United States Patent Application Publication US 2018/0305408 A1 - sequence listing, part 4

SEQ ID NO: 52773 - protein, 39 aa, Artificial Sequence; identical to SEQ ID NO: 19747
  Cyclic GFR-binding peptide
  MOD_RES (4)..(5)..(37)..(39): Xaa is C or S

SEQ ID NO: 52774 - protein, 34 aa, Artificial Sequence; identical to SEQ ID NO: 9515
  Cyclic GFR-binding peptide
  MOD_RES (4)..(5): Xaa is C or S

SEQ ID NO: 52775 - protein, 32 aa, Artificial Sequence; identical to SEQ ID NO: 19749
  Cyclic GFR-binding peptide
  MOD_RES (2)..(3): Xaa is C or S

SEQ ID NO: 52776 - protein, 34 aa, Artificial Sequence; identical to SEQ ID NO: 9517
  Cyclic GFR-binding peptide
  MOD_RES (3)..(4): Xaa is C or S

SEQ ID NO: 52777 - protein, 32 aa, Artificial Sequence; identical to SEQ ID NO: 19751
  Cyclic GFR-binding peptide
  MOD_RES (5)..(6): Xaa is C or S

SEQ ID NO: 52778 - protein, 34 aa, Artificial Sequence; identical to SEQ ID NO: 19753
  Cyclic GFR-binding peptide
  MOD_RES (4)..(5): Xaa is C or S

SEQ ID NO: 52779 - protein, 30 aa, Artificial Sequence; identical to SEQ ID NO: 9519
  Cyclic GFR-binding peptide
  MOD_RES (30)..(30): Xaa is C or S

SEQ ID NO: 52780 - protein, 26 aa, Artificial Sequence
  Cyclic GFR-binding peptide
QLEPLTVLYYDDSSNVIEQLSNNMVV

SEQ ID NO: 52781 - protein, 29 aa, Artificial Sequence
  Cyclic GFR-binding peptide
  MOD_RES (1)..(1): Xaa is C or S
XVPTELEPLTMLYYDENEKVVEQLSNDMV

SEQ ID NO: 52782 - protein, 33 aa, Artificial Sequence; identical to SEQ ID NO: 9529
  Cyclic GFR-binding peptide
  MOD_RES (6)..(7): Xaa is C or S

SEQ ID NO: 52783 - protein, 37 aa, Artificial Sequence; identical to SEQ ID NO: 19759
  Cyclic GFR-binding peptide
  MOD_RES (1)..(2)..(34)..(36): Xaa is C or S

SEQ ID NO: 52784 - protein, 30 aa, Artificial Sequence; identical to SEQ ID NO: 9534
  Cyclic GFR-binding peptide
  MOD_RES (4)..(5): Xaa is C or S

SEQ ID NO: 52785 - protein, 21 aa, Artificial Sequence
  Cyclic GFR-binding peptide
LNAISILYFIGKTPKILKKYR

SEQ ID NO: 52786 - protein, 31 aa, Artificial Sequence; identical to SEQ ID NO: 19763
  Cyclic GFR-binding peptide
  MOD_RES (5)..(6): Xaa is C or S

SEQ ID NO: 52787 - protein, 37 aa, Artificial Sequence; identical to SEQ ID NO: 19764
  Cyclic GFR-binding peptide
  MOD_RES (3)..(4)..(36): Xaa is C or S

SEQ ID NO: 52788 - protein, 40 aa, Artificial Sequence; identical to SEQ ID NO: 9541
  Cyclic GFR-binding peptide
  MOD_RES (5)..(6)..(37)..(39): Xaa is C or S

SEQ ID NO: 52789 - protein, 36 aa, Artificial Sequence; identical to SEQ ID NO: 19766
  Cyclic GFR-binding peptide
  MOD_RES (4)..(5)..(36): Xaa is C or S

SEQ ID NO: 52790 - protein, 33 aa, Artificial Sequence; identical to SEQ ID NO: 9544
  Cyclic GFR-binding peptide
  MOD_RES (30)..(32): Xaa is C or S

SEQ ID NO: 52791 - protein, 29 aa, Artificial Sequence
  Cyclic GFR-binding peptide
  MOD_RES (2)..(3): Xaa is C or S
PXXAPTQLEPLTVLYYDDSSNVIEQLSNN

SEQ ID NO: 52792 - protein, 25 aa, Artificial Sequence
  Cyclic GFR-binding peptide
ALNAISILYFVGRKPKVLKKYRMIV

SEQ ID NO: 52793 - protein, 31 aa, Artificial Sequence; identical to SEQ ID NO: 19771
  Cyclic GFR-binding peptide
  MOD_RES (29)..(31): Xaa is C or S

SEQ ID NO: 52794 - protein, 28 aa, Artificial Sequence
  Cyclic GFR-binding peptide
  MOD_RES (1)..(1): Xaa is C or S
XVSQDLEPLPIVYYIGKTPKIEQLSNMI

SEQ ID NO: 52795 - protein, 31 aa, Artificial Sequence; identical to SEQ ID NO: 19775
  Cyclic GFR-binding peptide
  MOD_RES (1)..(2): Xaa is C or S

SEQ ID NO: 52796 - protein, 28 aa, Artificial Sequence
  Cyclic GFR-binding peptide
QDLNAISILYFVGRTPKVLKKYRMVVKS

SEQ ID NO: 52797 - protein, 36 aa, Artificial Sequence; identical to SEQ ID NO: 19778
  Cyclic GFR-binding peptide
  MOD_RES (4)..(5): Xaa is C or S

SEQ ID NO: 52798 - protein, 34 aa, Artificial Sequence; identical to SEQ ID NO: 19779
  Cyclic GFR-binding peptide
  MOD_RES (5)..(5): Xaa is C or S

SEQ ID NO: 52799 - protein, 30 aa, Artificial Sequence; identical to SEQ ID NO: 19780
  Cyclic GFR-binding peptide
  MOD_RES (1)..(2): Xaa is C or S

SEQ ID NO: 52800 - protein, 34 aa, Artificial Sequence; identical to SEQ ID NO: 19781
  Cyclic GFR-binding peptide
  MOD_RES (3)..(4): Xaa is C or S

SEQ ID NO: 52801 - protein, 20 aa, Artificial Sequence
  Cyclic GFR-binding peptide
EPLTMLYYDENEKVVEQLSN

SEQ ID NO: 52802 - protein, 34 aa, Artificial Sequence; identical to SEQ ID NO: 19784
  Cyclic GFR-binding peptide
  MOD_RES (3)..(4): Xaa is C or S

SEQ ID NO: 52803 - protein, 33 aa, Artificial Sequence; identical to SEQ ID NO: 19787
  Cyclic GFR-binding peptide
  MOD_RES (1)..(33): Xaa is C or S

SEQ ID NO: 52804 - protein, 36 aa, Artificial Sequence; identical to SEQ ID NO: 19788
  Cyclic GFR-binding peptide
  MOD_RES (3)..(4)..(36): Xaa is C or S

SEQ ID NO: 52805 - protein, 34 aa, Artificial Sequence; identical to SEQ ID NO: 19789
  Cyclic GFR-binding peptide
  MOD_RES (3)..(4): Xaa is C or S

SEQ ID NO: 52806 - protein, 36 aa, Artificial Sequence; identical to SEQ ID NO: 19791
  Cyclic GFR-binding peptide
  MOD_RES (5)..(6): Xaa is C or S

SEQ ID NO: 52807 - protein, 28 aa, Artificial Sequence
  Cyclic GFR-binding peptide
  MOD_RES (1)..(2): Xaa is C or S
XXAPTKLEPLPVVYYDDSSNVIEQLSNN

SEQ ID NO: 52808 - protein, 36 aa, Artificial Sequence; identical to SEQ ID NO: 19794
  Cyclic GFR-binding peptide
  MOD_RES (2)..(3)..(35): Xaa is C or S

SEQ ID NO: 52809 - protein, 39 aa, Artificial Sequence; identical to SEQ ID NO: 19795
  Cyclic GFR-binding peptide
  MOD_RES (6)..(7)..(39): Xaa is C or S

SEQ ID NO: 52810 - protein, 29 aa, Artificial Sequence
  Cyclic GFR-binding peptide
VSQDLNAISILYFIGKTPKILKKYRMIVK

SEQ ID NO: 52811 - protein, 32 aa, Artificial Sequence; identical to SEQ ID NO: 9581
  Cyclic GFR-binding peptide
  MOD_RES (4)..(5): Xaa is C or S

SEQ ID NO: 52812 - protein, 39 aa, Artificial Sequence; identical to SEQ ID NO: 19799
  Cyclic GFR-binding peptide
  MOD_RES (4)..(5)..(36)..(38): Xaa is C or S

SEQ ID NO: 52813 - protein, 39 aa, Artificial Sequence; identical to SEQ ID NO: 19800
  Cyclic GFR-binding peptide
  MOD_RES (6)..(7)..(39): Xaa is C or S

SEQ ID NO: 52814 - protein, 24 aa, Artificial Sequence
  Cyclic GFR-binding peptide
LSPISILFIIGKTPKIYKQYEMIV

SEQ ID NO: 52815 - protein, 23 aa, Artificial Sequence
  Cyclic GFR-binding peptide
LSPISILFIVGRKPKVYKQYEMI

SEQ ID NO: 52816 - protein, 31 aa, Artificial Sequence; identical to SEQ ID NO: 19803
  Cyclic GFR-binding peptide
  MOD_RES (4)..(5): Xaa is C or S

SEQ ID NO: 52817 - protein, 37 aa, Artificial Sequence; identical to SEQ ID NO: 19804
  Cyclic GFR-binding peptide
  MOD_RES (3)..(4)..(36): Xaa is C or S

SEQ ID NO: 52818 - protein, 37 aa, Artificial Sequence; identical to SEQ ID NO: 19805
  Cyclic GFR-binding peptide
  MOD_RES (6)..(7): Xaa is C or S

SEQ ID NO: 52819 - protein, 31 aa, Artificial Sequence; identical to SEQ ID NO: 19806
  Cyclic GFR-binding peptide
  MOD_RES (3)..(4): Xaa is C or S

SEQ ID NO: 52820 - protein, 32 aa, Artificial Sequence; identical to SEQ ID NO: 19808
  Cyclic GFR-binding peptide
  MOD_RES (1)..(1): Xaa is C or S

SEQ ID NO: 52821 - protein, 39 aa, Artificial Sequence; identical to SEQ ID NO: 19809
  Cyclic GFR-binding peptide
  MOD_RES (4)..(5)..(37)..(39): Xaa is C or S

SEQ ID NO: 52822 - protein, 22 aa, Artificial Sequence
  Cyclic GFR-binding peptide
LSPISILFIVGRKPKVYKQYEM

SEQ ID NO: 52823 - protein, 33 aa, Artificial Sequence; identical to SEQ ID NO: 9598
  Cyclic GFR-binding peptide
  MOD_RES (31)..(33): Xaa is C or S

SEQ ID NO: 52824 - protein, 37 aa, Artificial Sequence; identical to SEQ ID NO: 9603
  Cyclic GFR-binding peptide
  MOD_RES (5)..(6): Xaa is C or S

SEQ ID NO: 52825 - protein, 33 aa, Artificial Sequence; identical to SEQ ID NO: 9605
  Cyclic GFR-binding peptide
  MOD_RES (1)..(2)..(33): Xaa is C or S

SEQ ID NO: 52826 - protein, 36 aa, Artificial Sequence; identical to SEQ ID NO: 19818
  Cyclic GFR-binding peptide
  MOD_RES (6)..(7): Xaa is C or S

SEQ ID NO: 52827 - protein, 26 aa, Artificial Sequence
  Cyclic GFR-binding peptide
TKLEPLTVLYYDDSSNVIEQLSNNMV

SEQ ID NO: 52828 - protein, 32 aa, Artificial Sequence; identical to SEQ ID NO: 19824
  Cyclic GFR-binding peptide
  MOD_RES (32)..(32): Xaa is C or S

SEQ ID NO: 52829 - protein, 28 aa, Artificial Sequence
  Cyclic GFR-binding peptide
  MOD_RES (27)..(27): Xaa is C or S
LNAISILYFIGKTPKILKKYRMIVKSXK

SEQ ID NO: 52830 - protein, 28 aa, Artificial Sequence
  Cyclic GFR-binding peptide
QLSPISVLFIDDSSNVIYKQYENMVVRA

SEQ ID NO: 52831 - protein, 30 aa, Artificial Sequence; identical to SEQ ID NO: 19832
  Cyclic GFR-binding peptide
  MOD_RES (4)..(5): Xaa is C or S

SEQ ID NO: 52832 - protein, 35 aa, Artificial Sequence; identical to SEQ ID NO: 19833
  Cyclic GFR-binding peptide
  MOD_RES (1)..(2)..(34): Xaa is C or S

SEQ ID NO: 52833 - protein, 26 aa, Artificial Sequence
  Cyclic GFR-binding peptide
SPISVLFIDDSSNVIYKQYENMVVRS

SEQ ID NO: 52834 - protein, 33 aa, Artificial Sequence; identical to SEQ ID NO: 19835
  Cyclic GFR-binding peptide
  MOD_RES (2)..(2): Xaa is C or S

SEQ ID NO: 52835 - protein, 39 aa, Artificial Sequence; identical to SEQ ID NO: 19837
  Cyclic GFR-binding peptide
  MOD_RES (6)..(7)..(38): Xaa is C or S

SEQ ID NO: 52836 - protein, 31 aa, Artificial Sequence; identical to SEQ ID NO: 19838
  Cyclic GFR-binding peptide
  MOD_RES (5)..(6): Xaa is C or S

SEQ ID NO: 52837 - protein, 29 aa, Artificial Sequence
  Cyclic GFR-binding peptide
  MOD_RES (27)..(29): Xaa is C or S
LNAISILYFVGRKPKVLKKYRMIVRSXKX

SEQ ID NO: 52838 - protein, 28 aa, Artificial Sequence
  Cyclic GFR-binding peptide
TELSPISMLFIDEYDKVVYKQYEEMVVE

SEQ ID NO: 52839 - protein, 34 aa, Artificial Sequence; identical to SEQ ID NO: 19841
  Cyclic GFR-binding peptide
  MOD_RES (31)..(33): Xaa is C or S

SEQ ID NO: 52840 - protein, 28 aa, Artificial Sequence
  Cyclic GFR-binding peptide
  MOD_RES (26)..(28): Xaa is C or S
NAISILYFVGRTPKVLKKYRMVVKSXKX

SEQ ID NO: 52841 - protein, 22 aa, Artificial Sequence
  Cyclic GFR-binding peptide
ELNAISMLYFDENEKVVLKKYR

SEQ ID NO: 52842 - protein, 32 aa, Artificial Sequence; identical to SEQ ID NO: 9632
  Cyclic GFR-binding peptide
  MOD_RES (1)..(1): Xaa is C or S

SEQ ID NO: 52843 - protein, 24 aa, Artificial Sequence
  Cyclic GFR-binding peptide
PQDLSPISILFIVGRTPKVYKQYE

SEQ ID NO: 52844 - protein, 30 aa, Artificial Sequence; identical to SEQ ID NO: 19851
  Cyclic GFR-binding peptide
  MOD_RES (1)..(1): Xaa is C or S

SEQ ID NO: 52845 - protein, 36 aa, Artificial Sequence; identical to SEQ ID NO: 19853
  Cyclic GFR-binding peptide
  MOD_RES (2)..(3)..(34)..(36): Xaa is C or S

SEQ ID NO: 52846 - protein, 36 aa, Artificial Sequence; identical to SEQ ID NO: 19854
  Cyclic GFR-binding peptide
  MOD_RES (6)..(7): Xaa is C or S

SEQ ID NO: 52847 - protein, 24 aa, Artificial Sequence
  Cyclic GFR-binding peptide
DLNAISILYFVGRTPKVLKKYRMV

SEQ ID NO: 52848 - protein, 32 aa, Artificial Sequence; identical to SEQ ID NO: 9643
  Cyclic GFR-binding peptide
  MOD_RES (1)..(1): Xaa is C or S

SEQ ID NO: 52849 - protein, 31 aa, Artificial Sequence; identical to SEQ ID NO: 19858
  Cyclic GFR-binding peptide
  MOD_RES (29)..(31): Xaa is C or S

SEQ ID NO: 52850 - protein, 28 aa, Artificial Sequence
  Cyclic GFR-binding peptide
  MOD_RES (2)..(3): Xaa is C or S
PXXAPTQLSPISVLFIDDSSNVIYKQYE

SEQ ID NO: 52851 - protein, 27 aa, Artificial Sequence
  Cyclic GFR-binding peptide
PTKLSPISVLFIDDSSNVIYKQYENMV

SEQ ID NO: 52852 - protein, 40 aa, Artificial Sequence; identical to SEQ ID NO: 9647
  Cyclic GFR-binding peptide
  MOD_RES (6)..(7)..(39): Xaa is C or S

SEQ ID NO: 52853 - protein, 36 aa, Artificial Sequence; identical to SEQ ID NO: 9650
  Cyclic GFR-binding peptide
  MOD_RES (6)..(7): Xaa is C or S

SEQ ID NO: 52854 - protein, 38 aa, Artificial Sequence; identical to SEQ ID NO: 19865
  Cyclic GFR-binding peptide
  MOD_RES (5)..(6)..(38): Xaa is C or S

SEQ ID NO: 52855 - protein, 37 aa, Artificial Sequence; identical to SEQ ID NO: 19868
  Cyclic GFR-binding peptide
  MOD_RES (4)..(5)..(37): Xaa is C or S

SEQ ID NO: 52856 - protein, 35 aa, Artificial Sequence; identical to SEQ ID NO: 19869
  Cyclic GFR-binding peptide
  MOD_RES (3)..(4)..(35): Xaa is C or S

SEQ ID NO: 52857 - protein, 35 aa, Artificial Sequence; identical to SEQ ID NO: 19870
  Cyclic GFR-binding peptide
  MOD_RES (4)..(5): Xaa is C or S

SEQ ID NO: 52858 - protein, 32 aa, Artificial Sequence; identical to SEQ ID NO: 19872
  Cyclic GFR-binding peptide
  MOD_RES (1)..(32): Xaa is C or S

SEQ ID NO: 52859 - protein, 34 aa, Artificial Sequence; identical to SEQ ID NO: 19873
  Cyclic GFR-binding peptide
  MOD_RES (4)..(5): Xaa is C or S

SEQ ID NO: 52860 - protein, 30 aa, Artificial Sequence; identical to SEQ ID NO: 19874
  Cyclic GFR-binding peptide
  MOD_RES (1)..(2): Xaa is C or S

SEQ ID NO: 52861 - protein, 31 aa, Artificial Sequence; identical to SEQ ID NO: 9657
  Cyclic GFR-binding peptide
  MOD_RES (1)..(2): Xaa is C or S

SEQ ID NO: 52862 - protein, 36 aa, Artificial Sequence; identical to SEQ ID NO: 19877
  Cyclic GFR-binding peptide
  MOD_RES (2)..(3)..(34)..(36): Xaa is C or S

SEQ ID NO: 52863 - protein, 23 aa, Artificial Sequence
  Cyclic GFR-binding peptide
KLSPISVLFIDDSSNVIYKQYEN

SEQ ID NO: 52864 - protein, 31 aa, Artificial Sequence; identical to SEQ ID NO: 19879
  Cyclic GFR-binding peptide
  MOD_RES (31)..(31): Xaa is C or S

SEQ ID NO: 52865 - protein, 37 aa, Artificial Sequence; identical to SEQ ID NO: 19880
  Cyclic GFR-binding peptide
  MOD_RES (2)..(3)..(35)..(37): Xaa is C or S

SEQ ID NO: 52866 - protein, 31 aa, Artificial Sequence; identical to SEQ ID NO: 19881
  Cyclic GFR-binding peptide
  MOD_RES (31)..(31): Xaa is C or S

SEQ ID NO: 52867 - protein, 40 aa, Artificial Sequence; identical to SEQ ID NO: 19883
  Cyclic GFR-binding peptide
  MOD_RES (4)..(5)..(37)..(39): Xaa is C or S

SEQ ID NO: 52868 - protein, 26 aa, Artificial Sequence
  Cyclic GFR-binding peptide
SPISVLFIDDSSNVIYKQYENMVVRA

SEQ ID NO: 52869 - protein, 33 aa, Artificial Sequence; identical to SEQ ID NO: 19886
  Cyclic GFR-binding peptide
  MOD_RES (31)..(33): Xaa is C or S

SEQ ID NO: 52870 - protein, 41 aa, Artificial Sequence; identical to SEQ ID NO: 19887
  Cyclic GFR-binding peptide
  MOD_RES (5)..(6)..(38)..(40): Xaa is C or S

SEQ ID NO: 52871 - protein, 41 aa, Artificial Sequence; identical to SEQ ID NO: 9668
  Cyclic GFR-binding peptide
  MOD_RES (6)..(7)..(39)..(41): Xaa is C or S

SEQ ID NO: 52872 - protein, 32 aa, Artificial Sequence; identical to SEQ ID NO: 19889
  Cyclic GFR-binding peptide
  MOD_RES (2)..(3): Xaa is C or S

SEQ ID NO: 52873 - protein, 29 aa, Artificial Sequence
  Cyclic GFR-binding peptide
  MOD_RES (29)..(29): Xaa is C or S
KLSPISVLFIDDSSNVIYKQYENMVVRSX

SEQ ID NO: 52874 - protein, 30 aa, Artificial Sequence; identical to SEQ ID NO: 19894
  Cyclic GFR-binding peptide
  MOD_RES (1)..(2): Xaa is C or S

SEQ ID NO: 52875 - protein, 35 aa, Artificial Sequence; identical to SEQ ID NO: 19895
  Cyclic GFR-binding peptide
  MOD_RES (3)..(4): Xaa is C or S

SEQ ID NO: 52876 - protein, 21 aa, Artificial Sequence
  Cyclic GFR-binding peptide
EPLPMVYYDEYDKVVEQLSNE

SEQ ID NO: 52877 - protein, 28 aa, Artificial Sequence
  Cyclic GFR-binding peptide
  MOD_RES (1)..(1): Xaa is C or S
XVPQALEPLTILYYVGRKPKVEQLSNMI

SEQ ID NO: 52878 - protein, 39 aa, Artificial Sequence; identical to SEQ ID NO: 9678
  Cyclic GFR-binding peptide
  MOD_RES (3)..(4)..(36)..(38): Xaa is C or S

SEQ ID NO: 52879 - protein, 40 aa, Artificial Sequence; identical to SEQ ID NO: 19900
  Cyclic GFR-binding peptide
  MOD_RES (4)..(5)..(37)..(39): Xaa is C or S

SEQ ID NO: 52880 - protein, 38 aa, Artificial Sequence; identical to SEQ ID NO: 19902
  Cyclic GFR-binding peptide
  MOD_RES (2)..(3)..(35)..(37): Xaa is C or S

SEQ ID NO: 52881 - protein, 29 aa, Artificial Sequence
  Cyclic GFR-binding peptide
  MOD_RES (3)..(4): Xaa is C or S
KAXXVPTELEPLTMLYYDEYDKVVEQLSN

SEQ ID NO: 52882 - protein, 24 aa, Artificial Sequence
  Cyclic GFR-binding peptide
PTELNAISMLYFDEYDKVVLKKYR

SEQ ID NO: 52883 - protein, 36 aa, Artificial Sequence; identical to SEQ ID NO: 19905
  Cyclic GFR-binding peptide
  MOD_RES (3)..(4)..(36): Xaa is C or S

SEQ ID NO: 52884 - protein, 37 aa, Artificial Sequence; identical to SEQ ID NO: 9687
  Cyclic GFR-binding peptide
  MOD_RES (3)..(4)..(35)..(37): Xaa is C or S

SEQ ID NO: 52885 - protein, 34 aa, Artificial Sequence; identical to SEQ ID NO: 19907
  Cyclic GFR-binding peptide
  MOD_RES (6)..(7): Xaa is C or S

SEQ ID NO: 52886 - protein, 40 aa, Artificial Sequence; identical to SEQ ID NO: 19909
  Cyclic GFR-binding peptide
  MOD_RES (4)..(5)..(37)..(39): Xaa is C or S

SEQ ID NO: 52887 - protein, 33 aa, Artificial Sequence; identical to SEQ ID NO: 9691
  Cyclic GFR-binding peptide
  MOD_RES (5)..(6): Xaa is C or S

SEQ ID NO: 52888 - protein, 35 aa, Artificial Sequence; identical to SEQ ID NO: 19912
  Cyclic GFR-binding peptide
  MOD_RES (1)..(2)..(34): Xaa is C or S

SEQ ID NO: 52889 - protein, 29 aa, Artificial Sequence
  Cyclic GFR-binding peptide
  MOD_RES (28)..(28): Xaa is C or S
LEPLTILYYDSANNVVEQLSNDMVVESXG

SEQ ID NO: 52890 - protein, 25 aa, Artificial Sequence
  Cyclic GFR-binding peptide
SPISMLFIDEYDKVVYKQYEEMVVE

SEQ ID NO: 52891 - protein, 39 aa, Artificial Sequence; identical to SEQ ID NO: 19917
  Cyclic GFR-binding peptide
  MOD_RES (4)..(5)..(37)..(39): Xaa is C or S

SEQ ID NO: 52892 - protein, 28 aa, Artificial Sequence
  Cyclic GFR-binding peptide
  MOD_RES (1)..(1): Xaa is C or S
XVPTELEPLPMVYYDENEKVVEQLSNDM

SEQ ID NO: 52893 - protein, 32 aa, Artificial Sequence; identical to SEQ ID NO: 19919
  Cyclic GFR-binding peptide
  MOD_RES (30)..(32): Xaa is C or S

SEQ ID NO: 52894 - protein, 37 aa, Artificial Sequence; identical to SEQ ID NO: 19920
  Cyclic GFR-binding peptide
  MOD_RES (5)..(6): Xaa is C or S

SEQ ID NO: 52895 - protein, 29 aa, Artificial Sequence
  Cyclic GFR-binding peptide
  MOD_RES (1)..(2): Xaa is C or S
XXVPTRLEPLTILYYDSANNVVEQLSNDM

SEQ ID NO: 52896 - protein, 28 aa, Artificial Sequence
  Cyclic GFR-binding peptide
PTQLSPISVLFIDDSSNVIYKQYENMVV

SEQ ID NO: 52897 - protein, 25 aa, Artificial Sequence
  Cyclic GFR-binding peptide
DLSPISILFIIGKTPKIYKQYEMIV

SEQ ID NO: 52898 - protein, 27 aa, Artificial Sequence
  Cyclic GFR-binding peptide
APTKLEPLPVVYYDDSSNVIEQLSNNM

SEQ ID NO: 52899 - protein, 29 aa, Artificial Sequence
  Cyclic GFR-binding peptide
  MOD_RES (28)..(28): Xaa is C or S
LSPISVLFIDDSSNVIYKQYENMVVRAXG

SEQ ID NO: 52900 - protein, 32 aa, Artificial Sequence; identical to SEQ ID NO: 19928
  Cyclic GFR-binding peptide
  MOD_RES (1)..(2): Xaa is C or S

SEQ ID NO: 52901 - protein, 33 aa, Artificial Sequence; identical to SEQ ID NO: 9707
  Cyclic GFR-binding peptide
  MOD_RES (30)..(32): Xaa is C or S

SEQ ID NO: 52902 - protein, 32 aa, Artificial Sequence; identical to SEQ ID NO: 19930
  Cyclic GFR-binding peptide
  MOD_RES (31)..(31): Xaa is C or S

SEQ ID NO: 52903 - protein, 36 aa, Artificial Sequence; identical to SEQ ID NO: 19931
  Cyclic GFR-binding peptide
  MOD_RES (2)..(3)..(34)..(36): Xaa is C or S

SEQ ID NO: 52904 - protein, 29 aa, Artificial Sequence
  Cyclic GFR-binding peptide
PQDLNAISILYFVGRTPKVLKKYRMVVKS

SEQ ID NO: 52905 - protein, 39 aa, Artificial Sequence; identical to SEQ ID NO: 19935
  Cyclic GFR-binding peptide
  MOD_RES (6)..(7)..(39): Xaa is C or S

SEQ ID NO: 52906 - protein, 27 aa, Artificial Sequence
  Cyclic GFR-binding peptide
  MOD_RES (1)..(2): Xaa is C or S
XXAPTQLEPLPVVYYDDSSNVIEQLSN

SEQ ID NO: 52907 - protein, 40 aa, Artificial Sequence; identical to SEQ ID NO: 19937
  Cyclic GFR-binding peptide
  MOD_RES (5)..(6)..(37)..(39): Xaa is C or S

SEQ ID NO: 52908 - protein, 39 aa, Artificial Sequence; identical to SEQ ID NO: 19939
  Cyclic GFR-binding peptide
  MOD_RES (4)..(5)..(36)..(38): Xaa is C or S

SEQ ID NO: 52909 - protein, 39 aa, Artificial Sequence; identical to SEQ ID NO: 9716
  Cyclic GFR-binding peptide
  MOD_RES (6)..(7)..(38): Xaa is C or S

SEQ ID NO: 52910 - protein, 30 aa, Artificial Sequence; identical to SEQ ID NO: 19942
  Cyclic GFR-binding peptide

SEQ ID NO: 52911 - protein, 35 aa, Artificial Sequence; identical to SEQ ID NO: 19943
  Cyclic GFR-binding peptide
  MOD_RES (6)..(7): Xaa is C or S

SEQ ID NO: 52912 - protein, 29 aa, Artificial Sequence
  Cyclic GFR-binding peptide
  MOD_RES (1)..(2): Xaa is C or S
XXVSQDLEPLPIVYYIGKTPKIEQLSNMI

SEQ ID NO: 52913 - protein, 37 aa, Artificial Sequence; identical to SEQ ID NO: 19946
  Cyclic GFR-binding peptide
  MOD_RES (6)..(7): Xaa is C or S

SEQ ID NO: 52914 - protein, 30 aa, Artificial Sequence; identical to SEQ ID NO: 9738
  Cyclic GFR-binding peptide
  MOD_RES (2)..(3): Xaa is C or S

SEQ ID NO: 52915 - protein, 25 aa, Artificial Sequence
  Cyclic GFR-binding peptide
RLEPLPIVYYDSANNVVEQLSNDMV

SEQ ID NO: 52916 - protein, 27 aa, Artificial Sequence
  Cyclic GFR-binding peptide
  MOD_RES (27)..(27): Xaa is C or S
EPLPMVYYDENEKVVEQLSNDMVVEGX

SEQ ID NO: 52917 - protein, 32 aa, Artificial Sequence; identical to SEQ ID NO: 19952
  Cyclic GFR-binding peptide
  MOD_RES (3)..(4): Xaa is C or S

SEQ ID NO: 52918 - protein, 21 aa, Artificial Sequence
  Cyclic GFR-binding peptide
NAISMLYFDEYDKVVLKKYRE

SEQ ID NO: 52919 - protein, 33 aa, Artificial Sequence; identical to SEQ ID NO: 9746
  Cyclic GFR-binding peptide
  MOD_RES (4)..(5): Xaa is C or S

SEQ ID NO: 52920 - protein, 38 aa, Artificial Sequence; identical to SEQ ID NO: 19957
  Cyclic GFR-binding peptide
  MOD_RES (2)..(3)..(35)..(37): Xaa is C or S

SEQ ID NO: 52921 - protein, 35 aa, Artificial Sequence; identical to SEQ ID NO: 19959
  Cyclic GFR-binding peptide
  MOD_RES (2)..(3)..(35): Xaa is C or S

SEQ ID NO: 52922 - protein, 21 aa, Artificial Sequence
  Cyclic GFR-binding peptide
LNAISMLYFDENEKVVLKKYR

SEQ ID NO: 52923 - protein, 34 aa, Artificial Sequence; identical to SEQ ID NO: 19963
  Cyclic GFR-binding peptide
  MOD_RES (2)..(3): Xaa is C or S

SEQ ID NO: 52924 - protein, 37 aa, Artificial Sequence; identical to SEQ ID NO: 19964
  Cyclic GFR-binding peptide
  MOD_RES (1)..(2)..(34)..(36): Xaa is C or S

SEQ ID NO: 52925 - protein, 28 aa, Artificial Sequence
  Cyclic GFR-binding peptide
  MOD_RES (2)..(3): Xaa is C or S
AXXVPTELNAISMLYFDEYDKVVLKKYR

SEQ ID NO: 52926 - protein, 35 aa, Artificial Sequence; identical to SEQ ID NO: 9760
  Cyclic GFR-binding peptide
  MOD_RES (5)..(6): Xaa is C or S

SEQ ID NO: 52927 - protein, 27 aa, Artificial Sequence
  Cyclic GFR-binding peptide
  MOD_RES (1)..(1): Xaa is C or S
XVPTELNAISMLYFDEYDKVVLKKYRE

SEQ ID NO: 52928 - protein, 29 aa, Artificial Sequence
  Cyclic GFR-binding peptide
  MOD_RES (3)..(4): Xaa is C or S
PTXXVPTRLNAISILYFDSANNVVLKKYR

SEQ ID NO: 52929 - protein, 32 aa, Artificial Sequence; identical to SEQ ID NO: 19970
  Cyclic GFR-binding peptide
  MOD_RES (4)..(4): Xaa is C or S

SEQ ID NO: 52930 - protein, 30 aa, Artificial Sequence; identical to SEQ ID NO: 19973
  Cyclic GFR-binding peptide

SEQ ID NO: 52931 - protein, 31 aa, Artificial Sequence; identical to SEQ ID NO: 19974
  Cyclic GFR-binding peptide
  MOD_RES (31)..(31): Xaa is C or S

SEQ ID NO: 52932 - protein, 35 aa, Artificial Sequence; identical to SEQ ID NO: 19976
  Cyclic GFR-binding peptide
  MOD_RES (1)..(2)..(34): Xaa is C or S

SEQ ID NO: 52933 - protein, 35 aa, Artificial Sequence; identical to SEQ ID NO: 19977
  Cyclic GFR-binding peptide
  MOD_RES (1)..(2)..(34): Xaa is C or S

SEQ ID NO: 52934 - protein, 29 aa, Artificial Sequence
  Cyclic GFR-binding peptide
  MOD_RES (1)..(2): Xaa is C or S
XXVPTELEPLPMVYYDENEKVVEQLSNDM

SEQ ID NO: 52935 - protein, 39 aa, Artificial Sequence; identical to SEQ ID NO: 19979
  Cyclic GFR-binding peptide
  MOD_RES (7)..(39): Xaa is C or S

SEQ ID NO: 52936 - protein, 32 aa, Artificial Sequence; identical to SEQ ID NO: 19980
  Cyclic GFR-binding peptide
  MOD_RES (31)..(31): Xaa is C or S

SEQ ID NO: 52937 - protein, 22 aa, Artificial Sequence
  Cyclic GFR-binding peptide
SPISILFIIGKTPKIYKQYEMI

SEQ ID NO: 52938 - protein, 34 aa, Artificial Sequence; identical to SEQ ID NO: 19983
  Cyclic GFR-binding peptide
  MOD_RES (1)..(2)..(33): Xaa is C or S

SEQ ID NO: 52939 - protein, 32 aa, Artificial Sequence; identical to SEQ ID NO: 19985
  Cyclic GFR-binding peptide
  MOD_RES (31)..(31): Xaa is C or S

SEQ ID NO: 52940 - protein, 32 aa, Artificial Sequence; identical to SEQ ID NO: 19986
  Cyclic GFR-binding peptide
  MOD_RES (32)..(32): Xaa is C or S

SEQ ID NO: 52941 - protein, 31 aa, Artificial Sequence; identical to SEQ ID NO: 9783
  Cyclic GFR-binding peptide
  MOD_RES (5)..(6): Xaa is C or S

SEQ ID NO: 52942 - protein, 31 aa, Artificial Sequence; identical to SEQ ID NO: 19989
  Cyclic GFR-binding peptide
  MOD_RES (4)..(4): Xaa is C or S

SEQ ID NO: 52943 - protein, 27 aa, Artificial Sequence
  Cyclic GFR-binding peptide
  MOD_RES (1)..(1): Xaa is C or S
XVSQDLSPISILFIIGKTPKIYKQYEM

SEQ ID NO: 52944 - protein, 34 aa, Artificial Sequence; identical to SEQ ID NO: 19991
  Cyclic GFR-binding peptide
  MOD_RES (1)..(2)..(34): Xaa is C or S

SEQ ID NO: 52945 - protein, 30 aa, Artificial Sequence; identical to SEQ ID NO: 9787
  Cyclic GFR-binding peptide
  MOD_RES (29)..(29): Xaa is C or S

SEQ ID NO: 52946 - protein, 22 aa, Artificial Sequence
  Cyclic GFR-binding peptide
RLEPLPIVYYDSANNVVEQLSN

SEQ ID NO: 52947 - protein, 31 aa, Artificial Sequence; identical to SEQ ID NO: 9793
  Cyclic GFR-binding peptide
  MOD_RES (2)..(3): Xaa is C or S

SEQ ID NO: 52948 - protein, 34 aa, Artificial Sequence; identical to SEQ ID NO: 19995
  Cyclic GFR-binding peptide
  MOD_RES (6)..(7): Xaa is C or S

SEQ ID NO: 52949 - protein, 37 aa, Artificial Sequence; identical to SEQ ID NO: 19998
  Cyclic GFR-binding peptide
  MOD_RES (2)..(3)..(35)..(37): Xaa is C or S

SEQ ID NO: 52950 - protein, 22 aa, Artificial Sequence
  Cyclic GFR-binding peptide
ELSPISMLFIDEYDKVVYKQYE

SEQ ID NO: 52951 - protein, 36 aa, Artificial Sequence; identical to SEQ ID NO: 9799
  Cyclic GFR-binding peptide
  MOD_RES (6)..(7): Xaa is C or S

SEQ ID NO: 52952 - protein, 34 aa, Artificial Sequence; identical to SEQ ID NO: 20001
  Cyclic GFR-binding peptide
  MOD_RES (2)..(34): Xaa is C or S

SEQ ID NO: 52953 - protein, 32 aa, Artificial Sequence; identical to SEQ ID NO: 20003
  Cyclic GFR-binding peptide
  MOD_RES (3)..(4): Xaa is C or S

SEQ ID NO: 52954 - protein, 34 aa, Artificial Sequence; identical to SEQ ID NO: 20004
  Cyclic GFR-binding peptide
  MOD_RES (5)..(6): Xaa is C or S

SEQ ID NO: 52955 - protein, 38 aa, Artificial Sequence; identical to SEQ ID NO: 9803
  Cyclic GFR-binding peptide
  MOD_RES (3)..(4)..(35)..(37): Xaa is C or S

SEQ ID NO: 52956 - protein, 29 aa, Artificial Sequence
  Cyclic GFR-binding peptide
  MOD_RES (29)..(29): Xaa is C or S
QALEPLTILYYVGRKPKVEQLSNMIVRSX

SEQ ID NO: 52957 - protein, 27 aa, Artificial Sequence
  Cyclic GFR-binding peptide
APTQLEPLTVLYYDDSSNVIEQLSNNM

SEQ ID NO: 52958 - protein, 32 aa, Artificial Sequence; identical to SEQ ID NO: 20009
  Cyclic GFR-binding peptide
  MOD_RES (30)..(32): Xaa is C or S

SEQ ID NO: 52959 - protein, 26 aa, Artificial Sequence
  Cyclic GFR-binding peptide
KLEPLPVVYYDDSSNVIEQLSNNMVV

SEQ ID NO: 52960 - protein, 32 aa, Artificial Sequence; identical to SEQ ID NO: 20011
  Cyclic GFR-binding peptide
  MOD_RES (1)..(2): Xaa is C or S

SEQ ID NO: 52961 - protein, 31 aa, Artificial Sequence; identical to SEQ ID NO: 20012
  Cyclic GFR-binding peptide
  MOD_RES (5)..(6): Xaa is C or S

SEQ ID NO: 52962 - protein, 30 aa, Artificial Sequence; identical to SEQ ID NO: 20013
  Cyclic GFR-binding peptide
  MOD_RES (4)..(5): Xaa is C or S

SEQ ID NO: 52963 - protein, 38 aa, Artificial Sequence; identical to SEQ ID NO: 20014
  Cyclic GFR-binding peptide
  MOD_RES (3)..(4)..(36)..(38): Xaa is C or S

SEQ ID NO: 52964 - protein, 38 aa, Artificial Sequence; identical to SEQ ID NO: 9809
  Cyclic GFR-binding peptide
  MOD_RES (5)..(6)..(37): Xaa is C or S

SEQ ID NO: 52965 - protein, 39 aa, Artificial Sequence; identical to SEQ ID NO: 20016
  Cyclic GFR-binding peptide
  MOD_RES (4)..(5)..(37)..(39): Xaa is C or S

SEQ ID NO: 52966 - protein, 31 aa, Artificial Sequence; identical to SEQ ID NO: 9815
  Cyclic GFR-binding peptide
  MOD_RES (2)..(3): Xaa is C or S

SEQ ID NO: 52967 - protein, 26 aa, Artificial Sequence
  Cyclic GFR-binding peptide
VSQDLEPLPIVYYIGKTPKIEQLSNM

SEQ ID NO: 52968 - protein, 32 aa, Artificial Sequence; identical to SEQ ID NO: 20019
  Cyclic GFR-binding peptide
  MOD_RES (1)..(1): Xaa is C or S

SEQ ID NO: 52969 - protein, 40 aa, Artificial Sequence; identical to SEQ ID NO: 20020
  Cyclic GFR-binding peptide
  MOD_RES (6)..(7)..(39): Xaa is C or S

SEQ ID NO: 52970 - protein, 26 aa, Artificial Sequence
  Cyclic GFR-binding peptide
QLEPLPVVYYDDSSNVIEQLSNNMVV

SEQ ID NO: 52971 - protein, 35 aa, Artificial Sequence; identical to SEQ ID NO: 9821
  Cyclic GFR-binding peptide
  MOD_RES (1)..(2)..(34): Xaa is C or S

SEQ ID NO: 52972 - protein, 35 aa, Artificial Sequence; identical to SEQ ID NO: 20026
  Cyclic GFR-binding peptide
  MOD_RES (5)..(6): Xaa is C or S

SEQ ID NO: 52973 - protein, 31 aa, Artificial Sequence; identical to SEQ ID NO: 20027
  Cyclic GFR-binding peptide
  MOD_RES (31)..(31): Xaa is C or S

SEQ ID NO: 52974 - protein, 37 aa, Artificial Sequence; identical to SEQ ID NO: 9835
  Cyclic GFR-binding peptide
  MOD_RES (3)..(4)..(35)..(37): Xaa is C or S

SEQ ID NO: 52975 - protein, 27 aa, Artificial Sequence
  Cyclic GFR-binding peptide
  MOD_RES (1)..(2): Xaa is C or S
XXVPTELNAISMLYFDEYDKVVLKKYR

SEQ ID NO: 52976 - protein, 33 aa, Artificial Sequence; identical to SEQ ID NO: 20032
  Cyclic GFR-binding peptide
  MOD_RES (2)..(3): Xaa is C or S

SEQ ID NO: 52977 - protein, 31 aa, Artificial Sequence; identical to SEQ ID NO: 20033
  Cyclic GFR-binding peptide
  MOD_RES (4)..(5): Xaa is C or S

SEQ ID NO: 52978 - protein, 26 aa, Artificial Sequence
  Cyclic GFR-binding peptide
QALSPISILFIVGRKPKVYKQYEMIV

SEQ ID NO: 52979 - protein, 37 aa, Artificial Sequence; identical to SEQ ID NO: 20037
  Cyclic GFR-binding peptide
  MOD_RES (2)..(3)..(35)..(37): Xaa is C or S

SEQ ID NO: 52980 - protein, 28 aa, Artificial Sequence
  Cyclic GFR-binding peptide
  MOD_RES (1)..(2): Xaa is C or S
XXAPTKLEPLTVLYYDDSSNVIEQLSNN

SEQ ID NO: 52981 - protein, 39 aa, Artificial Sequence; identical to SEQ ID NO: 20039
  Cyclic GFR-binding peptide
  MOD_RES (5)..(6)..(38): Xaa is C or S

SEQ ID NO: 52982 - protein, 31 aa, Artificial Sequence; identical to SEQ ID NO: 20040
  Cyclic GFR-binding peptide
  MOD_RES (2)..(3): Xaa is C or S

SEQ ID NO: 52983 - protein, 32 aa, Artificial Sequence; identical to SEQ ID NO: 20043
  Cyclic GFR-binding peptide
  MOD_RES (2)..(3): Xaa is C or S

SEQ ID NO: 52984 - protein, 24 aa, Artificial Sequence
  Cyclic GFR-binding peptide
QALEPLTILYYVGRKPKVEQLSNM

SEQ ID NO: 52985 - protein, 28 aa, Artificial Sequence
  Cyclic GFR-binding peptide
  MOD_RES (1)..(2): Xaa is C or S
XXVPTELEPLTMLYYDEYDKVVEQLSNE

SEQ ID NO: 52986 - protein, 33 aa, Artificial Sequence; identical to SEQ ID NO: 20047
  Cyclic GFR-binding peptide
  MOD_RES (4)..(5): Xaa is C or S

SEQ ID NO: 52987 - protein, 38 aa, Artificial Sequence; identical to SEQ ID NO: 20048
  Cyclic GFR-binding peptide
  MOD_RES (2)..(3)..(35)..(37): Xaa is C or S

SEQ ID NO: 52988 - protein, 29 aa, Artificial Sequence
  Cyclic GFR-binding peptide
  MOD_RES (3)..(3): Xaa is C or S
PTXAPTKLEPLTVLYYDDSSNVIEQLSNN

SEQ ID NO: 52989 - protein, 33 aa, Artificial Sequence; identical to SEQ ID NO: 20050
  Cyclic GFR-binding peptide
  MOD_RES (3)..(4): Xaa is C or S

SEQ ID NO: 52990 - protein, 32 aa, Artificial Sequence; identical to SEQ ID NO: 9859
  Cyclic GFR-binding peptide
  MOD_RES (29)..(31): Xaa is C or S

SEQ ID NO: 52991 - protein, 27 aa, Artificial Sequence
  Cyclic GFR-binding peptide
ALSPISILFIVGRKPKVYKQYEMIVRS

SEQ ID NO: 52992 - protein, 33 aa, Artificial Sequence; identical to SEQ ID NO: 20055
  Cyclic GFR-binding peptide
  MOD_RES (31)..(33): Xaa is C or S

SEQ ID NO: 52993 - protein, 28 aa, Artificial Sequence
  Cyclic GFR-binding peptide
  MOD_RES (1)..(1): Xaa is C or S
XVPTELNAISMLYFDENEKVVLKKYRDM

SEQ ID NO: 52994 - protein, 38 aa, Artificial Sequence; identical to SEQ ID NO: 20057
  Cyclic GFR-binding peptide
  MOD_RES (5)..(37): Xaa is C or S

SEQ ID NO: 52995 - protein, 32 aa, Artificial Sequence; identical to SEQ ID NO: 20058
  Cyclic GFR-binding peptide
  MOD_RES (6)..(7): Xaa is C or S

SEQ ID NO: 52996 - protein, 28 aa, Artificial Sequence
  Cyclic GFR-binding peptide
  MOD_RES (1)..(2): Xaa is C or S
XXVPTELEPLPMVYYDEYDKVVEQLSNE

SEQ ID NO: 52997 - protein, 29 aa, Artificial Sequence
  Cyclic GFR-binding peptide
PTELEPLTMLYYDENEKVVEQLSNDMVVE

SEQ ID NO: 52998 - protein, 29 aa, Artificial Sequence
  Cyclic GFR-binding peptide
  MOD_RES (28)..(28): Xaa is C or S
LNAISILYFDSANNVVLKKYRDMVVESXG

SEQ ID NO: 52999 - protein, 33 aa, Artificial Sequence; identical to SEQ ID NO: 20063
  Cyclic GFR-binding peptide
  MOD_RES (32)..(32): Xaa is C or S

SEQ ID NO: 53000 - protein, 33 aa, Artificial Sequence; identical to SEQ ID NO: 20064
  Cyclic GFR-binding peptide
  MOD_RES (4)..(5): Xaa is C or S

SEQ ID NO: 53001 - protein, 27 aa, Artificial Sequence
  Cyclic GFR-binding peptide
TELNAISMLYFDEYDKVVLKKYREMVV

SEQ ID NO: 53002 - protein, 32 aa, Artificial Sequence; identical to SEQ ID NO: 20067
  Cyclic GFR-binding peptide
  MOD_RES (32)..(32): Xaa is C or S

SEQ ID NO: 53003 - protein, 35 aa, Artificial Sequence; identical to SEQ ID NO: 20068
  Cyclic GFR-binding peptide
  MOD_RES (5)..(6): Xaa is C or S

SEQ ID NO: 53004 - protein, 38 aa, Artificial Sequence; identical to SEQ ID NO: 20069
  Cyclic GFR-binding peptide
  MOD_RES (4)..(5)..(37): Xaa is C or S

SEQ ID NO: 53005 - protein, 35 aa, Artificial Sequence; identical to SEQ ID NO: 20070
  Cyclic GFR-binding peptide
  MOD_RES (3)..(35): Xaa is C or S

SEQ ID NO: 53006 - protein, 30 aa, Artificial Sequence; identical to SEQ ID NO: 20071
  Cyclic GFR-binding peptide

SEQ ID NO: 53007 - protein, 33 aa, Artificial Sequence; identical to SEQ ID NO: 20072
  Cyclic GFR-binding peptide
  MOD_RES (2)..(3): Xaa is C or S

SEQ ID NO: 53008 - protein, 32 aa, Artificial Sequence; identical to SEQ ID NO: 20074
  Cyclic GFR-binding peptide
  MOD_RES (30)..(32): Xaa is C or S

SEQ ID NO: 53009 - protein, 37 aa, Artificial Sequence; identical to SEQ ID NO: 9881
  Cyclic GFR-binding peptide
  MOD_RES (5)..(6): Xaa is C or S

SEQ ID NO: 53010 - protein, 27 aa, Artificial Sequence
  Cyclic GFR-binding peptide
LEPLPIVYYDSANNVVEQLSNDMVVES

SEQ ID NO: 53011 - protein, 30 aa, Artificial Sequence; identical to SEQ ID NO: 20077
  Cyclic GFR-binding peptide
  MOD_RES (3)..(4): Xaa is C or S

SEQ ID NO: 53012 - protein, 38 aa, Artificial Sequence; identical to SEQ ID NO: 20078
  Cyclic GFR-binding peptide
  MOD_RES (7)..(7): Xaa is C or S

SEQ ID NO: 53013 - protein, 31 aa, Artificial Sequence; identical to SEQ ID NO: 20079
  Cyclic GFR-binding peptide
  MOD_RES (4)..(5): Xaa is C or S

SEQ ID NO: 53014 - protein, 31 aa, Artificial Sequence; identical to SEQ ID NO: 20080
  Cyclic GFR-binding peptide
  MOD_RES (31)..(31): Xaa is C or S

SEQ ID NO: 53015 - protein, 40 aa, Artificial Sequence; identical to SEQ ID NO: 20081
  Cyclic GFR-binding peptide
  MOD_RES (5)..(6)..(38)..(40): Xaa is C or S

SEQ ID NO: 53016 - protein, 35 aa, Artificial Sequence; identical to SEQ ID NO: 20082
  Cyclic GFR-binding peptide
  MOD_RES (3)..(4): Xaa is C or S

SEQ ID NO: 53017 - protein, 35 aa, Artificial Sequence; identical to SEQ ID NO: 20083
  Cyclic GFR-binding peptide
  MOD_RES (4)..(5): Xaa is C or S

SEQ ID NO: 53018 - protein, 27 aa, Artificial Sequence
  Cyclic GFR-binding peptide
TELSPISMLFIDEYDKVVYKQYEEMVV

SEQ ID NO: 53019 - protein, 35 aa, Artificial Sequence; identical to SEQ ID NO: 20086
  Cyclic GFR-binding peptide
  MOD_RES (2)..(3)..(34): Xaa is C or S

SEQ ID NO: 53020 - protein, 31 aa, Artificial Sequence; identical to SEQ ID NO: 20090
  Cyclic GFR-binding peptide
  MOD_RES (4)..(5): Xaa is C or S

SEQ ID NO: 53021 - protein, 33 aa, Artificial Sequence; identical to SEQ ID NO: 9900
  Cyclic GFR-binding peptide
  MOD_RES (30)..(32): Xaa is C or S

SEQ ID NO: 53022 - protein, 27 aa, Artificial Sequence
  Cyclic GFR-binding peptide
ELEPLPMVYYDEYDKVVEQLSNEMVVE

SEQ ID NO: 53023 - protein, 40 aa, Artificial Sequence; identical to SEQ ID NO: 20093
  Cyclic GFR-binding peptide
  MOD_RES (4)..(5)..(37)..(39): Xaa is C or S

SEQ ID NO: 53024 - protein, 26 aa, Artificial Sequence
  Cyclic GFR-binding peptide
VSQDLNAISILYFIGKTPKILKKYRM

SEQ ID NO: 53025 - protein, 32 aa, Artificial Sequence; identical to SEQ ID NO: 9907
  Cyclic GFR-binding peptide
  MOD_RES (2)..(3): Xaa is C or S

SEQ ID NO: 53026 - protein, 36 aa, Artificial Sequence; identical to SEQ ID NO: 20096
  Cyclic GFR-binding peptide
  MOD_RES (4)..(5): Xaa is C or S

SEQ ID NO: 53027 - protein, 31 aa, Artificial Sequence; identical to SEQ ID NO: 20097
  Cyclic GFR-binding peptide
  MOD_RES (30)..(30): Xaa is C or S

SEQ ID NO: 53028 - protein, 36 aa, Artificial Sequence; identical to SEQ ID NO: 9908
  Cyclic GFR-binding peptide
  MOD_RES (5)..(6): Xaa is C or S

SEQ ID NO: 53029 - protein, 26 aa, Artificial Sequence
  Cyclic GFR-binding peptide
  MOD_RES (1)..(1): Xaa is C or S
XVSQDLEPLPIVYYIGKTPKIEQLSN

SEQ ID NO: 53030 - protein, 35 aa, Artificial Sequence; identical to SEQ ID NO: 20101
  Cyclic GFR-binding peptide
  MOD_RES (2)..(3)..(34): Xaa is C or S

SEQ ID NO: 53031 - protein, 36 aa, Artificial Sequence; identical to SEQ ID NO: 20102
  Cyclic GFR-binding peptide
  MOD_RES (6)..(6): Xaa is C or S

SEQ ID NO: 53032 - protein, 36 aa, Artificial Sequence; identical to SEQ ID NO: 20103
  Cyclic GFR-binding peptide
  MOD_RES (4)..(5): Xaa is C or S

SEQ ID NO: 53033 - protein, 31 aa, Artificial Sequence; identical to SEQ ID NO: 20104
  Cyclic GFR-binding peptide
  MOD_RES (1)..(1): Xaa is C or S

SEQ ID NO: 53034 - protein, 37 aa, Artificial Sequence; identical to SEQ ID NO: 20105
  Cyclic GFR-binding peptide
  MOD_RES (6)..(7): Xaa is C or S

SEQ ID NO: 53035 - protein, 32 aa, Artificial Sequence; identical to SEQ ID NO: 20106
  Cyclic GFR-binding peptide
  MOD_RES (6)..(7): Xaa is C or S

SEQ ID NO: 53036 - protein, 33 aa, Artificial Sequence; identical to SEQ ID NO: 20107
  Cyclic GFR-binding peptide
  MOD_RES (5)..(6): Xaa is C or S

SEQ ID NO: 53037 - protein, 28 aa, Artificial Sequence
  Cyclic GFR-binding peptide
  MOD_RES (27)..(27): Xaa is C or S
LSPISILFIVGRKPKVYKQYEMIVRSXK

SEQ ID NO: 53038 - protein, 34 aa, Artificial Sequence; identical to SEQ ID NO: 20109
  Cyclic GFR-binding peptide
  MOD_RES (1)..(2)..(34): Xaa is C or S

SEQ ID NO: 53039 - protein, 26 aa, Artificial Sequence
  Cyclic GFR-binding peptide
VSQDLSPISILFIIGKTPKIYKQYEM

SEQ ID NO: 53040 - protein, 28 aa, Artificial Sequence
  Cyclic GFR-binding peptide
TQLEPLPVVYYDDSSNVIEQLSNNMVVR

SEQ ID NO: 53041 - protein, 33 aa, Artificial Sequence; identical to SEQ ID NO: 20113
  Cyclic GFR-binding peptide
  MOD_RES (1)..(33): Xaa is C or S

SEQ ID NO: 53042 - protein, 32 aa, Artificial Sequence; identical to SEQ ID NO: 20115
  Cyclic GFR-binding peptide
  MOD_RES (1)..(32): Xaa is C or S

SEQ ID NO: 53043 - protein, 25 aa, Artificial Sequence
  Cyclic GFR-binding peptide
QDLNAISILYFVGRTPKVLKKYRMV

SEQ ID NO: 53044 - protein, 37 aa, Artificial Sequence; identical to SEQ ID NO: 20118
  Cyclic GFR-binding peptide
  MOD_RES (4)..(5)..(37): Xaa is C or S

SEQ ID NO: 53045 - protein, 39 aa, Artificial Sequence; identical to SEQ ID NO: 20119
  Cyclic GFR-binding peptide
  MOD_RES (5)..(6)..(38): Xaa is C or S

SEQ ID NO: 53046 - protein, 31 aa, Artificial Sequence; identical to SEQ ID NO: 20120
  Cyclic GFR-binding peptide
  MOD_RES (31)..(31): Xaa is C or S

SEQ ID NO: 53047 - protein, 27 aa, Artificial Sequence
  Cyclic GFR-binding peptide
PTQLEPLTVLYYDDSSNVIEQLSNNMV

SEQ ID NO: 53048 - protein, 24 aa, Artificial Sequence
  Cyclic GFR-binding peptide
KLSPISVLFIDDSSNVIYKQYENM

SEQ ID NO: 53049 - protein, 36 aa, Artificial Sequence; identical to SEQ ID NO: 20123
  Cyclic GFR-binding peptide
  MOD_RES (5)..(6): Xaa is C or S

SEQ ID NO: 53050 - protein, 24 aa, Artificial Sequence
  Cyclic GFR-binding peptide
EPLPIVYYVGRTPKVEQLSNMVVK

SEQ ID NO: 53051 - protein, 37 aa, Artificial Sequence; identical to SEQ ID NO: 20125
  Cyclic GFR-binding peptide
  MOD_RES (6)..(7): Xaa is C or S

SEQ ID NO: 53052 - protein, 24 aa, Artificial Sequence
  Cyclic GFR-binding peptide
QALNAISILYFVGRKPKVLKKYRM

SEQ ID NO: 53053 - protein, 34 aa, Artificial Sequence; identical to SEQ ID NO: 20131
  Cyclic GFR-binding peptide
  MOD_RES (1)..(33): Xaa is C or S

SEQ ID NO: 53054 - protein, 22 aa, Artificial Sequence
  Cyclic GFR-binding peptide
ELEPLPMVYYDENEKVVEQLSN

SEQ ID NO: 53055 - protein, 32 aa, Artificial Sequence; identical to SEQ ID NO: 20133
  Cyclic GFR-binding peptide
  MOD_RES (5)..(6): Xaa is C or S

SEQ ID NO: 53056 - protein, 36 aa, Artificial Sequence; identical to SEQ ID NO: 20135
  Cyclic GFR-binding peptide
  MOD_RES (4)..(5): Xaa is C or S

SEQ ID NO: 53057 - protein, 36 aa, Artificial Sequence; identical to SEQ ID NO: 9955
  Cyclic GFR-binding peptide
  MOD_RES (4)..(5)..(36): Xaa is C or S

SEQ ID NO: 53058 - protein, 27 aa, Artificial Sequence
  Cyclic GFR-binding peptide
  MOD_RES (27)..(27): Xaa is C or S
EPLTVLYYDDSSNVIEQLSNNMVVRAX

SEQ ID NO: 53059 - protein, 23 aa, Artificial Sequence
  Cyclic GFR-binding peptide
ALNAISILYFVGRKPKVLKKYRM

SEQ ID NO: 53060 - protein, 30 aa, Artificial Sequence; identical to SEQ ID NO: 20140
  Cyclic GFR-binding peptide
  MOD_RES (28)..(30): Xaa is C or S

SEQ ID NO: 53061 - protein, 35 aa, Artificial Sequence; identical to SEQ ID NO: 20141
  Cyclic GFR-binding peptide
  MOD_RES (6)..(7): Xaa is C or S

SEQ ID NO: 53062 - protein, 22 aa, Artificial Sequence
  Cyclic GFR-binding peptide
LSPISILFIVGRTPKVYKQYEM

SEQ ID NO: 53063 - protein, 29 aa, Artificial Sequence
  Cyclic GFR-binding peptide
  MOD_RES (27)..(29): Xaa is C or S
SPISMLFIDENEKVVYKQYEDMVVEGXGX

SEQ ID NO: 53064 - protein, 25 aa, Artificial Sequence
  Cyclic GFR-binding peptide
APTKLEPLPVVYYDDSSNVIEQLSN

SEQ ID NO: 53065 - protein, 27 aa, Artificial Sequence
  Cyclic GFR-binding peptide
  MOD_RES (1)..(1): Xaa is C or S
XAPTKLEPLTVLYYDDSSNVIEQLSNN

SEQ ID NO: 53066 - protein, 29 aa, Artificial Sequence
  Cyclic GFR-binding peptide
  MOD_RES (3)..(3): Xaa is C or S
PTXAPTKLSPISVLFIDDSSNVIYKQYEN

SEQ ID NO: 53067 - protein, 27 aa, Artificial Sequence
  Cyclic GFR-binding peptide
  MOD_RES (1)..(1): Xaa is C or S
XVSQDLEPLPIVYYIGKTPKIEQLSNM

SEQ ID NO: 53068 - protein, 33 aa, Artificial Sequence; identical to SEQ ID NO: 9968
  Cyclic GFR-binding peptide
  MOD_RES (3)..(4): Xaa is C or S

SEQ ID NO: 53069 - protein, 29 aa, Artificial Sequence
  Cyclic GFR-binding peptide
  MOD_RES (2)..(3): Xaa is C or S
PXXVPQDLEPLPIVYYVGRTPKVEQLSNM

SEQ ID NO: 53070 - protein, 30 aa, Artificial Sequence; identical to SEQ ID NO: 9970
  Cyclic GFR-binding peptide

SEQ ID NO: 53071 - protein, 31 aa, Artificial Sequence; identical to SEQ ID NO: 20154
  Cyclic GFR-binding peptide
  MOD_RES (1)..(1): Xaa is C or S

SEQ ID NO: 53072 - protein, 34 aa, Artificial Sequence; identical to SEQ ID NO: 20156
  Cyclic GFR-binding peptide
  MOD_RES (3)..(4): Xaa is C or S

SEQ ID NO: 53073 - protein, 29 aa, Artificial Sequence
  Cyclic GFR-binding peptide
APTKLEPLPVVYYDDSSNVIEQLSNNMVV

SEQ ID NO: 53074 - protein, 28 aa, Artificial Sequence
  Cyclic GFR-binding peptide
VPTELEPLTMLYYDENEKVVEQLSNDMV

SEQ ID NO: 53075 - protein, 34 aa, Artificial Sequence; identical to SEQ ID NO: 20160
  Cyclic GFR-binding peptide
  MOD_RES (1)..(33): Xaa is C or S

SEQ ID NO: 53076 - protein, 30 aa, Artificial Sequence; identical to SEQ ID NO: 9980
  Cyclic GFR-binding peptide
  MOD_RES (1)..(2): Xaa is C or S

SEQ ID NO: 53077 - protein, 33 aa, Artificial Sequence; identical to SEQ ID NO: 20163
  Cyclic GFR-binding peptide
  MOD_RES (1)..(33): Xaa is C or S

SEQ ID NO: 53078 - protein, 32 aa, Artificial Sequence; identical to SEQ ID NO: 9982
  Cyclic GFR-binding peptide
  MOD_RES (1)..(2): Xaa is C or S

SEQ ID NO: 53079 - protein, 29 aa, Artificial Sequence
  Cyclic GFR-binding peptide
  MOD_RES (27)..(29): Xaa is C or S
EPLPMVYYDENEKVVEQLSNDMVVEGXGX

SEQ ID NO: 53080 - protein, 39 aa, Artificial Sequence; identical to SEQ ID NO: 20166
  Cyclic GFR-binding peptide
  MOD_RES (5)..(6)..(38): Xaa is C or S

SEQ ID NO: 53081 - protein, 26 aa, Artificial Sequence
  Cyclic GFR-binding peptide
PQALEPLTILYYVGRKPKVEQLSNMI

SEQ ID NO: 53082 - protein, 25 aa, Artificial Sequence
  Cyclic GFR-binding peptide
VPTELSPISMLFIDEYDKVVYKQYE

SEQ ID NO: 53083 - protein, 30 aa, Artificial Sequence; identical to SEQ ID NO: 20170
  Cyclic GFR-binding peptide
  MOD_RES (1)..(2): Xaa is C or S

SEQ ID NO: 53084 - protein, 25 aa, Artificial Sequence
  Cyclic GFR-binding peptide
PTKLEPLTVLYYDDSSNVIEQLSNN

SEQ ID NO: 53085 - protein, 38 aa, Artificial Sequence; identical to SEQ ID NO: 20173
  Cyclic GFR-binding peptide
  MOD_RES (4)..(5)..(37): Xaa is C or S

SEQ ID NO: 53086 - protein, 26 aa, Artificial Sequence
  Cyclic GFR-binding peptide
LEPLPIVYYVGRTPKVEQLSNMVVKS

SEQ ID NO: 53087 - protein, 31 aa, Artificial Sequence; identical to SEQ ID NO: 20176
  Cyclic GFR-binding peptide
  MOD_RES (31)..(31): Xaa is C or S

SEQ ID NO: 53088 - protein, 30 aa, Artificial Sequence; identical to SEQ ID NO: 20177
  Cyclic GFR-binding peptide
  MOD_RES (1)..(1): Xaa is C or S

SEQ ID NO: 53089 - protein, 35 aa, Artificial Sequence; identical to SEQ ID NO: 20179
  Cyclic GFR-binding peptide
  MOD_RES (1)..(33)..(35): Xaa is C or S

SEQ ID NO: 53090 - protein, 30 aa, Artificial Sequence; identical to SEQ ID NO: 20180
  Cyclic GFR-binding peptide
  MOD_RES (29)..(29): Xaa is C or S

SEQ ID NO: 53091 - protein, 38 aa, Artificial Sequence; identical to SEQ ID NO: 20181
  Cyclic GFR-binding peptide
  MOD_RES (5)..(6)..(38): Xaa is C or S

SEQ ID NO: 53092 - protein, 37 aa, Artificial Sequence; identical to SEQ ID NO: 20182
  Cyclic GFR-binding peptide
  MOD_RES (1)..(2)..(34)..(36): Xaa is C or S

SEQ ID NO: 53093 - protein, 32 aa, Artificial Sequence; identical to SEQ ID NO: 20183
  Cyclic GFR-binding peptide
  MOD_RES (1)..(32): Xaa is C or S

SEQ ID NO: 53094 - protein, 29 aa, Artificial Sequence
  Cyclic GFR-binding peptide
  MOD_RES (2)..(3): Xaa is C or S
PXXVPQDLSPISILFIVGRTPKVYKQYEM

SEQ ID NO: 53095 - protein, 30 aa, Artificial Sequence; identical to SEQ ID NO: 10001
  Cyclic GFR-binding peptide
  MOD_RES (4)..(5): Xaa is C or S

SEQ ID NO: 53096 - protein, 27 aa, Artificial Sequence
  Cyclic GFR-binding peptide
ELEPLTMLYYDENEKVVEQLSNDMVVE

SEQ ID NO: 53097 - protein, 35 aa, Artificial Sequence; identical to SEQ ID NO: 20189
  Cyclic GFR-binding peptide
  MOD_RES (5)..(6): Xaa is C or S

SEQ ID NO: 53098 - protein, 30 aa, Artificial Sequence; identical to SEQ ID NO: 10003
  Cyclic GFR-binding peptide
  MOD_RES (1)..(1): Xaa is C or S

SEQ ID NO: 53099 - protein, 23 aa, Artificial Sequence
  Cyclic GFR-binding peptide
ALEPLTILYYVGRKPKVEQLSNM

SEQ ID NO: 53100 - protein, 29 aa, Artificial Sequence
  Cyclic GFR-binding peptide
  MOD_RES (1)..(2): Xaa is C or S
XXAPTQLEPLTVLYYDDSSNVIEQLSNNM

SEQ ID NO: 53101 - protein, 31 aa, Artificial Sequence; identical to SEQ ID NO: 20194
  Cyclic GFR-binding peptide
  MOD_RES (29)..(31): Xaa is C or S

SEQ ID NO: 53102 - protein, 38 aa, Artificial Sequence; identical to SEQ ID NO: 10009
  Cyclic GFR-binding peptide
  MOD_RES (4)..(5)..(37): Xaa is C or S

SEQ ID NO: 53103 - protein, 31 aa, Artificial Sequence; identical to SEQ ID NO: 20197
  Cyclic GFR-binding peptide
  MOD_RES (30)..(30): Xaa is C or S

SEQ ID NO: 53104 - protein, 28 aa, Artificial Sequence
  Cyclic GFR-binding peptide
PTELSPISMLFIDENEKVVYKQYEDMVV

SEQ ID NO: 53105 - protein, 24 aa, Artificial Sequence
  Cyclic GFR-binding peptide
DLNAISILYFIGKTPKILKKYRMI

SEQ ID NO: 53106 - protein, 35 aa, Artificial Sequence; identical to SEQ ID NO: 20200
  Cyclic GFR-binding peptide
  MOD_RES (2)..(3)..(35): Xaa is C or S

SEQ ID NO: 53107 - protein, 28 aa, Artificial Sequence
  Cyclic GFR-binding peptide
  MOD_RES (27)..(27): Xaa is C or S
LSPISILFIVGRTPKVYKQYEMVVKSXK

SEQ ID NO: 53108 - protein, 34 aa, Artificial Sequence; identical to SEQ ID NO: 20202
  Cyclic GFR-binding peptide
  MOD_RES (1)..(2)..(34): Xaa is C or S

SEQ ID NO: 53109 - protein, 29 aa, Artificial Sequence
  Cyclic GFR-binding peptide
TELEPLTMLYYDENEKVVEQLSNDMVVEG

SEQ ID NO: 53110 - protein, 30 aa, Artificial Sequence; identical to SEQ ID NO: 20204
  Cyclic GFR-binding peptide
  MOD_RES (30)..(30): Xaa is C or S

SEQ ID NO: 53111 - protein, 26 aa, Artificial Sequence
  Cyclic GFR-binding peptide
EPLPVVYYDDSSNVIEQLSNNMVVRS

SEQ ID NO: 53112 - protein, 29 aa, Artificial Sequence
  Cyclic GFR-binding peptide
  MOD_RES (2)..(3): Xaa is C or S
PXXVPQDLNAISILYFVGRTPKVLKKYRM

SEQ ID NO: 53113 - protein, 28 aa, Artificial Sequence
  Cyclic GFR-binding peptide
  MOD_RES (1)..(2): Xaa is C or S
XXVPTELSPISMLFIDEYDKVVYKQYEE

SEQ ID NO: 53114 - protein, 31 aa, Artificial Sequence; identical to SEQ ID NO: 20211
  Cyclic GFR-binding peptide
  MOD_RES (1)..(1): Xaa is C or S

SEQ ID NO: 53115 - protein, 28 aa, Artificial Sequence
  Cyclic GFR-binding peptide
  MOD_RES (2)..(3): Xaa is C or S
PXXVPQALEPLTILYYVGRKPKVEQLSN

SEQ ID NO: 53116 - protein, 38 aa, Artificial Sequence; identical to SEQ ID NO: 20213
  Cyclic GFR-binding peptide
  MOD_RES (5)..(6)..(38): Xaa is C or S

SEQ ID NO: 53117 - protein, 34 aa, Artificial Sequence; identical to SEQ ID NO: 10022
  Cyclic GFR-binding peptide
  MOD_RES (6)..(7): Xaa is C or S

SEQ ID NO: 53118 - protein, 39 aa, Artificial Sequence; identical to SEQ ID NO: 10023
  Cyclic GFR-binding peptide
  MOD_RES (6)..(7)..(39): Xaa is C or S

SEQ ID NO: 53119 - protein, 34 aa, Artificial Sequence; identical to SEQ ID NO: 20216
  Cyclic GFR-binding peptide
  MOD_RES (4)..(5): Xaa is C or S

SEQ ID NO: 53120 - protein, 36 aa, Artificial Sequence; identical to SEQ ID NO: 10024
  Cyclic GFR-binding peptide
  MOD_RES (1)..(2)..(33)..(35): Xaa is C or S

SEQ ID NO: 53121 - protein, 29 aa, Artificial Sequence
  Cyclic GFR-binding peptide
  MOD_RES (3)..(3): Xaa is C or S
PTXAPTKLEPLPVVYYDDSSNVIEQLSNN

SEQ ID NO: 53122 - protein, 34 aa, Artificial Sequence; identical to SEQ ID NO: 20219
  Cyclic GFR-binding peptide
  MOD_RES (5)..(6): Xaa is C or S

SEQ ID NO: 53123 - protein, 21 aa, Artificial Sequence
  Cyclic GFR-binding peptide
NAISILYFIGKTPKILKKYRM

SEQ ID NO: 53124 - protein, 33 aa, Artificial Sequence; identical to SEQ ID NO: 20223
  Cyclic GFR-binding peptide
  MOD_RES (2)..(3): Xaa is C or S

SEQ ID NO: 53125 - protein, 35 aa, Artificial Sequence; identical to SEQ ID NO: 20224
  Cyclic GFR-binding peptide
  MOD_RES (2)..(3)..(34): Xaa is C or S

SEQ ID NO: 53126 - protein, 22 aa, Artificial Sequence
  Cyclic GFR-binding peptide
RLNAISILYFDSANNVVLKKYR

SEQ ID NO: 53127 - protein, 36 aa, Artificial Sequence; identical to SEQ ID NO: 10034
  Cyclic GFR-binding peptide
  MOD_RES (2)..(3)..(35): Xaa is C or S

SEQ ID NO: 53128 - protein, 24 aa, Artificial Sequence
  Cyclic GFR-binding peptide
PTELEPLPMVYYDEYDKVVEQLSN

SEQ ID NO: 53129 - protein, 38 aa, Artificial Sequence; identical to SEQ ID NO: 20230
  Cyclic GFR-binding peptide
  MOD_RES (4)..(36)..(38): Xaa is C or S

SEQ ID NO: 53130 - protein, 23 aa, Artificial Sequence
  Cyclic GFR-binding peptide
LSPISVLFIDDSSNVIYKQYENM

SEQ ID NO: 53131 - protein, 27 aa, Artificial Sequence
  Cyclic GFR-binding peptide
  MOD_RES (27)..(27): Xaa is C or S
LNAISILYFVGRKPKVLKKYRMIVRSX

SEQ ID NO: 53132 - protein, 35 aa, Artificial Sequence; identical to SEQ ID NO: 20237
  Cyclic GFR-binding peptide
  MOD_RES (3)..(4): Xaa is C or S

SEQ ID NO: 53133 - protein, 32 aa, Artificial Sequence; identical to SEQ ID NO: 20238
  Cyclic GFR-binding peptide
  MOD_RES (3)..(4): Xaa is C or S

SEQ ID NO: 53134 - protein, 27 aa, Artificial Sequence
  Cyclic GFR-binding peptide
APTKLSPISVLFIDDSSNVIYKQYENM

SEQ ID NO: 53135 - protein, 29 aa, Artificial Sequence
  Cyclic GFR-binding peptide
TELEPLTMLYYDEYDKVVEQLSNEMVVEG

SEQ ID NO: 53136 - protein, 36 aa, Artificial Sequence; identical to SEQ ID NO: 20241
  Cyclic GFR-binding peptide
  MOD_RES (3)..(4)..(35): Xaa is C or S

SEQ ID NO: 53137 - protein, 30 aa, Artificial Sequence; identical to SEQ ID NO: 20242
  Cyclic GFR-binding peptide
  MOD_RES (30)..(30): Xaa is C or S

SEQ ID NO: 53138 - protein, 25 aa, Artificial Sequence
  Cyclic GFR-binding peptide
SPISILFIIGKTPKIYKQYEMIVKS

SEQ ID NO: 53139 - protein, 31 aa, Artificial Sequence; identical to SEQ ID NO: 10056
  Cyclic GFR-binding peptide
  MOD_RES (3)..(4): Xaa is C or S

SEQ ID NO: 53140 - protein, 32 aa, Artificial Sequence; identical to SEQ ID NO: 10057
  Cyclic GFR-binding peptide
  MOD_RES (1)..(2): Xaa is C or S

SEQ ID NO: 53141 - protein, 24 aa, Artificial Sequence
  Cyclic GFR-binding peptide
QALSPISILFIVGRKPKVYKQYEM

SEQ ID NO: 53142 - protein, 25 aa, Artificial Sequence
  Cyclic GFR-binding peptide
VPTELEPLTMLYYDENEKVVEQLSN

SEQ ID NO: 53143 - protein, 32 aa, Artificial Sequence; identical to SEQ ID NO: 10058
  Cyclic GFR-binding peptide
  MOD_RES (30)..(32): Xaa is C or S

SEQ ID NO: 53144 - protein, 33 aa, Artificial Sequence; identical to SEQ ID NO: 20250
  Cyclic GFR-binding peptide
  MOD_RES (1)..(33): Xaa is C or S

SEQ ID NO: 53145 - protein, 36 aa, Artificial Sequence; identical to SEQ ID NO: 20252
  Cyclic GFR-binding peptide
  MOD_RES (3)..(4)..(36): Xaa is C or S

SEQ ID NO: 53146 - protein, 33 aa, Artificial Sequence; identical to SEQ ID NO: 20255
  Cyclic GFR-binding peptide
  MOD_RES (1)..(32): Xaa is C or S

SEQ ID NO: 53147 - protein, 36 aa, Artificial Sequence; identical to SEQ ID NO: 20256
  Cyclic GFR-binding peptide
  MOD_RES (7)..(7): Xaa is C or S

SEQ ID NO: 53148 - protein, 34 aa, Artificial Sequence; identical to SEQ ID NO: 10063
  Cyclic GFR-binding peptide
  MOD_RES (6)..(7): Xaa is C or S

SEQ ID NO: 53149 - protein, 31 aa, Artificial Sequence; identical to SEQ ID NO: 20258
  Cyclic GFR-binding peptide
  MOD_RES (5)..(6): Xaa is C or S

SEQ ID NO: 53150 - protein, 32 aa, Artificial Sequence; identical to SEQ ID NO: 10066
  Cyclic GFR-binding peptide
  MOD_RES (3)..(4): Xaa is C or S

SEQ ID NO: 53151 - protein, 26 aa, Artificial Sequence
  Cyclic GFR-binding peptide
EPLPVVYYDDSSNVIEQLSNNMVVRA

SEQ ID NO: 53152 - protein, 34 aa, Artificial Sequence; identical to SEQ ID NO: 20261
  Cyclic GFR-binding peptide
  MOD_RES (2)..(3): Xaa is C or S

SEQ ID NO: 53153 - protein, 27 aa, Artificial Sequence
  Cyclic GFR-binding peptide
  MOD_RES (1)..(2): Xaa is C or S
XXVPQDLSPISILFIVGRTPKVYKQYE

SEQ ID NO: 53154 - protein, 24 aa, Artificial Sequence
  Cyclic GFR-binding peptide
TKLEPLTVLYYDDSSNVIEQLSNN

SEQ ID NO: 53155 - protein, 26 aa, Artificial Sequence
  Cyclic GFR-binding peptide
TQLSPISVLFIDDSSNVIYKQYENMV

SEQ ID NO: 53156 - protein, 22 aa, Artificial Sequence
  Cyclic GFR-binding peptide
NAISMLYFDEYDKVVLKKYREM

SEQ ID NO: 53157 - protein, 35 aa, Artificial Sequence; identical to SEQ ID NO: 20267
  Cyclic GFR-binding peptide
  MOD_RES (4)..(5): Xaa is C or S

SEQ ID NO: 53158 - protein, 36 aa, Artificial Sequence; identical to SEQ ID NO: 10081
  Cyclic GFR-binding peptide
  MOD_RES (3)..(4)..(35): Xaa is C or S

SEQ ID NO: 53159 - protein, 28 aa, Artificial Sequence
  Cyclic GFR-binding peptide
TELEPLTMLYYDENEKVVEQLSNDMVVE

SEQ ID NO: 53160 - protein, 25 aa, Artificial Sequence
  Cyclic GFR-binding peptide
ELNAISMLYFDEYDKVVLKKYREMV

SEQ ID NO: 53161 - protein, 25 aa, Artificial Sequence
  Cyclic GFR-binding peptide
VSQDLSPISILFIIGKTPKIYKQYE

SEQ ID NO: 53162 - protein, 26 aa, Artificial Sequence
  Cyclic GFR-binding peptide
PTQLEPLTVLYYDDSSNVIEQLSNNM

SEQ ID NO: 53163 - protein, 23 aa, Artificial Sequence
  Cyclic GFR-binding peptide
EPLPIVYYVGRTPKVEQLSNMVV

SEQ ID NO: 53164 - protein, 35 aa, Artificial Sequence; identical to SEQ ID NO: 10093
  Cyclic GFR-binding peptide
  MOD_RES (3)..(4)..(35): Xaa is C or S

SEQ ID NO: 53165 - protein, 30 aa, Artificial Sequence; identical to SEQ ID NO: 20276
  Cyclic GFR-binding peptide
  MOD_RES (5)..(5): Xaa is C or S

SEQ ID NO: 53166 - protein, 30 aa, Artificial Sequence; identical to SEQ ID NO: 20277
  Cyclic GFR-binding peptide
  MOD_RES (30)..(30): Xaa is C or S

SEQ ID NO: 53167 - protein, 41 aa, Artificial Sequence; identical to SEQ ID NO: 20278
  Cyclic GFR-binding peptide
  MOD_RES (6)..(7)..(39)..(41): Xaa is C or S

SEQ ID NO: 53168 - protein, 39 aa, Artificial Sequence; identical to SEQ ID NO: 20279
  Cyclic GFR-binding peptide
  MOD_RES (3)..(4)..(36)..(38): Xaa is C or S

SEQ ID NO: 53169 - protein, 39 aa, Artificial Sequence; identical to SEQ ID NO: 20281
  Cyclic GFR-binding peptide
  MOD_RES (6)..(7)..(39): Xaa is C or S

SEQ ID NO: 53170 - protein, 26 aa, Artificial Sequence
  Cyclic GFR-binding peptide
  MOD_RES (1)..(1): Xaa is C or S
XVSQDLNAISILYFIGKTPKILKKYR

SEQ ID NO: 53171 - protein, 30 aa, Artificial Sequence; identical to SEQ ID NO: 20284
  Cyclic GFR-binding peptide
  MOD_RES (4)..(5): Xaa is C or S

SEQ ID NO: 53172 - protein, 30 aa, Artificial Sequence; identical to SEQ ID NO: 20285
  Cyclic GFR-binding peptide
  MOD_RES (29)..(29): Xaa is C or S

SEQ ID NO: 53173 - protein, 34 aa, Artificial Sequence; identical to SEQ ID NO: 20286
  Cyclic GFR-binding peptide
  MOD_RES (31)..(33): Xaa is C or S

SEQ ID NO: 53174 - protein, 30 aa, Artificial Sequence; identical to SEQ ID NO: 20287
  Cyclic GFR-binding peptide
  MOD_RES (1)..(1): Xaa is C or S

SEQ ID NO: 53175 - protein, 32 aa, Artificial Sequence; identical to SEQ ID NO: 10110
  Cyclic GFR-binding peptide
  MOD_RES (4)..(5): Xaa is C or S

SEQ ID NO: 53176 - protein, 30 aa, Artificial Sequence; identical to SEQ ID NO: 20289
  Cyclic GFR-binding peptide
  MOD_RES (29)..(29): Xaa is C or S

SEQ ID NO: 53177 - protein, 40 aa, Artificial Sequence; identical to SEQ ID NO: 20290
  Cyclic GFR-binding peptide
  MOD_RES (4)..(5)..(37)..(39): Xaa is C or S

SEQ ID NO: 53178 - protein, 37 aa, Artificial Sequence; identical to SEQ ID NO: 20291
  Cyclic GFR-binding peptide
  MOD_RES (4)..(5)..(37): Xaa is C or S

SEQ ID NO: 53179 - protein, 34 aa, Artificial Sequence; identical to SEQ ID NO: 20292
  Cyclic GFR-binding peptide
  MOD_RES (1)..(2)..(34): Xaa is C or S

SEQ ID NO: 53180 - protein, 36 aa, Artificial Sequence; identical to SEQ ID NO: 20294
  Cyclic GFR-binding peptide
  MOD_RES (4)..(5)..(36): Xaa is C or S

SEQ ID NO: 53181 - protein, 30 aa, Artificial Sequence; identical to SEQ ID NO: 20295
  Cyclic GFR-binding peptide
  MOD_RES (2)..(3): Xaa is C or S

SEQ ID NO: 53182 - protein, 27 aa, Artificial Sequence
  Cyclic GFR-binding peptide
  MOD_RES (1)..(2): Xaa is C or S
XXVPTELNAISMLYFDENEKVVLKKYR

SEQ ID NO: 53183 - protein, 32 aa, Artificial Sequence; identical to SEQ ID NO: 20298
  Cyclic GFR-binding peptide
  MOD_RES (1)..(2): Xaa is C or S

SEQ ID NO: 53184 - protein, 37 aa, Artificial Sequence; identical to SEQ ID NO: 10127
  Cyclic GFR-binding peptide
  MOD_RES (6)..(7): Xaa is C or S

SEQ ID NO: 53185 - protein, 29 aa, Artificial Sequence
  Cyclic GFR-binding peptide
  MOD_RES (4)..(4): Xaa is C or S
KPTXAPTKLSPISVLFIDDSSNVIYKQYE

SEQ ID NO: 53186 - protein, 21 aa, Artificial Sequence
  Cyclic GFR-binding peptide
EPLPMVYYDENEKVVEQLSND

SEQ ID NO: 53187 - protein, 24 aa, Artificial Sequence
  Cyclic GFR-binding peptide
TQLSPISVLFIDDSSNVIYKQYEN

SEQ ID NO: 53188 - protein, 29 aa, Artificial Sequence
  Cyclic GFR-binding peptide
PQALEPLTILYYVGRKPKVEQLSNMIVRS

SEQ ID NO: 53189 - protein, 26 aa, Artificial Sequence
  Cyclic GFR-binding peptide
LNAISILYFVGRTPKVLKKYRMVVKS

SEQ ID NO: 53190 - protein, 28 aa, Artificial Sequence
  Cyclic GFR-binding peptide
  MOD_RES (28)..(28): Xaa is C or S
LSPISMLFIDEYDKVVYKQYEEMVVEGX

SEQ ID NO: 53191 - protein, 31 aa, Artificial Sequence; identical to SEQ ID NO: 20308
  Cyclic GFR-binding peptide

SEQ ID NO: 53192 - protein, 34 aa, Artificial Sequence; identical to SEQ ID NO: 20309
  Cyclic GFR-binding peptide
  MOD_RES (32)..(34): Xaa is C or S

SEQ ID NO: 53193 - protein, 35 aa, Artificial Sequence; identical to SEQ ID NO: 20310
  Cyclic GFR-binding peptide
  MOD_RES (5)..(6): Xaa is C or S

SEQ ID NO: 53194 - protein, 37 aa, Artificial Sequence; identical to SEQ ID NO: 20311
  Cyclic GFR-binding peptide
  MOD_RES (2)..(3)..(35)..(37): Xaa is C or S

SEQ ID NO: 53195 - protein, 30 aa, Artificial Sequence; identical to SEQ ID NO: 20313
  Cyclic GFR-binding peptide
  MOD_RES (1)..(1): Xaa is C or S

SEQ ID NO: 53196 - protein, 28 aa, Artificial Sequence
  Cyclic GFR-binding peptide
  MOD_RES (26)..(28): Xaa is C or S
EPLTILYYVGRKPKVEQLSNMIVRSXKX

SEQ ID NO: 53197 - protein, 24 aa, Artificial Sequence
  Cyclic GFR-binding peptide
ELEPLPMVYYDEYDKVVEQLSNEM

SEQ ID NO: 53198 - protein, 35 aa, Artificial Sequence; identical to SEQ ID NO: 20316
  Cyclic GFR-binding peptide
  MOD_RES (6)..(7): Xaa is C or S

SEQ ID NO: 53199 - protein, 24 aa, Artificial Sequence
  Cyclic GFR-binding peptide
PTRLEPLPIVYYDSANNVVEQLSN

SEQ ID NO: 53200 - protein, 28 aa, Artificial Sequence
  Cyclic GFR-binding peptide
  MOD_RES (2)..(2): Xaa is C or S
TXAPTKLEPLPVVYYDDSSNVIEQLSNN

SEQ ID NO: 53201 - protein, 38 aa, Artificial Sequence; identical to SEQ ID NO: 20322
  Cyclic GFR-binding peptide
  MOD_RES (7)..(7): Xaa is C or S

SEQ ID NO: 53202 - protein, 21 aa, Artificial Sequence
  Cyclic GFR-binding peptide
LEPLPMVYYDENEKVVEQLSN

SEQ ID NO: 53203 - protein, 28 aa, Artificial Sequence
  Cyclic GFR-binding peptide
  MOD_RES (2)..(3): Xaa is C or S
PXXAPTQLEPLTVLYYDDSSNVIEQLSN

SEQ ID NO: 53204 - protein, 25 aa, Artificial Sequence
  Cyclic GFR-binding peptide
PQALSPISILFIVGRKPKVYKQYEM

SEQ ID NO: 53205 - protein, 27 aa, Artificial Sequence
  Cyclic GFR-binding peptide
  MOD_RES (27)..(27): Xaa is C or S
LEPLTILYYVGRKPKVEQLSNMIVRSX

SEQ ID NO: 53206 - protein, 33 aa, Artificial Sequence; identical to SEQ ID NO: 20330
  Cyclic GFR-binding peptide
  MOD_RES (32)..(32): Xaa is C or S

SEQ ID NO: 53207 - protein, 24 aa, Artificial Sequence
  Cyclic GFR-binding peptide
EPLTVLYYDDSSNVIEQLSNNMVV

SEQ ID NO: 53208 - protein, 38 aa, Artificial Sequence; identical to SEQ ID NO: 10161
  Cyclic GFR-binding peptide
  MOD_RES (3)..(4)..(36)..(38): Xaa is C or S

SEQ ID NO: 53209 - protein, 33 aa, Artificial Sequence; identical to SEQ ID NO: 20334
  Cyclic GFR-binding peptide
  MOD_RES (1)..(33): Xaa is C or S

SEQ ID NO: 53210 - protein, 34 aa, Artificial Sequence; identical to SEQ ID NO: 10164
  Cyclic GFR-binding peptide
  MOD_RES (5)..(6): Xaa is C or S

SEQ ID NO: 53211 - protein, 40 aa, Artificial Sequence; identical to SEQ ID NO: 10166
  Cyclic GFR-binding peptide
  MOD_RES (5)..(6)..(38)..(40): Xaa is C or S

SEQ ID NO: 53212 - protein, 33 aa, Artificial Sequence; identical to SEQ ID NO: 20337
  Cyclic GFR-binding peptide
  MOD_RES (31)..(33): Xaa is C or S

SEQ ID NO: 53213 - protein, 35 aa, Artificial Sequence; identical to SEQ ID NO: 20339
  Cyclic GFR-binding peptide
  MOD_RES (5)..(6): Xaa is C or S

SEQ ID NO: 53214 - protein, 25 aa, Artificial Sequence
  Cyclic GFR-binding peptide
SQDLSPISILFIIGKTPKIYKQYEM

SEQ ID NO: 53215 - protein, 28 aa, Artificial Sequence
  Cyclic GFR-binding peptide
PTELEPLPMVYYDEYDKVVEQLSNEMVV

SEQ ID NO: 53216 - protein, 33 aa, Artificial Sequence; identical to SEQ ID NO: 20342
  Cyclic GFR-binding peptide
  MOD_RES (2)..(3): Xaa is C or S

SEQ ID NO: 53217 - protein, 33 aa, Artificial Sequence; identical to SEQ ID NO: 20344
  Cyclic GFR-binding peptide
  MOD_RES (32)..(32): Xaa is C or S

SEQ ID NO: 53218 - protein, 28 aa, Artificial Sequence
  Cyclic GFR-binding peptide
  MOD_RES (27)..(27): Xaa is C or S
EPLTVLYYDDSSNVIEQLSNNMVVRSXG

SEQ ID NO: 53219 - protein, 27 aa, Artificial Sequence
  Cyclic GFR-binding peptide
TELNAISMLYFDENEKVVLKKYRDMVV

SEQ ID NO: 53220 - protein, 36 aa, Artificial Sequence; identical to SEQ ID NO: 20349
  Cyclic GFR-binding peptide
  MOD_RES (4)..(5): Xaa is C or S

SEQ ID NO: 53221 - protein, 27 aa, Artificial Sequence
  Cyclic GFR-binding peptide
QLEPLPVVYYDDSSNVIEQLSNNMVVR

SEQ ID NO: 53222 - protein, 35 aa, Artificial Sequence; identical to SEQ ID NO: 20351
  Cyclic GFR-binding peptide
  MOD_RES (3)..(35): Xaa is C or S

SEQ ID NO: 53223 - protein, 38 aa, Artificial Sequence; identical to SEQ ID NO: 20354
  Cyclic GFR-binding peptide
  MOD_RES (6)..(7): Xaa is C or S

SEQ ID NO: 53224 - protein, 26 aa, Artificial Sequence
  Cyclic GFR-binding peptide
DLEPLPIVYYVGRTPKVEQLSNMVVK

SEQ ID NO: 53225 - protein, 27 aa, Artificial Sequence
  Cyclic GFR-binding peptide
  MOD_RES (1)..(1): Xaa is C or S
XVPTRLEPLPIVYYDSANNVVEQLSND

SEQ ID NO: 53226 - protein, 26 aa, Artificial Sequence
  Cyclic GFR-binding peptide
TELEPLPMVYYDEYDKVVEQLSNEMV

SEQ ID NO: 53227 - protein, 24 aa, Artificial Sequence
  Cyclic GFR-binding peptide
QDLSPISILFIVGRTPKVYKQYEM

SEQ ID NO: 53228 - protein, 29 aa, Artificial Sequence
  Cyclic GFR-binding peptide
  MOD_RES (28)..(28): Xaa is C or S
LEPLPMVYYDENEKVVEQLSNDMVVEGXG

SEQ ID NO: 53229 - protein, 31 aa, Artificial Sequence; identical to SEQ ID NO: 20363
  Cyclic GFR-binding peptide
  MOD_RES (4)..(5): Xaa is C or S

SEQ ID NO: 53230 - protein, 39 aa, Artificial Sequence; identical to SEQ ID NO: 20364
  Cyclic GFR-binding peptide
  MOD_RES (3)..(4)..(36)..(38): Xaa is C or S

SEQ ID NO: 53231 - protein, 34 aa, Artificial Sequence; identical to SEQ ID NO: 20365
  Cyclic GFR-binding peptide
  MOD_RES (1)..(2)..(34): Xaa is C or S

SEQ ID NO: 53232 - protein, 27 aa, Artificial Sequence
  Cyclic GFR-binding peptide
PTRLNAISILYFDSANNVVLKKYRDMV

SEQ ID NO: 53233 - protein, 35 aa, Artificial Sequence; identical to SEQ ID NO: 10195
  Cyclic GFR-binding peptide
  MOD_RES (1)..(33)..(35): Xaa is C or S

SEQ ID NO: 53234 - protein, 38 aa, Artificial Sequence; identical to SEQ ID NO: 20370
  Cyclic GFR-binding peptide
  MOD_RES (6)..(7)..(38): Xaa is C or S

SEQ ID NO: 53235 - protein, 29 aa, Artificial Sequence
  Cyclic GFR-binding peptide
  MOD_RES (28)..(28): Xaa is C or S
LEPLTVLYYDDSSNVIEQLSNNMVVRAXG

SEQ ID NO: 53236 - protein, 25 aa, Artificial Sequence
  Cyclic GFR-binding peptide
PTELNAISMLYFDENEKVVLKKYRD

SEQ ID NO: 53237 - protein, 30 aa, Artificial Sequence; identical to SEQ ID NO: 20375
  Cyclic GFR-binding peptide
  MOD_RES (28)..(30): Xaa is C or S

SEQ ID NO: 53238 - protein, 20 aa, Artificial Sequence
  Cyclic GFR-binding peptide
NAISILYFIGKTPKILKKYR

SEQ ID NO: 53239 - protein, 27 aa, Artificial Sequence
  Cyclic GFR-binding peptide
TQLSPISVLFIDDSSNVIYKQYENMVV

SEQ ID NO: 53240 - protein, 35 aa, Artificial Sequence; identical to SEQ ID NO: 10210
  Cyclic GFR-binding peptide
  MOD_RES (32)..(34): Xaa is C or S

SEQ ID NO: 53241 - protein, 33 aa, Artificial Sequence; identical to SEQ ID NO: 20380
  Cyclic GFR-binding peptide
  MOD_RES (4)..(4): Xaa is C or S

SEQ ID NO: 53242 - protein, 29 aa, Artificial Sequence
  Cyclic GFR-binding peptide
TRLEPLPIVYYDSANNVVEQLSNDMVVES

SEQ ID NO: 53243 - protein, 33 aa, Artificial Sequence; identical to SEQ ID NO: 20382
  Cyclic GFR-binding peptide
  MOD_RES (6)..(7): Xaa is C or S

SEQ ID NO: 53244 - protein, 36 aa, Artificial Sequence; identical to SEQ ID NO: 10213
  Cyclic GFR-binding peptide
  MOD_RES (5)..(6): Xaa is C or S

SEQ ID NO: 53245 - protein, 26 aa, Artificial Sequence
  Cyclic GFR-binding peptide
TKLSPISVLFIDDSSNVIYKQYENMV

SEQ ID NO: 53246 - protein, 40 aa, Artificial Sequence; identical to SEQ ID NO: 20385
  Cyclic GFR-binding peptide
  MOD_RES (5)..(37)..(39): Xaa is C or S

SEQ ID NO: 53247 - protein, 30 aa, Artificial Sequence; identical to SEQ ID NO: 20386
  Cyclic GFR-binding peptide

SEQ ID NO: 53248 - protein, 22 aa, Artificial Sequence
  Cyclic GFR-binding peptide
LNAISILYFIGKTPKILKKYRM

SEQ ID NO: 53249 - protein, 37 aa, Artificial Sequence; identical to SEQ ID NO: 20388
  Cyclic GFR-binding peptide
  MOD_RES (6)..(7): Xaa is C or S

SEQ ID NO: 53250 - protein, 27 aa, Artificial Sequence
  Cyclic GFR-binding peptide
  MOD_RES (1)..(2): Xaa is C or S
XXVPTELEPLTMLYYDENEKVVEQLSN

SEQ ID NO: 53251 - protein, 41 aa, Artificial Sequence; identical to SEQ ID NO: 20391
  Cyclic GFR-binding peptide
  MOD_RES (6)..(7)..(39)..(41): Xaa is C or S

SEQ ID NO: 53252 - protein, 32 aa, Artificial Sequence; identical to SEQ ID NO: 20392
  Cyclic GFR-binding peptide
  MOD_RES (3)..(4): Xaa is C or S

SEQ ID NO: 53253 - protein, 34 aa, Artificial Sequence; identical to SEQ ID NO: 20393
  Cyclic GFR-binding peptide
  MOD_RES (1)..(33): Xaa is C or S

SEQ ID NO: 53254 - protein, 26 aa, Artificial Sequence
  Cyclic GFR-binding peptide
  MOD_RES (26)..(26): Xaa is C or S
EPLPIVYYIGKTPKIEQLSNMIVKSX

SEQ ID NO: 53255 - protein, 38 aa, Artificial Sequence; identical to SEQ ID NO: 10223
  Cyclic GFR-binding peptide
  MOD_RES (5)..(6)..(38): Xaa is C or S

SEQ ID NO: 53256 - protein, 23 aa, Artificial Sequence
  Cyclic GFR-binding peptide
LNAISILYFVGRTPKVLKKYRMV

SEQ ID NO: 53257 - protein, 41 aa, Artificial Sequence; identical to SEQ ID NO: 20398
  Cyclic GFR-binding peptide
  MOD_RES (6)..(7)..(39)..(41): Xaa is C or S

SEQ ID NO: 53258 - protein, 32 aa, Artificial Sequence; identical to SEQ ID NO: 10226
  Cyclic GFR-binding peptide
  MOD_RES (31)..(31): Xaa is C or S

SEQ ID NO: 53259 - protein, 30 aa, Artificial Sequence; identical to SEQ ID NO: 20400
  Cyclic GFR-binding peptide
  MOD_RES (28)..(30): Xaa is C or S

SEQ ID NO: 53260 - protein, 31 aa, Artificial Sequence; identical to SEQ ID NO: 20401
  Cyclic GFR-binding peptide
  MOD_RES (31)..(31): Xaa is C or S

SEQ ID NO: 53261 - protein, 24 aa, Artificial Sequence
  Cyclic GFR-binding peptide
QLSPISVLFIDDSSNVIYKQYENM

SEQ ID NO: 53262 - protein, 33 aa, Artificial Sequence; identical to SEQ ID NO: 20403
  Cyclic GFR-binding peptide
  MOD_RES (2)..(3): Xaa is C or S

SEQ ID NO: 53263 - protein, 23 aa, Artificial Sequence
  Cyclic GFR-binding peptide
RLEPLTILYYDSANNVVEQLSND

SEQ ID NO: 53264 - protein, 22 aa, Artificial Sequence
  Cyclic GFR-binding peptide
ELSPISMLFIDENEKVVYKQYE

SEQ ID NO: 53265 - protein, 34 aa, Artificial Sequence; identical to SEQ ID NO: 20406
  Cyclic GFR-binding peptide
  MOD_RES (5)..(5): Xaa is C or S

SEQ ID NO: 53266 - protein, 30 aa, Artificial Sequence; identical to SEQ ID NO: 20407
  Cyclic GFR-binding peptide

SEQ ID NO: 53267 - protein, 32 aa, Artificial Sequence; identical to SEQ ID NO: 20408
  Cyclic GFR-binding peptide
  MOD_RES (6)..(7): Xaa is C or S

SEQ ID NO: 53268 - protein, 39 aa, Artificial Sequence; identical to SEQ ID NO: 20409
  Cyclic GFR-binding peptide
  MOD_RES (5)..(6)..(37)..(39): Xaa is C or S

SEQ ID NO: 53269 - protein, 23 aa, Artificial Sequence
  Cyclic GFR-binding peptide
LEPLPVVYYDDSSNVIEQLSNNM

SEQ ID NO: 53270 - protein, 28 aa, Artificial Sequence
  Cyclic GFR-binding peptide
  MOD_RES (1)..(1): Xaa is C or S
XVPTELEPLTMLYYDEYDKVVEQLSNEM

SEQ ID NO: 53271 - protein, 32 aa, Artificial Sequence; identical to SEQ ID NO: 10247
  Cyclic GFR-binding peptide
  MOD_RES (29)..(31): Xaa is C or S

SEQ ID NO: 53272 - protein, 33 aa, Artificial Sequence; identical to SEQ ID NO: 10249
  Cyclic GFR-binding peptide
  MOD_RES (1)..(33): Xaa is C or S

SEQ ID NO: 53273 - protein, 41 aa, Artificial Sequence; identical to SEQ ID NO: 20418
  Cyclic GFR-binding peptide
  MOD_RES (6)..(7)..(39)..(41): Xaa is C or S

SEQ ID NO: 53274 - protein, 30 aa, Artificial Sequence; identical to SEQ ID NO: 20420
  Cyclic GFR-binding peptide
  MOD_RES (2)..(3): Xaa is C or S

SEQ ID NO: 53275 - protein, 32 aa, Artificial Sequence; identical to SEQ ID NO: 20421
  Cyclic GFR-binding peptide
  MOD_RES (5)..(6): Xaa is C or S

SEQ ID NO: 53276 - protein, 32 aa, Artificial Sequence; identical to SEQ ID NO: 20422
  Cyclic GFR-binding peptide
  MOD_RES (31)..(31): Xaa is C or S

SEQ ID NO: 53277 - protein, 24 aa, Artificial Sequence
  Cyclic GFR-binding peptide
NAISILYFDSANNVVLKKYRDMVV

SEQ ID NO: 53278 - protein, 21 aa, Artificial Sequence
  Cyclic GFR-binding peptide
NAISILYFDSANNVVLKKYRD

SEQ ID NO: 53279 - protein, 37 aa, Artificial Sequence; identical to SEQ ID NO: 20425
  Cyclic GFR-binding peptide
  MOD_RES (6)..(7): Xaa is C or S

SEQ ID NO: 53280 - protein, 33 aa, Artificial Sequence; identical to SEQ ID NO: 20426
  Cyclic GFR-binding peptide
  MOD_RES (1)..(2): Xaa is C or S

SEQ ID NO: 53281 - protein, 31 aa, Artificial Sequence; identical to SEQ ID NO: 10268
  Cyclic GFR-binding peptide
  MOD_RES (1)..(1): Xaa is C or S

SEQ ID NO: 53282 - protein, 30 aa, Artificial Sequence; identical to SEQ ID NO: 20429
  Cyclic GFR-binding peptide
  MOD_RES (2)..(3): Xaa is C or S

SEQ ID NO: 53283 - protein, 34 aa, Artificial Sequence; identical to SEQ ID NO: 20430
  Cyclic GFR-binding peptide
  MOD_RES (5)..(6): Xaa is C or S

SEQ ID NO: 53284 - protein, 35 aa, Artificial Sequence; identical to SEQ ID NO: 20431
  Cyclic GFR-binding peptide
  MOD_RES (1)..(2)..(33)..(35): Xaa is C or S

SEQ ID NO: 53285 - protein, 38 aa, Artificial Sequence; identical to SEQ ID NO: 10274
  Cyclic GFR-binding peptide
  MOD_RES (3)..(4)..(36)..(38): Xaa is C or S

SEQ ID NO: 53286 - protein, 30 aa, Artificial Sequence; identical to SEQ ID NO: 20434
  Cyclic GFR-binding peptide

SEQ ID NO: 53287 - protein, 26 aa, Artificial Sequence
  Cyclic GFR-binding peptide
SQDLNAISILYFIGKTPKILKKYRMI

SEQ ID NO: 53288 - protein, 29 aa, Artificial Sequence
  Cyclic GFR-binding peptide
  MOD_RES (1)..(1): Xaa is C or S
XVPQDLNAISILYFVGRTPKVLKKYRMVV

SEQ ID NO: 53289 - protein, 29 aa, Artificial Sequence
  Cyclic GFR-binding peptide
  MOD_RES (1)..(1): Xaa is C or S
XVPTELEPLPMVYYDENEKVVEQLSNDMV

SEQ ID NO: 53290 - protein, 35 aa, Artificial Sequence; identical to SEQ ID NO: 20438
  Cyclic GFR-binding peptide
  MOD_RES (2)..(3)..(34): Xaa is C or S

SEQ ID NO: 53291 - protein, 31 aa, Artificial Sequence; identical to SEQ ID NO: 20439
  Cyclic GFR-binding peptide

SEQ ID NO: 53292 - protein, 36 aa, Artificial Sequence; identical to SEQ ID NO: 20440
  Cyclic GFR-binding peptide
  MOD_RES (1)..(2)..(33)..(35): Xaa is C or S

SEQ ID NO: 53293 - protein, 32 aa, Artificial Sequence; identical to SEQ ID NO: 10284
  Cyclic GFR-binding peptide
  MOD_RES (1)..(2): Xaa is C or S

SEQ ID NO: 53294 - protein, 33 aa, Artificial Sequence; identical to SEQ ID NO: 20444
  Cyclic GFR-binding peptide
  MOD_RES (1)..(33): Xaa is C or S

SEQ ID NO: 53295 - protein, 39 aa, Artificial Sequence; identical to SEQ ID NO: 20445
  Cyclic GFR-binding peptide
  MOD_RES (7)..(39): Xaa is C or S

SEQ ID NO: 53296 - protein, 36 aa, Artificial Sequence; identical to SEQ ID NO: 20448
  Cyclic GFR-binding peptide
  MOD_RES (5)..(6): Xaa is C or S

SEQ ID NO: 53297 - protein, 34 aa, Artificial Sequence; identical to SEQ ID NO: 20449
  Cyclic GFR-binding peptide
  MOD_RES (4)..(5): Xaa is C or S

SEQ ID NO: 53298 - protein, 36 aa, Artificial Sequence; identical to SEQ ID NO: 20450
  Cyclic GFR-binding peptide
  MOD_RES (6)..(7): Xaa is C or S

SEQ ID NO: 53299 - protein, 37 aa, Artificial Sequence; identical to SEQ ID NO: 20451
  Cyclic GFR-binding peptide
  MOD_RES (5)..(6): Xaa is C or S

SEQ ID NO: 53300 - protein, 29 aa, Artificial Sequence
  Cyclic GFR-binding peptide
  MOD_RES (29)..(29): Xaa is C or S
QDLSPISILFIVGRTPKVYKQYEMVVKSX

SEQ ID NO: 53301 - protein, 26 aa, Artificial Sequence
  Cyclic GFR-binding peptide
TELSPISMLFIDEYDKVVYKQYEEMV

SEQ ID NO: 53302 - protein, 38 aa, Artificial Sequence; identical to SEQ ID NO: 20454
  Cyclic GFR-binding peptide
  MOD_RES (6)..(7): Xaa is C or S

SEQ ID NO: 53303 - protein, 32 aa, Artificial Sequence; identical to SEQ ID NO: 20455
  Cyclic GFR-binding peptide
  MOD_RES (2)..(3): Xaa is C or S

SEQ ID NO: 53304 - protein, 37 aa, Artificial Sequence; identical to SEQ ID NO: 20456
  Cyclic GFR-binding peptide
  MOD_RES (3)..(4)..(36): Xaa is C or S

SEQ ID NO: 53305 - protein, 37 aa, Artificial Sequence; identical to SEQ ID NO: 20457
  Cyclic GFR-binding peptide
  MOD_RES (4)..(5)..(37): Xaa is C or S

SEQ ID NO: 53306 - protein, 23 aa, Artificial Sequence
  Cyclic GFR-binding peptide
TELSPISMLFIDENEKVVYKQYE

SEQ ID NO: 53307 - protein, 34 aa, Artificial Sequence; identical to SEQ ID NO: 20459
  Cyclic GFR-binding peptide
  MOD_RES (6)..(7): Xaa is C or S

SEQ ID NO: 53308 - protein, 29 aa, Artificial Sequence
  Cyclic GFR-binding peptide
TQLSPISVLFIDDSSNVIYKQYENMVVRA

SEQ ID NO: 53309 - protein, 27 aa, Artificial Sequence
  Cyclic GFR-binding peptide
  MOD_RES (27)..(27): Xaa is C or S
EPLPMVYYDEYDKVVEQLSNEMVVEGX

SEQ ID NO: 53310 - protein, 37 aa, Artificial Sequence; identical to SEQ ID NO: 20462
  Cyclic GFR-binding peptide
  MOD_RES (3)..(4)..(35)..(37): Xaa is C or S

SEQ ID NO: 53311 - protein, 30 aa, Artificial Sequence; identical to SEQ ID NO: 20463
  Cyclic GFR-binding peptide
  MOD_RES (29)..(29): Xaa is C or S

SEQ ID NO: 53312 - protein, 33 aa, Artificial Sequence; identical to SEQ ID NO: 20464
  Cyclic GFR-binding peptide
  MOD_RES (4)..(5): Xaa is C or S

SEQ ID NO: 53313 - protein, 28 aa, Artificial Sequence
  Cyclic GFR-binding peptide
PTELEPLPMVYYDENEKVVEQLSNDMVV

SEQ ID NO: 53314 - protein, 26 aa, Artificial Sequence
  Cyclic GFR-binding peptide
VPTELEPLTMLYYDENEKVVEQLSND

SEQ ID NO: 53315 - protein, 28 aa, Artificial Sequence
  Cyclic GFR-binding peptide
TELSPISMLFIDENEKVVYKQYEDMVVE

SEQ ID NO: 53316 - protein, 35 aa, Artificial Sequence; identical to SEQ ID NO: 20470
  Cyclic GFR-binding peptide
  MOD_RES (6)..(7): Xaa is C or S

SEQ ID NO: 53317 - protein, 25 aa, Artificial Sequence
  Cyclic GFR-binding peptide
PQDLSPISILFIVGRTPKVYKQYEM

SEQ ID NO: 53318 - protein, 30 aa, Artificial Sequence; identical to SEQ ID NO: 20473
  Cyclic GFR-binding peptide
  MOD_RES (2)..(2): Xaa is C or S

SEQ ID NO: 53319 - protein, 39 aa, Artificial Sequence; identical to SEQ ID NO: 20474
  Cyclic GFR-binding peptide
  MOD_RES (4)..(36)..(38): Xaa is C or S

SEQ ID NO: 53320 - protein, 30 aa, Artificial Sequence; identical to SEQ ID NO: 20476
  Cyclic GFR-binding peptide
  MOD_RES (3)..(4): Xaa is C or S

SEQ ID NO: 53321 - protein, 36 aa, Artificial Sequence; identical to SEQ ID NO: 20477
  Cyclic GFR-binding peptide
  MOD_RES (5)..(6): Xaa is C or S

SEQ ID NO: 53322 - protein, 22 aa, Artificial Sequence
  Cyclic GFR-binding peptide
EPLTILYYDSANNVVEQLSNDM

SEQ ID NO: 53323 - protein, 26 aa, Artificial Sequence
  Cyclic GFR-binding peptide
TELNAISMLYFDEYDKVVLKKYREMV

SEQ ID NO: 53324 - protein, 29 aa, Artificial Sequence
  Cyclic GFR-binding peptide
  MOD_RES (1)..(1): Xaa is C or S
XVPQALEPLTILYYVGRKPKVEQLSNMIV

SEQ ID NO: 53325 - protein, 27 aa, Artificial Sequence
  Cyclic GFR-binding peptide
TELEPLTMLYYDEYDKVVEQLSNEMVV

SEQ ID NO: 53326 - protein, 39 aa, Artificial Sequence; identical to SEQ ID NO: 20483
  Cyclic GFR-binding peptide
  MOD_RES (4)..(5)..(36)..(38): Xaa is C or S

SEQ ID NO: 53327 - protein, 33 aa, Artificial Sequence; identical to SEQ ID NO: 20484
  Cyclic GFR-binding peptide
  MOD_RES (4)..(5): Xaa is C or S

SEQ ID NO: 53328 - protein, 33 aa, Artificial Sequence; identical to SEQ ID NO: 10316
  Cyclic GFR-binding peptide
  MOD_RES (6)..(7): Xaa is C or S

SEQ ID NO: 53329 - protein, 29 aa, Artificial Sequence
  Cyclic GFR-binding peptide
APTKLEPLTVLYYDDSSNVIEQLSNNMVV

SEQ ID NO: 53330 - protein, 32 aa, Artificial Sequence; identical to SEQ ID NO: 20487
  Cyclic GFR-binding peptide
  MOD_RES (1)..(2): Xaa is C or S

SEQ ID NO: 53331 - protein, 23 aa, Artificial Sequence
  Cyclic GFR-binding peptide
TELEPLPMVYYDEYDKVVEQLSN

SEQ ID NO: 53332 - protein, 39 aa, Artificial Sequence; identical to SEQ ID NO: 20489
  Cyclic GFR-binding peptide
  MOD_RES (3)..(4)..(36)..(38): Xaa is C or S

SEQ ID NO: 53333 - protein, 24 aa, Artificial Sequence
  Cyclic GFR-binding peptide
TELNAISMLYFDENEKVVLKKYRD

SEQ ID NO: 53334 - protein, 35 aa, Artificial Sequence; identical to SEQ ID NO: 20492
  Cyclic GFR-binding peptide
  MOD_RES (32)..(34): Xaa is C or S

SEQ ID NO: 53335 - protein, 34 aa, Artificial Sequence; identical to SEQ ID NO: 20493
  Cyclic GFR-binding peptide
  MOD_RES (7)..(7): Xaa is C or S

SEQ ID NO: 53336 - protein, 36 aa, Artificial Sequence; identical to SEQ ID NO: 10325
  Cyclic GFR-binding peptide
  MOD_RES (6)..(7): Xaa is C or S

SEQ ID NO: 53337 - protein, 28 aa, Artificial Sequence
  Cyclic GFR-binding peptide
  MOD_RES (1)..(2): Xaa is C or S
XXVSQDLEPLPIVYYIGKTPKIEQLSNM

SEQ ID NO: 53338 - protein, 42 aa, Artificial Sequence; identical to SEQ ID NO: 20500
  Cyclic GFR-binding peptide
  MOD_RES (6)..(7)..(39)..(41): Xaa is C or S

SEQ ID NO: 53339 - protein, 36 aa, Artificial Sequence; identical to SEQ ID NO: 20501
  Cyclic GFR-binding peptide
  MOD_RES (1)..(33)..(35): Xaa is C or S

SEQ ID NO: 53340 - protein, 30 aa, Artificial Sequence; identical to SEQ ID NO: 20502
  Cyclic GFR-binding peptide
  MOD_RES (29)..(29): Xaa is C or S

SEQ ID NO: 53341 - protein, 34 aa, Artificial Sequence; identical to SEQ ID NO: 20504
  Cyclic GFR-binding peptide
  MOD_RES (5)..(6): Xaa is C or S

SEQ ID NO: 53342 - protein, 37 aa, Artificial Sequence; identical to SEQ ID NO: 20505
  Cyclic GFR-binding peptide
  MOD_RES (5)..(6)..(37): Xaa is C or S

SEQ ID NO: 53343 - protein, 29 aa, Artificial Sequence
  Cyclic GFR-binding peptide
  MOD_RES (3)..(4): Xaa is C or S
PTXXVPTRLEPLTILYYDSANNVVEQLSN

SEQ ID NO: 53344 - protein, 29 aa, Artificial Sequence
  Cyclic GFR-binding peptide
  MOD_RES (29)..(29): Xaa is C or S
ELEPLTMLYYDEYDKVVEQLSNEMVVEGX

SEQ ID NO: 53345 - protein, 31 aa, Artificial Sequence; identical to SEQ ID NO: 20508
  Cyclic GFR-binding peptide
  MOD_RES (1)..(1): Xaa is C or S

SEQ ID NO: 53346 - protein, 35 aa, Artificial Sequence; identical to SEQ ID NO: 20510
  Cyclic GFR-binding peptide
  MOD_RES (32)..(34): Xaa is C or S

SEQ ID NO: 53347 - protein, 28 aa, Artificial Sequence
  Cyclic GFR-binding peptide
  MOD_RES (28)..(28): Xaa is C or S
LEPLTMLYYDENEKVVEQLSNDMVVEGX

SEQ ID NO: 53348 - protein, 32 aa, Artificial Sequence; identical to SEQ ID NO: 20512
  Cyclic GFR-binding peptide
  MOD_RES (1)..(2): Xaa is C or S

SEQ ID NO: 53349 - protein, 34 aa, Artificial Sequence; identical to SEQ ID NO: 20513
  Cyclic GFR-binding peptide
  MOD_RES (5)..(6): Xaa is C or S

SEQ ID NO: 53350 - protein, 31 aa, Artificial Sequence; identical to SEQ ID NO: 20514
  Cyclic GFR-binding peptide
  MOD_RES (1)..(2): Xaa is C or S

SEQ ID NO: 53351 - protein, 29 aa, Artificial Sequence
  Cyclic GFR-binding peptide
VPTELEPLPMVYYDENEKVVEQLSNDMVV

SEQ ID NO: 53352 - protein, 22 aa, Artificial Sequence
  Cyclic GFR-binding peptide
LNAISMLYFDENEKVVLKKYRD

SEQ ID NO: 53353 - protein, 32 aa, Artificial Sequence; identical to SEQ ID NO: 20517
  Cyclic GFR-binding peptide
  MOD_RES (32)..(32): Xaa is C or S

SEQ ID NO: 53354 - protein, 24 aa, Artificial Sequence
  Cyclic GFR-binding peptide
SPISMLFIDENEKVVYKQYEDMVV

SEQ ID NO: 53355 - protein, 39 aa, Artificial Sequence; identical to SEQ ID NO: 20519
  Cyclic GFR-binding peptide
  MOD_RES (4)..(5)..(37)..(39): Xaa is C or S

SEQ ID NO: 53356 - protein, 36 aa, Artificial Sequence; identical to SEQ ID NO: 20520
  Cyclic GFR-binding peptide
  MOD_RES (5)..(5): Xaa is C or S

SEQ ID NO: 53357 - protein, 29 aa, Artificial Sequence
  Cyclic GFR-binding peptide
PTELNAISMLYFDENEKVVLKKYRDMVVE

SEQ ID NO: 53358 - protein, 33 aa, Artificial Sequence; identical to SEQ ID NO: 20523
  Cyclic GFR-binding peptide
  MOD_RES (3)..(4): Xaa is C or S

SEQ ID NO: 53359 - protein, 30 aa, Artificial Sequence; identical to SEQ ID NO: 20524
  Cyclic GFR-binding peptide
  MOD_RES (29)..(29): Xaa is C or S

SEQ ID NO: 53360 - protein, 28 aa, Artificial Sequence
  Cyclic GFR-binding peptide
  MOD_RES (28)..(28): Xaa is C or S
DLNAISILYFVGRTPKVLKKYRMVVKSX

SEQ ID NO: 53361 - protein, 22 aa, Artificial Sequence
  Cyclic GFR-binding peptide
SPISVLFIDDSSNVIYKQYENM

SEQ ID NO: 53362 - protein, 33 aa, Artificial Sequence; identical to SEQ ID NO: 20529
  Cyclic GFR-binding peptide
  MOD_RES (5)..(6): Xaa is C or S

SEQ ID NO: 53363 - protein, 34 aa, Artificial Sequence; identical to SEQ ID NO: 20530
  Cyclic GFR-binding peptide
  MOD_RES (2)..(34): Xaa is C or S

SEQ ID NO: 53364 - protein, 35 aa, Artificial Sequence; identical to SEQ ID NO: 20531
  Cyclic GFR-binding peptide
  MOD_RES (4)..(5): Xaa is C or S

SEQ ID NO: 53365 - protein, 29 aa, Artificial Sequence
  Cyclic GFR-binding peptide
  MOD_RES (2)..(2): Xaa is C or S
TXAPTKLSPISVLFIDDSSNVIYKQYENM

SEQ ID NO: 53366 - protein, 28 aa, Artificial Sequence
  Cyclic GFR-binding peptide
PTELNAISMLYFDEYDKVVLKKYREMVV

SEQ ID NO: 53367 - protein, 24 aa, Artificial Sequence
  Cyclic GFR-binding peptide
PTQLEPLPVVYYDDSSNVIEQLSN

SEQ ID NO: 53368 - protein, 29 aa, Artificial Sequence
  Cyclic GFR-binding peptide
  MOD_RES (28)..(28): Xaa is C or S
LNAISMLYFDEYDKVVLKKYREMVVEGXG

SEQ ID NO: 53369 - protein, 30 aa, Artificial Sequence; identical to SEQ ID NO: 20537
  Cyclic GFR-binding peptide
  MOD_RES (30)..(30): Xaa is C or S

SEQ ID NO: 53370 - protein, 22 aa, Artificial Sequence
  Cyclic GFR-binding peptide
EPLPIVYYVGRTPKVEQLSNMV

SEQ ID NO: 53371 - protein, 22 aa, Artificial Sequence
  Cyclic GFR-binding peptide
LEPLPIVYYDSANNVVEQLSND

SEQ ID NO: 53372 - protein, 37 aa, Artificial Sequence; identical to SEQ ID NO: 20542
  Cyclic GFR-binding peptide
  MOD_RES (2)..(3)..(34)..(36): Xaa is C or S

SEQ ID NO: 53373 - protein, 39 aa, Artificial Sequence; identical to SEQ ID NO: 20543
  Cyclic GFR-binding peptide
  MOD_RES (4)..(5)..(37)..(39): Xaa is C or S

SEQ ID NO: 53374 - protein, 29 aa, Artificial Sequence
  Cyclic GFR-binding peptide
  MOD_RES (2)..(3): Xaa is C or S
AXXVPTELEPLTMLYYDENEKVVEQLSND

SEQ ID NO: 53375 - protein, 32 aa, Artificial Sequence; identical to SEQ ID NO: 20546
  Cyclic GFR-binding peptide
  MOD_RES (2)..(3): Xaa is C or S

SEQ ID NO: 53376 - protein, 31 aa, Artificial Sequence; identical to SEQ ID NO: 20548
  Cyclic GFR-binding peptide
  MOD_RES (1)..(1): Xaa is C or S

SEQ ID NO: 53377 - protein, 31 aa, Artificial Sequence; identical to SEQ ID NO: 10394
  Cyclic GFR-binding peptide
  MOD_RES (31)..(31): Xaa is C or S

SEQ ID NO: 53378 - protein, 29 aa, Artificial Sequence
  Cyclic GFR-binding peptide
  MOD_RES (2)..(3): Xaa is C or S
PXXVPQALNAISILYFVGRKPKVLKKYRM

SEQ ID NO: 53379 - protein, 36 aa, Artificial Sequence; identical to SEQ ID NO: 20552
  Cyclic GFR-binding peptide
  MOD_RES (5)..(6): Xaa is C or S

SEQ ID NO: 53380 - protein, 33 aa, Artificial Sequence; identical to SEQ ID NO: 20553
  Cyclic GFR-binding peptide
  MOD_RES (2)..(2): Xaa is C or S

SEQ ID NO: 53381 - protein, 35 aa, Artificial Sequence; identical to SEQ ID NO: 20554
  Cyclic GFR-binding peptide
  MOD_RES (6)..(6): Xaa is C or S

SEQ ID NO: 53382 - protein, 28 aa, Artificial Sequence
  Cyclic GFR-binding peptide
SQDLSPISILFIIGKTPKIYKQYEMIVK

SEQ ID NO: 53383 - protein, 27 aa, Artificial Sequence
  Cyclic GFR-binding peptide
  MOD_RES (1)..(2): Xaa is C or S
XXVPTELEPLTMLYYDEYDKVVEQLSN

SEQ ID NO: 53384 - protein, 27 aa, Artificial Sequence
  Cyclic GFR-binding peptide
SQDLNAISILYFIGKTPKILKKYRMIV

SEQ ID NO: 53385 - protein, 25 aa, Artificial Sequence
  Cyclic GFR-binding peptide
NAISILYFIGKTPKILKKYRMIVKS

SEQ ID NO: 53386 - protein, 36 aa, Artificial Sequence; identical to SEQ ID NO: 20562
  Cyclic GFR-binding peptide
  MOD_RES (4)..(36): Xaa is C or S

SEQ ID NO: 53387 - protein, 30 aa, Artificial Sequence; identical to SEQ ID NO: 20563
  Cyclic GFR-binding peptide
  MOD_RES (4)..(5): Xaa is C or S

SEQ ID NO: 53388 - protein, 26 aa, Artificial Sequence
  Cyclic GFR-binding peptide
PTKLEPLPVVYYDDSSNVIEQLSNNM

SEQ ID NO: 53389 - protein, 28 aa, Artificial Sequence
  Cyclic GFR-binding peptide
  MOD_RES (1)..(2): Xaa is C or S
XXVSQDLSPISILFIIGKTPKIYKQYEM

SEQ ID NO: 53390 - protein, 38 aa, Artificial Sequence; identical to SEQ ID NO: 20567
  Cyclic GFR-binding peptide
  MOD_RES (5)..(37): Xaa is C or S

SEQ ID NO: 53391 - protein, 31 aa, Artificial Sequence; identical to SEQ ID NO: 20569
  Cyclic GFR-binding peptide
  MOD_RES (5)..(6): Xaa is C or S

SEQ ID NO: 53392 - protein, 33 aa, Artificial Sequence; identical to SEQ ID NO: 20571
  Cyclic GFR-binding peptide
  MOD_RES (2)..(3): Xaa is C or S

SEQ ID NO: 53393 - protein, 25 aa, Artificial Sequence
  Cyclic GFR-binding peptide
PTQLEPLPVVYYDDSSNVIEQLSNN

SEQ ID NO: 53394 - protein, 32 aa, Artificial Sequence; identical to SEQ ID NO: 20573
  Cyclic GFR-binding peptide
  MOD_RES (6)..(7): Xaa is C or S

SEQ ID NO: 53395 - protein, 28 aa, Artificial Sequence
  Cyclic GFR-binding peptide
  MOD_RES (27)..(27): Xaa is C or S
SPISMLFIDENEKVVYKQYEDMVVEGXG

SEQ ID NO: 53396 - protein, 26 aa, Artificial Sequence
  Cyclic GFR-binding peptide
ELEPLPMVYYDENEKVVEQLSNDMVV

SEQ ID NO: 53397 - protein, 40 aa, Artificial Sequence; identical to SEQ ID NO: 20577
  Cyclic GFR-binding peptide
  MOD_RES (5)..(6)..(38)..(40): Xaa is C or S

SEQ ID NO: 53398 - protein, 32 aa, Artificial Sequence; identical to SEQ ID NO: 20578
  Cyclic GFR-binding peptide
  MOD_RES (1)..(1): Xaa is C or S

SEQ ID NO: 53399 - protein, 29 aa, Artificial Sequence
  Cyclic GFR-binding peptide
  MOD_RES (1)..(2): Xaa is C or S
XXVPTELEPLTMLYYDEYDKVVEQLSNEM

SEQ ID NO: 53400 - protein, 25 aa, Artificial Sequence
  Cyclic GFR-binding peptide
VPQDLEPLPIVYYVGRTPKVEQLSN

SEQ ID NO: 53401 - protein, 26 aa, Artificial Sequence
  Cyclic GFR-binding peptide
TRLEPLPIVYYDSANNVVEQLSNDMV

SEQ ID NO: 53402 - protein, 31 aa, Artificial Sequence; identical to SEQ ID NO: 20582
  Cyclic GFR-binding peptide
  MOD_RES (30)..(30): Xaa is C or S

SEQ ID NO: 53403 - protein, 32 aa, Artificial Sequence; identical to SEQ ID NO: 10434
  Cyclic GFR-binding peptide
  MOD_RES (30)..(32): Xaa is C or S

SEQ ID NO: 53404 - protein, 30 aa, Artificial Sequence; identical to SEQ ID NO: 20585
  Cyclic GFR-binding peptide
  MOD_RES (1)..(1): Xaa is C or S

SEQ ID NO: 53405 - protein, 35 aa, Artificial Sequence; identical to SEQ ID NO: 20586
  Cyclic GFR-binding peptide
  MOD_RES (3)..(4)..(35): Xaa is C or S

SEQ ID NO: 53406 - protein, 38 aa, Artificial Sequence; identical to SEQ ID NO: 20587
  Cyclic GFR-binding peptide
  MOD_RES (4)..(5)..(36)..(38): Xaa is C or S

SEQ ID NO: 53407 - protein, 35 aa, Artificial Sequence; identical to SEQ ID NO: 20588
  Cyclic GFR-binding peptide
  MOD_RES (3)..(4): Xaa is C or S

SEQ ID NO: 53408 - protein, 31 aa, Artificial Sequence; identical to SEQ ID NO: 20589
  Cyclic GFR-binding peptide
  MOD_RES (1)..(2): Xaa is C or S

SEQ ID NO: 53409 - protein, 31 aa, Artificial Sequence; identical to SEQ ID NO: 10444
  Cyclic GFR-binding peptide
  MOD_RES (1)..(2): Xaa is C or S

SEQ ID NO: 53410 - protein, 33 aa, Artificial Sequence; identical to SEQ ID NO: 10445
  Cyclic GFR-binding peptide
  MOD_RES (4)..(5): Xaa is C or S

SEQ ID NO: 53411 - protein, 37 aa, Artificial Sequence; identical to SEQ ID NO: 20592
  Cyclic GFR-binding peptide
  MOD_RES (4)..(5)..(37): Xaa is C or S

SEQ ID NO: 53412 - protein, 27 aa, Artificial Sequence
  Cyclic GFR-binding peptide
QLSPISVLFIDDSSNVIYKQYENMVVR

SEQ ID NO: 53413 - protein, 31 aa, Artificial Sequence; identical to SEQ ID NO: 10452
  Cyclic GFR-binding peptide
  MOD_RES (29)..(31): Xaa is C or S

SEQ ID NO: 53414 - protein, 35 aa, Artificial Sequence; identical to SEQ ID NO: 20595
  Cyclic GFR-binding peptide
  MOD_RES (3)..(35): Xaa is C or S

SEQ ID NO: 53415 - protein, 27 aa, Artificial Sequence
  Cyclic GFR-binding peptide
  MOD_RES (1)..(1): Xaa is C or S
XVPTELEPLTMLYYDENEKVVEQLSND

SEQ ID NO: 53416 - protein, 29 aa, Artificial Sequence
  Cyclic GFR-binding peptide
  MOD_RES (27)..(29): Xaa is C or S
EPLPVVYYDDSSNVIEQLSNNMVVRSXGX

SEQ ID NO: 53417 - protein, 40 aa, Artificial Sequence; identical to SEQ ID NO: 20599
  Cyclic GFR-binding peptide
  MOD_RES (5)..(6)..(38)..(40): Xaa is C or S

SEQ ID NO: 53418 - protein, 38 aa, Artificial Sequence; identical to SEQ ID NO: 20600
  Cyclic GFR-binding peptide
  MOD_RES (6)..(7): Xaa is C or S

SEQ ID NO: 53419 - protein, 32 aa, Artificial Sequence; identical to SEQ ID NO: 20601
  Cyclic GFR-binding peptide
  MOD_RES (30)..(32): Xaa is C or S

SEQ ID NO: 53420 - protein, 26 aa, Artificial Sequence
  Cyclic GFR-binding peptide
VPTRLEPLTILYYDSANNVVEQLSND

SEQ ID NO: 53421 - protein, 26 aa, Artificial Sequence
  Cyclic GFR-binding peptide
APTKLEPLTVLYYDDSSNVIEQLSNN

SEQ ID NO: 53422 - protein, 31 aa, Artificial Sequence; identical to SEQ ID NO: 20605
  Cyclic GFR-binding peptide
  MOD_RES (5)..(6): Xaa is C or S

SEQ ID NO: 53423 - protein, 30 aa, Artificial Sequence; identical to SEQ ID NO: 20606
  Cyclic GFR-binding peptide

SEQ ID NO: 53424 - protein, 31 aa, Artificial Sequence; identical to SEQ ID NO: 20607
  Cyclic GFR-binding peptide

SEQ ID NO: 53425 - protein, 37 aa, Artificial Sequence; identical to SEQ ID NO: 20608
  Cyclic GFR-binding peptide
  MOD_RES (4)..(5)..(37): Xaa is C or S

SEQ ID NO: 53426 - protein, 31 aa, Artificial Sequence; identical to SEQ ID NO: 20609
  Cyclic GFR-binding peptide
  MOD_RES (29)..(31): Xaa is C or S

SEQ ID NO: 53427 - protein, 38 aa, Artificial Sequence; identical to SEQ ID NO: 20611
  Cyclic GFR-binding peptide
  MOD_RES (5)..(6)..(38): Xaa is C or S

SEQ ID NO: 53428 - protein, 35 aa, Artificial Sequence; identical to SEQ ID NO: 20613
  Cyclic GFR-binding peptide
  MOD_RES (4)..(5): Xaa is C or S

SEQ ID NO: 53429 - protein, 33 aa, Artificial Sequence; identical to SEQ ID NO: 20614
  Cyclic GFR-binding peptide
  MOD_RES (2)..(3): Xaa is C or S

SEQ ID NO: 53430 - protein, 36 aa, Artificial Sequence; identical to SEQ ID NO: 20615
  Cyclic GFR-binding peptide
  MOD_RES (2)..(3)..(35): Xaa is C or S

SEQ ID NO: 53431 - protein, 36 aa, Artificial Sequence; identical to SEQ ID NO: 20616
  Cyclic GFR-binding peptide
  MOD_RES (6)..(7): Xaa is C or S

SEQ ID NO: 53432 - protein, 30 aa, Artificial Sequence; identical to SEQ ID NO: 20617
  Cyclic GFR-binding peptide
  MOD_RES (30)..(30): Xaa is C or S

SEQ ID NO: 53433 - protein, 23 aa, Artificial Sequence
  Cyclic GFR-binding peptide
TELEPLTMLYYDENEKVVEQLSN

SEQ ID NO: 53434 - protein, 32 aa, Artificial Sequence; identical to SEQ ID NO: 20619
  Cyclic GFR-binding peptide
  MOD_RES (2)..(3): Xaa is C or S

SEQ ID NO: 53435 - protein, 36 aa, Artificial Sequence; identical to SEQ ID NO: 20620
  Cyclic GFR-binding peptide
  MOD_RES (2)..(3)..(35): Xaa is C or S

SEQ ID NO: 53436 - protein, 29 aa, Artificial Sequence
  Cyclic GFR-binding peptide
PTELEPLTMLYYDEYDKVVEQLSNEMVVE

SEQ ID NO: 53437 - protein, 26 aa, Artificial Sequence
  Cyclic GFR-binding peptide
VPQALNAISILYFVGRKPKVLKKYRM

SEQ ID NO: 53438 - protein, 36 aa, Artificial Sequence; identical to SEQ ID NO: 20624
  Cyclic GFR-binding peptide
  MOD_RES (5)..(5): Xaa is C or S

SEQ ID NO: 53439 - protein, 40 aa, Artificial Sequence; identical to SEQ ID NO: 20625
  Cyclic GFR-binding peptide
  MOD_RES (5)..(6)..(37)..(39): Xaa is C or S

SEQ ID NO: 53440 - protein, 22 aa, Artificial Sequence
  Cyclic GFR-binding peptide
KLEPLTVLYYDDSSNVIEQLSN

SEQ ID NO: 53441 - protein, 40 aa, Artificial Sequence; identical to SEQ ID NO: 20628
  Cyclic GFR-binding peptide
  MOD_RES (6)..(7)..(39): Xaa is C or S

SEQ ID NO: 53442 - protein, 28 aa, Artificial Sequence
  Cyclic GFR-binding peptide
QLEPLPVVYYDDSSNVIEQLSNNMVVRA

SEQ ID NO: 53443 - protein, 29 aa, Artificial Sequence
  Cyclic GFR-binding peptide
  MOD_RES (2)..(3): Xaa is C or S
PXXVSQDLSPISILFIIGKTPKIYKQYEM

SEQ ID NO: 53444 - protein, 34 aa, Artificial Sequence; identical to SEQ ID NO: 20631
  Cyclic GFR-binding peptide
  MOD_RES (2)..(3): Xaa is C or S

SEQ ID NO: 53445 - protein, 38 aa, Artificial Sequence; identical to SEQ ID NO: 20632
  Cyclic GFR-binding peptide
  MOD_RES (4)..(5)..(37): Xaa is C or S

SEQ ID NO: 53446 - protein, 33 aa, Artificial Sequence; identical to SEQ ID NO: 20633
  Cyclic GFR-binding peptide
  MOD_RES (6)..(7): Xaa is C or S

SEQ ID NO: 53447 - protein, 32 aa, Artificial Sequence; identical to SEQ ID NO: 20634
  Cyclic GFR-binding peptide
  MOD_RES (4)..(4): Xaa is C or S

SEQ ID NO: 53448 - protein, 33 aa, Artificial Sequence; identical to SEQ ID NO: 20635
  Cyclic GFR-binding peptide
  MOD_RES (6)..(7): Xaa is C or S

SEQ ID NO: 53449 - protein, 37 aa, Artificial Sequence; identical to SEQ ID NO: 20636
  Cyclic GFR-binding peptide
  MOD_RES (1)..(2)..(34)..(36): Xaa is C or S

SEQ ID NO: 53450 - protein, 31 aa, Artificial Sequence; identical to SEQ ID NO: 20638
  Cyclic GFR-binding peptide

SEQ ID NO: 53451 - protein, 36 aa, Artificial Sequence; identical to SEQ ID NO: 20639
  Cyclic GFR-binding peptide
  MOD_RES (6)..(7): Xaa is C or S

SEQ ID NO: 53452 - protein, 25 aa, Artificial Sequence
  Cyclic GFR-binding peptide
PTQLSPISVLFIDDSSNVIYKQYEN

SEQ ID NO: 53453 - protein, 30 aa, Artificial Sequence; identical to SEQ ID NO: 20641
  Cyclic GFR-binding peptide
  MOD_RES (3)..(4): Xaa is C or S

SEQ ID NO: 53454 - protein, 29 aa, Artificial Sequence
  Cyclic GFR-binding peptide
  MOD_RES (29)..(29): Xaa is C or S
QDLEPLPIVYYIGKTPKIEQLSNMIVKSX

SEQ ID NO: 53455 - protein, 30 aa, Artificial Sequence; identical to SEQ ID NO: 20643
  Cyclic GFR-binding peptide
  MOD_RES (28)..(30): Xaa is C or S

SEQ ID NO: 53456 - protein, 25 aa, Artificial Sequence
  Cyclic GFR-binding peptide
DLNAISILYFIGKTPKILKKYRMIV

SEQ ID NO: 53457 - protein, 27 aa, Artificial Sequence
  Cyclic GFR-binding peptide
VPTELEPLPMVYYDENEKVVEQLSNDM

SEQ ID NO: 53458 - protein, 37 aa, Artificial Sequence; identical to SEQ ID NO: 20648
  Cyclic GFR-binding peptide
  MOD_RES (5)..(6): Xaa is C or S

SEQ ID NO: 53459 - protein, 27 aa, Artificial Sequence
  Cyclic GFR-binding peptide
VPTELSPISMLFIDEYDKVVYKQYEEM

SEQ ID NO: 53460 - protein, 29 aa, Artificial Sequence
  Cyclic GFR-binding peptide
  MOD_RES (1)..(1): Xaa is C or S
XVSQDLNAISILYFIGKTPKILKKYRMIV

SEQ ID NO: 53461 - protein, 25 aa, Artificial Sequence
  Cyclic GFR-binding peptide
PQDLEPLPIVYYVGRTPKVEQLSNM

SEQ ID NO: 53462 - protein, 26 aa, Artificial Sequence
  Cyclic GFR-binding peptide
PQDLNAISILYFVGRTPKVLKKYRMV

SEQ ID NO: 53463 - protein, 31 aa, Artificial Sequence; identical to SEQ ID NO: 20653
  Cyclic GFR-binding peptide
  MOD_RES (1)..(1): Xaa is C or S

SEQ ID NO: 53464 - protein, 26 aa, Artificial Sequence
  Cyclic GFR-binding peptide
DLEPLPIVYYIGKTPKIEQLSNMIVK

SEQ ID NO: 53465 - protein, 36 aa, Artificial Sequence; identical to SEQ ID NO: 20655
  Cyclic GFR-binding peptide
  MOD_RES (1)..(2)..(34)..(36): Xaa is C or S

SEQ ID NO: 53466 - protein, 28 aa, Artificial Sequence
  Cyclic GFR-binding peptide
  MOD_RES (26)..(28): Xaa is C or S
SPISILFIVGRKPKVYKQYEMIVRSXKX

SEQ ID NO: 53467 - protein, 26 aa, Artificial Sequence
  Cyclic GFR-binding peptide
PTELEPLPMVYYDENEKVVEQLSNDM

SEQ ID NO: 53468 - protein, 33 aa, Artificial Sequence; identical to SEQ ID NO: 20660
  Cyclic GFR-binding peptide
  MOD_RES (4)..(5): Xaa is C or S

SEQ ID NO: 53469 - protein, 34 aa, Artificial Sequence; identical to SEQ ID NO: 20661
  Cyclic GFR-binding peptide
  MOD_RES (6)..(7): Xaa is C or S

SEQ ID NO: 53470 - protein, 27 aa, Artificial Sequence
  Cyclic GFR-binding peptide
  MOD_RES (1)..(2): Xaa is C or S
XXVPTRLEPLPIVYYDSANNVVEQLSN

SEQ ID NO: 53471 - protein, 28 aa, Artificial Sequence
  Cyclic GFR-binding peptide
  MOD_RES (2)..(3): Xaa is C or S
PXXVPQDLNAISILYFVGRTPKVLKKYR

SEQ ID NO: 53472 - protein, 23 aa, Artificial Sequence
  Cyclic GFR-binding peptide
LEPLPMVYYDENEKVVEQLSNDM

SEQ ID NO: 53473 - protein, 34 aa, Artificial Sequence; identical to SEQ ID NO: 10515
  Cyclic GFR-binding peptide
  MOD_RES (31)..(33): Xaa is C or S

SEQ ID NO: 53474 - protein, 29 aa, Artificial Sequence
  Cyclic GFR-binding peptide
  MOD_RES (1)..(1): Xaa is C or S
XVPQDLEPLPIVYYVGRTPKVEQLSNMVV

SEQ ID NO: 53475 - protein, 34 aa, Artificial Sequence; identical to SEQ ID NO: 20669
  Cyclic GFR-binding peptide
  MOD_RES (2)..(3)..(34): Xaa is C or S

SEQ ID NO: 53476 - protein, 37 aa, Artificial Sequence; identical to SEQ ID NO: 20671
  Cyclic GFR-binding peptide
  MOD_RES (6)..(7): Xaa is C or S

SEQ ID NO: 53477 - protein, 32 aa, Artificial Sequence; identical to SEQ ID NO: 20672
  Cyclic GFR-binding peptide
  MOD_RES (30)..(32): Xaa is C or S

SEQ ID NO: 53478 - protein, 30 aa, Artificial Sequence; identical to SEQ ID NO: 10522
  Cyclic GFR-binding peptide
  MOD_RES (28)..(30): Xaa is C or S

SEQ ID NO: 53479 - protein, 22 aa, Artificial Sequence
  Cyclic GFR-binding peptide
EPLPMVYYDEYDKVVEQLSNEM

SEQ ID NO: 53480 - protein, 37 aa, Artificial Sequence; identical to SEQ ID NO: 20675
  Cyclic GFR-binding peptide
  MOD_RES (1)..(2)..(34)..(36): Xaa is C or S

SEQ ID NO: 53481 - protein, 29 aa, Artificial Sequence
  Cyclic GFR-binding peptide
  MOD_RES (28)..(28): Xaa is C or S
LSPISMLFIDENEKVVYKQYEDMVVEGXG

SEQ ID NO: 53482 - protein, 26 aa, Artificial Sequence
  Cyclic GFR-binding peptide
LNAISILYFIGKTPKILKKYRMIVKS

SEQ ID NO: 53483 - protein, 27 aa, Artificial Sequence
  Cyclic GFR-binding peptide
  MOD_RES (1)..(1): Xaa is C or S
XVPTELEPLPMVYYDENEKVVEQLSND

SEQ ID NO: 53484 - protein, 36 aa, Artificial Sequence; identical to SEQ ID NO: 20680
  Cyclic GFR-binding peptide
  MOD_RES (1)..(2)..(34)..(36): Xaa is C or S

SEQ ID NO: 53485 - protein, 26 aa, Artificial Sequence
  Cyclic GFR-binding peptide
EPLTMLYYDENEKVVEQLSNDMVVEG

SEQ ID NO: 53486 - protein, 38 aa, Artificial Sequence; identical to SEQ ID NO: 20682
  Cyclic GFR-binding peptide
  MOD_RES (5)..(6)..(37): Xaa is C or S

SEQ ID NO: 53487 - protein, 38 aa, Artificial Sequence; identical to SEQ ID NO: 20683
  Cyclic GFR-binding peptide
  MOD_RES (5)..(6)..(38): Xaa is C or S

SEQ ID NO: 53488 - protein, 34 aa, Artificial Sequence; identical to SEQ ID NO: 20684
  Cyclic GFR-binding peptide
  MOD_RES (1)..(33): Xaa is C or S

SEQ ID NO: 53489 - protein, 37 aa, Artificial Sequence; identical to SEQ ID NO: 20685
  Cyclic GFR-binding peptide
  MOD_RES (5)..(6)..(37): Xaa is C or S

SEQ ID NO: 53490 - protein, 29 aa, Artificial Sequence
  Cyclic GFR-binding peptide
VPTELEPLPMVYYDEYDKVVEQLSNEMVV

SEQ ID NO: 53491 - protein, 34 aa, Artificial Sequence; identical to SEQ ID NO: 20688
  Cyclic GFR-binding peptide
  MOD_RES (3)..(4): Xaa is C or S

SEQ ID NO: 53492 - protein, 26 aa, Artificial Sequence
  Cyclic GFR-binding peptide
TELNAISMLYFDENEKVVLKKYRDMV

SEQ ID NO: 53493 - protein, 28 aa, Artificial Sequence
  Cyclic GFR-binding peptide
TRLEPLPIVYYDSANNVVEQLSNDMVVE

SEQ ID NO: 53494 - protein, 29 aa, Artificial Sequence
  Cyclic GFR-binding peptide
  MOD_RES (1)..(1): Xaa is C or S
XVSQDLEPLPIVYYIGKTPKIEQLSNMIV

SEQ ID NO: 53495 - protein, 39 aa, Artificial Sequence; identical to SEQ ID NO: 20692
  Cyclic GFR-binding peptide
  MOD_RES (5)..(6)..(38): Xaa is C or S

SEQ ID NO: 53496 - protein, 31 aa, Artificial Sequence; identical to SEQ ID NO: 20693
  Cyclic GFR-binding peptide
  MOD_RES (31)..(31): Xaa is C or S

SEQ ID NO: 53497 - protein, 21 aa, Artificial Sequence
  Cyclic GFR-binding peptide
SPISMLFIDENEKVVYKQYED

SEQ ID NO: 53498 - protein, 38 aa, Artificial Sequence; identical to SEQ ID NO: 20695
  Cyclic GFR-binding peptide
  MOD_RES (4)..(5)..(37): Xaa is C or S

SEQ ID NO: 53499 - protein, 31 aa, Artificial Sequence; identical to SEQ ID NO: 20696
  Cyclic GFR-binding peptide
  MOD_RES (4)..(5): Xaa is C or S

SEQ ID NO: 53500 - protein, 30 aa, Artificial Sequence; identical to SEQ ID NO: 20697
  Cyclic GFR-binding peptide
  MOD_RES (28)..(30): Xaa is C or S

SEQ ID NO: 53501 - protein, 34 aa, Artificial Sequence; identical to SEQ ID NO: 20699
  Cyclic GFR-binding peptide
  MOD_RES (1)..(33): Xaa is C or S

SEQ ID NO: 53502 - protein, 35 aa, Artificial Sequence; identical to SEQ ID NO: 20700
  Cyclic GFR-binding peptide
  MOD_RES (3)..(4): Xaa is C or S

SEQ ID NO: 53503 - protein, 32 aa, Artificial Sequence; identical to SEQ ID NO: 20701
  Cyclic GFR-binding peptide
  MOD_RES (5)..(6): Xaa is C or S

SEQ ID NO: 53504 - protein, 32 aa, Artificial Sequence; identical to SEQ ID NO: 20703
  Cyclic GFR-binding peptide
  MOD_RES (2)..(3): Xaa is C or S

SEQ ID NO: 53505 - protein, 33 aa, Artificial Sequence; identical to SEQ ID NO: 10579
  Cyclic GFR-binding peptide
  MOD_RES (5)..(6): Xaa is C or S

SEQ ID NO: 53506 - protein, 35 aa, Artificial Sequence; identical to SEQ ID NO: 20705
  Cyclic GFR-binding peptide
  MOD_RES (5)..(6): Xaa is C or S

SEQ ID NO: 53507 - protein, 34 aa, Artificial Sequence; identical to SEQ ID NO: 20706
  Cyclic GFR-binding peptide
  MOD_RES (1)..(2)..(34): Xaa is C or S

SEQ ID NO: 53508 - protein, 38 aa, Artificial Sequence; identical to SEQ ID NO: 10582
  Cyclic GFR-binding peptide
  MOD_RES (5)..(6)..(37): Xaa is C or S

SEQ ID NO: 53509 - protein, 25 aa, Artificial Sequence
  Cyclic GFR-binding peptide
NAISILYFVGRKPKVLKKYRMIVRS

SEQ ID NO: 53510 - protein, 25 aa, Artificial Sequence
  Cyclic GFR-binding peptide
TELSPISMLFIDENEKVVYKQYEDM

SEQ ID NO: 53511 - protein, 24 aa, Artificial Sequence
  Cyclic GFR-binding peptide
TQLEPLPVVYYDDSSNVIEQLSNN

SEQ ID NO: 53512 - protein, 36 aa, Artificial Sequence; identical to SEQ ID NO: 10590
  Cyclic GFR-binding peptide
  MOD_RES (1)..(33)..(35): Xaa is C or S

SEQ ID NO: 53513 - protein, 31 aa, Artificial Sequence; identical to SEQ ID NO: 10591
  Cyclic GFR-binding peptide
  MOD_RES (29)..(31): Xaa is C or S

SEQ ID NO: 53514 - protein, 31 aa, Artificial Sequence; identical to SEQ ID NO: 20715
  Cyclic GFR-binding peptide
  MOD_RES (5)..(6): Xaa is C or S

SEQ ID NO: 53515 - protein, 37 aa, Artificial Sequence; identical to SEQ ID NO: 10593
  Cyclic GFR-binding peptide
  MOD_RES (4)..(5)..(36): Xaa is C or S

SEQ ID NO: 53516 - protein, 34 aa, Artificial Sequence; identical to SEQ ID NO: 10595
  Cyclic GFR-binding peptide
  MOD_RES (3)..(4): Xaa is C or S

SEQ ID NO: 53517 - protein, 41 aa, Artificial Sequence; identical to SEQ ID NO: 20718
  Cyclic GFR-binding peptide
  MOD_RES (6)..(7)..(39)..(41): Xaa is C or S

SEQ ID NO: 53518 - protein, 30 aa, Artificial Sequence; identical to SEQ ID NO: 20719
  Cyclic GFR-binding peptide
  MOD_RES (28)..(30): Xaa is C or S

SEQ ID NO: 53519 - protein, 30 aa, Artificial Sequence; identical to SEQ ID NO: 10596
  Cyclic GFR-binding peptide
  MOD_RES (29)..(29): Xaa is C or S

SEQ ID NO: 53520 - protein, 32 aa, Artificial Sequence; identical to SEQ ID NO: 20722
  Cyclic GFR-binding peptide
  MOD_RES (1)..(2): Xaa is C or S

SEQ ID NO: 53521 - protein, 29 aa, Artificial Sequence
  Cyclic GFR-binding peptide
  MOD_RES (28)..(28): Xaa is C or S
DLEPLPIVYYIGKTPKIEQLSNMIVKSXK

SEQ ID NO: 53522 - protein, 38 aa, Artificial Sequence; identical to SEQ ID NO: 20724
  Cyclic GFR-binding peptide
  MOD_RES (6)..(38): Xaa is C or S

SEQ ID NO: 53523 - protein, 33 aa, Artificial Sequence; identical to SEQ ID NO: 10604
  Cyclic GFR-binding peptide
  MOD_RES (3)..(4): Xaa is C or S

SEQ ID NO: 53524 - protein, 20 aa, Artificial Sequence
  Cyclic GFR-binding peptide
EPLTMLYYDEYDKVVEQLSN

SEQ ID NO: 53525 - protein, 36 aa, Artificial Sequence; identical to SEQ ID NO: 20728
  Cyclic GFR-binding peptide
  MOD_RES (5)..(6): Xaa is C or S

SEQ ID NO: 53526 - protein, 31 aa, Artificial Sequence; identical to SEQ ID NO: 20729
  Cyclic GFR-binding peptide
  MOD_RES (30)..(30): Xaa is C or S

SEQ ID NO: 53527 - protein, 30 aa, Artificial Sequence; identical to SEQ ID NO: 20731
  Cyclic GFR-binding peptide
  MOD_RES (2)..(2): Xaa is C or S

SEQ ID NO: 53528 - protein, 27 aa, Artificial Sequence
  Cyclic GFR-binding peptide
PTKLEPLPVVYYDDSSNVIEQLSNNMV

SEQ ID NO: 53529 - protein, 28 aa, Artificial Sequence
  Cyclic GFR-binding peptide
  MOD_RES (27)..(27): Xaa is C or S
LEPLPIVYYVGRTPKVEQLSNMVVKSXK

SEQ ID NO: 53530 - protein, 38 aa, Artificial Sequence; identical to SEQ ID NO: 20734
  Cyclic GFR-binding peptide
  MOD_RES (2)..(3)..(35)..(37): Xaa is C or S

SEQ ID NO: 53531 - protein, 21 aa, Artificial Sequence
  Cyclic GFR-binding peptide
EPLPVVYYDDSSNVIEQLSNN

SEQ ID NO: 53532 - protein, 41 aa, Artificial Sequence; identical to SEQ ID NO: 10613
  Cyclic GFR-binding peptide
  MOD_RES (6)..(7)..(38)..(40): Xaa is C or S

SEQ ID NO: 53533 - protein, 36 aa, Artificial Sequence; identical to SEQ ID NO: 20737
  Cyclic GFR-binding peptide
  MOD_RES (3)..(4)..(36): Xaa is C or S

SEQ ID NO: 53534 - protein, 30 aa, Artificial Sequence; identical to SEQ ID NO: 20738
  Cyclic GFR-binding peptide

SEQ ID NO: 53535 - protein, 31 aa, Artificial Sequence; identical to SEQ ID NO: 10615
  Cyclic GFR-binding peptide
  MOD_RES (2)..(3): Xaa is C or S

SEQ ID NO: 53536 - protein, 32 aa, Artificial Sequence; identical to SEQ ID NO: 20741
  Cyclic GFR-binding peptide
  MOD_RES (3)..(4): Xaa is C or S

SEQ ID NO: 53537 - protein, 30 aa, Artificial Sequence; identical to SEQ ID NO: 10617
  Cyclic GFR-binding peptide
  MOD_RES (28)..(30): Xaa is C or S

SEQ ID NO: 53538 - protein, 26 aa, Artificial Sequence
  Cyclic GFR-binding peptide
  MOD_RES (1)..(1): Xaa is C or S
XAPTKLEPLTVLYYDDSSNVIEQLSN

SEQ ID NO: 53539 - protein, 39 aa, Artificial Sequence; identical to SEQ ID NO: 10618
  Cyclic GFR-binding peptide
  MOD_RES (4)..(5)..(36)..(38): Xaa is C or S

SEQ ID NO: 53540 - protein, 37 aa, Artificial Sequence; identical to SEQ ID NO: 20747
  Cyclic GFR-binding peptide
  MOD_RES (1)..(2)..(34)..(36): Xaa is C or S

SEQ ID NO: 53541 - protein, 36 aa, Artificial Sequence; identical to SEQ ID NO: 20748
  Cyclic GFR-binding peptide
  MOD_RES (6)..(7): Xaa is C or S

SEQ ID NO: 53542 - protein, 27 aa, Artificial Sequence
  Cyclic GFR-binding peptide
PQALSPISILFIVGRKPKVYKQYEMIV

SEQ ID NO: 53543 - protein, 33 aa, Artificial Sequence; identical to SEQ ID NO: 20750
  Cyclic GFR-binding peptide
  MOD_RES (1)..(33): Xaa is C or S

SEQ ID NO: 53544 - protein, 36 aa, Artificial Sequence; identical to SEQ ID NO: 20751
  Cyclic GFR-binding peptide
  MOD_RES (1)..(2)..(34)..(36): Xaa is C or S

SEQ ID NO: 53545 - protein, 38 aa, Artificial Sequence; identical to SEQ ID NO: 20752
  Cyclic GFR-binding peptide
  MOD_RES (6)..(7)..(38): Xaa is C or S

SEQ ID NO: 53546 - protein, 33 aa, Artificial Sequence; identical to SEQ ID NO: 20753
  Cyclic GFR-binding peptide
  MOD_RES (31)..(33): Xaa is C or S

SEQ ID NO: 53547 - protein, 24 aa, Artificial Sequence
  Cyclic GFR-binding peptide
ELEPLTMLYYDENEKVVEQLSNDM

SEQ ID NO: 53548 - protein, 30 aa, Artificial Sequence; identical to SEQ ID NO: 20756
  Cyclic GFR-binding peptide
  MOD_RES (28)..(30): Xaa is C or S

SEQ ID NO: 53549 - protein, 31 aa, Artificial Sequence; identical to SEQ ID NO: 20757
  Cyclic GFR-binding peptide

SEQ ID NO: 53550 - protein, 30 aa, Artificial Sequence; identical to SEQ ID NO: 20758
  Cyclic GFR-binding peptide
  MOD_RES (4)..(4): Xaa is C or S

SEQ ID NO: 53551 - protein, 25 aa, Artificial Sequence
  Cyclic GFR-binding peptide
TKLSPISVLFIDDSSNVIYKQYENM

SEQ ID NO: 53552 - protein, 37 aa, Artificial Sequence; identical to SEQ ID NO: 20760
  Cyclic GFR-binding peptide
  MOD_RES (2)..(3)..(34)..(36): Xaa is C or S

SEQ ID NO: 53553 - protein, 35 aa, Artificial Sequence; identical to SEQ ID NO: 20761
  Cyclic GFR-binding peptide
  MOD_RES (4)..(5): Xaa is C or S

SEQ ID NO: 53554 - protein, 40 aa, Artificial Sequence; identical to SEQ ID NO: 20762
  Cyclic GFR-binding peptide
  MOD_RES (4)..(5)..(37)..(39): Xaa is C or S

SEQ ID NO: 53555 - protein, 40 aa, Artificial Sequence; identical to SEQ ID NO: 10629
  Cyclic GFR-binding peptide
  MOD_RES (5)..(6)..(38)..(40): Xaa is C or S

SEQ ID NO: 53556 - protein, 29 aa, Artificial Sequence
  Cyclic GFR-binding peptide
  MOD_RES (27)..(29): Xaa is C or S
NAISILYFDSANNVVLKKYRDMVVESXGX

SEQ ID NO: 53557 - protein, 26 aa, Artificial Sequence
  Cyclic GFR-binding peptide
EPLPMVYYDENEKVVEQLSNDMVVEG

SEQ ID NO: 53558 - protein, 30 aa, Artificial Sequence; identical to SEQ ID NO: 20766
  Cyclic GFR-binding peptide
  MOD_RES (3)..(3): Xaa is C or S

SEQ ID NO: 53559 - protein, 29 aa, Artificial Sequence
  Cyclic GFR-binding peptide
  MOD_RES (3)..(4): Xaa is C or S
KAXXVPTELEPLPMVYYDENEKVVEQLSN

SEQ ID NO: 53560 - protein, 37 aa, Artificial Sequence; identical to SEQ ID NO: 20768
  Cyclic GFR-binding peptide
  MOD_RES (4)..(5)..(36): Xaa is C or S

SEQ ID NO: 53561 - protein, 31 aa, Artificial Sequence; identical to SEQ ID NO: 20769
  Cyclic GFR-binding peptide
  MOD_RES (1)..(1): Xaa is C or S

SEQ ID NO: 53562 - protein, 35 aa, Artificial Sequence; identical to SEQ ID NO: 20770
  Cyclic GFR-binding peptide
  MOD_RES (32)..(34): Xaa is C or S

SEQ ID NO: 53563 - protein, 34 aa, Artificial Sequence; identical to SEQ ID NO: 20771
  Cyclic GFR-binding peptide
  MOD_RES (2)..(3): Xaa is C or S

SEQ ID NO: 53564 - protein, 40 aa, Artificial Sequence; identical to SEQ ID NO: 20772
  Cyclic GFR-binding peptide
  MOD_RES (5)..(6)..(38)..(40): Xaa is C or S

SEQ ID NO: 53565 - protein, 31 aa, Artificial Sequence; identical to SEQ ID NO: 10640
  Cyclic GFR-binding peptide
  MOD_RES (29)..(31): Xaa is C or S

SEQ ID NO: 53566 - protein, 40 aa, Artificial Sequence; identical to SEQ ID NO: 20775
  Cyclic GFR-binding peptide
  MOD_RES (5)..(6)..(38)..(40): Xaa is C or S

SEQ ID NO: 53567 - protein, 34 aa, Artificial Sequence; identical to SEQ ID NO: 20777
  Cyclic GFR-binding peptide
  MOD_RES (1)..(2)..(33): Xaa is C or S

SEQ ID NO: 53568 - protein, 29 aa, Artificial Sequence
  Cyclic GFR-binding peptide
  MOD_RES (27)..(29): Xaa is C or S
EPLTILYYDSANNVVEQLSNDMVVESXGX

SEQ ID NO: 53569 - protein, 23 aa, Artificial Sequence
  Cyclic GFR-binding peptide
SPISILFIVGRKPKVYKQYEMIV

SEQ ID NO: 53570 - protein, 33 aa, Artificial Sequence; identical to SEQ ID NO: 10651
  Cyclic GFR-binding peptide
  MOD_RES (31)..(33): Xaa is C or S

SEQ ID NO: 53571 - protein, 37 aa, Artificial Sequence; identical to SEQ ID NO: 20781
  Cyclic GFR-binding peptide
  MOD_RES (5)..(6): Xaa is C or S

SEQ ID NO: 53572 - protein, 34 aa, Artificial Sequence; identical to SEQ ID NO: 20782
  Cyclic GFR-binding peptide
  MOD_RES (1)..(2)..(34): Xaa is C or S

SEQ ID NO: 53573 - protein, 41 aa, Artificial Sequence; identical to SEQ ID NO: 20783
  Cyclic GFR-binding peptide
  MOD_RES (6)..(38)..(40): Xaa is C or S

SEQ ID NO: 53574 - protein, 39 aa, Artificial Sequence; identical to SEQ ID NO: 20784
  Cyclic GFR-binding peptide
  MOD_RES (5)..(6)..(38): Xaa is C or S

SEQ ID NO: 53575 - protein, 31 aa, Artificial Sequence; identical to SEQ ID NO: 20785
  Cyclic GFR-binding peptide
  MOD_RES (3)..(4): Xaa is C or S

SEQ ID NO: 53576 - protein, 39 aa, Artificial Sequence; identical to SEQ ID NO: 20786
  Cyclic GFR-binding peptide
  MOD_RES (5)..(6)..(38): Xaa is C or S

SEQ ID NO: 53577 - protein, 38 aa, Artificial Sequence; identical to SEQ ID NO: 20787
  Cyclic GFR-binding peptide
  MOD_RES (2)..(3)..(35)..(37): Xaa is C or S

SEQ ID NO: 53578 - protein, 27 aa, Artificial Sequence
  Cyclic GFR-binding peptide
  MOD_RES (1)..(1): Xaa is C or S
XVPQDLNAISILYFVGRTPKVLKKYRM

SEQ ID NO: 53579 - protein, 30 aa, Artificial Sequence; identical to SEQ ID NO: 20792
  Cyclic GFR-binding peptide
  MOD_RES (2)..(3): Xaa is C or S

SEQ ID NO: 53580 - protein, 36 aa, Artificial Sequence; identical to SEQ ID NO: 20793
  Cyclic GFR-binding peptide
  MOD_RES (5)..(6): Xaa is C or S

SEQ ID NO: 53581 - protein, 28 aa, Artificial Sequence
  Cyclic GFR-binding peptide
ELSPISMLFIDENEKVVYKQYEDMVVEG

SEQ ID NO: 53582 - protein, 30 aa, Artificial Sequence; identical to SEQ ID NO: 20797
  Cyclic GFR-binding peptide
  MOD_RES (1)..(2): Xaa is C or S

SEQ ID NO: 53583 - protein, 35 aa, Artificial Sequence; identical to SEQ ID NO: 20800
  Cyclic GFR-binding peptide
  MOD_RES (32)..(34): Xaa is C or S

SEQ ID NO: 53584 - protein, 33 aa, Artificial Sequence; identical to SEQ ID NO: 20801
  Cyclic GFR-binding peptide
  MOD_RES (3)..(4): Xaa is C or S

SEQ ID NO: 53585 - protein, 35 aa, Artificial Sequence; identical to SEQ ID NO: 10685
  Cyclic GFR-binding peptide
  MOD_RES (1)..(33)..(35): Xaa is C or S

SEQ ID NO: 53586 - protein, 34 aa, Artificial Sequence; identical to SEQ ID NO: 20803
  Cyclic GFR-binding peptide
  MOD_RES (5)..(6): Xaa is C or S

SEQ ID NO: 53587 - protein, 33 aa, Artificial Sequence; identical to SEQ ID NO: 10686
  Cyclic GFR-binding peptide
  MOD_RES (5)..(6): Xaa is C or S

SEQ ID NO: 53588 - protein, 25 aa, Artificial Sequence
  Cyclic GFR-binding peptide
SPISILFIVGRTPKVYKQYEMVVKS

SEQ ID NO: 53589 - protein, 37 aa, Artificial Sequence; identical to SEQ ID NO: 10693
  Cyclic GFR-binding peptide
  MOD_RES (3)..(4)..(36): Xaa is C or S

SEQ ID NO: 53590 - protein, 32 aa, Artificial Sequence; identical to SEQ ID NO: 20808
  Cyclic GFR-binding peptide
  MOD_RES (32)..(32): Xaa is C or S

SEQ ID NO: 53591 - protein, 27 aa, Artificial Sequence
  Cyclic GFR-binding peptide
PTELNAISMLYFDENEKVVLKKYRDMV

SEQ ID NO: 53592 - protein, 28 aa, Artificial Sequence
  Cyclic GFR-binding peptide
  MOD_RES (27)..(27): Xaa is C or S
SPISVLFIDDSSNVIYKQYENMVVRSXG

SEQ ID NO: 53593 - protein, 28 aa, Artificial Sequence
  Cyclic GFR-binding peptide
  MOD_RES (28)..(28): Xaa is C or S
LSPISVLFIDDSSNVIYKQYENMVVRAX

SEQ ID NO: 53594 - protein, 27 aa, Artificial Sequence
  Cyclic GFR-binding peptide
  MOD_RES (27)..(27): Xaa is C or S
LNAISILYFIGKTPKILKKYRMIVKSX

SEQ ID NO: 53595 - protein, 24 aa, Artificial Sequence
  Cyclic GFR-binding peptide
TRLNAISILYFDSANNVVLKKYRD

SEQ ID NO: 53596 - protein, 35 aa, Artificial Sequence; identical to SEQ ID NO: 10700
  Cyclic GFR-binding peptide
  MOD_RES (3)..(4)..(35): Xaa is C or S

SEQ ID NO: 53597 - protein, 36 aa, Artificial Sequence; identical to SEQ ID NO: 20816
  Cyclic GFR-binding peptide
  MOD_RES (6)..(7): Xaa is C or S

SEQ ID NO: 53598 - protein, 24 aa, Artificial Sequence
  Cyclic GFR-binding peptide
EPLPMVYYDENEKVVEQLSNDMVV

SEQ ID NO: 53599 - protein, 21 aa, Artificial Sequence
  Cyclic GFR-binding peptide
LEPLTMLYYDEYDKVVEQLSN

SEQ ID NO: 53600 - protein, 35 aa, Artificial Sequence; identical to SEQ ID NO: 10702
  Cyclic GFR-binding peptide
  MOD_RES (2)..(3)..(34): Xaa is C or S

SEQ ID NO: 53601 - protein, 34 aa, Artificial Sequence; identical to SEQ ID NO: 20820
  Cyclic GFR-binding peptide
  MOD_RES (5)..(6): Xaa is C or S

SEQ ID NO: 53602 - protein, 25 aa, Artificial Sequence
  Cyclic GFR-binding peptide
PTELEPLPMVYYDEYDKVVEQLSNE

SEQ ID NO: 53603 - protein, 33 aa, Artificial Sequence; identical to SEQ ID NO: 20822
  Cyclic GFR-binding peptide
  MOD_RES (5)..(6): Xaa is C or S

SEQ ID NO: 53604 - protein, 37 aa, Artificial Sequence; identical to SEQ ID NO: 20823
  Cyclic GFR-binding peptide
  MOD_RES (6)..(7): Xaa is C or S

SEQ ID NO: 53605 - protein, 35 aa, Artificial Sequence; identical to SEQ ID NO: 20824
  Cyclic GFR-binding peptide
  MOD_RES (6)..(7): Xaa is C or S

SEQ ID NO: 53606 - protein, 21 aa, Artificial Sequence
  Cyclic GFR-binding peptide
EPLTVLYYDDSSNVIEQLSNN

SEQ ID NO: 53607 - protein, 29 aa, Artificial Sequence
  Cyclic GFR-binding peptide
  MOD_RES (2)..(3): Xaa is C or S
AXXVPTELEPLPMVYYDENEKVVEQLSND

SEQ ID NO: 53608 - protein, 31 aa, Artificial Sequence; identical to SEQ ID NO: 10712
  Cyclic GFR-binding peptide

SEQ ID NO: 53609 - protein, 41 aa, Artificial Sequence; identical to SEQ ID NO: 20829
  Cyclic GFR-binding peptide
  MOD_RES (6)..(7)..(39)..(41): Xaa is C or S

SEQ ID NO: 53610 - protein, 32 aa, Artificial Sequence; identical to SEQ ID NO: 10714
  Cyclic GFR-binding peptide
  MOD_RES (2)..(3): Xaa is C or S

SEQ ID NO: 53611 - protein, 31 aa, Artificial Sequence; identical to SEQ ID NO: 20831
  Cyclic GFR-binding peptide
  MOD_RES (2)..(3): Xaa is C or S

SEQ ID NO: 53612 - protein, 40 aa, Artificial Sequence; identical to SEQ ID NO: 20832
  Cyclic GFR-binding peptide
  MOD_RES (5)..(6)..(38)..(40): Xaa is C or S

SEQ ID NO: 53613 - protein, 23 aa, Artificial Sequence
  Cyclic GFR-binding peptide
RLEPLPIVYYDSANNVVEQLSND

SEQ ID NO: 53614 - protein, 39 aa, Artificial Sequence; identical to SEQ ID NO: 20834
  Cyclic GFR-binding peptide
  MOD_RES (3)..(4)..(36)..(38): Xaa is C or S

SEQ ID NO: 53615 - protein, 30 aa, Artificial Sequence; identical to SEQ ID NO: 20835
  Cyclic GFR-binding peptide
  MOD_RES (2)..(3): Xaa is C or S

SEQ ID NO: 53616 - protein, 25 aa, Artificial Sequence
  Cyclic GFR-binding peptide
TELNAISMLYFDEYDKVVLKKYREM

SEQ ID NO: 53617 - protein, 23 aa, Artificial Sequence
  Cyclic GFR-binding peptide
NAISMLYFDENEKVVLKKYRDMV

SEQ ID NO: 53618 - protein, 31 aa, Artificial Sequence; identical to SEQ ID NO: 20839
  Cyclic GFR-binding peptide
  MOD_RES (1)..(2): Xaa is C or S

SEQ ID NO: 53619 - protein, 32 aa, Artificial Sequence; identical to SEQ ID NO: 20840
  Cyclic GFR-binding peptide
  MOD_RES (30)..(32): Xaa is C or S

SEQ ID NO: 53620 - protein, 33 aa, Artificial Sequence; identical to SEQ ID NO: 20841
  Cyclic GFR-binding peptide
  MOD_RES (2)..(3): Xaa is C or S

SEQ ID NO: 53621 - protein, 24 aa, Artificial Sequence
  Cyclic GFR-binding peptide
DLEPLPIVYYVGRTPKVEQLSNMV

SEQ ID NO: 53622 - protein, 27 aa, Artificial Sequence
  Cyclic GFR-binding peptide
KLEPLPVVYYDDSSNVIEQLSNNMVVR

SEQ ID NO: 53623 - protein, 30 aa, Artificial Sequence; identical to SEQ ID NO: 20845
  Cyclic GFR-binding peptide
  MOD_RES (5)..(5): Xaa is C or S

SEQ ID NO: 53624 - protein, 34 aa, Artificial Sequence; identical to SEQ ID NO: 20846
  Cyclic GFR-binding peptide
  MOD_RES (4)..(5): Xaa is C or S

SEQ ID NO: 53625 - protein, 24 aa, Artificial Sequence
  Cyclic GFR-binding peptide
QDLEPLPIVYYVGRTPKVEQLSNM

SEQ ID NO: 53626 - protein, 31 aa, Artificial Sequence; identical to SEQ ID NO: 20848
  Cyclic GFR-binding peptide
  MOD_RES (3)..(3): Xaa is C or S

SEQ ID NO: 53627 - protein, 39 aa, Artificial Sequence; identical to SEQ ID NO: 10725
  Cyclic GFR-binding peptide
  MOD_RES (5)..(6)..(38): Xaa is C or S

SEQ ID NO: 53628 - protein, 40 aa, Artificial Sequence; identical to SEQ ID NO: 20850
  Cyclic GFR-binding peptide
  MOD_RES (5)..(6)..(38)..(40): Xaa is C or S

SEQ ID NO: 53629 - protein, 39 aa, Artificial Sequence; identical to SEQ ID NO: 20851
  Cyclic GFR-binding peptide
  MOD_RES (6)..(7)..(39): Xaa is C or S

SEQ ID NO: 53630 - protein, 31 aa, Artificial Sequence; identical to SEQ ID NO: 20852
  Cyclic GFR-binding peptide
  MOD_RES (1)..(2): Xaa is C or S

SEQ ID NO: 53631 - protein, 39 aa, Artificial Sequence; identical to SEQ ID NO: 20853
  Cyclic GFR-binding peptide
  MOD_RES (5)..(6)..(38): Xaa is C or S

SEQ ID NO: 53632 - protein, 28 aa, Artificial Sequence
  Cyclic GFR-binding peptide
ELEPLTMLYYDENEKVVEQLSNDMVVEG

SEQ ID NO: 53633 - protein, 27 aa, Artificial Sequence
  Cyclic GFR-binding peptide
  MOD_RES (27)..(27): Xaa is C or S
NAISMLYFDENEKVVLKKYRDMVVEGX

SEQ ID NO: 53634 - protein, 35 aa, Artificial Sequence; identical to SEQ ID NO: 10735
  Cyclic GFR-binding peptide
  MOD_RES (4)..(5): Xaa is C or S

SEQ ID NO: 53635 - protein, 36 aa, Artificial Sequence; identical to SEQ ID NO: 20858
  Cyclic GFR-binding peptide
  MOD_RES (1)..(2)..(33)..(35): Xaa is C or S

SEQ ID NO: 53636 - protein, 36 aa, Artificial Sequence; identical to SEQ ID NO: 20859
  Cyclic GFR-binding peptide
  MOD_RES (1)..(33)..(35): Xaa is C or S

SEQ ID NO: 53637 - protein, 31 aa, Artificial Sequence; identical to SEQ ID NO: 10739
  Cyclic GFR-binding peptide
  MOD_RES (28)..(30): Xaa is C or S

SEQ ID NO: 53638 - protein, 35 aa, Artificial Sequence; identical to SEQ ID NO: 10743
  Cyclic GFR-binding peptide
  MOD_RES (6)..(7): Xaa is C or S

SEQ ID NO: 53639 - protein, 36 aa, Artificial Sequence; identical to SEQ ID NO: 20863
  Cyclic GFR-binding peptide
  MOD_RES (1)..(2)..(33)..(35): Xaa is C or S

SEQ ID NO: 53640 - protein, 30 aa, Artificial Sequence; identical to SEQ ID NO: 20865
  Cyclic GFR-binding peptide
  MOD_RES (29)..(29): Xaa is C or S

SEQ ID NO: 53641 - protein, 32 aa, Artificial Sequence; identical to SEQ ID NO: 20866
  Cyclic GFR-binding peptide
  MOD_RES (2)..(3): Xaa is C or S

SEQ ID NO: 53642 - protein, 38 aa, Artificial Sequence; identical to SEQ ID NO: 20867
  Cyclic GFR-binding peptide
  MOD_RES (3)..(4)..(36)..(38): Xaa is C or S

SEQ ID NO: 53643 - protein, 30 aa, Artificial Sequence; identical to SEQ ID NO: 20868
  Cyclic GFR-binding peptide

SEQ ID NO: 53644 - protein, 39 aa, Artificial Sequence; identical to SEQ ID NO: 20869
  Cyclic GFR-binding peptide
  MOD_RES (4)..(5)..(37)..(39): Xaa is C or S

SEQ ID NO: 53645 - protein, 35 aa, Artificial Sequence; identical to SEQ ID NO: 20870
  Cyclic GFR-binding peptide
  MOD_RES (6)..(7): Xaa is C or S

SEQ ID NO: 53646 - protein, 23 aa, Artificial Sequence
  Cyclic GFR-binding peptide
LNAISILYFDSANNVVLKKYRDM

SEQ ID NO: 53647 - protein, 35 aa, Artificial Sequence; identical to SEQ ID NO: 20872
  Cyclic GFR-binding peptide
  MOD_RES (5)..(6): Xaa is C or S

SEQ ID NO: 53648 - protein, 33 aa, Artificial Sequence; identical to SEQ ID NO: 20873
  Cyclic GFR-binding peptide
  MOD_RES (32)..(32): Xaa is C or S

SEQ ID NO: 53649 - protein, 25 aa, Artificial Sequence
  Cyclic GFR-binding peptide
APTQLEPLPVVYYDDSSNVIEQLSN

SEQ ID NO: 53650 - protein, 39 aa, Artificial Sequence; identical to SEQ ID NO: 10757
  Cyclic GFR-binding peptide
  MOD_RES (4)..(5)..(36)..(38): Xaa is C or S

SEQ ID NO: 53651 - protein, 28 aa, Artificial Sequence
  Cyclic GFR-binding peptide
VPQALSPISILFIVGRKPKVYKQYEMIV

SEQ ID NO: 53652 - protein, 32 aa, Artificial Sequence; identical to SEQ ID NO: 20877
  Cyclic GFR-binding peptide
  MOD_RES (31)..(31): Xaa is C or S

SEQ ID NO: 53653 - protein, 33 aa, Artificial Sequence; identical to SEQ ID NO: 20878
  Cyclic GFR-binding peptide
  MOD_RES (1)..(2)..(33): Xaa is C or S

SEQ ID NO: 53654 - protein, 33 aa, Artificial Sequence; identical to SEQ ID NO: 20879
  Cyclic GFR-binding peptide
  MOD_RES (1)..(2): Xaa is C or S

SEQ ID NO: 53655 - protein, 27 aa, Artificial Sequence
  Cyclic GFR-binding peptide
  MOD_RES (26)..(26): Xaa is C or S
EPLPIVYYVGRTPKVEQLSNMVVKSXK

SEQ ID NO: 53656 - protein, 35 aa, Artificial Sequence; identical to SEQ ID NO: 20881
  Cyclic GFR-binding peptide
  MOD_RES (3)..(4)..(35): Xaa is C or S

SEQ ID NO: 53657 - protein, 41 aa, Artificial Sequence; identical to SEQ ID NO: 20882
  Cyclic GFR-binding peptide
  MOD_RES (5)..(6)..(38)..(40): Xaa is C or S

SEQ ID NO: 53658 - protein, 21 aa, Artificial Sequence
  Cyclic GFR-binding peptide
LNAISMLYFDEYDKVVLKKYR

SEQ ID NO: 53659 - protein, 32 aa, Artificial Sequence; identical to SEQ ID NO: 20884
  Cyclic GFR-binding peptide
  MOD_RES (30)..(32): Xaa is C or S

SEQ ID NO: 53660 - protein, 32 aa, Artificial Sequence; identical to SEQ ID NO: 20885
  Cyclic GFR-binding peptide
  MOD_RES (30)..(32): Xaa is C or S

SEQ ID NO: 53661 - protein, 25 aa, Artificial Sequence
  Cyclic GFR-binding peptide
TRLNAISILYFDSANNVVLKKYRDM

SEQ ID NO: 53662 - protein, 31 aa, Artificial Sequence; identical to SEQ ID NO: 20889
  Cyclic GFR-binding peptide
  MOD_RES (30)..(30): Xaa is C or S

SEQ ID NO: 53663 - protein, 29 aa, Artificial Sequence
  Cyclic GFR-binding peptide
  MOD_RES (27)..(29): Xaa is C or S
LSPISILFIVGRKPKVYKQYEMIVRSXKX

SEQ ID NO: 53664 - protein, 29 aa, Artificial Sequence
  Cyclic GFR-binding peptide
  MOD_RES (4)..(4): Xaa is C or S
KPTXAPTKLEPLTVLYYDDSSNVIEQLSN

SEQ ID NO: 53665 - protein, 40 aa, Artificial Sequence; identical to SEQ ID NO: 20893
  Cyclic GFR-binding peptide
  MOD_RES (5)..(6)..(38)..(40): Xaa is C or S

SEQ ID NO: 53666 - protein, 22 aa, Artificial Sequence
  Cyclic GFR-binding peptide
EPLTVLYYDDSSNVIEQLSNNM

SEQ ID NO: 53667 - protein, 33 aa, Artificial Sequence; identical to SEQ ID NO: 20896
  Cyclic GFR-binding peptide
  MOD_RES (2)..(3): Xaa is C or S

SEQ ID NO: 53668 - protein, 39 aa, Artificial Sequence; identical to SEQ ID NO: 20897
  Cyclic GFR-binding peptide
  MOD_RES (6)..(7)..(39): Xaa is C or S

SEQ ID NO: 53669 - protein, 33 aa, Artificial Sequence; identical to SEQ ID NO: 20898
  Cyclic GFR-binding peptide
  MOD_RES (4)..(5): Xaa is C or S

SEQ ID NO: 53670 - protein, 26 aa, Artificial Sequence
  Cyclic GFR-binding peptide
  MOD_RES (1)..(1): Xaa is C or S
XVPTELSPISMLFIDEYDKVVYKQYE

SEQ ID NO: 53671 - protein, 24 aa, Artificial Sequence
  Cyclic GFR-binding peptide
LNAISILYFVGRTPKVLKKYRMVV

SEQ ID NO: 53672 - protein, 33 aa, Artificial Sequence; identical to SEQ ID NO: 20902
  Cyclic GFR-binding peptide
  MOD_RES (1)..(33): Xaa is C or S

SEQ ID NO: 53673 - protein, 37 aa, Artificial Sequence; identical to SEQ ID NO: 20904
  Cyclic GFR-binding peptide
  MOD_RES (2)..(3)..(35)..(37): Xaa is C or S

SEQ ID NO: 53674 - protein, 30 aa, Artificial Sequence; identical to SEQ ID NO: 20905
  Cyclic GFR-binding peptide
  MOD_RES (2)..(3): Xaa is C or S

SEQ ID NO: 53675 - protein, 29 aa, Artificial Sequence
  Cyclic GFR-binding peptide
  MOD_RES (1)..(1): Xaa is C or S
XAPTKLEPLPVVYYDDSSNVIEQLSNNMV

SEQ ID NO: 53676 - protein, 30 aa, Artificial Sequence; identical to SEQ ID NO: 20908
  Cyclic GFR-binding peptide
  MOD_RES (29)..(29): Xaa is C or S

SEQ ID NO: 53677 - protein, 29 aa, Artificial Sequence
  Cyclic GFR-binding peptide
PTKLSPISVLFIDDSSNVIYKQYENMVVR

SEQ ID NO: 53678 - protein, 40 aa, Artificial Sequence; identical to SEQ ID NO: 20910
  Cyclic GFR-binding peptide
  MOD_RES (4)..(5)..(37)..(39): Xaa is C or S

SEQ ID NO: 53679 - protein, 25 aa, Artificial Sequence
  Cyclic GFR-binding peptide
VPTELNAISMLYFDEYDKVVLKKYR

SEQ ID NO: 53680 - protein, 35 aa, Artificial Sequence; identical to SEQ ID NO: 20912
  Cyclic GFR-binding peptide
  MOD_RES (3)..(4): Xaa is C or S

SEQ ID NO: 53681 - protein, 32 aa, Artificial Sequence; identical to SEQ ID NO: 20913
  Cyclic GFR-binding peptide
  MOD_RES (4)..(5): Xaa is C or S

SEQ ID NO: 53682 - protein, 27 aa, Artificial Sequence
  Cyclic GFR-binding peptide
QALSPISILFIVGRKPKVYKQYEMIVR

SEQ ID NO: 53683 - protein, 34 aa, Artificial Sequence; identical to SEQ ID NO: 10796
  Cyclic GFR-binding peptide
  MOD_RES (1)..(2)..(34): Xaa is C or S

SEQ ID NO: 53684 - protein, 33 aa, Artificial Sequence; identical to SEQ ID NO: 20916
  Cyclic GFR-binding peptide
  MOD_RES (32)..(32): Xaa is C or S

SEQ ID NO: 53685 - protein, 37 aa, Artificial Sequence; identical to SEQ ID NO: 10802
  Cyclic GFR-binding peptide
  MOD_RES (4)..(5)..(36): Xaa is C or S

SEQ ID NO: 53686 - protein, 23 aa, Artificial Sequence
  Cyclic GFR-binding peptide
EPLPMVYYDEYDKVVEQLSNEMV

SEQ ID NO: 53687 - protein, 27 aa, Artificial Sequence
  Cyclic GFR-binding peptide
ELNAISMLYFDENEKVVLKKYRDMVVE

SEQ ID NO: 53688 - protein, 25 aa, Artificial Sequence
  Cyclic GFR-binding peptide
TQLSPISVLFIDDSSNVIYKQYENM

SEQ ID NO: 53689 - protein, 36 aa, Artificial Sequence; identical to SEQ ID NO: 20927
  Cyclic GFR-binding peptide
  MOD_RES (6)..(7): Xaa is C or S

SEQ ID NO: 53690 - protein, 25 aa, Artificial Sequence
  Cyclic GFR-binding peptide
DLEPLPIVYYIGKTPKIEQLSNMIV

SEQ ID NO: 53691 - protein, 25 aa, Artificial Sequence
  Cyclic GFR-binding peptide
EPLPMVYYDENEKVVEQLSNDMVVE

SEQ ID NO: 53692 - protein, 27 aa, Artificial Sequence
  Cyclic GFR-binding peptide
LSPISMLFIDENEKVVYKQYEDMVVEG

SEQ ID NO: 53693 - protein, 32 aa, Artificial Sequence; identical to SEQ ID NO: 10816
  Cyclic GFR-binding peptide
  MOD_RES (1)..(32): Xaa is C or S

SEQ ID NO: 53694 - protein, 33 aa, Artificial Sequence; identical to SEQ ID NO: 20932
  Cyclic GFR-binding peptide
  MOD_RES (5)..(6): Xaa is C or S

SEQ ID NO: 53695 - protein, 31 aa, Artificial Sequence; identical to SEQ ID NO: 20933
  Cyclic GFR-binding peptide
  MOD_RES (3)..(4): Xaa is C or S

SEQ ID NO: 53696 - protein, 24 aa, Artificial Sequence
  Cyclic GFR-binding peptide
NAISILYFIGKTPKILKKYRMIVK

SEQ ID NO: 53697 - protein, 21 aa, Artificial Sequence
  Cyclic GFR-binding peptide
NAISILYFVGRTPKVLKKYRM

SEQ ID NO: 53698 - protein, 31 aa, Artificial Sequence; identical to SEQ ID NO: 10821
  Cyclic GFR-binding peptide
  MOD_RES (1)..(2): Xaa is C or S

SEQ ID NO: 53699 - protein, 32 aa, Artificial Sequence; identical to SEQ ID NO: 20938
  Cyclic GFR-binding peptide
  MOD_RES (32)..(32): Xaa is C or S

SEQ ID NO: 53700 - protein, 27 aa, Artificial Sequence
  Cyclic GFR-binding peptide
  MOD_RES (26)..(26): Xaa is C or S
SPISILFIVGRKPKVYKQYEMIVRSXK

SEQ ID NO: 53701 - protein, 37 aa, Artificial Sequence; identical to SEQ ID NO: 20940
  Cyclic GFR-binding peptide
  MOD_RES (3)..(35)..(37): Xaa is C or S

SEQ ID NO: 53702 - protein, 26 aa, Artificial Sequence
  Cyclic GFR-binding peptide
PTQLEPLPVVYYDDSSNVIEQLSNNM

SEQ ID NO: 53703 - protein, 28 aa, Artificial Sequence
  Cyclic GFR-binding peptide
TQLEPLTVLYYDDSSNVIEQLSNNMVVR

SEQ ID NO: 53704 - protein, 26 aa, Artificial Sequence
  Cyclic GFR-binding peptide
TQLEPLPVVYYDDSSNVIEQLSNNMV

SEQ ID NO: 53705 - protein, 21 aa, Artificial Sequence
  Cyclic GFR-binding peptide
EPLTILYYVGRKPKVEQLSNM

SEQ ID NO: 53706 - protein, 34 aa, Artificial Sequence; identical to SEQ ID NO: 20946
  Cyclic GFR-binding peptide
  MOD_RES (1)..(2)..(34): Xaa is C or S

SEQ ID NO: 53707 - protein, 33 aa, Artificial Sequence; identical to SEQ ID NO: 20947
  Cyclic GFR-binding peptide
  MOD_RES (3)..(4): Xaa is C or S

SEQ ID NO: 53708 - protein, 27 aa, Artificial Sequence
  Cyclic GFR-binding peptide
PTELEPLPMVYYDEYDKVVEQLSNEMV

SEQ ID NO: 53709 - protein, 29 aa, Artificial Sequence
  Cyclic GFR-binding peptide
  MOD_RES (1)..(1): Xaa is C or S
XVPTRLNAISILYFDSANNVVLKKYRDMV

SEQ ID NO: 53710 - protein, 33 aa, Artificial Sequence; identical to SEQ ID NO: 20951
  Cyclic GFR-binding peptide
  MOD_RES (4)..(5): Xaa is C or S

SEQ ID NO: 53711 - protein, 41 aa, Artificial Sequence; identical to SEQ ID NO: 20952
  Cyclic GFR-binding peptide
  MOD_RES (7)..(39)..(41): Xaa is C or S

SEQ ID NO: 53712 - protein, 28 aa, Artificial Sequence
  Cyclic GFR-binding peptide
  MOD_RES (2)..(3): Xaa is C or S
AXXVPTELSPISMLFIDEYDKVVYKQYE

SEQ ID NO: 53713 - protein, 25 aa, Artificial Sequence
  Cyclic GFR-binding peptide
VPQDLSPISILFIVGRTPKVYKQYE

SEQ ID NO: 53714 - protein, 31 aa, Artificial Sequence; identical to SEQ ID NO: 20956
  Cyclic GFR-binding peptide

SEQ ID NO: 53715 - protein, 38 aa, Artificial Sequence; identical to SEQ ID NO: 20958
  Cyclic GFR-binding peptide
  MOD_RES (6)..(7): Xaa is C or S

SEQ ID NO: 53716 - protein, 25 aa, Artificial Sequence
  Cyclic GFR-binding peptide
QDLSPISILFIVGRTPKVYKQYEMV

SEQ ID NO: 53717 - protein, 41 aa, Artificial Sequence; identical to SEQ ID NO: 20962
  Cyclic GFR-binding peptide
  MOD_RES (6)..(7)..(39)..(41): Xaa is C or S

SEQ ID NO: 53718 - protein, 22 aa, Artificial Sequence
  Cyclic GFR-binding peptide
LEPLPMVYYDEYDKVVEQLSNE

SEQ ID NO: 53719 - protein, 31 aa, Artificial Sequence; identical to SEQ ID NO: 20964
  Cyclic GFR-binding peptide
  MOD_RES (2)..(3): Xaa is C or S

SEQ ID NO: 53720 - protein, 34 aa, Artificial Sequence; identical to SEQ ID NO: 10853
  Cyclic GFR-binding peptide
  MOD_RES (6)..(7): Xaa is C or S

SEQ ID NO: 53721 - protein, 33 aa, Artificial Sequence; identical to SEQ ID NO: 20966
  Cyclic GFR-binding peptide
  MOD_RES (6)..(6): Xaa is C or S

SEQ ID NO: 53722 - protein, 37 aa, Artificial Sequence; identical to SEQ ID NO: 20968
  Cyclic GFR-binding peptide
  MOD_RES (1)..(2)..(34)..(36): Xaa is C or S

SEQ ID NO: 53723 - protein, 35 aa, Artificial Sequence; identical to SEQ ID NO: 20970
  Cyclic GFR-binding peptide
  MOD_RES (5)..(6): Xaa is C or S

SEQ ID NO: 53724 - protein, 30 aa, Artificial Sequence; identical to SEQ ID NO: 10862
  Cyclic GFR-binding peptide

SEQ ID NO: 53725 - protein, 34 aa, Artificial Sequence; identical to SEQ ID NO: 20972
  Cyclic GFR-binding peptide
  MOD_RES (6)..(7): Xaa is C or S

SEQ ID NO: 53726 - protein, 26 aa, Artificial Sequence
  Cyclic GFR-binding peptide
  MOD_RES (1)..(1): Xaa is C or S
XVPQDLEPLPIVYYVGRTPKVEQLSN

SEQ ID NO: 53727 - protein, 26 aa, Artificial Sequence
  Cyclic GFR-binding peptide
VPTRLEPLPIVYYDSANNVVEQLSND

SEQ ID NO: 53728 - protein, 36 aa, Artificial Sequence; identical to SEQ ID NO: 20976
  Cyclic GFR-binding peptide
  MOD_RES (2)..(3)..(35): Xaa is C or S

SEQ ID NO: 53729 - protein, 33 aa, Artificial Sequence; identical to SEQ ID NO: 10867
  Cyclic GFR-binding peptide
  MOD_RES (30)..(32): Xaa is C or S

SEQ ID NO: 53730 - protein, 31 aa, Artificial Sequence; identical to SEQ ID NO: 20981
  Cyclic GFR-binding peptide
  MOD_RES (5)..(6): Xaa is C or S

SEQ ID NO: 53731 - protein, 31 aa, Artificial Sequence; identical to SEQ ID NO: 20983
  Cyclic GFR-binding peptide
  MOD_RES (1)..(1): Xaa is C or S

SEQ ID NO: 53732 - protein, 28 aa, Artificial Sequence
  Cyclic GFR-binding peptide
VPTRLEPLPIVYYDSANNVVEQLSNDMV

SEQ ID NO: 53733 - protein, 30 aa, Artificial Sequence; identical to SEQ ID NO: 20985
  Cyclic GFR-binding peptide
  MOD_RES (30)..(30): Xaa is C or S

SEQ ID NO: 53734 - protein, 33 aa, Artificial Sequence; identical to SEQ ID NO: 20986
  Cyclic GFR-binding peptide
  MOD_RES (32)..(32): Xaa is C or S

SEQ ID NO: 53735 - protein, 38 aa, Artificial Sequence; identical to SEQ ID NO: 20987
  Cyclic GFR-binding peptide
  MOD_RES (3)..(4)..(35)..(37): Xaa is C or S

SEQ ID NO: 53736 - protein, 38 aa, Artificial Sequence; identical to SEQ ID NO: 20988
  Cyclic GFR-binding peptide
  MOD_RES (5)..(6)..(37): Xaa is C or S

SEQ ID NO: 53737 - protein, 36 aa, Artificial Sequence; identical to SEQ ID NO: 20989
  Cyclic GFR-binding peptide
  MOD_RES (1)..(33)..(35): Xaa is C or S

SEQ ID NO: 53738 - protein, 41 aa, Artificial Sequence; identical to SEQ ID NO: 20990
  Cyclic GFR-binding peptide
  MOD_RES (5)..(6)..(38)..(40): Xaa is C or S

SEQ ID NO: 53739 - protein, 24 aa, Artificial Sequence
  Cyclic GFR-binding peptide
PTELEPLTMLYYDENEKVVEQLSN

SEQ ID NO: 53740 - protein, 25 aa, Artificial Sequence
  Cyclic GFR-binding peptide
PTRLNAISILYFDSANNVVLKKYRD

SEQ ID NO: 53741 - protein, 34 aa, Artificial Sequence; identical to SEQ ID NO: 20993
  Cyclic GFR-binding peptide
  MOD_RES (3)..(4): Xaa is C or S

SEQ ID NO: 53742 - protein, 33 aa, Artificial Sequence; identical to SEQ ID NO: 20994
  Cyclic GFR-binding peptide
  MOD_RES (1)..(33): Xaa is C or S

SEQ ID NO: 53743 - protein, 27 aa, Artificial Sequence
  Cyclic GFR-binding peptide
LEPLPMVYYDENEKVVEQLSNDMVVEG

SEQ ID NO: 53744 - protein, 32 aa, Artificial Sequence; identical to SEQ ID NO: 20997
  Cyclic GFR-binding peptide
  MOD_RES (6)..(7): Xaa is C or S

SEQ ID NO: 53745 - protein, 36 aa, Artificial Sequence; identical to SEQ ID NO: 10892
  Cyclic GFR-binding peptide
  MOD_RES (3)..(4)..(35): Xaa is C or S

SEQ ID NO: 53746 - protein, 39 aa, Artificial Sequence; identical to SEQ ID NO: 21000
  Cyclic GFR-binding peptide
  MOD_RES (6)..(7)..(39): Xaa is C or S

SEQ ID NO: 53747 - protein, 30 aa, Artificial Sequence; identical to SEQ ID NO: 10896
  Cyclic GFR-binding peptide
  MOD_RES (30)..(30): Xaa is C or S

SEQ ID NO: 53748 - protein, 29 aa, Artificial Sequence
  Cyclic GFR-binding peptide
PTRLNAISILYFDSANNVVLKKYRDMVVE

SEQ ID NO: 53749 - protein, 21 aa, Artificial Sequence
  Cyclic GFR-binding peptide
LEPLPVVYYDDSSNVIEQLSN

SEQ ID NO: 53750 - protein, 40 aa, Artificial Sequence; identical to SEQ ID NO: 21006
  Cyclic GFR-binding peptide
  MOD_RES (6)..(38)..(40): Xaa is C or S

SEQ ID NO: 53751 - protein, 26 aa, Artificial Sequence
  Cyclic GFR-binding peptide
QDLSPISILFIVGRTPKVYKQYEMVV

SEQ ID NO: 53752 - protein, 35 aa, Artificial Sequence; identical to SEQ ID NO: 10900
  Cyclic GFR-binding peptide
  MOD_RES (2)..(3)..(34): Xaa is C or S

SEQ ID NO: 53753 - protein, 34 aa, Artificial Sequence; identical to SEQ ID NO: 21009
  Cyclic GFR-binding peptide
  MOD_RES (1)..(33): Xaa is C or S

SEQ ID NO: 53754 - protein, 29 aa, Artificial Sequence
  Cyclic GFR-binding peptide
  MOD_RES (28)..(28): Xaa is C or S
LEPLPMVYYDEYDKVVEQLSNEMVVEGXG

SEQ ID NO: 53755 - protein, 29 aa, Artificial Sequence
  Cyclic GFR-binding peptide
SQDLEPLPIVYYIGKTPKIEQLSNMIVKS

SEQ ID NO: 53756 - protein, 26 aa, Artificial Sequence
  Cyclic GFR-binding peptide
LEPLTVLYYDDSSNVIEQLSNNMVVR

SEQ ID NO: 53757 - protein, 40 aa, Artificial Sequence; identical to SEQ ID NO: 21014
  Cyclic GFR-binding peptide
  MOD_RES (5)..(37)..(39): Xaa is C or S

SEQ ID NO: 53758 - protein, 30 aa, Artificial Sequence; identical to SEQ ID NO: 21015
  Cyclic GFR-binding peptide

SEQ ID NO: 53759 - protein, 31 aa, Artificial Sequence; identical to SEQ ID NO: 21016
  Cyclic GFR-binding peptide
  MOD_RES (2)..(2): Xaa is C or S

SEQ ID NO: 53760 - protein, 23 aa, Artificial Sequence
  Cyclic GFR-binding peptide
LEPLPIVYYIGKTPKIEQLSNMI

SEQ ID NO: 53761 - protein, 27 aa, Artificial Sequence
  Cyclic GFR-binding peptide
VPQALNAISILYFVGRKPKVLKKYRMI

SEQ ID NO: 53762 - protein, 26 aa, Artificial Sequence
  Cyclic GFR-binding peptide
TELEPLPMVYYDENEKVVEQLSNDMV

SEQ ID NO: 53763 - protein, 28 aa, Artificial Sequence
  Cyclic GFR-binding peptide
  MOD_RES (26)..(28): Xaa is C or S
NAISILYFIGKTPKILKKYRMIVKSXKX

SEQ ID NO: 53764 - protein, 35 aa, Artificial Sequence; identical to SEQ ID NO: 21022
  Cyclic GFR-binding peptide
  MOD_RES (32)..(34): Xaa is C or S

SEQ ID NO: 53765 - protein, 25 aa, Artificial Sequence
  Cyclic GFR-binding peptide
LEPLTVLYYDDSSNVIEQLSNNMVV

SEQ ID NO: 53766 - protein, 34 aa, Artificial Sequence; identical to SEQ ID NO: 21025
  Cyclic GFR-binding peptide
  MOD_RES (32)..(34): Xaa is C or S

SEQ ID NO: 53767 - protein, 30 aa, Artificial Sequence; identical to SEQ ID NO: 21026
  Cyclic GFR-binding peptide
  MOD_RES (30)..(30): Xaa is C or S

SEQ ID NO: 53768 - protein, 27 aa, Artificial Sequence
  Cyclic GFR-binding peptide
TRLEPLTILYYDSANNVVEQLSNDMVV

SEQ ID NO: 53769 - protein, 30 aa, Artificial Sequence; identical to SEQ ID NO: 21030
  Cyclic GFR-binding peptide

SEQ ID NO: 53770 - protein, 27 aa, Artificial Sequence
  Cyclic GFR-binding peptide
  MOD_RES (1)..(2): Xaa is C or S
XXVPTELSPISMLFIDEYDKVVYKQYE

SEQ ID NO: 53771 - protein, 32 aa, Artificial Sequence; identical to SEQ ID NO: 21034
  Cyclic GFR-binding peptide
  MOD_RES (6)..(7): Xaa is C or S

SEQ ID NO: 53772 - protein, 38 aa, Artificial Sequence; identical to SEQ ID NO: 21036
  Cyclic GFR-binding peptide
  MOD_RES (5)..(37): Xaa is C or S

SEQ ID NO: 53773 - protein, 24 aa, Artificial Sequence
  Cyclic GFR-binding peptide
EPLTILYYDSANNVVEQLSNDMVV

SEQ ID NO: 53774 - protein, 34 aa, Artificial Sequence; identical to SEQ ID NO: 21039
  Cyclic GFR-binding peptide
  MOD_RES (3)..(4): Xaa is C or S

SEQ ID NO: 53775 - protein, 26 aa, Artificial Sequence
  Cyclic GFR-binding peptide
ELEPLPMVYYDEYDKVVEQLSNEMVV

SEQ ID NO: 53776 - protein, 30 aa, Artificial Sequence; identical to SEQ ID NO: 21041
  Cyclic GFR-binding peptide
  MOD_RES (4)..(5): Xaa is C or S

SEQ ID NO: 53777 - protein, 41 aa, Artificial Sequence; identical to SEQ ID NO: 10931
  Cyclic GFR-binding peptide
  MOD_RES (6)..(7)..(38)..(40): Xaa is C or S

SEQ ID NO: 53778 - protein, 27 aa, Artificial Sequence
  Cyclic GFR-binding peptide
KLSPISVLFIDDSSNVIYKQYENMVVR

SEQ ID NO: 53779 - protein, 41 aa, Artificial Sequence; identical to SEQ ID NO: 21045
  Cyclic GFR-binding peptide
  MOD_RES (7)..(39)..(41): Xaa is C or S

SEQ ID NO: 53780 - protein, 31 aa, Artificial Sequence; identical to SEQ ID NO: 21047
  Cyclic GFR-binding peptide
  MOD_RES (2)..(3): Xaa is C or S

SEQ ID NO: 53781 - protein, 35 aa, Artificial Sequence; identical to SEQ ID NO: 10934
  Cyclic GFR-binding peptide
  MOD_RES (1)..(2)..(34): Xaa is C or S

SEQ ID NO: 53782 - protein, 30 aa, Artificial Sequence; identical to SEQ ID NO: 10936
  Cyclic GFR-binding peptide
  MOD_RES (2)..(3): Xaa is C or S

SEQ ID NO: 53783 - protein, 30 aa, Artificial Sequence; identical to SEQ ID NO: 21050
  Cyclic GFR-binding peptide
  MOD_RES (30)..(30): Xaa is C or S

SEQ ID NO: 53784 - protein, 23 aa, Artificial Sequence
  Cyclic GFR-binding peptide
DLNAISILYFVGRTPKVLKKYRM

SEQ ID NO: 53785 - protein, 30 aa, Artificial Sequence; identical to SEQ ID NO: 21052
  Cyclic GFR-binding peptide

SEQ ID NO: 53786 - protein, 26 aa, Artificial Sequence
  Cyclic GFR-binding peptide
NAISMLYFDENEKVVLKKYRDMVVEG

SEQ ID NO: 53787 - protein, 29 aa, Artificial Sequence
  Cyclic GFR-binding peptide
  MOD_RES (1)..(1): Xaa is C or S
XVPTELNAISMLYFDEYDKVVLKKYREMV

SEQ ID NO: 53788 - protein, 29 aa, Artificial Sequence
  Cyclic GFR-binding peptide
  MOD_RES (29)..(29): Xaa is C or S
QALNAISILYFVGRKPKVLKKYRMIVRSX

SEQ ID NO: 53789 - protein, 25 aa, Artificial Sequence
  Cyclic GFR-binding peptide
TELEPLPMVYYDEYDKVVEQLSNEM

SEQ ID NO: 53790 - protein, 23 aa, Artificial Sequence
  Cyclic GFR-binding peptide
LNAISILYFVGRKPKVLKKYRMI

SEQ ID NO: 53791 - protein, 32 aa, Artificial Sequence; identical to SEQ ID NO: 21059
  Cyclic GFR-binding peptide
  MOD_RES (1)..(1): Xaa is C or S

SEQ ID NO: 53792 - protein, 40 aa, Artificial Sequence; identical to SEQ ID NO: 21060
  Cyclic GFR-binding peptide
  MOD_RES (5)..(6)..(38)..(40): Xaa is C or S

SEQ ID NO: 53793 - protein, 36 aa, Artificial Sequence; identical to SEQ ID NO: 21061
  Cyclic GFR-binding peptide
  MOD_RES (6)..(7): Xaa is C or S

SEQ ID NO: 53794 - protein, 30 aa, Artificial Sequence; identical to SEQ ID NO: 21062
  Cyclic GFR-binding peptide
  MOD_RES (3)..(4): Xaa is C or S

SEQ ID NO: 53795 - protein, 35 aa, Artificial Sequence; identical to SEQ ID NO: 21063
  Cyclic GFR-binding peptide
  MOD_RES (32)..(34): Xaa is C or S

SEQ ID NO: 53796 - protein, 33 aa, Artificial Sequence; identical to SEQ ID NO: 21064
  Cyclic GFR-binding peptide
  MOD_RES (3)..(4): Xaa is C or S

SEQ ID NO: 53797 - protein, 25 aa, Artificial Sequence
  Cyclic GFR-binding peptide
EPLPIVYYVGRTPKVEQLSNMVVKS

SEQ ID NO: 53798 - protein, 33 aa, Artificial Sequence; identical to SEQ ID NO: 21066
  Cyclic GFR-binding peptide
  MOD_RES (1)..(33): Xaa is C or S

SEQ ID NO: 53799 - protein, 34 aa, Artificial Sequence; identical to SEQ ID NO: 21068
  Cyclic GFR-binding peptide
  MOD_RES (2)..(3): Xaa is C or S

SEQ ID NO: 53800 - protein, 35 aa, Artificial Sequence; identical to SEQ ID NO: 21070
  Cyclic GFR-binding peptide
  MOD_RES (3)..(4): Xaa is C or S

SEQ ID NO: 53801 - protein, 29 aa, Artificial Sequence
  Cyclic GFR-binding peptide
  MOD_RES (3)..(4): Xaa is C or S
KAXXVPTELNAISMLYFDEYDKVVLKKYR

SEQ ID NO: 53802 - protein, 38 aa, Artificial Sequence; identical to SEQ ID NO: 10969
  Cyclic GFR-binding peptide
  MOD_RES (6)..(7): Xaa is C or S

SEQ ID NO: 53803 - protein, 37 aa, Artificial Sequence; identical to SEQ ID NO: 21074
  Cyclic GFR-binding peptide
  MOD_RES (2)..(3)..(34)..(36): Xaa is C or S

SEQ ID NO: 53804 - protein, 26 aa, Artificial Sequence
  Cyclic GFR-binding peptide
  MOD_RES (1)..(1): Xaa is C or S
XVPTELEPLTMLYYDENEKVVEQLSN

SEQ ID NO: 53805 - protein, 26 aa, Artificial Sequence
  Cyclic GFR-binding peptide
  MOD_RES (1)..(1): Xaa is C or S
XVPTRLEPLPIVYYDSANNVVEQLSN

SEQ ID NO: 53806 - protein, 33 aa, Artificial Sequence; identical to SEQ ID NO: 21078
  Cyclic GFR-binding peptide
  MOD_RES (1)..(2): Xaa is C or S

SEQ ID NO: 53807 - protein, 28 aa, Artificial Sequence
  Cyclic GFR-binding peptide
  MOD_RES (27)..(27): Xaa is C or S
EPLTMLYYDEYDKVVEQLSNEMVVEGXG

SEQ ID NO: 53808 - protein, 40 aa, Artificial Sequence; identical to SEQ ID NO: 10971
  Cyclic GFR-binding peptide
  MOD_RES (5)..(6)..(37)..(39): Xaa is C or S

SEQ ID NO: 53809 - protein, 26 aa, Artificial Sequence
  Cyclic GFR-binding peptide
PQDLEPLPIVYYVGRTPKVEQLSNMV

SEQ ID NO: 53810 - protein, 32 aa, Artificial Sequence; identical to SEQ ID NO: 21083
  Cyclic GFR-binding peptide
  MOD_RES (6)..(7): Xaa is C or S

SEQ ID NO: 53811 - protein, 28 aa, Artificial Sequence
  Cyclic GFR-binding peptide
  MOD_RES (27)..(27): Xaa is C or S
LNAISILYFVGRKPKVLKKYRMIVRSXK

SEQ ID NO: 53812 - protein, 29 aa, Artificial Sequence
  Cyclic GFR-binding peptide
TQLEPLTVLYYDDSSNVIEQLSNNMVVRA

SEQ ID NO: 53813 - protein, 38 aa, Artificial Sequence; identical to SEQ ID NO: 21086
  Cyclic GFR-binding peptide
  MOD_RES (6)..(7): Xaa is C or S

SEQ ID NO: 53814 - protein, 37 aa, Artificial Sequence; identical to SEQ ID NO: 21087
  Cyclic GFR-binding peptide
  MOD_RES (6)..(7): Xaa is C or S

SEQ ID NO: 53815 - protein, 24 aa, Artificial Sequence
  Cyclic GFR-binding peptide
PTELNAISMLYFDENEKVVLKKYR

SEQ ID NO: 53816 - protein, 29 aa, Artificial Sequence
  Cyclic GFR-binding peptide
VPQALNAISILYFVGRKPKVLKKYRMIVR

SEQ ID NO: 53817 - protein, 39 aa, Artificial Sequence; identical to SEQ ID NO: 10986
  Cyclic GFR-binding peptide
  MOD_RES (6)..(7)..(38): Xaa is C or S

SEQ ID NO: 53818 - protein, 25 aa, Artificial Sequence
  Cyclic GFR-binding peptide
SQDLEPLPIVYYIGKTPKIEQLSNM

SEQ ID NO: 53819 - protein, 26 aa, Artificial Sequence
  Cyclic GFR-binding peptide
  MOD_RES (1)..(1): Xaa is C or S
XVPTELNAISMLYFDENEKVVLKKYR

SEQ ID NO: 53820 - protein, 27 aa, Artificial Sequence
  Cyclic GFR-binding peptide
PTELNAISMLYFDEYDKVVLKKYREMV

SEQ ID NO: 53821 - protein, 37 aa, Artificial Sequence; identical to SEQ ID NO: 21095
  Cyclic GFR-binding peptide
  MOD_RES (5)..(37): Xaa is C or S

SEQ ID NO: 53822 - protein, 31 aa, Artificial Sequence; identical to SEQ ID NO: 21096
  Cyclic GFR-binding peptide
  MOD_RES (29)..(31): Xaa is C or S

SEQ ID NO: 53823 - protein, 35 aa, Artificial Sequence; identical to SEQ ID NO: 21097
  Cyclic GFR-binding peptide
  MOD_RES (5)..(5): Xaa is C or S

SEQ ID NO: 53824 - protein, 36 aa, Artificial Sequence; identical to SEQ ID NO: 21098
  Cyclic GFR-binding peptide
  MOD_RES (3)..(4)..(36): Xaa is C or S

SEQ ID NO: 53825 - protein, 34 aa, Artificial Sequence; identical to SEQ ID NO: 10992
  Cyclic GFR-binding peptide
  MOD_RES (6)..(7): Xaa is C or S

SEQ ID NO: 53826 - protein, 33 aa, Artificial Sequence; identical to SEQ ID NO: 21100
  Cyclic GFR-binding peptide
  MOD_RES (5)..(6): Xaa is C or S

SEQ ID NO: 53827 - protein, 34 aa, Artificial Sequence; identical to SEQ ID NO: 21101
  Cyclic GFR-binding peptide
  MOD_RES (5)..(6): Xaa is C or S

SEQ ID NO: 53828 - protein, 24 aa, Artificial Sequence
  Cyclic GFR-binding peptide
TELSPISMLFIDEYDKVVYKQYEE

SEQ ID NO: 53829 - protein, 39 aa, Artificial Sequence; identical to SEQ ID NO: 21103
  Cyclic GFR-binding peptide
  MOD_RES (5)..(6)..(38): Xaa is C or S

SEQ ID NO: 53830 - protein, 33 aa, Artificial Sequence; identical to SEQ ID NO: 21104
  Cyclic GFR-binding peptide
  MOD_RES (3)..(4): Xaa is C or S

SEQ ID NO: 53831 - protein, 33 aa, Artificial Sequence; identical to SEQ ID NO: 21105
  Cyclic GFR-binding peptide
  MOD_RES (6)..(7): Xaa is C or S

SEQ ID NO: 53832 - protein, 35 aa, Artificial Sequence; identical to SEQ ID NO: 21106
  Cyclic GFR-binding peptide
  MOD_RES (1)..(2)..(34): Xaa is C or S

SEQ ID NO: 53833 - protein, 34 aa, Artificial Sequence; identical to SEQ ID NO: 11003
  Cyclic GFR-binding peptide
  MOD_RES (1)..(32)..(34): Xaa is C or S

SEQ ID NO: 53834 - protein, 37 aa, Artificial Sequence; identical to SEQ ID NO: 21109
  Cyclic GFR-binding peptide
  MOD_RES (6)..(7): Xaa is C or S

SEQ ID NO: 53835 - protein, 33 aa, Artificial Sequence; identical to SEQ ID NO: 21110
  Cyclic GFR-binding peptide
  MOD_RES (4)..(5): Xaa is C or S

SEQ ID NO: 53836 - protein, 29 aa, Artificial Sequence
  Cyclic GFR-binding peptide
  MOD_RES (2)..(2): Xaa is C or S
TXAPTKLEPLTVLYYDDSSNVIEQLSNNM

SEQ ID NO: 53837 - protein, 33 aa, Artificial Sequence; identical to SEQ ID NO: 21112
  Cyclic GFR-binding peptide
  MOD_RES (1)..(33): Xaa is C or S

SEQ ID NO: 53838 - protein, 33 aa, Artificial Sequence; identical to SEQ ID NO: 21113
  Cyclic GFR-binding peptide
  MOD_RES (1)..(2)..(33): Xaa is C or S

SEQ ID NO: 53839 - protein, 41 aa, Artificial Sequence; identical to SEQ ID NO: 21114
  Cyclic GFR-binding peptide
  MOD_RES (6)..(7)..(39)..(41): Xaa is C or S

SEQ ID NO: 53840 - protein, 34 aa, Artificial Sequence; identical to SEQ ID NO: 21115
  Cyclic GFR-binding peptide
  MOD_RES (5)..(6): Xaa is C or S

SEQ ID NO: 53841 - protein, 29 aa, Artificial Sequence
  Cyclic GFR-binding peptide
  MOD_RES (28)..(28): Xaa is C or S
ALNAISILYFVGRKPKVLKKYRMIVRSXK

SEQ ID NO: 53842 - protein, 26 aa, Artificial Sequence
  Cyclic GFR-binding peptide
SPISMLFIDENEKVVYKQYEDMVVEG

SEQ ID NO: 53843 - protein, 26 aa, Artificial Sequence
  Cyclic GFR-binding peptide
VPQDLNAISILYFVGRTPKVLKKYRM

SEQ ID NO: 53844 - protein, 31 aa, Artificial Sequence; identical to SEQ ID NO: 21119
  Cyclic GFR-binding peptide
  MOD_RES (29)..(31): Xaa is C or S

SEQ ID NO: 53845 - protein, 36 aa, Artificial Sequence; identical to SEQ ID NO: 21120
  Cyclic GFR-binding peptide
  MOD_RES (1)..(2)..(34)..(36): Xaa is C or S

SEQ ID NO: 53846 - protein, 26 aa, Artificial Sequence
  Cyclic GFR-binding peptide
LEPLTILYYVGRKPKVEQLSNMIVRS

SEQ ID NO: 53847 - protein, 24 aa, Artificial Sequence
  Cyclic GFR-binding peptide
TELEPLTMLYYDEYDKVVEQLSNE

SEQ ID NO: 53848 - protein, 26 aa, Artificial Sequence
  Cyclic GFR-binding peptide
QDLEPLPIVYYIGKTPKIEQLSNMIV

SEQ ID NO: 53849 - protein, 33 aa, Artificial Sequence; identical to SEQ ID NO: 21125
  Cyclic GFR-binding peptide
  MOD_RES (6)..(7): Xaa is C or S

SEQ ID NO: 53850 - protein, 31 aa, Artificial Sequence; identical to SEQ ID NO: 11020
  Cyclic GFR-binding peptide
  MOD_RES (5)..(6): Xaa is C or S

SEQ ID NO: 53851 - protein, 30 aa, Artificial Sequence; identical to SEQ ID NO: 21127
  Cyclic GFR-binding peptide

SEQ ID NO: 53852 - protein, 22 aa, Artificial Sequence
  Cyclic GFR-binding peptide
LEPLTMLYYDEYDKVVEQLSNE

SEQ ID NO: 53853 - protein, 21 aa, Artificial Sequence
  Cyclic GFR-binding peptide
LNAISILYFVGRTPKVLKKYR

SEQ ID NO: 53854 - protein, 38 aa, Artificial Sequence; identical to SEQ ID NO: 21130
  Cyclic GFR-binding peptide
  MOD_RES (5)..(6)..(38): Xaa is C or S

SEQ ID NO: 53855 - protein, 38 aa, Artificial Sequence; identical to SEQ ID NO: 21131
  Cyclic GFR-binding peptide
  MOD_RES (3)..(4)..(36)..(38): Xaa is C or S

SEQ ID NO: 53856 - protein, 38 aa, Artificial Sequence; identical to SEQ ID NO: 21132
  Cyclic GFR-binding peptide
  MOD_RES (6)..(38): Xaa is C or S

SEQ ID NO: 53857 - protein, 33 aa, Artificial Sequence; identical to SEQ ID NO: 21133
  Cyclic GFR-binding peptide
  MOD_RES (30)..(32): Xaa is C or S

SEQ ID NO: 53858 - protein, 34 aa, Artificial Sequence; identical to SEQ ID NO: 21134
  Cyclic GFR-binding peptide
  MOD_RES (5)..(6): Xaa is C or S

SEQ ID NO: 53859 - protein, 32 aa, Artificial Sequence; identical to SEQ ID NO: 21135
  Cyclic GFR-binding peptide
  MOD_RES (30)..(32): Xaa is C or S

SEQ ID NO: 53860 - protein, 37 aa, Artificial Sequence; identical to SEQ ID NO: 21136
  Cyclic GFR-binding peptide
  MOD_RES (5)..(6): Xaa is C or S

SEQ ID NO: 53861 - protein, 38 aa, Artificial Sequence; identical to SEQ ID NO: 11029
  Cyclic GFR-binding peptide
  MOD_RES (4)..(5)..(37): Xaa is C or S

SEQ ID NO: 53862 - protein, 28 aa, Artificial Sequence
  Cyclic GFR-binding peptide
  MOD_RES (2)..(3): Xaa is C or S
PXXVSQDLNAISILYFIGKTPKILKKYR

SEQ ID NO: 53863 - protein, 26 aa, Artificial Sequence
  Cyclic GFR-binding peptide
LNAISMLYFDEYDKVVLKKYREMVVE

SEQ ID NO: 53864 - protein, 29 aa, Artificial Sequence
  Cyclic GFR-binding peptide
  MOD_RES (27)..(29): Xaa is C or S
NAISMLYFDEYDKVVLKKYREMVVEGXGX

SEQ ID NO: 53865 - protein, 28 aa, Artificial Sequence
  Cyclic GFR-binding peptide
PTQLEPLTVLYYDDSSNVIEQLSNNMVV

SEQ ID NO: 53866 - protein, 38 aa, Artificial Sequence; identical to SEQ ID NO: 21146
  Cyclic GFR-binding peptide
  MOD_RES (3)..(4)..(35)..(37): Xaa is C or S

SEQ ID NO: 53867 - protein, 32 aa, Artificial Sequence; identical to SEQ ID NO: 21148
  Cyclic GFR-binding peptide
  MOD_RES (30)..(32): Xaa is C or S

SEQ ID NO: 53868 - protein, 23 aa, Artificial Sequence
  Cyclic GFR-binding peptide
SPISILFIIGKTPKIYKQYEMIV

SEQ ID NO: 53869 - protein, 23 aa, Artificial Sequence
  Cyclic GFR-binding peptide
ELEPLPMVYYDENEKVVEQLSND

SEQ ID NO: 53870 - protein, 22 aa, Artificial Sequence
  Cyclic GFR-binding peptide
NAISILYFIGKTPKILKKYRMI

SEQ ID NO: 53871 - protein, 37 aa, Artificial Sequence; identical to SEQ ID NO: 21154
  Cyclic GFR-binding peptide
  MOD_RES (2)..(3)..(35)..(37): Xaa is C or S

SEQ ID NO: 53872 - protein, 37 aa, Artificial Sequence; identical to SEQ ID NO: 21155
  Cyclic GFR-binding peptide
  MOD_RES (2)..(3)..(35)..(37): Xaa is C or S

SEQ ID NO: 53873 - protein, 33 aa, Artificial Sequence; identical to SEQ ID NO: 21156
  Cyclic GFR-binding peptide
  MOD_RES (32)..(32): Xaa is C or S

SEQ ID NO: 53874 - protein, 28 aa, Artificial Sequence
  Cyclic GFR-binding peptide
  MOD_RES (28)..(28): Xaa is C or S
DLSPISILFIVGRTPKVYKQYEMVVKSX

SEQ ID NO: 53875 - protein, 23 aa, Artificial Sequence
  Cyclic GFR-binding peptide
ELNAISMLYFDEYDKVVLKKYRE

SEQ ID NO: 53876 - protein, 37 aa, Artificial Sequence; identical to SEQ ID NO: 21163
  Cyclic GFR-binding peptide
  MOD_RES (4)..(36): Xaa is C or S

SEQ ID NO: 53877 - protein, 31 aa, Artificial Sequence; identical to SEQ ID NO: 11087
  Cyclic GFR-binding peptide
  MOD_RES (29)..(31): Xaa is C or S

SEQ ID NO: 53878 - protein, 38 aa, Artificial Sequence; identical to SEQ ID NO: 21166
  Cyclic GFR-binding peptide
  MOD_RES (5)..(6)..(38): Xaa is C or S

SEQ ID NO: 53879 - protein, 32 aa, Artificial Sequence; identical to SEQ ID NO: 21167
  Cyclic GFR-binding peptide
  MOD_RES (3)..(3): Xaa is C or S

SEQ ID NO: 53880 - protein, 33 aa, Artificial Sequence; identical to SEQ ID NO: 11092
  Cyclic GFR-binding peptide
  MOD_RES (3)..(4): Xaa is C or S

SEQ ID NO: 53881 - protein, 32 aa, Artificial Sequence; identical to SEQ ID NO: 21169
  Cyclic GFR-binding peptide
  MOD_RES (31)..(31): Xaa is C or S

SEQ ID NO: 53882 - protein, 33 aa, Artificial Sequence; identical to SEQ ID NO: 21170
  Cyclic GFR-binding peptide
  MOD_RES (5)..(6): Xaa is C or S

SEQ ID NO: 53883 - protein, 32 aa, Artificial Sequence; identical to SEQ ID NO: 21173
  Cyclic GFR-binding peptide
  MOD_RES (3)..(4): Xaa is C or S

SEQ ID NO: 53884 - protein, 28 aa, Artificial Sequence
  Cyclic GFR-binding peptide
  MOD_RES (27)..(27): Xaa is C or S
NAISILYFDSANNVVLKKYRDMVVESXG

SEQ ID NO: 53885 - protein, 31 aa, Artificial Sequence; identical to SEQ ID NO: 21175
  Cyclic GFR-binding peptide
  MOD_RES (29)..(31): Xaa is C or S

SEQ ID NO: 53886 - protein, 39 aa, Artificial Sequence; identical to SEQ ID NO: 21177
  Cyclic GFR-binding peptide
  MOD_RES (4)..(5)..(37)..(39): Xaa is C or S

SEQ ID NO: 53887 - protein, 25 aa, Artificial Sequence
  Cyclic GFR-binding peptide
DLSPISILFIVGRTPKVYKQYEMVV

SEQ ID NO: 53888 - protein, 38 aa, Artificial Sequence; identical to SEQ ID NO: 21180
  Cyclic GFR-binding peptide
  MOD_RES (3)..(4)..(36)..(38): Xaa is C or S

SEQ ID NO: 53889 - protein, 24 aa, Artificial Sequence
  Cyclic GFR-binding peptide
ALNAISILYFVGRKPKVLKKYRMI

SEQ ID NO: 53890 - protein, 29 aa, Artificial Sequence
  Cyclic GFR-binding peptide
  MOD_RES (27)..(29): Xaa is C or S
EPLPVVYYDDSSNVIEQLSNNMVVRAXGX

SEQ ID NO: 53891 - protein, 28 aa, Artificial Sequence
  Cyclic GFR-binding peptide
VPTELNAISMLYFDEYDKVVLKKYREMV

SEQ ID NO: 53892 - protein, 37 aa, Artificial Sequence; identical to SEQ ID NO: 21184
  Cyclic GFR-binding peptide
  MOD_RES (2)..(3)..(35)..(37): Xaa is C or S

SEQ ID NO: 53893 - protein, 24 aa, Artificial Sequence
  Cyclic GFR-binding peptide
EPLPMVYYDEYDKVVEQLSNEMVV

SEQ ID NO: 53894 - protein, 25 aa, Artificial Sequence
  Cyclic GFR-binding peptide
VSQDLEPLPIVYYIGKTPKIEQLSN

SEQ ID NO: 53895 - protein, 35 aa, Artificial Sequence; identical to SEQ ID NO: 21188
  Cyclic GFR-binding peptide
  MOD_RES (5)..(6): Xaa is C or S

SEQ ID NO: 53896 - protein, 36 aa, Artificial Sequence; identical to SEQ ID NO: 21190
  Cyclic GFR-binding peptide
  MOD_RES (1)..(2)..(34)..(36): Xaa is C or S

SEQ ID NO: 53897 - protein, 22 aa, Artificial Sequence
  Cyclic GFR-binding peptide
LSPISMLFIDEYDKVVYKQYEE

SEQ ID NO: 53898 - protein, 30 aa, Artificial Sequence; identical to SEQ ID NO: 21192
  Cyclic GFR-binding peptide
  MOD_RES (28)..(30): Xaa is C or S

SEQ ID NO: 53899 - protein, 20 aa, Artificial Sequence
  Cyclic GFR-binding peptide
NAISILYFVGRTPKVLKKYR

SEQ ID NO: 53900 - protein, 29 aa, Artificial Sequence
  Cyclic GFR-binding peptide
  MOD_RES (3)..(4): Xaa is C or S
SPXXVSQDLSPISILFIIGKTPKIYKQYE

SEQ ID NO: 53901 - protein, 36 aa, Artificial Sequence; identical to SEQ ID NO: 21195
  Cyclic GFR-binding peptide
  MOD_RES (4)..(36): Xaa is C or S

SEQ ID NO: 53902 - protein, 24 aa, Artificial Sequence
  Cyclic GFR-binding peptide
TELEPLPMVYYDEYDKVVEQLSNE

SEQ ID NO: 53903 - protein, 23 aa, Artificial Sequence
  Cyclic GFR-binding peptide
EPLPMVYYDENEKVVEQLSNDMV

SEQ ID NO: 53904 - protein, 24 aa, Artificial Sequence
  Cyclic GFR-binding peptide
ELSPISMLFIDENEKVVYKQYEDM

SEQ ID NO: 53905 - protein, 37 aa, Artificial Sequence; identical to SEQ ID NO: 21200
  Cyclic GFR-binding peptide
  MOD_RES (6)..(7): Xaa is C or S

SEQ ID NO: 53906 - protein, 27 aa, Artificial Sequence
  Cyclic GFR-binding peptide
  MOD_RES (1)..(1): Xaa is C or S
XVPQALNAISILYFVGRKPKVLKKYRM

SEQ ID NO: 53907 - protein, 26 aa, Artificial Sequence
  Cyclic GFR-binding peptide
ALNAISILYFVGRKPKVLKKYRMIVR

SEQ ID NO: 53908 - protein, 31 aa, Artificial Sequence; identical to SEQ ID NO: 21203
  Cyclic GFR-binding peptide
  MOD_RES (2)..(3): Xaa is C or S

SEQ ID NO: 53909 - protein, 30 aa, Artificial Sequence; identical to SEQ ID NO: 21204
  Cyclic GFR-binding peptide
  MOD_RES (28)..(30): Xaa is C or S

SEQ ID NO: 53910 - protein, 27 aa, Artificial Sequence
  Cyclic GFR-binding peptide
PTRLEPLPIVYYDSANNVVEQLSNDMV

SEQ ID NO: 53911 - protein, 32 aa, Artificial Sequence; identical to SEQ ID NO: 11135
  Cyclic GFR-binding peptide
  MOD_RES (31)..(31): Xaa is C or S

SEQ ID NO: 53912 - protein, 37 aa, Artificial Sequence; identical to SEQ ID NO: 21209
  Cyclic GFR-binding peptide
  MOD_RES (4)..(5)..(37): Xaa is C or S

SEQ ID NO: 53913 - protein, 37 aa, Artificial Sequence; identical to SEQ ID NO: 21211
  Cyclic GFR-binding peptide
  MOD_RES (3)..(4)..(35)..(37): Xaa is C or S

SEQ ID NO: 53914 - protein, 34 aa, Artificial Sequence; identical to SEQ ID NO: 21212
  Cyclic GFR-binding peptide
  MOD_RES (31)..(33): Xaa is C or S

SEQ ID NO: 53915 - protein, 25 aa, Artificial Sequence
  Cyclic GFR-binding peptide
SPISMLFIDENEKVVYKQYEDMVVE

SEQ ID NO: 53916 - protein, 29 aa, Artificial Sequence
  Cyclic GFR-binding peptide
VPQDLSPISILFIVGRTPKVYKQYEMVVK

SEQ ID NO: 53917 - protein, 23 aa, Artificial Sequence
  Cyclic GFR-binding peptide
ELEPLTMLYYDENEKVVEQLSND

SEQ ID NO: 53918 - protein, 33 aa, Artificial Sequence; identical to SEQ ID NO: 21218
  Cyclic GFR-binding peptide
  MOD_RES (5)..(6): Xaa is C or S

SEQ ID NO: 53919 - protein, 30 aa, Artificial Sequence; identical to SEQ ID NO: 21219
  Cyclic GFR-binding peptide
  MOD_RES (1)..(2): Xaa is C or S

SEQ ID NO: 53920 - protein, 36 aa, Artificial Sequence; identical to SEQ ID NO: 11148
  Cyclic GFR-binding peptide
  MOD_RES (3)..(4)..(36): Xaa is C or S

SEQ ID NO: 53921 - protein, 30 aa, Artificial Sequence; identical to SEQ ID NO: 21221
  Cyclic GFR-binding peptide
  MOD_RES (3)..(3): Xaa is C or S

SEQ ID NO: 53922 - protein, 32 aa, Artificial Sequence; identical to SEQ ID NO: 21222
  Cyclic GFR-binding peptide
  MOD_RES (3)..(4): Xaa is C or S

SEQ ID NO: 53923 - protein, 34 aa, Artificial Sequence; identical to SEQ ID NO: 11151
  Cyclic GFR-binding peptide
  MOD_RES (4)..(5): Xaa is C or S

SEQ ID NO: 53924 - protein, 35 aa, Artificial Sequence; identical to SEQ ID NO: 21224
  Cyclic GFR-binding peptide
  MOD_RES (1)..(2)..(34): Xaa is C or S

SEQ ID NO: 53925 - protein, 28 aa, Artificial Sequence
  Cyclic GFR-binding peptide
  MOD_RES (2)..(2): Xaa is C or S
TXAPTKLEPLTVLYYDDSSNVIEQLSNN

SEQ ID NO: 53926 - protein, 29 aa, Artificial Sequence
  Cyclic GFR-binding peptide
  MOD_RES (29)..(29): Xaa is C or S
ELSPISMLFIDENEKVVYKQYEDMVVEGX

SEQ ID NO: 53927 - protein, 28 aa, Artificial Sequence
  Cyclic GFR-binding peptide
  MOD_RES (2)..(2): Xaa is C or S
TXAPTKLSPISVLFIDDSSNVIYKQYEN

SEQ ID NO: 53928 - protein, 30 aa, Artificial Sequence; identical to SEQ ID NO: 21229
  Cyclic GFR-binding peptide
  MOD_RES (1)..(2): Xaa is C or S

SEQ ID NO: 53929 - protein, 23 aa, Artificial Sequence
  Cyclic GFR-binding peptide
LEPLPIVYYVGRTPKVEQLSNMV

SEQ ID NO: 53930 - protein, 34 aa, Artificial Sequence; identical to SEQ ID NO: 21231
  Cyclic GFR-binding peptide
  MOD_RES (2)..(3): Xaa is C or S

SEQ ID NO: 53931 - protein, 24 aa, Artificial Sequence
  Cyclic GFR-binding peptide
LEPLTVLYYDDSSNVIEQLSNNMV

SEQ ID NO: 53932 - protein, 31 aa, Artificial Sequence; identical to SEQ ID NO: 21233
  Cyclic GFR-binding peptide

SEQ ID NO: 53933 - protein, 29 aa, Artificial Sequence
  Cyclic GFR-binding peptide
TELEPLPMVYYDEYDKVVEQLSNEMVVEG

SEQ ID NO: 53934 - protein, 22 aa, Artificial Sequence
  Cyclic GFR-binding peptide
DLEPLPIVYYVGRTPKVEQLSN

SEQ ID NO: 53935 - protein, 33 aa, Artificial Sequence; identical to SEQ ID NO: 21237
  Cyclic GFR-binding peptide
  MOD_RES (6)..(7): Xaa is C or S

SEQ ID NO: 53936 - protein, 29 aa, Artificial Sequence
  Cyclic GFR-binding peptide
  MOD_RES (1)..(1): Xaa is C or S
XVPTELEPLPMVYYDEYDKVVEQLSNEMV

SEQ ID NO: 53937 - protein, 31 aa, Artificial Sequence; identical to SEQ ID NO: 21240
  Cyclic GFR-binding peptide
  MOD_RES (5)..(6): Xaa is C or S

SEQ ID NO: 53938 - protein, 29 aa, Artificial Sequence
  Cyclic GFR-binding peptide
  MOD_RES (28)..(28): Xaa is C or S
DLEPLPIVYYVGRTPKVEQLSNMVVKSXK

SEQ ID NO: 53939 - protein, 28 aa, Artificial Sequence
  Cyclic GFR-binding peptide
  MOD_RES (26)..(28): Xaa is C or S
SPISILFIVGRTPKVYKQYEMVVKSXKX

SEQ ID NO: 53940 - protein, 38 aa, Artificial Sequence; identical to SEQ ID NO: 21244
  Cyclic GFR-binding peptide
  MOD_RES (7)..(7): Xaa is C or S

SEQ ID NO: 53941 - protein, 27 aa, Artificial Sequence
  Cyclic GFR-binding peptide
  MOD_RES (1)..(2): Xaa is C or S
XXVPQDLEPLPIVYYVGRTPKVEQLSN

SEQ ID NO: 53942 - protein, 35 aa, Artificial Sequence; identical to SEQ ID NO: 21246
  Cyclic GFR-binding peptide
  MOD_RES (1)..(2)..(34): Xaa is C or S

SEQ ID NO: 53943 - protein, 30 aa, Artificial Sequence; identical to SEQ ID NO: 21247
  Cyclic GFR-binding peptide
  MOD_RES (1)..(2): Xaa is C or S

SEQ ID NO: 53944 - protein, 25 aa, Artificial Sequence
  Cyclic GFR-binding peptide
PTELEPLTMLYYDEYDKVVEQLSNE

SEQ ID NO: 53945 - protein, 27 aa, Artificial Sequence
  Cyclic GFR-binding peptide
  MOD_RES (27)..(27): Xaa is C or S
LSPISILFIIGKTPKIYKQYEMIVKSX

SEQ ID NO: 53946 - protein, 32 aa, Artificial Sequence; identical to SEQ ID NO: 21250
  Cyclic GFR-binding peptide
  MOD_RES (1)..(1): Xaa is C or S

SEQ ID NO: 53947 - protein, 33 aa, Artificial Sequence; identical to SEQ ID NO: 21251
  Cyclic GFR-binding peptide
  MOD_RES (6)..(7): Xaa is C or S

SEQ ID NO: 53948 - protein, 36 aa, Artificial Sequence; identical to SEQ ID NO: 11174
  Cyclic GFR-binding peptide
  MOD_RES (5)..(6): Xaa is C or S

SEQ ID NO: 53949 - protein, 39 aa, Artificial Sequence; identical to SEQ ID NO: 21254
  Cyclic GFR-binding peptide
  MOD_RES (6)..(7)..(39): Xaa is C or S

SEQ ID NO: 53950 - protein, 30 aa, Artificial Sequence; identical to SEQ ID NO: 21256
  Cyclic GFR-binding peptide
  MOD_RES (3)..(4): Xaa is C or S

SEQ ID NO: 53951 - protein, 30 aa, Artificial Sequence; identical to SEQ ID NO: 21257
  Cyclic GFR-binding peptide
  MOD_RES (3)..(4): Xaa is C or S

SEQ ID NO: 53952 - protein, 27 aa, Artificial Sequence
  Cyclic GFR-binding peptide
TELEPLTMLYYDENEKVVEQLSNDMVV

SEQ ID NO: 53953 - protein, 29 aa, Artificial Sequence
  Cyclic GFR-binding peptide
  MOD_RES (28)..(28): Xaa is C or S
LEPLPVVYYDDSSNVIEQLSNNMVVRSXG

SEQ ID NO: 53954 - protein, 34 aa, Artificial Sequence; identical to SEQ ID NO: 21261
  Cyclic GFR-binding peptide
  MOD_RES (1)..(2)..(34): Xaa is C or S

SEQ ID NO: 53955 - protein, 24 aa, Artificial Sequence
  Cyclic GFR-binding peptide
NAISILYFVGRTPKVLKKYRMVVK

SEQ ID NO: 53956 - protein, 30 aa, Artificial Sequence; identical to SEQ ID NO: 21263
  Cyclic GFR-binding peptide
  MOD_RES (4)..(5): Xaa is C or S

SEQ ID NO: 53957 - protein, 26 aa, Artificial Sequence
  Cyclic GFR-binding peptide
QALEPLTILYYVGRKPKVEQLSNMIV

SEQ ID NO: 53958 - protein, 38 aa, Artificial Sequence; identical to SEQ ID NO: 21267
  Cyclic GFR-binding peptide
  MOD_RES (3)..(4)..(35)..(37): Xaa is C or S

SEQ ID NO: 53959 - protein, 31 aa, Artificial Sequence; identical to SEQ ID NO: 21268
  Cyclic GFR-binding peptide
  MOD_RES (4)..(5): Xaa is C or S

SEQ ID NO: 53960 - protein, 39 aa, Artificial Sequence; identical to SEQ ID NO: 21269
  Cyclic GFR-binding peptide
  MOD_RES (6)..(7)..(39): Xaa is C or S

SEQ ID NO: 53961 - protein, 36 aa, Artificial Sequence; identical to SEQ ID NO: 21270
  Cyclic GFR-binding peptide
  MOD_RES (1)..(2)..(34)..(36): Xaa is C or S

SEQ ID NO: 53962 - protein, 28 aa, Artificial Sequence
  Cyclic GFR-binding peptide
  MOD_RES (27)..(27): Xaa is C or S
LEPLPIVYYIGKTPKIEQLSNMIVKSXK

SEQ ID NO: 53963 - protein, 28 aa, Artificial Sequence
  Cyclic GFR-binding peptide
VPTRLNAISILYFDSANNVVLKKYRDMV

SEQ ID NO: 53964 - protein, 27 aa, Artificial Sequence
  Cyclic GFR-binding peptide
RLNAISILYFDSANNVVLKKYRDMVVE

SEQ ID NO: 53965 - protein, 30 aa, Artificial Sequence; identical to SEQ ID NO: 11203
  Cyclic GFR-binding peptide

SEQ ID NO: 53966 - protein, 29 aa, Artificial Sequence
  Cyclic GFR-binding peptide
  MOD_RES (29)..(29): Xaa is C or S
QLSPISVLFIDDSSNVIYKQYENMVVRAX

SEQ ID NO: 53967 - protein, 37 aa, Artificial Sequence; identical to SEQ ID NO: 21279
  Cyclic GFR-binding peptide
  MOD_RES (5)..(6): Xaa is C or S

SEQ ID NO: 53968 - protein, 34 aa, Artificial Sequence; identical to SEQ ID NO: 21280
  Cyclic GFR-binding peptide
  MOD_RES (32)..(34): Xaa is C or S

SEQ ID NO: 53969 - protein, 25 aa, Artificial Sequence
  Cyclic GFR-binding peptide
VPTELEPLTMLYYDEYDKVVEQLSN

SEQ ID NO: 53970 - protein, 24 aa, Artificial Sequence
  Cyclic GFR-binding peptide
LEPLTILYYVGRKPKVEQLSNMIV

SEQ ID NO: 53971 - protein, 26 aa, Artificial Sequence
  Cyclic GFR-binding peptide
PQALNAISILYFVGRKPKVLKKYRMI

SEQ ID NO: 53972 - protein, 25 aa, Artificial Sequence
  Cyclic GFR-binding peptide
KLSPISVLFIDDSSNVIYKQYENMV

SEQ ID NO: 53973 - protein, 37 aa, Artificial Sequence; identical to SEQ ID NO: 21286
  Cyclic GFR-binding peptide
  MOD_RES (2)..(34)..(36): Xaa is C or S

SEQ ID NO: 53974 - protein, 25 aa, Artificial Sequence
  Cyclic GFR-binding peptide
TELEPLTMLYYDENEKVVEQLSNDM

SEQ ID NO: 53975 - protein, 29 aa, Artificial Sequence
  Cyclic GFR-binding peptide
  MOD_RES (1)..(1): Xaa is C or S
XVPTELNAISMLYFDENEKVVLKKYRDMV

SEQ ID NO: 53976 - protein, 37 aa, Artificial Sequence; identical to SEQ ID NO: 21289
  Cyclic GFR-binding peptide
  MOD_RES (4)..(36): Xaa is C or S

SEQ ID NO: 53977 - protein, 33 aa, Artificial Sequence; identical to SEQ ID NO: 11216
  Cyclic GFR-binding peptide
  MOD_RES (31)..(33): Xaa is C or S

SEQ ID NO: 53978 - protein, 39 aa, Artificial Sequence; identical to SEQ ID NO: 21291
  Cyclic GFR-binding peptide
  MOD_RES (6)..(7)..(38): Xaa is C or S

SEQ ID NO: 53979 - protein, 29 aa, Artificial Sequence
  Cyclic GFR-binding peptide
SQDLSPISILFIIGKTPKIYKQYEMIVKS

SEQ ID NO: 53980 - protein, 28 aa, Artificial Sequence
  Cyclic GFR-binding peptide
TELEPLPMVYYDENEKVVEQLSNDMVVE

SEQ ID NO: 53981 - protein, 24 aa, Artificial Sequence
  Cyclic GFR-binding peptide
RLEPLTILYYDSANNVVEQLSNDM

SEQ ID NO: 53982 - protein, 35 aa, Artificial Sequence; identical to SEQ ID NO: 21296
  Cyclic GFR-binding peptide
  MOD_RES (7)..(7): Xaa is C or S

SEQ ID NO: 53983 - protein, 22 aa, Artificial Sequence
  Cyclic GFR-binding peptide
ELEPLPMVYYDEYDKVVEQLSN

SEQ ID NO: 53984 - protein, 31 aa, Artificial Sequence; identical to SEQ ID NO: 21299
  Cyclic GFR-binding peptide
  MOD_RES (2)..(3): Xaa is C or S

SEQ ID NO: 53985 - protein, 30 aa, Artificial Sequence; identical to SEQ ID NO: 21300
  Cyclic GFR-binding peptide
  MOD_RES (30)..(30): Xaa is C or S

SEQ ID NO: 53986 - protein, 37 aa, Artificial Sequence; identical to SEQ ID NO: 21301
  Cyclic GFR-binding peptide
  MOD_RES (1)..(2)..(34)..(36): Xaa is C or S

SEQ ID NO: 53987 - protein, 28 aa, Artificial Sequence
  Cyclic GFR-binding peptide
  MOD_RES (28)..(28): Xaa is C or S
LNAISILYFDSANNVVLKKYRDMVVESX

SEQ ID NO: 53988 - protein, 34 aa, Artificial Sequence; identical to SEQ ID NO: 11231
  Cyclic GFR-binding peptide
  MOD_RES (2)..(3): Xaa is C or S

SEQ ID NO: 53989 - protein, 35 aa, Artificial Sequence; identical to SEQ ID NO: 21304
  Cyclic GFR-binding peptide
  MOD_RES (5)..(6): Xaa is C or S

SEQ ID NO: 53990 - protein, 35 aa, Artificial Sequence; identical to SEQ ID NO: 21305
  Cyclic GFR-binding peptide
  MOD_RES (1)..(2)..(34): Xaa is C or S

SEQ ID NO: 53991 - protein, 38 aa, Artificial Sequence; identical to SEQ ID NO: 21306
  Cyclic GFR-binding peptide
  MOD_RES (3)..(4)..(36)..(38): Xaa is C or S

SEQ ID NO: 53992 - protein, 37 aa, Artificial Sequence; identical to SEQ ID NO: 11236
  Cyclic GFR-binding peptide
  MOD_RES (4)..(5)..(37): Xaa is C or S

SEQ ID NO: 53993 - protein, 22 aa, Artificial Sequence
  Cyclic GFR-binding peptide
EPLTILYYVGRKPKVEQLSNMI

SEQ ID NO: 53994 - protein, 32 aa, Artificial Sequence; identical to SEQ ID NO: 11244
  Cyclic GFR-binding peptide
  MOD_RES (5)..(6): Xaa is C or S

SEQ ID NO: 53995 - protein, 31 aa, Artificial Sequence; identical to SEQ ID NO: 21313
  Cyclic GFR-binding peptide
  MOD_RES (1)..(2): Xaa is C or S

SEQ ID NO: 53996 - protein, 26 aa, Artificial Sequence
  Cyclic GFR-binding peptide
QDLNAISILYFIGKTPKILKKYRMIV

SEQ ID NO: 53997 - protein, 31 aa, Artificial Sequence; identical to SEQ ID NO: 11249
  Cyclic GFR-binding peptide
  MOD_RES (30)..(30): Xaa is C or S

SEQ ID NO: 53998 - protein, 31 aa, Artificial Sequence; identical to SEQ ID NO: 21316
  Cyclic GFR-binding peptide
  MOD_RES (3)..(4): Xaa is C or S

SEQ ID NO: 53999 - protein, 40 aa, Artificial Sequence; identical to SEQ ID NO: 11254
  Cyclic GFR-binding peptide
  MOD_RES (6)..(7)..(39): Xaa is C or S

SEQ ID NO: 54000 - protein, 29 aa, Artificial Sequence
  Cyclic GFR-binding peptide
  MOD_RES (27)..(29): Xaa is C or S
NAISMLYFDENEKVVLKKYRDMVVEGXGX

SEQ ID NO: 54001 - protein, 30 aa, Artificial Sequence; identical to SEQ ID NO: 21324
  Cyclic GFR-binding peptide
  MOD_RES (1)..(1): Xaa is C or S

SEQ ID NO: 54002 - protein, 20 aa, Artificial Sequence
  Cyclic GFR-binding peptide
NAISMLYFDEYDKVVLKKYR

SEQ ID NO: 54003 - protein, 32 aa, Artificial Sequence; identical to SEQ ID NO: 21326
  Cyclic GFR-binding peptide
  MOD_RES (2)..(3): Xaa is C or S

SEQ ID NO: 54004 - protein, 28 aa, Artificial Sequence
  Cyclic GFR-binding peptide
APTKLEPLPVVYYDDSSNVIEQLSNNMV

SEQ ID NO: 54005 - protein, 30 aa, Artificial Sequence; identical to SEQ ID NO: 11270
  Cyclic GFR-binding peptide

SEQ ID NO: 54006 - protein, 39 aa, Artificial Sequence; identical to SEQ ID NO: 21331
  Cyclic GFR-binding peptide
  MOD_RES (6)..(7)..(39): Xaa is C or S

SEQ ID NO: 54007 - protein, 25 aa, Artificial Sequence
  Cyclic GFR-binding peptide
PTELSPISMLFIDEYDKVVYKQYEE

SEQ ID NO: 54008 - protein, 28 aa, Artificial Sequence
  Cyclic GFR-binding peptide
  MOD_RES (28)..(28): Xaa is C or S
LSPISVLFIDDSSNVIYKQYENMVVRSX

SEQ ID NO: 54009 - protein, 36 aa, Artificial Sequence; identical to SEQ ID NO: 21334
  Cyclic GFR-binding peptide
  MOD_RES (1)..(2)..(33)..(35): Xaa is C or S

SEQ ID NO: 54010 - protein, 29 aa, Artificial Sequence
  Cyclic GFR-binding peptide
  MOD_RES (1)..(1): Xaa is C or S
XVPTRLEPLPIVYYDSANNVVEQLSNDMV

SEQ ID NO: 54011 - protein, 23 aa, Artificial Sequence
  Cyclic GFR-binding peptide
ELSPISMLFIDENEKVVYKQYED

SEQ ID NO: 54012 - protein, 32 aa, Artificial Sequence; identical to SEQ ID NO: 11282
  Cyclic GFR-binding peptide
  MOD_RES (4)..(5): Xaa is C or S

SEQ ID NO: 54013 - protein, 23 aa, Artificial Sequence
  Cyclic GFR-binding peptide
QDLNAISILYFIGKTPKILKKYR

SEQ ID NO: 54014 - protein, 31 aa, Artificial Sequence; identical to SEQ ID NO: 11287
  Cyclic GFR-binding peptide
  MOD_RES (28)..(30): Xaa is C or S

SEQ ID NO: 54015 - protein, 28 aa, Artificial Sequence
  Cyclic GFR-binding peptide
QALSPISILFIVGRKPKVYKQYEMIVRS

SEQ ID NO: 54016 - protein, 32 aa, Artificial Sequence; identical to SEQ ID NO: 21347
  Cyclic GFR-binding peptide
  MOD_RES (1)..(1): Xaa is C or S

SEQ ID NO: 54017 - protein, 25 aa, Artificial Sequence
  Cyclic GFR-binding peptide
EPLPIVYYDSANNVVEQLSNDMVVE

SEQ ID NO: 54018 - protein, 21 aa, Artificial Sequence
  Cyclic GFR-binding peptide
SPISILFIVGRKPKVYKQYEM

SEQ ID NO: 54019 - protein, 30 aa, Artificial Sequence; identical to SEQ ID NO: 21350
  Cyclic GFR-binding peptide
  MOD_RES (1)..(2): Xaa is C or S

SEQ ID NO: 54020 - protein, 33 aa, Artificial Sequence; identical to SEQ ID NO: 21351
  Cyclic GFR-binding peptide
  MOD_RES (1)..(2): Xaa is C or S

SEQ ID NO: 54021 - protein, 34 aa, Artificial Sequence; identical to SEQ ID NO: 21352
  Cyclic GFR-binding peptide
  MOD_RES (3)..(4): Xaa is C or S

SEQ ID NO: 54022 - protein, 28 aa, Artificial Sequence
  Cyclic GFR-binding peptide
  MOD_RES (1)..(2): Xaa is C or S
XXVPQALNAISILYFVGRKPKVLKKYRM

SEQ ID NO: 54023 - protein, 22 aa, Artificial Sequence
  Cyclic GFR-binding peptide
NAISMLYFDENEKVVLKKYRDM

SEQ ID NO: 54024 - protein, 37 aa, Artificial Sequence; identical to SEQ ID NO: 21355
  Cyclic GFR-binding peptide
  MOD_RES (1)..(2)..(34)..(36): Xaa is C or S

SEQ ID NO: 54025 - protein, 31 aa, Artificial Sequence; identical to SEQ ID NO: 21357
  Cyclic GFR-binding peptide
  MOD_RES (4)..(5): Xaa is C or S

SEQ ID NO: 54026 - protein, 30 aa, Artificial Sequence; identical to SEQ ID NO: 21358
  Cyclic GFR-binding peptide
  MOD_RES (2)..(3): Xaa is C or S

SEQ ID NO: 54027 - protein, 29 aa, Artificial Sequence
  Cyclic GFR-binding peptide
  MOD_RES (2)..(3): Xaa is C or S
AXXVPTELNAISMLYFDEYDKVVLKKYRE

SEQ ID NO: 54028 - protein, 31 aa, Artificial Sequence; identical to SEQ ID NO: 21360
  Cyclic GFR-binding peptide
  MOD_RES (1)..(2): Xaa is C or S

SEQ ID NO: 54029 - protein, 30 aa, Artificial Sequence; identical to SEQ ID NO: 11311
  Cyclic GFR-binding peptide
  MOD_RES (4)..(5): Xaa is C or S

SEQ ID NO: 54030 - protein, 35 aa, Artificial Sequence; identical to SEQ ID NO: 11312
  Cyclic GFR-binding peptide
  MOD_RES (1)..(32)..(34): Xaa is C or S

SEQ ID NO: 54031 - protein, 30 aa, Artificial Sequence; identical to SEQ ID NO: 21363
  Cyclic GFR-binding peptide

SEQ ID NO: 54032 - protein, 28 aa, Artificial Sequence
  Cyclic GFR-binding peptide
ELNAISMLYFDENEKVVLKKYRDMVVEG

SEQ ID NO: 54033 - protein, 38 aa, Artificial Sequence; identical to SEQ ID NO: 21365
  Cyclic GFR-binding peptide
  MOD_RES (3)..(4)..(36)..(38): Xaa is C or S

SEQ ID NO: 54034 - protein, 33 aa, Artificial Sequence; identical to SEQ ID NO: 11316
  Cyclic GFR-binding peptide
  MOD_RES (2)..(3): Xaa is C or S

SEQ ID NO: 54035 - protein, 31 aa, Artificial Sequence; identical to SEQ ID NO: 11321
  Cyclic GFR-binding peptide
  MOD_RES (4)..(5): Xaa is C or S

SEQ ID NO: 54036 - protein, 30 aa, Artificial Sequence; identical to SEQ ID NO: 14055
  Cyclic GFR-binding peptide
  MOD_RES (2)..(4): Xaa is C or S

SEQ ID NO: 54037 - protein, 35 aa, Artificial Sequence; identical to SEQ ID NO: 28862
  Cyclic GFR-binding peptide
  MOD_RES (1)..(33)..(34): Xaa is C or S

SEQ ID NO: 54038 - protein, 24 aa, Artificial Sequence
  Cyclic GFR-binding peptide
EYQKYLLVRGNDIYLMSIPSTKVP

SEQ ID NO: 54039 - protein, 24 aa, Artificial Sequence
  Cyclic GFR-binding peptide
VAMGEYQKYYTVVGKDIYLISIPS

SEQ ID NO: 54040 - protein, 35 aa, Artificial Sequence
  Cyclic GFR-binding peptide
  MOD_RES (31)..(32): Xaa is C or S
EEVIMEYQKYLLVRGNDIYLMSIPSTKVPAXXTSP

SEQ ID NO: 54041 - protein, 25 aa, Artificial Sequence
  Cyclic GFR-binding peptide
VVMDEYQKYVVNNASDIYLISIPSL

SEQ ID NO: 54042 - protein, 35 aa, Artificial Sequence; identical to SEQ ID NO: 31795
  Cyclic GFR-binding peptide
  MOD_RES (31)..(32): Xaa is C or S

SEQ ID NO: 54043 - protein, 30 aa, Artificial Sequence; identical to SEQ ID NO: 31797
  Cyclic GFR-binding peptide
  MOD_RES (26)..(27): Xaa is C or S

SEQ ID NO: 54044 - protein, 25 aa, Artificial Sequence
  Cyclic GFR-binding peptide
VVMNEYQKYIVNNSSDIYLVSIPSL

SEQ ID NO: 54045 - protein, 32 aa, Artificial Sequence; identical to SEQ ID NO: 28873
  Cyclic GFR-binding peptide
  MOD_RES (31)..(32): Xaa is C or S

SEQ ID NO: 54046 - protein, 27 aa, Artificial Sequence
  Cyclic GFR-binding peptide
  MOD_RES (2)..(2): Xaa is C or S
GXEEVIMEYQKYLLVRGNDIYLMSIPS

SEQ ID NO: 54047 - protein, 29 aa, Artificial Sequence
  Cyclic GFR-binding peptide
EAVSMGEEYQKYTPVGMDDIYLVSIPSLK

SEQ ID NO: 54048 - protein, 32 aa, Artificial Sequence
  Cyclic GFR-binding peptide
  MOD_RES (2)..(2): Xaa is C or S
GXEEVIMEYQKYLLVRGNDIYLMSIPSTKVPA

SEQ ID NO: 54049 - protein, 30 aa, Artificial Sequence
  Cyclic GFR-binding peptide
  MOD_RES (27)..(28): Xaa is C or S
MEYQKYLLVRGNDIYLMSIPSTKVPAXXTS

SEQ ID NO: 54050 - protein, 25 aa, Artificial Sequence
  Cyclic GFR-binding peptide
EVVMEEYQKYVVKDYEDIYLMSIPS

SEQ ID NO: 54051 - protein, 31 aa, Artificial Sequence; identical to SEQ ID NO: 28881
  Cyclic GFR-binding peptide
  MOD_RES (1)..(1): Xaa is C or S

SEQ ID NO: 54052 - protein, 22 aa, Artificial Sequence
  Cyclic GFR-binding peptide
EYQKYIVNSSDDIYLVSIPSLK

SEQ ID NO: 54053 - protein, 32 aa, Artificial Sequence; identical to SEQ ID NO: 31816
  Cyclic GFR-binding peptide
  MOD_RES (30)..(31): Xaa is C or S

SEQ ID NO: 54054 - protein, 21 aa, Artificial Sequence
  Cyclic GFR-binding peptide
EYQKYIIQQKDNIYLMSIPSM

SEQ ID NO: 54055 - protein, 32 aa, Artificial Sequence
  Cyclic GFR-binding peptide
  MOD_RES (1)..(32): Xaa is C or S
XEEVIMEYQKYLLVRGNDIYLMSIPSTKVPAX

SEQ ID NO: 54056 - protein, 29 aa, Artificial Sequence
  Cyclic GFR-binding peptide
  MOD_RES (28)..(28): Xaa is C or S
MNEYQKYIVNSSDDIYLVSIPSLKTPAXT

SEQ ID NO: 54057 - protein, 22 aa, Artificial Sequence
  Cyclic GFR-binding peptide
EYQKYTPVGMDDIYLVSIPSLK

SEQ ID NO: 54058 - protein, 31 aa, Artificial Sequence; identical to SEQ ID NO: 28893
  Cyclic GFR-binding peptide
  MOD_RES (1)..(3): Xaa is C or S

SEQ ID NO: 54059 - protein, 36 aa, Artificial Sequence; identical to SEQ ID NO: 28895
  Cyclic GFR-binding peptide
  MOD_RES (31)..(32): Xaa is C or S

SEQ ID NO: 54060 - protein, 31 aa, Artificial Sequence; identical to SEQ ID NO: 31826
  Cyclic GFR-binding peptide
  MOD_RES (2)..(2): Xaa is C or S

SEQ ID NO: 54061 - protein, 30 aa, Artificial Sequence; identical to SEQ ID NO: 31831
  Cyclic GFR-binding peptide
  MOD_RES (1)..(3): Xaa is C or S

SEQ ID NO: 54062 - protein, 28 aa, Artificial Sequence
  Cyclic GFR-binding peptide
  MOD_RES (2)..(2): Xaa is C or S
GXSEVVMDEYQKYVVNNASDIYLISIPS

SEQ ID NO: 54063 - protein, 31 aa, Artificial Sequence
  Cyclic GFR-binding peptide
  MOD_RES (29)..(30): Xaa is C or S
VMDEYQKYVVNNASDIYLISIPSLRTPVXXT

SEQ ID NO: 54064 - protein, 38 aa, Artificial Sequence; identical to SEQ ID NO: 31836
  Cyclic GFR-binding peptide
  MOD_RES (32)..(32): Xaa is C or S

SEQ ID NO: 54065 - protein, 27 aa, Artificial Sequence
  Cyclic GFR-binding peptide
EVVMDEYQKYVVNNASDIYLISIPSLR

SEQ ID NO: 54066 - protein, 33 aa, Artificial Sequence; identical to SEQ ID NO: 11377
  Cyclic GFR-binding peptide
  MOD_RES (2)..(4): Xaa is C or S

SEQ ID NO: 54067 - protein, 21 aa, Artificial Sequence
  Cyclic GFR-binding peptide
EYQKYVVKENEDIYLMSIPSL

SEQ ID NO: 54068 - protein, 26 aa, Artificial Sequence
  Cyclic GFR-binding peptide
  MOD_RES (26)..(26): Xaa is C or S
EYQKYIVNSSDDIYLVSIPSLKTPAX

SEQ ID NO: 54069 - protein, 33 aa, Artificial Sequence
  Cyclic GFR-binding peptide
  MOD_RES (1)..(33): Xaa is C or S
XRDVVMGEYQKYIIQQKDNIYLMSIPSMKTPTX

SEQ ID NO: 54070 - protein, 24 aa, Artificial Sequence
  Cyclic GFR-binding peptide
EYQKYVVNNASDIYLISIPSLRTP

SEQ ID NO: 54071 - protein, 34 aa, Artificial Sequence; identical to SEQ ID NO: 28913
  Cyclic GFR-binding peptide
  MOD_RES (2)..(34): Xaa is C or S

SEQ ID NO: 54072 - protein, 29 aa, Artificial Sequence
  Cyclic GFR-binding peptide
  MOD_RES (2)..(4): Xaa is C or S
LXGXEEVIMEYQKYLLVRGNDIYLMSIPS

SEQ ID NO: 54073 - protein, 32 aa, Artificial Sequence; identical to SEQ ID NO: 31853
  Cyclic GFR-binding peptide
  MOD_RES (29)..(29): Xaa is C or S

SEQ ID NO: 54074 - protein, 38 aa, Artificial Sequence; identical to SEQ ID NO: 28923
  Cyclic GFR-binding peptide
  MOD_RES (2)..(4)..(36): Xaa is C or S

SEQ ID NO: 54075 - protein, 41 aa, Artificial Sequence; identical to SEQ ID NO: 28926
  Cyclic GFR-binding peptide
  MOD_RES (1)..(3)..(35)..(36): Xaa is C or S

SEQ ID NO: 54076 - protein, 24 aa, Artificial Sequence
  Cyclic GFR-binding peptide
MDEYQKYVVKENEDIYLMSIPSLE

SEQ ID NO: 54077 - protein, 34 aa, Artificial Sequence; identical to SEQ ID NO: 31858
  Cyclic GFR-binding peptide
  MOD_RES (2)..(4): Xaa is C or S

SEQ ID NO: 54078 - protein, 31 aa, Artificial Sequence; identical to SEQ ID NO: 31859
  Cyclic GFR-binding peptide
  MOD_RES (2)..(2): Xaa is C or S

SEQ ID NO: 54079 - protein, 33 aa, Artificial Sequence
  Cyclic GFR-binding peptide
  MOD_RES (32)..(33): Xaa is C or S
RDVVMGEYQKYIIQQKDNIYLMSIPSMKTPTXX

SEQ ID NO: 54080 - protein, 29 aa, Artificial Sequence
  Cyclic GFR-binding peptide
  MOD_RES (28)..(29): Xaa is C or S
IMEYQKYLLVRGNDIYLMSIPSTKVPAXX

SEQ ID NO: 54081 - protein, 22 aa, Artificial Sequence
  Cyclic GFR-binding peptide
IMEYQKYLLVRGNDIYLMSIPS

SEQ ID NO: 54082 - protein, 32 aa, Artificial Sequence
  Cyclic GFR-binding peptide
  MOD_RES (29)..(30): Xaa is C or S
VMDEYQKYVVNNASDIYLISIPSLRTPVXXTP

SEQ ID NO: 54083 - protein, 22 aa, Artificial Sequence
  Cyclic GFR-binding peptide
MEYQKYLLVRGNDIYLMSIPST

SEQ ID NO: 54084 - protein, 41 aa, Artificial Sequence; identical to SEQ ID NO: 28942
  Cyclic GFR-binding peptide
  MOD_RES (1)..(3)..(35)..(36): Xaa is C or S

SEQ ID NO: 54085 - protein, 38 aa, Artificial Sequence; identical to SEQ ID NO: 31873
  Cyclic GFR-binding peptide
  MOD_RES (32)..(33): Xaa is C or S

SEQ ID NO: 54086 - protein, 36 aa, Artificial Sequence; identical to SEQ ID NO: 28946
  Cyclic GFR-binding peptide
  MOD_RES (31)..(31): Xaa is C or S

SEQ ID NO: 54087 - protein, 41 aa, Artificial Sequence; identical to SEQ ID NO: 31881
  Cyclic GFR-binding peptide
  MOD_RES (1)..(3)..(35)..(36): Xaa is C or S

SEQ ID NO: 54088 - protein, 33 aa, Artificial Sequence
  Cyclic GFR-binding peptide
  MOD_RES (30)..(31): Xaa is C or S
VVMGEYQKYIIQQKDNIYLMSIPSMKTPTXXPG

SEQ ID NO: 54089 - protein, 26 aa, Artificial Sequence
  Cyclic GFR-binding peptide
ESVAMGEYQKYYTVVGKDIYLISIPS

SEQ ID NO: 54090 - protein, 32 aa, Artificial Sequence; identical to SEQ ID NO: 31883
  Cyclic GFR-binding peptide
  MOD_RES (1)..(1): Xaa is C or S

SEQ ID NO: 54091 - protein, 42 aa, Artificial Sequence; identical to SEQ ID NO: 14166
  Cyclic GFR-binding peptide
  MOD_RES (2)..(4)..(36)..(37): Xaa is C or S

SEQ ID NO: 54092 - protein, 26 aa, Artificial Sequence
  Cyclic GFR-binding peptide
VVMNEYQKYIVNNSSDIYLVSIPSLK

SEQ ID NO: 54093 - protein, 42 aa, Artificial Sequence; identical to SEQ ID NO: 31886
  Cyclic GFR-binding peptide
  MOD_RES (2)..(4)..(36)..(37): Xaa is C or S

SEQ ID NO: 54094 - protein, 35 aa, Artificial Sequence; identical to SEQ ID NO: 31889
  Cyclic GFR-binding peptide
  MOD_RES (32)..(32): Xaa is C or S

SEQ ID NO: 54095 - protein, 29 aa, Artificial Sequence
  Cyclic GFR-binding peptide
  MOD_RES (1)..(1): Xaa is C or S
XESVAMGEYQKYYTVVGKDIYLISIPSLK

SEQ ID NO: 54096 - protein, 34 aa, Artificial Sequence; identical to SEQ ID NO: 31892
  Cyclic GFR-binding peptide
  MOD_RES (2)..(4): Xaa is C or S

SEQ ID NO: 54097 - protein, 24 aa, Artificial Sequence
  Cyclic GFR-binding peptide
MEYQKYLLVRGNDIYLMSIPSTKV

SEQ ID NO: 54098 - protein, 36 aa, Artificial Sequence
  Cyclic GFR-binding peptide
  MOD_RES (1)..(33)..(34): Xaa is C or S
XSEVVMDEYQKYVVNNASDIYLISIPSLRTPVXXTP

SEQ ID NO: 54099 - protein, 28 aa, Artificial Sequence
  Cyclic GFR-binding peptide
ESVAMGEYQKYYTVVGKDIYLISIPSLK

SEQ ID NO: 54100 - protein, 36 aa, Artificial Sequence; identical to SEQ ID NO: 28963
  Cyclic GFR-binding peptide
  MOD_RES (30)..(31): Xaa is C or S

SEQ ID NO: 54101 - protein, 31 aa, Artificial Sequence; identical to SEQ ID NO: 28964
  Cyclic GFR-binding peptide
  MOD_RES (27)..(28): Xaa is C or S

SEQ ID NO: 54102 - protein, 31 aa, Artificial Sequence; identical to SEQ ID NO: 31896
  Cyclic GFR-binding peptide
  MOD_RES (26)..(27): Xaa is C or S

SEQ ID NO: 54103 - protein, 36 aa, Artificial Sequence; identical to SEQ ID NO: 31898
  Cyclic GFR-binding peptide
  MOD_RES (32)..(33): Xaa is C or S

SEQ ID NO: 54104 - protein, 27 aa, Artificial Sequence
  Cyclic GFR-binding peptide
MNEYQKYIVNSSDDIYLVSIPSLQTPA

SEQ ID NO: 54105 - protein, 33 aa, Artificial Sequence; identical to SEQ ID NO: 14178
  Cyclic GFR-binding peptide
  MOD_RES (2)..(4): Xaa is C or S

SEQ ID NO: 54106 - protein, 33 aa, Artificial Sequence; identical to SEQ ID NO: 31906
  Cyclic GFR-binding peptide
  MOD_RES (2)..(2): Xaa is C or S

SEQ ID NO: 54107 - protein, 33 aa, Artificial Sequence; identical to SEQ ID NO: 28978
  Cyclic GFR-binding peptide
  MOD_RES (2)..(2): Xaa is C or S

SEQ ID NO: 54108 - protein, 29 aa, Artificial Sequence
  Cyclic GFR-binding peptide
  MOD_RES (26)..(27): Xaa is C or S
EYQKYVVKENEDIYLMSIPSLETPVXXAK

SEQ ID NO: 54109 - protein, 28 aa, Artificial Sequence
  Cyclic GFR-binding peptide
VVMEEYQKYVVKDYEDIYLMSIPSLETP

SEQ ID NO: 54110 - protein, 26 aa, Artificial Sequence
  Cyclic GFR-binding peptide
EVVMEEYQKYVVKDYEDIYLMSIPSL

SEQ ID NO: 54111 - protein, 34 aa, Artificial Sequence; identical to SEQ ID NO: 31920
  Cyclic GFR-binding peptide
  MOD_RES (28)..(29): Xaa is C or S

SEQ ID NO: 54112 - protein, 33 aa, Artificial Sequence; identical to SEQ ID NO: 31923
  Cyclic GFR-binding peptide
  MOD_RES (29)..(30): Xaa is C or S

SEQ ID NO: 54113 - protein, 24 aa, Artificial Sequence
  Cyclic GFR-binding peptide
MNEYQKYIVNSSDDIYLVSIPSLK

SEQ ID NO: 54114 - protein, 28 aa, Artificial Sequence
  Cyclic GFR-binding peptide
  MOD_RES (26)..(27): Xaa is C or S
EYQKYIIQQKDNIYLMSIPSMKTPTXXP

SEQ ID NO: 54115 - protein, 32 aa, Artificial Sequence; identical to SEQ ID NO: 28990
  Cyclic GFR-binding peptide
  MOD_RES (27)..(27): Xaa is C or S

SEQ ID NO: 54116 - protein, 29 aa, Artificial Sequence
  Cyclic GFR-binding peptide
  MOD_RES (2)..(2): Xaa is C or S
GXAKVVMNEYQKYIVNNSSDIYLVSIPSL

SEQ ID NO: 54117 - protein, 31 aa, Artificial Sequence; identical to SEQ ID NO: 31935
  Cyclic GFR-binding peptide
  MOD_RES (1)..(3): Xaa is C or S

SEQ ID NO: 54118 - protein, 33 aa, Artificial Sequence
  Cyclic GFR-binding peptide
  MOD_RES (30)..(31): Xaa is C or S
EVIMEYQKYLLVRGNDIYLMSIPSTKVPAXXTS

SEQ ID NO: 54119 - protein, 36 aa, Artificial Sequence
  Cyclic GFR-binding peptide
  MOD_RES (1)..(32)..(33): Xaa is C or S
XEEVIMEYQKYLLVRGNDIYLMSIPSTKVPAXXTSP

SEQ ID NO: 54120 - protein, 39 aa, Artificial Sequence; identical to SEQ ID NO: 28998
  Cyclic GFR-binding peptide
  MOD_RES (2)..(4)..(36)..(37): Xaa is C or S

SEQ ID NO: 54121 - protein, 38 aa, Artificial Sequence; identical to SEQ ID NO: 31939
  Cyclic GFR-binding peptide
  MOD_RES (2)..(4)..(36)..(37): Xaa is C or S

SEQ ID NO: 54122 - protein, 21 aa, Artificial Sequence
  Cyclic GFR-binding peptide
NEYQKYIVNNSSDIYLVSIPS

SEQ ID NO: 54123 - protein, 29 aa, Artificial Sequence
  Cyclic GFR-binding peptide
  MOD_RES (28)..(29): Xaa is C or S
MGEYQKYYTVVGKDIYLISIPSLKTPVXX

SEQ ID NO: 54124 - protein, 27 aa, Artificial Sequence
  Cyclic GFR-binding peptide
VVMNEYQKYIVNNSSDIYLVSIPSLKT

SEQ ID NO: 54125 - protein, 41 aa, Artificial Sequence
  Cyclic GFR-binding peptide
  MOD_RES (2)..(4)..(36)..(37): Xaa is C or S
SXGXRDVVMGEYQKYIIQQKDNIYLMSIPSMKTPTXXPGAS

SEQ ID NO: 54126 - protein, 40 aa, Artificial Sequence; identical to SEQ ID NO: 31947
  Cyclic GFR-binding peptide
  MOD_RES (1)..(34)..(35): Xaa is C or S

SEQ ID NO: 54127 - protein, 23 aa, Artificial Sequence
  Cyclic GFR-binding peptide
IMEYQKYLLVRGNDIYLMSIPST

SEQ ID NO: 54128 - protein, 34 aa, Artificial Sequence; identical to SEQ ID NO: 31948
  Cyclic GFR-binding peptide
  MOD_RES (30)..(30): Xaa is C or S

SEQ ID NO: 54129 - protein, 32 aa, Artificial Sequence; identical to SEQ ID NO: 31953
  Cyclic GFR-binding peptide
  MOD_RES (27)..(28): Xaa is C or S

SEQ ID NO: 54130 - protein, 34 aa, Artificial Sequence; identical to SEQ ID NO: 29007
  Cyclic GFR-binding peptide
  MOD_RES (1)..(3): Xaa is C or S

SEQ ID NO: 54131 - protein, 32 aa, Artificial Sequence; identical to SEQ ID NO: 29008
  Cyclic GFR-binding peptide
  MOD_RES (29)..(30): Xaa is C or S

SEQ ID NO: 54132 - protein, 37 aa, Artificial Sequence; identical to SEQ ID NO: 31959
  Cyclic GFR-binding peptide
  MOD_RES (31)..(32): Xaa is C or S

SEQ ID NO: 54133 - protein, 36 aa, Artificial Sequence; identical to SEQ ID NO: 29009
  Cyclic GFR-binding peptide
  MOD_RES (2)..(34)..(35): Xaa is C or S

SEQ ID NO: 54134 - protein, 36 aa, Artificial Sequence; identical to SEQ ID NO: 31960
  Cyclic GFR-binding peptide
  MOD_RES (30)..(31): Xaa is C or S

SEQ ID NO: 54135 - protein, 32 aa, Artificial Sequence; identical to SEQ ID NO: 31963
  Cyclic GFR-binding peptide
  MOD_RES (2)..(4): Xaa is C or S

SEQ ID NO: 54136 - protein, 35 aa, Artificial Sequence
  Cyclic GFR-binding peptide
  MOD_RES (30)..(31): Xaa is C or S
VVMGEYQKYIIQQKDNIYLMSIPSMKTPTXXPGAS

SEQ ID NO: 54137 - protein, 35 aa, Artificial Sequence; identical to SEQ ID NO: 29019
  Cyclic GFR-binding peptide
  MOD_RES (29)..(30): Xaa is C or S

SEQ ID NO: 54138 - protein, 30 aa, Artificial Sequence; identical to SEQ ID NO: 31974
  Cyclic GFR-binding peptide
  MOD_RES (28)..(29): Xaa is C or S

SEQ ID NO: 54139 - protein, 31 aa, Artificial Sequence; identical to SEQ ID NO: 29023
  Cyclic GFR-binding peptide

SEQ ID NO: 54140 - protein, 30 aa, Artificial Sequence; identical to SEQ ID NO: 29030
  Cyclic GFR-binding peptide
  MOD_RES (28)..(29): Xaa is C or S

SEQ ID NO: 54141 - protein, 34 aa, Artificial Sequence; identical to SEQ ID NO: 29031
  Cyclic GFR-binding peptide
  MOD_RES (31)..(32): Xaa is C or S

SEQ ID NO: 54142 - protein, 32 aa, Artificial Sequence; identical to SEQ ID NO: 29032
  Cyclic GFR-binding peptide
  MOD_RES (28)..(29): Xaa is C or S

SEQ ID NO: 54143 - protein, 25 aa, Artificial Sequence
  Cyclic GFR-binding peptide
NEYQKYIVNSSDDIYLVSIPSLQTP

SEQ ID NO: 54144 - protein, 33 aa, Artificial Sequence
  Cyclic GFR-binding peptide
  MOD_RES (27)..(28): Xaa is C or S
MEYQKYLLVRGNDIYLMSIPSTKVPAXXTSPVR

SEQ ID NO: 54145 - protein, 27 aa, Artificial Sequence
  Cyclic GFR-binding peptide
  MOD_RES (27)..(27): Xaa is C or S
NEYQKYIVNSSDDIYLVSIPSLQTPAX

SEQ ID NO: 54146 - protein, 29 aa, Artificial Sequence
  Cyclic GFR-binding peptide
AKVVMNEYQKYIVNNSSDIYLVSIPSLKT

SEQ ID NO: 54147 - protein, 30 aa, Artificial Sequence; identical to SEQ ID NO: 31990
  Cyclic GFR-binding peptide
  MOD_RES (30)..(30): Xaa is C or S

SEQ ID NO: 54148 - protein, 33 aa, Artificial Sequence; identical to SEQ ID NO: 31993
  Cyclic GFR-binding peptide
  MOD_RES (27)..(28): Xaa is C or S

SEQ ID NO: 54149 - protein, 22 aa, Artificial Sequence
  Cyclic GFR-binding peptide
GEYQKYYTVVGKDIYLISIPSL

SEQ ID NO: 54150 - protein, 28 aa, Artificial Sequence
  Cyclic GFR-binding peptide
  MOD_RES (1)..(1): Xaa is C or S
XRDVVMGEYQKYIIQQKDNIYLMSIPSM

SEQ ID NO: 54151 - protein, 33 aa, Artificial Sequence; identical to SEQ ID NO: 29052
  Cyclic GFR-binding peptide
  MOD_RES (28)..(29): Xaa is C or S

SEQ ID NO: 54152 - protein, 29 aa, Artificial Sequence
  Cyclic GFR-binding peptide
  MOD_RES (26)..(27): Xaa is C or S
EYQKYIVNSSDDIYLVSIPSLKTPAXXPK

SEQ ID NO: 54153 - protein, 42 aa, Artificial Sequence; identical to SEQ ID NO: 29056
  Cyclic GFR-binding peptide
  MOD_RES (2)..(4)..(36)..(37): Xaa is C or S

SEQ ID NO: 54154 - protein, 38 aa, Artificial Sequence; identical to SEQ ID NO: 29058
  Cyclic GFR-binding peptide
  MOD_RES (1)..(3)..(35)..(36): Xaa is C or S

SEQ ID NO: 54155 - protein, 32 aa, Artificial Sequence; identical to SEQ ID NO: 32002
  Cyclic GFR-binding peptide
  MOD_RES (1)..(1): Xaa is C or S

SEQ ID NO: 54156 - protein, 25 aa, Artificial Sequence
  Cyclic GFR-binding peptide
VMNEYQKYIVNSSDDIYLVSIPSLQ

SEQ ID NO: 54157 - protein, 33 aa, Artificial Sequence; identical to SEQ ID NO: 32006
  Cyclic GFR-binding peptide
  MOD_RES (27)..(28): Xaa is C or S

SEQ ID NO: 54158 - protein, 37 aa, Artificial Sequence; identical to SEQ ID NO: 32007
  Cyclic GFR-binding peptide
  MOD_RES (1)..(3)..(35)..(36): Xaa is C or S

SEQ ID NO: 54159 - protein, 30 aa, Artificial Sequence
  Cyclic GFR-binding peptide
  MOD_RES (28)..(29): Xaa is C or S
MGEYQKYIIQQKDNIYLMSIPSMKTPTXXP

SEQ ID NO: 54160 - protein, 30 aa, Artificial Sequence
  Cyclic GFR-binding peptide
  MOD_RES (30)..(30): Xaa is C or S
VVMGEYQKYIIQQKDNIYLMSIPSMKTPTX

SEQ ID NO: 54161 - protein, 41 aa, Artificial Sequence; identical to SEQ ID NO: 11535
  Cyclic GFR-binding peptide
  MOD_RES (2)..(4)..(35)..(36): Xaa is C or S

SEQ ID NO: 54162 - protein, 40 aa, Artificial Sequence; identical to SEQ ID NO: 32010
  Cyclic GFR-binding peptide
  MOD_RES (1)..(3)..(35)..(36): Xaa is C or S

SEQ ID NO: 54163 - protein, 31 aa, Artificial Sequence; identical to SEQ ID NO: 32014
  Cyclic GFR-binding peptide
  MOD_RES (31)..(31): Xaa is C or S

SEQ ID NO: 54164 - protein, 31 aa, Artificial Sequence; identical to SEQ ID NO: 29069
  Cyclic GFR-binding peptide
  MOD_RES (29)..(30): Xaa is C or S

SEQ ID NO: 54165 - protein, 39 aa, Artificial Sequence
  Cyclic GFR-binding peptide
  MOD_RES (2)..(34)..(35): Xaa is C or S
GXSEVVMDEYQKYVVNNASDIYLISIPSLRTPVXXTPPT

SEQ ID NO: 54166 - protein, 28 aa, Artificial Sequence
  Cyclic GFR-binding peptide
  MOD_RES (28)..(28): Xaa is C or S
IMEYQKYLLVRGNDIYLMSIPSTKVPAX

SEQ ID NO: 54167 - protein, 31 aa, Artificial Sequence; identical to SEQ ID NO: 29077
  Cyclic GFR-binding peptide
  MOD_RES (26)..(27): Xaa is C or S

SEQ ID NO: 54168 - protein, 26 aa, Artificial Sequence
  Cyclic GFR-binding peptide
VVMNEYQKYIVNSSDDIYLVSIPSLK

SEQ ID NO: 54169 - protein, 41 aa, Artificial Sequence; identical to SEQ ID NO: 29080
  Cyclic GFR-binding peptide
  MOD_RES (2)..(4)..(36)..(37): Xaa is C or S

SEQ ID NO: 54170 - protein, 22 aa, Artificial Sequence
  Cyclic GFR-binding peptide
MGEYQKYYTVVGKDIYLISIPS

SEQ ID NO: 54171 - protein, 27 aa, Artificial Sequence
  Cyclic GFR-binding peptide
MNEYQKYIVNNSSDIYLVSIPSLKTPA

SEQ ID NO: 54172 - protein, 32 aa, Artificial Sequence
  Cyclic GFR-binding peptide
  MOD_RES (26)..(27): Xaa is C or S
EYQKYIVNSSDDIYLVSIPSLKTPAXXPKPVH

SEQ ID NO: 54173 - protein, 23 aa, Artificial Sequence
  Cyclic GFR-binding peptide
VIMEYQKYLLVRGNDIYLMSIPS

SEQ ID NO: 54174 - protein, 31 aa, Artificial Sequence; identical to SEQ ID NO: 14274
  Cyclic GFR-binding peptide
  MOD_RES (2)..(4): Xaa is C or S

SEQ ID NO: 54175 - protein, 31 aa, Artificial Sequence; identical to SEQ ID NO: 32036
  Cyclic GFR-binding peptide
  MOD_RES (27)..(28): Xaa is C or S

SEQ ID NO: 54176 - protein, 35 aa, Artificial Sequence
  Cyclic GFR-binding peptide
  MOD_RES (30)..(31): Xaa is C or S
VVMDEYQKYVVNNASDIYLISIPSLRTPVXXTPPT

SEQ ID NO: 54177 - protein, 26 aa, Artificial Sequence
  Cyclic GFR-binding peptide
VVMDEYQKYVVKENEDIYLMSIPSLE

SEQ ID NO: 54178 - protein, 36 aa, Artificial Sequence; identical to SEQ ID NO: 32044
  Cyclic GFR-binding peptide
  MOD_RES (1)..(3)..(35)..(36): Xaa is C or S

SEQ ID NO: 54179 - protein, 31 aa, Artificial Sequence
  Cyclic GFR-binding peptide
  MOD_RES (30)..(31): Xaa is C or S
EVIMEYQKYLLVRGNDIYLMSIPSTKVPAXX

SEQ ID NO: 54180 - protein, 39 aa, Artificial Sequence; identical to SEQ ID NO: 29096
  Cyclic GFR-binding peptide
  MOD_RES (1)..(3)..(36)..(37): Xaa is C or S

SEQ ID NO: 54181 - protein, 30 aa, Artificial Sequence
  Cyclic GFR-binding peptide
DVVMGEYQKYIIQQKDNIYLMSIPSMKTPT

SEQ ID NO: 54182 - protein, 33 aa, Artificial Sequence; identical to SEQ ID NO: 32052
  Cyclic GFR-binding peptide
  MOD_RES (1)..(33): Xaa is C or S

SEQ ID NO: 54183 - protein, 27 aa, Artificial Sequence
  Cyclic GFR-binding peptide
SVAMGEYQKYYTVVGKDIYLISIPSLK

SEQ ID NO: 54184 - protein, 31 aa, Artificial Sequence; identical to SEQ ID NO: 29099
  Cyclic GFR-binding peptide
  MOD_RES (27)..(27): Xaa is C or S

SEQ ID NO: 54185 - protein, 33 aa, Artificial Sequence; identical to SEQ ID NO: 14295
  Cyclic GFR-binding peptide
  MOD_RES (2)..(4): Xaa is C or S

SEQ ID NO: 54186 - protein, 30 aa, Artificial Sequence; identical to SEQ ID NO: 29103
  Cyclic GFR-binding peptide

SEQ ID NO: 54187 - protein, 34 aa, Artificial Sequence; identical to SEQ ID NO: 14300
  Cyclic GFR-binding peptide
  MOD_RES (2)..(4): Xaa is C or S

SEQ ID NO: 54188 - protein, 32 aa, Artificial Sequence
  Cyclic GFR-binding peptide
  MOD_RES (2)..(4): Xaa is C or S
RXGXSEVVMDEYQKYVVNNASDIYLISIPSLR

SEQ ID NO: 54189 - protein, 35 aa, Artificial Sequence; identical to SEQ ID NO: 29107
  Cyclic GFR-binding peptide
  MOD_RES (2)..(34): Xaa is C or S

SEQ ID NO: 54190 - protein, 41 aa, Artificial Sequence; identical to SEQ ID NO: 14306
  Cyclic GFR-binding peptide
  MOD_RES (2)..(4)..(35)..(36): Xaa is C or S

SEQ ID NO: 54191 - protein, 34 aa, Artificial Sequence; identical to SEQ ID NO: 32068
  Cyclic GFR-binding peptide
  MOD_RES (32)..(33): Xaa is C or S

SEQ ID NO: 54192 - protein, 33 aa, Artificial Sequence; identical to SEQ ID NO: 32072
  Cyclic GFR-binding peptide
  MOD_RES (28)..(29): Xaa is C or S

SEQ ID NO: 54193 - protein, 40 aa, Artificial Sequence
  Cyclic GFR-binding peptide
  MOD_RES (1)..(3)..(35)..(36): Xaa is C or S
XGXSEVVMDEYQKYVVNNASDIYLISIPSLRTPVXXTPPT

SEQ ID NO: 54194 - protein, 25 aa, Artificial Sequence
  Cyclic GFR-binding peptide
DVVMGEYQKYIIQQKDNIYLMSIPS

SEQ ID NO: 54195 - protein, 32 aa, Artificial Sequence; identical to SEQ ID NO: 32086
  Cyclic GFR-binding peptide
  MOD_RES (28)..(29): Xaa is C or S

SEQ ID NO: 54196 - protein, 34 aa, Artificial Sequence; identical to SEQ ID NO: 32088
  Cyclic GFR-binding peptide
  MOD_RES (1)..(33)..(34): Xaa is C or S

SEQ ID NO: 54197 - protein, 31 aa, Artificial Sequence; identical to SEQ ID NO: 29117
  Cyclic GFR-binding peptide
  MOD_RES (28)..(29): Xaa is C or S

SEQ ID NO: 54198 - protein, 40 aa, Artificial Sequence
  Cyclic GFR-binding peptide
  MOD_RES (2)..(34)..(35): Xaa is C or S
GXSRVVMNEYQKYIVNSSDDIYLVSIPSLKTPAXXPKPVH

SEQ ID NO: 54199 - protein, 34 aa, Artificial Sequence; identical to SEQ ID NO: 29124
  Cyclic GFR-binding peptide
  MOD_RES (2)..(4): Xaa is C or S

SEQ ID NO: 54200 - protein, 34 aa, Artificial Sequence; identical to SEQ ID NO: 32091
  Cyclic GFR-binding peptide
  MOD_RES (32)..(33): Xaa is C or S

SEQ ID NO: 54201 - protein, 37 aa, Artificial Sequence; identical to SEQ ID NO: 32092
  Cyclic GFR-binding peptide
  MOD_RES (31)..(32): Xaa is C or S

SEQ ID NO: 54202 - protein, 32 aa, Artificial Sequence; identical to SEQ ID NO: 29126
  Cyclic GFR-binding peptide
  MOD_RES (31)..(32): Xaa is C or S

SEQ ID NO: 54203 - protein, 30 aa, Artificial Sequence; identical to SEQ ID NO: 11618
  Cyclic GFR-binding peptide
  MOD_RES (2)..(4): Xaa is C or S

SEQ ID NO: 54204 - protein, 32 aa, Artificial Sequence; identical to SEQ ID NO: 11619
  Cyclic GFR-binding peptide
  MOD_RES (2)..(4): Xaa is C or S

SEQ ID NO: 54205 - protein, 30 aa, Artificial Sequence; identical to SEQ ID NO: 32094
  Cyclic GFR-binding peptide
  MOD_RES (29)..(30): Xaa is C or S

SEQ ID NO: 54206 - protein, 33 aa, Artificial Sequence; identical to SEQ ID NO: 29129
  Cyclic GFR-binding peptide
  MOD_RES (28)..(29): Xaa is C or S

SEQ ID NO: 54207 - protein, 42 aa, Artificial Sequence; identical to SEQ ID NO: 14337
  Cyclic GFR-binding peptide
  MOD_RES (2)..(4)..(36)..(37): Xaa is C or S

SEQ ID NO: 54208 - protein, 33 aa, Artificial Sequence
  Cyclic GFR-binding peptide
  MOD_RES (1)..(3): Xaa is C or S
XGXEEVIMEYQKYLLVRGNDIYLMSIPSTKVPA

SEQ ID NO: 54209 - protein, 35 aa, Artificial Sequence; identical to SEQ ID NO: 32103
  Cyclic GFR-binding peptide
  MOD_RES (2)..(35): Xaa is C or S

SEQ ID NO: 54210 - protein, 33 aa, Artificial Sequence; identical to SEQ ID NO: 14340
  Cyclic GFR-binding peptide
  MOD_RES (2)..(4): Xaa is C or S

SEQ ID NO: 54211 - protein, 39 aa, Artificial Sequence; identical to SEQ ID NO: 29132
  Cyclic GFR-binding peptide
  MOD_RES (1)..(3)..(35)..(36): Xaa is C or S

SEQ ID NO: 54212 - protein, 38 aa, Artificial Sequence
  Cyclic GFR-binding peptide
  MOD_RES (2)..(34)..(35): Xaa is C or S
GXSEVVMDEYQKYVVNNASDIYLISIPSLRTPVXXTPP

SEQ ID NO: 54213 - protein, 40 aa, Artificial Sequence; identical to SEQ ID NO: 32111
  Cyclic GFR-binding peptide
  MOD_RES (2)..(34)..(35): Xaa is C or S

SEQ ID NO: 54214 - protein, 29 aa, Artificial Sequence
  Cyclic GFR-binding peptide
  MOD_RES (27)..(27): Xaa is C or S
NEYQKYIVNSSDDIYLVSIPSLKTPAXTP

SEQ ID NO: 54215 - protein, 24 aa, Artificial Sequence
  Cyclic GFR-binding peptide
NEYQKYIVNSSDDIYLVSIPSLQT

SEQ ID NO: 54216 - protein, 40 aa, Artificial Sequence; identical to SEQ ID NO: 32116
  Cyclic GFR-binding peptide
  MOD_RES (2)..(34)..(35): Xaa is C or S

SEQ ID NO: 54217 - protein, 28 aa, Artificial Sequence
  Cyclic GFR-binding peptide
GEVVMDEYQKYVVKENEDIYLMSIPSLE

SEQ ID NO: 54218 - protein, 30 aa, Artificial Sequence
  Cyclic GFR-binding peptide
  MOD_RES (1)..(1): Xaa is C or S
XEEVIMEYQKYLLVRGNDIYLMSIPSTKVP

SEQ ID NO: 54219 - protein, 34 aa, Artificial Sequence; identical to SEQ ID NO: 29141
  Cyclic GFR-binding peptide
  MOD_RES (31)..(32): Xaa is C or S

SEQ ID NO: 54220 - protein, 27 aa, Artificial Sequence
  Cyclic GFR-binding peptide
  MOD_RES (1)..(1): Xaa is C or S
XRDVVMGEYQKYIIQQKDNIYLMSIPS

SEQ ID NO: 54221 - protein, 33 aa, Artificial Sequence; identical to SEQ ID NO: 29144
  Cyclic GFR-binding peptide
  MOD_RES (1)..(3): Xaa is C or S

SEQ ID NO: 54222 - protein, 34 aa, Artificial Sequence; identical to SEQ ID NO: 32121
  Cyclic GFR-binding peptide
  MOD_RES (1)..(33)..(34): Xaa is C or S

SEQ ID NO: 54223 - protein, 35 aa, Artificial Sequence; identical to SEQ ID NO: 32125
  Cyclic GFR-binding peptide
  MOD_RES (2)..(4): Xaa is C or S

SEQ ID NO: 54224 - protein, 25 aa, Artificial Sequence
  Cyclic GFR-binding peptide
EEVIMEYQKYLLVRGNDIYLMSIPS

SEQ ID NO: 54225 - protein, 35 aa, Artificial Sequence; identical to SEQ ID NO: 32131
  Cyclic GFR-binding peptide
  MOD_RES (29)..(30): Xaa is C or S

SEQ ID NO: 54226 - protein, 31 aa, Artificial Sequence; identical to SEQ ID NO: 32140
  Cyclic GFR-binding peptide
  MOD_RES (27)..(28): Xaa is C or S

SEQ ID NO: 54227 - protein, 33 aa, Artificial Sequence; identical to SEQ ID NO: 32141
  Cyclic GFR-binding peptide
  MOD_RES (28)..(29): Xaa is C or S

SEQ ID NO: 54228 - protein, 28 aa, Artificial Sequence
  Cyclic GFR-binding peptide
VIMEYQKYLLVRGNDIYLMSIPSTKVPA

SEQ ID NO: 54229 - protein, 35 aa, Artificial Sequence; identical to SEQ ID NO: 32142
  Cyclic GFR-binding peptide
  MOD_RES (1)..(3)..(35): Xaa is C or S

SEQ ID NO: 54230 - protein, 31 aa, Artificial Sequence; identical to SEQ ID NO: 11644
  Cyclic GFR-binding peptide
  MOD_RES (2)..(4): Xaa is C or S

SEQ ID NO: 54231 - protein, 26 aa, Artificial Sequence
  Cyclic GFR-binding peptide
MGEYQKYIIQQKDNIYLMSIPSMKTP

SEQ ID NO: 54232 - protein, 26 aa, Artificial Sequence
  Cyclic GFR-binding peptide
KVVMNEYQKYIVNNSSDIYLVSIPSL

SEQ ID NO: 54233 - protein, 37 aa, Artificial Sequence
  Cyclic GFR-binding peptide
  MOD_RES (2)..(34)..(35): Xaa is C or S
GXRDVVMGEYQKYIIQQKDNIYLMSIPSMKTPTXXPG

SEQ ID NO: 54234 - protein, 41 aa, Artificial Sequence; identical to SEQ ID NO: 32148
  Cyclic GFR-binding peptide
  MOD_RES (1)..(3)..(35)..(36): Xaa is C or S

SEQ ID NO: 54235 - protein, 32 aa, Artificial Sequence
  Cyclic GFR-binding peptide
  MOD_RES (2)..(2): Xaa is C or S
GXRDVVMGEYQKYIIQQKDNIYLMSIPSMKTP

SEQ ID NO: 54236 - protein, 32 aa, Artificial Sequence; identical to SEQ ID NO: 14372
  Cyclic GFR-binding peptide
  MOD_RES (2)..(4): Xaa is C or S

SEQ ID NO: 54237 - protein, 28 aa, Artificial Sequence
  Cyclic GFR-binding peptide
VMGEYQKYIIQQKDNIYLMSIPSMKTPT

SEQ ID NO: 54238 - protein, 37 aa, Artificial Sequence
  Cyclic GFR-binding peptide
  MOD_RES (2)..(34)..(35): Xaa is C or S
GXSEVVMDEYQKYVVNNASDIYLISIPSLRTPVXXTP

SEQ ID NO: 54239 - protein, 25 aa, Artificial Sequence
  Cyclic GFR-binding peptide
VAMGEYQKYYTVVGKDIYLISIPSL

SEQ ID NO: 54240 - protein, 34 aa, Artificial Sequence; identical to SEQ ID NO: 32162
  Cyclic GFR-binding peptide
  MOD_RES (31)..(31): Xaa is C or S

SEQ ID NO: 54241 - protein, 29 aa, Artificial Sequence
  Cyclic GFR-binding peptide
  MOD_RES (2)..(2): Xaa is C or S
GXGEVVMEEYQKYVVKDYEDIYLMSIPSL

SEQ ID NO: 54242 - protein, 33 aa, Artificial Sequence; identical to SEQ ID NO: 29186
  Cyclic GFR-binding peptide
  MOD_RES (2)..(4): Xaa is C or S

SEQ ID NO: 54243 - protein, 29 aa, Artificial Sequence
  Cyclic GFR-binding peptide
  MOD_RES (2)..(4): Xaa is C or S
SXKXSRVIMNSLQEVKPKRGVYYLITLPE

SEQ ID NO: 54244 - protein, 41 aa, Artificial Sequence; identical to SEQ ID NO: 32178
  Cyclic GFR-binding peptide
  MOD_RES (2)..(4)..(36): Xaa is C or S

SEQ ID NO: 54245 - protein, 31 aa, Artificial Sequence; identical to SEQ ID NO: 32185
  Cyclic GFR-binding peptide
  MOD_RES (26)..(27): Xaa is C or S

SEQ ID NO: 54246 - protein, 34 aa, Artificial Sequence; identical to SEQ ID NO: 11681
  Cyclic GFR-binding peptide
  MOD_RES (2)..(4): Xaa is C or S

SEQ ID NO: 54247 - protein, 33 aa, Artificial Sequence; identical to SEQ ID NO: 32186
  Cyclic GFR-binding peptide
  MOD_RES (28)..(29): Xaa is C or S

SEQ ID NO: 54248 - protein, 35 aa, Artificial Sequence; identical to SEQ ID NO: 32187
  Cyclic GFR-binding peptide
  MOD_RES (29)..(30): Xaa is C or S

SEQ ID NO: 54249 - protein, 30 aa, Artificial Sequence; identical to SEQ ID NO: 32188
  Cyclic GFR-binding peptide
  MOD_RES (29)..(30): Xaa is C or S

SEQ ID NO: 54250 - protein, 30 aa, Artificial Sequence; identical to SEQ ID NO: 32189
  Cyclic GFR-binding peptide
  MOD_RES (29)..(30): Xaa is C or S

SEQ ID NO: 54251 - protein, 31 aa, Artificial Sequence; identical to SEQ ID NO: 29196
  Cyclic GFR-binding peptide
  MOD_RES (31)..(31): Xaa is C or S

SEQ ID NO: 54252 - protein, 20 aa, Artificial Sequence
  Cyclic GFR-binding peptide
EYQKYIVNNSSDIYLVSIPS

SEQ ID NO: 54253 - protein, 34 aa, Artificial Sequence; identical to SEQ ID NO: 32193
  Cyclic GFR-binding peptide
  MOD_RES (1)..(3): Xaa is C or S

SEQ ID NO: 54254 - protein, 40 aa, Artificial Sequence; identical to SEQ ID NO: 29201
  Cyclic GFR-binding peptide
  MOD_RES (1)..(3)..(35)..(36): Xaa is C or S

SEQ ID NO: 54255 - protein, 24 aa, Artificial Sequence
  Cyclic GFR-binding peptide
SMGEEYQKYTPVGMDDIYLVSIPS

SEQ ID NO: 54256 - protein, 34 aa, Artificial Sequence
  Cyclic GFR-binding peptide
  MOD_RES (1)..(3): Xaa is C or S
XGXRDVVMGEYQKYIIQQKDNIYLMSIPSMKTPT

SEQ ID NO: 54257 - protein, 38 aa, Artificial Sequence
  Cyclic GFR-binding peptide
  MOD_RES (1)..(3)..(34)..(35): Xaa is C or S
XGXEEVIMEYQKYLLVRGNDIYLMSIPSTKVPAXXTSP

SEQ ID NO: 54258 - protein, 28 aa, Artificial Sequence
  Cyclic GFR-binding peptide
  MOD_RES (2)..(2): Xaa is C or S
GXGEVVMEEYQKYVVKDYEDIYLMSIPS

SEQ ID NO: 54259 - protein, 22 aa, Artificial Sequence
  Cyclic GFR-binding peptide
GEYQKYIIQQKDNIYLMSIPSM

SEQ ID NO: 54260 - protein, 32 aa, Artificial Sequence; identical to SEQ ID NO: 11697
  Cyclic GFR-binding peptide
  MOD_RES (2)..(4): Xaa is C or S

SEQ ID NO: 54261 - protein, 24 aa, Artificial Sequence
  Cyclic GFR-binding peptide
VVMNEYQKYIVNNSSDIYLVSIPS

SEQ ID NO: 54262 - protein, 37 aa, Artificial Sequence; identical to SEQ ID NO: 29205
  Cyclic GFR-binding peptide
  MOD_RES (1)..(3)..(35): Xaa is C or S

SEQ ID NO: 54263 - protein, 31 aa, Artificial Sequence; identical to SEQ ID NO: 29216
  Cyclic GFR-binding peptide
  MOD_RES (2)..(2): Xaa is C or S

SEQ ID NO: 54264 - protein, 36 aa, Artificial Sequence; identical to SEQ ID NO: 29217
  Cyclic GFR-binding peptide
  MOD_RES (2)..(4)..(36): Xaa is C or S

SEQ ID NO: 54265 - protein, 32 aa, Artificial Sequence; identical to SEQ ID NO: 29218
  Cyclic GFR-binding peptide
  MOD_RES (2)..(4): Xaa is C or S

SEQ ID NO: 54266 - protein, 37 aa, Artificial Sequence
  Cyclic GFR-binding peptide
  MOD_RES (1)..(33)..(34): Xaa is C or S
XRDVVMGEYQKYIIQQKDNIYLMSIPSMKTPTXXPGA

SEQ ID NO: 54267 - protein, 39 aa, Artificial Sequence; identical to SEQ ID NO: 32223
  Cyclic GFR-binding peptide
  MOD_RES (2)..(4)..(36)..(37): Xaa is C or S

SEQ ID NO: 54268 - protein, 39 aa, Artificial Sequence; identical to SEQ ID NO: 29222
  Cyclic GFR-binding peptide
  MOD_RES (2)..(4)..(36)..(37): Xaa is C or S

SEQ ID NO: 54269 - protein, 31 aa, Artificial Sequence; identical to SEQ ID NO: 29227
  Cyclic GFR-binding peptide

SEQ ID NO: 54270 - protein, 35 aa, Artificial Sequence; identical to SEQ ID NO: 29228
  Cyclic GFR-binding peptide
  MOD_RES (1)..(33)..(34): Xaa is C or S

SEQ ID NO: 54271 - protein, 37 aa, Artificial Sequence
  Cyclic GFR-binding peptide
  MOD_RES (32)..(33): Xaa is C or S
SEVVMDEYQKYVVNNASDIYLISIPSLRTPVXXTPPT

SEQ ID NO: 54272 - protein, 35 aa, Artificial Sequence; identical to SEQ ID NO: 32227
  Cyclic GFR-binding peptide
  MOD_RES (32)..(33): Xaa is C or S

SEQ ID NO: 54273 - protein, 28 aa, Artificial Sequence
  Cyclic GFR-binding peptide
  MOD_RES (27)..(28): Xaa is C or S
NEYQKYIVNSSDDIYLVSIPSLKTPAXX

SEQ ID NO: 54274 - protein, 32 aa, Artificial Sequence; identical to SEQ ID NO: 32231
  Cyclic GFR-binding peptide
  MOD_RES (29)..(30): Xaa is C or S

SEQ ID NO: 54275 - protein, 33 aa, Artificial Sequence; identical to SEQ ID NO: 11713
  Cyclic GFR-binding peptide
  MOD_RES (2)..(4): Xaa is C or S

SEQ ID NO: 54276 - protein, 27 aa, Artificial Sequence
  Cyclic GFR-binding peptide
  MOD_RES (26)..(27): Xaa is C or S
EYQKYVVKENEDIYLMSIPSLETPVXX

SEQ ID NO: 54277 - protein, 36 aa, Artificial Sequence
  Cyclic GFR-binding peptide
  MOD_RES (32)..(33): Xaa is C or S
RDVVMGEYQKYIIQQKDNIYLMSIPSMKTPTXXPGA

SEQ ID NO: 54278 - protein, 27 aa, Artificial Sequence
  Cyclic GFR-binding peptide
VVMNEYQKYIVNSSDDIYLVSIPSLKT

SEQ ID NO: 54279 - protein, 42 aa, Artificial Sequence; identical to SEQ ID NO: 11723
  Cyclic GFR-binding peptide
  MOD_RES (2)..(4)..(36)..(37): Xaa is C or S

SEQ ID NO: 54280 - protein, 36 aa, Artificial Sequence; identical to SEQ ID NO: 29242
  Cyclic GFR-binding peptide
  MOD_RES (2)..(4)..(36): Xaa is C or S

SEQ ID NO: 54281 - protein, 23 aa, Artificial Sequence
  Cyclic GFR-binding peptide
NEYQKYIVNNSSDIYLVSIPSLK

SEQ ID NO: 54282 - protein, 30 aa, Artificial Sequence
  Cyclic GFR-binding peptide
  MOD_RES (29)..(30): Xaa is C or S
VMGEYQKYIIQQKDNIYLMSIPSMKTPTXX

SEQ ID NO: 54283 - protein, 28 aa, Artificial Sequence
  Cyclic GFR-binding peptide
  MOD_RES (1)..(1): Xaa is C or S
XARVVMNEYQKYIVNSSDDIYLVSIPSL

SEQ ID NO: 54284 - protein, 31 aa, Artificial Sequence
  Cyclic GFR-binding peptide
  MOD_RES (2)..(4): Xaa is C or S
SXGXRDVVMGEYQKYIIQQKDNIYLMSIPSM

SEQ ID NO: 54285 - protein, 28 aa, Artificial Sequence
  Cyclic GFR-binding peptide
VMNEYQKYIVNNSSDIYLVSIPSLKTPA

SEQ ID NO: 54286 - protein, 41 aa, Artificial Sequence; identical to SEQ ID NO: 14447
  Cyclic GFR-binding peptide
  MOD_RES (2)..(4)..(35)..(36): Xaa is C or S

SEQ ID NO: 54287 - protein, 37 aa, Artificial Sequence; identical to SEQ ID NO: 32255
  Cyclic GFR-binding peptide
  MOD_RES (32)..(33): Xaa is C or S

SEQ ID NO: 54288 - protein, 33 aa, Artificial Sequence; identical to SEQ ID NO: 32258
  Cyclic GFR-binding peptide
  MOD_RES (27)..(28): Xaa is C or S

SEQ ID NO: 54289 - protein, 28 aa, Artificial Sequence
  Cyclic GFR-binding peptide
VVMNEYQKYIVNSSDDIYLVSIPSLKTP

SEQ ID NO: 54290 - protein, 22 aa, Artificial Sequence
  Cyclic GFR-binding peptide
EYQKYVVKDYEDIYLMSIPSLE

SEQ ID NO: 54291 - protein, 30 aa, Artificial Sequence; identical to SEQ ID NO: 29250
  Cyclic GFR-binding peptide
  MOD_RES (2)..(4): Xaa is C or S

SEQ ID NO: 54292 - protein, 30 aa, Artificial Sequence
  Cyclic GFR-binding peptide
  MOD_RES (26)..(27): Xaa is C or S
EYQKYIIQQKDNIYLMSIPSMKTPTXXPGA

SEQ ID NO: 54293 - protein, 37 aa, Artificial Sequence; identical to SEQ ID NO: 29253
  Cyclic GFR-binding peptide
  MOD_RES (2)..(4)..(36)..(37): Xaa is C or S

SEQ ID NO: 54294 - protein, 27 aa, Artificial Sequence
  Cyclic GFR-binding peptide
MNEYQKYIVNSSDDIYLVSIPSLKTPA

SEQ ID NO: 54295 - protein, 36 aa, Artificial Sequence
  Cyclic GFR-binding peptide
  MOD_RES (1)..(3)..(34)..(35): Xaa is C or S
XGXEEVIMEYQKYLLVRGNDIYLMSIPSTKVPAXXT

SEQ ID NO: 54296 - protein, 29 aa, Artificial Sequence
  Cyclic GFR-binding peptide
  MOD_RES (1)..(3): Xaa is C or S
XGXSEVVMDEYQKYVVNNASDIYLISIPS

SEQ ID NO: 54297 - protein, 32 aa, Artificial Sequence; identical to SEQ ID NO: 29264
  Cyclic GFR-binding peptide
  MOD_RES (2)..(4): Xaa is C or S

SEQ ID NO: 54298 - protein, 27 aa, Artificial Sequence
  Cyclic GFR-binding peptide
  MOD_RES (27)..(27): Xaa is C or S
MEYQKYLLVRGNDIYLMSIPSTKVPAX

SEQ ID NO: 54299 - protein, 36 aa, Artificial Sequence
  Cyclic GFR-binding peptide
  MOD_RES (31)..(32): Xaa is C or S
DVVMGEYQKYIIQQKDNIYLMSIPSMKTPTXXPGAS

SEQ ID NO: 54300 - protein, 30 aa, Artificial Sequence; identical to SEQ ID NO: 29267
  Cyclic GFR-binding peptide
  MOD_RES (2)..(4): Xaa is C or S

SEQ ID NO: 54301 - protein, 33 aa, Artificial Sequence; identical to SEQ ID NO: 11758
  Cyclic GFR-binding peptide
  MOD_RES (2)..(4): Xaa is C or S

SEQ ID NO: 54302 - protein, 28 aa, Artificial Sequence
  Cyclic GFR-binding peptide
  MOD_RES (26)..(27): Xaa is C or S
EYQKYIVNSSDDIYLVSIPSLQTPAXXP

SEQ ID NO: 54303 - protein, 39 aa, Artificial Sequence; identical to SEQ ID NO: 29270
  Cyclic GFR-binding peptide
  MOD_RES (2)..(34)..(35): Xaa is C or S

SEQ ID NO: 54304 - protein, 29 aa, Artificial Sequence
  Cyclic GFR-binding peptide
VVMNEYQKYIVNSSDDIYLVSIPSLQTPA

SEQ ID NO: 54305 - protein, 35 aa, Artificial Sequence; identical to SEQ ID NO: 32274
  Cyclic GFR-binding peptide
  MOD_RES (2)..(34)..(35): Xaa is C or S

SEQ ID NO: 54306 - protein, 34 aa, Artificial Sequence; identical to SEQ ID NO: 32276
  Cyclic GFR-binding peptide
  MOD_RES (1)..(33)..(34): Xaa is C or S

SEQ ID NO: 54307 - protein, 36 aa, Artificial Sequence; identical to SEQ ID NO: 29281
  Cyclic GFR-binding peptide
  MOD_RES (32)..(33): Xaa is C or S

SEQ ID NO: 54308 - protein, 31 aa, Artificial Sequence; identical to SEQ ID NO: 29282
  Cyclic GFR-binding peptide
  MOD_RES (27)..(28): Xaa is C or S

SEQ ID NO: 54309 - protein, 36 aa, Artificial Sequence; identical to SEQ ID NO: 29283
  Cyclic GFR-binding peptide
  MOD_RES (32)..(32): Xaa is C or S

SEQ ID NO: 54310 - protein, 24 aa, Artificial Sequence
  Cyclic GFR-binding peptide
VVMGEYQKYIIQQKDNIYLMSIPS

SEQ ID NO: 54311 - protein, 29 aa, Artificial Sequence
  Cyclic GFR-binding peptide
  MOD_RES (1)..(1): Xaa is C or S
XSEVVMDEYQKYVVNNASDIYLISIPSLR

SEQ ID NO: 54312 - protein, 33 aa, Artificial Sequence; identical to SEQ ID NO: 11769
  Cyclic GFR-binding peptide
  MOD_RES (2)..(4): Xaa is C or S

SEQ ID NO: 54313 - protein, 34 aa, Artificial Sequence; identical to SEQ ID NO: 29294
  Cyclic GFR-binding peptide
  MOD_RES (32)..(33): Xaa is C or S

SEQ ID NO: 54314 - protein, 32 aa, Artificial Sequence; identical to SEQ ID NO: 29297
  Cyclic GFR-binding peptide
  MOD_RES (30)..(31): Xaa is C or S

SEQ ID NO: 54315 - protein, 33 aa, Artificial Sequence
  Cyclic GFR-binding peptide
  MOD_RES (2)..(2): Xaa is C or S
GXSEVVMDEYQKYVVNNASDIYLISIPSLRTPV

SEQ ID NO: 54316 - protein, 25 aa, Artificial Sequence
  Cyclic GFR-binding peptide
EYQKYYTVVGKDIYLISIPSLKTPV

SEQ ID NO: 54317 - protein, 30 aa, Artificial Sequence; identical to SEQ ID NO: 14489
  Cyclic GFR-binding peptide
  MOD_RES (2)..(4): Xaa is C or S

SEQ ID NO: 54318 - protein, 24 aa, Artificial Sequence
  Cyclic GFR-binding peptide
MGEYQKYYTVVGKDIYLISIPSLK

SEQ ID NO: 54319 - protein, 41 aa, Artificial Sequence; identical to SEQ ID NO: 29308
  Cyclic GFR-binding peptide
  MOD_RES (2)..(4)..(37)..(38): Xaa is C or S

SEQ ID NO: 54320 - protein, 33 aa, Artificial Sequence
  Cyclic GFR-binding peptide
  MOD_RES (29)..(30): Xaa is C or S
VMGEYQKYIIQQKDNIYLMSIPSMKTPTXXPGA

SEQ ID NO: 54321 - protein, 31 aa, Artificial Sequence
  Cyclic GFR-binding peptide
RDVVMGEYQKYIIQQKDNIYLMSIPSMKTPT

SEQ ID NO: 54322 - protein, 30 aa, Artificial Sequence; identical to SEQ ID NO: 32297
  Cyclic GFR-binding peptide
  MOD_RES (1)..(3): Xaa is C or S

SEQ ID NO: 54323 - protein, 32 aa, Artificial Sequence
  Cyclic GFR-binding peptide
  MOD_RES (26)..(27): Xaa is C or S
EYQKYVVNNASDIYLISIPSLRTPVXXTPPTS

SEQ ID NO: 54324 - protein, 33 aa, Artificial Sequence; identical to SEQ ID NO: 14495
  Cyclic GFR-binding peptide
  MOD_RES (2)..(4): Xaa is C or S

SEQ ID NO: 54325 - protein, 27 aa, Artificial Sequence
  Cyclic GFR-binding peptide
SRVVMNEYQKYIVNSSDDIYLVSIPSL

SEQ ID NO: 54326 - protein, 33 aa, Artificial Sequence; identical to SEQ ID NO: 29315
  Cyclic GFR-binding peptide
  MOD_RES (27)..(28): Xaa is C or S

SEQ ID NO: 54327 - protein, 32 aa, Artificial Sequence; identical to SEQ ID NO: 32309
  Cyclic GFR-binding peptide
  MOD_RES (2)..(2): Xaa is C or S

SEQ ID NO: 54328 - protein, 42 aa, Artificial Sequence; identical to SEQ ID NO: 29322
  Cyclic GFR-binding peptide
  MOD_RES (2)..(4)..(37)..(38): Xaa is C or S

SEQ ID NO: 54329 - protein, 34 aa, Artificial Sequence; identical to SEQ ID NO: 32313
  Cyclic GFR-binding peptide
  MOD_RES (32)..(33): Xaa is C or S

SEQ ID NO: 54330 - protein, 27 aa, Artificial Sequence
  Cyclic GFR-binding peptide
  MOD_RES (1)..(1): Xaa is C or S
XEEVIMEYQKYLLVRGNDIYLMSIPST

SEQ ID NO: 54331 - protein, 37 aa, Artificial Sequence; identical to SEQ ID NO: 32316
  Cyclic GFR-binding peptide
  MOD_RES (2)..(4)..(36)..(37): Xaa is C or S

SEQ ID NO: 54332 - protein, 28 aa, Artificial Sequence
  Cyclic GFR-binding peptide
SRVVMNEYQKYIVNSSDDIYLVSIPSLK

SEQ ID NO: 54333 - protein, 40 aa, Artificial Sequence
  Cyclic GFR-binding peptide
  MOD_RES (2)..(4)..(36)..(37): Xaa is C or S
SXGXRDVVMGEYQKYIIQQKDNIYLMSIPSMKTPTXXPGA

SEQ ID NO: 54334 - protein, 30 aa, Artificial Sequence; identical to SEQ ID NO: 29329
  Cyclic GFR-binding peptide
  MOD_RES (1)..(3): Xaa is C or S

SEQ ID NO: 54335 - protein, 20 aa, Artificial Sequence
  Cyclic GFR-binding peptide
EYQKYVVKDYEDIYLMSIPS

SEQ ID NO: 54336 - protein, 23 aa, Artificial Sequence
  Cyclic GFR-binding peptide
EYQKYVVKDYEDIYLMSIPSLET

SEQ ID NO: 54337 - protein, 33 aa, Artificial Sequence
  Cyclic GFR-binding peptide
  MOD_RES (28)..(29): Xaa is C or S
MDEYQKYVVNNASDIYLISIPSLRTPVXXTPPT

SEQ ID NO: 54338 - protein, 40 aa, Artificial Sequence; identical to SEQ ID NO: 29331
  Cyclic GFR-binding peptide
  MOD_RES (1)..(3)..(35)..(36): Xaa is C or S

SEQ ID NO: 54339 - protein, 20 aa, Artificial Sequence
  Cyclic GFR-binding peptide
EYQKYIIQQKDNIYLMSIPS

SEQ ID NO: 54340 - protein, 34 aa, Artificial Sequence
  Cyclic GFR-binding peptide
  MOD_RES (31)..(32): Xaa is C or S
EVVMDEYQKYVVNNASDIYLISIPSLRTPVXXTP

SEQ ID NO: 54341 - protein, 37 aa, Artificial Sequence; identical to SEQ ID NO: 32326
  Cyclic GFR-binding peptide
  MOD_RES (33)..(34): Xaa is C or S

SEQ ID NO: 54342 - protein, 30 aa, Artificial Sequence; identical to SEQ ID NO: 29335
  Cyclic GFR-binding peptide
  MOD_RES (30)..(30): Xaa is C or S

SEQ ID NO: 54343 - protein, 37 aa, Artificial Sequence; identical to SEQ ID NO: 29336
  Cyclic GFR-binding peptide
  MOD_RES (2)..(4)..(36): Xaa is C or S

SEQ ID NO: 54344 - protein, 28 aa, Artificial Sequence
  Cyclic GFR-binding peptide
RVVMNEYQKYIVNSSDDIYLVSIPSLKT

SEQ ID NO: 54345 - protein, 31 aa, Artificial Sequence
  Cyclic GFR-binding peptide
  MOD_RES (30)..(31): Xaa is C or S
VVMDEYQKYVVNNASDIYLISIPSLRTPVXX

SEQ ID NO: 54346 - protein, 24 aa, Artificial Sequence
  Cyclic GFR-binding peptide
EYQKYVVKENEDIYLMSIPSLETP

SEQ ID NO: 54347 - protein, 37 aa, Artificial Sequence; identical to SEQ ID NO: 29341
  Cyclic GFR-binding peptide
  MOD_RES (32)..(33): Xaa is C or S

SEQ ID NO: 54348 - protein, 27 aa, Artificial Sequence
  Cyclic GFR-binding peptide
ARVVMNEYQKYIVNSSDDIYLVSIPSL

SEQ ID NO: 54349 - protein, 34 aa, Artificial Sequence
  Cyclic GFR-binding peptide
  MOD_RES (2)..(34): Xaa is C or S
GXSEVVMDEYQKYVVNNASDIYLISIPSLRTPVX

SEQ ID NO: 54350 - protein, 37 aa, Artificial Sequence
  Cyclic GFR-binding peptide
  MOD_RES (1)..(3)..(35)..(36): Xaa is C or S
XGXSEVVMDEYQKYVVNNASDIYLISIPSLRTPVXXT

SEQ ID NO: 54351 - protein, 34 aa, Artificial Sequence
  Cyclic GFR-binding peptide
  MOD_RES (1)..(32)..(33): Xaa is C or S
XEEVIMEYQKYLLVRGNDIYLMSIPSTKVPAXXT

SEQ ID NO: 54352 - protein, 28 aa, Artificial Sequence
  Cyclic GFR-binding peptide
VMDEYQKYVVKENEDIYLMSIPSLETPV

SEQ ID NO: 54353 - protein, 30 aa, Artificial Sequence; identical to SEQ ID NO: 29351
  Cyclic GFR-binding peptide
  MOD_RES (2)..(4): Xaa is C or S

SEQ ID NO: 54354 - protein, 33 aa, Artificial Sequence
  Cyclic GFR-binding peptide
  MOD_RES (32)..(33): Xaa is C or S
SEVVMDEYQKYVVNNASDIYLISIPSLRTPVXX

SEQ ID NO: 54355 - protein, 29 aa, Artificial Sequence
  Cyclic GFR-binding peptide
  MOD_RES (26)..(27): Xaa is C or S
EYQKYLLVRGNDIYLMSIPSTKVPAXXTS

SEQ ID NO: 54356 - protein, 28 aa, Artificial Sequence
  Cyclic GFR-binding peptide
  MOD_RES (1)..(1): Xaa is C or S
XSEVVMDEYQKYVVNNASDIYLISIPSL

SEQ ID NO: 54357 - protein, 30 aa, Artificial Sequence; identical to SEQ ID NO: 11829
  Cyclic GFR-binding peptide
  MOD_RES (2)..(4): Xaa is C or S

SEQ ID NO: 54358 - protein, 28 aa, Artificial Sequence
  Cyclic GFR-binding peptide
  MOD_RES (1)..(3): Xaa is C or S
XGXEEVIMEYQKYLLVRGNDIYLMSIPS

SEQ ID NO: 54359 - protein, 25 aa, Artificial Sequence
  Cyclic GFR-binding peptide
SVAMGEYQKYYTVVGKDIYLISIPS

SEQ ID NO: 54360 - protein, 29 aa, Artificial Sequence
  Cyclic GFR-binding peptide
  MOD_RES (1)..(1): Xaa is C or S
XAKVVMNEYQKYIVNNSSDIYLVSIPSLK

SEQ ID NO: 54361 - protein, 32 aa, Artificial Sequence; identical to SEQ ID NO: 11833
  Cyclic GFR-binding peptide
  MOD_RES (2)..(4): Xaa is C or S

SEQ ID NO: 54362 - protein, 24 aa, Artificial Sequence
  Cyclic GFR-binding peptide
EYQKYIVNSSDDIYLVSIPSLQTP

SEQ ID NO: 54363 - protein, 30 aa, Artificial Sequence; identical to SEQ ID NO: 29360
  Cyclic GFR-binding peptide

SEQ ID NO: 54364 - protein, 34 aa, Artificial Sequence
  Cyclic GFR-binding peptide
  MOD_RES (2)..(4): Xaa is C or S
SXGXRDVVMGEYQKYIIQQKDNIYLMSIPSMKTP

SEQ ID NO: 54365 - protein, 43 aa, Artificial Sequence; identical to SEQ ID NO: 32355
  Cyclic GFR-binding peptide
  MOD_RES (2)..(4)..(37)..(38): Xaa is C or S

SEQ ID NO: 54366 - protein, 33 aa, Artificial Sequence; identical to SEQ ID NO: 32356
  Cyclic GFR-binding peptide
  MOD_RES (28)..(29): Xaa is C or S

SEQ ID NO: 54367 - protein, 25 aa, Artificial Sequence
  Cyclic GFR-binding peptide
EYQKYLLVRGNDIYLMSIPSTKVPA

SEQ ID NO: 54368 - protein, 34 aa, Artificial Sequence; identical to SEQ ID NO: 32358
  Cyclic GFR-binding peptide
  MOD_RES (29)..(30): Xaa is C or S

SEQ ID NO: 54369 - protein, 30 aa, Artificial Sequence
  Cyclic GFR-binding peptide
EVVMDEYQKYVVNNASDIYLISIPSLRTPV

SEQ ID NO: 54370 - protein, 29 aa, Artificial Sequence
  Cyclic GFR-binding peptide
  MOD_RES (2)..(2): Xaa is C or S
GXEEVIMEYQKYLLVRGNDIYLMSIPSTK

SEQ ID NO: 54371 - protein, 39 aa, Artificial Sequence; identical to SEQ ID NO: 32367
  Cyclic GFR-binding peptide
  MOD_RES (2)..(34)..(35): Xaa is C or S

SEQ ID NO: 54372 - protein, 28 aa, Artificial Sequence
  Cyclic GFR-binding peptide
AMGEYQKYYTVVGKDIYLISIPSLKTPV

SEQ ID NO: 54373 - protein, 29 aa, Artificial Sequence
  Cyclic GFR-binding peptide
RVVMNEYQKYIVNSSDDIYLVSIPSLKTP

SEQ ID NO: 54374 - protein, 37 aa, Artificial Sequence
  Cyclic GFR-binding peptide
  MOD_RES (2)..(4)..(35)..(36): Xaa is C or S
LXGXEEVIMEYQKYLLVRGNDIYLMSIPSTKVPAXXT

SEQ ID NO: 54375 - protein, 36 aa, Artificial Sequence
  Cyclic GFR-binding peptide
  MOD_RES (30)..(31): Xaa is C or S
VVMGEYQKYIIQQKDNIYLMSIPSMKTPTXXPGASG

SEQ ID NO: 54376 - protein, 30 aa, Artificial Sequence; identical to SEQ ID NO: 32380
  Cyclic GFR-binding peptide
  MOD_RES (2)..(2): Xaa is C or S

SEQ ID NO: 54377 - protein, 30 aa, Artificial Sequence; identical to SEQ ID NO: 29384
  Cyclic GFR-binding peptide
  MOD_RES (30)..(30): Xaa is C or S

SEQ ID NO: 54378 - protein, 21 aa, Artificial Sequence
  Cyclic GFR-binding peptide
EYQKYVVKDYEDIYLMSIPSL

SEQ ID NO: 54379 - protein, 29 aa, Artificial Sequence
  Cyclic GFR-binding peptide
ARVVMNEYQKYIVNSSDDIYLVSIPSLQT

SEQ ID NO: 54380 - protein, 27 aa, Artificial Sequence
  Cyclic GFR-binding peptide
  MOD_RES (26)..(27): Xaa is C or S
EYQKYVVKDYEDIYLMSIPSLETPVXX

SEQ ID NO: 54381 - protein, 34 aa, Artificial Sequence; identical to SEQ ID NO: 29406
  Cyclic GFR-binding peptide
  MOD_RES (30)..(31): Xaa is C or S

SEQ ID NO: 54382 - protein, 31 aa, Artificial Sequence; identical to SEQ ID NO: 32409
  Cyclic GFR-binding peptide
  MOD_RES (31)..(31): Xaa is C or S

SEQ ID NO: 54383 - protein, 25 aa, Artificial Sequence
  Cyclic GFR-binding peptide
EYQKYIVNSSDDIYLVSIPSLKTPA

SEQ ID NO: 54384 - protein, 27 aa, Artificial Sequence
  Cyclic GFR-binding peptide
VMNEYQKYIVNSSDDIYLVSIPSLQTP

SEQ ID NO: 54385 - protein, 24 aa, Artificial Sequence
  Cyclic GFR-binding peptide
VMDEYQKYVVKENEDIYLMSIPSL

SEQ ID NO: 54386 - protein, 33 aa, Artificial Sequence; identical to SEQ ID NO: 32420
  Cyclic GFR-binding peptide
  MOD_RES (2)..(4): Xaa is C or S

SEQ ID NO: 54387 - protein, 41 aa, Artificial Sequence; identical to SEQ ID NO: 11915
  Cyclic GFR-binding peptide
  MOD_RES (2)..(4)..(35)..(36): Xaa is C or S

SEQ ID NO: 54388 - protein, 31 aa, Artificial Sequence; identical to SEQ ID NO: 32423
  Cyclic GFR-binding peptide

SEQ ID NO: 54389 - protein, 33 aa, Artificial Sequence
  Cyclic GFR-binding peptide
  MOD_RES (31)..(32): Xaa is C or S
DVVMGEYQKYIIQQKDNIYLMSIPSMKTPTXXP

SEQ ID NO: 54390 - protein, 34 aa, Artificial Sequence; identical to SEQ ID NO: 29431
  Cyclic GFR-binding peptide
  MOD_RES (32)..(33): Xaa is C or S

SEQ ID NO: 54391 - protein, 33 aa, Artificial Sequence
  Cyclic GFR-binding peptide
  MOD_RES (30)..(31): Xaa is C or S
VVMDEYQKYVVNNASDIYLISIPSLRTPVXXTP

SEQ ID NO: 54392 - protein, 36 aa, Artificial Sequence
  Cyclic GFR-binding peptide
  MOD_RES (30)..(31): Xaa is C or S
VVMNEYQKYIVNSSDDIYLVSIPSLKTPAXXPKPVH

SEQ ID NO: 54393 - protein, 30 aa, Artificial Sequence
  Cyclic GFR-binding peptide
  MOD_RES (2)..(4): Xaa is C or S
RXGXSEVVMDEYQKYVVNNASDIYLISIPS

SEQ ID NO: 54394 - protein, 33 aa, Artificial Sequence; identical to SEQ ID NO: 32430
  Cyclic GFR-binding peptide
  MOD_RES (29)..(30): Xaa is C or S

SEQ ID NO: 54395 - protein, 25 aa, Artificial Sequence
  Cyclic GFR-binding peptide
KVVMNEYQKYIVNNSSDIYLVSIPS

SEQ ID NO: 54396 - protein, 29 aa, Artificial Sequence
  Cyclic GFR-binding peptide
  MOD_RES (2)..(4): Xaa is C or S
SXKXSRVIMEYQKYVKPKRGVIFLISIPS

SEQ ID NO: 54397 - protein, 23 aa, Artificial Sequence
  Cyclic GFR-binding peptide
MGEYQKYIIQQKDNIYLMSIPSM

SEQ ID NO: 54398 - protein, 36 aa, Artificial Sequence; identical to SEQ ID NO: 32435
  Cyclic GFR-binding peptide
  MOD_RES (2)..(4)..(36): Xaa is C or S

SEQ ID NO: 54399 - protein, 31 aa, Artificial Sequence
  Cyclic GFR-binding peptide
  MOD_RES (26)..(27): Xaa is C or S
EYQKYVVNNASDIYLISIPSLRTPVXXTPPT

SEQ ID NO: 54400 - protein, 30 aa, Artificial Sequence; identical to SEQ ID NO: 11933
  Cyclic GFR-binding peptide
  MOD_RES (2)..(4): Xaa is C or S

SEQ ID NO: 54401 - protein, 41 aa, Artificial Sequence; identical to SEQ ID NO: 14632
  Cyclic GFR-binding peptide
  MOD_RES (2)..(4)..(35)..(36): Xaa is C or S

SEQ ID NO: 54402 - protein, 34 aa, Artificial Sequence; identical to SEQ ID NO: 11936
  Cyclic GFR-binding peptide
  MOD_RES (2)..(4): Xaa is C or S

SEQ ID NO: 54403 - protein, 29 aa, Artificial Sequence
  Cyclic GFR-binding peptide
VVMDEYQKYVVKENEDIYLMSIPSLETPV

SEQ ID NO: 54404 - protein, 33 aa, Artificial Sequence
  Cyclic GFR-binding peptide
  MOD_RES (1)..(32)..(33): Xaa is C or S
XEEVIMEYQKYLLVRGNDIYLMSIPSTKVPAXX

SEQ ID NO: 54405 - protein, 35 aa, Artificial Sequence; identical to SEQ ID NO: 32438
  Cyclic GFR-binding peptide
  MOD_RES (30)..(30): Xaa is C or S

SEQ ID NO: 54406 - protein, 30 aa, Artificial Sequence; identical to SEQ ID NO: 14639
  Cyclic GFR-binding peptide
  MOD_RES (2)..(4): Xaa is C or S

SEQ ID NO: 54407 - protein, 34 aa, Artificial Sequence
  Cyclic GFR-binding peptide
  MOD_RES (31)..(32): Xaa is C or S
DVVMGEYQKYIIQQKDNIYLMSIPSMKTPTXXPG

SEQ ID NO: 54408 - protein, 25 aa, Artificial Sequence
  Cyclic GFR-binding peptide
EYQKYTPVGMDDIYLVSIPSLKTPV

SEQ ID NO: 54409 - protein, 32 aa, Artificial Sequence; identical to SEQ ID NO: 29455
  Cyclic GFR-binding peptide
  MOD_RES (1)..(3): Xaa is C or S

SEQ ID NO: 54410 - protein, 26 aa, Artificial Sequence
  Cyclic GFR-binding peptide
NEYQKYIVNSSDDIYLVSIPSLQTPA

SEQ ID NO: 54411 - protein, 31 aa, Artificial Sequence; identical to SEQ ID NO: 32457
  Cyclic GFR-binding peptide
  MOD_RES (31)..(31): Xaa is C or S

SEQ ID NO: 54412 - protein, 33 aa, Artificial Sequence; identical to SEQ ID NO: 32459
  Cyclic GFR-binding peptide
  MOD_RES (1)..(33): Xaa is C or S

SEQ ID NO: 54413 - protein, 29 aa, Artificial Sequence
  Cyclic GFR-binding peptide
  MOD_RES (26)..(27): Xaa is C or S
EYQKYVVNNASDIYLISIPSLRTPVXXTP

SEQ ID NO: 54414 - protein, 35 aa, Artificial Sequence
  Cyclic GFR-binding peptide
  MOD_RES (32)..(33): Xaa is C or S
SEVVMDEYQKYVVNNASDIYLISIPSLRTPVXXTP

SEQ ID NO: 54415 - protein, 31 aa, Artificial Sequence
  Cyclic GFR-binding peptide
SEVVMDEYQKYVVNNASDIYLISIPSLRTPV

SEQ ID NO: 54416 - protein, 41 aa, Artificial Sequence; identical to SEQ ID NO: 32462
  Cyclic GFR-binding peptide
  MOD_RES (1)..(3)..(36)..(37): Xaa is C or S

SEQ ID NO: 54417 - protein, 33 aa, Artificial Sequence; identical to SEQ ID NO: 32466
  Cyclic GFR-binding peptide
  MOD_RES (30)..(31): Xaa is C or S

SEQ ID NO: 54418 - protein, 32 aa, Artificial Sequence; identical to SEQ ID NO: 29469
  Cyclic GFR-binding peptide
  MOD_RES (26)..(27): Xaa is C or S

SEQ ID NO: 54419 - protein, 32 aa, Artificial Sequence; identical to SEQ ID NO: 29470
  Cyclic GFR-binding peptide
  MOD_RES (28)..(29): Xaa is C or S

SEQ ID NO: 54420 - protein, 35 aa, Artificial Sequence
  Cyclic GFR-binding peptide
  MOD_RES (30)..(31): Xaa is C or S
EVIMEYQKYLLVRGNDIYLMSIPSTKVPAXXTSPV

SEQ ID NO: 54421 - protein, 21 aa, Artificial Sequence
  Cyclic GFR-binding peptide
GEYQKYIIQQKDNIYLMSIPS

SEQ ID NO: 54422 - protein, 33 aa, Artificial Sequence; identical to SEQ ID NO: 32476
  Cyclic GFR-binding peptide
  MOD_RES (30)..(31): Xaa is C or S

SEQ ID NO: 54423 - protein, 30 aa, Artificial Sequence; identical to SEQ ID NO: 32481
  Cyclic GFR-binding peptide
  MOD_RES (30)..(30): Xaa is C or S

SEQ ID NO: 54424 - protein, 34 aa, Artificial Sequence; identical to SEQ ID NO: 29484
  Cyclic GFR-binding peptide
  MOD_RES (31)..(32): Xaa is C or S

SEQ ID NO: 54425 - protein, 30 aa, Artificial Sequence; identical to SEQ ID NO: 32487
  Cyclic GFR-binding peptide

SEQ ID NO: 54426 - protein, 36 aa, Artificial Sequence; identical to SEQ ID NO: 32489
  Cyclic GFR-binding peptide
  MOD_RES (1)..(33)..(34): Xaa is C or S

SEQ ID NO: 54427 - protein, 33 aa, Artificial Sequence; identical to SEQ ID NO: 29490
  Cyclic GFR-binding peptide
  MOD_RES (1)..(3): Xaa is C or S

SEQ ID NO: 54428 - protein, 26 aa, Artificial Sequence
  Cyclic GFR-binding peptide
MNEYQKYIVNNSSDIYLVSIPSLKTP

SEQ ID NO: 54429 - protein, 37 aa, Artificial Sequence; identical to SEQ ID NO: 32493
  Cyclic GFR-binding peptide
  MOD_RES (32)..(32): Xaa is C or S

SEQ ID NO: 54430 - protein, 38 aa, Artificial Sequence; identical to SEQ ID NO: 32494
  Cyclic GFR-binding peptide
  MOD_RES (2)..(34)..(35): Xaa is C or S

SEQ ID NO: 54431 - protein, 39 aa, Artificial Sequence
  Cyclic GFR-binding peptide
  MOD_RES (2)..(4)..(36)..(37): Xaa is C or S
SXGXRDVVMGEYQKYIIQQKDNIYLMSIPSMKTPTXXPG

SEQ ID NO: 54432 - protein, 31 aa, Artificial Sequence; identical to SEQ ID NO: 29497
  Cyclic GFR-binding peptide
  MOD_RES (30)..(31): Xaa is C or S

SEQ ID NO: 54433 - protein, 30 aa, Artificial Sequence; identical to SEQ ID NO: 29498
  Cyclic GFR-binding peptide
  MOD_RES (29)..(30): Xaa is C or S

SEQ ID NO: 54434 - protein, 25 aa, Artificial Sequence
  Cyclic GFR-binding peptide
MEYQKYLLVRGNDIYLMSIPSTKVP

SEQ ID NO: 54435 - protein, 36 aa, Artificial Sequence; identical to SEQ ID NO: 32501
  Cyclic GFR-binding peptide
  MOD_RES (2)..(35)..(36): Xaa is C or S

SEQ ID NO: 54436 - protein, 32 aa, Artificial Sequence; identical to SEQ ID NO: 32502
  Cyclic GFR-binding peptide
  MOD_RES (28)..(28): Xaa is C or S

SEQ ID NO: 54437 - protein, 30 aa, Artificial Sequence; identical to SEQ ID NO: 29503
  Cyclic GFR-binding peptide
  MOD_RES (28)..(29): Xaa is C or S

SEQ ID NO: 54438 - protein, 27 aa, Artificial Sequence
  Cyclic GFR-binding peptide
MGEYQKYIIQQKDNIYLMSIPSMKTPT

SEQ ID NO: 54439 - protein, 27 aa, Artificial Sequence
  Cyclic GFR-binding peptide
  MOD_RES (1)..(1): Xaa is C or S
XSRVVMNEYQKYIVNSSDDIYLVSIPS

SEQ ID NO: 54440 - protein, 32 aa, Artificial Sequence; identical to SEQ ID NO: 32510
  Cyclic GFR-binding peptide
  MOD_RES (1)..(1): Xaa is C or S

SEQ ID NO: 54441 - protein, 27 aa, Artificial Sequence
  Cyclic GFR-binding peptide
  MOD_RES (1)..(1): Xaa is C or S
XGEVVMEEYQKYVVKDYEDIYLMSIPS

SEQ ID NO: 54442 - protein, 34 aa, Artificial Sequence; identical to SEQ ID NO: 32512
  Cyclic GFR-binding peptide
  MOD_RES (31)..(32): Xaa is C or S

SEQ ID NO: 54443 - protein, 35 aa, Artificial Sequence; identical to SEQ ID NO: 29516
  Cyclic GFR-binding peptide
  MOD_RES (30)..(31): Xaa is C or S

SEQ ID NO: 54444 - protein, 28 aa, Artificial Sequence
  Cyclic GFR-binding peptide
  MOD_RES (26)..(27): Xaa is C or S
EYQKYIVNNSSDIYLVSIPSLKTPAXXA

SEQ ID NO: 54445 - protein, 26 aa, Artificial Sequence
  Cyclic GFR-binding peptide
GEVVMEEYQKYVVKDYEDIYLMSIPS

SEQ ID NO: 54446 - protein, 31 aa, Artificial Sequence; identical to SEQ ID NO: 32520
  Cyclic GFR-binding peptide
  MOD_RES (28)..(29): Xaa is C or S

SEQ ID NO: 54447 - protein, 29 aa, Artificial Sequence
  Cyclic GFR-binding peptide
  MOD_RES (1)..(1): Xaa is C or S
XRDVVMGEYQKYIIQQKDNIYLMSIPSMK

SEQ ID NO: 54448 - protein, 30 aa, Artificial Sequence; identical to SEQ ID NO: 14731
  Cyclic GFR-binding peptide
  MOD_RES (2)..(4): Xaa is C or S

SEQ ID NO: 54449 - protein, 29 aa, Artificial Sequence
  Cyclic GFR-binding peptide
  MOD_RES (27)..(28): Xaa is C or S
NEYQKYIVNSSDDIYLVSIPSLQTPAXXP

SEQ ID NO: 54450 - protein, 42 aa, Artificial Sequence; identical to SEQ ID NO: 29530
  Cyclic GFR-binding peptide
  MOD_RES (2)..(4)..(36)..(37): Xaa is C or S

SEQ ID NO: 54451 - protein, 36 aa, Artificial Sequence; identical to SEQ ID NO: 32531
  Cyclic GFR-binding peptide
  MOD_RES (2)..(4)..(36): Xaa is C or S

SEQ ID NO: 54452 - protein, 37 aa, Artificial Sequence; identical to SEQ ID NO: 32534
  Cyclic GFR-binding peptide
  MOD_RES (1)..(33): Xaa is C or S

SEQ ID NO: 54453 - protein, 32 aa, Artificial Sequence; identical to SEQ ID NO: 29532
  Cyclic GFR-binding peptide
  MOD_RES (29)..(30): Xaa is C or S

SEQ ID NO: 54454 - protein, 38 aa, Artificial Sequence
  Cyclic GFR-binding peptide
  MOD_RES (1)..(3)..(35)..(36): Xaa is C or S
XGXSEVVMDEYQKYVVNNASDIYLISIPSLRTPVXXTP

SEQ ID NO: 54455 - protein, 29 aa, Artificial Sequence
  Cyclic GFR-binding peptide
EVVMDEYQKYVVKENEDIYLMSIPSLETP

SEQ ID NO: 54456 - protein, 34 aa, Artificial Sequence; identical to SEQ ID NO: 29536
  Cyclic GFR-binding peptide
  MOD_RES (2)..(34): Xaa is C or S

SEQ ID NO: 54457 - protein, 33 aa, Artificial Sequence
  Cyclic GFR-binding peptide
  MOD_RES (29)..(30): Xaa is C or S
VIMEYQKYLLVRGNDIYLMSIPSTKVPAXXTSP

SEQ ID NO: 54458 - protein, 24 aa, Artificial Sequence
  Cyclic GFR-binding peptide
EVIMEYQKYLLVRGNDIYLMSIPS

SEQ ID NO: 54459 - protein, 39 aa, Artificial Sequence; identical to SEQ ID NO: 32542
  Cyclic GFR-binding peptide
  MOD_RES (1)..(3)..(35)..(36): Xaa is C or S

SEQ ID NO: 54460 - protein, 30 aa, Artificial Sequence; identical to SEQ ID NO: 14747
  Cyclic GFR-binding peptide
  MOD_RES (2)..(4): Xaa is C or S

SEQ ID NO: 54461 - protein, 36 aa, Artificial Sequence; identical to SEQ ID NO: 29541
  Cyclic GFR-binding peptide
  MOD_RES (2)..(34)..(35): Xaa is C or S

SEQ ID NO: 54462 - protein, 29 aa, Artificial Sequence
  Cyclic GFR-binding peptide
  MOD_RES (2)..(4): Xaa is C or S
SXKXSKVIMNSLQEIKPTKGIYYLITLPE

SEQ ID NO: 54463 - protein, 24 aa, Artificial Sequence
  Cyclic GFR-binding peptide
EYQKYVVKDYEDIYLMSIPSLETP

SEQ ID NO: 54464 - protein, 34 aa, Artificial Sequence; identical to SEQ ID NO: 12036
  Cyclic GFR-binding peptide
  MOD_RES (2)..(4): Xaa is C or S

SEQ ID NO: 54465 - protein, 31 aa, Artificial Sequence; identical to SEQ ID NO: 12037
  Cyclic GFR-binding peptide
  MOD_RES (2)..(4): Xaa is C or S

SEQ ID NO: 54466 - protein, 31 aa, Artificial Sequence
  Cyclic GFR-binding peptide
  MOD_RES (28)..(29): Xaa is C or S
MGEYQKYIIQQKDNIYLMSIPSMKTPTXXPG

SEQ ID NO: 54467 - protein, 40 aa, Artificial Sequence; identical to SEQ ID NO: 29560
  Cyclic GFR-binding peptide
  MOD_RES (2)..(4)..(36)..(37): Xaa is C or S

SEQ ID NO: 54468 - protein, 26 aa, Artificial Sequence
  Cyclic GFR-binding peptide
EEYQKYVVKDYEDIYLMSIPSLETPV

SEQ ID NO: 54469 - protein, 38 aa, Artificial Sequence
  Cyclic GFR-binding peptide
  MOD_RES (32)..(33): Xaa is C or S
SEVVMDEYQKYVVNNASDIYLISIPSLRTPVXXTPPTS

SEQ ID NO: 54470 - protein, 36 aa, Artificial Sequence; identical to SEQ ID NO: 29563
  Cyclic GFR-binding peptide
  MOD_RES (31)..(32): Xaa is C or S

SEQ ID NO: 54471 - protein, 21 aa, Artificial Sequence
  Cyclic GFR-binding peptide
EEYQKYTPVGMDDIYLVSIPS

SEQ ID NO: 54472 - protein, 25 aa, Artificial Sequence
  Cyclic GFR-binding peptide
MGEEYQKYTPVGMDDIYLVSIPSLK

SEQ ID NO: 54473 - protein, 33 aa, Artificial Sequence
  Cyclic GFR-binding peptide
  MOD_RES (27)..(28): Xaa is C or S
GEYQKYIIQQKDNIYLMSIPSMKTPTXXPGASG

SEQ ID NO: 54474 - protein, 30 aa, Artificial Sequence; identical to SEQ ID NO: 14773
  Cyclic GFR-binding peptide
  MOD_RES (2)..(4): Xaa is C or S

SEQ ID NO: 54475 - protein, 31 aa, Artificial Sequence; identical to SEQ ID NO: 32568
  Cyclic GFR-binding peptide
  MOD_RES (29)..(30): Xaa is C or S

SEQ ID NO: 54476 - protein, 28 aa, Artificial Sequence
  Cyclic GFR-binding peptide
  MOD_RES (28)..(28): Xaa is C or S
MDEYQKYVVKENEDIYLMSIPSLETPVX

SEQ ID NO: 54477 - protein, 37 aa, Artificial Sequence
  Cyclic GFR-binding peptide
  MOD_RES (31)..(32): Xaa is C or S
EEVIMEYQKYLLVRGNDIYLMSIPSTKVPAXXTSPVR

SEQ ID NO: 54478 - protein, 29 aa, Artificial Sequence
  Cyclic GFR-binding peptide
  MOD_RES (1)..(1): Xaa is C or S
XEAVSMGEEYQKYTPVGMDDIYLVSIPSL

SEQ ID NO: 54479 - protein, 30 aa, Artificial Sequence
  Cyclic GFR-binding peptide
  MOD_RES (2)..(4): Xaa is C or S
SXGXRDVVMGEYQKYIIQQKDNIYLMSIPS

SEQ ID NO: 54480 - protein, 33 aa, Artificial Sequence
  Cyclic GFR-binding peptide
  MOD_RES (1)..(3): Xaa is C or S
XGXRDVVMGEYQKYIIQQKDNIYLMSIPSMKTP

SEQ ID NO: 54481 - protein, 29 aa, Artificial Sequence
  Cyclic GFR-binding peptide
GEVVMDEYQKYVVKENEDIYLMSIPSLET

SEQ ID NO: 54482 - protein, 41 aa, Artificial Sequence
  Cyclic GFR-binding peptide
  MOD_RES (2)..(4)..(35)..(36): Xaa is C or S
LXGXEEVIMEYQKYLLVRGNDIYLMSIPSTKVPAXXTSPVR

SEQ ID NO: 54483 - protein, 32 aa, Artificial Sequence
  Cyclic GFR-binding peptide
  MOD_RES (31)..(32): Xaa is C or S
DVVMGEYQKYIIQQKDNIYLMSIPSMKTPTXX

SEQ ID NO: 54484 - protein, 35 aa, Artificial Sequence; identical to SEQ ID NO: 32580
  Cyclic GFR-binding peptide
  MOD_RES (30)..(31): Xaa is C or S

SEQ ID NO: 54485 - protein, 29 aa, Artificial Sequence
  Cyclic GFR-binding peptide
  MOD_RES (27)..(28): Xaa is C or S
DEYQKYVVNNASDIYLISIPSLRTPVXXT

SEQ ID NO: 54486 - protein, 34 aa, Artificial Sequence; identical to SEQ ID NO: 12064
  Cyclic GFR-binding peptide
  MOD_RES (2)..(4): Xaa is C or S

SEQ ID NO: 54487 - protein, 26 aa, Artificial Sequence
  Cyclic GFR-binding peptide
GEYQKYIIQQKDNIYLMSIPSMKTPT

SEQ ID NO: 54488 - protein, 34 aa, Artificial Sequence
  Cyclic GFR-binding peptide
  MOD_RES (30)..(31): Xaa is C or S
VVMGEYQKYIIQQKDNIYLMSIPSMKTPTXXPGA

SEQ ID NO: 54489 - protein, 29 aa, Artificial Sequence
  Cyclic GFR-binding peptide
  MOD_RES (2)..(4): Xaa is C or S
SXKXSRVIMNSLQEVKPKRGVYYVIPLPE

SEQ ID NO: 54490 - protein, 35 aa, Artificial Sequence; identical to SEQ ID NO: 29589
  Cyclic GFR-binding peptide
  MOD_RES (1)..(33)..(34): Xaa is C or S

SEQ ID NO: 54491 - protein, 38 aa, Artificial Sequence; identical to SEQ ID NO: 32589
  Cyclic GFR-binding peptide
  MOD_RES (1)..(3)..(35)..(36): Xaa is C or S

SEQ ID NO: 54492 - protein, 40 aa, Artificial Sequence; identical to SEQ ID NO: 29591
  Cyclic GFR-binding peptide
  MOD_RES (2)..(4)..(36)..(37): Xaa is C or S

SEQ ID NO: 54493 - protein, 29 aa, Artificial Sequence
  Cyclic GFR-binding peptide
  MOD_RES (2)..(2): Xaa is C or S
GXGEVVMDEYQKYVVKENEDIYLMSIPSL

SEQ ID NO: 54494 - protein, 33 aa, Artificial Sequence; identical to SEQ ID NO: 29597
  Cyclic GFR-binding peptide
  MOD_RES (30)..(30): Xaa is C or S

SEQ ID NO: 54495 - protein, 30 aa, Artificial Sequence
  Cyclic GFR-binding peptide
EEVIMEYQKYLLVRGNDIYLMSIPSTKVPA

SEQ ID NO: 54496 - protein, 28 aa, Artificial Sequence
  Cyclic GFR-binding peptide
  MOD_RES (2)..(2): Xaa is C or S
GXARVVMNEYQKYIVNSSDDIYLVSIPS

SEQ ID NO: 54497 - protein, 35 aa, Artificial Sequence
  Cyclic GFR-binding peptide
  MOD_RES (1)..(33)..(34): Xaa is C or S
XRDVVMGEYQKYIIQQKDNIYLMSIPSMKTPTXXP

SEQ ID NO: 54498 - protein, 37 aa, Artificial Sequence
  Cyclic GFR-binding peptide
  MOD_RES (2)..(33)..(34): Xaa is C or S
GXEEVIMEYQKYLLVRGNDIYLMSIPSTKVPAXXTSP

SEQ ID NO: 54499 - protein, 27 aa, Artificial Sequence
  Cyclic GFR-binding peptide
  MOD_RES (26)..(27): Xaa is C or S
EYQKYIVNNSSDIYLVSIPSLKTPAXX

SEQ ID NO: 54500 - protein, 26 aa, Artificial Sequence
  Cyclic GFR-binding peptide
SMGEEYQKYTPVGMDDIYLVSIPSLK

SEQ ID NO: 54501 - protein, 34 aa, Artificial Sequence
  Cyclic GFR-binding peptide
  MOD_RES (30)..(31): Xaa is C or S
VVMDEYQKYVVNNASDIYLISIPSLRTPVXXTPP

SEQ ID NO: 54502 - protein, 31 aa, Artificial Sequence; identical to SEQ ID NO: 29612
  Cyclic GFR-binding peptide
  MOD_RES (26)..(27): Xaa is C or S

SEQ ID NO: 54503 - protein, 29 aa, Artificial Sequence
  Cyclic GFR-binding peptide
  MOD_RES (27)..(28): Xaa is C or S
NEYQKYIVNNSSDIYLVSIPSLKTPAXXA

SEQ ID NO: 54504 - protein, 29 aa, Artificial Sequence
  Cyclic GFR-binding peptide
ESVAMGEYQKYYTVVGKDIYLISIPSLKT

SEQ ID NO: 54505 - protein, 32 aa, Artificial Sequence
  Cyclic GFR-binding peptide
  MOD_RES (30)..(31): Xaa is C or S
EVIMEYQKYLLVRGNDIYLMSIPSTKVPAXXT

SEQ ID NO: 54506 - protein, 27 aa, Artificial Sequence
  Cyclic GFR-binding peptide
GEVVMDEYQKYVVKENEDIYLMSIPSL

SEQ ID NO: 54507 - protein, 36 aa, Artificial Sequence; identical to SEQ ID NO: 32621
  Cyclic GFR-binding peptide
  MOD_RES (1)..(34)..(35): Xaa is C or S

SEQ ID NO: 54508 - protein, 38 aa, Artificial Sequence; identical to SEQ ID NO: 32622
  Cyclic GFR-binding peptide
  MOD_RES (1)..(33)..(34): Xaa is C or S

SEQ ID NO: 54509 - protein, 31 aa, Artificial Sequence; identical to SEQ ID NO: 32625
  Cyclic GFR-binding peptide
  MOD_RES (28)..(29): Xaa is C or S

SEQ ID NO: 54510 - protein, 37 aa, Artificial Sequence; identical to SEQ ID NO: 29629
  Cyclic GFR-binding peptide
  MOD_RES (2)..(35)..(36): Xaa is C or S

SEQ ID NO: 54511 - protein, 40 aa, Artificial Sequence; identical to SEQ ID NO: 29630
  Cyclic GFR-binding peptide
  MOD_RES (1)..(3)..(35)..(36): Xaa is C or S

SEQ ID NO: 54512 - protein, 37 aa, Artificial Sequence; identical to SEQ ID NO: 29631
  Cyclic GFR-binding peptide
  MOD_RES (32)..(33): Xaa is C or S

SEQ ID NO: 54513 - protein, 29 aa, Artificial Sequence
  Cyclic GFR-binding peptide
  MOD_RES (2)..(2): Xaa is C or S
GXARVVMNEYQKYIVNSSDDIYLVSIPSL

SEQ ID NO: 54514 - protein, 35 aa, Artificial Sequence
  Cyclic GFR-binding peptide
  MOD_RES (2)..(4)..(35): Xaa is C or S
LXGXEEVIMEYQKYLLVRGNDIYLMSIPSTKVPAX

SEQ ID NO: 54515 - protein, 30 aa, Artificial Sequence; identical to SEQ ID NO: 12116
  Cyclic GFR-binding peptide
  MOD_RES (2)..(4): Xaa is C or S

SEQ ID NO: 54516 - protein, 33 aa, Artificial Sequence; identical to SEQ ID NO: 32644
  Cyclic GFR-binding peptide
  MOD_RES (32)..(33): Xaa is C or S

SEQ ID NO: 54517 - protein, 29 aa, Artificial Sequence
  Cyclic GFR-binding peptide
  MOD_RES (1)..(1): Xaa is C or S
XGEVVMDEYQKYVVKENEDIYLMSIPSLE

SEQ ID NO: 54518 - protein, 31 aa, Artificial Sequence; identical to SEQ ID NO: 29637
  Cyclic GFR-binding peptide
  MOD_RES (2)..(4): Xaa is C or S

SEQ ID NO: 54519 - protein, 27 aa, Artificial Sequence
  Cyclic GFR-binding peptide
ESVAMGEYQKYYTVVGKDIYLISIPSL

SEQ ID NO: 54520 - protein, 41 aa, Artificial Sequence; identical to SEQ ID NO: 29639
  Cyclic GFR-binding peptide
  MOD_RES (2)..(4)..(36)..(37): Xaa is C or S

SEQ ID NO: 54521 - protein, 31 aa, Artificial Sequence; identical to SEQ ID NO: 14857
  Cyclic GFR-binding peptide
  MOD_RES (2)..(4): Xaa is C or S

SEQ ID NO: 54522 - protein, 39 aa, Artificial Sequence
  Cyclic GFR-binding peptide
  MOD_RES (1)..(3)..(35)..(36): Xaa is C or S
XGXSEVVMDEYQKYVVNNASDIYLISIPSLRTPVXXTPP

SEQ ID NO: 54523 - protein, 30 aa, Artificial Sequence; identical to SEQ ID NO: 29644
  Cyclic GFR-binding peptide
  MOD_RES (28)..(29): Xaa is C or S

SEQ ID NO: 54524 - protein, 24 aa, Artificial Sequence
  Cyclic GFR-binding peptide
VVMDEYQKYVVKENEDIYLMSIPS

SEQ ID NO: 54525 - protein, 40 aa, Artificial Sequence; identical to SEQ ID NO: 32659
  Cyclic GFR-binding peptide
  MOD_RES (1)..(3)..(36)..(37): Xaa is C or S

SEQ ID NO: 54526 - protein, 32 aa, Artificial Sequence; identical to SEQ ID NO: 14862
  Cyclic GFR-binding peptide
  MOD_RES (2)..(4): Xaa is C or S

SEQ ID NO: 54527 - protein, 30 aa, Artificial Sequence; identical to SEQ ID NO: 29648
  Cyclic GFR-binding peptide
  MOD_RES (2)..(2): Xaa is C or S

SEQ ID NO: 54528 - protein, 32 aa, Artificial Sequence
  Cyclic GFR-binding peptide
  MOD_RES (1)..(3): Xaa is C or S
XGXEEVIMEYQKYLLVRGNDIYLMSIPSTKVP

SEQ ID NO: 54529 - protein, 34 aa, Artificial Sequence; identical to SEQ ID NO: 32660
  Cyclic GFR-binding peptide
  MOD_RES (2)..(4): Xaa is C or S

SEQ ID NO: 54530 - protein, 26 aa, Artificial Sequence
  Cyclic GFR-binding peptide
  MOD_RES (26)..(26): Xaa is C or S
EYQKYVVNNASDIYLISIPSLRTPVX

SEQ ID NO: 54531 - protein, 33 aa, Artificial Sequence
  Cyclic GFR-binding peptide
  MOD_RES (2)..(4): Xaa is C or S
RXGXSEVVMDEYQKYVVNNASDIYLISIPSLRT

SEQ ID NO: 54532 - protein, 32 aa, Artificial Sequence; identical to SEQ ID NO: 32664
  Cyclic GFR-binding peptide
  MOD_RES (30)..(31): Xaa is C or S

SEQ ID NO: 54533 - protein, 30 aa, Artificial Sequence; identical to SEQ ID NO: 14871
  Cyclic GFR-binding peptide
  MOD_RES (2)..(4): Xaa is C or S

SEQ ID NO: 54534 - protein, 32 aa, Artificial Sequence; identical to SEQ ID NO: 32666
  Cyclic GFR-binding peptide
  MOD_RES (31)..(32): Xaa is C or S

SEQ ID NO: 54535 - protein, 27 aa, Artificial Sequence
  Cyclic GFR-binding peptide
VMDEYQKYVVKENEDIYLMSIPSLETP

SEQ ID NO: 54536 - protein, 41 aa, Artificial Sequence; identical to SEQ ID NO: 14874
  Cyclic GFR-binding peptide
  MOD_RES (2)..(4)..(35)..(36): Xaa is C or S

SEQ ID NO: 54537 - protein, 33 aa, Artificial Sequence; identical to SEQ ID NO: 32673
  Cyclic GFR-binding peptide
  MOD_RES (28)..(28): Xaa is C or S

SEQ ID NO: 54538 - protein, 37 aa, Artificial Sequence; identical to SEQ ID NO: 29662
  Cyclic GFR-binding peptide
  MOD_RES (32)..(33): Xaa is C or S

SEQ ID NO: 54539 - protein, 34 aa, Artificial Sequence; identical to SEQ ID NO: 32678
  Cyclic GFR-binding peptide
  MOD_RES (30)..(31): Xaa is C or S

SEQ ID NO: 54540 - protein, 26 aa, Artificial Sequence
  Cyclic GFR-binding peptide
VMGEYQKYIIQQKDNIYLMSIPSMKT

SEQ ID NO: 54541 - protein, 26 aa, Artificial Sequence
  Cyclic GFR-binding peptide
IMEYQKYLLVRGNDIYLMSIPSTKVP

SEQ ID NO: 54542 - protein, 32 aa, Artificial Sequence
  Cyclic GFR-binding peptide
  MOD_RES (27)..(28): Xaa is C or S
GEYQKYIIQQKDNIYLMSIPSMKTPTXXPGAS

SEQ ID NO: 54543 - protein, 30 aa, Artificial Sequence; identical to SEQ ID NO: 32683
  Cyclic GFR-binding peptide
  MOD_RES (30)..(30): Xaa is C or S

SEQ ID NO: 54544 - protein, 29 aa, Artificial Sequence
  Cyclic GFR-binding peptide
  MOD_RES (26)..(27): Xaa is C or S
EYQKYVVKDYEDIYLMSIPSLETPVXXAK

SEQ ID NO: 54545 - protein, 36 aa, Artificial Sequence; identical to SEQ ID NO: 29674
  Cyclic GFR-binding peptide
  MOD_RES (30)..(31): Xaa is C or S

SEQ ID NO: 54546 - protein, 31 aa, Artificial Sequence
  Cyclic GFR-binding peptide
  MOD_RES (31)..(31): Xaa is C or S
EVVMDEYQKYVVNNASDIYLISIPSLRTPVX

SEQ ID NO: 54547 - protein, 26 aa, Artificial Sequence
  Cyclic GFR-binding peptide
VSMGEEYQKYTPVGMDDIYLVSIPSL

SEQ ID NO: 54548 - protein, 35 aa, Artificial Sequence; identical to SEQ ID NO: 29683
  Cyclic GFR-binding peptide
  MOD_RES (32)..(33): Xaa is C or S

SEQ ID NO: 54549 - protein, 29 aa, Artificial Sequence
  Cyclic GFR-binding peptide
VAMGEYQKYYTVVGKDIYLISIPSLKTPV

SEQ ID NO: 54550 - protein, 29 aa, Artificial Sequence
  Cyclic GFR-binding peptide
SMGEEYQKYTPVGMDDIYLVSIPSLKTPV

SEQ ID NO: 54551 - protein, 31 aa, Artificial Sequence; identical to SEQ ID NO: 32706
  Cyclic GFR-binding peptide
  MOD_RES (30)..(31): Xaa is C or S

SEQ ID NO: 54552 - protein, 32 aa, Artificial Sequence; identical to SEQ ID NO: 32707
  Cyclic GFR-binding peptide
  MOD_RES (31)..(32): Xaa is C or S

SEQ ID NO: 54553 - protein, 26 aa, Artificial Sequence
  Cyclic GFR-binding peptide
MDEYQKYVVNNASDIYLISIPSLRTP

SEQ ID NO: 54554 - protein, 32 aa, Artificial Sequence; identical to SEQ ID NO: 32709
  Cyclic GFR-binding peptide
  MOD_RES (32)..(32): Xaa is C or S

SEQ ID NO: 54555 - protein, 32 aa, Artificial Sequence
  Cyclic GFR-binding peptide
  MOD_RES (28)..(29): Xaa is C or S
MGEYQKYIIQQKDNIYLMSIPSMKTPTXXPGA

SEQ ID NO: 54556 - protein, 29 aa, Artificial Sequence
  Cyclic GFR-binding peptide
  MOD_RES (27)..(28): Xaa is C or S
EEYQKYTPVGMDDIYLVSIPSLKTPVXXA

SEQ ID NO: 54557 - protein, 28 aa, Artificial Sequence
  Cyclic GFR-binding peptide
AKVVMNEYQKYIVNNSSDIYLVSIPSLK

SEQ ID NO: 54558 - protein, 39 aa, Artificial Sequence; identical to SEQ ID NO: 32713
  Cyclic GFR-binding peptide
  MOD_RES (2)..(34)..(35): Xaa is C or S

SEQ ID NO: 54559 - protein, 31 aa, Artificial Sequence; identical to SEQ ID NO: 32715
  Cyclic GFR-binding peptide

SEQ ID NO: 54560 - protein, 30 aa, Artificial Sequence; identical to SEQ ID NO: 32718
  Cyclic GFR-binding peptide

SEQ ID NO: 54561 - protein, 34 aa, Artificial Sequence
  Cyclic GFR-binding peptide
  MOD_RES (28)..(29): Xaa is C or S
MGEYQKYIIQQKDNIYLMSIPSMKTPTXXPGASG

SEQ ID NO: 54562 - protein, 32 aa, Artificial Sequence
  Cyclic GFR-binding peptide
  MOD_RES (2)..(4): Xaa is C or S
LXGXEEVIMEYQKYLLVRGNDIYLMSIPSTKV

SEQ ID NO: 54563 - protein, 23 aa, Artificial Sequence
  Cyclic GFR-binding peptide
MGEEYQKYTPVGMDDIYLVSIPS

SEQ ID NO: 54564 - protein, 24 aa, Artificial Sequence
  Cyclic GFR-binding peptide
VVMEEYQKYVVKDYEDIYLMSIPS

SEQ ID NO: 54565 - protein, 30 aa, Artificial Sequence; identical to SEQ ID NO: 29717
  Cyclic GFR-binding peptide
  MOD_RES (2)..(2): Xaa is C or S

SEQ ID NO: 54566 - protein, 32 aa, Artificial Sequence; identical to SEQ ID NO: 32728
  Cyclic GFR-binding peptide
  MOD_RES (28)..(29): Xaa is C or S

SEQ ID NO: 54567 - protein, 42 aa, Artificial Sequence; identical to SEQ ID NO: 12190
  Cyclic GFR-binding peptide
  MOD_RES (2)..(4)..(36)..(37): Xaa is C or S

SEQ ID NO: 54568 - protein, 29 aa, Artificial Sequence
  Cyclic GFR-binding peptide
  MOD_RES (2)..(4): Xaa is C or S
SXKXSKVVMEYQKYVKPTRGVIFLISIPS

SEQ ID NO: 54569 - protein, 32 aa, Artificial Sequence; identical to SEQ ID NO: 29722
  Cyclic GFR-binding peptide
  MOD_RES (27)..(28): Xaa is C or S

SEQ ID NO: 54570 - protein, 35 aa, Artificial Sequence; identical to SEQ ID NO: 29723
  Cyclic GFR-binding peptide
  MOD_RES (32)..(33): Xaa is C or S

SEQ ID NO: 54571 - protein, 36 aa, Artificial Sequence; identical to SEQ ID NO: 32733
  Cyclic GFR-binding peptide
  MOD_RES (31)..(32): Xaa is C or S

SEQ ID NO: 54572 - protein, 37 aa, Artificial Sequence
  Cyclic GFR-binding peptide
  MOD_RES (1)..(33)..(34): Xaa is C or S
XSEVVMDEYQKYVVNNASDIYLISIPSLRTPVXXTPP

SEQ ID NO: 54573 - protein, 29 aa, Artificial Sequence
  Cyclic GFR-binding peptide
  MOD_RES (28)..(29): Xaa is C or S
MDEYQKYVVKENEDIYLMSIPSLETPVXX

SEQ ID NO: 54574 - protein, 37 aa, Artificial Sequence; identical to SEQ ID NO: 32741
  Cyclic GFR-binding peptide
  MOD_RES (2)..(34)..(35): Xaa is C or S

SEQ ID NO: 54575 - protein, 34 aa, Artificial Sequence; identical to SEQ ID NO: 29729
  Cyclic GFR-binding peptide
  MOD_RES (2)..(4): Xaa is C or S

SEQ ID NO: 54576 - protein, 42 aa, Artificial Sequence; identical to SEQ ID NO: 12201
  Cyclic GFR-binding peptide
  MOD_RES (2)..(4)..(36): Xaa is C or S

SEQ ID NO: 54577 - protein, 30 aa, Artificial Sequence; identical to SEQ ID NO: 29734
  Cyclic GFR-binding peptide
  MOD_RES (27)..(28): Xaa is C or S

SEQ ID NO: 54578 - protein, 37 aa, Artificial Sequence; identical to SEQ ID NO: 29737
  Cyclic GFR-binding peptide
  MOD_RES (2)..(34)..(35): Xaa is C or S

SEQ ID NO: 54579 - protein, 22 aa, Artificial Sequence
  Cyclic GFR-binding peptide
MDEYQKYVVNNASDIYLISIPS

SEQ ID NO: 54580 - protein, 31 aa, Artificial Sequence; identical to SEQ ID NO: 12209
  Cyclic GFR-binding peptide
  MOD_RES (2)..(4): Xaa is C or S

SEQ ID NO: 54581 - protein, 35 aa, Artificial Sequence; identical to SEQ ID NO: 29739
  Cyclic GFR-binding peptide
  MOD_RES (1)..(3)..(35): Xaa is C or S

SEQ ID NO: 54582 - protein, 25 aa, Artificial Sequence
  Cyclic GFR-binding peptide
AMGEYQKYYTVVGKDIYLISIPSLK

SEQ ID NO: 54583 - protein, 35 aa, Artificial Sequence; identical to SEQ ID NO: 29741
  Cyclic GFR-binding peptide
  MOD_RES (31)..(32): Xaa is C or S

SEQ ID NO: 54584 - protein, 24 aa, Artificial Sequence
  Cyclic GFR-binding peptide
VMEEYQKYVVKDYEDIYLMSIPSL

SEQ ID NO: 54585 - protein, 29 aa, Artificial Sequence
  Cyclic GFR-binding peptide
  MOD_RES (2)..(2): Xaa is C or S
GXEAVSMGEEYQKYTPVGMDDIYLVSIPS

SEQ ID NO: 54586 - protein, 26 aa, Artificial Sequence
  Cyclic GFR-binding peptide
MDEYQKYVVKENEDIYLMSIPSLETP

SEQ ID NO: 54587 - protein, 31 aa, Artificial Sequence; identical to SEQ ID NO: 32763
  Cyclic GFR-binding peptide
  MOD_RES (31)..(31): Xaa is C or S

SEQ ID NO: 54588 - protein, 32 aa, Artificial Sequence
  Cyclic GFR-binding peptide
  MOD_RES (29)..(30): Xaa is C or S
VIMEYQKYLLVRGNDIYLMSIPSTKVPAXXTS

SEQ ID NO: 54589 - protein, 36 aa, Artificial Sequence; identical to SEQ ID NO: 29748
  Cyclic GFR-binding peptide
  MOD_RES (1)..(3)..(35)..(36): Xaa is C or S

SEQ ID NO: 54590 - protein, 38 aa, Artificial Sequence
  Cyclic GFR-binding peptide
  MOD_RES (1)..(33)..(34): Xaa is C or S
XSEVVMDEYQKYVVNNASDIYLISIPSLRTPVXXTPPT

SEQ ID NO: 54591 - protein, 39 aa, Artificial Sequence; identical to SEQ ID NO: 32770
  Cyclic GFR-binding peptide
  MOD_RES (1)..(33)..(34): Xaa is C or S

SEQ ID NO: 54592 - protein, 32 aa, Artificial Sequence
  Cyclic GFR-binding peptide
  MOD_RES (27)..(28): Xaa is C or S
DEYQKYVVNNASDIYLISIPSLRTPVXXTPPT

SEQ ID NO: 54593 - protein, 38 aa, Artificial Sequence
  Cyclic GFR-binding peptide
  MOD_RES (32)..(33): Xaa is C or S
SRVVMNEYQKYIVNSSDDIYLVSIPSLKTPAXXPKPVH

SEQ ID NO: 54594 - protein, 37 aa, Artificial Sequence; identical to SEQ ID NO: 29755
  Cyclic GFR-binding peptide
  MOD_RES (1)..(3)..(35)..(36): Xaa is C or S

SEQ ID NO: 54595 - protein, 29 aa, Artificial Sequence
  Cyclic GFR-binding peptide
  MOD_RES (1)..(3): Xaa is C or S
XGXARVVMNEYQKYIVNSSDDIYLVSIPS

SEQ ID NO: 54596 - protein, 22 aa, Artificial Sequence
  Cyclic GFR-binding peptide
EYQKYIIQQKDNIYLMSIPSMK

SEQ ID NO: 54597 - protein, 32 aa, Artificial Sequence; identical to SEQ ID NO: 29763
  Cyclic GFR-binding peptide
  MOD_RES (2)..(2): Xaa is C or S

SEQ ID NO: 54598 - protein, 35 aa, Artificial Sequence; identical to SEQ ID NO: 32784
  Cyclic GFR-binding peptide
  MOD_RES (2)..(4): Xaa is C or S

SEQ ID NO: 54599 - protein, 33 aa, Artificial Sequence; identical to SEQ ID NO: 32785
  Cyclic GFR-binding peptide
  MOD_RES (33)..(33): Xaa is C or S

SEQ ID NO: 54600 - protein, 28 aa, Artificial Sequence
  Cyclic GFR-binding peptide
EVVMDEYQKYVVKENEDIYLMSIPSLET

SEQ ID NO: 54601 - protein, 33 aa, Artificial Sequence; identical to SEQ ID NO: 15000
  Cyclic GFR-binding peptide
  MOD_RES (2)..(4): Xaa is C or S

SEQ ID NO: 54602 - protein, 39 aa, Artificial Sequence
  Cyclic GFR-binding peptide
  MOD_RES (2)..(33)..(34): Xaa is C or S
GXEEVIMEYQKYLLVRGNDIYLMSIPSTKVPAXXTSPVR

SEQ ID NO: 54603 - protein, 28 aa, Artificial Sequence
  Cyclic GFR-binding peptide
VAMGEYQKYYTVVGKDIYLISIPSLKTP

SEQ ID NO: 54604 - protein, 33 aa, Artificial Sequence; identical to SEQ ID NO: 29776
  Cyclic GFR-binding peptide
  MOD_RES (32)..(33): Xaa is C or S

SEQ ID NO: 54605 - protein, 33 aa, Artificial Sequence; identical to SEQ ID NO: 32789
  Cyclic GFR-binding peptide
  MOD_RES (31)..(32): Xaa is C or S

SEQ ID NO: 54606 - protein, 34 aa, Artificial Sequence; identical to SEQ ID NO: 12244
  Cyclic GFR-binding peptide
  MOD_RES (2)..(4): Xaa is C or S

SEQ ID NO: 54607 - protein, 30 aa, Artificial Sequence; identical to SEQ ID NO: 29782
  Cyclic GFR-binding peptide
  MOD_RES (29)..(30): Xaa is C or S

SEQ ID NO: 54608 - protein, 33 aa, Artificial Sequence; identical to SEQ ID NO: 29783
  Cyclic GFR-binding peptide
  MOD_RES (29)..(30): Xaa is C or S

SEQ ID NO: 54609 - protein, 41 aa, Artificial Sequence
  Cyclic GFR-binding peptide
  MOD_RES (1)..(3)..(35)..(36): Xaa is C or S
XGXSRVVMNEYQKYIVNSSDDIYLVSIPSLKTPAXXPKPVH

SEQ ID NO: 54610 - protein, 38 aa, Artificial Sequence; identical to SEQ ID NO: 32796
  Cyclic GFR-binding peptide
  MOD_RES (32)..(33): Xaa is C or S

SEQ ID NO: 54611 - protein, 35 aa, Artificial Sequence
  Cyclic GFR-binding peptide
  MOD_RES (1)..(33)..(34): Xaa is C or S
XSEVVMDEYQKYVVNNASDIYLISIPSLRTPVXXT

SEQ ID NO: 54612 - protein, 42 aa, Artificial Sequence
  Cyclic GFR-binding peptide
  MOD_RES (2)..(4)..(36)..(37): Xaa is C or S
RXGXSEVVMDEYQKYVVNNASDIYLISIPSLRTPVXXTPPTS

SEQ ID NO: 54613 - protein, 31 aa, Artificial Sequence; identical to SEQ ID NO: 15012
  Cyclic GFR-binding peptide
  MOD_RES (2)..(4): Xaa is C or S

SEQ ID NO: 54614 - protein, 40 aa, Artificial Sequence
  Cyclic GFR-binding peptide
  MOD_RES (2)..(34)..(35): Xaa is C or S
GXSEVVMDEYQKYVVNNASDIYLISIPSLRTPVXXTPPTS

SEQ ID NO: 54615 - protein, 27 aa, Artificial Sequence
  Cyclic GFR-binding peptide
VVMEEYQKYVVKDYEDIYLMSIPSLET

SEQ ID NO: 54616 - protein, 32 aa, Artificial Sequence; identical to SEQ ID NO: 32807
  Cyclic GFR-binding peptide
  MOD_RES (2)..(4): Xaa is C or S

SEQ ID NO: 54617 - protein, 33 aa, Artificial Sequence; identical to SEQ ID NO: 32814
  Cyclic GFR-binding peptide
  MOD_RES (32)..(33): Xaa is C or S

SEQ ID NO: 54618 - protein, 31 aa, Artificial Sequence; identical to SEQ ID NO: 29805
  Cyclic GFR-binding peptide
  MOD_RES (29)..(30): Xaa is C or S

SEQ ID NO: 54619 - protein, 31 aa, Artificial Sequence
  Cyclic GFR-binding peptide
  MOD_RES (2)..(2): Xaa is C or S
GXRDVVMGEYQKYIIQQKDNIYLMSIPSMKT

SEQ ID NO: 54620 - protein, 31 aa, Artificial Sequence
  Cyclic GFR-binding peptide
  MOD_RES (1)..(1): Xaa is C or S
XEEVIMEYQKYLLVRGNDIYLMSIPSTKVPA

SEQ ID NO: 54621 - protein, 37 aa, Artificial Sequence; identical to SEQ ID NO: 29809
  Cyclic GFR-binding peptide
  MOD_RES (32)..(33): Xaa is C or S

SEQ ID NO: 54622 - protein, 23 aa, Artificial Sequence
  Cyclic GFR-binding peptide
EYQKYIVNNSSDIYLVSIPSLKT

SEQ ID NO: 54623 - protein, 29 aa, Artificial Sequence
  Cyclic GFR-binding peptide
  MOD_RES (2)..(4): Xaa is C or S
SXKXSKVIMEYQKYIKPTKGIIFLISIPS

SEQ ID NO: 54624 - protein, 31 aa, Artificial Sequence; identical to SEQ ID NO: 32827
  Cyclic GFR-binding peptide
  MOD_RES (2)..(2): Xaa is C or S

SEQ ID NO: 54625 - protein, 27 aa, Artificial Sequence
  Cyclic GFR-binding peptide
  MOD_RES (26)..(27): Xaa is C or S
EYQKYVVNNASDIYLISIPSLRTPVXX

SEQ ID NO: 54626 - protein, 29 aa, Artificial Sequence
  Cyclic GFR-binding peptide
  MOD_RES (2)..(2): Xaa is C or S
GXRDVVMGEYQKYIIQQKDNIYLMSIPSM

SEQ ID NO: 54627 - protein, 23 aa, Artificial Sequence
  Cyclic GFR-binding peptide
MDEYQKYVVKENEDIYLMSIPSL

SEQ ID NO: 54628 - protein, 26 aa, Artificial Sequence
  Cyclic GFR-binding peptide
AKVVMNEYQKYIVNNSSDIYLVSIPS

SEQ ID NO: 54629 - protein, 25 aa, Artificial Sequence
  Cyclic GFR-binding peptide
RVVMNEYQKYIVNSSDDIYLVSIPS

SEQ ID NO: 54630 - protein, 32 aa, Artificial Sequence; identical to SEQ ID NO: 29828
  Cyclic GFR-binding peptide
  MOD_RES (28)..(29): Xaa is C or S

SEQ ID NO: 54631 - protein, 31 aa, Artificial Sequence; identical to SEQ ID NO: 29831
  Cyclic GFR-binding peptide
  MOD_RES (31)..(31): Xaa is C or S

SEQ ID NO: 54632 - protein, 35 aa, Artificial Sequence; identical to SEQ ID NO: 29832
  Cyclic GFR-binding peptide
  MOD_RES (29)..(29): Xaa is C or S

SEQ ID NO: 54633 - protein, 40 aa, Artificial Sequence; identical to SEQ ID NO: 29834
  Cyclic GFR-binding peptide
  MOD_RES (2)..(34)..(35): Xaa is C or S

SEQ ID NO: 54634 - protein, 25 aa, Artificial Sequence
  Cyclic GFR-binding peptide
VMNEYQKYIVNSSDDIYLVSIPSLK

SEQ ID NO: 54635 - protein, 31 aa, Artificial Sequence; identical to SEQ ID NO: 29842
  Cyclic GFR-binding peptide
  MOD_RES (1)..(1): Xaa is C or S

SEQ ID NO: 54636 - protein, 31 aa, Artificial Sequence; identical to SEQ ID NO: 29848
  Cyclic GFR-binding peptide
  MOD_RES (29)..(30): Xaa is C or S

SEQ ID NO: 54637 - protein, 32 aa, Artificial Sequence; identical to SEQ ID NO: 29850
  Cyclic GFR-binding peptide
  MOD_RES (2)..(4): Xaa is C or S

SEQ ID NO: 54638 - protein, 31 aa, Artificial Sequence; identical to SEQ ID NO: 29852
  Cyclic GFR-binding peptide
  MOD_RES (30)..(31): Xaa is C or S

SEQ ID NO: 54639 - protein, 21 aa, Artificial Sequence
  Cyclic GFR-binding peptide
NEYQKYIVNSSDDIYLVSIPS

SEQ ID NO: 54640 - protein, 30 aa, Artificial Sequence; identical to SEQ ID NO: 29855
  Cyclic GFR-binding peptide
  MOD_RES (29)..(30): Xaa is C or S

SEQ ID NO: 54641 - protein, 42 aa, Artificial Sequence; identical to SEQ ID NO: 29857
  Cyclic GFR-binding peptide
  MOD_RES (2)..(4)..(36)..(37): Xaa is C or S

SEQ ID NO: 54642 - protein, 25 aa, Artificial Sequence
  Cyclic GFR-binding peptide
EVVMDEYQKYVVKENEDIYLMSIPS

SEQ ID NO: 54643 - protein, 31 aa, Artificial Sequence; identical to SEQ ID NO: 29864
  Cyclic GFR-binding peptide
  MOD_RES (29)..(30): Xaa is C or S

SEQ ID NO: 54644 - protein, 37 aa, Artificial Sequence
  Cyclic GFR-binding peptide
  MOD_RES (2)..(4)..(36)..(37): Xaa is C or S
SXGXRDVVMGEYQKYIIQQKDNIYLMSIPSMKTPTXX

SEQ ID NO: 54645 - protein, 42 aa, Artificial Sequence; identical to SEQ ID NO: 12320
  Cyclic GFR-binding peptide
  MOD_RES (2)..(4)..(36)..(37): Xaa is C or S

SEQ ID NO: 54646 - protein, 40 aa, Artificial Sequence; identical to SEQ ID NO: 29867
  Cyclic GFR-binding peptide
  MOD_RES (1)..(3)..(35)..(36): Xaa is C or S

SEQ ID NO: 54647 - protein, 24 aa, Artificial Sequence
  Cyclic GFR-binding peptide
VMGEYQKYIIQQKDNIYLMSIPSM

SEQ ID NO: 54648 - protein, 28 aa, Artificial Sequence
  Cyclic GFR-binding peptide
  MOD_RES (1)..(1): Xaa is C or S
XSRVVMNEYQKYIVNSSDDIYLVSIPSL

SEQ ID NO: 54649 - protein, 29 aa, Artificial Sequence
  Cyclic GFR-binding peptide
  MOD_RES (2)..(2): Xaa is C or S
GXSRVVMNEYQKYIVNSSDDIYLVSIPSL

SEQ ID NO: 54650 - protein, 31 aa, Artificial Sequence; identical to SEQ ID NO: 29871
  Cyclic GFR-binding peptide
  MOD_RES (1)..(3): Xaa is C or S

SEQ ID NO: 54651 - protein, 33 aa, Artificial Sequence
  Cyclic GFR-binding peptide
  MOD_RES (28)..(29): Xaa is C or S
IMEYQKYLLVRGNDIYLMSIPSTKVPAXXTSPV

SEQ ID NO: 54652 - protein, 37 aa, Artificial Sequence; identical to SEQ ID NO: 29876
  Cyclic GFR-binding peptide
  MOD_RES (1)..(3)..(35)..(36): Xaa is C or S

SEQ ID NO: 54653 - protein, 29 aa, Artificial Sequence
  Cyclic GFR-binding peptide
  MOD_RES (1)..(3): Xaa is C or S
XGXEEVIMEYQKYLLVRGNDIYLMSIPST

SEQ ID NO: 54654 - protein, 25 aa, Artificial Sequence
  Cyclic GFR-binding peptide
VVMNEYQKYIVNSSDDIYLVSIPSL

SEQ ID NO: 54655 - protein, 28 aa, Artificial Sequence
  Cyclic GFR-binding peptide
RDVVMGEYQKYIIQQKDNIYLMSIPSMK

SEQ ID NO: 54656 - protein, 39 aa, Artificial Sequence; identical to SEQ ID NO: 29883
  Cyclic GFR-binding peptide
  MOD_RES (1)..(33): Xaa is C or S

SEQ ID NO: 54657 - protein, 34 aa, Artificial Sequence; identical to SEQ ID NO: 32885
  Cyclic GFR-binding peptide
  MOD_RES (1)..(33)..(34): Xaa is C or S

SEQ ID NO: 54658 - protein, 31 aa, Artificial Sequence; identical to SEQ ID NO: 12336
  Cyclic GFR-binding peptide
  MOD_RES (2)..(4): Xaa is C or S

SEQ ID NO: 54659 - protein, 31 aa, Artificial Sequence; identical to SEQ ID NO: 32891
  Cyclic GFR-binding peptide
  MOD_RES (1)..(1): Xaa is C or S

SEQ ID NO: 54660 - protein, 27 aa, Artificial Sequence
  Cyclic GFR-binding peptide
EVVMDEYQKYVVKENEDIYLMSIPSLE

SEQ ID NO: 54661 - protein, 33 aa, Artificial Sequence; identical to SEQ ID NO: 32899
  Cyclic GFR-binding peptide
  MOD_RES (31)..(32): Xaa is C or S

SEQ ID NO: 54662 - protein, 32 aa, Artificial Sequence; identical to SEQ ID NO: 32904
  Cyclic GFR-binding peptide
  MOD_RES (26)..(27): Xaa is C or S

SEQ ID NO: 54663 - protein, 31 aa, Artificial Sequence; identical to SEQ ID NO: 29900
  Cyclic GFR-binding peptide
  MOD_RES (27)..(28): Xaa is C or S

SEQ ID NO: 54664 - protein, 28 aa, Artificial Sequence
  Cyclic GFR-binding peptide
VVMGEYQKYIIQQKDNIYLMSIPSMKTP

SEQ ID NO: 54665 - protein, 33 aa, Artificial Sequence
  Cyclic GFR-binding peptide
  MOD_RES (27)..(28): Xaa is C or S
NEYQKYIVNSSDDIYLVSIPSLKTPAXXPKPVH

SEQ ID NO: 54666 - protein, 28 aa, Artificial Sequence
  Cyclic GFR-binding peptide
VVMNEYQKYIVNSSDDIYLVSIPSLQTP

SEQ ID NO: 54667 - protein, 37 aa, Artificial Sequence; identical to SEQ ID NO: 32912
  Cyclic GFR-binding peptide
  MOD_RES (1)..(3)..(35)..(36): Xaa is C or S

SEQ ID NO: 54668 - protein, 36 aa, Artificial Sequence; identical to SEQ ID NO: 29908
  Cyclic GFR-binding peptide
  MOD_RES (2)..(4)..(36): Xaa is C or S

SEQ ID NO: 54669 - protein, 32 aa, Artificial Sequence; identical to SEQ ID NO: 29915
  Cyclic GFR-binding peptide
  MOD_RES (32)..(32): Xaa is C or S

SEQ ID NO: 54670 - protein, 27 aa, Artificial Sequence
  Cyclic GFR-binding peptide
  MOD_RES (26)..(27): Xaa is C or S
EYQKYIVNSSDDIYLVSIPSLKTPAXX

SEQ ID NO: 54671 - protein, 30 aa, Artificial Sequence; identical to SEQ ID NO: 29923
  Cyclic GFR-binding peptide
  MOD_RES (30)..(30): Xaa is C or S

SEQ ID NO: 54672 - protein, 31 aa, Artificial Sequence; identical to SEQ ID NO: 15129
  Cyclic GFR-binding peptide
  MOD_RES (2)..(4): Xaa is C or S

SEQ ID NO: 54673 - protein, 27 aa, Artificial Sequence
  Cyclic GFR-binding peptide
MDEYQKYVVKENEDIYLMSIPSLETPV

SEQ ID NO: 54674 - protein, 32 aa, Artificial Sequence; identical to SEQ ID NO: 29930
  Cyclic GFR-binding peptide
  MOD_RES (32)..(32): Xaa is C or S

SEQ ID NO: 54675 - protein, 29 aa, Artificial Sequence
  Cyclic GFR-binding peptide
  MOD_RES (29)..(29): Xaa is C or S
VMGEYQKYIIQQKDNIYLMSIPSMKTPTX

SEQ ID NO: 54676 - protein, 33 aa, Artificial Sequence; identical to SEQ ID NO: 29934
  Cyclic GFR-binding peptide
  MOD_RES (32)..(33): Xaa is C or S

SEQ ID NO: 54677 - protein, 26 aa, Artificial Sequence
  Cyclic GFR-binding peptide
SVAMGEYQKYYTVVGKDIYLISIPSL

SEQ ID NO: 54678 - protein, 32 aa, Artificial Sequence; identical to SEQ ID NO: 29936
  Cyclic GFR-binding peptide
  MOD_RES (2)..(4): Xaa is C or S

SEQ ID NO: 54679 - protein, 32 aa, Artificial Sequence; identical to SEQ ID NO: 32933
  Cyclic GFR-binding peptide
  MOD_RES (29)..(30): Xaa is C or S

SEQ ID NO: 54680 - protein, 37 aa, Artificial Sequence; identical to SEQ ID NO: 29937
  Cyclic GFR-binding peptide
  MOD_RES (1)..(33)..(34): Xaa is C or S

SEQ ID NO: 54681 - protein, 39 aa, Artificial Sequence
  Cyclic GFR-binding peptide
  MOD_RES (1)..(33)..(34): Xaa is C or S
XRDVVMGEYQKYIIQQKDNIYLMSIPSMKTPTXXPGASG

SEQ ID NO: 54682 - protein, 29 aa, Artificial Sequence
  Cyclic GFR-binding peptide
VVMEEYQKYVVKDYEDIYLMSIPSLETPV

SEQ ID NO: 54683 - protein, 37 aa, Artificial Sequence; identical to SEQ ID NO: 29941
  Cyclic GFR-binding peptide
  MOD_RES (2)..(4)..(36)..(37): Xaa is C or S

SEQ ID NO: 54684 - protein, 29 aa, Artificial Sequence
  Cyclic GFR-binding peptide
SEVVMDEYQKYVVNNASDIYLISIPSLRT

SEQ ID NO: 54685 - protein, 36 aa, Artificial Sequence; identical to SEQ ID NO: 32936
  Cyclic GFR-binding peptide
  MOD_RES (32)..(33): Xaa is C or S

SEQ ID NO: 54686 - protein, 28 aa, Artificial Sequence
  Cyclic GFR-binding peptide
  MOD_RES (26)..(26): Xaa is C or S
EYQKYIVNSSDDIYLVSIPSLKTPAXTP

SEQ ID NO: 54687 - protein, 32 aa, Artificial Sequence; identical to SEQ ID NO: 29943
  Cyclic GFR-binding peptide
  MOD_RES (30)..(31): Xaa is C or S

SEQ ID NO: 54688 - protein, 32 aa, Artificial Sequence; identical to SEQ ID NO: 32938
  Cyclic GFR-binding peptide
  MOD_RES (29)..(30): Xaa is C or S

SEQ ID NO: 54689 - protein, 36 aa, Artificial Sequence; identical to SEQ ID NO: 29947
  Cyclic GFR-binding peptide
  MOD_RES (2)..(34)..(35): Xaa is C or S

SEQ ID NO: 54690 - protein, 33 aa, Artificial Sequence; identical to SEQ ID NO: 29949
  Cyclic GFR-binding peptide
  MOD_RES (2)..(4): Xaa is C or S

SEQ ID NO: 54691 - protein, 32 aa, Artificial Sequence; identical to SEQ ID NO: 12383
  Cyclic GFR-binding peptide
  MOD_RES (2)..(4): Xaa is C or S

SEQ ID NO: 54692 - protein, 32 aa, Artificial Sequence; identical to SEQ ID NO: 32946
  Cyclic GFR-binding peptide
  MOD_RES (32)..(32): Xaa is C or S

SEQ ID NO: 54693 - protein, 23 aa, Artificial Sequence
  Cyclic GFR-binding peptide
EYQKYYTVVGKDIYLISIPSLKT

SEQ ID NO: 54694 - protein, 30 aa, Artificial Sequence; identical to SEQ ID NO: 29956
  Cyclic GFR-binding peptide
  MOD_RES (1)..(1): Xaa is C or S

SEQ ID NO: 54695 - protein, 25 aa, Artificial Sequence
  Cyclic GFR-binding peptide
EYQKYIIQQKDNIYLMSIPSMKTPT

SEQ ID NO: 54696 - protein, 27 aa, Artificial Sequence
  Cyclic GFR-binding peptide
VVMDEYQKYVVKENEDIYLMSIPSLET

SEQ ID NO: 54697 - protein, 27 aa, Artificial Sequence
  Cyclic GFR-binding peptide
  MOD_RES (27)..(27): Xaa is C or S
DEYQKYVVKENEDIYLMSIPSLETPVX

SEQ ID NO: 54698 - protein, 28 aa, Artificial Sequence
  Cyclic GFR-binding peptide
SVAMGEYQKYYTVVGKDIYLISIPSLKT

SEQ ID NO: 54699 - protein, 31 aa, Artificial Sequence; identical to SEQ ID NO: 32957
  Cyclic GFR-binding peptide
  MOD_RES (30)..(31): Xaa is C or S

SEQ ID NO: 54700 - protein, 28 aa, Artificial Sequence
  Cyclic GFR-binding peptide
VVMDEYQKYVVKENEDIYLMSIPSLETP

SEQ ID NO: 54701 - protein, 24 aa, Artificial Sequence
  Cyclic GFR-binding peptide
VVMDEYQKYVVNNASDIYLISIPS

SEQ ID NO: 54702 - protein, 38 aa, Artificial Sequence; identical to SEQ ID NO: 29966
  Cyclic GFR-binding peptide
  MOD_RES (2)..(35)..(36): Xaa is C or S

SEQ ID NO: 54703 - protein, 30 aa, Artificial Sequence
  Cyclic GFR-binding peptide
  MOD_RES (1)..(3): Xaa is C or S
XGXSEVVMDEYQKYVVNNASDIYLISIPSL

SEQ ID NO: 54704 - protein, 32 aa, Artificial Sequence; identical to SEQ ID NO: 15159
  Cyclic GFR-binding peptide
  MOD_RES (2)..(4): Xaa is C or S

SEQ ID NO: 54705 - protein, 31 aa, Artificial Sequence; identical to SEQ ID NO: 32966
  Cyclic GFR-binding peptide
  MOD_RES (2)..(4): Xaa is C or S

SEQ ID NO: 54706 - protein, 30 aa, Artificial Sequence
  Cyclic GFR-binding peptide
RDVVMGEYQKYIIQQKDNIYLMSIPSMKTP

SEQ ID NO: 54707 - protein, 31 aa, Artificial Sequence; identical to SEQ ID NO: 29968
  Cyclic GFR-binding peptide
  MOD_RES (29)..(29): Xaa is C or S

SEQ ID NO: 54708 - protein, 27 aa, Artificial Sequence
  Cyclic GFR-binding peptide
EEVIMEYQKYLLVRGNDIYLMSIPSTK

SEQ ID NO: 54709 - protein, 32 aa, Artificial Sequence; identical to SEQ ID NO: 32970
  Cyclic GFR-binding peptide
  MOD_RES (1)..(1): Xaa is C or S

SEQ ID NO: 54710 - protein, 27 aa, Artificial Sequence
  Cyclic GFR-binding peptide
VVMGEYQKYIIQQKDNIYLMSIPSMKT

SEQ ID NO: 54711 - protein, 41 aa, Artificial Sequence; identical to SEQ ID NO: 32977
  Cyclic GFR-binding peptide
  MOD_RES (1)..(3)..(35)..(36): Xaa is C or S

SEQ ID NO: 54712 - protein, 31 aa, Artificial Sequence
  Cyclic GFR-binding peptide
  MOD_RES (29)..(30): Xaa is C or S
VMGEYQKYIIQQKDNIYLMSIPSMKTPTXXP

SEQ ID NO: 54713 - protein, 29 aa, Artificial Sequence
  Cyclic GFR-binding peptide
  MOD_RES (2)..(4): Xaa is C or S
SXKXSKVIMNSLQEIKPTKGIYYVIPLPE

SEQ ID NO: 54714 - protein, 35 aa, Artificial Sequence; identical to SEQ ID NO: 29979
  Cyclic GFR-binding peptide
  MOD_RES (2)..(4): Xaa is C or S

SEQ ID NO: 54715 - protein, 25 aa, Artificial Sequence
  Cyclic GFR-binding peptide
IMEYQKYLLVRGNDIYLMSIPSTKV

SEQ ID NO: 54716 - protein, 34 aa, Artificial Sequence; identical to SEQ ID NO: 32985
  Cyclic GFR-binding peptide
  MOD_RES (2)..(34): Xaa is C or S

SEQ ID NO: 54717 - protein, 31 aa, Artificial Sequence; identical to SEQ ID NO: 32988
  Cyclic GFR-binding peptide
  MOD_RES (1)..(3): Xaa is C or S

SEQ ID NO: 54718 - protein, 32 aa, Artificial Sequence
  Cyclic GFR-binding peptide
  MOD_RES (32)..(32): Xaa is C or S
RDVVMGEYQKYIIQQKDNIYLMSIPSMKTPTX

SEQ ID NO: 54719 - protein, 31 aa, Artificial Sequence; identical to SEQ ID NO: 29992
  Cyclic GFR-binding peptide
  MOD_RES (28)..(29): Xaa is C or S

SEQ ID NO: 54720 - protein, 22 aa, Artificial Sequence
  Cyclic GFR-binding peptide
EYQKYIVNNSSDIYLVSIPSLK

SEQ ID NO: 54721 - protein, 40 aa, Artificial Sequence; identical to SEQ ID NO: 29995
  Cyclic GFR-binding peptide
  MOD_RES (2)..(34)..(35): Xaa is C or S

SEQ ID NO: 54722 - protein, 21 aa, Artificial Sequence
  Cyclic GFR-binding peptide
DEYQKYVVKENEDIYLMSIPS

SEQ ID NO: 54723 - protein, 22 aa, Artificial Sequence
  Cyclic GFR-binding peptide
MNEYQKYIVNSSDDIYLVSIPS

SEQ ID NO: 54724 - protein, 33 aa, Artificial Sequence; identical to SEQ ID NO: 29997
  Cyclic GFR-binding peptide
  MOD_RES (27)..(28): Xaa is C or S

SEQ ID NO: 54725 - protein, 34 aa, Artificial Sequence
  Cyclic GFR-binding peptide
  MOD_RES (29)..(30): Xaa is C or S
VIMEYQKYLLVRGNDIYLMSIPSTKVPAXXTSPV

SEQ ID NO: 54726 - protein, 39 aa, Artificial Sequence; identical to SEQ ID NO: 32996
  Cyclic GFR-binding peptide
  MOD_RES (1)..(3)..(35)..(36): Xaa is C or S

SEQ ID NO: 54727 - protein, 29 aa, Artificial Sequence
  Cyclic GFR-binding peptide
GEVVMEEYQKYVVKDYEDIYLMSIPSLET

SEQ ID NO: 54728 - protein, 38 aa, Artificial Sequence; identical to SEQ ID NO: 30002
  Cyclic GFR-binding peptide
  MOD_RES (2)..(4)..(36)..(37): Xaa is C or S

SEQ ID NO: 54729 - protein, 31 aa, Artificial Sequence; identical to SEQ ID NO: 15186
  Cyclic GFR-binding peptide
  MOD_RES (2)..(4): Xaa is C or S

SEQ ID NO: 54730 - protein, 27 aa, Artificial Sequence
  Cyclic GFR-binding peptide
  MOD_RES (27)..(27): Xaa is C or S
EEYQKYVVKDYEDIYLMSIPSLETPVX

SEQ ID NO: 54731 - protein, 29 aa, Artificial Sequence
  Cyclic GFR-binding peptide
  MOD_RES (2)..(4): Xaa is C or S
SXKXSKVVMNSLQEVKPTRGVYYLITLPE

SEQ ID NO: 54732 - protein, 33 aa, Artificial Sequence
  Cyclic GFR-binding peptide
  MOD_RES (2)..(4): Xaa is C or S
LXGXEEVIMEYQKYLLVRGNDIYLMSIPSTKVP

SEQ ID NO: 54733 - protein, 36 aa, Artificial Sequence; identical to SEQ ID NO: 33003
  Cyclic GFR-binding peptide
  MOD_RES (2)..(4)..(36): Xaa is C or S

SEQ ID NO: 54734 - protein, 34 aa, Artificial Sequence; identical to SEQ ID NO: 33005
  Cyclic GFR-binding peptide
  MOD_RES (2)..(34): Xaa is C or S

SEQ ID NO: 54735 - protein, 31 aa, Artificial Sequence; identical to SEQ ID NO: 12438
  Cyclic GFR-binding peptide
  MOD_RES (2)..(4): Xaa is C or S

SEQ ID NO: 54736 - protein, 38 aa, Artificial Sequence; identical to SEQ ID NO: 30017
  Cyclic GFR-binding peptide
  MOD_RES (32)..(33): Xaa is C or S

SEQ ID NO: 54737 - protein, 33 aa, Artificial Sequence; identical to SEQ ID NO: 30018
  Cyclic GFR-binding peptide
  MOD_RES (2)..(4): Xaa is C or S

SEQ ID NO: 54738 - protein, 31 aa, Artificial Sequence; identical to SEQ ID NO: 33009
  Cyclic GFR-binding peptide
  MOD_RES (2)..(4): Xaa is C or S

SEQ ID NO: 54739 - protein, 34 aa, Artificial Sequence; identical to SEQ ID NO: 30019
  Cyclic GFR-binding peptide
  MOD_RES (29)..(30): Xaa is C or S

SEQ ID NO: 54740 - protein, 30 aa, Artificial Sequence; identical to SEQ ID NO: 33011
  Cyclic GFR-binding peptide

SEQ ID NO: 54741 - protein, 27 aa, Artificial Sequence
  Cyclic GFR-binding peptide
GEVVMEEYQKYVVKDYEDIYLMSIPSL

SEQ ID NO: 54742 - protein, 32 aa, Artificial Sequence; identical to SEQ ID NO: 33019
  Cyclic GFR-binding peptide
  MOD_RES (31)..(31): Xaa is C or S

SEQ ID NO: 54743 - protein, 25 aa, Artificial Sequence
  Cyclic GFR-binding peptide
EVVMDEYQKYVVNNASDIYLISIPS

SEQ ID NO: 54744 - protein, 31 aa, Artificial Sequence; identical to SEQ ID NO: 15208
  Cyclic GFR-binding peptide
  MOD_RES (2)..(4): Xaa is C or S

SEQ ID NO: 54745 - protein, 29 aa, Artificial Sequence
  Cyclic GFR-binding peptide
  MOD_RES (26)..(27): Xaa is C or S
EYQKYTPVGMDDIYLVSIPSLKTPVXXAK

SEQ ID NO: 54746 - protein, 29 aa, Artificial Sequence
  Cyclic GFR-binding peptide
  MOD_RES (27)..(28): Xaa is C or S
GEYQKYYTVVGKDIYLISIPSLKTPVXXA

SEQ ID NO: 54747 - protein, 33 aa, Artificial Sequence; identical to SEQ ID NO: 12457
  Cyclic GFR-binding peptide
  MOD_RES (2)..(4): Xaa is C or S

SEQ ID NO: 54748 - protein, 23 aa, Artificial Sequence
  Cyclic GFR-binding peptide
EYQKYTPVGMDDIYLVSIPSLKT

SEQ ID NO: 54749 - protein, 39 aa, Artificial Sequence
  Cyclic GFR-binding peptide
  MOD_RES (2)..(4)..(36)..(37): Xaa is C or S
RXGXSEVVMDEYQKYVVNNASDIYLISIPSLRTPVXXTP

SEQ ID NO: 54750 - protein, 26 aa, Artificial Sequence
  Cyclic GFR-binding peptide
AMGEYQKYYTVVGKDIYLISIPSLKT

SEQ ID NO: 54751 - protein, 34 aa, Artificial Sequence; identical to SEQ ID NO: 33035
  Cyclic GFR-binding peptide
  MOD_RES (28)..(29): Xaa is C or S

SEQ ID NO: 54752 - protein, 27 aa, Artificial Sequence
  Cyclic GFR-binding peptide
VAMGEYQKYYTVVGKDIYLISIPSLKT

SEQ ID NO: 54753 - protein, 32 aa, Artificial Sequence; identical to SEQ ID NO: 33038
  Cyclic GFR-binding peptide
  MOD_RES (30)..(30): Xaa is C or S

SEQ ID NO: 54754 - protein, 37 aa, Artificial Sequence; identical to SEQ ID NO: 30050
  Cyclic GFR-binding peptide
  MOD_RES (31)..(32): Xaa is C or S

SEQ ID NO: 54755 - protein, 25 aa, Artificial Sequence
  Cyclic GFR-binding peptide
GEYQKYYTVVGKDIYLISIPSLKTP

SEQ ID NO: 54756 - protein, 31 aa, Artificial Sequence
  Cyclic GFR-binding peptide
  MOD_RES (28)..(29): Xaa is C or S
MDEYQKYVVNNASDIYLISIPSLRTPVXXTP

SEQ ID NO: 54757 - protein, 26 aa, Artificial Sequence
  Cyclic GFR-binding peptide
VAMGEYQKYYTVVGKDIYLISIPSLK

SEQ ID NO: 54758 - protein, 38 aa, Artificial Sequence; identical to SEQ ID NO: 30058
  Cyclic GFR-binding peptide
  MOD_RES (2)..(4)..(36)..(37): Xaa is C or S

SEQ ID NO: 54759 - protein, 31 aa, Artificial Sequence; identical to SEQ ID NO: 15226
  Cyclic GFR-binding peptide
  MOD_RES (2)..(4): Xaa is C or S

SEQ ID NO: 54760 - protein, 22 aa, Artificial Sequence
  Cyclic GFR-binding peptide
EYQKYYTVVGKDIYLISIPSLK

SEQ ID NO: 54761 - protein, 28 aa, Artificial Sequence
  Cyclic GFR-binding peptide
EEVIMEYQKYLLVRGNDIYLMSIPSTKV

SEQ ID NO: 54762 - protein, 32 aa, Artificial Sequence; identical to SEQ ID NO: 33048
  Cyclic GFR-binding peptide
  MOD_RES (27)..(28): Xaa is C or S

SEQ ID NO: 54763 - protein, 27 aa, Artificial Sequence
  Cyclic GFR-binding peptide
  MOD_RES (1)..(1): Xaa is C or S
XESVAMGEYQKYYTVVGKDIYLISIPS

SEQ ID NO: 54764 - protein, 40 aa, Artificial Sequence; identical to SEQ ID NO: 30071
  Cyclic GFR-binding peptide
  MOD_RES (2)..(35)..(36): Xaa is C or S

SEQ ID NO: 54765 - protein, 34 aa, Artificial Sequence; identical to SEQ ID NO: 33051
  Cyclic GFR-binding peptide
  MOD_RES (29)..(30): Xaa is C or S

SEQ ID NO: 54766 - protein, 34 aa, Artificial Sequence; identical to SEQ ID NO: 33058
  Cyclic GFR-binding peptide
  MOD_RES (2)..(34): Xaa is C or S

SEQ ID NO: 54767 - protein, 33 aa, Artificial Sequence; identical to SEQ ID NO: 30077
  Cyclic GFR-binding peptide
  MOD_RES (29)..(30): Xaa is C or S

SEQ ID NO: 54768 - protein, 42 aa, Artificial Sequence; identical to SEQ ID NO: 33070
  Cyclic GFR-binding peptide
  MOD_RES (2)..(4)..(36)..(37): Xaa is C or S

SEQ ID NO: 54769 - protein, 38 aa, Artificial Sequence; identical to SEQ ID NO: 30080
  Cyclic GFR-binding peptide
  MOD_RES (2)..(34)..(35): Xaa is C or S

SEQ ID NO: 54770 - protein, 23 aa, Artificial Sequence
  Cyclic GFR-binding peptide
NEYQKYIVNSSDDIYLVSIPSLQ

SEQ ID NO: 54771 - protein, 25 aa, Artificial Sequence
  Cyclic GFR-binding peptide
VIMEYQKYLLVRGNDIYLMSIPSTK

SEQ ID NO: 54772 - protein, 42 aa, Artificial Sequence; identical to SEQ ID NO: 12488
  Cyclic GFR-binding peptide
  MOD_RES (2)..(4)..(36)..(37): Xaa is C or S

SEQ ID NO: 54773 - protein, 33 aa, Artificial Sequence; identical to SEQ ID NO: 33072
  Cyclic GFR-binding peptide
  MOD_RES (31)..(32): Xaa is C or S

SEQ ID NO: 54774 - protein, 42 aa, Artificial Sequence; identical to SEQ ID NO: 12492
  Cyclic GFR-binding peptide
  MOD_RES (2)..(4)..(36)..(37): Xaa is C or S

SEQ ID NO: 54775 - protein, 28 aa, Artificial Sequence
  Cyclic GFR-binding peptide
  MOD_RES (27)..(28): Xaa is C or S
DEYQKYVVNNASDIYLISIPSLRTPVXX

SEQ ID NO: 54776 - protein, 30 aa, Artificial Sequence
  Cyclic GFR-binding peptide
  MOD_RES (29)..(30): Xaa is C or S
VIMEYQKYLLVRGNDIYLMSIPSTKVPAXX

SEQ ID NO: 54777 - protein, 32 aa, Artificial Sequence
  Cyclic GFR-binding peptide
  MOD_RES (1)..(3): Xaa is C or S
XGXRDVVMGEYQKYIIQQKDNIYLMSIPSMKT

SEQ ID NO: 54778 - protein, 29 aa, Artificial Sequence
  Cyclic GFR-binding peptide
  MOD_RES (2)..(4): Xaa is C or S
SXKXSKVVMNSLQEVKPTRGVYYVIPLPE

SEQ ID NO: 54779 - protein, 35 aa, Artificial Sequence; identical to SEQ ID NO: 33082
  Cyclic GFR-binding peptide
  MOD_RES (31)..(32): Xaa is C or S

SEQ ID NO: 54780 - protein, 22 aa, Artificial Sequence
  Cyclic GFR-binding peptide
GEEYQKYTPVGMDDIYLVSIPS

SEQ ID NO: 54781 - protein, 22 aa, Artificial Sequence
  Cyclic GFR-binding peptide
MEEYQKYVVKDYEDIYLMSIPS

SEQ ID NO: 54782 - protein, 41 aa, Artificial Sequence; identical to SEQ ID NO: 12507
  Cyclic GFR-binding peptide
  MOD_RES (2)..(4)..(35)..(36): Xaa is C or S

SEQ ID NO: 54783 - protein, 34 aa, Artificial Sequence; identical to SEQ ID NO: 33093
  Cyclic GFR-binding peptide
  MOD_RES (1)..(3): Xaa is C or S

SEQ ID NO: 54784 - protein, 35 aa, Artificial Sequence; identical to SEQ ID NO: 33095
  Cyclic GFR-binding peptide
  MOD_RES (2)..(4): Xaa is C or S

SEQ ID NO: 54785 - protein, 30 aa, Artificial Sequence; identical to SEQ ID NO: 12512
  Cyclic GFR-binding peptide
  MOD_RES (2)..(4): Xaa is C or S

SEQ ID NO: 54786 - protein, 24 aa, Artificial Sequence
  Cyclic GFR-binding peptide
VMNEYQKYIVNNSSDIYLVSIPSL

SEQ ID NO: 54787 - protein, 31 aa, Artificial Sequence; identical to SEQ ID NO: 15269
  Cyclic GFR-binding peptide
  MOD_RES (2)..(4): Xaa is C or S

SEQ ID NO: 54788 - protein, 31 aa, Artificial Sequence; identical to SEQ ID NO: 30111
  Cyclic GFR-binding peptide
  MOD_RES (28)..(29): Xaa is C or S

SEQ ID NO: 54789 - protein, 33 aa, Artificial Sequence; identical to SEQ ID NO: 33105
  Cyclic GFR-binding peptide
  MOD_RES (32)..(33): Xaa is C or S

SEQ ID NO: 54790 - protein, 37 aa, Artificial Sequence; identical to SEQ ID NO: 30113
  Cyclic GFR-binding peptide
  MOD_RES (1)..(3)..(36)..(37): Xaa is C or S

SEQ ID NO: 54791 - protein, 31 aa, Artificial Sequence; identical to SEQ ID NO: 30114
  Cyclic GFR-binding peptide
  MOD_RES (2)..(2): Xaa is C or S

SEQ ID NO: 54792 - protein, 36 aa, Artificial Sequence
  Cyclic GFR-binding peptide
  MOD_RES (32)..(33): Xaa is C or S
SEVVMDEYQKYVVNNASDIYLISIPSLRTPVXXTPP

SEQ ID NO: 54793 - protein, 25 aa, Artificial Sequence
  Cyclic GFR-binding peptide
MDEYQKYVVKENEDIYLMSIPSLET

SEQ ID NO: 54794 - protein, 38 aa, Artificial Sequence; identical to SEQ ID NO: 33116
  Cyclic GFR-binding peptide
  MOD_RES (1)..(33)..(34): Xaa is C or S

SEQ ID NO: 54795 - protein, 35 aa, Artificial Sequence; identical to SEQ ID NO: 30118
  Cyclic GFR-binding peptide
  MOD_RES (2)..(34)..(35): Xaa is C or S

SEQ ID NO: 54796 - protein, 30 aa, Artificial Sequence; identical to SEQ ID NO: 33117
  Cyclic GFR-binding peptide
  MOD_RES (1)..(3): Xaa is C or S

SEQ ID NO: 54797 - protein, 35 aa, Artificial Sequence
  Cyclic GFR-binding peptide
  MOD_RES (32)..(33): Xaa is C or S
RDVVMGEYQKYIIQQKDNIYLMSIPSMKTPTXXPG

SEQ ID NO: 54798 - protein, 31 aa, Artificial Sequence; identical to SEQ ID NO: 15283
  Cyclic GFR-binding peptide
  MOD_RES (2)..(4): Xaa is C or S

SEQ ID NO: 54799 - protein, 31 aa, Artificial Sequence; identical to SEQ ID NO: 33120
  Cyclic GFR-binding peptide
  MOD_RES (2)..(4): Xaa is C or S

SEQ ID NO: 54800 - protein, 26 aa, Artificial Sequence
  Cyclic GFR-binding peptide
NEYQKYIVNSSDDIYLVSIPSLKTPA

SEQ ID NO: 54801 - protein, 31 aa, Artificial Sequence
  Cyclic GFR-binding peptide
  MOD_RES (2)..(4): Xaa is C or S
RXGXSEVVMDEYQKYVVNNASDIYLISIPSL

SEQ ID NO: 54802 - protein, 27 aa, Artificial Sequence
  Cyclic GFR-binding peptide
  MOD_RES (27)..(27): Xaa is C or S
DEYQKYVVNNASDIYLISIPSLRTPVX

SEQ ID NO: 54803 - protein, 25 aa, Artificial Sequence
  Cyclic GFR-binding peptide
MGEYQKYYTVVGKDIYLISIPSLKT

SEQ ID NO: 54804 - protein, 32 aa, Artificial Sequence; identical to SEQ ID NO: 30140
  Cyclic GFR-binding peptide
  MOD_RES (27)..(28): Xaa is C or S

SEQ ID NO: 54805 - protein, 33 aa, Artificial Sequence; identical to SEQ ID NO: 30143
  Cyclic GFR-binding peptide
  MOD_RES (27)..(28): Xaa is C or S

SEQ ID NO: 54806 - protein, 27 aa, Artificial Sequence
  Cyclic GFR-binding peptide
  MOD_RES (1)..(1): Xaa is C or S
XARVVMNEYQKYIVNSSDDIYLVSIPS

SEQ ID NO: 54807 - protein, 30 aa, Artificial Sequence; identical to SEQ ID NO: 33135
  Cyclic GFR-binding peptide
  MOD_RES (2)..(4): Xaa is C or S

SEQ ID NO: 54808 - protein, 26 aa, Artificial Sequence
  Cyclic GFR-binding peptide
VMNEYQKYIVNSSDDIYLVSIPSLKT

SEQ ID NO: 54809 - protein, 28 aa, Artificial Sequence
  Cyclic GFR-binding peptide
VVMDEYQKYVVNNASDIYLISIPSLRTP

SEQ ID NO: 54810 - protein, 30 aa, Artificial Sequence
  Cyclic GFR-binding peptide
  MOD_RES (2)..(2): Xaa is C or S
GXEEVIMEYQKYLLVRGNDIYLMSIPSTKV

SEQ ID NO: 54811 - protein, 29 aa, Artificial Sequence
  Cyclic GFR-binding peptide
  MOD_RES (29)..(29): Xaa is C or S
VMNEYQKYIVNSSDDIYLVSIPSLQTPAX

SEQ ID NO: 54812 - protein, 28 aa, Artificial Sequence
  Cyclic GFR-binding peptide
VMNEYQKYIVNSSDDIYLVSIPSLQTPA

SEQ ID NO: 54813 - protein, 27 aa, Artificial Sequence
  Cyclic GFR-binding peptide
  MOD_RES (27)..(27): Xaa is C or S
GEYQKYIIQQKDNIYLMSIPSMKTPTX

SEQ ID NO: 54814 - protein, 24 aa, Artificial Sequence
  Cyclic GFR-binding peptide
MDEYQKYVVNNASDIYLISIPSLR

SEQ ID NO: 54815 - protein, 35 aa, Artificial Sequence; identical to SEQ ID NO: 33141
  Cyclic GFR-binding peptide
  MOD_RES (1)..(34)..(35): Xaa is C or S

SEQ ID NO: 54816 - protein, 31 aa, Artificial Sequence; identical to SEQ ID NO: 30149
  Cyclic GFR-binding peptide
  MOD_RES (26)..(26): Xaa is C or S

SEQ ID NO: 54817 - protein, 38 aa, Artificial Sequence; identical to SEQ ID NO: 30152
  Cyclic GFR-binding peptide
  MOD_RES (1)..(33)..(34): Xaa is C or S

SEQ ID NO: 54818 - protein, 25 aa, Artificial Sequence
  Cyclic GFR-binding peptide
MGEYQKYIIQQKDNIYLMSIPSMKT

SEQ ID NO: 54819 - protein, 30 aa, Artificial Sequence; identical to SEQ ID NO: 33159
  Cyclic GFR-binding peptide
  MOD_RES (26)..(27): Xaa is C or S

SEQ ID NO: 54820 - protein, 33 aa, Artificial Sequence; identical to SEQ ID NO: 30164
  Cyclic GFR-binding peptide
  MOD_RES (30)..(31): Xaa is C or S

SEQ ID NO: 54821 - protein, 31 aa, Artificial Sequence; identical to SEQ ID NO: 30169
  Cyclic GFR-binding peptide
  MOD_RES (26)..(27): Xaa is C or S

SEQ ID NO: 54822 - protein, 33 aa, Artificial Sequence; identical to SEQ ID NO: 30174
  Cyclic GFR-binding peptide
  MOD_RES (1)..(33): Xaa is C or S

SEQ ID NO: 54823 - protein, 39 aa, Artificial Sequence; identical to SEQ ID NO: 30182
  Cyclic GFR-binding peptide
  MOD_RES (1)..(3)..(35)..(36): Xaa is C or S

SEQ ID NO: 54824 - protein, 32 aa, Artificial Sequence
  Cyclic GFR-binding peptide
  MOD_RES (1)..(3): Xaa is C or S
XGXSEVVMDEYQKYVVNNASDIYLISIPSLRT

SEQ ID NO: 54825 - protein, 30 aa, Artificial Sequence; identical to SEQ ID NO: 15338
  Cyclic GFR-binding peptide
  MOD_RES (2)..(4): Xaa is C or S

SEQ ID NO: 54826 - protein, 39 aa, Artificial Sequence; identical to SEQ ID NO: 33172
  Cyclic GFR-binding peptide
  MOD_RES (1)..(33)..(34): Xaa is C or S

SEQ ID NO: 54827 - protein, 28 aa, Artificial Sequence
  Cyclic GFR-binding peptide
  MOD_RES (27)..(28): Xaa is C or S
DEYQKYVVKENEDIYLMSIPSLETPVXX

SEQ ID NO: 54828 - protein, 38 aa, Artificial Sequence
  Cyclic GFR-binding peptide
  MOD_RES (1)..(32)..(33): Xaa is C or S
XEEVIMEYQKYLLVRGNDIYLMSIPSTKVPAXXTSPVR

SEQ ID NO: 54829 - protein, 38 aa, Artificial Sequence; identical to SEQ ID NO: 30192
  Cyclic GFR-binding peptide
  MOD_RES (1)..(3)..(35)..(36): Xaa is C or S

SEQ ID NO: 54830 - protein, 30 aa, Artificial Sequence; identical to SEQ ID NO: 30193
  Cyclic GFR-binding peptide
  MOD_RES (1)..(1): Xaa is C or S

SEQ ID NO: 54831 - protein, 29 aa, Artificial Sequence
  Cyclic GFR-binding peptide
EEVIMEYQKYLLVRGNDIYLMSIPSTKVP

SEQ ID NO: 54832 - protein, 36 aa, Artificial Sequence; identical to SEQ ID NO: 33183
  Cyclic GFR-binding peptide
  MOD_RES (1)..(33)..(34): Xaa is C or S

SEQ ID NO: 54833 - protein, 37 aa, Artificial Sequence
  Cyclic GFR-binding peptide
  MOD_RES (31)..(32): Xaa is C or S
EVVMDEYQKYVVNNASDIYLISIPSLRTPVXXTPPTS

SEQ ID NO: 54834 - protein, 28 aa, Artificial Sequence
  Cyclic GFR-binding peptide
  MOD_RES (26)..(27): Xaa is C or S
EYQKYLLVRGNDIYLMSIPSTKVPAXXT

SEQ ID NO: 54835 - protein, 30 aa, Artificial Sequence; identical to SEQ ID NO: 33189
  Cyclic GFR-binding peptide
  MOD_RES (26)..(27): Xaa is C or S

SEQ ID NO: 54836 - protein, 31 aa, Artificial Sequence; identical to SEQ ID NO: 12592
  Cyclic GFR-binding peptide
  MOD_RES (2)..(4): Xaa is C or S

SEQ ID NO: 54837 - protein, 33 aa, Artificial Sequence; identical to SEQ ID NO: 33190
  Cyclic GFR-binding peptide
  MOD_RES (30)..(31): Xaa is C or S

SEQ ID NO: 54838 - protein, 41 aa, Artificial Sequence; identical to SEQ ID NO: 33193
  Cyclic GFR-binding peptide
  MOD_RES (1)..(3)..(35): Xaa is C or S

SEQ ID NO: 54839 - protein, 31 aa, Artificial Sequence; identical to SEQ ID NO: 33194
  Cyclic GFR-binding peptide
  MOD_RES (30)..(31): Xaa is C or S

SEQ ID NO: 54840 - protein, 30 aa, Artificial Sequence; identical to SEQ ID NO: 30204
  Cyclic GFR-binding peptide
  MOD_RES (1)..(1): Xaa is C or S

SEQ ID NO: 54841 - protein, 37 aa, Artificial Sequence; identical to SEQ ID NO: 30205
  Cyclic GFR-binding peptide
  MOD_RES (31)..(32): Xaa is C or S

SEQ ID NO: 54842 - protein, 39 aa, Artificial Sequence; identical to SEQ ID NO: 30206
  Cyclic GFR-binding peptide
  MOD_RES (33)..(34): Xaa is C or S

SEQ ID NO: 54843 - protein, 25 aa, Artificial Sequence
  Cyclic GFR-binding peptide
EVIMEYQKYLLVRGNDIYLMSIPST

SEQ ID NO: 54844 - protein, 41 aa, Artificial Sequence; identical to SEQ ID NO: 15365
  Cyclic GFR-binding peptide
  MOD_RES (2)..(4)..(35)..(36): Xaa is C or S

SEQ ID NO: 54845 - protein, 32 aa, Artificial Sequence; identical to SEQ ID NO: 30209
  Cyclic GFR-binding peptide
  MOD_RES (32)..(32): Xaa is C or S

SEQ ID NO: 54846 - protein, 31 aa, Artificial Sequence; identical to SEQ ID NO: 12601
  Cyclic GFR-binding peptide
  MOD_RES (2)..(4): Xaa is C or S

SEQ ID NO: 54847 - protein, 26 aa, Artificial Sequence
  Cyclic GFR-binding peptide
  MOD_RES (26)..(26): Xaa is C or S
EYQKYIVNNSSDIYLVSIPSLKTPAX

SEQ ID NO: 54848 - protein, 32 aa, Artificial Sequence; identical to SEQ ID NO: 30222
  Cyclic GFR-binding peptide
  MOD_RES (27)..(28): Xaa is C or S

SEQ ID NO: 54849 - protein, 30 aa, Artificial Sequence; identical to SEQ ID NO: 15379
  Cyclic GFR-binding peptide
  MOD_RES (2)..(4): Xaa is C or S

SEQ ID NO: 54850 - protein, 35 aa, Artificial Sequence; identical to SEQ ID NO: 30224
  Cyclic GFR-binding peptide
  MOD_RES (1)..(33)..(34): Xaa is C or S

SEQ ID NO: 54851 - protein, 27 aa, Artificial Sequence
  Cyclic GFR-binding peptide
  MOD_RES (1)..(1): Xaa is C or S
XAKVVMNEYQKYIVNNSSDIYLVSIPS

SEQ ID NO: 54852 - protein, 26 aa, Artificial Sequence
  Cyclic GFR-binding peptide
VVMEEYQKYVVKDYEDIYLMSIPSLE

SEQ ID NO: 54853 - protein, 32 aa, Artificial Sequence; identical to SEQ ID NO: 12622
  Cyclic GFR-binding peptide
  MOD_RES (2)..(4): Xaa is C or S

SEQ ID NO: 54854 - protein, 30 aa, Artificial Sequence; identical to SEQ ID NO: 12623
  Cyclic GFR-binding peptide
  MOD_RES (2)..(4): Xaa is C or S

SEQ ID NO: 54855 - protein, 34 aa, Artificial Sequence; identical to SEQ ID NO: 12627
  Cyclic GFR-binding peptide
  MOD_RES (2)..(4): Xaa is C or S

SEQ ID NO: 54856 - protein, 41 aa, Artificial Sequence; identical to SEQ ID NO: 12629
  Cyclic GFR-binding peptide
  MOD_RES (2)..(4)..(35)..(36): Xaa is C or S

SEQ ID NO: 54857 - protein, 25 aa, Artificial Sequence
  Cyclic GFR-binding peptide
GEYQKYIIQQKDNIYLMSIPSMKTP

SEQ ID NO: 54858 - protein, 31 aa, Artificial Sequence; identical to SEQ ID NO: 12633
  Cyclic GFR-binding peptide
  MOD_RES (2)..(4): Xaa is C or S

SEQ ID NO: 54859 - protein, 33 aa, Artificial Sequence; identical to SEQ ID NO: 30238
  Cyclic GFR-binding peptide
  MOD_RES (31)..(32): Xaa is C or S

SEQ ID NO: 54860 - protein, 22 aa, Artificial Sequence
  Cyclic GFR-binding peptide
EYQKYLLVRGNDIYLMSIPSTK

SEQ ID NO: 54861 - protein, 23 aa, Artificial Sequence
  Cyclic GFR-binding peptide
GEYQKYYTVVGKDIYLISIPSLK

SEQ ID NO: 54862 - protein, 23 aa, Artificial Sequence
  Cyclic GFR-binding peptide
EYQKYIVNSSDDIYLVSIPSLKT

SEQ ID NO: 54863 - protein, 42 aa, Artificial Sequence; identical to SEQ ID NO: 30243
  Cyclic GFR-binding peptide
  MOD_RES (1)..(3)..(36)..(37): Xaa is C or S

SEQ ID NO: 54864 - protein, 28 aa, Artificial Sequence
  Cyclic GFR-binding peptide
  MOD_RES (28)..(28): Xaa is C or S
MGEYQKYYTVVGKDIYLISIPSLKTPVX

SEQ ID NO: 54865 - protein, 38 aa, Artificial Sequence; identical to SEQ ID NO: 30247
  Cyclic GFR-binding peptide
  MOD_RES (1)..(33)..(34): Xaa is C or S

SEQ ID NO: 54866 - protein, 32 aa, Artificial Sequence
  Cyclic GFR-binding peptide
  MOD_RES (2)..(2): Xaa is C or S
GXSEVVMDEYQKYVVNNASDIYLISIPSLRTP

SEQ ID NO: 54867 - protein, 36 aa, Artificial Sequence
  Cyclic GFR-binding peptide
  MOD_RES (2)..(33)..(34): Xaa is C or S
GXEEVIMEYQKYLLVRGNDIYLMSIPSTKVPAXXTS

SEQ ID NO: 54868 - protein, 37 aa, Artificial Sequence; identical to SEQ ID NO: 30250
  Cyclic GFR-binding peptide
  MOD_RES (31)..(32): Xaa is C or S

SEQ ID NO: 54869 - protein, 35 aa, Artificial Sequence; identical to SEQ ID NO: 33249
  Cyclic GFR-binding peptide
  MOD_RES (31)..(32): Xaa is C or S

SEQ ID NO: 54870 - protein, 32 aa, Artificial Sequence
  Cyclic GFR-binding peptide
  MOD_RES (2)..(4): Xaa is C or S
SXGXRDVVMGEYQKYIIQQKDNIYLMSIPSMK

SEQ ID NO: 54871 - protein, 29 aa, Artificial Sequence
  Cyclic GFR-binding peptide
  MOD_RES (2)..(2): Xaa is C or S
GXSEVVMDEYQKYVVNNASDIYLISIPSL

SEQ ID NO: 54872 - protein, 35 aa, Artificial Sequence; identical to SEQ ID NO: 30263
  Cyclic GFR-binding peptide
  MOD_RES (31)..(32): Xaa is C or S

SEQ ID NO: 54873 - protein, 42 aa, Artificial Sequence; identical to SEQ ID NO: 30267
  Cyclic GFR-binding peptide
  MOD_RES (2)..(4)..(36)..(37): Xaa is C or S

SEQ ID NO: 54874 - protein, 37 aa, Artificial Sequence
  Cyclic GFR-binding peptide
  MOD_RES (32)..(33): Xaa is C or S
RDVVMGEYQKYIIQQKDNIYLMSIPSMKTPTXXPGAS

SEQ ID NO: 54875 - protein, 21 aa, Artificial Sequence
  Cyclic GFR-binding peptide
EEYQKYVVKDYEDIYLMSIPS

SEQ ID NO: 54876 - protein, 26 aa, Artificial Sequence
  Cyclic GFR-binding peptide
GEYQKYYTVVGKDIYLISIPSLKTPV

SEQ ID NO: 54877 - protein, 24 aa, Artificial Sequence
  Cyclic GFR-binding peptide
GEYQKYIIQQKDNIYLMSIPSMKT

SEQ ID NO: 54878 - protein, 34 aa, Artificial Sequence; identical to SEQ ID NO: 33283
  Cyclic GFR-binding peptide
  MOD_RES (30)..(31): Xaa is C or S

SEQ ID NO: 54879 - protein, 38 aa, Artificial Sequence
  Cyclic GFR-binding peptide
  MOD_RES (2)..(33)..(34): Xaa is C or S
GXEEVIMEYQKYLLVRGNDIYLMSIPSTKVPAXXTSPV

SEQ ID NO: 54880 - protein, 34 aa, Artificial Sequence
  Cyclic GFR-binding peptide
  MOD_RES (28)..(29): Xaa is C or S
MDEYQKYVVNNASDIYLISIPSLRTPVXXTPPTS

SEQ ID NO: 54881 - protein, 32 aa, Artificial Sequence; identical to SEQ ID NO: 30291
  Cyclic GFR-binding peptide
  MOD_RES (26)..(27): Xaa is C or S

SEQ ID NO: 54882 - protein, 39 aa, Artificial Sequence; identical to SEQ ID NO: 33294
  Cyclic GFR-binding peptide
  MOD_RES (1)..(33)..(34): Xaa is C or S

SEQ ID NO: 54883 - protein, 33 aa, Artificial Sequence; identical to SEQ ID NO: 12681
  Cyclic GFR-binding peptide
  MOD_RES (2)..(4): Xaa is C or S

SEQ ID NO: 54884 - protein, 27 aa, Artificial Sequence
  Cyclic GFR-binding peptide
RVVMNEYQKYIVNSSDDIYLVSIPSLQ

SEQ ID NO: 54885 - protein, 26 aa, Artificial Sequence
  Cyclic GFR-binding peptide
EVIMEYQKYLLVRGNDIYLMSIPSTK

SEQ ID NO: 54886 - protein, 20 aa, Artificial Sequence
  Cyclic GFR-binding peptide
EYQKYTPVGMDDIYLVSIPS

SEQ ID NO: 54887 - protein, 34 aa, Artificial Sequence; identical to SEQ ID NO: 30300
  Cyclic GFR-binding peptide
  MOD_RES (1)..(3): Xaa is C or S

SEQ ID NO: 54888 - protein, 31 aa, Artificial Sequence; identical to SEQ ID NO: 30301
  Cyclic GFR-binding peptide
  MOD_RES (1)..(1): Xaa is C or S

SEQ ID NO: 54889 - protein, 20 aa, Artificial Sequence
  Cyclic GFR-binding peptide
EYQKYIVNSSDDIYLVSIPS

SEQ ID NO: 54890 - protein, 29 aa, Artificial Sequence
  Cyclic GFR-binding peptide
VVMDEYQKYVVNNASDIYLISIPSLRTPV

SEQ ID NO: 54891 - protein, 36 aa, Artificial Sequence; identical to SEQ ID NO: 33307
  Cyclic GFR-binding peptide
  MOD_RES (31)..(32): Xaa is C or S

SEQ ID NO: 54892 - protein, 42 aa, Artificial Sequence; identical to SEQ ID NO: 12697
  Cyclic GFR-binding peptide
  MOD_RES (2)..(4)..(36)..(37): Xaa is C or S

SEQ ID NO: 54893 - protein, 36 aa, Artificial Sequence; identical to SEQ ID NO: 33313
  Cyclic GFR-binding peptide
  MOD_RES (1)..(3)..(35)..(36): Xaa is C or S

SEQ ID NO: 54894 - protein, 27 aa, Artificial Sequence
  Cyclic GFR-binding peptide
VMNEYQKYIVNSSDDIYLVSIPSLKTP

SEQ ID NO: 54895 - protein, 29 aa, Artificial Sequence
  Cyclic GFR-binding peptide
  MOD_RES (28)..(29): Xaa is C or S
MGEYQKYIIQQKDNIYLMSIPSMKTPTXX

SEQ ID NO: 54896 - protein, 25 aa, Artificial Sequence
  Cyclic GFR-binding peptide
MNEYQKYIVNNSSDIYLVSIPSLKT

SEQ ID NO: 54897 - protein, 31 aa, Artificial Sequence; identical to SEQ ID NO: 15474
  Cyclic GFR-binding peptide
  MOD_RES (2)..(4): Xaa is C or S

SEQ ID NO: 54898 - protein, 27 aa, Artificial Sequence
  Cyclic GFR-binding peptide
VMNEYQKYIVNNSSDIYLVSIPSLKTP

SEQ ID NO: 54899 - protein, 39 aa, Artificial Sequence; identical to SEQ ID NO: 30317
  Cyclic GFR-binding peptide
  MOD_RES (2)..(4)..(36)..(37): Xaa is C or S

SEQ ID NO: 54900 - protein, 37 aa, Artificial Sequence; identical to SEQ ID NO: 30319
  Cyclic GFR-binding peptide
  MOD_RES (2)..(34)..(35): Xaa is C or S

SEQ ID NO: 54901 - protein, 26 aa, Artificial Sequence
  Cyclic GFR-binding peptide
  MOD_RES (1)..(1): Xaa is C or S
XEEVIMEYQKYLLVRGNDIYLMSIPS

SEQ ID NO: 54902 - protein, 26 aa, Artificial Sequence
  Cyclic GFR-binding peptide
VVMDEYQKYVVNNASDIYLISIPSLR

SEQ ID NO: 54903 - protein, 21 aa, Artificial Sequence
  Cyclic GFR-binding peptide
GEYQKYYTVVGKDIYLISIPS

SEQ ID NO: 54904 - protein, 35 aa, Artificial Sequence; identical to SEQ ID NO: 33334
  Cyclic GFR-binding peptide
  MOD_RES (2)..(34)..(35): Xaa is C or S

SEQ ID NO: 54905 - protein, 39 aa, Artificial Sequence; identical to SEQ ID NO: 30338
  Cyclic GFR-binding peptide
  MOD_RES (1)..(34)..(35): Xaa is C or S

SEQ ID NO: 54906 - protein, 39 aa, Artificial Sequence; identical to SEQ ID NO: 33335
  Cyclic GFR-binding peptide
  MOD_RES (2)..(34)..(35): Xaa is C or S

SEQ ID NO: 54907 - protein, 31 aa, Artificial Sequence
  Cyclic GFR-binding peptide
  MOD_RES (2)..(2): Xaa is C or S
GXSEVVMDEYQKYVVNNASDIYLISIPSLRT

SEQ ID NO: 54908 - protein, 34 aa, Artificial Sequence; identical to SEQ ID NO: 15488
  Cyclic GFR-binding peptide
  MOD_RES (2)..(4): Xaa is C or S

SEQ ID NO: 54909 - protein, 32 aa, Artificial Sequence; identical to SEQ ID NO: 33340
  Cyclic GFR-binding peptide

SEQ ID NO: 54910 - protein, 21 aa, Artificial Sequence
  Cyclic GFR-binding peptide
MEYQKYLLVRGNDIYLMSIPS

SEQ ID NO: 54911 - protein, 35 aa, Artificial Sequence
  Cyclic GFR-binding peptide
  MOD_RES (2)..(33)..(34): Xaa is C or S
GXEEVIMEYQKYLLVRGNDIYLMSIPSTKVPAXXT

SEQ ID NO: 54912 - protein, 37 aa, Artificial Sequence
  Cyclic GFR-binding peptide
  MOD_RES (1)..(3)..(34)..(35): Xaa is C or S
XGXEEVIMEYQKYLLVRGNDIYLMSIPSTKVPAXXTS

SEQ ID NO: 54913 - protein, 36 aa, Artificial Sequence; identical to SEQ ID NO: 30346
  Cyclic GFR-binding peptide
  MOD_RES (30)..(30): Xaa is C or S

SEQ ID NO: 54914 - protein, 36 aa, Artificial Sequence; identical to SEQ ID NO: 30347
  Cyclic GFR-binding peptide
  MOD_RES (31)..(32): Xaa is C or S

SEQ ID NO: 54915 - protein, 33 aa, Artificial Sequence; identical to SEQ ID NO: 33344
  Cyclic GFR-binding peptide
  MOD_RES (27)..(27): Xaa is C or S

SEQ ID NO: 54916 - protein, 31 aa, Artificial Sequence; identical to SEQ ID NO: 30354
  Cyclic GFR-binding peptide
  MOD_RES (1)..(3): Xaa is C or S

SEQ ID NO: 54917 - protein, 30 aa, Artificial Sequence; identical to SEQ ID NO: 33349
  Cyclic GFR-binding peptide

SEQ ID NO: 54918 - protein, 32 aa, Artificial Sequence; identical to SEQ ID NO: 33350
  Cyclic GFR-binding peptide
  MOD_RES (31)..(32): Xaa is C or S

SEQ ID NO: 54919 - protein, 28 aa, Artificial Sequence
  Cyclic GFR-binding peptide
  MOD_RES (28)..(28): Xaa is C or S
GEEYQKYTPVGMDDIYLVSIPSLKTPVX

SEQ ID NO: 54920 - protein, 36 aa, Artificial Sequence; identical to SEQ ID NO: 33352
  Cyclic GFR-binding peptide
  MOD_RES (2)..(34)..(35): Xaa is C or S

SEQ ID NO: 54921 - protein, 33 aa, Artificial Sequence
  Cyclic GFR-binding peptide
  MOD_RES (1)..(3): Xaa is C or S
XGXSEVVMDEYQKYVVNNASDIYLISIPSLRTP

SEQ ID NO: 54922 - protein, 23 aa, Artificial Sequence
  Cyclic GFR-binding peptide
VMGEYQKYIIQQKDNIYLMSIPS

SEQ ID NO: 54923 - protein, 36 aa, Artificial Sequence
  Cyclic GFR-binding peptide
  MOD_RES (1)..(33)..(34): Xaa is C or S
XRDVVMGEYQKYIIQQKDNIYLMSIPSMKTPTXXPG

SEQ ID NO: 54924 - protein, 39 aa, Artificial Sequence
  Cyclic GFR-binding peptide
  MOD_RES (1)..(33)..(34): Xaa is C or S
XSEVVMDEYQKYVVNNASDIYLISIPSLRTPVXXTPPTS

SEQ ID NO: 54925 - protein, 35 aa, Artificial Sequence; identical to SEQ ID NO: 33367
  Cyclic GFR-binding peptide
  MOD_RES (1)..(33): Xaa is C or S

SEQ ID NO: 54926 - protein, 34 aa, Artificial Sequence
  Cyclic GFR-binding peptide
  MOD_RES (1)..(33)..(34): Xaa is C or S
XSEVVMDEYQKYVVNNASDIYLISIPSLRTPVXX

SEQ ID NO: 54927 - protein, 29 aa, Artificial Sequence
  Cyclic GFR-binding peptide
  MOD_RES (28)..(29): Xaa is C or S
MNEYQKYIVNSSDDIYLVSIPSLQTPAXX

SEQ ID NO: 54928 - protein, 28 aa, Artificial Sequence
  Cyclic GFR-binding peptide
  MOD_RES (27)..(28): Xaa is C or S
NEYQKYIVNSSDDIYLVSIPSLQTPAXX

SEQ ID NO: 54929 - protein, 37 aa, Artificial Sequence; identical to SEQ ID NO: 30379
  Cyclic GFR-binding peptide
  MOD_RES (2)..(34)..(35): Xaa is C or S

SEQ ID NO: 54930 - protein, 34 aa, Artificial Sequence; identical to SEQ ID NO: 30380
  Cyclic GFR-binding peptide
  MOD_RES (29)..(30): Xaa is C or S

SEQ ID NO: 54931 - protein, 24 aa, Artificial Sequence
  Cyclic GFR-binding peptide
IMEYQKYLLVRGNDIYLMSIPSTK

SEQ ID NO: 54932 - protein, 26 aa, Artificial Sequence
  Cyclic GFR-binding peptide
DEYQKYVVKENEDIYLMSIPSLETPV

SEQ ID NO: 54933 - protein, 30 aa, Artificial Sequence; identical to SEQ ID NO: 30391
  Cyclic GFR-binding peptide
  MOD_RES (1)..(3): Xaa is C or S

SEQ ID NO: 54934 - protein, 42 aa, Artificial Sequence; identical to SEQ ID NO: 15526
  Cyclic GFR-binding peptide
  MOD_RES (2)..(4)..(36)..(37): Xaa is C or S

SEQ ID NO: 54935 - protein, 31 aa, Artificial Sequence
  Cyclic GFR-binding peptide
  MOD_RES (2)..(2): Xaa is C or S
GXEEVIMEYQKYLLVRGNDIYLMSIPSTKVP

SEQ ID NO: 54936 - protein, 23 aa, Artificial Sequence
  Cyclic GFR-binding peptide
GEYQKYIIQQKDNIYLMSIPSMK

SEQ ID NO: 54937 - protein, 33 aa, Artificial Sequence; identical to SEQ ID NO: 30399
  Cyclic GFR-binding peptide
  MOD_RES (2)..(4): Xaa is C or S

SEQ ID NO: 54938 - protein, 39 aa, Artificial Sequence
  Cyclic GFR-binding peptide
  MOD_RES (2)..(34)..(35): Xaa is C or S
GXRDVVMGEYQKYIIQQKDNIYLMSIPSMKTPTXXPGAS

SEQ ID NO: 54939 - protein, 25 aa, Artificial Sequence
  Cyclic GFR-binding peptide
DEYQKYVVNNASDIYLISIPSLRTP

SEQ ID NO: 54940 - protein, 27 aa, Artificial Sequence
  Cyclic GFR-binding peptide
EVIMEYQKYLLVRGNDIYLMSIPSTKV

SEQ ID NO: 54941 - protein, 37 aa, Artificial Sequence
  Cyclic GFR-binding peptide
  MOD_RES (2)..(4)..(36)..(37): Xaa is C or S
RXGXSEVVMDEYQKYVVNNASDIYLISIPSLRTPVXX

SEQ ID NO: 54942 - protein, 26 aa, Artificial Sequence
  Cyclic GFR-binding peptide
VMDEYQKYVVKENEDIYLMSIPSLET

SEQ ID NO: 54943 - protein, 24 aa, Artificial Sequence
  Cyclic GFR-binding peptide
EYQKYYTVVGKDIYLISIPSLKTP

SEQ ID NO: 54944 - protein, 33 aa, Artificial Sequence; identical to SEQ ID NO: 33394
  Cyclic GFR-binding peptide
  MOD_RES (1)..(33): Xaa is C or S

SEQ ID NO: 54945 - protein, 34 aa, Artificial Sequence; identical to SEQ ID NO: 33396
  Cyclic GFR-binding peptide
  MOD_RES (2)..(4): Xaa is C or S

SEQ ID NO: 54946 - protein, 34 aa, Artificial Sequence; identical to SEQ ID NO: 33397
  Cyclic GFR-binding peptide
  MOD_RES (31)..(32): Xaa is C or S

SEQ ID NO: 54947 - protein, 37 aa, Artificial Sequence; identical to SEQ ID NO: 30410
  Cyclic GFR-binding peptide
  MOD_RES (31)..(32): Xaa is C or S

SEQ ID NO: 54948 - protein, 28 aa, Artificial Sequence
  Cyclic GFR-binding peptide
  MOD_RES (2)..(2): Xaa is C or S
GXRDVVMGEYQKYIIQQKDNIYLMSIPS

SEQ ID NO: 54949 - protein, 30 aa, Artificial Sequence; identical to SEQ ID NO: 30420
  Cyclic GFR-binding peptide
  MOD_RES (26)..(27): Xaa is C or S

SEQ ID NO: 54950 - protein, 22 aa, Artificial Sequence
  Cyclic GFR-binding peptide
EYQKYIVNSSDDIYLVSIPSLQ

SEQ ID NO: 54951 - protein, 29 aa, Artificial Sequence
  Cyclic GFR-binding peptide
VSMGEEYQKYTPVGMDDIYLVSIPSLKTP

SEQ ID NO: 54952 - protein, 32 aa, Artificial Sequence
  Cyclic GFR-binding peptide
  MOD_RES (31)..(32): Xaa is C or S
EVVMDEYQKYVVNNASDIYLISIPSLRTPVXX

SEQ ID NO: 54953 - protein, 25 aa, Artificial Sequence
  Cyclic GFR-binding peptide
EEYQKYTPVGMDDIYLVSIPSLKTP

SEQ ID NO: 54954 - protein, 32 aa, Artificial Sequence; identical to SEQ ID NO: 30433
  Cyclic GFR-binding peptide
  MOD_RES (30)..(31): Xaa is C or S

SEQ ID NO: 54955 - protein, 31 aa, Artificial Sequence; identical to SEQ ID NO: 15577
  Cyclic GFR-binding peptide
  MOD_RES (2)..(4): Xaa is C or S

SEQ ID NO: 54956 - protein, 31 aa, Artificial Sequence
  Cyclic GFR-binding peptide
  MOD_RES (30)..(31): Xaa is C or S
VVMGEYQKYIIQQKDNIYLMSIPSMKTPTXX

SEQ ID NO: 54957 - protein, 27 aa, Artificial Sequence
  Cyclic GFR-binding peptide
MGEYQKYYTVVGKDIYLISIPSLKTPV

SEQ ID NO: 54958 - protein, 35 aa, Artificial Sequence
  Cyclic GFR-binding peptide
  MOD_RES (2)..(34)..(35): Xaa is C or S
GXSEVVMDEYQKYVVNNASDIYLISIPSLRTPVXX

SEQ ID NO: 54959 - protein, 29 aa, Artificial Sequence
  Cyclic GFR-binding peptide
  MOD_RES (1)..(3): Xaa is C or S
XGXGEVVMEEYQKYVVKDYEDIYLMSIPS

SEQ ID NO: 54960 - protein, 30 aa, Artificial Sequence
  Cyclic GFR-binding peptide
  MOD_RES (26)..(27): Xaa is C or S
EYQKYLLVRGNDIYLMSIPSTKVPAXXTSP

SEQ ID NO: 54961 - protein, 37 aa, Artificial Sequence; identical to SEQ ID NO: 30444
  Cyclic GFR-binding peptide
  MOD_RES (32)..(33): Xaa is C or S

SEQ ID NO: 54962 - protein, 34 aa, Artificial Sequence; identical to SEQ ID NO: 12832
  Cyclic GFR-binding peptide
  MOD_RES (2)..(4): Xaa is C or S

SEQ ID NO: 54963 - protein, 26 aa, Artificial Sequence
  Cyclic GFR-binding peptide
MGEYQKYYTVVGKDIYLISIPSLKTP

SEQ ID NO: 54964 - protein, 39 aa, Artificial Sequence; identical to SEQ ID NO: 33443
  Cyclic GFR-binding peptide
  MOD_RES (2)..(4)..(36)..(37): Xaa is C or S

SEQ ID NO: 54965 - protein, 38 aa, Artificial Sequence; identical to SEQ ID NO: 33444
  Cyclic GFR-binding peptide
  MOD_RES (1)..(3)..(35): Xaa is C or S

SEQ ID NO: 54966 - protein, 31 aa, Artificial Sequence; identical to SEQ ID NO: 33445
  Cyclic GFR-binding peptide

SEQ ID NO: 54967 - protein, 29 aa, Artificial Sequence
  Cyclic GFR-binding peptide
EVVMEEYQKYVVKDYEDIYLMSIPSLETP

SEQ ID NO: 54968 - protein, 33 aa, Artificial Sequence; identical to SEQ ID NO: 12843
  Cyclic GFR-binding peptide
  MOD_RES (2)..(4): Xaa is C or S

SEQ ID NO: 54969 - protein, 36 aa, Artificial Sequence
  Cyclic GFR-binding peptide
  MOD_RES (31)..(32): Xaa is C or S
EVVMDEYQKYVVNNASDIYLISIPSLRTPVXXTPPT

SEQ ID NO: 54970 - protein, 30 aa, Artificial Sequence; identical to SEQ ID NO: 30453
  Cyclic GFR-binding peptide

SEQ ID NO: 54971 - protein, 33 aa, Artificial Sequence
  Cyclic GFR-binding peptide
  MOD_RES (29)..(30): Xaa is C or S
VMDEYQKYVVNNASDIYLISIPSLRTPVXXTPP

SEQ ID NO: 54972 - protein, 32 aa, Artificial Sequence; identical to SEQ ID NO: 15602
  Cyclic GFR-binding peptide
  MOD_RES (2)..(4): Xaa is C or S

SEQ ID NO: 54973 - protein, 29 aa, Artificial Sequence
  Cyclic GFR-binding peptide
DVVMGEYQKYIIQQKDNIYLMSIPSMKTP

SEQ ID NO: 54974 - protein, 30 aa, Artificial Sequence; identical to SEQ ID NO: 12856
  Cyclic GFR-binding peptide
  MOD_RES (2)..(4): Xaa is C or S

SEQ ID NO: 54975 - protein, 38 aa, Artificial Sequence; identical to SEQ ID NO: 33458
  Cyclic GFR-binding peptide
  MOD_RES (32)..(33): Xaa is C or S

SEQ ID NO: 54976 - protein, 33 aa, Artificial Sequence; identical to SEQ ID NO: 33459
  Cyclic GFR-binding peptide
  MOD_RES (2)..(2): Xaa is C or S

SEQ ID NO: 54977 - protein, 37 aa, Artificial Sequence; identical to SEQ ID NO: 30464
  Cyclic GFR-binding peptide
  MOD_RES (1)..(33)..(34): Xaa is C or S

SEQ ID NO: 54978 - protein, 28 aa, Artificial Sequence
  Cyclic GFR-binding peptide
  MOD_RES (27)..(28): Xaa is C or S
GEYQKYIIQQKDNIYLMSIPSMKTPTXX

SEQ ID NO: 54979 - protein, 21 aa, Artificial Sequence
  Cyclic GFR-binding peptide
EYQKYIVNNSSDIYLVSIPSL

SEQ ID NO: 54980 - protein, 25 aa, Artificial Sequence
  Cyclic GFR-binding peptide
GEEYQKYTPVGMDDIYLVSIPSLKT

SEQ ID NO: 54981 - protein, 27 aa, Artificial Sequence
  Cyclic GFR-binding peptide
VVMDEYQKYVVNNASDIYLISIPSLRT

SEQ ID NO: 54982 - protein, 27 aa, Artificial Sequence
  Cyclic GFR-binding peptide
VMDEYQKYVVNNASDIYLISIPSLRTP

SEQ ID NO: 54983 - protein, 31 aa, Artificial Sequence; identical to SEQ ID NO: 30471
  Cyclic GFR-binding peptide
  MOD_RES (29)..(30): Xaa is C or S

SEQ ID NO: 54984 - protein, 33 aa, Artificial Sequence; identical to SEQ ID NO: 12871
  Cyclic GFR-binding peptide
  MOD_RES (2)..(4): Xaa is C or S

SEQ ID NO: 54985 - protein, 37 aa, Artificial Sequence; identical to SEQ ID NO: 33475
  Cyclic GFR-binding peptide
  MOD_RES (1)..(33)..(34): Xaa is C or S

SEQ ID NO: 54986 - protein, 32 aa, Artificial Sequence
  Cyclic GFR-binding peptide
  MOD_RES (30)..(31): Xaa is C or S
VVMGEYQKYIIQQKDNIYLMSIPSMKTPTXXP

SEQ ID NO: 54987 - protein, 35 aa, Artificial Sequence
  Cyclic GFR-binding peptide
  MOD_RES (1)..(3)..(35): Xaa is C or S
XGXRDVVMGEYQKYIIQQKDNIYLMSIPSMKTPTX

SEQ ID NO: 54988 - protein, 33 aa, Artificial Sequence; identical to SEQ ID NO: 30477
  Cyclic GFR-binding peptide
  MOD_RES (31)..(32): Xaa is C or S

SEQ ID NO: 54989 - protein, 38 aa, Artificial Sequence; identical to SEQ ID NO: 30482
  Cyclic GFR-binding peptide
  MOD_RES (1)..(3)..(36)..(37): Xaa is C or S

SEQ ID NO: 54990 - protein, 31 aa, Artificial Sequence; identical to SEQ ID NO: 30486
  Cyclic GFR-binding peptide

SEQ ID NO: 54991 - protein, 38 aa, Artificial Sequence; identical to SEQ ID NO: 33482
  Cyclic GFR-binding peptide
  MOD_RES (2)..(34)..(35): Xaa is C or S

SEQ ID NO: 54992 - protein, 28 aa, Artificial Sequence
  Cyclic GFR-binding peptide
  MOD_RES (27)..(28): Xaa is C or S
EEYQKYVVKDYEDIYLMSIPSLETPVXX

SEQ ID NO: 54993 - protein, 30 aa, Artificial Sequence
  Cyclic GFR-binding peptide
  MOD_RES (1)..(3): Xaa is C or S
XGXRDVVMGEYQKYIIQQKDNIYLMSIPSM

SEQ ID NO: 54994 - protein, 32 aa, Artificial Sequence; identical to SEQ ID NO: 30495
  Cyclic GFR-binding peptide
  MOD_RES (2)..(2): Xaa is C or S

SEQ ID NO: 54995 - protein, 27 aa, Artificial Sequence
  Cyclic GFR-binding peptide
IMEYQKYLLVRGNDIYLMSIPSTKVPA

SEQ ID NO: 54996 - protein, 35 aa, Artificial Sequence; identical to SEQ ID NO: 30499
  Cyclic GFR-binding peptide
  MOD_RES (31)..(32): Xaa is C or S

SEQ ID NO: 54997 - protein, 33 aa, Artificial Sequence; identical to SEQ ID NO: 33498
  Cyclic GFR-binding peptide
  MOD_RES (1)..(33): Xaa is C or S

SEQ ID NO: 54998 - protein, 29 aa, Artificial Sequence
  Cyclic GFR-binding peptide
  MOD_RES (1)..(3): Xaa is C or S
XGXGEVVMDEYQKYVVKENEDIYLMSIPS

SEQ ID NO: 54999 - protein, 41 aa, Artificial Sequence; identical to SEQ ID NO: 30503
  Cyclic GFR-binding peptide
  MOD_RES (2)..(4)..(36)..(37): Xaa is C or S

SEQ ID NO: 55000 - protein, 28 aa, Artificial Sequence
  Cyclic GFR-binding peptide
EAVSMGEEYQKYTPVGMDDIYLVSIPSL

SEQ ID NO: 55001 - protein, 33 aa, Artificial Sequence; identical to SEQ ID NO: 12900
  Cyclic GFR-binding peptide
  MOD_RES (2)..(4): Xaa is C or S

SEQ ID NO: 55002 - protein, 26 aa, Artificial Sequence
  Cyclic GFR-binding peptide
  MOD_RES (26)..(26): Xaa is C or S
EYQKYTPVGMDDIYLVSIPSLKTPVX

SEQ ID NO: 55003 - protein, 33 aa, Artificial Sequence
  Cyclic GFR-binding peptide
  MOD_RES (2)..(4): Xaa is C or S
SXGXRDVVMGEYQKYIIQQKDNIYLMSIPSMKT

SEQ ID NO: 55004 - protein, 38 aa, Artificial Sequence; identical to SEQ ID NO: 30524
  Cyclic GFR-binding peptide
  MOD_RES (2)..(34)..(35): Xaa is C or S

SEQ ID NO: 55005 - protein, 24 aa, Artificial Sequence
  Cyclic GFR-binding peptide
GEYQKYYTVVGKDIYLISIPSLKT

SEQ ID NO: 55006 - protein, 32 aa, Artificial Sequence; identical to SEQ ID NO: 33511
  Cyclic GFR-binding peptide
  MOD_RES (30)..(31): Xaa is C or S

SEQ ID NO: 55007 - protein, 25 aa, Artificial Sequence
  Cyclic GFR-binding peptide
VVMGEYQKYIIQQKDNIYLMSIPSM

SEQ ID NO: 55008 - protein, 27 aa, Artificial Sequence
  Cyclic GFR-binding peptide
VMGEYQKYIIQQKDNIYLMSIPSMKTP

SEQ ID NO: 55009 - protein, 33 aa, Artificial Sequence; identical to SEQ ID NO: 30529
  Cyclic GFR-binding peptide
  MOD_RES (30)..(31): Xaa is C or S

SEQ ID NO: 55010 - protein, 39 aa, Artificial Sequence; identical to SEQ ID NO: 33517
  Cyclic GFR-binding peptide
  MOD_RES (2)..(34)..(35): Xaa is C or S

SEQ ID NO: 55011 - protein, 40 aa, Artificial Sequence; identical to SEQ ID NO: 30535
  Cyclic GFR-binding peptide
  MOD_RES (1)..(3)..(35)..(36): Xaa is C or S

SEQ ID NO: 55012 - protein, 28 aa, Artificial Sequence
  Cyclic GFR-binding peptide
  MOD_RES (28)..(28): Xaa is C or S
MNEYQKYIVNSSDDIYLVSIPSLKTPAX

SEQ ID NO: 55013 - protein, 28 aa, Artificial Sequence
  Cyclic GFR-binding peptide
SMGEEYQKYTPVGMDDIYLVSIPSLKTP

SEQ ID NO: 55014 - protein, 32 aa, Artificial Sequence
  Cyclic GFR-binding peptide
  MOD_RES (1)..(1): Xaa is C or S
XRDVVMGEYQKYIIQQKDNIYLMSIPSMKTPT

SEQ ID NO: 55015 - protein, 29 aa, Artificial Sequence
  Cyclic GFR-binding peptide
  MOD_RES (26)..(27): Xaa is C or S
EYQKYYTVVGKDIYLISIPSLKTPVXXAK

SEQ ID NO: 55016 - protein, 35 aa, Artificial Sequence; identical to SEQ ID NO: 30541
  Cyclic GFR-binding peptide
  MOD_RES (30)..(31): Xaa is C or S

SEQ ID NO: 55017 - protein, 20 aa, Artificial Sequence
  Cyclic GFR-binding peptide
EYQKYYTVVGKDIYLISIPS

SEQ ID NO: 55018 - protein, 32 aa, Artificial Sequence
  Cyclic GFR-binding peptide
  MOD_RES (27)..(28): Xaa is C or S
MEYQKYLLVRGNDIYLMSIPSTKVPAXXTSPV

SEQ ID NO: 55019 - protein, 33 aa, Artificial Sequence; identical to SEQ ID NO: 30547
  Cyclic GFR-binding peptide
  MOD_RES (28)..(29): Xaa is C or S

SEQ ID NO: 55020 - protein, 35 aa, Artificial Sequence; identical to SEQ ID NO: 30548
  Cyclic GFR-binding peptide
  MOD_RES (29)..(30): Xaa is C or S

SEQ ID NO: 55021 - protein, 28 aa, Artificial Sequence
  Cyclic GFR-binding peptide
  MOD_RES (27)..(28): Xaa is C or S
EEYQKYTPVGMDDIYLVSIPSLKTPVXX

SEQ ID NO: 55022 - protein, 30 aa, Artificial Sequence; identical to SEQ ID NO: 33530
  Cyclic GFR-binding peptide

SEQ ID NO: 55023 - protein, 37 aa, Artificial Sequence
  Cyclic GFR-binding peptide
  MOD_RES (1)..(32)..(33): Xaa is C or S
XEEVIMEYQKYLLVRGNDIYLMSIPSTKVPAXXTSPV

SEQ ID NO: 55024 - protein, 28 aa, Artificial Sequence
  Cyclic GFR-binding peptide
  MOD_RES (2)..(2): Xaa is C or S
GXESVAMGEYQKYYTVVGKDIYLISIPS

SEQ ID NO: 55025 - protein, 29 aa, Artificial Sequence
  Cyclic GFR-binding peptide
  MOD_RES (1)..(1): Xaa is C or S
XGEVVMEEYQKYVVKDYEDIYLMSIPSLE

SEQ ID NO: 55026 - protein, 33 aa, Artificial Sequence
  Cyclic GFR-binding peptide
  MOD_RES (27)..(28): Xaa is C or S
DEYQKYVVNNASDIYLISIPSLRTPVXXTPPTS

SEQ ID NO: 55027 - protein, 34 aa, Artificial Sequence; identical to SEQ ID NO: 30553
  Cyclic GFR-binding peptide
  MOD_RES (32)..(33): Xaa is C or S

SEQ ID NO: 55028 - protein, 29 aa, Artificial Sequence
  Cyclic GFR-binding peptide
  MOD_RES (1)..(1): Xaa is C or S
XARVVMNEYQKYIVNSSDDIYLVSIPSLQ

SEQ ID NO: 55029 - protein, 30 aa, Artificial Sequence
  Cyclic GFR-binding peptide
  MOD_RES (30)..(30): Xaa is C or S
VVMDEYQKYVVNNASDIYLISIPSLRTPVX

SEQ ID NO: 55030 - protein, 36 aa, Artificial Sequence; identical to SEQ ID NO: 30562
  Cyclic GFR-binding peptide
  MOD_RES (2)..(34): Xaa is C or S

SEQ ID NO: 55031 - protein, 31 aa, Artificial Sequence
  Cyclic GFR-binding peptide
  MOD_RES (27)..(28): Xaa is C or S
DEYQKYVVNNASDIYLISIPSLRTPVXXTPP

SEQ ID NO: 55032 - protein, 30 aa, Artificial Sequence; identical to SEQ ID NO: 30564
  Cyclic GFR-binding peptide
  MOD_RES (28)..(29): Xaa is C or S

SEQ ID NO: 55033 - protein, 27 aa, Artificial Sequence
  Cyclic GFR-binding peptide
  MOD_RES (27)..(27): Xaa is C or S
NEYQKYIVNSSDDIYLVSIPSLKTPAX

SEQ ID NO: 55034 - protein, 38 aa, Artificial Sequence
  Cyclic GFR-binding peptide
  MOD_RES (2)..(4)..(36)..(37): Xaa is C or S
RXGXSEVVMDEYQKYVVNNASDIYLISIPSLRTPVXXT

SEQ ID NO: 55035 - protein, 25 aa, Artificial Sequence
  Cyclic GFR-binding peptide
EYQKYVVKENEDIYLMSIPSLETPV

SEQ ID NO: 55036 - protein, 35 aa, Artificial Sequence; identical to SEQ ID NO: 30572
  Cyclic GFR-binding peptide
  MOD_RES (2)..(4): Xaa is C or S

SEQ ID NO: 55037 - protein, 34 aa, Artificial Sequence; identical to SEQ ID NO: 30574
  Cyclic GFR-binding peptide
  MOD_RES (29)..(29): Xaa is C or S

SEQ ID NO: 55038 - protein, 39 aa, Artificial Sequence; identical to SEQ ID NO: 33543
  Cyclic GFR-binding peptide
  MOD_RES (1)..(3)..(35): Xaa is C or S

SEQ ID NO: 55039 - protein, 34 aa, Artificial Sequence
  Cyclic GFR-binding peptide
  MOD_RES (2)..(4): Xaa is C or S
RXGXSEVVMDEYQKYVVNNASDIYLISIPSLRTP

SEQ ID NO: 55040 - protein, 31 aa, Artificial Sequence
  Cyclic GFR-binding peptide
  MOD_RES (29)..(30): Xaa is C or S
VIMEYQKYLLVRGNDIYLMSIPSTKVPAXXT

SEQ ID NO: 55041 - protein, 28 aa, Artificial Sequence
  Cyclic GFR-binding peptide
  MOD_RES (1)..(1): Xaa is C or S
XGEVVMDEYQKYVVKENEDIYLMSIPSL

SEQ ID NO: 55042 - protein, 34 aa, Artificial Sequence; identical to SEQ ID NO: 33547
  Cyclic GFR-binding peptide
  MOD_RES (30)..(31): Xaa is C or S

SEQ ID NO: 55043 - protein, 35 aa, Artificial Sequence; identical to SEQ ID NO: 30578
  Cyclic GFR-binding peptide
  MOD_RES (29)..(30): Xaa is C or S

SEQ ID NO: 55044 - protein, 32 aa, Artificial Sequence
  Cyclic GFR-binding peptide
  MOD_RES (31)..(32): Xaa is C or S
EEVIMEYQKYLLVRGNDIYLMSIPSTKVPAXX

SEQ ID NO: 55045 - protein, 24 aa, Artificial Sequence
  Cyclic GFR-binding peptide
EYQKYIIQQKDNIYLMSIPSMKTP

SEQ ID NO: 55046 - protein, 36 aa, Artificial Sequence; identical to SEQ ID NO: 30584
  Cyclic GFR-binding peptide
  MOD_RES (1)..(33)..(34): Xaa is C or S

SEQ ID NO: 55047 - protein, 32 aa, Artificial Sequence
  Cyclic GFR-binding peptide
  MOD_RES (32)..(32): Xaa is C or S
SEVVMDEYQKYVVNNASDIYLISIPSLRTPVX

SEQ ID NO: 55048 - protein, 36 aa, Artificial Sequence; identical to SEQ ID NO: 33551
  Cyclic GFR-binding peptide
  MOD_RES (1)..(3)..(35)..(36): Xaa is C or S

SEQ ID NO: 55049 - protein, 35 aa, Artificial Sequence
  Cyclic GFR-binding peptide
  MOD_RES (2)..(34)..(35): Xaa is C or S
GXRDVVMGEYQKYIIQQKDNIYLMSIPSMKTPTXX

SEQ ID NO: 55050 - protein, 35 aa, Artificial Sequence
  Cyclic GFR-binding peptide
  MOD_RES (31)..(32): Xaa is C or S
DVVMGEYQKYIIQQKDNIYLMSIPSMKTPTXXPGA

SEQ ID NO: 55051 - protein, 27 aa, Artificial Sequence
  Cyclic GFR-binding peptide
VIMEYQKYLLVRGNDIYLMSIPSTKVP

SEQ ID NO: 55052 - protein, 31 aa, Artificial Sequence; identical to SEQ ID NO: 12964
  Cyclic GFR-binding peptide
  MOD_RES (2)..(4): Xaa is C or S

SEQ ID NO: 55053 - protein, 42 aa, Artificial Sequence; identical to SEQ ID NO: 12966
  Cyclic GFR-binding peptide
  MOD_RES (2)..(4)..(36)..(37): Xaa is C or S

SEQ ID NO: 55054 - protein, 32 aa, Artificial Sequence
  Cyclic GFR-binding peptide
  MOD_RES (26)..(27): Xaa is C or S
EYQKYLLVRGNDIYLMSIPSTKVPAXXTSPVR

SEQ ID NO: 55055 - protein, 33 aa, Artificial Sequence; identical to SEQ ID NO: 30593
  Cyclic GFR-binding peptide
  MOD_RES (30)..(31): Xaa is C or S

SEQ ID NO: 55056 - protein, 21 aa, Artificial Sequence
  Cyclic GFR-binding peptide
EYQKYLLVRGNDIYLMSIPST

SEQ ID NO: 55057 - protein, 34 aa, Artificial Sequence; identical to SEQ ID NO: 30596
  Cyclic GFR-binding peptide
  MOD_RES (2)..(4): Xaa is C or S

SEQ ID NO: 55058 - protein, 35 aa, Artificial Sequence; identical to SEQ ID NO: 33558
  Cyclic GFR-binding peptide
  MOD_RES (1)..(3)..(35): Xaa is C or S

SEQ ID NO: 55059 - protein, 23 aa, Artificial Sequence
  Cyclic GFR-binding peptide
DEYQKYVVNNASDIYLISIPSLR

SEQ ID NO: 55060 - protein, 23 aa, Artificial Sequence
  Cyclic GFR-binding peptide
DEYQKYVVKENEDIYLMSIPSLE

SEQ ID NO: 55061 - protein, 41 aa, Artificial Sequence; identical to SEQ ID NO: 30602
  Cyclic GFR-binding peptide
  MOD_RES (2)..(4)..(36)..(37): Xaa is C or S

SEQ ID NO: 55062 - protein, 25 aa, Artificial Sequence
  Cyclic GFR-binding peptide
EEYQKYVVKDYEDIYLMSIPSLETP

SEQ ID NO: 55063 - protein, 24 aa, Artificial Sequence
  Cyclic GFR-binding peptide
VMDEYQKYVVNNASDIYLISIPSL

SEQ ID NO: 55064 - protein, 30 aa, Artificial Sequence; identical to SEQ ID NO: 33569
  Cyclic GFR-binding peptide
  MOD_RES (29)..(30): Xaa is C or S

SEQ ID NO: 55065 - protein, 32 aa, Artificial Sequence; identical to SEQ ID NO: 15732
  Cyclic GFR-binding peptide
  MOD_RES (2)..(4): Xaa is C or S

SEQ ID NO: 55066 - protein, 33 aa, Artificial Sequence; identical to SEQ ID NO: 12987
  Cyclic GFR-binding peptide
  MOD_RES (2)..(4): Xaa is C or S

SEQ ID NO: 55067 - protein, 28 aa, Artificial Sequence
  Cyclic GFR-binding peptide
AVSMGEEYQKYTPVGMDDIYLVSIPSLK

SEQ ID NO: 55068 - protein, 22 aa, Artificial Sequence
  Cyclic GFR-binding peptide
NEYQKYIVNNSSDIYLVSIPSL

SEQ ID NO: 55069 - protein, 36 aa, Artificial Sequence; identical to SEQ ID NO: 30615
  Cyclic GFR-binding peptide
  MOD_RES (1)..(33)..(34): Xaa is C or S

SEQ ID NO: 55070 - protein, 31 aa, Artificial Sequence; identical to SEQ ID NO: 30616
  Cyclic GFR-binding peptide
  MOD_RES (27)..(28): Xaa is C or S

SEQ ID NO: 55071 - protein, 28 aa, Artificial Sequence
  Cyclic GFR-binding peptide
VSMGEEYQKYTPVGMDDIYLVSIPSLKT

SEQ ID NO: 55072 - protein, 40 aa, Artificial Sequence; identical to SEQ ID NO: 30621
  Cyclic GFR-binding peptide
  MOD_RES (2)..(4)..(36)..(37): Xaa is C or S

SEQ ID NO: 55073 - protein, 28 aa, Artificial Sequence
  Cyclic GFR-binding peptide
  MOD_RES (1)..(1): Xaa is C or S
XGEVVMEEYQKYVVKDYEDIYLMSIPSL

SEQ ID NO: 55074 - protein, 34 aa, Artificial Sequence; identical to SEQ ID NO: 30627
  Cyclic GFR-binding peptide
  MOD_RES (28)..(29): Xaa is C or S

SEQ ID NO: 55075 - protein, 24 aa, Artificial Sequence
  Cyclic GFR-binding peptide
EYQKYIVNSSDDIYLVSIPSLKTP

SEQ ID NO: 55076 - protein, 28 aa, Artificial Sequence
  Cyclic GFR-binding peptide
EVVMDEYQKYVVNNASDIYLISIPSLRT

SEQ ID NO: 55077 - protein, 30 aa, Artificial Sequence; identical to SEQ ID NO: 30632
  Cyclic GFR-binding peptide
  MOD_RES (26)..(27): Xaa is C or S

SEQ ID NO: 55078 - protein, 32 aa, Artificial Sequence; identical to SEQ ID NO: 30634
  Cyclic GFR-binding peptide
  MOD_RES (26)..(27): Xaa is C or S

SEQ ID NO: 55079 - protein, 32 aa, Artificial Sequence; identical to SEQ ID NO: 30636
  Cyclic GFR-binding peptide
  MOD_RES (2)..(2): Xaa is C or S

SEQ ID NO: 55080 - protein, 35 aa, Artificial Sequence; identical to SEQ ID NO: 33591
  Cyclic GFR-binding peptide
  MOD_RES (30)..(31): Xaa is C or S

SEQ ID NO: 55081 - protein, 35 aa, Artificial Sequence
  Cyclic GFR-binding peptide
  MOD_RES (2)..(4): Xaa is C or S
RXGXSEVVMDEYQKYVVNNASDIYLISIPSLRTPV

SEQ ID NO: 55082 - protein, 39 aa, Artificial Sequence; identical to SEQ ID NO: 33593
  Cyclic GFR-binding peptide
  MOD_RES (1)..(33)..(34): Xaa is C or S

SEQ ID NO: 55083 - protein, 31 aa, Artificial Sequence; identical to SEQ ID NO: 33594
  Cyclic GFR-binding peptide
  MOD_RES (1)..(3): Xaa is C or S

SEQ ID NO: 55084 - protein, 31 aa, Artificial Sequence; identical to SEQ ID NO: 30640
  Cyclic GFR-binding peptide
  MOD_RES (30)..(30): Xaa is C or S

SEQ ID NO: 55085 - protein, 34 aa, Artificial Sequence
  Cyclic GFR-binding peptide
  MOD_RES (32)..(33): Xaa is C or S
RDVVMGEYQKYIIQQKDNIYLMSIPSMKTPTXXP

SEQ ID NO: 55086 - protein, 28 aa, Artificial Sequence
  Cyclic GFR-binding peptide
  MOD_RES (26)..(27): Xaa is C or S
EYQKYIVNSSDDIYLVSIPSLKTPAXXP

SEQ ID NO: 55087 - protein, 22 aa, Artificial Sequence
  Cyclic GFR-binding peptide
EYQKYVVNNASDIYLISIPSLR

SEQ ID NO: 55088 - protein, 33 aa, Artificial Sequence; identical to SEQ ID NO: 33600
  Cyclic GFR-binding peptide
  MOD_RES (31)..(31): Xaa is C or S

SEQ ID NO: 55089 - protein, 26 aa, Artificial Sequence
  Cyclic GFR-binding peptide
DEYQKYVVNNASDIYLISIPSLRTPV

SEQ ID NO: 55090 - protein, 41 aa, Artificial Sequence
  Cyclic GFR-binding peptide
  MOD_RES (1)..(3)..(35)..(36): Xaa is C or S
XGXRDVVMGEYQKYIIQQKDNIYLMSIPSMKTPTXXPGASG

SEQ ID NO: 55091 - protein, 23 aa, Artificial Sequence
  Cyclic GFR-binding peptide
MNEYQKYIVNSSDDIYLVSIPSL

SEQ ID NO: 55092 - protein, 39 aa, Artificial Sequence; identical to SEQ ID NO: 33612
  Cyclic GFR-binding peptide
  MOD_RES (2)..(4)..(36)..(37): Xaa is C or S

SEQ ID NO: 55093 - protein, 36 aa, Artificial Sequence
  Cyclic GFR-binding peptide
  MOD_RES (1)..(3)..(35)..(36): Xaa is C or S
XGXSEVVMDEYQKYVVNNASDIYLISIPSLRTPVXX

SEQ ID NO: 55094 - protein, 38 aa, Artificial Sequence; identical to SEQ ID NO: 33614
  Cyclic GFR-binding peptide
  MOD_RES (2)..(4)..(36)..(37): Xaa is C or S

SEQ ID NO: 55095 - protein, 29 aa, Artificial Sequence
  Cyclic GFR-binding peptide
SRVVMNEYQKYIVNSSDDIYLVSIPSLKT

SEQ ID NO: 55096 - protein, 33 aa, Artificial Sequence
  Cyclic GFR-binding peptide
  MOD_RES (31)..(32): Xaa is C or S
EEVIMEYQKYLLVRGNDIYLMSIPSTKVPAXXT

SEQ ID NO: 55097 - protein, 23 aa, Artificial Sequence
  Cyclic GFR-binding peptide
MDEYQKYVVNNASDIYLISIPSL

SEQ ID NO: 55098 - protein, 26 aa, Artificial Sequence
  Cyclic GFR-binding peptide
AVSMGEEYQKYTPVGMDDIYLVSIPS

SEQ ID NO: 55099 - protein, 31 aa, Artificial Sequence; identical to SEQ ID NO: 13044
  Cyclic GFR-binding peptide
  MOD_RES (2)..(4): Xaa is C or S

SEQ ID NO: 55100 - protein, 36 aa, Artificial Sequence; identical to SEQ ID NO: 30677
  Cyclic GFR-binding peptide
  MOD_RES (1)..(3)..(35)..(36): Xaa is C or S

SEQ ID NO: 55101 - protein, 26 aa, Artificial Sequence
  Cyclic GFR-binding peptide
  MOD_RES (26)..(26): Xaa is C or S
EYQKYLLVRGNDIYLMSIPSTKVPAX

SEQ ID NO: 55102 - protein, 29 aa, Artificial Sequence
  Cyclic GFR-binding peptide
  MOD_RES (28)..(29): Xaa is C or S
MNEYQKYIVNNSSDIYLVSIPSLKTPAXX

SEQ ID NO: 55103 - protein, 31 aa, Artificial Sequence; identical to SEQ ID NO: 33630
  Cyclic GFR-binding peptide
  MOD_RES (2)..(4): Xaa is C or S

SEQ ID NO: 55104 - protein, 26 aa, Artificial Sequence
  Cyclic GFR-binding peptide
GEVVMDEYQKYVVKENEDIYLMSIPS

SEQ ID NO: 55105 - protein, 24 aa, Artificial Sequence
  Cyclic GFR-binding peptide
EEYQKYTPVGMDDIYLVSIPSLKT

SEQ ID NO: 55106 - protein, 23 aa, Artificial Sequence
  Cyclic GFR-binding peptide
MEYQKYLLVRGNDIYLMSIPSTK

SEQ ID NO: 55107 - protein, 27 aa, Artificial Sequence
  Cyclic GFR-binding peptide
VVMNEYQKYIVNSSDDIYLVSIPSLQT

SEQ ID NO: 55108 - protein, 29 aa, Artificial Sequence
  Cyclic GFR-binding peptide
EVVMDEYQKYVVNNASDIYLISIPSLRTP

SEQ ID NO: 55109 - protein, 37 aa, Artificial Sequence; identical to SEQ ID NO: 33646
  Cyclic GFR-binding peptide
  MOD_RES (1)..(33)..(34): Xaa is C or S

SEQ ID NO: 55110 - protein, 36 aa, Artificial Sequence; identical to SEQ ID NO: 30695
  Cyclic GFR-binding peptide
  MOD_RES (1)..(3)..(35): Xaa is C or S

SEQ ID NO: 55111 - protein, 34 aa, Artificial Sequence
  Cyclic GFR-binding peptide
  MOD_RES (30)..(31): Xaa is C or S
EVIMEYQKYLLVRGNDIYLMSIPSTKVPAXXTSP

SEQ ID NO: 55112 - protein, 35 aa, Artificial Sequence; identical to SEQ ID NO: 30708
  Cyclic GFR-binding peptide
  MOD_RES (29)..(30): Xaa is C or S

SEQ ID NO: 55113 - protein, 34 aa, Artificial Sequence
  Cyclic GFR-binding peptide
  MOD_RES (2)..(4): Xaa is C or S
LXGXEEVIMEYQKYLLVRGNDIYLMSIPSTKVPA

SEQ ID NO: 55114 - protein, 34 aa, Artificial Sequence; identical to SEQ ID NO: 30710
  Cyclic GFR-binding peptide
  MOD_RES (32)..(33): Xaa is C or S

SEQ ID NO: 55115 - protein, 36 aa, Artificial Sequence
  Cyclic GFR-binding peptide
  MOD_RES (2)..(34)..(35): Xaa is C or S
GXSEVVMDEYQKYVVNNASDIYLISIPSLRTPVXXT

SEQ ID NO: 55116 - protein, 28 aa, Artificial Sequence
  Cyclic GFR-binding peptide
  MOD_RES (2)..(2): Xaa is C or S
GXSRVVMNEYQKYIVNSSDDIYLVSIPS

SEQ ID NO: 55117 - protein, 28 aa, Artificial Sequence
  Cyclic GFR-binding peptide
  MOD_RES (26)..(27): Xaa is C or S
EYQKYVVKENEDIYLMSIPSLETPVXXA

SEQ ID NO: 55118 - protein, 33 aa, Artificial Sequence
  Cyclic GFR-binding peptide
  MOD_RES (28)..(29): Xaa is C or S
MGEYQKYIIQQKDNIYLMSIPSMKTPTXXPGAS

SEQ ID NO: 55119 - protein, 29 aa, Artificial Sequence
  Cyclic GFR-binding peptide
  MOD_RES (29)..(29): Xaa is C or S
VMNEYQKYIVNNSSDIYLVSIPSLKTPAX

SEQ ID NO: 55120 - protein, 30 aa, Artificial Sequence; identical to SEQ ID NO: 15827
  Cyclic GFR-binding peptide
  MOD_RES (2)..(4): Xaa is C or S

SEQ ID NO: 55121 - protein, 35 aa, Artificial Sequence; identical to SEQ ID NO: 30726
  Cyclic GFR-binding peptide
  MOD_RES (32)..(33): Xaa is C or S

SEQ ID NO: 55122 - protein, 25 aa, Artificial Sequence
  Cyclic GFR-binding peptide
VMGEYQKYIIQQKDNIYLMSIPSMK

SEQ ID NO: 55123 - protein, 30 aa, Artificial Sequence; identical to SEQ ID NO: 13092
  Cyclic GFR-binding peptide
  MOD_RES (2)..(4): Xaa is C or S

SEQ ID NO: 55124 - protein, 29 aa, Artificial Sequence
  Cyclic GFR-binding peptide
VVMNEYQKYIVNSSDDIYLVSIPSLKTPA

SEQ ID NO: 55125 - protein, 30 aa, Artificial Sequence
  Cyclic GFR-binding peptide
  MOD_RES (1)..(3): Xaa is C or S
XGXEEVIMEYQKYLLVRGNDIYLMSIPSTK

SEQ ID NO: 55126 - protein, 30 aa, Artificial Sequence; identical to SEQ ID NO: 30730
  Cyclic GFR-binding peptide
  MOD_RES (2)..(2): Xaa is C or S

SEQ ID NO: 55127 - protein, 36 aa, Artificial Sequence; identical to SEQ ID NO: 33685
  Cyclic GFR-binding peptide
  MOD_RES (1)..(3)..(35)..(36): Xaa is C or S

SEQ ID NO: 55128 - protein, 42 aa, Artificial Sequence; identical to SEQ ID NO: 15837
  Cyclic GFR-binding peptide
  MOD_RES (2)..(4)..(36)..(37): Xaa is C or S

SEQ ID NO: 55129 - protein, 32 aa, Artificial Sequence; identical to SEQ ID NO: 13103
  Cyclic GFR-binding peptide
  MOD_RES (2)..(4): Xaa is C or S

SEQ ID NO: 55130 - protein, 25 aa, Artificial Sequence
  Cyclic GFR-binding peptide
MNEYQKYIVNSSDDIYLVSIPSLQT

SEQ ID NO: 55131 - protein, 38 aa, Artificial Sequence; identical to SEQ ID NO: 33692
  Cyclic GFR-binding peptide
  MOD_RES (1)..(33)..(34): Xaa is C or S

SEQ ID NO: 55132 - protein, 34 aa, Artificial Sequence; identical to SEQ ID NO: 30740
  Cyclic GFR-binding peptide
  MOD_RES (29)..(30): Xaa is C or S

SEQ ID NO: 55133 - protein, 40 aa, Artificial Sequence
  Cyclic GFR-binding peptide
  MOD_RES (2)..(4)..(35)..(36): Xaa is C or S
LXGXEEVIMEYQKYLLVRGNDIYLMSIPSTKVPAXXTSPV

SEQ ID NO: 55134 - protein, 30 aa, Artificial Sequence; identical to SEQ ID NO: 13113
  Cyclic GFR-binding peptide
  MOD_RES (2)..(4): Xaa is C or S

SEQ ID NO: 55135 - protein, 28 aa, Artificial Sequence
  Cyclic GFR-binding peptide
  MOD_RES (28)..(28): Xaa is C or S
MGEYQKYIIQQKDNIYLMSIPSMKTPTX

SEQ ID NO: 55136 - protein, 26 aa, Artificial Sequence
  Cyclic GFR-binding peptide
MGEEYQKYTPVGMDDIYLVSIPSLKT

SEQ ID NO: 55137 - protein, 34 aa, Artificial Sequence; identical to SEQ ID NO: 33699
  Cyclic GFR-binding peptide
  MOD_RES (1)..(33)..(34): Xaa is C or S

SEQ ID NO: 55138 - protein, 25 aa, Artificial Sequence
  Cyclic GFR-binding peptide
NEYQKYIVNSSDDIYLVSIPSLKTP

SEQ ID NO: 55139 - protein, 30 aa, Artificial Sequence; identical to SEQ ID NO: 30750
  Cyclic GFR-binding peptide
  MOD_RES (1)..(1): Xaa is C or S

SEQ ID NO: 55140 - protein, 30 aa, Artificial Sequence; identical to SEQ ID NO: 33705
  Cyclic GFR-binding peptide
  MOD_RES (27)..(28): Xaa is C or S

SEQ ID NO: 55141 - protein, 34 aa, Artificial Sequence; identical to SEQ ID NO: 30753
  Cyclic GFR-binding peptide
  MOD_RES (1)..(3): Xaa is C or S

SEQ ID NO: 55142 - protein, 40 aa, Artificial Sequence; identical to SEQ ID NO: 30754
  Cyclic GFR-binding peptide
  MOD_RES (2)..(34): Xaa is C or S

SEQ ID NO: 55143 - protein, 25 aa, Artificial Sequence
  Cyclic GFR-binding peptide
EYQKYVVNNASDIYLISIPSLRTPV

SEQ ID NO: 55144 - protein, 27 aa, Artificial Sequence
  Cyclic GFR-binding peptide
RDVVMGEYQKYIIQQKDNIYLMSIPSM

SEQ ID NO: 55145 - protein, 38 aa, Artificial Sequence; identical to SEQ ID NO: 30755
  Cyclic GFR-binding peptide
  MOD_RES (32)..(33): Xaa is C or S

SEQ ID NO: 55146 - protein, 34 aa, Artificial Sequence
  Cyclic GFR-binding peptide
  MOD_RES (1)..(3): Xaa is C or S
XGXSEVVMDEYQKYVVNNASDIYLISIPSLRTPV

SEQ ID NO: 55147 - protein, 36 aa, Artificial Sequence; identical to SEQ ID NO: 30757
  Cyclic GFR-binding peptide
  MOD_RES (33)..(34): Xaa is C or S

SEQ ID NO: 55148 - protein, 30 aa, Artificial Sequence; identical to SEQ ID NO: 13125
  Cyclic GFR-binding peptide
  MOD_RES (2)..(4): Xaa is C or S

SEQ ID NO: 55149 - protein, 32 aa, Artificial Sequence; identical to SEQ ID NO: 13126
  Cyclic GFR-binding peptide
  MOD_RES (2)..(4): Xaa is C or S

SEQ ID NO: 55150 - protein, 32 aa, Artificial Sequence
  Cyclic GFR-binding peptide
  MOD_RES (28)..(29): Xaa is C or S
MDEYQKYVVNNASDIYLISIPSLRTPVXXTPP

SEQ ID NO: 55151 - protein, 24 aa, Artificial Sequence
  Cyclic GFR-binding peptide
NEYQKYIVNSSDDIYLVSIPSLKT

SEQ ID NO: 55152 - protein, 39 aa, Artificial Sequence; identical to SEQ ID NO: 30763
  Cyclic GFR-binding peptide
  MOD_RES (2)..(4)..(37)..(38): Xaa is C or S

SEQ ID NO: 55153 - protein, 35 aa, Artificial Sequence; identical to SEQ ID NO: 30764
  Cyclic GFR-binding peptide
  MOD_RES (2)..(34)..(35): Xaa is C or S

SEQ ID NO: 55154 - protein, 30 aa, Artificial Sequence; identical to SEQ ID NO: 33720
  Cyclic GFR-binding peptide

SEQ ID NO: 55155 - protein, 31 aa, Artificial Sequence; identical to SEQ ID NO: 33722
  Cyclic GFR-binding peptide
  MOD_RES (26)..(27): Xaa is C or S

SEQ ID NO: 55156 - protein, 38 aa, Artificial Sequence
  Cyclic GFR-binding peptide
  MOD_RES (1)..(3)..(35)..(36): Xaa is C or S
XGXRDVVMGEYQKYIIQQKDNIYLMSIPSMKTPTXXPG

SEQ ID NO: 55157 - protein, 32 aa, Artificial Sequence; identical to SEQ ID NO: 13133
  Cyclic GFR-binding peptide
  MOD_RES (2)..(4): Xaa is C or S

SEQ ID NO: 55158 - protein, 27 aa, Artificial Sequence
  Cyclic GFR-binding peptide
VMEEYQKYVVKDYEDIYLMSIPSLETP

SEQ ID NO: 55159 - protein, 29 aa, Artificial Sequence
  Cyclic GFR-binding peptide
SVAMGEYQKYYTVVGKDIYLISIPSLKTP

SEQ ID NO: 55160 - protein, 40 aa, Artificial Sequence; identical to SEQ ID NO: 30773
  Cyclic GFR-binding peptide
  MOD_RES (1)..(3)..(35): Xaa is C or S

SEQ ID NO: 55161 - protein, 35 aa, Artificial Sequence; identical to SEQ ID NO: 30777
  Cyclic GFR-binding peptide
  MOD_RES (1)..(3)..(35): Xaa is C or S

SEQ ID NO: 55162 - protein, 25 aa, Artificial Sequence
  Cyclic GFR-binding peptide
MDEYQKYVVNNASDIYLISIPSLRT

SEQ ID NO: 55163 - protein, 36 aa, Artificial Sequence
  Cyclic GFR-binding peptide
  MOD_RES (2)..(4)..(35)..(36): Xaa is C or S
LXGXEEVIMEYQKYLLVRGNDIYLMSIPSTKVPAXX

SEQ ID NO: 55164 - protein, 32 aa, Artificial Sequence; identical to SEQ ID NO: 30786
  Cyclic GFR-binding peptide
  MOD_RES (26)..(27): Xaa is C or S

SEQ ID NO: 55165 - protein, 41 aa, Artificial Sequence; identical to SEQ ID NO: 33741
  Cyclic GFR-binding peptide
  MOD_RES (2)..(4)..(36)..(37): Xaa is C or S

SEQ ID NO: 55166 - protein, 27 aa, Artificial Sequence
  Cyclic GFR-binding peptide
  MOD_RES (26)..(26): Xaa is C or S
EYQKYIVNSSDDIYLVSIPSLKTPAXT

SEQ ID NO: 55167 - protein, 26 aa, Artificial Sequence
  Cyclic GFR-binding peptide
VMEEYQKYVVKDYEDIYLMSIPSLET

SEQ ID NO: 55168 - protein, 32 aa, Artificial Sequence; identical to SEQ ID NO: 15900
  Cyclic GFR-binding peptide
  MOD_RES (2)..(4): Xaa is C or S

SEQ ID NO: 55169 - protein, 29 aa, Artificial Sequence
  Cyclic GFR-binding peptide
  MOD_RES (26)..(27): Xaa is C or S
EYQKYIVNNSSDIYLVSIPSLKTPAXXAK

SEQ ID NO: 55170 - protein, 36 aa, Artificial Sequence
  Cyclic GFR-binding peptide
  MOD_RES (2)..(34)..(35): Xaa is C or S
GXRDVVMGEYQKYIIQQKDNIYLMSIPSMKTPTXXP

SEQ ID NO: 55171 - protein, 40 aa, Artificial Sequence; identical to SEQ ID NO: 33755
  Cyclic GFR-binding peptide
  MOD_RES (2)..(4)..(36)..(37): Xaa is C or S

SEQ ID NO: 55172 - protein, 29 aa, Artificial Sequence
  Cyclic GFR-binding peptide
  MOD_RES (29)..(29): Xaa is C or S
VIMEYQKYLLVRGNDIYLMSIPSTKVPAX

SEQ ID NO: 55173 - protein, 24 aa, Artificial Sequence
  Cyclic GFR-binding peptide
EYQKYTPVGMDDIYLVSIPSLKTP

SEQ ID NO: 55174 - protein, 30 aa, Artificial Sequence; identical to SEQ ID NO: 33766
  Cyclic GFR-binding peptide
  MOD_RES (1)..(3): Xaa is C or S

SEQ ID NO: 55175 - protein, 28 aa, Artificial Sequence
  Cyclic GFR-binding peptide
VMDEYQKYVVNNASDIYLISIPSLRTPV

SEQ ID NO: 55176 - protein, 22 aa, Artificial Sequence
  Cyclic GFR-binding peptide
MGEYQKYIIQQKDNIYLMSIPS

SEQ ID NO: 55177 - protein, 32 aa, Artificial Sequence; identical to SEQ ID NO: 33769
  Cyclic GFR-binding peptide
  MOD_RES (2)..(4): Xaa is C or S

SEQ ID NO: 55178 - protein, 32 aa, Artificial Sequence
  Cyclic GFR-binding peptide
  MOD_RES (26)..(27): Xaa is C or S
EYQKYIIQQKDNIYLMSIPSMKTPTXXPGASG

SEQ ID NO: 55179 - protein, 33 aa, Artificial Sequence; identical to SEQ ID NO: 33772
  Cyclic GFR-binding peptide
  MOD_RES (29)..(30): Xaa is C or S

SEQ ID NO: 55180 - protein, 42 aa, Artificial Sequence; identical to SEQ ID NO: 13190
  Cyclic GFR-binding peptide
  MOD_RES (2)..(4)..(36)..(37): Xaa is C or S

SEQ ID NO: 55181 - protein, 31 aa, Artificial Sequence; identical to SEQ ID NO: 33773
  Cyclic GFR-binding peptide
  MOD_RES (1)..(1): Xaa is C or S

SEQ ID NO: 55182 - protein, 33 aa, Artificial Sequence; identical to SEQ ID NO: 33774
  Cyclic GFR-binding peptide
  MOD_RES (1)..(1): Xaa is C or S

SEQ ID NO: 55183 - protein, 37 aa, Artificial Sequence; identical to SEQ ID NO: 30828
  Cyclic GFR-binding peptide
  MOD_RES (1)..(33)..(34): Xaa is C or S

SEQ ID NO: 55184 - protein, 29 aa, Artificial Sequence
  Cyclic GFR-binding peptide
  MOD_RES (1)..(3): Xaa is C or S
XGXESVAMGEYQKYYTVVGKDIYLISIPS

SEQ ID NO: 55185 - protein, 35 aa, Artificial Sequence; identical to SEQ ID NO: 30834
  Cyclic GFR-binding peptide
  MOD_RES (30)..(31): Xaa is C or S

SEQ ID NO: 55186 - protein, 32 aa, Artificial Sequence; identical to SEQ ID NO: 30836
  Cyclic GFR-binding peptide
  MOD_RES (28)..(29): Xaa is C or S

SEQ ID NO: 55187 - protein, 38 aa, Artificial Sequence; identical to SEQ ID NO: 30839
  Cyclic GFR-binding peptide
  MOD_RES (33)..(34): Xaa is C or S

SEQ ID NO: 55188 - protein, 35 aa, Artificial Sequence; identical to SEQ ID NO: 33782
  Cyclic GFR-binding peptide
  MOD_RES (29)..(30): Xaa is C or S

SEQ ID NO: 55189 - protein, 32 aa, Artificial Sequence; identical to SEQ ID NO: 13203
  Cyclic GFR-binding peptide
  MOD_RES (2)..(4): Xaa is C or S

SEQ ID NO: 55190 - protein, 32 aa, Artificial Sequence
  Cyclic GFR-binding peptide
  MOD_RES (30)..(31): Xaa is C or S
VVMDEYQKYVVNNASDIYLISIPSLRTPVXXT

SEQ ID NO: 55191 - protein, 35 aa, Artificial Sequence; identical to SEQ ID NO: 33789
  Cyclic GFR-binding peptide
  MOD_RES (32)..(33): Xaa is C or S

SEQ ID NO: 55192 - protein, 32 aa, Artificial Sequence; identical to SEQ ID NO: 30843
  Cyclic GFR-binding peptide
  MOD_RES (29)..(30): Xaa is C or S

SEQ ID NO: 55193 - protein, 32 aa, Artificial Sequence; identical to SEQ ID NO: 33791
  Cyclic GFR-binding peptide
  MOD_RES (1)..(3): Xaa is C or S

SEQ ID NO: 55194 - protein, 31 aa, Artificial Sequence; identical to SEQ ID NO: 30846
  Cyclic GFR-binding peptide
  MOD_RES (29)..(30): Xaa is C or S

SEQ ID NO: 55195 - protein, 31 aa, Artificial Sequence; identical to SEQ ID NO: 33792
  Cyclic GFR-binding peptide
  MOD_RES (26)..(27): Xaa is C or S

SEQ ID NO: 55196 - protein, 35 aa, Artificial Sequence; identical to SEQ ID NO: 33795
  Cyclic GFR-binding peptide
  MOD_RES (33)..(34): Xaa is C or S

SEQ ID NO: 55197 - protein, 37 aa, Artificial Sequence; identical to SEQ ID NO: 30851
  Cyclic GFR-binding peptide
  MOD_RES (2)..(4)..(37): Xaa is C or S

SEQ ID NO: 55198 - protein, 26 aa, Artificial Sequence
  Cyclic GFR-binding peptide
VVMNEYQKYIVNSSDDIYLVSIPSLQ

SEQ ID NO: 55199 - protein, 30 aa, Artificial Sequence; identical to SEQ ID NO: 30854
  Cyclic GFR-binding peptide
  MOD_RES (27)..(28): Xaa is C or S

SEQ ID NO: 55200 - protein, 42 aa, Artificial Sequence; identical to SEQ ID NO: 13212
  Cyclic GFR-binding peptide
  MOD_RES (2)..(4)..(36): Xaa is C or S

SEQ ID NO: 55201 - protein, 35 aa, Artificial Sequence
  Cyclic GFR-binding peptide
  MOD_RES (1)..(3)..(34)..(35): Xaa is C or S
XGXEEVIMEYQKYLLVRGNDIYLMSIPSTKVPAXX

SEQ ID NO: 55202 - protein, 38 aa, Artificial Sequence; identical to SEQ ID NO: 30857
  Cyclic GFR-binding peptide
  MOD_RES (32)..(33): Xaa is C or S

SEQ ID NO: 55203 - protein, 22 aa, Artificial Sequence
  Cyclic GFR-binding peptide
EYQKYVVKENEDIYLMSIPSLE

SEQ ID NO: 55204 - protein, 32 aa, Artificial Sequence; identical to SEQ ID NO: 30861
  Cyclic GFR-binding peptide
  MOD_RES (31)..(32): Xaa is C or S

SEQ ID NO: 55205 - protein, 28 aa, Artificial Sequence
  Cyclic GFR-binding peptide
ARVVMNEYQKYIVNSSDDIYLVSIPSLQ

SEQ ID NO: 55206 - protein, 27 aa, Artificial Sequence
  Cyclic GFR-binding peptide
  MOD_RES (1)..(1): Xaa is C or S
XGEVVMDEYQKYVVKENEDIYLMSIPS

SEQ ID NO: 55207 - protein, 32 aa, Artificial Sequence; identical to SEQ ID NO: 30868
  Cyclic GFR-binding peptide
  MOD_RES (1)..(1): Xaa is C or S

SEQ ID NO: 55208 - protein, 30 aa, Artificial Sequence; identical to SEQ ID NO: 15943
  Cyclic GFR-binding peptide
  MOD_RES (2)..(4): Xaa is C or S

SEQ ID NO: 55209 - protein, 42 aa, Artificial Sequence; identical to SEQ ID NO: 33808
  Cyclic GFR-binding peptide
  MOD_RES (2)..(4)..(36): Xaa is C or S

SEQ ID NO: 55210 - protein, 23 aa, Artificial Sequence
  Cyclic GFR-binding peptide
EEYQKYVVKDYEDIYLMSIPSLE

SEQ ID NO: 55211 - protein, 25 aa, Artificial Sequence
  Cyclic GFR-binding peptide
VMDEYQKYVVNNASDIYLISIPSLR

SEQ ID NO: 55212 - protein, 36 aa, Artificial Sequence; identical to SEQ ID NO: 30873
  Cyclic GFR-binding peptide
  MOD_RES (30)..(31): Xaa is C or S

SEQ ID NO: 55213 - protein, 24 aa, Artificial Sequence
  Cyclic GFR-binding peptide
MEEYQKYVVKDYEDIYLMSIPSLE

SEQ ID NO: 55214 - protein, 31 aa, Artificial Sequence; identical to SEQ ID NO: 30875
  Cyclic GFR-binding peptide
  MOD_RES (1)..(3): Xaa is C or S

SEQ ID NO: 55215 - protein, 26 aa, Artificial Sequence
  Cyclic GFR-binding peptide
  MOD_RES (26)..(26): Xaa is C or S
EYQKYVVKDYEDIYLMSIPSLETPVX

SEQ ID NO: 55216 - protein, 30 aa, Artificial Sequence
  Cyclic GFR-binding peptide
  MOD_RES (28)..(29): Xaa is C or S
MDEYQKYVVNNASDIYLISIPSLRTPVXXT

SEQ ID NO: 55217 - protein, 38 aa, Artificial Sequence; identical to SEQ ID NO: 33823
  Cyclic GFR-binding peptide
  MOD_RES (1)..(33): Xaa is C or S

SEQ ID NO: 55218 - protein, 42 aa, Artificial Sequence; identical to SEQ ID NO: 13239
  Cyclic GFR-binding peptide
  MOD_RES (2)..(4)..(36)..(37): Xaa is C or S

SEQ ID NO: 55219 - protein, 30 aa, Artificial Sequence
  Cyclic GFR-binding peptide
  MOD_RES (2)..(4): Xaa is C or S
LXGXEEVIMEYQKYLLVRGNDIYLMSIPST

SEQ ID NO: 55220 - protein, 35 aa, Artificial Sequence; identical to SEQ ID NO: 33828
  Cyclic GFR-binding peptide
  MOD_RES (30)..(31): Xaa is C or S

SEQ ID NO: 55221 - protein, 24 aa, Artificial Sequence
  Cyclic GFR-binding peptide
VMNEYQKYIVNSSDDIYLVSIPSL

SEQ ID NO: 55222 - protein, 30 aa, Artificial Sequence; identical to SEQ ID NO: 33829
  Cyclic GFR-binding peptide

SEQ ID NO: 55223 - protein, 33 aa, Artificial Sequence; identical to SEQ ID NO: 30882
  Cyclic GFR-binding peptide
  MOD_RES (1)..(3): Xaa is C or S

SEQ ID NO: 55224 - protein, 41 aa, Artificial Sequence; identical to SEQ ID NO: 30887
  Cyclic GFR-binding peptide
  MOD_RES (2)..(4)..(36)..(37): Xaa is C or S

SEQ ID NO: 55225 - protein, 26 aa, Artificial Sequence
  Cyclic GFR-binding peptide
VVMGEYQKYIIQQKDNIYLMSIPSMK

SEQ ID NO: 55226 - protein, 25 aa, Artificial Sequence
  Cyclic GFR-binding peptide
VVMDEYQKYVVKENEDIYLMSIPSL

SEQ ID NO: 55227 - protein, 31 aa, Artificial Sequence; identical to SEQ ID NO: 30892
  Cyclic GFR-binding peptide
  MOD_RES (31)..(31): Xaa is C or S

SEQ ID NO: 55228 - protein, 31 aa, Artificial Sequence; identical to SEQ ID NO: 13251
  Cyclic GFR-binding peptide
  MOD_RES (2)..(4): Xaa is C or S

SEQ ID NO: 55229 - protein, 32 aa, Artificial Sequence; identical to SEQ ID NO: 30895
  Cyclic GFR-binding peptide
  MOD_RES (31)..(32): Xaa is C or S

SEQ ID NO: 55230 - protein, 34 aa, Artificial Sequence; identical to SEQ ID NO: 33846
  Cyclic GFR-binding peptide
  MOD_RES (1)..(3): Xaa is C or S

SEQ ID NO: 55231 - protein, 34 aa, Artificial Sequence; identical to SEQ ID NO: 30901
  Cyclic GFR-binding peptide
  MOD_RES (33)..(34): Xaa is C or S

SEQ ID NO: 55232 - protein, 31 aa, Artificial Sequence
  Cyclic GFR-binding peptide
  MOD_RES (26)..(27): Xaa is C or S
EYQKYIIQQKDNIYLMSIPSMKTPTXXPGAS

SEQ ID NO: 55233 - protein, 29 aa, Artificial Sequence
  Cyclic GFR-binding peptide
  MOD_RES (28)..(29): Xaa is C or S
GEEYQKYTPVGMDDIYLVSIPSLKTPVXX

SEQ ID NO: 55234 - protein, 29 aa, Artificial Sequence
  Cyclic GFR-binding peptide
  MOD_RES (27)..(28): Xaa is C or S
GEYQKYIIQQKDNIYLMSIPSMKTPTXXP

SEQ ID NO: 55235 - protein, 33 aa, Artificial Sequence; identical to SEQ ID NO: 33852
  Cyclic GFR-binding peptide
  MOD_RES (2)..(2): Xaa is C or S

SEQ ID NO: 55236 - protein, 30 aa, Artificial Sequence; identical to SEQ ID NO: 30910
  Cyclic GFR-binding peptide
  MOD_RES (26)..(27): Xaa is C or S

SEQ ID NO: 55237 - protein, 28 aa, Artificial Sequence
  Cyclic GFR-binding peptide
  MOD_RES (28)..(28): Xaa is C or S
MNEYQKYIVNNSSDIYLVSIPSLKTPAX

SEQ ID NO: 55238 - protein, 30 aa, Artificial Sequence
  Cyclic GFR-binding peptide
  MOD_RES (28)..(29): Xaa is C or S
IMEYQKYLLVRGNDIYLMSIPSTKVPAXXT

SEQ ID NO: 55239 - protein, 27 aa, Artificial Sequence
  Cyclic GFR-binding peptide
AMGEYQKYYTVVGKDIYLISIPSLKTP

SEQ ID NO: 55240 - protein, 32 aa, Artificial Sequence; identical to SEQ ID NO: 30915
  Cyclic GFR-binding peptide
  MOD_RES (28)..(29): Xaa is C or S

SEQ ID NO: 55241 - protein, 34 aa, Artificial Sequence; identical to SEQ ID NO: 33861
  Cyclic GFR-binding peptide
  MOD_RES (31)..(32): Xaa is C or S

SEQ ID NO: 55242 - protein, 36 aa, Artificial Sequence; identical to SEQ ID NO: 33863
  Cyclic GFR-binding peptide
  MOD_RES (1)..(33)..(34): Xaa is C or S

SEQ ID NO: 55243 - protein, 23 aa, Artificial Sequence
  Cyclic GFR-binding peptide
MGEYQKYYTVVGKDIYLISIPSL

SEQ ID NO: 55244 - protein, 27 aa, Artificial Sequence
  Cyclic GFR-binding peptide
MDEYQKYVVNNASDIYLISIPSLRTPV

SEQ ID NO: 55245 - protein, 23 aa, Artificial Sequence
  Cyclic GFR-binding peptide
NEYQKYIVNSSDDIYLVSIPSLK

SEQ ID NO: 55246 - protein, 33 aa, Artificial Sequence; identical to SEQ ID NO: 30920
  Cyclic GFR-binding peptide
  MOD_RES (31)..(32): Xaa is C or S

SEQ ID NO: 55247 - protein, 36 aa, Artificial Sequence
  Cyclic GFR-binding peptide
  MOD_RES (30)..(31): Xaa is C or S
EVIMEYQKYLLVRGNDIYLMSIPSTKVPAXXTSPVR

SEQ ID NO: 55248 - protein, 31 aa, Artificial Sequence; identical to SEQ ID NO: 33874
  Cyclic GFR-binding peptide
  MOD_RES (2)..(4): Xaa is C or S

SEQ ID NO: 55249 - protein, 34 aa, Artificial Sequence; identical to SEQ ID NO: 15995
  Cyclic GFR-binding peptide
  MOD_RES (2)..(4): Xaa is C or S

SEQ ID NO: 55250 - protein, 29 aa, Artificial Sequence
  Cyclic GFR-binding peptide
  MOD_RES (29)..(29): Xaa is C or S
AMGEYQKYYTVVGKDIYLISIPSLKTPVX

SEQ ID NO: 55251 - protein, 31 aa, Artificial Sequence
  Cyclic GFR-binding peptide
  MOD_RES (31)..(31): Xaa is C or S
DVVMGEYQKYIIQQKDNIYLMSIPSMKTPTX

SEQ ID NO: 55252 - protein, 27 aa, Artificial Sequence
  Cyclic GFR-binding peptide
EAVSMGEEYQKYTPVGMDDIYLVSIPS

SEQ ID NO: 55253 - protein, 27 aa, Artificial Sequence
  Cyclic GFR-binding peptide
AKVVMNEYQKYIVNNSSDIYLVSIPSL

SEQ ID NO: 55254 - protein, 25 aa, Artificial Sequence
  Cyclic GFR-binding peptide
VMEEYQKYVVKDYEDIYLMSIPSLE

SEQ ID NO: 55255 - protein, 34 aa, Artificial Sequence
  Cyclic GFR-binding peptide
  MOD_RES (2)..(34): Xaa is C or S
GXRDVVMGEYQKYIIQQKDNIYLMSIPSMKTPTX

SEQ ID NO: 55256 - protein, 36 aa, Artificial Sequence; identical to SEQ ID NO: 33888
  Cyclic GFR-binding peptide
  MOD_RES (30)..(31): Xaa is C or S

SEQ ID NO: 55257 - protein, 33 aa, Artificial Sequence; identical to SEQ ID NO: 30952
  Cyclic GFR-binding peptide
  MOD_RES (2)..(2): Xaa is C or S

SEQ ID NO: 55258 - protein, 41 aa, Artificial Sequence; identical to SEQ ID NO: 33892
  Cyclic GFR-binding peptide
  MOD_RES (1)..(3)..(35)..(36): Xaa is C or S

SEQ ID NO: 55259 - protein, 36 aa, Artificial Sequence
  Cyclic GFR-binding peptide
  MOD_RES (30)..(31): Xaa is C or S
VVMDEYQKYVVNNASDIYLISIPSLRTPVXXTPPTS

SEQ ID NO: 55260 - protein, 32 aa, Artificial Sequence; identical to SEQ ID NO: 30955
  Cyclic GFR-binding peptide
  MOD_RES (26)..(26): Xaa is C or S

SEQ ID NO: 55261 - protein, 34 aa, Artificial Sequence; identical to SEQ ID NO: 13301
  Cyclic GFR-binding peptide
  MOD_RES (2)..(4): Xaa is C or S

SEQ ID NO: 55262 - protein, 23 aa, Artificial Sequence
  Cyclic GFR-binding peptide
EYQKYIIQQKDNIYLMSIPSMKT

SEQ ID NO: 55263 - protein, 30 aa, Artificial Sequence; identical to SEQ ID NO: 30957
  Cyclic GFR-binding peptide
  MOD_RES (28)..(28): Xaa is C or S

SEQ ID NO: 55264 - protein, 28 aa, Artificial Sequence
  Cyclic GFR-binding peptide
  MOD_RES (26)..(27): Xaa is C or S
EYQKYVVKDYEDIYLMSIPSLETPVXXA

SEQ ID NO: 55265 - protein, 42 aa, Artificial Sequence
  Cyclic GFR-binding peptide
  MOD_RES (2)..(4)..(36)..(37): Xaa is C or S
SXGXRDVVMGEYQKYIIQQKDNIYLMSIPSMKTPTXXPGASG

SEQ ID NO: 55266 - protein, 32 aa, Artificial Sequence; identical to SEQ ID NO: 30964
  Cyclic GFR-binding peptide
  MOD_RES (29)..(30): Xaa is C or S

SEQ ID NO: 55267 - protein, 24 aa, Artificial Sequence
  Cyclic GFR-binding peptide
MGEYQKYIIQQKDNIYLMSIPSMK

SEQ ID NO: 55268 - protein, 31 aa, Artificial Sequence; identical to SEQ ID NO: 33907
  Cyclic GFR-binding peptide
  MOD_RES (30)..(31): Xaa is C or S

SEQ ID NO: 55269 - protein, 28 aa, Artificial Sequence
  Cyclic GFR-binding peptide
  MOD_RES (27)..(28): Xaa is C or S
MEYQKYLLVRGNDIYLMSIPSTKVPAXX

SEQ ID NO: 55270 - protein, 37 aa, Artificial Sequence
  Cyclic GFR-binding peptide
  MOD_RES (1)..(3)..(35)..(36): Xaa is C or S
XGXRDVVMGEYQKYIIQQKDNIYLMSIPSMKTPTXXP

SEQ ID NO: 55271 - protein, 30 aa, Artificial Sequence
  Cyclic GFR-binding peptide
  MOD_RES (29)..(30): Xaa is C or S
VMDEYQKYVVNNASDIYLISIPSLRTPVXX

SEQ ID NO: 55272 - protein, 38 aa, Artificial Sequence; identical to SEQ ID NO: 30978
  Cyclic GFR-binding peptide
  MOD_RES (2)..(4)..(36)..(37): Xaa is C or S

SEQ ID NO: 55273 - protein, 30 aa, Artificial Sequence; identical to SEQ ID NO: 30982
  Cyclic GFR-binding peptide
  MOD_RES (26)..(27): Xaa is C or S

SEQ ID NO: 55274 - protein, 36 aa, Artificial Sequence
  Cyclic GFR-binding peptide
  MOD_RES (2)..(4)..(36): Xaa is C or S
RXGXSEVVMDEYQKYVVNNASDIYLISIPSLRTPVX

SEQ ID NO: 55275 - protein, 26 aa, Artificial Sequence
  Cyclic GFR-binding peptide
RDVVMGEYQKYIIQQKDNIYLMSIPS

SEQ ID NO: 55276 - protein, 26 aa, Artificial Sequence
  Cyclic GFR-binding peptide
  MOD_RES (26)..(26): Xaa is C or S
EYQKYIVNSSDDIYLVSIPSLQTPAX

SEQ ID NO: 55277 - protein, 34 aa, Artificial Sequence; identical to SEQ ID NO: 30990
  Cyclic GFR-binding peptide
  MOD_RES (28)..(29): Xaa is C or S

SEQ ID NO: 55278 - protein, 36 aa, Artificial Sequence; identical to SEQ ID NO: 30991
  Cyclic GFR-binding peptide
  MOD_RES (31)..(32): Xaa is C or S

SEQ ID NO: 55279 - protein, 32 aa, Artificial Sequence; identical to SEQ ID NO: 30995
  Cyclic GFR-binding peptide
  MOD_RES (1)..(3): Xaa is C or S

SEQ ID NO: 55280 - protein, 38 aa, Artificial Sequence; identical to SEQ ID NO: 33932
  Cyclic GFR-binding peptide
  MOD_RES (32)..(33): Xaa is C or S

SEQ ID NO: 55281 - protein, 33 aa, Artificial Sequence; identical to SEQ ID NO: 33935
  Cyclic GFR-binding peptide
  MOD_RES (29)..(30): Xaa is C or S

SEQ ID NO: 55282 - protein, 33 aa, Artificial Sequence; identical to SEQ ID NO: 31000
  Cyclic GFR-binding peptide
  MOD_RES (2)..(4): Xaa is C or S

SEQ ID NO: 55283 - protein, 33 aa, Artificial Sequence; identical to SEQ ID NO: 33943
  Cyclic GFR-binding peptide
  MOD_RES (27)..(28): Xaa is C or S

SEQ ID NO: 55284 - protein, 26 aa, Artificial Sequence
  Cyclic GFR-binding peptide
VIMEYQKYLLVRGNDIYLMSIPSTKV

SEQ ID NO: 55285 - protein, 31 aa, Artificial Sequence; identical to SEQ ID NO: 33945
  Cyclic GFR-binding peptide

SEQ ID NO: 55286 - protein, 30 aa, Artificial Sequence; identical to SEQ ID NO: 33946
  Cyclic GFR-binding peptide
  MOD_RES (2)..(4): Xaa is C or S

SEQ ID NO: 55287 - protein, 34 aa, Artificial Sequence
  Cyclic GFR-binding peptide
  MOD_RES (29)..(30): Xaa is C or S
VMGEYQKYIIQQKDNIYLMSIPSMKTPTXXPGAS

SEQ ID NO: 55288 - protein, 31 aa, Artificial Sequence; identical to SEQ ID NO: 31013
  Cyclic GFR-binding peptide
  MOD_RES (2)..(2): Xaa is C or S

SEQ ID NO: 55289 - protein, 34 aa, Artificial Sequence; identical to SEQ ID NO: 31015
  Cyclic GFR-binding peptide
  MOD_RES (2)..(4): Xaa is C or S

SEQ ID NO: 55290 - protein, 39 aa, Artificial Sequence
  Cyclic GFR-binding peptide
  MOD_RES (1)..(33)..(34): Xaa is C or S
XSRVVMNEYQKYIVNSSDDIYLVSIPSLKTPAXXPKPVH

SEQ ID NO: 55291 - protein, 33 aa, Artificial Sequence; identical to SEQ ID NO: 16059
  Cyclic GFR-binding peptide
  MOD_RES (2)..(4): Xaa is C or S

SEQ ID NO: 55292 - protein, 23 aa, Artificial Sequence
  Cyclic GFR-binding peptide
EEYQKYTPVGMDDIYLVSIPSLK

SEQ ID NO: 55293 - protein, 33 aa, Artificial Sequence; identical to SEQ ID NO: 33953
  Cyclic GFR-binding peptide
  MOD_RES (29)..(30): Xaa is C or S

SEQ ID NO: 55294 - protein, 30 aa, Artificial Sequence; identical to SEQ ID NO: 13360
  Cyclic GFR-binding peptide
  MOD_RES (2)..(4): Xaa is C or S

SEQ ID NO: 55295 - protein, 32 aa, Artificial Sequence; identical to SEQ ID NO: 33961
  Cyclic GFR-binding peptide
  MOD_RES (2)..(2): Xaa is C or S

SEQ ID NO: 55296 - protein, 29 aa, Artificial Sequence
  Cyclic GFR-binding peptide
  MOD_RES (29)..(29): Xaa is C or S
VMDEYQKYVVKENEDIYLMSIPSLETPVX

SEQ ID NO: 55297 - protein, 37 aa, Artificial Sequence; identical to SEQ ID NO: 31027
  Cyclic GFR-binding peptide
  MOD_RES (1)..(3)..(35)..(36): Xaa is C or S

SEQ ID NO: 55298 - protein, 24 aa, Artificial Sequence
  Cyclic GFR-binding peptide
AMGEYQKYYTVVGKDIYLISIPSL

SEQ ID NO: 55299 - protein, 31 aa, Artificial Sequence; identical to SEQ ID NO: 33963
  Cyclic GFR-binding peptide
  MOD_RES (27)..(28): Xaa is C or S

SEQ ID NO: 55300 - protein, 24 aa, Artificial Sequence
  Cyclic GFR-binding peptide
VVMNEYQKYIVNSSDDIYLVSIPS

SEQ ID NO: 55301 - protein, 32 aa, Artificial Sequence
  Cyclic GFR-binding peptide
  MOD_RES (28)..(29): Xaa is C or S
IMEYQKYLLVRGNDIYLMSIPSTKVPAXXTSP

SEQ ID NO: 55302 - protein, 22 aa, Artificial Sequence
  Cyclic GFR-binding peptide
MNEYQKYIVNNSSDIYLVSIPS

SEQ ID NO: 55303 - protein, 31 aa, Artificial Sequence
  Cyclic GFR-binding peptide
  MOD_RES (1)..(3): Xaa is C or S
XGXEEVIMEYQKYLLVRGNDIYLMSIPSTKV

SEQ ID NO: 55304 - protein, 25 aa, Artificial Sequence
  Cyclic GFR-binding peptide
SMGEEYQKYTPVGMDDIYLVSIPSL

SEQ ID NO: 55305 - protein, 25 aa, Artificial Sequence
  Cyclic GFR-binding peptide
EYQKYIVNSSDDIYLVSIPSLQTPA

SEQ ID NO: 55306 - protein, 34 aa, Artificial Sequence; identical to SEQ ID NO: 33973
  Cyclic GFR-binding peptide
  MOD_RES (1)..(33)..(34): Xaa is C or S

SEQ ID NO: 55307 - protein, 28 aa, Artificial Sequence
  Cyclic GFR-binding peptide
EVIMEYQKYLLVRGNDIYLMSIPSTKVP

SEQ ID NO: 55308 - protein, 30 aa, Artificial Sequence; identical to SEQ ID NO: 31042
  Cyclic GFR-binding peptide
  MOD_RES (1)..(3): Xaa is C or S

SEQ ID NO: 55309 - protein, 32 aa, Artificial Sequence
  Cyclic GFR-binding peptide
  MOD_RES (1)..(1): Xaa is C or S
XSEVVMDEYQKYVVNNASDIYLISIPSLRTPV

SEQ ID NO: 55310 - protein, 29 aa, Artificial Sequence
  Cyclic GFR-binding peptide
VVMNEYQKYIVNNSSDIYLVSIPSLKTPA

SEQ ID NO: 55311 - protein, 32 aa, Artificial Sequence; identical to SEQ ID NO: 13380
  Cyclic GFR-binding peptide
  MOD_RES (2)..(4): Xaa is C or S

SEQ ID NO: 55312 - protein, 33 aa, Artificial Sequence
  Cyclic GFR-binding peptide
  MOD_RES (2)..(2): Xaa is C or S
GXRDVVMGEYQKYIIQQKDNIYLMSIPSMKTPT

SEQ ID NO: 55313 - protein, 36 aa, Artificial Sequence
  Cyclic GFR-binding peptide
  MOD_RES (2)..(4)..(36): Xaa is C or S
SXGXRDVVMGEYQKYIIQQKDNIYLMSIPSMKTPTX

SEQ ID NO: 55314 - protein, 39 aa, Artificial Sequence
  Cyclic GFR-binding peptide
  MOD_RES (2)..(4)..(35)..(36): Xaa is C or S
LXGXEEVIMEYQKYLLVRGNDIYLMSIPSTKVPAXXTSP

SEQ ID NO: 55315 - protein, 32 aa, Artificial Sequence; identical to SEQ ID NO: 33981
  Cyclic GFR-binding peptide
  MOD_RES (1)..(3): Xaa is C or S

SEQ ID NO: 55316 - protein, 33 aa, Artificial Sequence; identical to SEQ ID NO: 31057
  Cyclic GFR-binding peptide
  MOD_RES (30)..(31): Xaa is C or S

SEQ ID NO: 55317 - protein, 30 aa, Artificial Sequence; identical to SEQ ID NO: 31061
  Cyclic GFR-binding peptide
  MOD_RES (1)..(1): Xaa is C or S

SEQ ID NO: 55318 - protein, 28 aa, Artificial Sequence
  Cyclic GFR-binding peptide
  MOD_RES (2)..(2): Xaa is C or S
GXEEVIMEYQKYLLVRGNDIYLMSIPST

SEQ ID NO: 55319 - protein, 27 aa, Artificial Sequence
  Cyclic GFR-binding peptide
  MOD_RES (26)..(27): Xaa is C or S
EYQKYLLVRGNDIYLMSIPSTKVPAXX

SEQ ID NO: 55320 - protein, 26 aa, Artificial Sequence
  Cyclic GFR-binding peptide
VMDEYQKYVVNNASDIYLISIPSLRT

SEQ ID NO: 55321 - protein, 37 aa, Artificial Sequence; identical to SEQ ID NO: 31066
  Cyclic GFR-binding peptide
  MOD_RES (1)..(3)..(35)..(36): Xaa is C or S

SEQ ID NO: 55322 - protein, 31 aa, Artificial Sequence; identical to SEQ ID NO: 31070
  Cyclic GFR-binding peptide
  MOD_RES (28)..(28): Xaa is C or S

SEQ ID NO: 55323 - protein, 35 aa, Artificial Sequence; identical to SEQ ID NO: 31074
  Cyclic GFR-binding peptide
  MOD_RES (32)..(33): Xaa is C or S

SEQ ID NO: 55324 - protein, 32 aa, Artificial Sequence; identical to SEQ ID NO: 16108
  Cyclic GFR-binding peptide
  MOD_RES (2)..(4): Xaa is C or S

SEQ ID NO: 55325 - protein, 28 aa, Artificial Sequence
  Cyclic GFR-binding peptide
  MOD_RES (26)..(27): Xaa is C or S
EYQKYYTVVGKDIYLISIPSLKTPVXXA

SEQ ID NO: 55326 - protein, 31 aa, Artificial Sequence
  Cyclic GFR-binding peptide
  MOD_RES (31)..(31): Xaa is C or S
EEVIMEYQKYLLVRGNDIYLMSIPSTKVPAX

SEQ ID NO: 55327 - protein, 30 aa, Artificial Sequence; identical to SEQ ID NO: 31084
  Cyclic GFR-binding peptide
  MOD_RES (26)..(26): Xaa is C or S

SEQ ID NO: 55328 - protein, 29 aa, Artificial Sequence
  Cyclic GFR-binding peptide
  MOD_RES (28)..(29): Xaa is C or S
MEEYQKYVVKDYEDIYLMSIPSLETPVXX

SEQ ID NO: 55329 - protein, 31 aa, Artificial Sequence
  Cyclic GFR-binding peptide
  MOD_RES (28)..(29): Xaa is C or S
IMEYQKYLLVRGNDIYLMSIPSTKVPAXXTS

SEQ ID NO: 55330 - protein, 31 aa, Artificial Sequence; identical to SEQ ID NO: 31088
  Cyclic GFR-binding peptide

SEQ ID NO: 55331 - protein, 36 aa, Artificial Sequence; identical to SEQ ID NO: 34013
  Cyclic GFR-binding peptide
  MOD_RES (2)..(4): Xaa is C or S

SEQ ID NO: 55332 - protein, 34 aa, Artificial Sequence; identical to SEQ ID NO: 34018
  Cyclic GFR-binding peptide
  MOD_RES (28)..(29): Xaa is C or S

SEQ ID NO: 55333 - protein, 38 aa, Artificial Sequence
  Cyclic GFR-binding peptide
  MOD_RES (2)..(4)..(35)..(36): Xaa is C or S
LXGXEEVIMEYQKYLLVRGNDIYLMSIPSTKVPAXXTS

SEQ ID NO: 55334 - protein, 34 aa, Artificial Sequence
  Cyclic GFR-binding peptide
  MOD_RES (28)..(29): Xaa is C or S
IMEYQKYLLVRGNDIYLMSIPSTKVPAXXTSPVR

SEQ ID NO: 55335 - protein, 26 aa, Artificial Sequence
  Cyclic GFR-binding peptide
  MOD_RES (26)..(26): Xaa is C or S
EYQKYVVKENEDIYLMSIPSLETPVX

SEQ ID NO: 55336 - protein, 39 aa, Artificial Sequence
  Cyclic GFR-binding peptide
  MOD_RES (1)..(3)..(35)..(36): Xaa is C or S
XGXRDVVMGEYQKYIIQQKDNIYLMSIPSMKTPTXXPGA

SEQ ID NO: 55337 - protein, 26 aa, Artificial Sequence
  Cyclic GFR-binding peptide
EEVIMEYQKYLLVRGNDIYLMSIPST

SEQ ID NO: 55338 - protein, 21 aa, Artificial Sequence
  Cyclic GFR-binding peptide
DEYQKYVVNNASDIYLISIPS

SEQ ID NO: 55339 - protein, 20 aa, Artificial Sequence
  Cyclic GFR-binding peptide
EYQKYLLVRGNDIYLMSIPS

SEQ ID NO: 55340 - protein, 34 aa, Artificial Sequence; identical to SEQ ID NO: 34030
  Cyclic GFR-binding peptide
  MOD_RES (1)..(33): Xaa is C or S

SEQ ID NO: 55341 - protein, 34 aa, Artificial Sequence
  Cyclic GFR-binding peptide
  MOD_RES (31)..(32): Xaa is C or S
EEVIMEYQKYLLVRGNDIYLMSIPSTKVPAXXTS

SEQ ID NO: 55342 - protein, 36 aa, Artificial Sequence
  Cyclic GFR-binding peptide
  MOD_RES (31)..(32): Xaa is C or S
EEVIMEYQKYLLVRGNDIYLMSIPSTKVPAXXTSPV

SEQ ID NO: 55343 - protein, 37 aa, Artificial Sequence; identical to SEQ ID NO: 34047
  Cyclic GFR-binding peptide
  MOD_RES (32)..(33): Xaa is C or S

SEQ ID NO: 55344 - protein, 22 aa, Artificial Sequence
  Cyclic GFR-binding peptide
EEYQKYTPVGMDDIYLVSIPSL

SEQ ID NO: 55345 - protein, 35 aa, Artificial Sequence
  Cyclic GFR-binding peptide
  MOD_RES (29)..(30): Xaa is C or S
VMNEYQKYIVNSSDDIYLVSIPSLKTPAXXPKPVH

SEQ ID NO: 55346 - protein, 27 aa, Artificial Sequence
  Cyclic GFR-binding peptide
SMGEEYQKYTPVGMDDIYLVSIPSLKT

SEQ ID NO: 55347 - protein, 22 aa, Artificial Sequence
  Cyclic GFR-binding peptide
DEYQKYVVNNASDIYLISIPSL

SEQ ID NO: 55348 - protein, 33 aa, Artificial Sequence; identical to SEQ ID NO: 16161
  Cyclic GFR-binding peptide
  MOD_RES (2)..(4): Xaa is C or S

SEQ ID NO: 55349 - protein, 26 aa, Artificial Sequence
  Cyclic GFR-binding peptide
SEVVMDEYQKYVVNNASDIYLISIPS

SEQ ID NO: 55350 - protein, 27 aa, Artificial Sequence
  Cyclic GFR-binding peptide
  MOD_RES (27)..(27): Xaa is C or S
NEYQKYIVNNSSDIYLVSIPSLKTPAX

SEQ ID NO: 55351 - protein, 40 aa, Artificial Sequence; identical to SEQ ID NO: 31131
  Cyclic GFR-binding peptide
  MOD_RES (2)..(4)..(36)..(37): Xaa is C or S

SEQ ID NO: 55352 - protein, 20 aa, Artificial Sequence
  Cyclic GFR-binding peptide
EYQKYVVKENEDIYLMSIPS

SEQ ID NO: 55353 - protein, 28 aa, Artificial Sequence
  Cyclic GFR-binding peptide
KVVMNEYQKYIVNNSSDIYLVSIPSLKT

SEQ ID NO: 55354 - protein, 32 aa, Artificial Sequence; identical to SEQ ID NO: 34065
  Cyclic GFR-binding peptide
  MOD_RES (1)..(3): Xaa is C or S

SEQ ID NO: 55355 - protein, 38 aa, Artificial Sequence; identical to SEQ ID NO: 31146
  Cyclic GFR-binding peptide
  MOD_RES (1)..(3)..(35)..(36): Xaa is C or S

SEQ ID NO: 55356 - protein, 35 aa, Artificial Sequence; identical to SEQ ID NO: 31149
  Cyclic GFR-binding peptide
  MOD_RES (31)..(31): Xaa is C or S

SEQ ID NO: 55357 - protein, 23 aa, Artificial Sequence
  Cyclic GFR-binding peptide
AMGEYQKYYTVVGKDIYLISIPS

SEQ ID NO: 55358 - protein, 29 aa, Artificial Sequence
  Cyclic GFR-binding peptide
  MOD_RES (1)..(1): Xaa is C or S
XEEVIMEYQKYLLVRGNDIYLMSIPSTKV

SEQ ID NO: 55359 - protein, 30 aa, Artificial Sequence; identical to SEQ ID NO: 31159
  Cyclic GFR-binding peptide
  MOD_RES (2)..(4): Xaa is C or S

SEQ ID NO: 55360 - protein, 34 aa, Artificial Sequence; identical to SEQ ID NO: 13486
  Cyclic GFR-binding peptide
  MOD_RES (2)..(4): Xaa is C or S

SEQ ID NO: 55361 - protein, 33 aa, Artificial Sequence; identical to SEQ ID NO: 34076
  Cyclic GFR-binding peptide
  MOD_RES (2)..(2): Xaa is C or S

SEQ ID NO: 55362 - protein, 37 aa, Artificial Sequence; identical to SEQ ID NO: 34077
  Cyclic GFR-binding peptide
  MOD_RES (2)..(4)..(36)..(37): Xaa is C or S

SEQ ID NO: 55363 - protein, 40 aa, Artificial Sequence; identical to SEQ ID NO: 34078
  Cyclic GFR-binding peptide
  MOD_RES (2)..(34)..(35): Xaa is C or S

SEQ ID NO: 55364 - protein, 35 aa, Artificial Sequence
  Cyclic GFR-binding peptide
  MOD_RES (2)..(4): Xaa is C or S
SXGXRDVVMGEYQKYIIQQKDNIYLMSIPSMKTPT

SEQ ID NO: 55365 - protein, 23 aa, Artificial Sequence
  Cyclic GFR-binding peptide
VMDEYQKYVVKENEDIYLMSIPS

SEQ ID NO: 55366 - protein, 23 aa, Artificial Sequence
  Cyclic GFR-binding peptide
VMDEYQKYVVNNASDIYLISIPS

SEQ ID NO: 55367 - protein, 40 aa, Artificial Sequence
  Cyclic GFR-binding peptide
  MOD_RES (1)..(3)..(34)..(35): Xaa is C or S
XGXEEVIMEYQKYLLVRGNDIYLMSIPSTKVPAXXTSPVR

SEQ ID NO: 55368 - protein, 41 aa, Artificial Sequence; identical to SEQ ID NO: 31181
  Cyclic GFR-binding peptide
  MOD_RES (2)..(35)..(36): Xaa is C or S

SEQ ID NO: 55369 - protein, 42 aa, Artificial Sequence; identical to SEQ ID NO: 16197
  Cyclic GFR-binding peptide
  MOD_RES (2)..(4)..(36)..(37): Xaa is C or S

SEQ ID NO: 55370 - protein, 30 aa, Artificial Sequence; identical to SEQ ID NO: 31184
  Cyclic GFR-binding peptide
  MOD_RES (27)..(28): Xaa is C or S

SEQ ID NO: 55371 - protein, 31 aa, Artificial Sequence; identical to SEQ ID NO: 31185
  Cyclic GFR-binding peptide
  MOD_RES (1)..(1): Xaa is C or S

SEQ ID NO: 55372 - protein, 28 aa, Artificial Sequence
  Cyclic GFR-binding peptide
  MOD_RES (1)..(1): Xaa is C or S
XEAVSMGEEYQKYTPVGMDDIYLVSIPS

SEQ ID NO: 55373 - protein, 27 aa, Artificial Sequence
  Cyclic GFR-binding peptide
RVVMNEYQKYIVNSSDDIYLVSIPSLK

SEQ ID NO: 55374 - protein, 25 aa, Artificial Sequence
  Cyclic GFR-binding peptide
VSMGEEYQKYTPVGMDDIYLVSIPS

SEQ ID NO: 55375 - protein, 23 aa, Artificial Sequence
  Cyclic GFR-binding peptide
EYQKYVVKENEDIYLMSIPSLET

SEQ ID NO: 55376 - protein, 25 aa, Artificial Sequence
  Cyclic GFR-binding peptide
DEYQKYVVKENEDIYLMSIPSLETP

SEQ ID NO: 55377 - protein, 40 aa, Artificial Sequence; identical to SEQ ID NO: 31200
  Cyclic GFR-binding peptide
  MOD_RES (2)..(34)..(35): Xaa is C or S

SEQ ID NO: 55378 - protein, 26 aa, Artificial Sequence
  Cyclic GFR-binding peptide
MEYQKYLLVRGNDIYLMSIPSTKVPA

SEQ ID NO: 55379 - protein, 42 aa, Artificial Sequence; identical to SEQ ID NO: 13523
  Cyclic GFR-binding peptide
  MOD_RES (2)..(4)..(36)..(37): Xaa is C or S

SEQ ID NO: 55380 - protein, 40 aa, Artificial Sequence; identical to SEQ ID NO: 31205
  Cyclic GFR-binding peptide
  MOD_RES (2)..(4)..(36): Xaa is C or S

SEQ ID NO: 55381 - protein, 33 aa, Artificial Sequence; identical to SEQ ID NO: 31207
  Cyclic GFR-binding peptide
  MOD_RES (1)..(3): Xaa is C or S

SEQ ID NO: 55382 - protein, 28 aa, Artificial Sequence
  Cyclic GFR-binding peptide
  MOD_RES (1)..(1): Xaa is C or S
XESVAMGEYQKYYTVVGKDIYLISIPSL

SEQ ID NO: 55383 - protein, 31 aa, Artificial Sequence
  Cyclic GFR-binding peptide
  MOD_RES (1)..(3): Xaa is C or S
XGXSEVVMDEYQKYVVNNASDIYLISIPSLR

SEQ ID NO: 55384 - protein, 38 aa, Artificial Sequence; identical to SEQ ID NO: 34118
  Cyclic GFR-binding peptide
  MOD_RES (1)..(3)..(35)..(36): Xaa is C or S

SEQ ID NO: 55385 - protein, 37 aa, Artificial Sequence; identical to SEQ ID NO: 34119
  Cyclic GFR-binding peptide
  MOD_RES (31)..(31): Xaa is C or S

SEQ ID NO: 55386 - protein, 30 aa, Artificial Sequence
  Cyclic GFR-binding peptide
  MOD_RES (1)..(1): Xaa is C or S
XSEVVMDEYQKYVVNNASDIYLISIPSLRT

SEQ ID NO: 55387 - protein, 22 aa, Artificial Sequence
  Cyclic GFR-binding peptide
NEYQKYIVNSSDDIYLVSIPSL

SEQ ID NO: 55388 - protein, 38 aa, Artificial Sequence; identical to SEQ ID NO: 31217
  Cyclic GFR-binding peptide
  MOD_RES (2)..(34)..(35): Xaa is C or S

SEQ ID NO: 55389 - protein, 35 aa, Artificial Sequence; identical to SEQ ID NO: 34127
  Cyclic GFR-binding peptide
  MOD_RES (1)..(33)..(34): Xaa is C or S

SEQ ID NO: 55390 - protein, 23 aa, Artificial Sequence
  Cyclic GFR-binding peptide
VMNEYQKYIVNNSSDIYLVSIPS

SEQ ID NO: 55391 - protein, 35 aa, Artificial Sequence; identical to SEQ ID NO: 34130
  Cyclic GFR-binding peptide
  MOD_RES (1)..(33)..(34): Xaa is C or S

SEQ ID NO: 55392 - protein, 26 aa, Artificial Sequence
  Cyclic GFR-binding peptide
DVVMGEYQKYIIQQKDNIYLMSIPSM

SEQ ID NO: 55393 - protein, 27 aa, Artificial Sequence
  Cyclic GFR-binding peptide
KVVMNEYQKYIVNNSSDIYLVSIPSLK

SEQ ID NO: 55394 - protein, 30 aa, Artificial Sequence
  Cyclic GFR-binding peptide
  MOD_RES (1)..(1): Xaa is C or S
XRDVVMGEYQKYIIQQKDNIYLMSIPSMKT

SEQ ID NO: 55395 - protein, 34 aa, Artificial Sequence; identical to SEQ ID NO: 31234
  Cyclic GFR-binding peptide
  MOD_RES (2)..(2): Xaa is C or S

SEQ ID NO: 55396 - protein, 35 aa, Artificial Sequence; identical to SEQ ID NO: 31238
  Cyclic GFR-binding peptide
  MOD_RES (2)..(34)..(35): Xaa is C or S

SEQ ID NO: 55397 - protein, 32 aa, Artificial Sequence; identical to SEQ ID NO: 34140
  Cyclic GFR-binding peptide
  MOD_RES (1)..(1): Xaa is C or S

SEQ ID NO: 55398 - protein, 28 aa, Artificial Sequence
  Cyclic GFR-binding peptide
  MOD_RES (26)..(27): Xaa is C or S
EYQKYTPVGMDDIYLVSIPSLKTPVXXA

SEQ ID NO: 55399 - protein, 32 aa, Artificial Sequence; identical to SEQ ID NO: 31242
  Cyclic GFR-binding peptide
  MOD_RES (27)..(28): Xaa is C or S

SEQ ID NO: 55400 - protein, 31 aa, Artificial Sequence; identical to SEQ ID NO: 16243
  Cyclic GFR-binding peptide
  MOD_RES (2)..(4): Xaa is C or S

SEQ ID NO: 55401 - protein, 28 aa, Artificial Sequence
  Cyclic GFR-binding peptide
  MOD_RES (28)..(28): Xaa is C or S
MEEYQKYVVKDYEDIYLMSIPSLETPVX

SEQ ID NO: 55402 - protein, 26 aa, Artificial Sequence
  Cyclic GFR-binding peptide
MNEYQKYIVNSSDDIYLVSIPSLKTP

SEQ ID NO: 55403 - protein, 32 aa, Artificial Sequence; identical to SEQ ID NO: 34146
  Cyclic GFR-binding peptide
  MOD_RES (32)..(32): Xaa is C or S

SEQ ID NO: 55404 - protein, 29 aa, Artificial Sequence
  Cyclic GFR-binding peptide
KVVMNEYQKYIVNNSSDIYLVSIPSLKTP

SEQ ID NO: 55405 - protein, 28 aa, Artificial Sequence
  Cyclic GFR-binding peptide
VMEEYQKYVVKDYEDIYLMSIPSLETPV

SEQ ID NO: 55406 - protein, 36 aa, Artificial Sequence; identical to SEQ ID NO: 31251
  Cyclic GFR-binding peptide
  MOD_RES (32)..(33): Xaa is C or S

SEQ ID NO: 55407 - protein, 30 aa, Artificial Sequence; identical to SEQ ID NO: 31255
  Cyclic GFR-binding peptide
  MOD_RES (29)..(29): Xaa is C or S

SEQ ID NO: 55408 - protein, 40 aa, Artificial Sequence
  Cyclic GFR-binding peptide
  MOD_RES (1)..(3)..(35)..(36): Xaa is C or S
XGXRDVVMGEYQKYIIQQKDNIYLMSIPSMKTPTXXPGAS

SEQ ID NO: 55409 - protein, 27 aa, Artificial Sequence
  Cyclic GFR-binding peptide
  MOD_RES (26)..(27): Xaa is C or S
EYQKYIVNSSDDIYLVSIPSLQTPAXX

SEQ ID NO: 55410 - protein, 25 aa, Artificial Sequence
  Cyclic GFR-binding peptide
VVMEEYQKYVVKDYEDIYLMSIPSL

SEQ ID NO: 55411 - protein, 29 aa, Artificial Sequence
  Cyclic GFR-binding peptide
AVSMGEEYQKYTPVGMDDIYLVSIPSLKT

SEQ ID NO: 55412 - protein, 28 aa, Artificial Sequence
  Cyclic GFR-binding peptide
  MOD_RES (27)..(28): Xaa is C or S
GEYQKYYTVVGKDIYLISIPSLKTPVXX

SEQ ID NO: 55413 - protein, 27 aa, Artificial Sequence
  Cyclic GFR-binding peptide
  MOD_RES (26)..(27): Xaa is C or S
EYQKYIIQQKDNIYLMSIPSMKTPTXX

SEQ ID NO: 55414 - protein, 36 aa, Artificial Sequence; identical to SEQ ID NO: 34180
  Cyclic GFR-binding peptide
  MOD_RES (32)..(33): Xaa is C or S

SEQ ID NO: 55415 - protein, 28 aa, Artificial Sequence
  Cyclic GFR-binding peptide
  MOD_RES (26)..(27): Xaa is C or S
EYQKYVVNNASDIYLISIPSLRTPVXXT

SEQ ID NO: 55416 - protein, 33 aa, Artificial Sequence
  Cyclic GFR-binding peptide
  MOD_RES (1)..(33): Xaa is C or S
XSEVVMDEYQKYVVNNASDIYLISIPSLRTPVX

SEQ ID NO: 55417 - protein, 27 aa, Artificial Sequence
  Cyclic GFR-binding peptide
  MOD_RES (27)..(27): Xaa is C or S
GEYQKYYTVVGKDIYLISIPSLKTPVX

SEQ ID NO: 55418 - protein, 39 aa, Artificial Sequence; identical to SEQ ID NO: 34189
  Cyclic GFR-binding peptide
  MOD_RES (1)..(3)..(35)..(36): Xaa is C or S

SEQ ID NO: 55419 - protein, 37 aa, Artificial Sequence
  Cyclic GFR-binding peptide
  MOD_RES (31)..(32): Xaa is C or S
DVVMGEYQKYIIQQKDNIYLMSIPSMKTPTXXPGASG

SEQ ID NO: 55420 - protein, 30 aa, Artificial Sequence; identical to SEQ ID NO: 31292
  Cyclic GFR-binding peptide

SEQ ID NO: 55421 - protein, 34 aa, Artificial Sequence
  Cyclic GFR-binding peptide
  MOD_RES (28)..(29): Xaa is C or S
MNEYQKYIVNSSDDIYLVSIPSLKTPAXXPKPVH

SEQ ID NO: 55422 - protein, 31 aa, Artificial Sequence; identical to SEQ ID NO: 34192
  Cyclic GFR-binding peptide
  MOD_RES (28)..(29): Xaa is C or S

SEQ ID NO: 55423 - protein, 37 aa, Artificial Sequence; identical to SEQ ID NO: 31294
  Cyclic GFR-binding peptide
  MOD_RES (2)..(34)..(35): Xaa is C or S

SEQ ID NO: 55424 - protein, 39 aa, Artificial Sequence
  Cyclic GFR-binding peptide
  MOD_RES (1)..(3)..(34)..(35): Xaa is C or S
XGXEEVIMEYQKYLLVRGNDIYLMSIPSTKVPAXXTSPV

SEQ ID NO: 55425 - protein, 26 aa, Artificial Sequence
  Cyclic GFR-binding peptide
VMNEYQKYIVNNSSDIYLVSIPSLKT

SEQ ID NO: 55426 - protein, 30 aa, Artificial Sequence; identical to SEQ ID NO: 31301
  Cyclic GFR-binding peptide
  MOD_RES (30)..(30): Xaa is C or S

SEQ ID NO: 55427 - protein, 30 aa, Artificial Sequence; identical to SEQ ID NO: 31305
  Cyclic GFR-binding peptide
  MOD_RES (27)..(28): Xaa is C or S

SEQ ID NO: 55428 - protein, 30 aa, Artificial Sequence; identical to SEQ ID NO: 34205
  Cyclic GFR-binding peptide
  MOD_RES (27)..(28): Xaa is C or S

SEQ ID NO: 55429 - protein, 35 aa, Artificial Sequence; identical to SEQ ID NO: 31312
  Cyclic GFR-binding peptide
  MOD_RES (2)..(4): Xaa is C or S

SEQ ID NO: 55430 - protein, 26 aa, Artificial Sequence
  Cyclic GFR-binding peptide
MEEYQKYVVKDYEDIYLMSIPSLETP

SEQ ID NO: 55431 - protein, 28 aa, Artificial Sequence
  Cyclic GFR-binding peptide
  MOD_RES (27)..(28): Xaa is C or S
NEYQKYIVNNSSDIYLVSIPSLKTPAXX

SEQ ID NO: 55432 - protein, 40 aa, Artificial Sequence
  Cyclic GFR-binding peptide
  MOD_RES (2)..(4)..(36)..(37): Xaa is C or S
RXGXSEVVMDEYQKYVVNNASDIYLISIPSLRTPVXXTPP

SEQ ID NO: 55433 - protein, 23 aa, Artificial Sequence
  Cyclic GFR-binding peptide
EYQKYVVNNASDIYLISIPSLRT

SEQ ID NO: 55434 - protein, 33 aa, Artificial Sequence
  Cyclic GFR-binding peptide
  MOD_RES (31)..(32): Xaa is C or S
EVVMDEYQKYVVNNASDIYLISIPSLRTPVXXT

SEQ ID NO: 55435 - protein, 28 aa, Artificial Sequence
  Cyclic GFR-binding peptide
  MOD_RES (28)..(28): Xaa is C or S
MDEYQKYVVNNASDIYLISIPSLRTPVX

SEQ ID NO: 55436 - protein, 41 aa, Artificial Sequence
  Cyclic GFR-binding peptide
  MOD_RES (2)..(4)..(36)..(37): Xaa is C or S
RXGXSEVVMDEYQKYVVNNASDIYLISIPSLRTPVXXTPPT

SEQ ID NO: 55437 - protein, 31 aa, Artificial Sequence
  Cyclic GFR-binding peptide
  MOD_RES (27)..(28): Xaa is C or S
MEYQKYLLVRGNDIYLMSIPSTKVPAXXTSP

SEQ ID NO: 55438 - protein, 40 aa, Artificial Sequence
  Cyclic GFR-binding peptide
  MOD_RES (2)..(34)..(35): Xaa is C or S
GXRDVVMGEYQKYIIQQKDNIYLMSIPSMKTPTXXPGASG

SEQ ID NO: 55439 - protein, 31 aa, Artificial Sequence; identical to SEQ ID NO: 31332
  Cyclic GFR-binding peptide
  MOD_RES (1)..(1): Xaa is C or S

SEQ ID NO: 55440 - protein, 24 aa, Artificial Sequence
  Cyclic GFR-binding peptide
GEEYQKYTPVGMDDIYLVSIPSLK

SEQ ID NO: 55441 - protein, 34 aa, Artificial Sequence; identical to SEQ ID NO: 31333
  Cyclic GFR-binding peptide
  MOD_RES (28)..(29): Xaa is C or S

SEQ ID NO: 55442 - protein, 36 aa, Artificial Sequence; identical to SEQ ID NO: 31335
  Cyclic GFR-binding peptide
  MOD_RES (31)..(32): Xaa is C or S

SEQ ID NO: 55443 - protein, 28 aa, Artificial Sequence
  Cyclic GFR-binding peptide
GEVVMEEYQKYVVKDYEDIYLMSIPSLE

SEQ ID NO: 55444 - protein, 34 aa, Artificial Sequence
  Cyclic GFR-binding peptide
  MOD_RES (1)..(3)..(34): Xaa is C or S
XGXEEVIMEYQKYLLVRGNDIYLMSIPSTKVPAX

SEQ ID NO: 55445 - protein, 36 aa, Artificial Sequence
  Cyclic GFR-binding peptide
  MOD_RES (1)..(3)..(35)..(36): Xaa is C or S
XGXRDVVMGEYQKYIIQQKDNIYLMSIPSMKTPTXX

SEQ ID NO: 55446 - protein, 23 aa, Artificial Sequence
  Cyclic GFR-binding peptide
VMNEYQKYIVNSSDDIYLVSIPS

SEQ ID NO: 55447 - protein, 33 aa, Artificial Sequence; identical to SEQ ID NO: 34226
  Cyclic GFR-binding peptide
  MOD_RES (32)..(33): Xaa is C or S

SEQ ID NO: 55448 - protein, 30 aa, Artificial Sequence
  Cyclic GFR-binding peptide
  MOD_RES (27)..(28): Xaa is C or S
DEYQKYVVNNASDIYLISIPSLRTPVXXTP

SEQ ID NO: 55449 - protein, 25 aa, Artificial Sequence
  Cyclic GFR-binding peptide
NEYQKYIVNNSSDIYLVSIPSLKTP

SEQ ID NO: 55450 - protein, 30 aa, Artificial Sequence; identical to SEQ ID NO: 34232
  Cyclic GFR-binding peptide
  MOD_RES (2)..(2): Xaa is C or S

SEQ ID NO: 55451 - protein, 33 aa, Artificial Sequence; identical to SEQ ID NO: 16330
  Cyclic GFR-binding peptide
  MOD_RES (2)..(4): Xaa is C or S

SEQ ID NO: 55452 - protein, 23 aa, Artificial Sequence
  Cyclic GFR-binding peptide
MNEYQKYIVNNSSDIYLVSIPSL

SEQ ID NO: 55453 - protein, 30 aa, Artificial Sequence; identical to SEQ ID NO: 34238
  Cyclic GFR-binding peptide

SEQ ID NO: 55454 - protein, 28 aa, Artificial Sequence
  Cyclic GFR-binding peptide
  MOD_RES (27)..(27): Xaa is C or S
NEYQKYIVNSSDDIYLVSIPSLKTPAXT

SEQ ID NO: 55455 - protein, 24 aa, Artificial Sequence
  Cyclic GFR-binding peptide
MNEYQKYIVNNSSDIYLVSIPSLK

SEQ ID NO: 55456 - protein, 27 aa, Artificial Sequence
  Cyclic GFR-binding peptide
  MOD_RES (26)..(27): Xaa is C or S
EYQKYTPVGMDDIYLVSIPSLKTPVXX

SEQ ID NO: 55457 - protein, 34 aa, Artificial Sequence; identical to SEQ ID NO: 13645
  Cyclic GFR-binding peptide
  MOD_RES (2)..(4): Xaa is C or S

SEQ ID NO: 55458 - protein, 30 aa, Artificial Sequence; identical to SEQ ID NO: 34243
  Cyclic GFR-binding peptide
  MOD_RES (1)..(1): Xaa is C or S

SEQ ID NO: 55459 - protein, 31 aa, Artificial Sequence
  Cyclic GFR-binding peptide
  MOD_RES (1)..(1): Xaa is C or S
XRDVVMGEYQKYIIQQKDNIYLMSIPSMKTP

SEQ ID NO: 55460 - protein, 29 aa, Artificial Sequence
  Cyclic GFR-binding peptide
  MOD_RES (27)..(28): Xaa is C or S
EEYQKYVVKDYEDIYLMSIPSLETPVXXA

SEQ ID NO: 55461 - protein, 37 aa, Artificial Sequence; identical to SEQ ID NO: 34247
  Cyclic GFR-binding peptide
  MOD_RES (31)..(32): Xaa is C or S

SEQ ID NO: 55462 - protein, 33 aa, Artificial Sequence; identical to SEQ ID NO: 16342
  Cyclic GFR-binding peptide
  MOD_RES (2)..(4): Xaa is C or S

SEQ ID NO: 55463 - protein, 30 aa, Artificial Sequence; identical to SEQ ID NO: 31362
  Cyclic GFR-binding peptide

SEQ ID NO: 55464 - protein, 32 aa, Artificial Sequence; identical to SEQ ID NO: 16347
  Cyclic GFR-binding peptide
  MOD_RES (2)..(4): Xaa is C or S

SEQ ID NO: 55465 - protein, 35 aa, Artificial Sequence
  Cyclic GFR-binding peptide
  MOD_RES (1)..(32)..(33): Xaa is C or S
XEEVIMEYQKYLLVRGNDIYLMSIPSTKVPAXXTS

SEQ ID NO: 55466 - protein, 29 aa, Artificial Sequence
  Cyclic GFR-binding peptide
  MOD_RES (28)..(29): Xaa is C or S
MDEYQKYVVNNASDIYLISIPSLRTPVXX

SEQ ID NO: 55467 - protein, 35 aa, Artificial Sequence; identical to SEQ ID NO: 31371
  Cyclic GFR-binding peptide
  MOD_RES (1)..(3)..(35): Xaa is C or S

SEQ ID NO: 55468 - protein, 23 aa, Artificial Sequence
  Cyclic GFR-binding peptide
MEEYQKYVVKDYEDIYLMSIPSL

SEQ ID NO: 55469 - protein, 32 aa, Artificial Sequence; identical to SEQ ID NO: 13666
  Cyclic GFR-binding peptide
  MOD_RES (2)..(4): Xaa is C or S

SEQ ID NO: 55470 - protein, 32 aa, Artificial Sequence; identical to SEQ ID NO: 31377
  Cyclic GFR-binding peptide
  MOD_RES (2)..(2): Xaa is C or S

SEQ ID NO: 55471 - protein, 33 aa, Artificial Sequence; identical to SEQ ID NO: 16359
  Cyclic GFR-binding peptide
  MOD_RES (2)..(4): Xaa is C or S

SEQ ID NO: 55472 - protein, 34 aa, Artificial Sequence; identical to SEQ ID NO: 31378
  Cyclic GFR-binding peptide
  MOD_RES (28)..(28): Xaa is C or S

SEQ ID NO: 55473 - protein, 25 aa, Artificial Sequence
  Cyclic GFR-binding peptide
VMDEYQKYVVKENEDIYLMSIPSLE

SEQ ID NO: 55474 - protein, 29 aa, Artificial Sequence
  Cyclic GFR-binding peptide
  MOD_RES (29)..(29): Xaa is C or S
VMDEYQKYVVNNASDIYLISIPSLRTPVX

SEQ ID NO: 55475 - protein, 39 aa, Artificial Sequence; identical to SEQ ID NO: 31389
  Cyclic GFR-binding peptide
  MOD_RES (2)..(34)..(35): Xaa is C or S

SEQ ID NO: 55476 - protein, 31 aa, Artificial Sequence
  Cyclic GFR-binding peptide
  MOD_RES (1)..(1): Xaa is C or S
XSEVVMDEYQKYVVNNASDIYLISIPSLRTP

SEQ ID NO: 55477 - protein, 29 aa, Artificial Sequence
  Cyclic GFR-binding peptide
  MOD_RES (27)..(28): Xaa is C or S
MEYQKYLLVRGNDIYLMSIPSTKVPAXXT

SEQ ID NO: 55478 - protein, 24 aa, Artificial Sequence
  Cyclic GFR-binding peptide
NEYQKYIVNNSSDIYLVSIPSLKT

SEQ ID NO: 55479 - protein, 30 aa, Artificial Sequence; identical to SEQ ID NO: 16371
  Cyclic GFR-binding peptide
  MOD_RES (2)..(4): Xaa is C or S

SEQ ID NO: 55480 - protein, 31 aa, Artificial Sequence
  Cyclic GFR-binding peptide
  MOD_RES (2)..(4): Xaa is C or S
LXGXEEVIMEYQKYLLVRGNDIYLMSIPSTK

SEQ ID NO: 55481 - protein, 34 aa, Artificial Sequence; identical to SEQ ID NO: 31402
  Cyclic GFR-binding peptide
  MOD_RES (28)..(29): Xaa is C or S

SEQ ID NO: 55482 - protein, 35 aa, Artificial Sequence; identical to SEQ ID NO: 31405
  Cyclic GFR-binding peptide
  MOD_RES (32)..(33): Xaa is C or S

SEQ ID NO: 55483 - protein, 29 aa, Artificial Sequence
  Cyclic GFR-binding peptide
  MOD_RES (29)..(29): Xaa is C or S
VMEEYQKYVVKDYEDIYLMSIPSLETPVX

SEQ ID NO: 55484 - protein, 27 aa, Artificial Sequence
  Cyclic GFR-binding peptide
VSMGEEYQKYTPVGMDDIYLVSIPSLK

SEQ ID NO: 55485 - protein, 34 aa, Artificial Sequence; identical to SEQ ID NO: 16376
  Cyclic GFR-binding peptide
  MOD_RES (2)..(4): Xaa is C or S

SEQ ID NO: 55486 - protein, 33 aa, Artificial Sequence; identical to SEQ ID NO: 34290
  Cyclic GFR-binding peptide
  MOD_RES (1)..(33): Xaa is C or S

SEQ ID NO: 55487 - protein, 23 aa, Artificial Sequence
  Cyclic GFR-binding peptide
GEEYQKYTPVGMDDIYLVSIPSL

SEQ ID NO: 55488 - protein, 38 aa, Artificial Sequence; identical to SEQ ID NO: 34294
  Cyclic GFR-binding peptide
  MOD_RES (1)..(34)..(35): Xaa is C or S

SEQ ID NO: 55489 - protein, 38 aa, Artificial Sequence
  Cyclic GFR-binding peptide
  MOD_RES (1)..(33)..(34): Xaa is C or S
XRDVVMGEYQKYIIQQKDNIYLMSIPSMKTPTXXPGAS

SEQ ID NO: 55490 - protein, 28 aa, Artificial Sequence
  Cyclic GFR-binding peptide
  MOD_RES (2)..(2): Xaa is C or S
GXGEVVMDEYQKYVVKENEDIYLMSIPS

SEQ ID NO: 55491 - protein, 33 aa, Artificial Sequence; identical to SEQ ID NO: 16385
  Cyclic GFR-binding peptide
  MOD_RES (2)..(4): Xaa is C or S

SEQ ID NO: 55492 - protein, 35 aa, Artificial Sequence
  Cyclic GFR-binding peptide
  MOD_RES (29)..(30): Xaa is C or S
VIMEYQKYLLVRGNDIYLMSIPSTKVPAXXTSPVR

SEQ ID NO: 55493 - protein, 25 aa, Artificial Sequence
  Cyclic GFR-binding peptide
EYQKYIVNNSSDIYLVSIPSLKTPA

SEQ ID NO: 55494 - protein, 38 aa, Artificial Sequence
  Cyclic GFR-binding peptide
  MOD_RES (2)..(34)..(35): Xaa is C or S
GXRDVVMGEYQKYIIQQKDNIYLMSIPSMKTPTXXPGA

SEQ ID NO: 55495 - protein, 33 aa, Artificial Sequence; identical to SEQ ID NO: 31427
  Cyclic GFR-binding peptide
  MOD_RES (29)..(29): Xaa is C or S

SEQ ID NO: 55496 - protein, 32 aa, Artificial Sequence; identical to SEQ ID NO: 13714
  Cyclic GFR-binding peptide
  MOD_RES (2)..(4): Xaa is C or S

SEQ ID NO: 55497 - protein, 29 aa, Artificial Sequence
  Cyclic GFR-binding peptide
VVMGEYQKYIIQQKDNIYLMSIPSMKTPT

SEQ ID NO: 55498 - protein, 33 aa, Artificial Sequence; identical to SEQ ID NO: 34323
  Cyclic GFR-binding peptide
  MOD_RES (2)..(2): Xaa is C or S

SEQ ID NO: 55499 - protein, 38 aa, Artificial Sequence; identical to SEQ ID NO: 31442
  Cyclic GFR-binding peptide
  MOD_RES (2)..(34)..(35): Xaa is C or S

SEQ ID NO: 55500 - protein, 27 aa, Artificial Sequence
  Cyclic GFR-binding peptide
EVVMEEYQKYVVKDYEDIYLMSIPSLE

SEQ ID NO: 55501 - protein, 25 aa, Artificial Sequence
  Cyclic GFR-binding peptide
EYQKYVVKDYEDIYLMSIPSLETPV

SEQ ID NO: 55502 - protein, 30 aa, Artificial Sequence
  Cyclic GFR-binding peptide
  MOD_RES (27)..(28): Xaa is C or S
GEYQKYIIQQKDNIYLMSIPSMKTPTXXPG

SEQ ID NO: 55503 - protein, 35 aa, Artificial Sequence
  Cyclic GFR-binding peptide
  MOD_RES (29)..(30): Xaa is C or S
VMDEYQKYVVNNASDIYLISIPSLRTPVXXTPPTS

SEQ ID NO: 55504 - protein, 30 aa, Artificial Sequence; identical to SEQ ID NO: 34333
  Cyclic GFR-binding peptide
  MOD_RES (27)..(28): Xaa is C or S

SEQ ID NO: 55505 - protein, 29 aa, Artificial Sequence
  Cyclic GFR-binding peptide
RDVVMGEYQKYIIQQKDNIYLMSIPSMKT

SEQ ID NO: 55506 - protein, 36 aa, Artificial Sequence; identical to SEQ ID NO: 31451
  Cyclic GFR-binding peptide
  MOD_RES (32)..(33): Xaa is C or S

SEQ ID NO: 55507 - protein, 34 aa, Artificial Sequence; identical to SEQ ID NO: 34336
  Cyclic GFR-binding peptide
  MOD_RES (2)..(34): Xaa is C or S

SEQ ID NO: 55508 - protein, 24 aa, Artificial Sequence
  Cyclic GFR-binding peptide
MNEYQKYIVNSSDDIYLVSIPSLQ

SEQ ID NO: 55509 - protein, 32 aa, Artificial Sequence; identical to SEQ ID NO: 34345
  Cyclic GFR-binding peptide
  MOD_RES (26)..(27): Xaa is C or S

SEQ ID NO: 55510 - protein, 32 aa, Artificial Sequence; identical to SEQ ID NO: 31461
  Cyclic GFR-binding peptide
  MOD_RES (26)..(27): Xaa is C or S

SEQ ID NO: 55511 - protein, 37 aa, Artificial Sequence; identical to SEQ ID NO: 31462
  Cyclic GFR-binding peptide
  MOD_RES (1)..(33)..(34): Xaa is C or S

SEQ ID NO: 55512 - protein, 26 aa, Artificial Sequence
  Cyclic GFR-binding peptide
VMNEYQKYIVNSSDDIYLVSIPSLQT

SEQ ID NO: 55513 - protein, 21 aa, Artificial Sequence
  Cyclic GFR-binding peptide
EYQKYYTVVGKDIYLISIPSL

SEQ ID NO: 55514 - protein, 22 aa, Artificial Sequence
  Cyclic GFR-binding peptide
DEYQKYVVKENEDIYLMSIPSL

SEQ ID NO: 55515 - protein, 34 aa, Artificial Sequence; identical to SEQ ID NO: 34362
  Cyclic GFR-binding peptide
  MOD_RES (30)..(31): Xaa is C or S

SEQ ID NO: 55516 - protein, 30 aa, Artificial Sequence
  Cyclic GFR-binding peptide
SEVVMDEYQKYVVNNASDIYLISIPSLRTP

SEQ ID NO: 55517 - protein, 24 aa, Artificial Sequence
  Cyclic GFR-binding peptide
VIMEYQKYLLVRGNDIYLMSIPST

SEQ ID NO: 55518 - protein, 28 aa, Artificial Sequence
  Cyclic GFR-binding peptide
  MOD_RES (1)..(1): Xaa is C or S
XAKVVMNEYQKYIVNNSSDIYLVSIPSL

SEQ ID NO: 55519 - protein, 30 aa, Artificial Sequence
  Cyclic GFR-binding peptide
  MOD_RES (2)..(2): Xaa is C or S
GXRDVVMGEYQKYIIQQKDNIYLMSIPSMK

SEQ ID NO: 55520 - protein, 23 aa, Artificial Sequence
  Cyclic GFR-binding peptide
EYQKYIVNSSDDIYLVSIPSLQT

SEQ ID NO: 55521 - protein, 24 aa, Artificial Sequence
  Cyclic GFR-binding peptide
DEYQKYVVKENEDIYLMSIPSLET

SEQ ID NO: 55522 - protein, 37 aa, Artificial Sequence
  Cyclic GFR-binding peptide
  MOD_RES (31)..(32): Xaa is C or S
RVVMNEYQKYIVNSSDDIYLVSIPSLKTPAXXPKPVH

SEQ ID NO: 55523 - protein, 28 aa, Artificial Sequence
  Cyclic GFR-binding peptide
VMNEYQKYIVNSSDDIYLVSIPSLKTPA

SEQ ID NO: 55524 - protein, 28 aa, Artificial Sequence
  Cyclic GFR-binding peptide
  MOD_RES (28)..(28): Xaa is C or S
MNEYQKYIVNSSDDIYLVSIPSLQTPAX

SEQ ID NO: 55525 - protein, 26 aa, Artificial Sequence
  Cyclic GFR-binding peptide
NEYQKYIVNNSSDIYLVSIPSLKTPA

SEQ ID NO: 55526 - protein, 29 aa, Artificial Sequence
  Cyclic GFR-binding peptide
  MOD_RES (27)..(28): Xaa is C or S
NEYQKYIVNSSDDIYLVSIPSLKTPAXXP

SEQ ID NO: 55527 - protein, 29 aa, Artificial Sequence
  Cyclic GFR-binding peptide
RVVMNEYQKYIVNSSDDIYLVSIPSLQTP

SEQ ID NO: 55528 - protein, 29 aa, Artificial Sequence
  Cyclic GFR-binding peptide
  MOD_RES (1)..(3): Xaa is C or S
XGXRDVVMGEYQKYIIQQKDNIYLMSIPS

SEQ ID NO: 55529 - protein, 28 aa, Artificial Sequence
  Cyclic GFR-binding peptide
  MOD_RES (1)..(1): Xaa is C or S
XEEVIMEYQKYLLVRGNDIYLMSIPSTK

SEQ ID NO: 55530 - protein, 35 aa, Artificial Sequence
  Cyclic GFR-binding peptide
  MOD_RES (29)..(30): Xaa is C or S
VMGEYQKYIIQQKDNIYLMSIPSMKTPTXXPGASG

SEQ ID NO: 55531 - protein, 29 aa, Artificial Sequence
  Cyclic GFR-binding peptide
  MOD_RES (26)..(27): Xaa is C or S
EYQKYIIQQKDNIYLMSIPSMKTPTXXPG

SEQ ID NO: 55532 - protein, 30 aa, Artificial Sequence; identical to SEQ ID NO: 34403
  Cyclic GFR-binding peptide

SEQ ID NO: 55533 - protein, 29 aa, Artificial Sequence
  Cyclic GFR-binding peptide
  MOD_RES (1)..(3): Xaa is C or S
XGXAKVVMNEYQKYIVNNSSDIYLVSIPS

SEQ ID NO: 55534 - protein, 34 aa, Artificial Sequence; identical to SEQ ID NO: 34405
  Cyclic GFR-binding peptide
  MOD_RES (1)..(34): Xaa is C or S

SEQ ID NO: 55535 - protein, 30 aa, Artificial Sequence; identical to SEQ ID NO: 16477
  Cyclic GFR-binding peptide
  MOD_RES (2)..(4): Xaa is C or S

SEQ ID NO: 55536 - protein, 33 aa, Artificial Sequence; identical to SEQ ID NO: 34416
  Cyclic GFR-binding peptide
  MOD_RES (31)..(32): Xaa is C or S

SEQ ID NO: 55537 - protein, 27 aa, Artificial Sequence
  Cyclic GFR-binding peptide
GEEYQKYTPVGMDDIYLVSIPSLKTPV

SEQ ID NO: 55538 - protein, 27 aa, Artificial Sequence
  Cyclic GFR-binding peptide
  MOD_RES (27)..(27): Xaa is C or S
EEYQKYTPVGMDDIYLVSIPSLKTPVX

SEQ ID NO: 55539 - protein, 27 aa, Artificial Sequence
  Cyclic GFR-binding peptide
MGEEYQKYTPVGMDDIYLVSIPSLKTP

SEQ ID NO: 55540 - protein, 29 aa, Artificial Sequence
  Cyclic GFR-binding peptide
  MOD_RES (29)..(29): Xaa is C or S
VMNEYQKYIVNSSDDIYLVSIPSLKTPAX

SEQ ID NO: 55541 - protein, 33 aa, Artificial Sequence; identical to SEQ ID NO: 31518
  Cyclic GFR-binding peptide
  MOD_RES (2)..(4): Xaa is C or S

SEQ ID NO: 55542 - protein, 26 aa, Artificial Sequence
  Cyclic GFR-binding peptide
EVVMDEYQKYVVNNASDIYLISIPSL

SEQ ID NO: 55543 - protein, 32 aa, Artificial Sequence; identical to SEQ ID NO: 34428
  Cyclic GFR-binding peptide
  MOD_RES (1)..(1): Xaa is C or S

SEQ ID NO: 55544 - protein, 24 aa, Artificial Sequence
  Cyclic GFR-binding peptide
EEYQKYVVKDYEDIYLMSIPSLET

SEQ ID NO: 55545 - protein, 38 aa, Artificial Sequence; identical to SEQ ID NO: 34429
  Cyclic GFR-binding peptide
  MOD_RES (1)..(33)..(34): Xaa is C or S

SEQ ID NO: 55546 - protein, 26 aa, Artificial Sequence
  Cyclic GFR-binding peptide
  MOD_RES (26)..(26): Xaa is C or S
EYQKYYTVVGKDIYLISIPSLKTPVX

SEQ ID NO: 55547 - protein, 30 aa, Artificial Sequence; identical to SEQ ID NO: 34439
  Cyclic GFR-binding peptide
  MOD_RES (28)..(29): Xaa is C or S

SEQ ID NO: 55548 - protein, 34 aa, Artificial Sequence
  Cyclic GFR-binding peptide
  MOD_RES (29)..(30): Xaa is C or S
VMDEYQKYVVNNASDIYLISIPSLRTPVXXTPPT

SEQ ID NO: 55549 - protein, 32 aa, Artificial Sequence; identical to SEQ ID NO: 16490
  Cyclic GFR-binding peptide
  MOD_RES (2)..(4): Xaa is C or S

SEQ ID NO: 55550 - protein, 33 aa, Artificial Sequence; identical to SEQ ID NO: 34441
  Cyclic GFR-binding peptide
  MOD_RES (32)..(32): Xaa is C or S

SEQ ID NO: 55551 - protein, 32 aa, Artificial Sequence; identical to SEQ ID NO: 31529
  Cyclic GFR-binding peptide
  MOD_RES (2)..(4): Xaa is C or S

SEQ ID NO: 55552 - protein, 27 aa, Artificial Sequence
  Cyclic GFR-binding peptide
  MOD_RES (1)..(1): Xaa is C or S
XSEVVMDEYQKYVVNNASDIYLISIPS

SEQ ID NO: 55553 - protein, 35 aa, Artificial Sequence
  Cyclic GFR-binding peptide
  MOD_RES (1)..(3)..(35): Xaa is C or S
XGXSEVVMDEYQKYVVNNASDIYLISIPSLRTPVX

SEQ ID NO: 55554 - protein, 23 aa, Artificial Sequence
  Cyclic GFR-binding peptide
VMEEYQKYVVKDYEDIYLMSIPS

SEQ ID NO: 55555 - protein, 32 aa, Artificial Sequence; identical to SEQ ID NO: 16494
  Cyclic GFR-binding peptide
  MOD_RES (2)..(4): Xaa is C or S

SEQ ID NO: 55556 - protein, 30 aa, Artificial Sequence
  Cyclic GFR-binding peptide
  MOD_RES (2)..(2): Xaa is C or S
GXSEVVMDEYQKYVVNNASDIYLISIPSLR

SEQ ID NO: 55557 - protein, 36 aa, Artificial Sequence; identical to SEQ ID NO: 31538
  Cyclic GFR-binding peptide
  MOD_RES (30)..(31): Xaa is C or S

SEQ ID NO: 55558 - protein, 28 aa, Artificial Sequence
  Cyclic GFR-binding peptide
RVVMNEYQKYIVNSSDDIYLVSIPSLQT

SEQ ID NO: 55559 - protein, 42 aa, Artificial Sequence; identical to SEQ ID NO: 16500
  Cyclic GFR-binding peptide
  MOD_RES (2)..(4)..(36): Xaa is C or S

SEQ ID NO: 55560 - protein, 33 aa, Artificial Sequence; identical to SEQ ID NO: 34460
  Cyclic GFR-binding peptide
  MOD_RES (32)..(33): Xaa is C or S

SEQ ID NO: 55561 - protein, 36 aa, Artificial Sequence; identical to SEQ ID NO: 31548
  Cyclic GFR-binding peptide
  MOD_RES (30)..(31): Xaa is C or S

SEQ ID NO: 55562 - protein, 25 aa, Artificial Sequence
  Cyclic GFR-binding peptide
MNEYQKYIVNSSDDIYLVSIPSLKT

SEQ ID NO: 55563 - protein, 33 aa, Artificial Sequence; identical to SEQ ID NO: 34469
  Cyclic GFR-binding peptide
  MOD_RES (1)..(3): Xaa is C or S

SEQ ID NO: 55564 - protein, 33 aa, Artificial Sequence; identical to SEQ ID NO: 16517
  Cyclic GFR-binding peptide
  MOD_RES (2)..(4): Xaa is C or S

SEQ ID NO: 55565 - protein, 30 aa, Artificial Sequence; identical to SEQ ID NO: 34477
  Cyclic GFR-binding peptide
  MOD_RES (2)..(2): Xaa is C or S

SEQ ID NO: 55566 - protein, 40 aa, Artificial Sequence; identical to SEQ ID NO: 31560
  Cyclic GFR-binding peptide
  MOD_RES (2)..(4)..(37)..(38): Xaa is C or S

SEQ ID NO: 55567 - protein, 37 aa, Artificial Sequence; identical to SEQ ID NO: 34481
  Cyclic GFR-binding peptide
  MOD_RES (2)..(34): Xaa is C or S

SEQ ID NO: 55568 - protein, 32 aa, Artificial Sequence; identical to SEQ ID NO: 31562
  Cyclic GFR-binding peptide
  MOD_RES (1)..(3): Xaa is C or S

SEQ ID NO: 55569 - protein, 36 aa, Artificial Sequence; identical to SEQ ID NO: 34485
  Cyclic GFR-binding peptide
  MOD_RES (2)..(34)..(35): Xaa is C or S

SEQ ID NO: 55570 - protein, 31 aa, Artificial Sequence; identical to SEQ ID NO: 31565
  Cyclic GFR-binding peptide
  MOD_RES (28)..(29): Xaa is C or S

SEQ ID NO: 55571 - protein, 30 aa, Artificial Sequence
  Cyclic GFR-binding peptide
  MOD_RES (30)..(30): Xaa is C or S
EVIMEYQKYLLVRGNDIYLMSIPSTKVPAX

SEQ ID NO: 55572 - protein, 36 aa, Artificial Sequence; identical to SEQ ID NO: 31568
  Cyclic GFR-binding peptide
  MOD_RES (1)..(3)..(36): Xaa is C or S

SEQ ID NO: 55573 - protein, 22 aa, Artificial Sequence
  Cyclic GFR-binding peptide
EEYQKYVVKDYEDIYLMSIPSL

SEQ ID NO: 55574 - protein, 25 aa, Artificial Sequence
  Cyclic GFR-binding peptide
VMNEYQKYIVNNSSDIYLVSIPSLK

SEQ ID NO: 55575 - protein, 35 aa, Artificial Sequence; identical to SEQ ID NO: 31573
  Cyclic GFR-binding peptide
  MOD_RES (30)..(31): Xaa is C or S

SEQ ID NO: 55576 - protein, 36 aa, Artificial Sequence; identical to SEQ ID NO: 34497
  Cyclic GFR-binding peptide
  MOD_RES (1)..(33): Xaa is C or S

SEQ ID NO: 55577 - protein, 39 aa, Artificial Sequence; identical to SEQ ID NO: 34498
  Cyclic GFR-binding peptide
  MOD_RES (1)..(3)..(35)..(36): Xaa is C or S

SEQ ID NO: 55578 - protein, 33 aa, Artificial Sequence; identical to SEQ ID NO: 16551
  Cyclic GFR-binding peptide
  MOD_RES (2)..(4): Xaa is C or S

SEQ ID NO: 55579 - protein, 39 aa, Artificial Sequence; identical to SEQ ID NO: 34502
  Cyclic GFR-binding peptide
  MOD_RES (1)..(33)..(34): Xaa is C or S

SEQ ID NO: 55580 - protein, 33 aa, Artificial Sequence; identical to SEQ ID NO: 13882
  Cyclic GFR-binding peptide
  MOD_RES (2)..(4): Xaa is C or S

SEQ ID NO: 55581 - protein, 30 aa, Artificial Sequence; identical to SEQ ID NO: 31583
  Cyclic GFR-binding peptide
  MOD_RES (27)..(27): Xaa is C or S

SEQ ID NO: 55582 - protein, 21 aa, Artificial Sequence
  Cyclic GFR-binding peptide
EYQKYVVNNASDIYLISIPSL

SEQ ID NO: 55583 - protein, 25 aa, Artificial Sequence
  Cyclic GFR-binding peptide
MEEYQKYVVKDYEDIYLMSIPSLET

SEQ ID NO: 55584 - protein, 33 aa, Artificial Sequence
  Cyclic GFR-binding peptide
  MOD_RES (2)..(33): Xaa is C or S
GXEEVIMEYQKYLLVRGNDIYLMSIPSTKVPAX

SEQ ID NO: 55585 - protein, 34 aa, Artificial Sequence; identical to SEQ ID NO: 31591
  Cyclic GFR-binding peptide
  MOD_RES (32)..(32): Xaa is C or S

SEQ ID NO: 55586 - protein, 30 aa, Artificial Sequence; identical to SEQ ID NO: 34521
  Cyclic GFR-binding peptide
  MOD_RES (2)..(2): Xaa is C or S

SEQ ID NO: 55587 - protein, 35 aa, Artificial Sequence; identical to SEQ ID NO: 34523
  Cyclic GFR-binding peptide
  MOD_RES (1)..(3): Xaa is C or S

SEQ ID NO: 55588 - protein, 32 aa, Artificial Sequence; identical to SEQ ID NO: 34524
  Cyclic GFR-binding peptide
  MOD_RES (2)..(2): Xaa is C or S

SEQ ID NO: 55589 - protein, 35 aa, Artificial Sequence; identical to SEQ ID NO: 31599
  Cyclic GFR-binding peptide
  MOD_RES (31)..(32): Xaa is C or S

SEQ ID NO: 55590 - protein, 26 aa, Artificial Sequence
  Cyclic GFR-binding peptide
SRVVMNEYQKYIVNSSDDIYLVSIPS

SEQ ID NO: 55591 - protein, 27 aa, Artificial Sequence
  Cyclic GFR-binding peptide
MEEYQKYVVKDYEDIYLMSIPSLETPV

SEQ ID NO: 55592 - protein, 39 aa, Artificial Sequence; identical to SEQ ID NO: 34530
  Cyclic GFR-binding peptide
  MOD_RES (1)..(33)..(34): Xaa is C or S

SEQ ID NO: 55593 - protein, 36 aa, Artificial Sequence; identical to SEQ ID NO: 34531
  Cyclic GFR-binding peptide
  MOD_RES (2)..(34)..(35): Xaa is C or S

SEQ ID NO: 55594 - protein, 29 aa, Artificial Sequence
  Cyclic GFR-binding peptide
  MOD_RES (29)..(29): Xaa is C or S
MGEEYQKYTPVGMDDIYLVSIPSLKTPVX

SEQ ID NO: 55595 - protein, 38 aa, Artificial Sequence
  Cyclic GFR-binding peptide
  MOD_RES (32)..(33): Xaa is C or S
RDVVMGEYQKYIIQQKDNIYLMSIPSMKTPTXXPGASG

SEQ ID NO: 55596 - protein, 26 aa, Artificial Sequence
  Cyclic GFR-binding peptide
ARVVMNEYQKYIVNSSDDIYLVSIPS

SEQ ID NO: 55597 - protein, 30 aa, Artificial Sequence
  Cyclic GFR-binding peptide
  MOD_RES (26)..(27): Xaa is C or S
EYQKYVVNNASDIYLISIPSLRTPVXXTPP

SEQ ID NO: 55598 - protein, 34 aa, Artificial Sequence; identical to SEQ ID NO: 16571
  Cyclic GFR-binding peptide
  MOD_RES (2)..(4): Xaa is C or S

SEQ ID NO: 55599 - protein, 32 aa, Artificial Sequence; identical to SEQ ID NO: 34541
  Cyclic GFR-binding peptide
  MOD_RES (30)..(31): Xaa is C or S

SEQ ID NO: 55600 - protein, 29 aa, Artificial Sequence
  Cyclic GFR-binding peptide
  MOD_RES (27)..(28): Xaa is C or S
DEYQKYVVKENEDIYLMSIPSLETPVXXA

SEQ ID NO: 55601 - protein, 20 aa, Artificial Sequence
  Cyclic GFR-binding peptide
EYQKYVVNNASDIYLISIPS

SEQ ID NO: 55602 - protein, 31 aa, Artificial Sequence; identical to SEQ ID NO: 34542
  Cyclic GFR-binding peptide
  MOD_RES (2)..(4): Xaa is C or S

SEQ ID NO: 55603 - protein, 34 aa, Artificial Sequence; identical to SEQ ID NO: 34544
  Cyclic GFR-binding peptide
  MOD_RES (30)..(31): Xaa is C or S

SEQ ID NO: 55604 - protein, 30 aa, Artificial Sequence; identical to SEQ ID NO: 34545
  Cyclic GFR-binding peptide
  MOD_RES (1)..(1): Xaa is C or S

SEQ ID NO: 55605 - protein, 26 aa, Artificial Sequence
  Cyclic GFR-binding peptide
  MOD_RES (26)..(26): Xaa is C or S
EYQKYIIQQKDNIYLMSIPSMKTPTX

SEQ ID NO: 55606 - protein, 27 aa, Artificial Sequence
  Cyclic GFR-binding peptide
DVVMGEYQKYIIQQKDNIYLMSIPSMK

SEQ ID NO: 55607 - protein, 32 aa, Artificial Sequence; identical to SEQ ID NO: 34558
  Cyclic GFR-binding peptide
  MOD_RES (32)..(32): Xaa is C or S

SEQ ID NO: 55608 - protein, 41 aa, Artificial Sequence
  Cyclic GFR-binding peptide
  MOD_RES (1)..(3)..(35)..(36): Xaa is C or S
XGXSEVVMDEYQKYVVNNASDIYLISIPSLRTPVXXTPPTS

SEQ ID NO: 55609 - protein, 35 aa, Artificial Sequence; identical to SEQ ID NO: 34564
  Cyclic GFR-binding peptide
  MOD_RES (1)..(3)..(35): Xaa is C or S

SEQ ID NO: 55610 - protein, 37 aa, Artificial Sequence; identical to SEQ ID NO: 31638
  Cyclic GFR-binding peptide
  MOD_RES (1)..(34)..(35): Xaa is C or S

SEQ ID NO: 55611 - protein, 38 aa, Artificial Sequence
  Cyclic GFR-binding peptide
  MOD_RES (2)..(4)..(36)..(37): Xaa is C or S
SXGXRDVVMGEYQKYIIQQKDNIYLMSIPSMKTPTXXP

SEQ ID NO: 55612 - protein, 28 aa, Artificial Sequence
  Cyclic GFR-binding peptide
MGEEYQKYTPVGMDDIYLVSIPSLKTPV

SEQ ID NO: 55613 - protein, 26 aa, Artificial Sequence
  Cyclic GFR-binding peptide
GEEYQKYTPVGMDDIYLVSIPSLKTP

SEQ ID NO: 55614 - protein, 21 aa, Artificial Sequence
  Cyclic GFR-binding peptide
EYQKYIVNSSDDIYLVSIPSL

SEQ ID NO: 55615 - protein, 21 aa, Artificial Sequence
  Cyclic GFR-binding peptide
EYQKYTPVGMDDIYLVSIPSL

SEQ ID NO: 55616 - protein, 35 aa, Artificial Sequence
  Cyclic GFR-binding peptide
  MOD_RES (31)..(32): Xaa is C or S
EVVMDEYQKYVVNNASDIYLISIPSLRTPVXXTPP

SEQ ID NO: 55617 - protein, 35 aa, Artificial Sequence; identical to SEQ ID NO: 31645
  Cyclic GFR-binding peptide
  MOD_RES (2)..(34)..(35): Xaa is C or S

SEQ ID NO: 55618 - protein, 29 aa, Artificial Sequence
  Cyclic GFR-binding peptide
  MOD_RES (28)..(29): Xaa is C or S
MNEYQKYIVNSSDDIYLVSIPSLKTPAXX

SEQ ID NO: 55619 - protein, 33 aa, Artificial Sequence; identical to SEQ ID NO: 31650
  Cyclic GFR-binding peptide
  MOD_RES (2)..(4): Xaa is C or S

SEQ ID NO: 55620 - protein, 27 aa, Artificial Sequence
  Cyclic GFR-binding peptide
SEVVMDEYQKYVVNNASDIYLISIPSL

SEQ ID NO: 55621 - protein, 34 aa, Artificial Sequence
  Cyclic GFR-binding peptide
  MOD_RES (2)..(33)..(34): Xaa is C or S
GXEEVIMEYQKYLLVRGNDIYLMSIPSTKVPAXX

SEQ ID NO: 55622 - protein, 37 aa, Artificial Sequence; identical to SEQ ID NO: 31657
  Cyclic GFR-binding peptide
  MOD_RES (2)..(4)..(36)..(37): Xaa is C or S

SEQ ID NO: 55623 - protein, 23 aa, Artificial Sequence
  Cyclic GFR-binding peptide
EYQKYLLVRGNDIYLMSIPSTKV

SEQ ID NO: 55624 - protein, 35 aa, Artificial Sequence; identical to SEQ ID NO: 34580
  Cyclic GFR-binding peptide
  MOD_RES (2)..(4): Xaa is C or S

SEQ ID NO: 55625 - protein, 31 aa, Artificial Sequence; identical to SEQ ID NO: 31661
  Cyclic GFR-binding peptide
  MOD_RES (30)..(31): Xaa is C or S

SEQ ID NO: 55626 - protein, 29 aa, Artificial Sequence
  Cyclic GFR-binding peptide
  MOD_RES (26)..(26): Xaa is C or S
EYQKYIVNSSDDIYLVSIPSLKTPAXTPK

SEQ ID NO: 55627 - protein, 24 aa, Artificial Sequence
  Cyclic GFR-binding peptide
EYQKYIVNNSSDIYLVSIPSLKTP

SEQ ID NO: 55628 - protein, 31 aa, Artificial Sequence; identical to SEQ ID NO: 31674
  Cyclic GFR-binding peptide
  MOD_RES (2)..(4): Xaa is C or S

SEQ ID NO: 55629 - protein, 32 aa, Artificial Sequence; identical to SEQ ID NO: 31677
  Cyclic GFR-binding peptide
  MOD_RES (27)..(28): Xaa is C or S

SEQ ID NO: 55630 - protein, 26 aa, Artificial Sequence
  Cyclic GFR-binding peptide
EEYQKYTPVGMDDIYLVSIPSLKTPV

SEQ ID NO: 55631 - protein, 28 aa, Artificial Sequence
  Cyclic GFR-binding peptide
  MOD_RES (2)..(2): Xaa is C or S
GXAKVVMNEYQKYIVNNSSDIYLVSIPS

SEQ ID NO: 55632 - protein, 42 aa, Artificial Sequence; identical to SEQ ID NO: 31683
  Cyclic GFR-binding peptide
  MOD_RES (2)..(4)..(36)..(37): Xaa is C or S

SEQ ID NO: 55633 - protein, 34 aa, Artificial Sequence
  Cyclic GFR-binding peptide
  MOD_RES (32)..(33): Xaa is C or S
SEVVMDEYQKYVVNNASDIYLISIPSLRTPVXXT

SEQ ID NO: 55634 - protein, 26 aa, Artificial Sequence
  Cyclic GFR-binding peptide
RVVMNEYQKYIVNSSDDIYLVSIPSL

SEQ ID NO: 55635 - protein, 31 aa, Artificial Sequence
  Cyclic GFR-binding peptide
  MOD_RES (26)..(27): Xaa is C or S
EYQKYLLVRGNDIYLMSIPSTKVPAXXTSPV

SEQ ID NO: 55636 - protein, 29 aa, Artificial Sequence
  Cyclic GFR-binding peptide
  MOD_RES (1)..(1): Xaa is C or S
XSRVVMNEYQKYIVNSSDDIYLVSIPSLK

SEQ ID NO: 55637 - protein, 39 aa, Artificial Sequence; identical to SEQ ID NO: 34609
  Cyclic GFR-binding peptide
  MOD_RES (2)..(4)..(36): Xaa is C or S

SEQ ID NO: 55638 - protein, 28 aa, Artificial Sequence
  Cyclic GFR-binding peptide
VVMNEYQKYIVNNSSDIYLVSIPSLKTP

SEQ ID NO: 55639 - protein, 31 aa, Artificial Sequence; identical to SEQ ID NO: 16660
  Cyclic GFR-binding peptide
  MOD_RES (2)..(4): Xaa is C or S

SEQ ID NO: 55640 - protein, 31 aa, Artificial Sequence
  Cyclic GFR-binding peptide
  MOD_RES (27)..(28): Xaa is C or S
GEYQKYIIQQKDNIYLMSIPSMKTPTXXPGA

SEQ ID NO: 55641 - protein, 29 aa, Artificial Sequence
  Cyclic GFR-binding peptide
  MOD_RES (26)..(27): Xaa is C or S
EYQKYIVNSSDDIYLVSIPSLQTPAXXPK

SEQ ID NO: 55642 - protein, 30 aa, Artificial Sequence; identical to SEQ ID NO: 31707
  Cyclic GFR-binding peptide
  MOD_RES (2)..(4): Xaa is C or S

SEQ ID NO: 55643 - protein, 29 aa, Artificial Sequence
  Cyclic GFR-binding peptide
  MOD_RES (1)..(3): Xaa is C or S
XGXSRVVMNEYQKYIVNSSDDIYLVSIPS

SEQ ID NO: 55644 - protein, 32 aa, Artificial Sequence; identical to SEQ ID NO: 16678
  Cyclic GFR-binding peptide
  MOD_RES (2)..(4): Xaa is C or S

SEQ ID NO: 55645 - protein, 36 aa, Artificial Sequence; identical to SEQ ID NO: 31715
  Cyclic GFR-binding peptide
  MOD_RES (1)..(33)..(34): Xaa is C or S

SEQ ID NO: 55646 - protein, 42 aa, Artificial Sequence
  Cyclic GFR-binding peptide
  MOD_RES (2)..(4)..(36)..(37): Xaa is C or S
HXGXSRVVMNEYQKYIVNSSDDIYLVSIPSLKTPAXXPKPVH

SEQ ID NO: 55647 - protein, 34 aa, Artificial Sequence; identical to SEQ ID NO: 34640
  Cyclic GFR-binding peptide
  MOD_RES (29)..(30): Xaa is C or S

SEQ ID NO: 55648 - protein, 34 aa, Artificial Sequence
  Cyclic GFR-binding peptide
  MOD_RES (1)..(33)..(34): Xaa is C or S
XRDVVMGEYQKYIIQQKDNIYLMSIPSMKTPTXX

SEQ ID NO: 55649 - protein, 33 aa, Artificial Sequence; identical to SEQ ID NO: 31722
  Cyclic GFR-binding peptide
  MOD_RES (1)..(3): Xaa is C or S

SEQ ID NO: 55650 - protein, 39 aa, Artificial Sequence; identical to SEQ ID NO: 34644
  Cyclic GFR-binding peptide
  MOD_RES (2)..(35)..(36): Xaa is C or S

SEQ ID NO: 55651 - protein, 31 aa, Artificial Sequence
  Cyclic GFR-binding peptide
  MOD_RES (1)..(3): Xaa is C or S
XGXRDVVMGEYQKYIIQQKDNIYLMSIPSMK

SEQ ID NO: 55652 - protein, 28 aa, Artificial Sequence
  Cyclic GFR-binding peptide
EVVMEEYQKYVVKDYEDIYLMSIPSLET

SEQ ID NO: 55653 - protein, 32 aa, Artificial Sequence
  Cyclic GFR-binding peptide
  MOD_RES (29)..(30): Xaa is C or S
VMGEYQKYIIQQKDNIYLMSIPSMKTPTXXPG

SEQ ID NO: 55654 - protein, 31 aa, Artificial Sequence; identical to SEQ ID NO: 31732
  Cyclic GFR-binding peptide
  MOD_RES (2)..(2): Xaa is C or S

SEQ ID NO: 55655 - protein, 29 aa, Artificial Sequence
  Cyclic GFR-binding peptide
EVIMEYQKYLLVRGNDIYLMSIPSTKVPA

SEQ ID NO: 55656 - protein, 34 aa, Artificial Sequence; identical to SEQ ID NO: 34652
  Cyclic GFR-binding peptide
  MOD_RES (30)..(31): Xaa is C or S

SEQ ID NO: 55657 - protein, 38 aa, Artificial Sequence; identical to SEQ ID NO: 34655
  Cyclic GFR-binding peptide
  MOD_RES (2)..(4)..(36)..(37): Xaa is C or S

SEQ ID NO: 55658 - protein, 38 aa, Artificial Sequence; identical to SEQ ID NO: 34657
  Cyclic GFR-binding peptide
  MOD_RES (1)..(3)..(35)..(36): Xaa is C or S

SEQ ID NO: 55659 - protein, 26 aa, Artificial Sequence
  Cyclic GFR-binding peptide
EVVMDEYQKYVVKENEDIYLMSIPSL

SEQ ID NO: 55660 - protein, 32 aa, Artificial Sequence; identical to SEQ ID NO: 31738
  Cyclic GFR-binding peptide
  MOD_RES (1)..(3): Xaa is C or S

SEQ ID NO: 55661 - protein, 34 aa, Artificial Sequence; identical to SEQ ID NO: 34664
  Cyclic GFR-binding peptide
  MOD_RES (29)..(30): Xaa is C or S

SEQ ID NO: 55662 - protein, 34 aa, Artificial Sequence; identical to SEQ ID NO: 31739
  Cyclic GFR-binding peptide
  MOD_RES (1)..(3): Xaa is C or S

SEQ ID NO: 55663 - protein, 28 aa, Artificial Sequence
  Cyclic GFR-binding peptide
SEVVMDEYQKYVVNNASDIYLISIPSLR

SEQ ID NO: 55664 - protein, 30 aa, Artificial Sequence; identical to SEQ ID NO: 31740
  Cyclic GFR-binding peptide
  MOD_RES (28)..(29): Xaa is C or S

SEQ ID NO: 55665 - protein, 37 aa, Artificial Sequence; identical to SEQ ID NO: 34668
  Cyclic GFR-binding peptide
  MOD_RES (2)..(4)..(36)..(37): Xaa is C or S

SEQ ID NO: 55666 - protein, 38 aa, Artificial Sequence; identical to SEQ ID NO: 34669
  Cyclic GFR-binding peptide
  MOD_RES (2)..(4)..(37)..(38): Xaa is C or S

SEQ ID NO: 55667 - protein, 36 aa, Artificial Sequence; identical to SEQ ID NO: 34671
  Cyclic GFR-binding peptide
  MOD_RES (32)..(33): Xaa is C or S

SEQ ID NO: 55668 - protein, 40 aa, Artificial Sequence; identical to SEQ ID NO: 31750
  Cyclic GFR-binding peptide
  MOD_RES (2)..(4)..(36)..(37): Xaa is C or S

SEQ ID NO: 55669 - protein, 26 aa, Artificial Sequence
  Cyclic GFR-binding peptide
MNEYQKYIVNSSDDIYLVSIPSLQTP

SEQ ID NO: 55670 - protein, 34 aa, Artificial Sequence; identical to SEQ ID NO: 34676
  Cyclic GFR-binding peptide
  MOD_RES (31)..(32): Xaa is C or S

SEQ ID NO: 55671 - protein, 30 aa, Artificial Sequence; identical to SEQ ID NO: 34677
  Cyclic GFR-binding peptide

SEQ ID NO: 55672 - protein, 37 aa, Artificial Sequence; identical to SEQ ID NO: 31757
  Cyclic GFR-binding peptide
  MOD_RES (2)..(34)..(35): Xaa is C or S

SEQ ID NO: 55673 - protein, 24 aa, Artificial Sequence
  Cyclic GFR-binding peptide
DEYQKYVVNNASDIYLISIPSLRT

SEQ ID NO: 55674 - protein, 39 aa, Artificial Sequence; identical to SEQ ID NO: 31761
  Cyclic GFR-binding peptide
  MOD_RES (2)..(34): Xaa is C or S

SEQ ID NO: 55675 - protein, 38 aa, Artificial Sequence; identical to SEQ ID NO: 34690
  Cyclic GFR-binding peptide
  MOD_RES (2)..(34): Xaa is C or S

SEQ ID NO: 55676 - protein, 28 aa, Artificial Sequence
  Cyclic GFR-binding peptide
DVVMGEYQKYIIQQKDNIYLMSIPSMKT

SEQ ID NO: 55677 - protein, 27 aa, Artificial Sequence
  Cyclic GFR-binding peptide
AVSMGEEYQKYTPVGMDDIYLVSIPSL

SEQ ID NO: 55678 - protein, 33 aa, Artificial Sequence; identical to SEQ ID NO: 34698
  Cyclic GFR-binding peptide
  MOD_RES (1)..(3): Xaa is C or S

SEQ ID NO: 55679 - protein, 24 aa, Artificial Sequence
  Cyclic GFR-binding peptide
MGEEYQKYTPVGMDDIYLVSIPSL

SEQ ID NO: 55680 - protein, 27 aa, Artificial Sequence
  Cyclic GFR-binding peptide
  MOD_RES (26)..(27): Xaa is C or S
EYQKYYTVVGKDIYLISIPSLKTPVXX

SEQ ID NO: 55681 - protein, 32 aa, Artificial Sequence; identical to SEQ ID NO: 16727
  Cyclic GFR-binding peptide
  MOD_RES (2)..(4): Xaa is C or S

SEQ ID NO: 55682 - protein, 29 aa, Artificial Sequence
  Cyclic GFR-binding peptide
  MOD_RES (2)..(2): Xaa is C or S
GXESVAMGEYQKYYTVVGKDIYLISIPSL

SEQ ID NO: 55683 - protein, 22 aa, Artificial Sequence
  Cyclic GFR-binding peptide
MDEYQKYVVKENEDIYLMSIPS

SEQ ID NO: 55684 - protein, 30 aa, Artificial Sequence; identical to SEQ ID NO: 19091
  Cyclic GFR-binding peptide
  MOD_RES (27)..(29): Xaa is C or S

SEQ ID NO: 55685 - protein, 35 aa, Artificial Sequence; identical to SEQ ID NO: 34720
  Cyclic GFR-binding peptide
  MOD_RES (2)..(3)..(35): Xaa is C or S

SEQ ID NO: 55686 - protein, 24 aa, Artificial Sequence
  Cyclic GFR-binding peptide
PVKTSPISMLYIDNGRVLLYKQYE

SEQ ID NO: 55687 - protein, 24 aa, Artificial Sequence
  Cyclic GFR-binding peptide
SPISILYIDKGVVTYYKQYEGMAV

SEQ ID NO: 55688 - protein, 35 aa, Artificial Sequence
  Cyclic GFR-binding peptide
  MOD_RES (4)..(5): Xaa is C or S
PSTXXAPVKTSPISMLYIDNGRVLLYKQYEMIVEE

SEQ ID NO: 55689 - protein, 25 aa, Artificial Sequence
  Cyclic GFR-binding peptide
LSPISILYIDSANNVVYKQYEDMVV

SEQ ID NO: 55690 - protein, 35 aa, Artificial Sequence; identical to SEQ ID NO: 37528
  Cyclic GFR-binding peptide
  MOD_RES (4)..(5): Xaa is C or S

SEQ ID NO: 55691 - protein, 30 aa, Artificial Sequence; identical to SEQ ID NO: 37530
  Cyclic GFR-binding peptide
  MOD_RES (4)..(5): Xaa is C or S

SEQ ID NO: 55692 - protein, 25 aa, Artificial Sequence
  Cyclic GFR-binding peptide
LSPISVLYIDSSNNVIYKQYENMVV

SEQ ID NO: 55693 - protein, 32 aa, Artificial Sequence; identical to SEQ ID NO: 34731
  Cyclic GFR-binding peptide
  MOD_RES (1)..(2): Xaa is C or S

SEQ ID NO: 55694 - protein, 27 aa, Artificial Sequence
  Cyclic GFR-binding peptide
  MOD_RES (26)..(26): Xaa is C or S
SPISMLYIDNGRVLLYKQYEMIVEEXG

SEQ ID NO: 55695 - protein, 29 aa, Artificial Sequence
  Cyclic GFR-binding peptide
KLSPISVLYIDDMGVPTYKQYEEGMSVAE

SEQ ID NO: 55696 - protein, 32 aa, Artificial Sequence
  Cyclic GFR-binding peptide
  MOD_RES (31)..(31): Xaa is C or S
APVKTSPISMLYIDNGRVLLYKQYEMIVEEXG

SEQ ID NO: 55697 - protein, 30 aa, Artificial Sequence
  Cyclic GFR-binding peptide
  MOD_RES (3)..(4): Xaa is C or S
STXXAPVKTSPISMLYIDNGRVLLYKQYEM

SEQ ID NO: 55698 - protein, 25 aa, Artificial Sequence
  Cyclic GFR-binding peptide
SPISMLYIDEYDKVVYKQYEEMVVE

SEQ ID NO: 55699 - protein, 31 aa, Artificial Sequence; identical to SEQ ID NO: 34739
  Cyclic GFR-binding peptide
  MOD_RES (31)..(31): Xaa is C or S

SEQ ID NO: 55700 - protein, 22 aa, Artificial Sequence
  Cyclic GFR-binding peptide
KLSPISVLYIDDSSNVIYKQYE

SEQ ID NO: 55701 - protein, 32 aa, Artificial Sequence; identical to SEQ ID NO: 37549
  Cyclic GFR-binding peptide
  MOD_RES (2)..(3): Xaa is C or S

SEQ ID NO: 55702 - protein, 21 aa, Artificial Sequence
  Cyclic GFR-binding peptide
MSPISMLYINDKQQIIYKQYE

SEQ ID NO: 55703 - protein, 32 aa, Artificial Sequence
  Cyclic GFR-binding peptide
  MOD_RES (1)..(32): Xaa is C or S
XAPVKTSPISMLYIDNGRVLLYKQYEMIVEEX

SEQ ID NO: 55704 - protein, 29 aa, Artificial Sequence
  Cyclic GFR-binding peptide
  MOD_RES (2)..(2): Xaa is C or S
TXAPTKLSPISVLYIDDSSNVIYKQYENM

SEQ ID NO: 55705 - protein, 22 aa, Artificial Sequence
  Cyclic GFR-binding peptide
KLSPISVLYIDDMGVPTYKQYE

SEQ ID NO: 55706 - protein, 31 aa, Artificial Sequence; identical to SEQ ID NO: 34749
  Cyclic GFR-binding peptide
  MOD_RES (29)..(31): Xaa is C or S

SEQ ID NO: 55707 - protein, 36 aa, Artificial Sequence; identical to SEQ ID NO: 34751
  Cyclic GFR-binding peptide
  MOD_RES (5)..(6): Xaa is C or S

SEQ ID NO: 55708 - protein, 31 aa, Artificial Sequence; identical to SEQ ID NO: 37557
  Cyclic GFR-binding peptide
  MOD_RES (30)..(30): Xaa is C or S

SEQ ID NO: 55709 - protein, 30 aa, Artificial Sequence; identical to SEQ ID NO: 37562
  Cyclic GFR-binding peptide
  MOD_RES (28)..(30): Xaa is C or S

SEQ ID NO: 55710 - protein, 28 aa, Artificial Sequence
  Cyclic GFR-binding peptide
  MOD_RES (27)..(27): Xaa is C or S
SPISILYIDSANNVVYKQYEDMVVESXG

SEQ ID NO: 55711 - protein, 31 aa, Artificial Sequence
  Cyclic GFR-binding peptide
  MOD_RES (2)..(3): Xaa is C or S
TXXVPTRLSPISILYIDSANNVVYKQYEDMV

SEQ ID NO: 55712 - protein, 38 aa, Artificial Sequence; identical to SEQ ID NO: 37567
  Cyclic GFR-binding peptide
  MOD_RES (7)..(7): Xaa is C or S

SEQ ID NO: 55713 - protein, 27 aa, Artificial Sequence
  Cyclic GFR-binding peptide
RLSPISILYIDSANNVVYKQYEDMVVE

SEQ ID NO: 55714 - protein, 33 aa, Artificial Sequence; identical to SEQ ID NO: 16780
  Cyclic GFR-binding peptide
  MOD_RES (30)..(32): Xaa is C or S

SEQ ID NO: 55715 - protein, 21 aa, Artificial Sequence
  Cyclic GFR-binding peptide
LSPISMLYIDENEKVVYKQYE

SEQ ID NO: 55716 - protein, 26 aa, Artificial Sequence
  Cyclic GFR-binding peptide
  MOD_RES (1)..(1): Xaa is C or S
XAPTKLSPISVLYIDDSSNVIYKQYE

SEQ ID NO: 55717 - protein, 33 aa, Artificial Sequence
  Cyclic GFR-binding peptide
  MOD_RES (1)..(33): Xaa is C or S
XTPTKMSPISMLYINDKQQIIYKQYEGMVVDRX

SEQ ID NO: 55718 - protein, 24 aa, Artificial Sequence
  Cyclic GFR-binding peptide
PTRLSPISILYIDSANNVVYKQYE

SEQ ID NO: 55719 - protein, 34 aa, Artificial Sequence; identical to SEQ ID NO: 34768
  Cyclic GFR-binding peptide
  MOD_RES (1)..(33): Xaa is C or S

SEQ ID NO: 55720 - protein, 29 aa, Artificial Sequence
  Cyclic GFR-binding peptide
  MOD_RES (26)..(28): Xaa is C or S
SPISMLYIDNGRVLLYKQYEMIVEEXGXL

SEQ ID NO: 55721 - protein, 32 aa, Artificial Sequence; identical to SEQ ID NO: 37583
  Cyclic GFR-binding peptide
  MOD_RES (4)..(4): Xaa is C or S

SEQ ID NO: 55722 - protein, 38 aa, Artificial Sequence; identical to SEQ ID NO: 34778
  Cyclic GFR-binding peptide
  MOD_RES (3)..(35)..(37): Xaa is C or S

SEQ ID NO: 55723 - protein, 41 aa, Artificial Sequence; identical to SEQ ID NO: 34781
  Cyclic GFR-binding peptide
  MOD_RES (6)..(7)..(39)..(41): Xaa is C or S

SEQ ID NO: 55724 - protein, 24 aa, Artificial Sequence
  Cyclic GFR-binding peptide
ELSPISMLYIDENEKVVYKQYEDM

SEQ ID NO: 55725 - protein, 34 aa, Artificial Sequence; identical to SEQ ID NO: 37588
  Cyclic GFR-binding peptide
  MOD_RES (31)..(33): Xaa is C or S

SEQ ID NO: 55726 - protein, 31 aa, Artificial Sequence; identical to SEQ ID NO: 37589
  Cyclic GFR-binding peptide
  MOD_RES (30)..(30): Xaa is C or S

SEQ ID NO: 55727 - protein, 33 aa, Artificial Sequence
  Cyclic GFR-binding peptide
  MOD_RES (1)..(2): Xaa is C or S
XXTPTKMSPISMLYINDKQQIIYKQYEGMVVDR

SEQ ID NO: 55728 - protein, 29 aa, Artificial Sequence
  Cyclic GFR-binding peptide
  MOD_RES (1)..(2): Xaa is C or S
XXAPVKTSPISMLYIDNGRVLLYKQYEMI

SEQ ID NO: 55729 - protein, 22 aa, Artificial Sequence
  Cyclic GFR-binding peptide
SPISMLYIDNGRVLLYKQYEMI

SEQ ID NO: 55730 - protein, 32 aa, Artificial Sequence
  Cyclic GFR-binding peptide
  MOD_RES (3)..(4): Xaa is C or S
PTXXVPTRLSPISILYIDSANNVVYKQYEDMV

SEQ ID NO: 55731 - protein, 22 aa, Artificial Sequence
  Cyclic GFR-binding peptide
TSPISMLYIDNGRVLLYKQYEM

SEQ ID NO: 55732 - protein, 41 aa, Artificial Sequence; identical to SEQ ID NO: 34796
  Cyclic GFR-binding peptide
  MOD_RES (6)..(7)..(39)..(41): Xaa is C or S

SEQ ID NO: 55733 - protein, 38 aa, Artificial Sequence; identical to SEQ ID NO: 37602
  Cyclic GFR-binding peptide
  MOD_RES (6)..(7): Xaa is C or S

SEQ ID NO: 55734 - protein, 36 aa, Artificial Sequence; identical to SEQ ID NO: 34800
  Cyclic GFR-binding peptide
  MOD_RES (6)..(6): Xaa is C or S

SEQ ID NO: 55735 - protein, 41 aa, Artificial Sequence; identical to SEQ ID NO: 37610
  Cyclic GFR-binding peptide
  MOD_RES (6)..(7)..(39)..(41): Xaa is C or S

SEQ ID NO: 55736 - protein, 33 aa, Artificial Sequence
  Cyclic GFR-binding peptide
  MOD_RES (3)..(4): Xaa is C or S
GPXXTPTKMSPISMLYINDKQQIIYKQYEGMVV

SEQ ID NO: 55737 - protein, 26 aa, Artificial Sequence
  Cyclic GFR-binding peptide
SPISILYIDKGVVTYYKQYEGMAVSE

SEQ ID NO: 55738 - protein, 32 aa, Artificial Sequence; identical to SEQ ID NO: 37612
  Cyclic GFR-binding peptide
  MOD_RES (32)..(32): Xaa is C or S

SEQ ID NO: 55739 - protein, 42 aa, Artificial Sequence; identical to SEQ ID NO: 19186
  Cyclic GFR-binding peptide
  MOD_RES (6)..(7)..(39)..(41): Xaa is C or S

SEQ ID NO: 55740 - protein, 26 aa, Artificial Sequence
  Cyclic GFR-binding peptide
KLSPISVLYIDSSNNVIYKQYENMVV

SEQ ID NO: 55741 - protein, 42 aa, Artificial Sequence; identical to SEQ ID NO: 37615
  Cyclic GFR-binding peptide
  MOD_RES (6)..(7)..(39)..(41): Xaa is C or S

SEQ ID NO: 55742 - protein, 35 aa, Artificial Sequence; identical to SEQ ID NO: 37618
  Cyclic GFR-binding peptide
  MOD_RES (4)..(4): Xaa is C or S

SEQ ID NO: 55743 - protein, 29 aa, Artificial Sequence
  Cyclic GFR-binding peptide
  MOD_RES (29)..(29): Xaa is C or S
KLSPISILYIDKGVVTYYKQYEGMAVSEX

SEQ ID NO: 55744 - protein, 34 aa, Artificial Sequence; identical to SEQ ID NO: 37621
  Cyclic GFR-binding peptide
  MOD_RES (31)..(33): Xaa is C or S

SEQ ID NO: 55745 - protein, 24 aa, Artificial Sequence
  Cyclic GFR-binding peptide
VKTSPISMLYIDNGRVLLYKQYEM

SEQ ID NO: 55746 - protein, 36 aa, Artificial Sequence
  Cyclic GFR-binding peptide
  MOD_RES (3)..(4)..(36): Xaa is C or S
PTXXVPTRLSPISILYIDSANNVVYKQYEDMVVESX

SEQ ID NO: 55747 - protein, 28 aa, Artificial Sequence
  Cyclic GFR-binding peptide
KLSPISILYIDKGVVTYYKQYEGMAVSE

SEQ ID NO: 55748 - protein, 36 aa, Artificial Sequence; identical to SEQ ID NO: 34816
  Cyclic GFR-binding peptide
  MOD_RES (6)..(7): Xaa is C or S

SEQ ID NO: 55749 - protein, 31 aa, Artificial Sequence; identical to SEQ ID NO: 34817
  Cyclic GFR-binding peptide
  MOD_RES (4)..(5): Xaa is C or S

SEQ ID NO: 55750 - protein, 31 aa, Artificial Sequence; identical to SEQ ID NO: 37625
  Cyclic GFR-binding peptide
  MOD_RES (5)..(6): Xaa is C or S

SEQ ID NO: 55751 - protein, 36 aa, Artificial Sequence; identical to SEQ ID NO: 37627
  Cyclic GFR-binding peptide
  MOD_RES (4)..(5): Xaa is C or S

SEQ ID NO: 55752 - protein, 27 aa, Artificial Sequence
  Cyclic GFR-binding peptide
APTQLSPISVLYIDDSSNVIYKQYENM

SEQ ID NO: 55753 - protein, 33 aa, Artificial Sequence; identical to SEQ ID NO: 19197
  Cyclic GFR-binding peptide
  MOD_RES (30)..(32): Xaa is C or S

SEQ ID NO: 55754 - protein, 33 aa, Artificial Sequence; identical to SEQ ID NO: 37635
  Cyclic GFR-binding peptide
  MOD_RES (32)..(32): Xaa is C or S

SEQ ID NO: 55755 - protein, 33 aa, Artificial Sequence; identical to SEQ ID NO: 34831
  Cyclic GFR-binding peptide
  MOD_RES (32)..(32): Xaa is C or S

SEQ ID NO: 55756 - protein, 29 aa, Artificial Sequence
  Cyclic GFR-binding peptide
  MOD_RES (3)..(4): Xaa is C or S
KAXXVPTELSPISMLYIDENEKVVYKQYE

SEQ ID NO: 55757 - protein, 28 aa, Artificial Sequence
  Cyclic GFR-binding peptide
PTELSPISMLYIDEYDKVVYKQYEEMVV

SEQ ID NO: 55758 - protein, 26 aa, Artificial Sequence
  Cyclic GFR-binding peptide
LSPISMLYIDEYDKVVYKQYEEMVVE

SEQ ID NO: 55759 - protein, 34 aa, Artificial Sequence; identical to SEQ ID NO: 37649
  Cyclic GFR-binding peptide
  MOD_RES (6)..(7): Xaa is C or S

SEQ ID NO: 55760 - protein, 33 aa, Artificial Sequence; identical to SEQ ID NO: 37652
  Cyclic GFR-binding peptide
  MOD_RES (4)..(5): Xaa is C or S

SEQ ID NO: 55761 - protein, 24 aa, Artificial Sequence
  Cyclic GFR-binding peptide
KLSPISVLYIDDSSNVIYKQYENM

SEQ ID NO: 55762 - protein, 28 aa, Artificial Sequence
  Cyclic GFR-binding peptide
  MOD_RES (2)..(3): Xaa is C or S
PXXTPTKMSPISMLYINDKQQIIYKQYE

SEQ ID NO: 55763 - protein, 32 aa, Artificial Sequence; identical to SEQ ID NO: 34842
  Cyclic GFR-binding peptide
  MOD_RES (6)..(6): Xaa is C or S

SEQ ID NO: 55764 - protein, 29 aa, Artificial Sequence
  Cyclic GFR-binding peptide
  MOD_RES (28)..(28): Xaa is C or S
LSPISVLYIDSSNNVIYKQYENMVVKAXG

SEQ ID NO: 55765 - protein, 31 aa, Artificial Sequence; identical to SEQ ID NO: 37664
  Cyclic GFR-binding peptide
  MOD_RES (29)..(31): Xaa is C or S

SEQ ID NO: 55766 - protein, 33 aa, Artificial Sequence
  Cyclic GFR-binding peptide
  MOD_RES (3)..(4): Xaa is C or S
STXXAPVKTSPISMLYIDNGRVLLYKQYEMIVE

SEQ ID NO: 55767 - protein, 36 aa, Artificial Sequence
  Cyclic GFR-binding peptide
  MOD_RES (4)..(5)..(36): Xaa is C or S
PSTXXAPVKTSPISMLYIDNGRVLLYKQYEMIVEEX

SEQ ID NO: 55768 - protein, 39 aa, Artificial Sequence; identical to SEQ ID NO: 34850
  Cyclic GFR-binding peptide
  MOD_RES (3)..(4)..(36)..(38): Xaa is C or S

SEQ ID NO: 55769 - protein, 38 aa, Artificial Sequence; identical to SEQ ID NO: 37668
  Cyclic GFR-binding peptide
  MOD_RES (2)..(3)..(35)..(37): Xaa is C or S

SEQ ID NO: 55770 - protein, 21 aa, Artificial Sequence
  Cyclic GFR-binding peptide
SPISVLYIDSSNNVIYKQYEN

SEQ ID NO: 55771 - protein, 29 aa, Artificial Sequence
  Cyclic GFR-binding peptide
  MOD_RES (1)..(2): Xaa is C or S
XXVPTKLSPISILYIDKGVVTYYKQYEGM

SEQ ID NO: 55772 - protein, 27 aa, Artificial Sequence
  Cyclic GFR-binding peptide
TKLSPISVLYIDSSNNVIYKQYENMVV

SEQ ID NO: 55773 - protein, 41 aa, Artificial Sequence
  Cyclic GFR-binding peptide
  MOD_RES (5)..(6)..(38)..(40): Xaa is C or S
SAGPXXTPTKMSPISMLYINDKQQIIYKQYEGMVVDRXGXS

SEQ ID NO: 55774 - protein, 40 aa, Artificial Sequence; identical to SEQ ID NO: 37676
  Cyclic GFR-binding peptide
  MOD_RES (6)..(7)..(40): Xaa is C or S

SEQ ID NO: 55775 - protein, 23 aa, Artificial Sequence
  Cyclic GFR-binding peptide
TSPISMLYIDNGRVLLYKQYEMI

SEQ ID NO: 55776 - protein, 34 aa, Artificial Sequence; identical to SEQ ID NO: 37677
  Cyclic GFR-binding peptide
  MOD_RES (5)..(5): Xaa is C or S

SEQ ID NO: 55777 - protein, 32 aa, Artificial Sequence; identical to SEQ ID NO: 37682
  Cyclic GFR-binding peptide
  MOD_RES (5)..(6): Xaa is C or S

SEQ ID NO: 55778 - protein, 34 aa, Artificial Sequence; identical to SEQ ID NO: 34859
  Cyclic GFR-binding peptide
  MOD_RES (32)..(34): Xaa is C or S

SEQ ID NO: 55779 - protein, 32 aa, Artificial Sequence; identical to SEQ ID NO: 34860
  Cyclic GFR-binding peptide
  MOD_RES (3)..(4): Xaa is C or S

SEQ ID NO: 55780 - protein, 37 aa, Artificial Sequence; identical to SEQ ID NO: 37687
  Cyclic GFR-binding peptide
  MOD_RES (6)..(7): Xaa is C or S

SEQ ID NO: 55781 - protein, 36 aa, Artificial Sequence; identical to SEQ ID NO: 34861
  Cyclic GFR-binding peptide
  MOD_RES (2)..(3)..(35): Xaa is C or S

SEQ ID NO: 55782 - protein, 36 aa, Artificial Sequence; identical to SEQ ID NO: 37688
  Cyclic GFR-binding peptide
  MOD_RES (6)..(7): Xaa is C or S

SEQ ID NO: 55783 - protein, 35 aa, Artificial Sequence
  Cyclic GFR-binding peptide
  MOD_RES (5)..(6): Xaa is C or S
SAGPXXTPTKMSPISMLYINDKQQIIYKQYEGMVV

SEQ ID NO: 55784 - protein, 35 aa, Artificial Sequence; identical to SEQ ID NO: 34871
  Cyclic GFR-binding peptide
  MOD_RES (6)..(7): Xaa is C or S

SEQ ID NO: 55785 - protein, 30 aa, Artificial Sequence; identical to SEQ ID NO: 37701
  Cyclic GFR-binding peptide
  MOD_RES (2)..(3): Xaa is C or S

SEQ ID NO: 55786 - protein, 31 aa, Artificial Sequence; identical to SEQ ID NO: 34875
  Cyclic GFR-binding peptide

SEQ ID NO: 55787 - protein, 30 aa, Artificial Sequence; identical to SEQ ID NO: 34881
  Cyclic GFR-binding peptide
  MOD_RES (2)..(3): Xaa is C or S

SEQ ID NO: 55788 - protein, 34 aa, Artificial Sequence; identical to SEQ ID NO: 34882
  Cyclic GFR-binding peptide
  MOD_RES (3)..(4): Xaa is C or S

SEQ ID NO: 55789 - protein, 32 aa, Artificial Sequence; identical to SEQ ID NO: 34883
  Cyclic GFR-binding peptide
  MOD_RES (4)..(5): Xaa is C or S

SEQ ID NO: 55790 - protein, 25 aa, Artificial Sequence
  Cyclic GFR-binding peptide
PTQLSPISVLYIDDSSNVIYKQYEN

SEQ ID NO: 55791 - protein, 33 aa, Artificial Sequence
  Cyclic GFR-binding peptide
  MOD_RES (6)..(7): Xaa is C or S
RVPSTXXAPVKTSPISMLYIDNGRVLLYKQYEM

SEQ ID NO: 55792 - protein, 27 aa, Artificial Sequence
  Cyclic GFR-binding peptide
  MOD_RES (1)..(1): Xaa is C or S
XAPTQLSPISVLYIDDSSNVIYKQYEN

SEQ ID NO: 55793 - protein, 29 aa, Artificial Sequence
  Cyclic GFR-binding peptide
TKLSPISVLYIDSSNNVIYKQYENMVVKA

SEQ ID NO: 55794 - protein, 30 aa, Artificial Sequence; identical to SEQ ID NO: 37716
  Cyclic GFR-binding peptide
  MOD_RES (1)..(1): Xaa is C or S

SEQ ID NO: 55795 - protein, 33 aa, Artificial Sequence; identical to SEQ ID NO: 37719
  Cyclic GFR-binding peptide
  MOD_RES (6)..(7): Xaa is C or S

SEQ ID NO: 55796 - protein, 22 aa, Artificial Sequence
  Cyclic GFR-binding peptide
LSPISILYIDKGVVTYYKQYEG

SEQ ID NO: 55797 - protein, 28 aa, Artificial Sequence
  Cyclic GFR-binding peptide
  MOD_RES (28)..(28): Xaa is C or S
MSPISMLYINDKQQIIYKQYEGMVVDRX

SEQ ID NO: 55798 - protein, 33 aa, Artificial Sequence; identical to SEQ ID NO: 34903
  Cyclic GFR-binding peptide
  MOD_RES (5)..(6): Xaa is C or S

SEQ ID NO: 55799 - protein, 29 aa, Artificial Sequence
  Cyclic GFR-binding peptide
  MOD_RES (3)..(4): Xaa is C or S
KPXXAPTKLSPISVLYIDDSSNVIYKQYE

SEQ ID NO: 55800 - protein, 42 aa, Artificial Sequence; identical to SEQ ID NO: 34906
  Cyclic GFR-binding peptide
  MOD_RES (6)..(7)..(39)..(41): Xaa is C or S

SEQ ID NO: 55801 - protein, 38 aa, Artificial Sequence; identical to SEQ ID NO: 34908
  Cyclic GFR-binding peptide
  MOD_RES (3)..(4)..(36)..(38): Xaa is C or S

SEQ ID NO: 55802 - protein, 32 aa, Artificial Sequence; identical to SEQ ID NO: 37728
  Cyclic GFR-binding peptide
  MOD_RES (32)..(32): Xaa is C or S

SEQ ID NO: 55803 - protein, 25 aa, Artificial Sequence
  Cyclic GFR-binding peptide
QLSPISVLYIDDSSNVIYKQYENMV

SEQ ID NO: 55804 - protein, 33 aa, Artificial Sequence; identical to SEQ ID NO: 37732
  Cyclic GFR-binding peptide
  MOD_RES (6)..(7): Xaa is C or S

SEQ ID NO: 55805 - protein, 37 aa, Artificial Sequence; identical to SEQ ID NO: 37733
  Cyclic GFR-binding peptide
  MOD_RES (2)..(3)..(35)..(37): Xaa is C or S

SEQ ID NO: 55806 - protein, 30 aa, Artificial Sequence
  Cyclic GFR-binding peptide
  MOD_RES (2)..(3): Xaa is C or S
PXXTPTKMSPISMLYINDKQQIIYKQYEGM

SEQ ID NO: 55807 - protein, 30 aa, Artificial Sequence
  Cyclic GFR-binding peptide
  MOD_RES (1)..(1): Xaa is C or S
XTPTKMSPISMLYINDKQQIIYKQYEGMVV

SEQ ID NO: 55808 - protein, 41 aa, Artificial Sequence; identical to SEQ ID NO: 16918
  Cyclic GFR-binding peptide
  MOD_RES (6)..(7)..(38)..(40): Xaa is C or S

SEQ ID NO: 55809 - protein, 40 aa, Artificial Sequence; identical to SEQ ID NO: 37736
  Cyclic GFR-binding peptide
  MOD_RES (5)..(6)..(38)..(40): Xaa is C or S

SEQ ID NO: 55810 - protein, 31 aa, Artificial Sequence; identical to SEQ ID NO: 37740
  Cyclic GFR-binding peptide
  MOD_RES (1)..(1): Xaa is C or S

SEQ ID NO: 55811 - protein, 31 aa, Artificial Sequence; identical to SEQ ID NO: 34918
  Cyclic GFR-binding peptide
  MOD_RES (2)..(3): Xaa is C or S

SEQ ID NO: 55812 - protein, 39 aa, Artificial Sequence
  Cyclic GFR-binding peptide
  MOD_RES (5)..(6)..(38): Xaa is C or S
TPPTXXVPTRLSPISILYIDSANNVVYKQYEDMVVESXG

SEQ ID NO: 55813 - protein, 28 aa, Artificial Sequence
  Cyclic GFR-binding peptide
  MOD_RES (1)..(1): Xaa is C or S
XAPVKTSPISMLYIDNGRVLLYKQYEMI

SEQ ID NO: 55814 - protein, 31 aa, Artificial Sequence; identical to SEQ ID NO: 34926
  Cyclic GFR-binding peptide
  MOD_RES (5)..(6): Xaa is C or S

SEQ ID NO: 55815 - protein, 26 aa, Artificial Sequence
  Cyclic GFR-binding peptide
KLSPISVLYIDDSSNVIYKQYENMVV

SEQ ID NO: 55816 - protein, 41 aa, Artificial Sequence; identical to SEQ ID NO: 34929
  Cyclic GFR-binding peptide
  MOD_RES (5)..(6)..(38)..(40): Xaa is C or S

SEQ ID NO: 55817 - protein, 22 aa, Artificial Sequence
  Cyclic GFR-binding peptide
SPISILYIDKGVVTYYKQYEGM

SEQ ID NO: 55818 - protein, 27 aa, Artificial Sequence
  Cyclic GFR-binding peptide
APTKLSPISVLYIDSSNNVIYKQYENM

SEQ ID NO: 55819 - protein, 32 aa, Artificial Sequence
  Cyclic GFR-binding peptide
  MOD_RES (6)..(7): Xaa is C or S
HVPKPXXAPTKLSPISVLYIDDSSNVIYKQYE

SEQ ID NO: 55820 - protein, 23 aa, Artificial Sequence
  Cyclic GFR-binding peptide
SPISMLYIDNGRVLLYKQYEMIV

SEQ ID NO: 55821 - protein, 31 aa, Artificial Sequence; identical to SEQ ID NO: 19276
  Cyclic GFR-binding peptide
  MOD_RES (28)..(30): Xaa is C or S

SEQ ID NO: 55822 - protein, 31 aa, Artificial Sequence; identical to SEQ ID NO: 37760
  Cyclic GFR-binding peptide
  MOD_RES (4)..(5): Xaa is C or S

SEQ ID NO: 55823 - protein, 35 aa, Artificial Sequence
  Cyclic GFR-binding peptide
  MOD_RES (5)..(6): Xaa is C or S
TPPTXXVPTRLSPISILYIDSANNVVYKQYEDMVV

SEQ ID NO: 55824 - protein, 26 aa, Artificial Sequence
  Cyclic GFR-binding peptide
ELSPISMLYIDENEKVVYKQYEDMVV

SEQ ID NO: 55825 - protein, 36 aa, Artificial Sequence; identical to SEQ ID NO: 37768
  Cyclic GFR-binding peptide
  MOD_RES (1)..(2)..(34)..(36): Xaa is C or S

SEQ ID NO: 55826 - protein, 31 aa, Artificial Sequence
  Cyclic GFR-binding peptide
  MOD_RES (1)..(2): Xaa is C or S
XXAPVKTSPISMLYIDNGRVLLYKQYEMIVE

SEQ ID NO: 55827 - protein, 39 aa, Artificial Sequence; identical to SEQ ID NO: 34944
  Cyclic GFR-binding peptide
  MOD_RES (3)..(4)..(37)..(39): Xaa is C or S

SEQ ID NO: 55828 - protein, 30 aa, Artificial Sequence
  Cyclic GFR-binding peptide
TPTKMSPISMLYINDKQQIIYKQYEGMVVD

SEQ ID NO: 55829 - protein, 33 aa, Artificial Sequence; identical to SEQ ID NO: 37776
  Cyclic GFR-binding peptide
  MOD_RES (1)..(33): Xaa is C or S

SEQ ID NO: 55830 - protein, 27 aa, Artificial Sequence
  Cyclic GFR-binding peptide
KLSPISILYIDKGVVTYYKQYEGMAVS

SEQ ID NO: 55831 - protein, 31 aa, Artificial Sequence; identical to SEQ ID NO: 34947
  Cyclic GFR-binding peptide
  MOD_RES (5)..(5): Xaa is C or S

SEQ ID NO: 55832 - protein, 33 aa, Artificial Sequence; identical to SEQ ID NO: 19295
  Cyclic GFR-binding peptide
  MOD_RES (30)..(32): Xaa is C or S

SEQ ID NO: 55833 - protein, 30 aa, Artificial Sequence; identical to SEQ ID NO: 34951
  Cyclic GFR-binding peptide

SEQ ID NO: 55834 - protein, 34 aa, Artificial Sequence; identical to SEQ ID NO: 19299
  Cyclic GFR-binding peptide
  MOD_RES (31)..(33): Xaa is C or S

SEQ ID NO: 55835 - protein, 32 aa, Artificial Sequence
  Cyclic GFR-binding peptide
  MOD_RES (29)..(31): Xaa is C or S
RLSPISILYIDSANNVVYKQYEDMVVESXGXR

SEQ ID NO: 55836 - protein, 35 aa, Artificial Sequence; identical to SEQ ID NO: 34955
  Cyclic GFR-binding peptide
  MOD_RES (2)..(34): Xaa is C or S

SEQ ID NO: 55837 - protein, 41 aa, Artificial Sequence; identical to SEQ ID NO: 19305
  Cyclic GFR-binding peptide
  MOD_RES (6)..(7)..(38)..(40): Xaa is C or S

SEQ ID NO: 55838 - protein, 34 aa, Artificial Sequence; identical to SEQ ID NO: 37791
  Cyclic GFR-binding peptide
  MOD_RES (2)..(3): Xaa is C or S

SEQ ID NO: 55839 - protein, 33 aa, Artificial Sequence; identical to SEQ ID NO: 37795
  Cyclic GFR-binding peptide
  MOD_RES (5)..(6): Xaa is C or S

SEQ ID NO: 55840 - protein, 40 aa, Artificial Sequence
  Cyclic GFR-binding peptide
  MOD_RES (5)..(6)..(38)..(40): Xaa is C or S
TPPTXXVPTRLSPISILYIDSANNVVYKQYEDMVVESXGX

SEQ ID NO: 55841 - protein, 25 aa, Artificial Sequence
  Cyclic GFR-binding peptide
SPISMLYINDKQQIIYKQYEGMVVD

SEQ ID NO: 55842 - protein, 32 aa, Artificial Sequence; identical to SEQ ID NO: 37809
  Cyclic GFR-binding peptide
  MOD_RES (4)..(5): Xaa is C or S

SEQ ID NO: 55843 - protein, 34 aa, Artificial Sequence; identical to SEQ ID NO: 37811
  Cyclic GFR-binding peptide
  MOD_RES (1)..(2)..(34): Xaa is C or S

SEQ ID NO: 55844 - protein, 31 aa, Artificial Sequence; identical to SEQ ID NO: 34963
  Cyclic GFR-binding peptide
  MOD_RES (3)..(4): Xaa is C or S

SEQ ID NO: 55845 - protein, 40 aa, Artificial Sequence
  Cyclic GFR-binding peptide
  MOD_RES (6)..(7)..(39): Xaa is C or S
HVPKPXXAPTKLSPISVLYIDDSSNVIYKQYENMVVRSXG

SEQ ID NO: 55846 - protein, 34 aa, Artificial Sequence; identical to SEQ ID NO: 34970
  Cyclic GFR-binding peptide
  MOD_RES (31)..(33): Xaa is C or S

SEQ ID NO: 55847 - protein, 34 aa, Artificial Sequence; identical to SEQ ID NO: 37814
  Cyclic GFR-binding peptide
  MOD_RES (2)..(3): Xaa is C or S

SEQ ID NO: 55848 - protein, 37 aa, Artificial Sequence; identical to SEQ ID NO: 37815
  Cyclic GFR-binding peptide
  MOD_RES (6)..(7): Xaa is C or S

SEQ ID NO: 55849 - protein, 32 aa, Artificial Sequence; identical to SEQ ID NO: 34972
  Cyclic GFR-binding peptide
  MOD_RES (1)..(2): Xaa is C or S

SEQ ID NO: 55850 - protein, 30 aa, Artificial Sequence; identical to SEQ ID NO: 16994
  Cyclic GFR-binding peptide
  MOD_RES (27)..(29): Xaa is C or S

SEQ ID NO: 55851 - protein, 32 aa, Artificial Sequence; identical to SEQ ID NO: 16995
  Cyclic GFR-binding peptide
  MOD_RES (29)..(31): Xaa is C or S

SEQ ID NO: 55852 - protein, 30 aa, Artificial Sequence; identical to SEQ ID NO: 37817
  Cyclic GFR-binding peptide
  MOD_RES (1)..(2): Xaa is C or S

SEQ ID NO: 55853 - protein, 33 aa, Artificial Sequence; identical to SEQ ID NO: 34975
  Cyclic GFR-binding peptide
  MOD_RES (5)..(6): Xaa is C or S

SEQ ID NO: 55854 - protein, 42 aa, Artificial Sequence; identical to SEQ ID NO: 19332
  Cyclic GFR-binding peptide
  MOD_RES (6)..(7)..(39)..(41): Xaa is C or S

SEQ ID NO: 55855 - protein, 33 aa, Artificial Sequence
  Cyclic GFR-binding peptide
  MOD_RES (31)..(33): Xaa is C or S
APVKTSPISMLYIDNGRVLLYKQYEMIVEEXGX

SEQ ID NO: 55856 - protein, 35 aa, Artificial Sequence; identical to SEQ ID NO: 37826
  Cyclic GFR-binding peptide
  MOD_RES (1)..(34): Xaa is C or S

SEQ ID NO: 55857 - protein, 33 aa, Artificial Sequence; identical to SEQ ID NO: 19335
  Cyclic GFR-binding peptide
  MOD_RES (30)..(32): Xaa is C or S

SEQ ID NO: 55858 - protein, 39 aa, Artificial Sequence; identical to SEQ ID NO: 34978
  Cyclic GFR-binding peptide
  MOD_RES (4)..(5)..(37)..(39): Xaa is C or S

SEQ ID NO: 55859 - protein, 38 aa, Artificial Sequence
  Cyclic GFR-binding peptide
  MOD_RES (4)..(5)..(37): Xaa is C or S
PPTXXVPTRLSPISILYIDSANNVVYKQYEDMVVESXG

SEQ ID NO: 55860 - protein, 40 aa, Artificial Sequence; identical to SEQ ID NO: 37834
  Cyclic GFR-binding peptide
  MOD_RES (6)..(7)..(39): Xaa is C or S

SEQ ID NO: 55861 - protein, 29 aa, Artificial Sequence
  Cyclic GFR-binding peptide
  MOD_RES (3)..(3): Xaa is C or S
PTXAPTKLSPISVLYIDDSSNVIYKQYEN

SEQ ID NO: 55862 - protein, 24 aa, Artificial Sequence
  Cyclic GFR-binding peptide
TQLSPISVLYIDDSSNVIYKQYEN

SEQ ID NO: 55863 - protein, 40 aa, Artificial Sequence; identical to SEQ ID NO: 37839
  Cyclic GFR-binding peptide
  MOD_RES (6)..(7)..(39): Xaa is C or S

SEQ ID NO: 55864 - protein, 28 aa, Artificial Sequence
  Cyclic GFR-binding peptide
ELSPISMLYIDENEKVVYKQYEDMVVEG

SEQ ID NO: 55865 - protein, 30 aa, Artificial Sequence
  Cyclic GFR-binding peptide
  MOD_RES (30)..(30): Xaa is C or S
PVKTSPISMLYIDNGRVLLYKQYEMIVEEX

SEQ ID NO: 55866 - protein, 34 aa, Artificial Sequence; identical to SEQ ID NO: 34986
  Cyclic GFR-binding peptide
  MOD_RES (3)..(4): Xaa is C or S

SEQ ID NO: 55867 - protein, 27 aa, Artificial Sequence
  Cyclic GFR-binding peptide
  MOD_RES (27)..(27): Xaa is C or S
SPISMLYINDKQQIIYKQYEGMVVDRX

SEQ ID NO: 55868 - protein, 33 aa, Artificial Sequence; identical to SEQ ID NO: 34989
  Cyclic GFR-binding peptide
  MOD_RES (31)..(33): Xaa is C or S

SEQ ID NO: 55869 - protein, 34 aa, Artificial Sequence; identical to SEQ ID NO: 37844
  Cyclic GFR-binding peptide
  MOD_RES (1)..(2)..(34): Xaa is C or S

SEQ ID NO: 55870 - protein, 35 aa, Artificial Sequence; identical to SEQ ID NO: 37848
  Cyclic GFR-binding peptide
  MOD_RES (32)..(34): Xaa is C or S

SEQ ID NO: 55871 - protein, 25 aa, Artificial Sequence
  Cyclic GFR-binding peptide
SPISMLYIDNGRVLLYKQYEMIVEE

SEQ ID NO: 55872 - protein, 35 aa, Artificial Sequence; identical to SEQ ID NO: 37853
  Cyclic GFR-binding peptide
  MOD_RES (6)..(7): Xaa is C or S

SEQ ID NO: 55873 - protein, 31 aa, Artificial Sequence; identical to SEQ ID NO: 37862
  Cyclic GFR-binding peptide
  MOD_RES (4)..(5): Xaa is C or S

SEQ ID NO: 55874 - protein, 33 aa, Artificial Sequence; identical to SEQ ID NO: 37863
  Cyclic GFR-binding peptide
  MOD_RES (5)..(6): Xaa is C or S

SEQ ID NO: 55875 - protein, 28 aa, Artificial Sequence
  Cyclic GFR-binding peptide
APVKTSPISMLYIDNGRVLLYKQYEMIV

SEQ ID NO: 55876 - protein, 35 aa, Artificial Sequence; identical to SEQ ID NO: 37864
  Cyclic GFR-binding peptide
  MOD_RES (1)..(33)..(35): Xaa is C or S

SEQ ID NO: 55877 - protein, 31 aa, Artificial Sequence; identical to SEQ ID NO: 17019
  Cyclic GFR-binding peptide
  MOD_RES (28)..(30): Xaa is C or S

SEQ ID NO: 55878 - protein, 26 aa, Artificial Sequence
  Cyclic GFR-binding peptide
PTKMSPISMLYINDKQQIIYKQYEGM

SEQ ID NO: 55879 - protein, 26 aa, Artificial Sequence
  Cyclic GFR-binding peptide
LSPISVLYIDSSNNVIYKQYENMVVK

SEQ ID NO: 55880 - protein, 37 aa, Artificial Sequence
  Cyclic GFR-binding peptide
  MOD_RES (3)..(4)..(36): Xaa is C or S
GPXXTPTKMSPISMLYINDKQQIIYKQYEGMVVDRXG

SEQ ID NO: 55881 - protein, 41 aa, Artificial Sequence; identical to SEQ ID NO: 37870
  Cyclic GFR-binding peptide
  MOD_RES (6)..(7)..(39)..(41): Xaa is C or S

SEQ ID NO: 55882 - protein, 32 aa, Artificial Sequence
  Cyclic GFR-binding peptide
  MOD_RES (31)..(31): Xaa is C or S
PTKMSPISMLYINDKQQIIYKQYEGMVVDRXG

SEQ ID NO: 55883 - protein, 32 aa, Artificial Sequence; identical to SEQ ID NO: 19365
  Cyclic GFR-binding peptide
  MOD_RES (29)..(31): Xaa is C or S

SEQ ID NO: 55884 - protein, 28 aa, Artificial Sequence
  Cyclic GFR-binding peptide
TPTKMSPISMLYINDKQQIIYKQYEGMV

SEQ ID NO: 55885 - protein, 37 aa, Artificial Sequence
  Cyclic GFR-binding peptide
  MOD_RES (3)..(4)..(36): Xaa is C or S
PTXXVPTRLSPISILYIDSANNVVYKQYEDMVVESXG

SEQ ID NO: 55886 - protein, 25 aa, Artificial Sequence
  Cyclic GFR-binding peptide
LSPISILYIDKGVVTYYKQYEGMAV

SEQ ID NO: 55887 - protein, 34 aa, Artificial Sequence; identical to SEQ ID NO: 37884
  Cyclic GFR-binding peptide
  MOD_RES (4)..(4): Xaa is C or S

SEQ ID NO: 55888 - protein, 29 aa, Artificial Sequence
  Cyclic GFR-binding peptide
  MOD_RES (28)..(28): Xaa is C or S
LSPISMLYIDEYDKVVYKQYEEMVVEGXG

SEQ ID NO: 55889 - protein, 29 aa, Artificial Sequence
  Cyclic GFR-binding peptide
  MOD_RES (26)..(28): Xaa is C or S
EPLTILYYVGRKPKVEQLSNMIVRSXKXS

SEQ ID NO: 55890 - protein, 41 aa, Artificial Sequence; identical to SEQ ID NO: 37900
  Cyclic GFR-binding peptide
  MOD_RES (6)..(38)..(40): Xaa is C or S

SEQ ID NO: 55891 - protein, 31 aa, Artificial Sequence; identical to SEQ ID NO: 37905
  Cyclic GFR-binding peptide
  MOD_RES (5)..(6): Xaa is C or S

SEQ ID NO: 55892 - protein, 34 aa, Artificial Sequence; identical to SEQ ID NO: 17054
  Cyclic GFR-binding peptide
  MOD_RES (31)..(33): Xaa is C or S

SEQ ID NO: 55893 - protein, 33 aa, Artificial Sequence; identical to SEQ ID NO: 37906
  Cyclic GFR-binding peptide
  MOD_RES (5)..(6): Xaa is C or S

SEQ ID NO: 55894 - protein, 35 aa, Artificial Sequence; identical to SEQ ID NO: 37907
  Cyclic GFR-binding peptide
  MOD_RES (6)..(7): Xaa is C or S

SEQ ID NO: 55895 - protein, 30 aa, Artificial Sequence; identical to SEQ ID NO: 37908
  Cyclic GFR-binding peptide
  MOD_RES (1)..(2): Xaa is C or S

SEQ ID NO: 55896 - protein, 30 aa, Artificial Sequence; identical to SEQ ID NO: 37909
  Cyclic GFR-binding peptide
  MOD_RES (1)..(2): Xaa is C or S

SEQ ID NO: 55897 - protein, 31 aa, Artificial Sequence; identical to SEQ ID NO: 35040
  Cyclic GFR-binding peptide
  MOD_RES (1)..(1): Xaa is C or S

SEQ ID NO: 55898 - protein, 20 aa, Artificial Sequence
  Cyclic GFR-binding peptide
SPISVLYIDSSNNVIYKQYE

SEQ ID NO: 55899 - protein, 34 aa, Artificial Sequence; identical to SEQ ID NO: 37913
  Cyclic GFR-binding peptide
  MOD_RES (32)..(34): Xaa is C or S

SEQ ID NO: 55900 - protein, 40 aa, Artificial Sequence; identical to SEQ ID NO: 35045
  Cyclic GFR-binding peptide
  MOD_RES (5)..(6)..(38)..(40): Xaa is C or S

SEQ ID NO: 55901 - protein, 24 aa, Artificial Sequence
  Cyclic GFR-binding peptide
SPISVLYIDDMGVPTYKQYEEGMS

SEQ ID NO: 55902 - protein, 34 aa, Artificial Sequence
  Cyclic GFR-binding peptide
  MOD_RES (32)..(34): Xaa is C or S
TPTKMSPISMLYINDKQQIIYKQYEGMVVDRXGX

SEQ ID NO: 55903 - protein, 38 aa, Artificial Sequence
  Cyclic GFR-binding peptide
  MOD_RES (4)..(5)..(36)..(38): Xaa is C or S
PSTXXAPVKTSPISMLYIDNGRVLLYKQYEMIVEEXGX

SEQ ID NO: 55904 - protein, 28 aa, Artificial Sequence
  Cyclic GFR-binding peptide
  MOD_RES (27)..(27): Xaa is C or S
SPISMLYIDEYDKVVYKQYEEMVVEGXG

SEQ ID NO: 55905 - protein, 22 aa, Artificial Sequence
  Cyclic GFR-binding peptide
MSPISMLYINDKQQIIYKQYEG

SEQ ID NO: 55906 - protein, 32 aa, Artificial Sequence; identical to SEQ ID NO: 17067
  Cyclic GFR-binding peptide
  MOD_RES (29)..(31): Xaa is C or S

SEQ ID NO: 55907 - protein, 24 aa, Artificial Sequence
  Cyclic GFR-binding peptide
SPISVLYIDSSNNVIYKQYENMVV

SEQ ID NO: 55908 - protein, 37 aa, Artificial Sequence; identical to SEQ ID NO: 35049
  Cyclic GFR-binding peptide
  MOD_RES (3)..(35)..(37): Xaa is C or S

SEQ ID NO: 55909 - protein, 31 aa, Artificial Sequence; identical to SEQ ID NO: 35060
  Cyclic GFR-binding peptide
  MOD_RES (30)..(30): Xaa is C or S

SEQ ID NO: 55910 - protein, 36 aa, Artificial Sequence; identical to SEQ ID NO: 35061
  Cyclic GFR-binding peptide
  MOD_RES (1)..(33)..(35): Xaa is C or S

SEQ ID NO: 55911 - protein, 32 aa, Artificial Sequence; identical to SEQ ID NO: 35062
  Cyclic GFR-binding peptide
  MOD_RES (29)..(31): Xaa is C or S

SEQ ID NO: 55912 - protein, 37 aa, Artificial Sequence
  Cyclic GFR-binding peptide
  MOD_RES (4)..(5)..(37): Xaa is C or S
AGPXXTPTKMSPISMLYINDKQQIIYKQYEGMVVDRX

SEQ ID NO: 55913 - protein, 39 aa, Artificial Sequence; identical to SEQ ID NO: 37943
  Cyclic GFR-binding peptide
  MOD_RES (3)..(4)..(36)..(38): Xaa is C or S

SEQ ID NO: 55914 - protein, 39 aa, Artificial Sequence; identical to SEQ ID NO: 35066
  Cyclic GFR-binding peptide
  MOD_RES (3)..(4)..(36)..(38): Xaa is C or S

SEQ ID NO: 55915 - protein, 31 aa, Artificial Sequence; identical to SEQ ID NO: 35070
  Cyclic GFR-binding peptide

SEQ ID NO: 55916 - protein, 35 aa, Artificial Sequence; identical to SEQ ID NO: 35071
  Cyclic GFR-binding peptide
  MOD_RES (2)..(3)..(35): Xaa is C or S

SEQ ID NO: 55917 - protein, 37 aa, Artificial Sequence
  Cyclic GFR-binding peptide
  MOD_RES (5)..(6): Xaa is C or S
TPPTXXVPTRLSPISILYIDSANNVVYKQYEDMVVES

SEQ ID NO: 55918 - protein, 35 aa, Artificial Sequence; identical to SEQ ID NO: 37947
  Cyclic GFR-binding peptide
  MOD_RES (3)..(4): Xaa is C or S

SEQ ID NO: 55919 - protein, 28 aa, Artificial Sequence
  Cyclic GFR-binding peptide
  MOD_RES (1)..(2): Xaa is C or S
XXAPTKLSPISVLYIDDSSNVIYKQYEN

SEQ ID NO: 55920 - protein, 32 aa, Artificial Sequence; identical to SEQ ID NO: 37951
  Cyclic GFR-binding peptide
  MOD_RES (3)..(4): Xaa is C or S

SEQ ID NO: 55921 - protein, 33 aa, Artificial Sequence; identical to SEQ ID NO: 17081
  Cyclic GFR-binding peptide
  MOD_RES (30)..(32): Xaa is C or S

SEQ ID NO: 55922 - protein, 27 aa, Artificial Sequence
  Cyclic GFR-binding peptide
  MOD_RES (1)..(2): Xaa is C or S
XXVPTELSPISMLYIDENEKVVYKQYE

SEQ ID NO: 55923 - protein, 36 aa, Artificial Sequence
  Cyclic GFR-binding peptide
  MOD_RES (4)..(5): Xaa is C or S
AGPXXTPTKMSPISMLYINDKQQIIYKQYEGMVVDR

SEQ ID NO: 55924 - protein, 27 aa, Artificial Sequence
  Cyclic GFR-binding peptide
TKLSPISVLYIDDSSNVIYKQYENMVV

SEQ ID NO: 55925 - protein, 42 aa, Artificial Sequence; identical to SEQ ID NO: 17090
  Cyclic GFR-binding peptide
  MOD_RES (6)..(7)..(39)..(41): Xaa is C or S

SEQ ID NO: 55926 - protein, 36 aa, Artificial Sequence; identical to SEQ ID NO: 35084
  Cyclic GFR-binding peptide
  MOD_RES (1)..(33)..(35): Xaa is C or S

SEQ ID NO: 55927 - protein, 23 aa, Artificial Sequence
  Cyclic GFR-binding peptide
KLSPISVLYIDSSNNVIYKQYEN

SEQ ID NO: 55928 - protein, 30 aa, Artificial Sequence
  Cyclic GFR-binding peptide
  MOD_RES (1)..(2): Xaa is C or S
XXTPTKMSPISMLYINDKQQIIYKQYEGMV

SEQ ID NO: 55929 - protein, 28 aa, Artificial Sequence
  Cyclic GFR-binding peptide
  MOD_RES (28)..(28): Xaa is C or S
LSPISVLYIDDSSNVIYKQYENMVVRAX

SEQ ID NO: 55930 - protein, 31 aa, Artificial Sequence
  Cyclic GFR-binding peptide
  MOD_RES (28)..(30): Xaa is C or S
MSPISMLYINDKQQIIYKQYEGMVVDRXGXS

SEQ ID NO: 55931 - protein, 28 aa, Artificial Sequence
  Cyclic GFR-binding peptide
APTKLSPISVLYIDSSNNVIYKQYENMV

SEQ ID NO: 55932 - protein, 41 aa, Artificial Sequence; identical to SEQ ID NO: 19432
  Cyclic GFR-binding peptide
  MOD_RES (6)..(7)..(38)..(40): Xaa is C or S

SEQ ID NO: 55933 - protein, 37 aa, Artificial Sequence; identical to SEQ ID NO: 37975
  Cyclic GFR-binding peptide
  MOD_RES (5)..(6): Xaa is C or S

SEQ ID NO: 55934 - protein, 33 aa, Artificial Sequence; identical to SEQ ID NO: 37978
  Cyclic GFR-binding peptide
  MOD_RES (6)..(7): Xaa is C or S

SEQ ID NO: 55935 - protein, 28 aa, Artificial Sequence
  Cyclic GFR-binding peptide
PTKLSPISVLYIDDSSNVIYKQYENMVV

SEQ ID NO: 55936 - protein, 22 aa, Artificial Sequence
  Cyclic GFR-binding peptide
ELSPISMLYIDEYDKVVYKQYE

SEQ ID NO: 55937 - protein, 30 aa, Artificial Sequence; identical to SEQ ID NO: 35092
  Cyclic GFR-binding peptide
  MOD_RES (27)..(29): Xaa is C or S

SEQ ID NO: 55938 - protein, 30 aa, Artificial Sequence
  Cyclic GFR-binding peptide
  MOD_RES (4)..(5): Xaa is C or S
AGPXXTPTKMSPISMLYINDKQQIIYKQYE

SEQ ID NO: 55939 - protein, 37 aa, Artificial Sequence; identical to SEQ ID NO: 35095
  Cyclic GFR-binding peptide
  MOD_RES (1)..(2)..(34)..(36): Xaa is C or S

SEQ ID NO: 55940 - protein, 27 aa, Artificial Sequence
  Cyclic GFR-binding peptide
APTKLSPISVLYIDDSSNVIYKQYENM

SEQ ID NO: 55941 - protein, 36 aa, Artificial Sequence
  Cyclic GFR-binding peptide
  MOD_RES (2)..(3)..(34)..(36): Xaa is C or S
TXXAPVKTSPISMLYIDNGRVLLYKQYEMIVEEXGX

SEQ ID NO: 55942 - protein, 29 aa, Artificial Sequence
  Cyclic GFR-binding peptide
  MOD_RES (27)..(29): Xaa is C or S
SPISILYIDSANNVVYKQYEDMVVESXGX

SEQ ID NO: 55943 - protein, 32 aa, Artificial Sequence; identical to SEQ ID NO: 35106
  Cyclic GFR-binding peptide
  MOD_RES (29)..(31): Xaa is C or S

SEQ ID NO: 55944 - protein, 27 aa, Artificial Sequence
  Cyclic GFR-binding peptide
  MOD_RES (1)..(1): Xaa is C or S
XAPVKTSPISMLYIDNGRVLLYKQYEM

SEQ ID NO: 55945 - protein, 36 aa, Artificial Sequence
  Cyclic GFR-binding peptide
  MOD_RES (5)..(6): Xaa is C or S
SAGPXXTPTKMSPISMLYINDKQQIIYKQYEGMVVD

SEQ ID NO: 55946 - protein, 30 aa, Artificial Sequence; identical to SEQ ID NO: 35109
  Cyclic GFR-binding peptide
  MOD_RES (27)..(29): Xaa is C or S

SEQ ID NO: 55947 - protein, 33 aa, Artificial Sequence; identical to SEQ ID NO: 17123
  Cyclic GFR-binding peptide
  MOD_RES (30)..(32): Xaa is C or S

SEQ ID NO: 55948 - protein, 28 aa, Artificial Sequence
  Cyclic GFR-binding peptide
  MOD_RES (2)..(3): Xaa is C or S
PXXAPTQLSPISVLYIDDSSNVIYKQYE

SEQ ID NO: 55949 - protein, 39 aa, Artificial Sequence; identical to SEQ ID NO: 35112
  Cyclic GFR-binding peptide
  MOD_RES (5)..(6)..(38): Xaa is C or S

SEQ ID NO: 55950 - protein, 29 aa, Artificial Sequence
  Cyclic GFR-binding peptide
APTQLSPISVLYIDDSSNVIYKQYENMVV

SEQ ID NO: 55951 - protein, 35 aa, Artificial Sequence; identical to SEQ ID NO: 37992
  Cyclic GFR-binding peptide
  MOD_RES (1)..(2)..(34): Xaa is C or S

SEQ ID NO: 55952 - protein, 34 aa, Artificial Sequence; identical to SEQ ID NO: 37994
  Cyclic GFR-binding peptide
  MOD_RES (1)..(2)..(34): Xaa is C or S

SEQ ID NO: 55953 - protein, 36 aa, Artificial Sequence; identical to SEQ ID NO: 35123
  Cyclic GFR-binding peptide
  MOD_RES (4)..(5): Xaa is C or S

SEQ ID NO: 55954 - protein, 31 aa, Artificial Sequence; identical to SEQ ID NO: 35124
  Cyclic GFR-binding peptide
  MOD_RES (4)..(5): Xaa is C or S

SEQ ID NO: 55955 - protein, 36 aa, Artificial Sequence; identical to SEQ ID NO: 35125
  Cyclic GFR-binding peptide
  MOD_RES (5)..(5): Xaa is C or S

SEQ ID NO: 55956 - protein, 24 aa, Artificial Sequence
  Cyclic GFR-binding peptide
SPISMLYINDKQQIIYKQYEGMVV

SEQ ID NO: 55957 - protein, 29 aa, Artificial Sequence
  Cyclic GFR-binding peptide
  MOD_RES (29)..(29): Xaa is C or S
RLSPISILYIDSANNVVYKQYEDMVVESX

SEQ ID NO: 55958 - protein, 33 aa, Artificial Sequence; identical to SEQ ID NO: 17133
  Cyclic GFR-binding peptide
  MOD_RES (30)..(32): Xaa is C or S

SEQ ID NO: 55959 - protein, 34 aa, Artificial Sequence; identical to SEQ ID NO: 35136
  Cyclic GFR-binding peptide
  MOD_RES (2)..(3): Xaa is C or S

SEQ ID NO: 55960 - protein, 32 aa, Artificial Sequence; identical to SEQ ID NO: 35138
  Cyclic GFR-binding peptide
  MOD_RES (2)..(3): Xaa is C or S

SEQ ID NO: 55961 - protein, 33 aa, Artificial Sequence
  Cyclic GFR-binding peptide
  MOD_RES (32)..(32): Xaa is C or S
VPTRLSPISILYIDSANNVVYKQYEDMVVESXG

SEQ ID NO: 55962 - protein, 25 aa, Artificial Sequence
  Cyclic GFR-binding peptide
VPTKLSPISILYIDKGVVTYYKQYE

SEQ ID NO: 55963 - protein, 24 aa, Artificial Sequence
  Cyclic GFR-binding peptide
KLSPISILYIDKGVVTYYKQYEGM

SEQ ID NO: 55964 - protein, 41 aa, Artificial Sequence; identical to SEQ ID NO: 35149
  Cyclic GFR-binding peptide
  MOD_RES (4)..(5)..(38)..(40): Xaa is C or S

SEQ ID NO: 55965 - protein, 33 aa, Artificial Sequence
  Cyclic GFR-binding peptide
  MOD_RES (4)..(5): Xaa is C or S
AGPXXTPTKMSPISMLYINDKQQIIYKQYEGMV

SEQ ID NO: 55966 - protein, 31 aa, Artificial Sequence
  Cyclic GFR-binding peptide
TPTKMSPISMLYINDKQQIIYKQYEGMVVDR

SEQ ID NO: 55967 - protein, 30 aa, Artificial Sequence; identical to SEQ ID NO: 38015
  Cyclic GFR-binding peptide
  MOD_RES (28)..(30): Xaa is C or S

SEQ ID NO: 55968 - protein, 32 aa, Artificial Sequence
  Cyclic GFR-binding peptide
  MOD_RES (6)..(7): Xaa is C or S
STPPTXXVPTRLSPISILYIDSANNVVYKQYE

SEQ ID NO: 55969 - protein, 33 aa, Artificial Sequence; identical to SEQ ID NO: 19470
  Cyclic GFR-binding peptide
  MOD_RES (30)..(32): Xaa is C or S

SEQ ID NO: 55970 - protein, 27 aa, Artificial Sequence
  Cyclic GFR-binding peptide
LSPISVLYIDDSSNVIYKQYENMVVRS

SEQ ID NO: 55971 - protein, 33 aa, Artificial Sequence; identical to SEQ ID NO: 35155
  Cyclic GFR-binding peptide
  MOD_RES (6)..(7): Xaa is C or S

SEQ ID NO: 55972 - protein, 32 aa, Artificial Sequence; identical to SEQ ID NO: 38027
  Cyclic GFR-binding peptide
  MOD_RES (31)..(31): Xaa is C or S

SEQ ID NO: 55973 - protein, 42 aa, Artificial Sequence; identical to SEQ ID NO: 35162
  Cyclic GFR-binding peptide
  MOD_RES (5)..(6)..(39)..(41): Xaa is C or S

SEQ ID NO: 55974 - protein, 34 aa, Artificial Sequence; identical to SEQ ID NO: 38030
  Cyclic GFR-binding peptide
  MOD_RES (2)..(3): Xaa is C or S

SEQ ID NO: 55975 - protein, 27 aa, Artificial Sequence
  Cyclic GFR-binding peptide
  MOD_RES (27)..(27): Xaa is C or S
TSPISMLYIDNGRVLLYKQYEMIVEEX

SEQ ID NO: 55976 - protein, 37 aa, Artificial Sequence; identical to SEQ ID NO: 38033
  Cyclic GFR-binding peptide
  MOD_RES (1)..(2)..(34)..(36): Xaa is C or S

SEQ ID NO: 55977 - protein, 28 aa, Artificial Sequence
  Cyclic GFR-binding peptide
KLSPISVLYIDDSSNVIYKQYENMVVRS

SEQ ID NO: 55978 - protein, 40 aa, Artificial Sequence
  Cyclic GFR-binding peptide
  MOD_RES (4)..(5)..(37)..(39): Xaa is C or S
AGPXXTPTKMSPISMLYINDKQQIIYKQYEGMVVDRXGXS

SEQ ID NO: 55979 - protein, 30 aa, Artificial Sequence; identical to SEQ ID NO: 35169
  Cyclic GFR-binding peptide
  MOD_RES (28)..(30): Xaa is C or S

SEQ ID NO: 55980 - protein, 20 aa, Artificial Sequence
  Cyclic GFR-binding peptide
SPISMLYIDEYDKVVYKQYE

SEQ ID NO: 55981 - protein, 23 aa, Artificial Sequence
  Cyclic GFR-binding peptide
TELSPISMLYIDEYDKVVYKQYE

SEQ ID NO: 55982 - protein, 33 aa, Artificial Sequence
  Cyclic GFR-binding peptide
  MOD_RES (5)..(6): Xaa is C or S
TPPTXXVPTRLSPISILYIDSANNVVYKQYEDM

SEQ ID NO: 55983 - protein, 40 aa, Artificial Sequence; identical to SEQ ID NO: 35171
  Cyclic GFR-binding peptide
  MOD_RES (5)..(6)..(38)..(40): Xaa is C or S

SEQ ID NO: 55984 - protein, 20 aa, Artificial Sequence
  Cyclic GFR-binding peptide
SPISMLYINDKQQIIYKQYE

SEQ ID NO: 55985 - protein, 34 aa, Artificial Sequence
  Cyclic GFR-binding peptide
  MOD_RES (3)..(4): Xaa is C or S
PTXXVPTRLSPISILYIDSANNVVYKQYEDMVVE

SEQ ID NO: 55986 - protein, 37 aa, Artificial Sequence; identical to SEQ ID NO: 38042
  Cyclic GFR-binding peptide
  MOD_RES (4)..(5): Xaa is C or S

SEQ ID NO: 55987 - protein, 30 aa, Artificial Sequence; identical to SEQ ID NO: 35175
  Cyclic GFR-binding peptide
  MOD_RES (1)..(1): Xaa is C or S

SEQ ID NO: 55988 - protein, 37 aa, Artificial Sequence; identical to SEQ ID NO: 35176
  Cyclic GFR-binding peptide
  MOD_RES (2)..(34)..(36): Xaa is C or S

SEQ ID NO: 55989 - protein, 28 aa, Artificial Sequence
  Cyclic GFR-binding peptide
TKLSPISVLYIDDSSNVIYKQYENMVVR

SEQ ID NO: 55990 - protein, 31 aa, Artificial Sequence
  Cyclic GFR-binding peptide
  MOD_RES (1)..(2): Xaa is C or S
XXVPTRLSPISILYIDSANNVVYKQYEDMVV

SEQ ID NO: 55991 - protein, 24 aa, Artificial Sequence
  Cyclic GFR-binding peptide
PTELSPISMLYIDENEKVVYKQYE

SEQ ID NO: 55992 - protein, 37 aa, Artificial Sequence; identical to SEQ ID NO: 35181
  Cyclic GFR-binding peptide
  MOD_RES (5)..(6): Xaa is C or S

SEQ ID NO: 55993 - protein, 27 aa, Artificial Sequence
  Cyclic GFR-binding peptide
LSPISVLYIDDSSNVIYKQYENMVVRA

SEQ ID NO: 55994 - protein, 34 aa, Artificial Sequence
  Cyclic GFR-binding peptide
  MOD_RES (1)..(33): Xaa is C or S
XVPTRLSPISILYIDSANNVVYKQYEDMVVESXG

SEQ ID NO: 55995 - protein, 37 aa, Artificial Sequence
  Cyclic GFR-binding peptide
  MOD_RES (2)..(3)..(35)..(37): Xaa is C or S
TXXVPTRLSPISILYIDSANNVVYKQYEDMVVESXGX

SEQ ID NO: 55996 - protein, 34 aa, Artificial Sequence
  Cyclic GFR-binding peptide
  MOD_RES (2)..(3)..(34): Xaa is C or S
TXXAPVKTSPISMLYIDNGRVLLYKQYEMIVEEX

SEQ ID NO: 55997 - protein, 28 aa, Artificial Sequence
  Cyclic GFR-binding peptide
VPTELSPISMLYIDENEKVVYKQYEDMV

SEQ ID NO: 55998 - protein, 33 aa, Artificial Sequence
  Cyclic GFR-binding peptide
  MOD_RES (1)..(2): Xaa is C or S
XXVPTRLSPISILYIDSANNVVYKQYEDMVVES

SEQ ID NO: 55999 - protein, 29 aa, Artificial Sequence
  Cyclic GFR-binding peptide
  MOD_RES (3)..(4): Xaa is C or S
STXXAPVKTSPISMLYIDNGRVLLYKQYE

SEQ ID NO: 56000 - protein, 28 aa, Artificial Sequence
  Cyclic GFR-binding peptide
  MOD_RES (28)..(28): Xaa is C or S
LSPISILYIDSANNVVYKQYEDMVVESX

SEQ ID NO: 56001 - protein, 30 aa, Artificial Sequence; identical to SEQ ID NO: 17185
  Cyclic GFR-binding peptide
  MOD_RES (27)..(29): Xaa is C or S

SEQ ID NO: 56002 - protein, 28 aa, Artificial Sequence
  Cyclic GFR-binding peptide
  MOD_RES (26)..(28): Xaa is C or S
SPISMLYIDNGRVLLYKQYEMIVEEXGX

SEQ ID NO: 56003 - protein, 25 aa, Artificial Sequence
  Cyclic GFR-binding peptide
SPISILYIDKGVVTYYKQYEGMAVS

SEQ ID NO: 56004 - protein, 29 aa, Artificial Sequence
  Cyclic GFR-binding peptide
  MOD_RES (29)..(29): Xaa is C or S
KLSPISVLYIDSSNNVIYKQYENMVVKAX

SEQ ID NO: 56005 - protein, 32 aa, Artificial Sequence; identical to SEQ ID NO: 17189
  Cyclic GFR-binding peptide
  MOD_RES (29)..(31): Xaa is C or S

SEQ ID NO: 56006 - protein, 24 aa, Artificial Sequence
  Cyclic GFR-binding peptide
PTQLSPISVLYIDDSSNVIYKQYE

SEQ ID NO: 56007 - protein, 30 aa, Artificial Sequence; identical to SEQ ID NO: 35199
  Cyclic GFR-binding peptide

SEQ ID NO: 56008 - protein, 34 aa, Artificial Sequence
  Cyclic GFR-binding peptide
  MOD_RES (31)..(33): Xaa is C or S
PTKMSPISMLYINDKQQIIYKQYEGMVVDRXGXS

SEQ ID NO: 56009 - protein, 43 aa, Artificial Sequence; identical to SEQ ID NO: 38071
  Cyclic GFR-binding peptide
  MOD_RES (6)..(7)..(40)..(42): Xaa is C or S

SEQ ID NO: 56010 - protein, 33 aa, Artificial Sequence; identical to SEQ ID NO: 38072
  Cyclic GFR-binding peptide
  MOD_RES (5)..(6): Xaa is C or S

SEQ ID NO: 56011 - protein, 25 aa, Artificial Sequence
  Cyclic GFR-binding peptide
APVKTSPISMLYIDNGRVLLYKQYE

SEQ ID NO: 56012 - protein, 34 aa, Artificial Sequence; identical to SEQ ID NO: 38074
  Cyclic GFR-binding peptide
  MOD_RES (5)..(6): Xaa is C or S

SEQ ID NO: 56013 - protein, 30 aa, Artificial Sequence
  Cyclic GFR-binding peptide
VPTRLSPISILYIDSANNVVYKQYEDMVVE

SEQ ID NO: 56014 - protein, 29 aa, Artificial Sequence
  Cyclic GFR-binding peptide
  MOD_RES (28)..(28): Xaa is C or S
KTSPISMLYIDNGRVLLYKQYEMIVEEXG

SEQ ID NO: 56015 - protein, 39 aa, Artificial Sequence; identical to SEQ ID NO: 38083
  Cyclic GFR-binding peptide
  MOD_RES (5)..(6)..(38): Xaa is C or S

SEQ ID NO: 56016 - protein, 28 aa, Artificial Sequence
  Cyclic GFR-binding peptide
VPTKLSPISILYIDKGVVTYYKQYEGMA

SEQ ID NO: 56017 - protein, 29 aa, Artificial Sequence
  Cyclic GFR-binding peptide
PTKLSPISVLYIDDSSNVIYKQYENMVVR

SEQ ID NO: 56018 - protein, 37 aa, Artificial Sequence
  Cyclic GFR-binding peptide
  MOD_RES (2)..(3)..(34)..(36): Xaa is C or S
TXXAPVKTSPISMLYIDNGRVLLYKQYEMIVEEXGXL

SEQ ID NO: 56019 - protein, 36 aa, Artificial Sequence
  Cyclic GFR-binding peptide
  MOD_RES (6)..(7): Xaa is C or S
GSAGPXXTPTKMSPISMLYINDKQQIIYKQYEGMVV

SEQ ID NO: 56020 - protein, 30 aa, Artificial Sequence; identical to SEQ ID NO: 38095
  Cyclic GFR-binding peptide
  MOD_RES (29)..(29): Xaa is C or S

SEQ ID NO: 56021 - protein, 30 aa, Artificial Sequence; identical to SEQ ID NO: 35223
  Cyclic GFR-binding peptide
  MOD_RES (1)..(1): Xaa is C or S

SEQ ID NO: 56022 - protein, 21 aa, Artificial Sequence
  Cyclic GFR-binding peptide
LSPISMLYIDEYDKVVYKQYE

SEQ ID NO: 56023 - protein, 29 aa, Artificial Sequence
  Cyclic GFR-binding peptide
TQLSPISVLYIDDSSNVIYKQYENMVVRA

SEQ ID NO: 56024 - protein, 27 aa, Artificial Sequence
  Cyclic GFR-binding peptide
  MOD_RES (1)..(2): Xaa is C or S
XXVPTELSPISMLYIDEYDKVVYKQYE

SEQ ID NO: 56025 - protein, 34 aa, Artificial Sequence; identical to SEQ ID NO: 35243
  Cyclic GFR-binding peptide
  MOD_RES (4)..(5): Xaa is C or S

SEQ ID NO: 56026 - protein, 31 aa, Artificial Sequence; identical to SEQ ID NO: 38123
  Cyclic GFR-binding peptide
  MOD_RES (1)..(1): Xaa is C or S

SEQ ID NO: 56027 - protein, 25 aa, Artificial Sequence
  Cyclic GFR-binding peptide
APTKLSPISVLYIDDSSNVIYKQYE

SEQ ID NO: 56028 - protein, 27 aa, Artificial Sequence
  Cyclic GFR-binding peptide
PTQLSPISVLYIDDSSNVIYKQYENMV

SEQ ID NO: 56029 - protein, 24 aa, Artificial Sequence
  Cyclic GFR-binding peptide
LSPISMLYIDENEKVVYKQYEDMV

SEQ ID NO: 56030 - protein, 33 aa, Artificial Sequence; identical to SEQ ID NO: 38134
  Cyclic GFR-binding peptide
  MOD_RES (30)..(32): Xaa is C or S

SEQ ID NO: 56031 - protein, 31 aa, Artificial Sequence; identical to SEQ ID NO: 38137
  Cyclic GFR-binding peptide

SEQ ID NO: 56032 - protein, 33 aa, Artificial Sequence
  Cyclic GFR-binding peptide
  MOD_RES (2)..(3): Xaa is C or S
PXXTPTKMSPISMLYINDKQQIIYKQYEGMVVD

SEQ ID NO: 56033 - protein, 34 aa, Artificial Sequence; identical to SEQ ID NO: 35268
  Cyclic GFR-binding peptide
  MOD_RES (2)..(3): Xaa is C or S

SEQ ID NO: 56034 - protein, 33 aa, Artificial Sequence
  Cyclic GFR-binding peptide
  MOD_RES (3)..(4): Xaa is C or S
PTXXVPTRLSPISILYIDSANNVVYKQYEDMVV

SEQ ID NO: 56035 - protein, 36 aa, Artificial Sequence
  Cyclic GFR-binding peptide
  MOD_RES (6)..(7): Xaa is C or S
HVPKPXXAPTKLSPISVLYIDDSSNVIYKQYENMVV

SEQ ID NO: 56036 - protein, 30 aa, Artificial Sequence
  Cyclic GFR-binding peptide
  MOD_RES (27)..(29): Xaa is C or S
SPISILYIDSANNVVYKQYEDMVVESXGXR

SEQ ID NO: 56037 - protein, 33 aa, Artificial Sequence; identical to SEQ ID NO: 38143
  Cyclic GFR-binding peptide
  MOD_RES (4)..(5): Xaa is C or S

SEQ ID NO: 56038 - protein, 25 aa, Artificial Sequence
  Cyclic GFR-binding peptide
SPISVLYIDSSNNVIYKQYENMVVK

SEQ ID NO: 56039 - protein, 29 aa, Artificial Sequence
  Cyclic GFR-binding peptide
  MOD_RES (26)..(28): Xaa is C or S
SPISILFIVGRKPKVYKQYEMIVRSXKXS

SEQ ID NO: 56040 - protein, 23 aa, Artificial Sequence
  Cyclic GFR-binding peptide
MSPISMLYINDKQQIIYKQYEGM

SEQ ID NO: 56041 - protein, 36 aa, Artificial Sequence; identical to SEQ ID NO: 38148
  Cyclic GFR-binding peptide
  MOD_RES (1)..(33)..(35): Xaa is C or S

SEQ ID NO: 56042 - protein, 31 aa, Artificial Sequence
  Cyclic GFR-binding peptide
  MOD_RES (5)..(6): Xaa is C or S
TPPTXXVPTRLSPISILYIDSANNVVYKQYE

SEQ ID NO: 56043 - protein, 30 aa, Artificial Sequence; identical to SEQ ID NO: 17276
  Cyclic GFR-binding peptide
  MOD_RES (27)..(29): Xaa is C or S

SEQ ID NO: 56044 - protein, 41 aa, Artificial Sequence; identical to SEQ ID NO: 19594
  Cyclic GFR-binding peptide
  MOD_RES (6)..(7)..(38)..(40): Xaa is C or S

SEQ ID NO: 56045 - protein, 29 aa, Artificial Sequence
  Cyclic GFR-binding peptide
VPTELSPISMLYIDENEKVVYKQYEDMVV

SEQ ID NO: 56046 - protein, 33 aa, Artificial Sequence
  Cyclic GFR-binding peptide
  MOD_RES (1)..(2)..(33): Xaa is C or S
XXAPVKTSPISMLYIDNGRVLLYKQYEMIVEEX

SEQ ID NO: 56047 - protein, 35 aa, Artificial Sequence; identical to SEQ ID NO: 38151
  Cyclic GFR-binding peptide
  MOD_RES (6)..(6): Xaa is C or S

SEQ ID NO: 56048 - protein, 30 aa, Artificial Sequence; identical to SEQ ID NO: 19598
  Cyclic GFR-binding peptide
  MOD_RES (27)..(29): Xaa is C or S

SEQ ID NO: 56049 - protein, 34 aa, Artificial Sequence
  Cyclic GFR-binding peptide
  MOD_RES (3)..(4): Xaa is C or S
GPXXTPTKMSPISMLYINDKQQIIYKQYEGMVVD

SEQ ID NO: 56050 - protein, 25 aa, Artificial Sequence
  Cyclic GFR-binding peptide
VPTKLSPISVLYIDDMGVPTYKQYE

SEQ ID NO: 56051 - protein, 32 aa, Artificial Sequence; identical to SEQ ID NO: 35291
  Cyclic GFR-binding peptide
  MOD_RES (30)..(32): Xaa is C or S

SEQ ID NO: 56052 - protein, 26 aa, Artificial Sequence
  Cyclic GFR-binding peptide
APTQLSPISVLYIDDSSNVIYKQYEN

SEQ ID NO: 56053 - protein, 31 aa, Artificial Sequence; identical to SEQ ID NO: 38170
  Cyclic GFR-binding peptide
  MOD_RES (1)..(1): Xaa is C or S

SEQ ID NO: 56054 - protein, 33 aa, Artificial Sequence; identical to SEQ ID NO: 38172
  Cyclic GFR-binding peptide
  MOD_RES (1)..(33): Xaa is C or S

SEQ ID NO: 56055 - protein, 29 aa, Artificial Sequence
  Cyclic GFR-binding peptide
  MOD_RES (3)..(4): Xaa is C or S
PTXXVPTRLSPISILYIDSANNVVYKQYE

SEQ ID NO: 56056 - protein, 35 aa, Artificial Sequence
  Cyclic GFR-binding peptide
  MOD_RES (3)..(4): Xaa is C or S
PTXXVPTRLSPISILYIDSANNVVYKQYEDMVVES

SEQ ID NO: 56057 - protein, 31 aa, Artificial Sequence
  Cyclic GFR-binding peptide
VPTRLSPISILYIDSANNVVYKQYEDMVVES

SEQ ID NO: 56058 - protein, 41 aa, Artificial Sequence; identical to SEQ ID NO: 38175
  Cyclic GFR-binding peptide
  MOD_RES (5)..(6)..(39)..(41): Xaa is C or S

SEQ ID NO: 56059 - protein, 33 aa, Artificial Sequence; identical to SEQ ID NO: 38179
  Cyclic GFR-binding peptide
  MOD_RES (3)..(4): Xaa is C or S

SEQ ID NO: 56060 - protein, 32 aa, Artificial Sequence; identical to SEQ ID NO: 35305
  Cyclic GFR-binding peptide
  MOD_RES (6)..(7): Xaa is C or S

SEQ ID NO: 56061 - protein, 32 aa, Artificial Sequence; identical to SEQ ID NO: 35306
  Cyclic GFR-binding peptide
  MOD_RES (4)..(5): Xaa is C or S

SEQ ID NO: 56062 - protein, 35 aa, Artificial Sequence
  Cyclic GFR-binding peptide
  MOD_RES (5)..(6): Xaa is C or S
VPSTXXAPVKTSPISMLYIDNGRVLLYKQYEMIVE

SEQ ID NO: 56063 - protein, 21 aa, Artificial Sequence
  Cyclic GFR-binding peptide
SPISMLYINDKQQIIYKQYEG

SEQ ID NO: 56064 - protein, 33 aa, Artificial Sequence; identical to SEQ ID NO: 38188
  Cyclic GFR-binding peptide
  MOD_RES (3)..(4): Xaa is C or S

SEQ ID NO: 56065 - protein, 30 aa, Artificial Sequence; identical to SEQ ID NO: 38193
  Cyclic GFR-binding peptide
  MOD_RES (1)..(1): Xaa is C or S

SEQ ID NO: 56066 - protein, 34 aa, Artificial Sequence; identical to SEQ ID NO: 35319
  Cyclic GFR-binding peptide
  MOD_RES (3)..(4): Xaa is C or S

SEQ ID NO: 56067 - protein, 30 aa, Artificial Sequence; identical to SEQ ID NO: 38199
  Cyclic GFR-binding peptide

SEQ ID NO: 56068 - protein, 36 aa, Artificial Sequence; identical to SEQ ID NO: 38201
  Cyclic GFR-binding peptide
  MOD_RES (3)..(4)..(36): Xaa is C or S

SEQ ID NO: 56069 - protein, 33 aa, Artificial Sequence; identical to SEQ ID NO: 35325
  Cyclic GFR-binding peptide
  MOD_RES (31)..(33): Xaa is C or S

SEQ ID NO: 56070 - protein, 26 aa, Artificial Sequence
  Cyclic GFR-binding peptide
PTKLSPISVLYIDSSNNVIYKQYENM

SEQ ID NO: 56071 - protein, 37 aa, Artificial Sequence; identical to SEQ ID NO: 38205
  Cyclic GFR-binding peptide
  MOD_RES (6)..(6): Xaa is C or S

SEQ ID NO: 56072 - protein, 38 aa, Artificial Sequence; identical to SEQ ID NO: 38206
  Cyclic GFR-binding peptide
  MOD_RES (4)..(5)..(37): Xaa is C or S

SEQ ID NO: 56073 - protein, 39 aa, Artificial Sequence
  Cyclic GFR-binding peptide
  MOD_RES (3)..(4)..(36)..(38): Xaa is C or S
GPXXTPTKMSPISMLYINDKQQIIYKQYEGMVVDRXGXS

SEQ ID NO: 56074 - protein, 31 aa, Artificial Sequence; identical to SEQ ID NO: 35331
  Cyclic GFR-binding peptide
  MOD_RES (1)..(2): Xaa is C or S

SEQ ID NO: 56075 - protein, 30 aa, Artificial Sequence; identical to SEQ ID NO: 35332
  Cyclic GFR-binding peptide
  MOD_RES (1)..(2): Xaa is C or S

SEQ ID NO: 56076 - protein, 25 aa, Artificial Sequence
  Cyclic GFR-binding peptide
PVKTSPISMLYIDNGRVLLYKQYEM

SEQ ID NO: 56077 - protein, 36 aa, Artificial Sequence; identical to SEQ ID NO: 38210
  Cyclic GFR-binding peptide
  MOD_RES (1)..(2)..(35): Xaa is C or S

SEQ ID NO: 56078 - protein, 32 aa, Artificial Sequence; identical to SEQ ID NO: 38211
  Cyclic GFR-binding peptide
  MOD_RES (5)..(5): Xaa is C or S

SEQ ID NO: 56079 - protein, 30 aa, Artificial Sequence; identical to SEQ ID NO: 35337
  Cyclic GFR-binding peptide
  MOD_RES (2)..(3): Xaa is C or S

SEQ ID NO: 56080 - protein, 27 aa, Artificial Sequence
  Cyclic GFR-binding peptide
TPTKMSPISMLYINDKQQIIYKQYEGM

SEQ ID NO: 56081 - protein, 27 aa, Artificial Sequence
  Cyclic GFR-binding peptide
  MOD_RES (27)..(27): Xaa is C or S
SPISVLYIDDSSNVIYKQYENMVVRSX

SEQ ID NO: 56082 - protein, 32 aa, Artificial Sequence; identical to SEQ ID NO: 38217
  Cyclic GFR-binding peptide
  MOD_RES (32)..(32): Xaa is C or S

SEQ ID NO: 56083 - protein, 27 aa, Artificial Sequence
  Cyclic GFR-binding peptide
  MOD_RES (27)..(27): Xaa is C or S
SPISMLYIDEYDKVVYKQYEEMVVEGX

SEQ ID NO: 56084 - protein, 34 aa, Artificial Sequence; identical to SEQ ID NO: 38219
  Cyclic GFR-binding peptide
  MOD_RES (3)..(4): Xaa is C or S

SEQ ID NO: 56085 - protein, 35 aa, Artificial Sequence; identical to SEQ ID NO: 35349
  Cyclic GFR-binding peptide
  MOD_RES (5)..(6): Xaa is C or S

SEQ ID NO: 56086 - protein, 28 aa, Artificial Sequence
  Cyclic GFR-binding peptide
  MOD_RES (2)..(3): Xaa is C or S
AXXAPTKLSPISVLYIDSSNNVIYKQYE

SEQ ID NO: 56087 - protein, 26 aa, Artificial Sequence
  Cyclic GFR-binding peptide
SPISMLYIDEYDKVVYKQYEEMVVEG

SEQ ID NO: 56088 - protein, 31 aa, Artificial Sequence; identical to SEQ ID NO: 38227
  Cyclic GFR-binding peptide
  MOD_RES (3)..(4): Xaa is C or S

SEQ ID NO: 56089 - protein, 29 aa, Artificial Sequence
  Cyclic GFR-binding peptide
  MOD_RES (29)..(29): Xaa is C or S
KMSPISMLYINDKQQIIYKQYEGMVVDRX

SEQ ID NO: 56090 - protein, 30 aa, Artificial Sequence; identical to SEQ ID NO: 19678
  Cyclic GFR-binding peptide
  MOD_RES (27)..(29): Xaa is C or S

SEQ ID NO: 56091 - protein, 29 aa, Artificial Sequence
  Cyclic GFR-binding peptide
  MOD_RES (2)..(3): Xaa is C or S
PXXAPTQLSPISVLYIDDSSNVIYKQYEN

SEQ ID NO: 56092 - protein, 36 aa, Artificial Sequence; identical to SEQ ID NO: 38238
  Cyclic GFR-binding peptide
  MOD_RES (1)..(33)..(35): Xaa is C or S

SEQ ID NO: 56093 - protein, 37 aa, Artificial Sequence; identical to SEQ ID NO: 38241
  Cyclic GFR-binding peptide
  MOD_RES (5)..(37): Xaa is C or S

SEQ ID NO: 56094 - protein, 32 aa, Artificial Sequence; identical to SEQ ID NO: 35364
  Cyclic GFR-binding peptide
  MOD_RES (3)..(4): Xaa is C or S

SEQ ID NO: 56095 - protein, 38 aa, Artificial Sequence
  Cyclic GFR-binding peptide
  MOD_RES (3)..(4)..(36)..(38): Xaa is C or S
PTXXVPTRLSPISILYIDSANNVVYKQYEDMVVESXGX

SEQ ID NO: 56096 - protein, 29 aa, Artificial Sequence
  Cyclic GFR-binding peptide
PTELSPISMLYIDENEKVVYKQYEDMVVE

SEQ ID NO: 56097 - protein, 34 aa, Artificial Sequence; identical to SEQ ID NO: 35367
  Cyclic GFR-binding peptide
  MOD_RES (1)..(33): Xaa is C or S

SEQ ID NO: 56098 - protein, 33 aa, Artificial Sequence
  Cyclic GFR-binding peptide
  MOD_RES (4)..(5): Xaa is C or S
PSTXXAPVKTSPISMLYIDNGRVLLYKQYEMIV

SEQ ID NO: 56099 - protein, 24 aa, Artificial Sequence
  Cyclic GFR-binding peptide
SPISMLYIDNGRVLLYKQYEMIVE

SEQ ID NO: 56100 - protein, 39 aa, Artificial Sequence; identical to SEQ ID NO: 38249
  Cyclic GFR-binding peptide
  MOD_RES (4)..(5)..(37)..(39): Xaa is C or S

SEQ ID NO: 56101 - protein, 36 aa, Artificial Sequence; identical to SEQ ID NO: 35372
  Cyclic GFR-binding peptide
  MOD_RES (2)..(3)..(35): Xaa is C or S

SEQ ID NO: 56102 - protein, 24 aa, Artificial Sequence
  Cyclic GFR-binding peptide
PTELSPISMLYIDEYDKVVYKQYE

SEQ ID NO: 56103 - protein, 34 aa, Artificial Sequence; identical to SEQ ID NO: 17357
  Cyclic GFR-binding peptide
  MOD_RES (31)..(33): Xaa is C or S

SEQ ID NO: 56104 - protein, 31 aa, Artificial Sequence; identical to SEQ ID NO: 17358
  Cyclic GFR-binding peptide
  MOD_RES (28)..(30): Xaa is C or S

SEQ ID NO: 56105 - protein, 31 aa, Artificial Sequence
  Cyclic GFR-binding peptide
  MOD_RES (3)..(4): Xaa is C or S
GPXXTPTKMSPISMLYINDKQQIIYKQYEGM

SEQ ID NO: 56106 - protein, 40 aa, Artificial Sequence; identical to SEQ ID NO: 35391
  Cyclic GFR-binding peptide
  MOD_RES (4)..(5)..(37)..(39): Xaa is C or S

SEQ ID NO: 56107 - protein, 26 aa, Artificial Sequence
  Cyclic GFR-binding peptide
VPTELSPISMLYIDEYDKVVYKQYEE

SEQ ID NO: 56108 - protein, 38 aa, Artificial Sequence
  Cyclic GFR-binding peptide
  MOD_RES (6)..(7): Xaa is C or S
STPPTXXVPTRLSPISILYIDSANNVVYKQYEDMVVES

SEQ ID NO: 56109 - protein, 36 aa, Artificial Sequence; identical to SEQ ID NO: 35394
  Cyclic GFR-binding peptide
  MOD_RES (5)..(6): Xaa is C or S

SEQ ID NO: 56110 - protein, 21 aa, Artificial Sequence
  Cyclic GFR-binding peptide
SPISVLYIDDMGVPTYKQYEE

SEQ ID NO: 56111 - protein, 25 aa, Artificial Sequence
  Cyclic GFR-binding peptide
KLSPISVLYIDDMGVPTYKQYEEGM

SEQ ID NO: 56112 - protein, 33 aa, Artificial Sequence
  Cyclic GFR-binding peptide
  MOD_RES (6)..(7): Xaa is C or S
GSAGPXXTPTKMSPISMLYINDKQQIIYKQYEG

SEQ ID NO: 56113 - protein, 30 aa, Artificial Sequence; identical to SEQ ID NO: 19709
  Cyclic GFR-binding peptide
  MOD_RES (27)..(29): Xaa is C or S

SEQ ID NO: 56114 - protein, 31 aa, Artificial Sequence; identical to SEQ ID NO: 38275
  Cyclic GFR-binding peptide
  MOD_RES (2)..(3): Xaa is C or S

SEQ ID NO: 56115 - protein, 28 aa, Artificial Sequence
  Cyclic GFR-binding peptide
  MOD_RES (1)..(1): Xaa is C or S
XVPTELSPISMLYIDENEKVVYKQYEDM

SEQ ID NO: 56116 - protein, 37 aa, Artificial Sequence
  Cyclic GFR-binding peptide
  MOD_RES (6)..(7): Xaa is C or S
RVPSTXXAPVKTSPISMLYIDNGRVLLYKQYEMIVEE

SEQ ID NO: 56117 - protein, 29 aa, Artificial Sequence
  Cyclic GFR-binding peptide
  MOD_RES (29)..(29): Xaa is C or S
LSPISVLYIDDMGVPTYKQYEEGMSVAEX

SEQ ID NO: 56118 - protein, 30 aa, Artificial Sequence
  Cyclic GFR-binding peptide
  MOD_RES (27)..(29): Xaa is C or S
SPISMLYINDKQQIIYKQYEGMVVDRXGXS

SEQ ID NO: 56119 - protein, 33 aa, Artificial Sequence
  Cyclic GFR-binding peptide
  MOD_RES (31)..(33): Xaa is C or S
PTKMSPISMLYINDKQQIIYKQYEGMVVDRXGX

SEQ ID NO: 56120 - protein, 29 aa, Artificial Sequence
  Cyclic GFR-binding peptide
TELSPISMLYIDENEKVVYKQYEDMVVEG

SEQ ID NO: 56121 - protein, 41 aa, Artificial Sequence
  Cyclic GFR-binding peptide
  MOD_RES (6)..(7)..(38)..(40): Xaa is C or S
RVPSTXXAPVKTSPISMLYIDNGRVLLYKQYEMIVEEXGXL

SEQ ID NO: 56122 - protein, 32 aa, Artificial Sequence
  Cyclic GFR-binding peptide
  MOD_RES (1)..(2): Xaa is C or S
XXTPTKMSPISMLYINDKQQIIYKQYEGMVVD

SEQ ID NO: 56123 - protein, 35 aa, Artificial Sequence; identical to SEQ ID NO: 38286
  Cyclic GFR-binding peptide
  MOD_RES (5)..(6): Xaa is C or S

SEQ ID NO: 56124 - protein, 29 aa, Artificial Sequence
  Cyclic GFR-binding peptide
  MOD_RES (2)..(3): Xaa is C or S
TXXVPTRLSPISILYIDSANNVVYKQYED

SEQ ID NO: 56125 - protein, 34 aa, Artificial Sequence; identical to SEQ ID NO: 17382
  Cyclic GFR-binding peptide
  MOD_RES (31)..(33): Xaa is C or S

SEQ ID NO: 56126 - protein, 26 aa, Artificial Sequence
  Cyclic GFR-binding peptide
TPTKMSPISMLYINDKQQIIYKQYEG

SEQ ID NO: 56127 - protein, 34 aa, Artificial Sequence
  Cyclic GFR-binding peptide
  MOD_RES (4)..(5): Xaa is C or S
AGPXXTPTKMSPISMLYINDKQQIIYKQYEGMVV

SEQ ID NO: 56128 - protein, 35 aa, Artificial Sequence; identical to SEQ ID NO: 35420
  Cyclic GFR-binding peptide
  MOD_RES (2)..(3)..(35): Xaa is C or S

SEQ ID NO: 56129 - protein, 38 aa, Artificial Sequence; identical to SEQ ID NO: 38295
  Cyclic GFR-binding peptide
  MOD_RES (3)..(4)..(36)..(38): Xaa is C or S

SEQ ID NO: 56130 - protein, 40 aa, Artificial Sequence; identical to SEQ ID NO: 35422
  Cyclic GFR-binding peptide
  MOD_RES (4)..(5)..(37)..(39): Xaa is C or S

SEQ ID NO: 56131 - protein, 29 aa, Artificial Sequence
  Cyclic GFR-binding peptide
  MOD_RES (28)..(28): Xaa is C or S
LSPISMLYIDENEKVVYKQYEDMVVEGXG

SEQ ID NO: 56132 - protein, 33 aa, Artificial Sequence; identical to SEQ ID NO: 35428
  Cyclic GFR-binding peptide
  MOD_RES (4)..(4): Xaa is C or S

SEQ ID NO: 56133 - protein, 30 aa, Artificial Sequence
  Cyclic GFR-binding peptide
APVKTSPISMLYIDNGRVLLYKQYEMIVEE

SEQ ID NO: 56134 - protein, 28 aa, Artificial Sequence
  Cyclic GFR-binding peptide
  MOD_RES (27)..(27): Xaa is C or S
SPISVLYIDDSSNVIYKQYENMVVRAXG

SEQ ID NO: 56135 - protein, 35 aa, Artificial Sequence
  Cyclic GFR-binding peptide
  MOD_RES (2)..(3)..(35): Xaa is C or S
PXXTPTKMSPISMLYINDKQQIIYKQYEGMVVDRX

SEQ ID NO: 56136 - protein, 37 aa, Artificial Sequence
  Cyclic GFR-binding peptide
  MOD_RES (4)..(5)..(36): Xaa is C or S
PSTXXAPVKTSPISMLYIDNGRVLLYKQYEMIVEEXG

SEQ ID NO: 56137 - protein, 27 aa, Artificial Sequence
  Cyclic GFR-binding peptide
  MOD_RES (1)..(2): Xaa is C or S
XXAPTKLSPISVLYIDSSNNVIYKQYE

SEQ ID NO: 56138 - protein, 26 aa, Artificial Sequence
  Cyclic GFR-binding peptide
KLSPISVLYIDDMGVPTYKQYEEGMS

SEQ ID NO: 56139 - protein, 34 aa, Artificial Sequence
  Cyclic GFR-binding peptide
  MOD_RES (4)..(5): Xaa is C or S
PPTXXVPTRLSPISILYIDSANNVVYKQYEDMVV

SEQ ID NO: 56140 - protein, 31 aa, Artificial Sequence; identical to SEQ ID NO: 35443
  Cyclic GFR-binding peptide
  MOD_RES (5)..(6): Xaa is C or S

SEQ ID NO: 56141 - protein, 29 aa, Artificial Sequence
  Cyclic GFR-binding peptide
  MOD_RES (2)..(3): Xaa is C or S
AXXAPTKLSPISVLYIDSSNNVIYKQYEN

SEQ ID NO: 56142 - protein, 29 aa, Artificial Sequence
  Cyclic GFR-binding peptide
TKLSPISILYIDKGVVTYYKQYEGMAVSE

SEQ ID NO: 56143 - protein, 32 aa, Artificial Sequence
  Cyclic GFR-binding peptide
  MOD_RES (2)..(3): Xaa is C or S
TXXAPVKTSPISMLYIDNGRVLLYKQYEMIVE

SEQ ID NO: 56144 - protein, 27 aa, Artificial Sequence
  Cyclic GFR-binding peptide
LSPISMLYIDENEKVVYKQYEDMVVEG

SEQ ID NO: 56145 - protein, 36 aa, Artificial Sequence; identical to SEQ ID NO: 38325
  Cyclic GFR-binding peptide
  MOD_RES (2)..(3)..(36): Xaa is C or S

SEQ ID NO: 56146 - protein, 38 aa, Artificial Sequence; identical to SEQ ID NO: 38326
  Cyclic GFR-binding peptide
  MOD_RES (5)..(6)..(38): Xaa is C or S

SEQ ID NO: 56147 - protein, 31 aa, Artificial Sequence; identical to SEQ ID NO: 38329
  Cyclic GFR-binding peptide
  MOD_RES (3)..(4): Xaa is C or S

SEQ ID NO: 56148 - protein, 37 aa, Artificial Sequence; identical to SEQ ID NO: 35460
  Cyclic GFR-binding peptide
  MOD_RES (2)..(3)..(36): Xaa is C or S

SEQ ID NO: 56149 - protein, 40 aa, Artificial Sequence; identical to SEQ ID NO: 35461
  Cyclic GFR-binding peptide
  MOD_RES (5)..(6)..(38)..(40): Xaa is C or S

SEQ ID NO: 56150 - protein, 37 aa, Artificial Sequence; identical to SEQ ID NO: 35462
  Cyclic GFR-binding peptide
  MOD_RES (5)..(6): Xaa is C or S

SEQ ID NO: 56151 - protein, 29 aa, Artificial Sequence
  Cyclic GFR-binding peptide
  MOD_RES (28)..(28): Xaa is C or S
LSPISVLYIDDSSNVIYKQYENMVVRAXG

SEQ ID NO: 56152 - protein, 35 aa, Artificial Sequence
  Cyclic GFR-binding peptide
  MOD_RES (1)..(32)..(34): Xaa is C or S
XAPVKTSPISMLYIDNGRVLLYKQYEMIVEEXGXL

SEQ ID NO: 56153 - protein, 30 aa, Artificial Sequence; identical to SEQ ID NO: 17427
  Cyclic GFR-binding peptide
  MOD_RES (27)..(29): Xaa is C or S

SEQ ID NO: 56154 - protein, 33 aa, Artificial Sequence; identical to SEQ ID NO: 38347
  Cyclic GFR-binding peptide
  MOD_RES (1)..(2): Xaa is C or S

SEQ ID NO: 56155 - protein, 29 aa, Artificial Sequence
  Cyclic GFR-binding peptide
  MOD_RES (29)..(29): Xaa is C or S
ELSPISMLYIDENEKVVYKQYEDMVVEGX

SEQ ID NO: 56156 - protein, 31 aa, Artificial Sequence; identical to SEQ ID NO: 35468
  Cyclic GFR-binding peptide
  MOD_RES (28)..(30): Xaa is C or S

SEQ ID NO: 56157 - protein, 27 aa, Artificial Sequence
  Cyclic GFR-binding peptide
LSPISILYIDKGVVTYYKQYEGMAVSE

SEQ ID NO: 56158 - protein, 41 aa, Artificial Sequence; identical to SEQ ID NO: 35470
  Cyclic GFR-binding peptide
  MOD_RES (5)..(6)..(38)..(40): Xaa is C or S

SEQ ID NO: 56159 - protein, 39 aa, Artificial Sequence
  Cyclic GFR-binding peptide
  MOD_RES (4)..(5)..(37)..(39): Xaa is C or S
PPTXXVPTRLSPISILYIDSANNVVYKQYEDMVVESXGX

SEQ ID NO: 56160 - protein, 30 aa, Artificial Sequence; identical to SEQ ID NO: 35474
  Cyclic GFR-binding peptide
  MOD_RES (2)..(3): Xaa is C or S

SEQ ID NO: 56161 - protein, 24 aa, Artificial Sequence
  Cyclic GFR-binding peptide
SPISMLYIDENEKVVYKQYEDMVV

SEQ ID NO: 56162 - protein, 40 aa, Artificial Sequence; identical to SEQ ID NO: 38362
  Cyclic GFR-binding peptide
  MOD_RES (4)..(5)..(38)..(40): Xaa is C or S

SEQ ID NO: 56163 - protein, 32 aa, Artificial Sequence; identical to SEQ ID NO: 19785
  Cyclic GFR-binding peptide
  MOD_RES (29)..(31): Xaa is C or S

SEQ ID NO: 56164 - protein, 30 aa, Artificial Sequence; identical to SEQ ID NO: 35478
  Cyclic GFR-binding peptide
  MOD_RES (29)..(29): Xaa is C or S

SEQ ID NO: 56165 - protein, 32 aa, Artificial Sequence
  Cyclic GFR-binding peptide
  MOD_RES (30)..(32): Xaa is C or S
PVKTSPISMLYIDNGRVLLYKQYEMIVEEXGX

SEQ ID NO: 56166 - protein, 34 aa, Artificial Sequence; identical to SEQ ID NO: 38363
  Cyclic GFR-binding peptide
  MOD_RES (31)..(33): Xaa is C or S

SEQ ID NO: 56167 - protein, 26 aa, Artificial Sequence
  Cyclic GFR-binding peptide
  MOD_RES (1)..(1): Xaa is C or S
XVPTRLSPISILYIDSANNVVYKQYE

SEQ ID NO: 56168 - protein, 33 aa, Artificial Sequence
  Cyclic GFR-binding peptide
  MOD_RES (30)..(32): Xaa is C or S
TRLSPISILYIDSANNVVYKQYEDMVVESXGXR

SEQ ID NO: 56169 - protein, 32 aa, Artificial Sequence; identical to SEQ ID NO: 38367
  Cyclic GFR-binding peptide
  MOD_RES (2)..(3): Xaa is C or S

SEQ ID NO: 56170 - protein, 32 aa, Artificial Sequence; identical to SEQ ID NO: 38369
  Cyclic GFR-binding peptide
  MOD_RES (1)..(2): Xaa is C or S

SEQ ID NO: 56171 - protein, 27 aa, Artificial Sequence
  Cyclic GFR-binding peptide
PTELSPISMLYIDENEKVVYKQYEDMV

SEQ ID NO: 56172 - protein, 41 aa, Artificial Sequence; identical to SEQ ID NO: 19796
  Cyclic GFR-binding peptide
  MOD_RES (6)..(7)..(38)..(40): Xaa is C or S

SEQ ID NO: 56173 - protein, 33 aa, Artificial Sequence; identical to SEQ ID NO: 38376
  Cyclic GFR-binding peptide
  MOD_RES (6)..(6): Xaa is C or S

SEQ ID NO: 56174 - protein, 37 aa, Artificial Sequence; identical to SEQ ID NO: 35492
  Cyclic GFR-binding peptide
  MOD_RES (5)..(6): Xaa is C or S

SEQ ID NO: 56175 - protein, 34 aa, Artificial Sequence; identical to SEQ ID NO: 38381
  Cyclic GFR-binding peptide
  MOD_RES (4)..(5): Xaa is C or S

SEQ ID NO: 56176 - protein, 26 aa, Artificial Sequence
  Cyclic GFR-binding peptide
TKMSPISMLYINDKQQIIYKQYEGMV

SEQ ID NO: 56177 - protein, 26 aa, Artificial Sequence
  Cyclic GFR-binding peptide
PVKTSPISMLYIDNGRVLLYKQYEMI

SEQ ID NO: 56178 - protein, 32 aa, Artificial Sequence
  Cyclic GFR-binding peptide
  MOD_RES (5)..(6): Xaa is C or S
SAGPXXTPTKMSPISMLYINDKQQIIYKQYEG

SEQ ID NO: 56179 - protein, 30 aa, Artificial Sequence; identical to SEQ ID NO: 38386
  Cyclic GFR-binding peptide
  MOD_RES (1)..(1): Xaa is C or S

SEQ ID NO: 56180 - protein, 29 aa, Artificial Sequence
  Cyclic GFR-binding peptide
  MOD_RES (3)..(4): Xaa is C or S
KAXXVPTELSPISMLYIDEYDKVVYKQYE

SEQ ID NO: 56181 - protein, 36 aa, Artificial Sequence; identical to SEQ ID NO: 35502
  Cyclic GFR-binding peptide
  MOD_RES (6)..(7): Xaa is C or S

SEQ ID NO: 56182 - protein, 31 aa, Artificial Sequence
  Cyclic GFR-binding peptide
  MOD_RES (1)..(1): Xaa is C or S
XVPTRLSPISILYIDSANNVVYKQYEDMVVE

SEQ ID NO: 56183 - protein, 26 aa, Artificial Sequence
  Cyclic GFR-binding peptide
LSPISVLYIDDMGVPTYKQYEEGMSV

SEQ ID NO: 56184 - protein, 35 aa, Artificial Sequence; identical to SEQ ID NO: 35511
  Cyclic GFR-binding peptide
  MOD_RES (3)..(4): Xaa is C or S

SEQ ID NO: 56185 - protein, 29 aa, Artificial Sequence
  Cyclic GFR-binding peptide
VPTKLSPISILYIDKGVVTYYKQYEGMAV

SEQ ID NO: 56186 - protein, 29 aa, Artificial Sequence
  Cyclic GFR-binding peptide
VPTKLSPISVLYIDDMGVPTYKQYEEGMS

SEQ ID NO: 56187 - protein, 31 aa, Artificial Sequence; identical to SEQ ID NO: 38408
  Cyclic GFR-binding peptide
  MOD_RES (1)..(2): Xaa is C or S

SEQ ID NO: 56188 - protein, 32 aa, Artificial Sequence; identical to SEQ ID NO: 38409
  Cyclic GFR-binding peptide
  MOD_RES (1)..(2): Xaa is C or S

SEQ ID NO: 56189 - protein, 26 aa, Artificial Sequence
  Cyclic GFR-binding peptide
PTRLSPISILYIDSANNVVYKQYEDM

SEQ ID NO: 56190 - protein, 32 aa, Artificial Sequence; identical to SEQ ID NO: 38411
  Cyclic GFR-binding peptide
  MOD_RES (1)..(1): Xaa is C or S

SEQ ID NO: 56191 - protein, 32 aa, Artificial Sequence
  Cyclic GFR-binding peptide
  MOD_RES (4)..(5): Xaa is C or S
AGPXXTPTKMSPISMLYINDKQQIIYKQYEGM

SEQ ID NO: 56192 - protein, 29 aa, Artificial Sequence
  Cyclic GFR-binding peptide
  MOD_RES (2)..(3): Xaa is C or S
AXXVPTKLSPISVLYIDDMGVPTYKQYEE

SEQ ID NO: 56193 - protein, 28 aa, Artificial Sequence
  Cyclic GFR-binding peptide
KLSPISVLYIDSSNNVIYKQYENMVVKA

SEQ ID NO: 56194 - protein, 39 aa, Artificial Sequence; identical to SEQ ID NO: 38415
  Cyclic GFR-binding peptide
  MOD_RES (5)..(6)..(38): Xaa is C or S

SEQ ID NO: 56195 - protein, 31 aa, Artificial Sequence; identical to SEQ ID NO: 38417
  Cyclic GFR-binding peptide

SEQ ID NO: 56196 - protein, 30 aa, Artificial Sequence; identical to SEQ ID NO: 38420
  Cyclic GFR-binding peptide

SEQ ID NO: 56197 - protein, 34 aa, Artificial Sequence
  Cyclic GFR-binding peptide
  MOD_RES (6)..(7): Xaa is C or S
GSAGPXXTPTKMSPISMLYINDKQQIIYKQYEGM

SEQ ID NO: 56198 - protein, 32 aa, Artificial Sequence
  Cyclic GFR-binding peptide
  MOD_RES (29)..(31): Xaa is C or S
VKTSPISMLYIDNGRVLLYKQYEMIVEEXGXL

SEQ ID NO: 56199 - protein, 23 aa, Artificial Sequence
  Cyclic GFR-binding peptide
SPISVLYIDDMGVPTYKQYEEGM

SEQ ID NO: 56200 - protein, 24 aa, Artificial Sequence
  Cyclic GFR-binding peptide
SPISMLYIDEYDKVVYKQYEEMVV

SEQ ID NO: 56201 - protein, 30 aa, Artificial Sequence; identical to SEQ ID NO: 35541
  Cyclic GFR-binding peptide
  MOD_RES (29)..(29): Xaa is C or S

SEQ ID NO: 56202 - protein, 32 aa, Artificial Sequence; identical to SEQ ID NO: 38429
  Cyclic GFR-binding peptide
  MOD_RES (4)..(5): Xaa is C or S

SEQ ID NO: 56203 - protein, 42 aa, Artificial Sequence; identical to SEQ ID NO: 17487
  Cyclic GFR-binding peptide
  MOD_RES (6)..(7)..(39)..(41): Xaa is C or S

SEQ ID NO: 56204 - protein, 29 aa, Artificial Sequence
  Cyclic GFR-binding peptide
  MOD_RES (26)..(28): Xaa is C or S
SPISILFIVGRTPKVYKQYEMVVKSXKXS

SEQ ID NO: 56205 - protein, 32 aa, Artificial Sequence; identical to SEQ ID NO: 35546
  Cyclic GFR-binding peptide
  MOD_RES (5)..(6): Xaa is C or S

SEQ ID NO: 56206 - protein, 35 aa, Artificial Sequence; identical to SEQ ID NO: 35547
  Cyclic GFR-binding peptide
  MOD_RES (3)..(4): Xaa is C or S

SEQ ID NO: 56207 - protein, 36 aa, Artificial Sequence; identical to SEQ ID NO: 38434
  Cyclic GFR-binding peptide
  MOD_RES (5)..(6): Xaa is C or S

SEQ ID NO: 56208 - protein, 37 aa, Artificial Sequence
  Cyclic GFR-binding peptide
  MOD_RES (4)..(5)..(37): Xaa is C or S
PPTXXVPTRLSPISILYIDSANNVVYKQYEDMVVESX

SEQ ID NO: 56209 - protein, 29 aa, Artificial Sequence
  Cyclic GFR-binding peptide
  MOD_RES (1)..(2): Xaa is C or S
XXVPTELSPISMLYIDENEKVVYKQYEDM

SEQ ID NO: 56210 - protein, 37 aa, Artificial Sequence; identical to SEQ ID NO: 38440
  Cyclic GFR-binding peptide
  MOD_RES (3)..(4)..(36): Xaa is C or S

SEQ ID NO: 56211 - protein, 34 aa, Artificial Sequence; identical to SEQ ID NO: 35553
  Cyclic GFR-binding peptide
  MOD_RES (31)..(33): Xaa is C or S

SEQ ID NO: 56212 - protein, 42 aa, Artificial Sequence; identical to SEQ ID NO: 17497
  Cyclic GFR-binding peptide
  MOD_RES (7)..(39)..(41): Xaa is C or S

SEQ ID NO: 56213 - protein, 30 aa, Artificial Sequence; identical to SEQ ID NO: 35558
  Cyclic GFR-binding peptide
  MOD_RES (3)..(4): Xaa is C or S

SEQ ID NO: 56214 - protein, 37 aa, Artificial Sequence; identical to SEQ ID NO: 35561
  Cyclic GFR-binding peptide
  MOD_RES (3)..(4)..(36): Xaa is C or S

SEQ ID NO: 56215 - protein, 22 aa, Artificial Sequence
  Cyclic GFR-binding peptide
SPISILYIDSANNVVYKQYEDM

SEQ ID NO: 56216 - protein, 31 aa, Artificial Sequence; identical to SEQ ID NO: 17505
  Cyclic GFR-binding peptide
  MOD_RES (28)..(30): Xaa is C or S

SEQ ID NO: 56217 - protein, 35 aa, Artificial Sequence; identical to SEQ ID NO: 35563
  Cyclic GFR-binding peptide
  MOD_RES (1)..(33)..(35): Xaa is C or S

SEQ ID NO: 56218 - protein, 25 aa, Artificial Sequence
  Cyclic GFR-binding peptide
KLSPISILYIDKGVVTYYKQYEGMA

SEQ ID NO: 56219 - protein, 35 aa, Artificial Sequence; identical to SEQ ID NO: 35565
  Cyclic GFR-binding peptide
  MOD_RES (4)..(5): Xaa is C or S

SEQ ID NO: 56220 - protein, 24 aa, Artificial Sequence
  Cyclic GFR-binding peptide
LSPISMLYIDEYDKVVYKQYEEMV

SEQ ID NO: 56221 - protein, 29 aa, Artificial Sequence
  Cyclic GFR-binding peptide
  MOD_RES (28)..(28): Xaa is C or S
SPISVLYIDDMGVPTYKQYEEGMSVAEXG

SEQ ID NO: 56222 - protein, 26 aa, Artificial Sequence
  Cyclic GFR-binding peptide
PTELSPISMLYIDENEKVVYKQYEDM

SEQ ID NO: 56223 - protein, 31 aa, Artificial Sequence; identical to SEQ ID NO: 38461
  Cyclic GFR-binding peptide
  MOD_RES (1)..(1): Xaa is C or S

SEQ ID NO: 56224 - protein, 32 aa, Artificial Sequence
  Cyclic GFR-binding peptide
  MOD_RES (3)..(4): Xaa is C or S
STXXAPVKTSPISMLYIDNGRVLLYKQYEMIV

SEQ ID NO: 56225 - protein, 36 aa, Artificial Sequence; identical to SEQ ID NO: 35572
  Cyclic GFR-binding peptide
  MOD_RES (1)..(2)..(34)..(36): Xaa is C or S

SEQ ID NO: 56226 - protein, 38 aa, Artificial Sequence
  Cyclic GFR-binding peptide
  MOD_RES (5)..(6)..(38): Xaa is C or S
TPPTXXVPTRLSPISILYIDSANNVVYKQYEDMVVESX

SEQ ID NO: 56227 - protein, 39 aa, Artificial Sequence; identical to SEQ ID NO: 38468
  Cyclic GFR-binding peptide
  MOD_RES (6)..(7)..(39): Xaa is C or S

SEQ ID NO: 56228 - protein, 32 aa, Artificial Sequence
  Cyclic GFR-binding peptide
  MOD_RES (5)..(6): Xaa is C or S
TPPTXXVPTRLSPISILYIDSANNVVYKQYED

SEQ ID NO: 56229 - protein, 38 aa, Artificial Sequence
  Cyclic GFR-binding peptide
  MOD_RES (6)..(7): Xaa is C or S
HVPKPXXAPTKLSPISVLYIDDSSNVIYKQYENMVVRS

SEQ ID NO: 56230 - protein, 37 aa, Artificial Sequence; identical to SEQ ID NO: 35579
  Cyclic GFR-binding peptide
  MOD_RES (2)..(3)..(35)..(37): Xaa is C or S

SEQ ID NO: 56231 - protein, 29 aa, Artificial Sequence
  Cyclic GFR-binding peptide
  MOD_RES (27)..(29): Xaa is C or S
SPISVLYIDDSSNVIYKQYENMVVRAXGX

SEQ ID NO: 56232 - protein, 22 aa, Artificial Sequence
  Cyclic GFR-binding peptide
KMSPISMLYINDKQQIIYKQYE

SEQ ID NO: 56233 - protein, 32 aa, Artificial Sequence; identical to SEQ ID NO: 35587
  Cyclic GFR-binding peptide
  MOD_RES (31)..(31): Xaa is C or S

SEQ ID NO: 56234 - protein, 35 aa, Artificial Sequence; identical to SEQ ID NO: 38481
  Cyclic GFR-binding peptide
  MOD_RES (32)..(34): Xaa is C or S

SEQ ID NO: 56235 - protein, 33 aa, Artificial Sequence; identical to SEQ ID NO: 38482
  Cyclic GFR-binding peptide
  MOD_RES (1)..(1): Xaa is C or S

SEQ ID NO: 56236 - protein, 28 aa, Artificial Sequence
  Cyclic GFR-binding peptide
TELSPISMLYIDENEKVVYKQYEDMVVE

SEQ ID NO: 56237 - protein, 39 aa, Artificial Sequence
  Cyclic GFR-binding peptide
  MOD_RES (6)..(7)..(38): Xaa is C or S
RVPSTXXAPVKTSPISMLYIDNGRVLLYKQYEMIVEEXG

SEQ ID NO: 56238 - protein, 28 aa, Artificial Sequence
  Cyclic GFR-binding peptide
PTKLSPISILYIDKGVVTYYKQYEGMAV

SEQ ID NO: 56239 - protein, 33 aa, Artificial Sequence; identical to SEQ ID NO: 35599
  Cyclic GFR-binding peptide
  MOD_RES (1)..(2): Xaa is C or S

SEQ ID NO: 56240 - protein, 33 aa, Artificial Sequence; identical to SEQ ID NO: 38486
  Cyclic GFR-binding peptide
  MOD_RES (2)..(3): Xaa is C or S

SEQ ID NO: 56241 - protein, 34 aa, Artificial Sequence; identical to SEQ ID NO: 17534
  Cyclic GFR-binding peptide
  MOD_RES (31)..(33): Xaa is C or S

SEQ ID NO: 56242 - protein, 30 aa, Artificial Sequence; identical to SEQ ID NO: 35605
  Cyclic GFR-binding peptide
  MOD_RES (1)..(2): Xaa is C or S

SEQ ID NO: 56243 - protein, 33 aa, Artificial Sequence; identical to SEQ ID NO: 35606
  Cyclic GFR-binding peptide
  MOD_RES (4)..(5): Xaa is C or S

SEQ ID NO: 56244 - protein, 41 aa, Artificial Sequence
  Cyclic GFR-binding peptide
  MOD_RES (6)..(7)..(39)..(41): Xaa is C or S
HVPKPXXAPTKLSPISVLYIDDSSNVIYKQYENMVVRSXGX

SEQ ID NO: 56245 - protein, 38 aa, Artificial Sequence; identical to SEQ ID NO: 38493
  Cyclic GFR-binding peptide
  MOD_RES (6)..(7): Xaa is C or S

SEQ ID NO: 56246 - protein, 35 aa, Artificial Sequence
  Cyclic GFR-binding peptide
  MOD_RES (2)..(3)..(35): Xaa is C or S
TXXVPTRLSPISILYIDSANNVVYKQYEDMVVESX

SEQ ID NO: 56247 - protein, 42 aa, Artificial Sequence
  Cyclic GFR-binding peptide
  MOD_RES (6)..(7)..(39)..(41): Xaa is C or S
STPPTXXVPTRLSPISILYIDSANNVVYKQYEDMVVESXGXR

SEQ ID NO: 56248 - protein, 40 aa, Artificial Sequence
  Cyclic GFR-binding peptide
  MOD_RES (6)..(7)..(39): Xaa is C or S
STPPTXXVPTRLSPISILYIDSANNVVYKQYEDMVVESXG

SEQ ID NO: 56249 - protein, 27 aa, Artificial Sequence
  Cyclic GFR-binding peptide
TELSPISMLYIDEYDKVVYKQYEEMVV

SEQ ID NO: 56250 - protein, 32 aa, Artificial Sequence; identical to SEQ ID NO: 38504
  Cyclic GFR-binding peptide
  MOD_RES (29)..(31): Xaa is C or S

SEQ ID NO: 56251 - protein, 33 aa, Artificial Sequence; identical to SEQ ID NO: 38511
  Cyclic GFR-binding peptide
  MOD_RES (1)..(2): Xaa is C or S

SEQ ID NO: 56252 - protein, 31 aa, Artificial Sequence; identical to SEQ ID NO: 35628
  Cyclic GFR-binding peptide
  MOD_RES (2)..(3): Xaa is C or S

SEQ ID NO: 56253 - protein, 31 aa, Artificial Sequence
  Cyclic GFR-binding peptide
  MOD_RES (30)..(30): Xaa is C or S
TKMSPISMLYINDKQQIIYKQYEGMVVDRXG

SEQ ID NO: 56254 - protein, 31 aa, Artificial Sequence
  Cyclic GFR-binding peptide
  MOD_RES (31)..(31): Xaa is C or S
APVKTSPISMLYIDNGRVLLYKQYEMIVEEX

SEQ ID NO: 56255 - protein, 37 aa, Artificial Sequence; identical to SEQ ID NO: 35632
  Cyclic GFR-binding peptide
  MOD_RES (5)..(6): Xaa is C or S

SEQ ID NO: 56256 - protein, 23 aa, Artificial Sequence
  Cyclic GFR-binding peptide
TKLSPISVLYIDSSNNVIYKQYE

SEQ ID NO: 56257 - protein, 29 aa, Artificial Sequence
  Cyclic GFR-binding peptide
  MOD_RES (26)..(28): Xaa is C or S
SPISILFIIGKTPKIYKQYEMIVKSXKXS

SEQ ID NO: 56258 - protein, 31 aa, Artificial Sequence; identical to SEQ ID NO: 38524
  Cyclic GFR-binding peptide
  MOD_RES (30)..(30): Xaa is C or S

SEQ ID NO: 56259 - protein, 27 aa, Artificial Sequence
  Cyclic GFR-binding peptide
  MOD_RES (1)..(2): Xaa is C or S
XXVPTRLSPISILYIDSANNVVYKQYE

SEQ ID NO: 56260 - protein, 29 aa, Artificial Sequence
  Cyclic GFR-binding peptide
  MOD_RES (28)..(28): Xaa is C or S
MSPISMLYINDKQQIIYKQYEGMVVDRXG

SEQ ID NO: 56261 - protein, 23 aa, Artificial Sequence
  Cyclic GFR-binding peptide
LSPISMLYIDENEKVVYKQYEDM

SEQ ID NO: 56262 - protein, 26 aa, Artificial Sequence
  Cyclic GFR-binding peptide
SPISVLYIDSSNNVIYKQYENMVVKA

SEQ ID NO: 56263 - protein, 25 aa, Artificial Sequence
  Cyclic GFR-binding peptide
SPISVLYIDDSSNVIYKQYENMVVR

SEQ ID NO: 56264 - protein, 32 aa, Artificial Sequence; identical to SEQ ID NO: 35651
  Cyclic GFR-binding peptide
  MOD_RES (4)..(5): Xaa is C or S

SEQ ID NO: 56265 - protein, 31 aa, Artificial Sequence; identical to SEQ ID NO: 35653
  Cyclic GFR-binding peptide
  MOD_RES (1)..(1): Xaa is C or S

SEQ ID NO: 56266 - protein, 35 aa, Artificial Sequence; identical to SEQ ID NO: 35654
  Cyclic GFR-binding peptide
  MOD_RES (7)..(7): Xaa is C or S

SEQ ID NO: 56267 - protein, 40 aa, Artificial Sequence; identical to SEQ ID NO: 35656
  Cyclic GFR-binding peptide
  MOD_RES (6)..(7)..(39): Xaa is C or S

SEQ ID NO: 56268 - protein, 25 aa, Artificial Sequence
  Cyclic GFR-binding peptide
KLSPISVLYIDDSSNVIYKQYENMV

SEQ ID NO: 56269 - protein, 31 aa, Artificial Sequence; identical to SEQ ID NO: 35664
  Cyclic GFR-binding peptide
  MOD_RES (31)..(31): Xaa is C or S

SEQ ID NO: 56270 - protein, 31 aa, Artificial Sequence; identical to SEQ ID NO: 35670
  Cyclic GFR-binding peptide
  MOD_RES (2)..(3): Xaa is C or S

SEQ ID NO: 56271 - protein, 32 aa, Artificial Sequence; identical to SEQ ID NO: 35672
  Cyclic GFR-binding peptide
  MOD_RES (29)..(31): Xaa is C or S

SEQ ID NO: 56272 - protein, 31 aa, Artificial Sequence; identical to SEQ ID NO: 35674
  Cyclic GFR-binding peptide
  MOD_RES (1)..(2): Xaa is C or S

SEQ ID NO: 56273 - protein, 21 aa, Artificial Sequence
  Cyclic GFR-binding peptide
SPISVLYIDDSSNVIYKQYEN

SEQ ID NO: 56274 - protein, 30 aa, Artificial Sequence; identical to SEQ ID NO: 35677
  Cyclic GFR-binding peptide
  MOD_RES (1)..(2): Xaa is C or S

SEQ ID NO: 56275 - protein, 42 aa, Artificial Sequence; identical to SEQ ID NO: 35679
  Cyclic GFR-binding peptide
  MOD_RES (6)..(7)..(39)..(41): Xaa is C or S

SEQ ID NO: 56276 - protein, 25 aa, Artificial Sequence
  Cyclic GFR-binding peptide
SPISMLYIDENEKVVYKQYEDMVVE

SEQ ID NO: 56277 - protein, 31 aa, Artificial Sequence; identical to SEQ ID NO: 35686
  Cyclic GFR-binding peptide
  MOD_RES (2)..(3): Xaa is C or S

SEQ ID NO: 56278 - protein, 37 aa, Artificial Sequence
  Cyclic GFR-binding peptide
  MOD_RES (1)..(2)..(34)..(36): Xaa is C or S
XXTPTKMSPISMLYINDKQQIIYKQYEGMVVDRXGXS

SEQ ID NO: 56279 - protein, 42 aa, Artificial Sequence; identical to SEQ ID NO: 17598
  Cyclic GFR-binding peptide
  MOD_RES (6)..(7)..(39)..(41): Xaa is C or S

SEQ ID NO: 56280 - protein, 40 aa, Artificial Sequence; identical to SEQ ID NO: 35689
  Cyclic GFR-binding peptide
  MOD_RES (5)..(6)..(38)..(40): Xaa is C or S

SEQ ID NO: 56281 - protein, 24 aa, Artificial Sequence
  Cyclic GFR-binding peptide
MSPISMLYINDKQQIIYKQYEGMV

SEQ ID NO: 56282 - protein, 28 aa, Artificial Sequence
  Cyclic GFR-binding peptide
  MOD_RES (28)..(28): Xaa is C or S
LSPISVLYIDDSSNVIYKQYENMVVRSX

SEQ ID NO: 56283 - protein, 29 aa, Artificial Sequence
  Cyclic GFR-binding peptide
  MOD_RES (28)..(28): Xaa is C or S
LSPISVLYIDDSSNVIYKQYENMVVRSXG

SEQ ID NO: 56284 - protein, 31 aa, Artificial Sequence; identical to SEQ ID NO: 35693
  Cyclic GFR-binding peptide
  MOD_RES (29)..(31): Xaa is C or S

SEQ ID NO: 56285 - protein, 33 aa, Artificial Sequence
  Cyclic GFR-binding peptide
  MOD_RES (5)..(6): Xaa is C or S
VPSTXXAPVKTSPISMLYIDNGRVLLYKQYEMI

SEQ ID NO: 56286 - protein, 37 aa, Artificial Sequence; identical to SEQ ID NO: 35698
  Cyclic GFR-binding peptide
  MOD_RES (2)..(3)..(35)..(37): Xaa is C or S

SEQ ID NO: 56287 - protein, 29 aa, Artificial Sequence
  Cyclic GFR-binding peptide
  MOD_RES (27)..(29): Xaa is C or S
TSPISMLYIDNGRVLLYKQYEMIVEEXGX

SEQ ID NO: 56288 - protein, 25 aa, Artificial Sequence
  Cyclic GFR-binding peptide
LSPISVLYIDDSSNVIYKQYENMVV

SEQ ID NO: 56289 - protein, 28 aa, Artificial Sequence
  Cyclic GFR-binding peptide
KMSPISMLYINDKQQIIYKQYEGMVVDR

SEQ ID NO: 56290 - protein, 39 aa, Artificial Sequence; identical to SEQ ID NO: 35705
  Cyclic GFR-binding peptide
  MOD_RES (7)..(39): Xaa is C or S

SEQ ID NO: 56291 - protein, 34 aa, Artificial Sequence; identical to SEQ ID NO: 38581
  Cyclic GFR-binding peptide
  MOD_RES (1)..(2)..(34): Xaa is C or S

SEQ ID NO: 56292 - protein, 31 aa, Artificial Sequence; identical to SEQ ID NO: 17612
  Cyclic GFR-binding peptide
  MOD_RES (28)..(30): Xaa is C or S

SEQ ID NO: 56293 - protein, 31 aa, Artificial Sequence; identical to SEQ ID NO: 38587
  Cyclic GFR-binding peptide
  MOD_RES (31)..(31): Xaa is C or S

SEQ ID NO: 56294 - protein, 27 aa, Artificial Sequence
  Cyclic GFR-binding peptide
ELSPISMLYIDENEKVVYKQYEDMVVE

SEQ ID NO: 56295 - protein, 33 aa, Artificial Sequence; identical to SEQ ID NO: 38595
  Cyclic GFR-binding peptide
  MOD_RES (2)..(3): Xaa is C or S

SEQ ID NO: 56296 - protein, 32 aa, Artificial Sequence; identical to SEQ ID NO: 38599
  Cyclic GFR-binding peptide
  MOD_RES (6)..(7): Xaa is C or S

SEQ ID NO: 56297 - protein, 31 aa, Artificial Sequence; identical to SEQ ID NO: 35721
  Cyclic GFR-binding peptide
  MOD_RES (4)..(5): Xaa is C or S

SEQ ID NO: 56298 - protein, 28 aa, Artificial Sequence
  Cyclic GFR-binding peptide
PTKMSPISMLYINDKQQIIYKQYEGMVV

SEQ ID NO: 56299 - protein, 33 aa, Artificial Sequence
  Cyclic GFR-binding peptide
  MOD_RES (6)..(7): Xaa is C or S
HVPKPXXAPTKLSPISVLYIDDSSNVIYKQYEN

SEQ ID NO: 56300 - protein, 28 aa, Artificial Sequence
  Cyclic GFR-binding peptide
PTQLSPISVLYIDDSSNVIYKQYENMVV

SEQ ID NO: 56301 - protein, 37 aa, Artificial Sequence; identical to SEQ ID NO: 38607
  Cyclic GFR-binding peptide
  MOD_RES (2)..(3)..(35)..(37): Xaa is C or S

SEQ ID NO: 56302 - protein, 36 aa, Artificial Sequence; identical to SEQ ID NO: 35729
  Cyclic GFR-binding peptide
  MOD_RES (1)..(33)..(35): Xaa is C or S

SEQ ID NO: 56303 - protein, 32 aa, Artificial Sequence; identical to SEQ ID NO: 35736
  Cyclic GFR-binding peptide
  MOD_RES (1)..(1): Xaa is C or S

SEQ ID NO: 56304 - protein, 27 aa, Artificial Sequence
  Cyclic GFR-binding peptide
  MOD_RES (1)..(2): Xaa is C or S
XXAPTKLSPISVLYIDDSSNVIYKQYE

SEQ ID NO: 56305 - protein, 30 aa, Artificial Sequence; identical to SEQ ID NO: 35744
  Cyclic GFR-binding peptide
  MOD_RES (1)..(1): Xaa is C or S

SEQ ID NO: 56306 - protein, 31 aa, Artificial Sequence; identical to SEQ ID NO: 20005
  Cyclic GFR-binding peptide
  MOD_RES (28)..(30): Xaa is C or S

SEQ ID NO: 56307 - protein, 27 aa, Artificial Sequence
  Cyclic GFR-binding peptide
VPTELSPISMLYIDENEKVVYKQYEDM

SEQ ID NO: 56308 - protein, 32 aa, Artificial Sequence; identical to SEQ ID NO: 35750
  Cyclic GFR-binding peptide
  MOD_RES (1)..(1): Xaa is C or S

SEQ ID NO: 56309 - protein, 29 aa, Artificial Sequence
  Cyclic GFR-binding peptide
  MOD_RES (1)..(1): Xaa is C or S
XTPTKMSPISMLYINDKQQIIYKQYEGMV

SEQ ID NO: 56310 - protein, 33 aa, Artificial Sequence; identical to SEQ ID NO: 35754
  Cyclic GFR-binding peptide
  MOD_RES (1)..(2): Xaa is C or S

SEQ ID NO: 56311 - protein, 26 aa, Artificial Sequence
  Cyclic GFR-binding peptide
LSPISILYIDKGVVTYYKQYEGMAVS

SEQ ID NO: 56312 - protein, 32 aa, Artificial Sequence; identical to SEQ ID NO: 35756
  Cyclic GFR-binding peptide
  MOD_RES (29)..(31): Xaa is C or S

SEQ ID NO: 56313 - protein, 32 aa, Artificial Sequence; identical to SEQ ID NO: 38624
  Cyclic GFR-binding peptide
  MOD_RES (3)..(4): Xaa is C or S

SEQ ID NO: 56314 - protein, 37 aa, Artificial Sequence; identical to SEQ ID NO: 35757
  Cyclic GFR-binding peptide
  MOD_RES (4)..(5)..(37): Xaa is C or S

SEQ ID NO: 56315 - protein, 39 aa, Artificial Sequence
  Cyclic GFR-binding peptide
  MOD_RES (6)..(7)..(39): Xaa is C or S
GSAGPXXTPTKMSPISMLYINDKQQIIYKQYEGMVVDRX

SEQ ID NO: 56316 - protein, 29 aa, Artificial Sequence
  Cyclic GFR-binding peptide
VPTELSPISMLYIDEYDKVVYKQYEEMVV

SEQ ID NO: 56317 - protein, 37 aa, Artificial Sequence; identical to SEQ ID NO: 35761
  Cyclic GFR-binding peptide
  MOD_RES (1)..(2)..(34)..(36): Xaa is C or S

SEQ ID NO: 56318 - protein, 29 aa, Artificial Sequence
  Cyclic GFR-binding peptide
TRLSPISILYIDSANNVVYKQYEDMVVES

SEQ ID NO: 56319 - protein, 36 aa, Artificial Sequence; identical to SEQ ID NO: 38627
  Cyclic GFR-binding peptide
  MOD_RES (4)..(5): Xaa is C or S

SEQ ID NO: 56320 - protein, 28 aa, Artificial Sequence
  Cyclic GFR-binding peptide
  MOD_RES (3)..(3): Xaa is C or S
PTXAPTKLSPISVLYIDDSSNVIYKQYE

SEQ ID NO: 56321 - protein, 32 aa, Artificial Sequence; identical to SEQ ID NO: 35763
  Cyclic GFR-binding peptide
  MOD_RES (2)..(3): Xaa is C or S

SEQ ID NO: 56322 - protein, 32 aa, Artificial Sequence; identical to SEQ ID NO: 38629
  Cyclic GFR-binding peptide
  MOD_RES (3)..(4): Xaa is C or S

SEQ ID NO: 56323 - protein, 36 aa, Artificial Sequence; identical to SEQ ID NO: 35767
  Cyclic GFR-binding peptide
  MOD_RES (2)..(3)..(35): Xaa is C or S

SEQ ID NO: 56324 - protein, 33 aa, Artificial Sequence; identical to SEQ ID NO: 35769
  Cyclic GFR-binding peptide
  MOD_RES (30)..(32): Xaa is C or S

SEQ ID NO: 56325 - protein, 32 aa, Artificial Sequence; identical to SEQ ID NO: 17656
  Cyclic GFR-binding peptide
  MOD_RES (29)..(31): Xaa is C or S

SEQ ID NO: 56326 - protein, 32 aa, Artificial Sequence; identical to SEQ ID NO: 38636
  Cyclic GFR-binding peptide
  MOD_RES (1)..(1): Xaa is C or S

SEQ ID NO: 56327 - protein, 23 aa, Artificial Sequence
  Cyclic GFR-binding peptide
TKLSPISILYIDKGVVTYYKQYE

SEQ ID NO: 56328 - protein, 30 aa, Artificial Sequence; identical to SEQ ID NO: 35775
  Cyclic GFR-binding peptide
  MOD_RES (30)..(30): Xaa is C or S

SEQ ID NO: 56329 - protein, 25 aa, Artificial Sequence
  Cyclic GFR-binding peptide
TPTKMSPISMLYINDKQQIIYKQYE

SEQ ID NO: 56330 - protein, 27 aa, Artificial Sequence
  Cyclic GFR-binding peptide
TELSPISMLYIDENEKVVYKQYEDMVV

SEQ ID NO: 56331 - protein, 27 aa, Artificial Sequence
  Cyclic GFR-binding peptide
  MOD_RES (1)..(1): Xaa is C or S
XVPTELSPISMLYIDENEKVVYKQYED

SEQ ID NO: 56332 - protein, 28 aa, Artificial Sequence
  Cyclic GFR-binding peptide
TKLSPISILYIDKGVVTYYKQYEGMAVS

SEQ ID NO: 56333 - protein, 31 aa, Artificial Sequence; identical to SEQ ID NO: 38646
  Cyclic GFR-binding peptide
  MOD_RES (1)..(2): Xaa is C or S

SEQ ID NO: 56334 - protein, 28 aa, Artificial Sequence
  Cyclic GFR-binding peptide
PTELSPISMLYIDENEKVVYKQYEDMVV

SEQ ID NO: 56335 - protein, 24 aa, Artificial Sequence
  Cyclic GFR-binding peptide
SPISILYIDSANNVVYKQYEDMVV

SEQ ID NO: 56336 - protein, 38 aa, Artificial Sequence; identical to SEQ ID NO: 35784
  Cyclic GFR-binding peptide
  MOD_RES (3)..(4)..(37): Xaa is C or S

SEQ ID NO: 56337 - protein, 30 aa, Artificial Sequence
  Cyclic GFR-binding peptide
  MOD_RES (28)..(30): Xaa is C or S
LSPISILYIDSANNVVYKQYEDMVVESXGX

SEQ ID NO: 56338 - protein, 32 aa, Artificial Sequence; identical to SEQ ID NO: 20029
  Cyclic GFR-binding peptide
  MOD_RES (29)..(31): Xaa is C or S

SEQ ID NO: 56339 - protein, 31 aa, Artificial Sequence; identical to SEQ ID NO: 38655
  Cyclic GFR-binding peptide
  MOD_RES (28)..(30): Xaa is C or S

SEQ ID NO: 56340 - protein, 30 aa, Artificial Sequence
  Cyclic GFR-binding peptide
PTKMSPISMLYINDKQQIIYKQYEGMVVDR

SEQ ID NO: 56341 - protein, 31 aa, Artificial Sequence; identical to SEQ ID NO: 35786
  Cyclic GFR-binding peptide
  MOD_RES (3)..(3): Xaa is C or S

SEQ ID NO: 56342 - protein, 27 aa, Artificial Sequence
  Cyclic GFR-binding peptide
KTSPISMLYIDNGRVLLYKQYEMIVEE

SEQ ID NO: 56343 - protein, 32 aa, Artificial Sequence; identical to SEQ ID NO: 38659
  Cyclic GFR-binding peptide
  MOD_RES (32)..(32): Xaa is C or S

SEQ ID NO: 56344 - protein, 27 aa, Artificial Sequence
  Cyclic GFR-binding peptide
TKMSPISMLYINDKQQIIYKQYEGMVV

SEQ ID NO: 56345 - protein, 41 aa, Artificial Sequence; identical to SEQ ID NO: 38666
  Cyclic GFR-binding peptide
  MOD_RES (6)..(7)..(39)..(41): Xaa is C or S

SEQ ID NO: 56346 - protein, 31 aa, Artificial Sequence
  Cyclic GFR-binding peptide
  MOD_RES (2)..(3): Xaa is C or S
PXXTPTKMSPISMLYINDKQQIIYKQYEGMV

SEQ ID NO: 56347 - protein, 29 aa, Artificial Sequence
  Cyclic GFR-binding peptide
  MOD_RES (26)..(28): Xaa is C or S
EPLPIVYYIGKTPKIEQLSNMIVKSXKXS

SEQ ID NO: 56348 - protein, 35 aa, Artificial Sequence; identical to SEQ ID NO: 35797
  Cyclic GFR-binding peptide
  MOD_RES (32)..(34): Xaa is C or S

SEQ ID NO: 56349 - protein, 25 aa, Artificial Sequence
  Cyclic GFR-binding peptide
VKTSPISMLYIDNGRVLLYKQYEMI

SEQ ID NO: 56350 - protein, 34 aa, Artificial Sequence; identical to SEQ ID NO: 38674
  Cyclic GFR-binding peptide
  MOD_RES (1)..(33): Xaa is C or S

SEQ ID NO: 56351 - protein, 31 aa, Artificial Sequence; identical to SEQ ID NO: 38677
  Cyclic GFR-binding peptide
  MOD_RES (29)..(31): Xaa is C or S

SEQ ID NO: 56352 - protein, 32 aa, Artificial Sequence
  Cyclic GFR-binding peptide
  MOD_RES (1)..(1): Xaa is C or S
XTPTKMSPISMLYINDKQQIIYKQYEGMVVDR

SEQ ID NO: 56353 - protein, 31 aa, Artificial Sequence; identical to SEQ ID NO: 35810
  Cyclic GFR-binding peptide
  MOD_RES (3)..(4): Xaa is C or S

SEQ ID NO: 56354 - protein, 22 aa, Artificial Sequence
  Cyclic GFR-binding peptide
KLSPISVLYIDSSNNVIYKQYE

SEQ ID NO: 56355 - protein, 40 aa, Artificial Sequence; identical to SEQ ID NO: 35813
  Cyclic GFR-binding peptide
  MOD_RES (6)..(7)..(39): Xaa is C or S

SEQ ID NO: 56356 - protein, 21 aa, Artificial Sequence
  Cyclic GFR-binding peptide
SPISMLYIDENEKVVYKQYED

SEQ ID NO: 56357 - protein, 22 aa, Artificial Sequence
  Cyclic GFR-binding peptide
SPISVLYIDDSSNVIYKQYENM

SEQ ID NO: 56358 - protein, 33 aa, Artificial Sequence; identical to SEQ ID NO: 35815
  Cyclic GFR-binding peptide
  MOD_RES (6)..(7): Xaa is C or S

SEQ ID NO: 56359 - protein, 34 aa, Artificial Sequence
  Cyclic GFR-binding peptide
  MOD_RES (5)..(6): Xaa is C or S
VPSTXXAPVKTSPISMLYIDNGRVLLYKQYEMIV

SEQ ID NO: 56360 - protein, 39 aa, Artificial Sequence; identical to SEQ ID NO: 38685
  Cyclic GFR-binding peptide
  MOD_RES (4)..(5)..(37)..(39): Xaa is C or S

SEQ ID NO: 56361 - protein, 29 aa, Artificial Sequence
  Cyclic GFR-binding peptide
TELSPISMLYIDEYDKVVYKQYEEMVVEG

SEQ ID NO: 56362 - protein, 38 aa, Artificial Sequence; identical to SEQ ID NO: 35819
  Cyclic GFR-binding peptide
  MOD_RES (2)..(3)..(35)..(37): Xaa is C or S

SEQ ID NO: 56363 - protein, 31 aa, Artificial Sequence; identical to SEQ ID NO: 20054
  Cyclic GFR-binding peptide
  MOD_RES (28)..(30): Xaa is C or S

SEQ ID NO: 56364 - protein, 27 aa, Artificial Sequence
  Cyclic GFR-binding peptide
  MOD_RES (1)..(1): Xaa is C or S
XVPTELSPISMLYIDEYDKVVYKQYEE

SEQ ID NO: 56365 - protein, 33 aa, Artificial Sequence
  Cyclic GFR-binding peptide
  MOD_RES (30)..(32): Xaa is C or S
PVKTSPISMLYIDNGRVLLYKQYEMIVEEXGXL

SEQ ID NO: 56366 - protein, 36 aa, Artificial Sequence; identical to SEQ ID NO: 38692
  Cyclic GFR-binding peptide
  MOD_RES (1)..(33)..(35): Xaa is C or S

SEQ ID NO: 56367 - protein, 34 aa, Artificial Sequence; identical to SEQ ID NO: 38694
  Cyclic GFR-binding peptide
  MOD_RES (1)..(33): Xaa is C or S

SEQ ID NO: 56368 - protein, 31 aa, Artificial Sequence; identical to SEQ ID NO: 17701
  Cyclic GFR-binding peptide
  MOD_RES (28)..(30): Xaa is C or S

SEQ ID NO: 56369 - protein, 38 aa, Artificial Sequence; identical to SEQ ID NO: 35832
  Cyclic GFR-binding peptide
  MOD_RES (6)..(7): Xaa is C or S

SEQ ID NO: 56370 - protein, 33 aa, Artificial Sequence; identical to SEQ ID NO: 35833
  Cyclic GFR-binding peptide
  MOD_RES (30)..(32): Xaa is C or S

SEQ ID NO: 56371 - protein, 31 aa, Artificial Sequence; identical to SEQ ID NO: 38698
  Cyclic GFR-binding peptide
  MOD_RES (28)..(30): Xaa is C or S

SEQ ID NO: 56372 - protein, 34 aa, Artificial Sequence; identical to SEQ ID NO: 35834
  Cyclic GFR-binding peptide
  MOD_RES (5)..(6): Xaa is C or S

SEQ ID NO: 56373 - protein, 30 aa, Artificial Sequence; identical to SEQ ID NO: 38700
  Cyclic GFR-binding peptide

SEQ ID NO: 56374 - protein, 27 aa, Artificial Sequence
  Cyclic GFR-binding peptide
LSPISMLYIDEYDKVVYKQYEEMVVEG

SEQ ID NO: 56375 - protein, 32 aa, Artificial Sequence; identical to SEQ ID NO: 38708
  Cyclic GFR-binding peptide
  MOD_RES (2)..(2): Xaa is C or S

SEQ ID NO: 56376 - protein, 25 aa, Artificial Sequence
  Cyclic GFR-binding peptide
SPISILYIDSANNVVYKQYEDMVVE

SEQ ID NO: 56377 - protein, 29 aa, Artificial Sequence
  Cyclic GFR-binding peptide
  MOD_RES (3)..(4): Xaa is C or S
KAXXVPTKLSPISVLYIDDMGVPTYKQYE

SEQ ID NO: 56378 - protein, 29 aa, Artificial Sequence
  Cyclic GFR-binding peptide
  MOD_RES (2)..(3): Xaa is C or S
AXXVPTKLSPISILYIDKGVVTYYKQYEG

SEQ ID NO: 56379 - protein, 33 aa, Artificial Sequence; identical to SEQ ID NO: 17717
  Cyclic GFR-binding peptide
  MOD_RES (30)..(32): Xaa is C or S

SEQ ID NO: 56380 - protein, 23 aa, Artificial Sequence
  Cyclic GFR-binding peptide
TKLSPISVLYIDDMGVPTYKQYE

SEQ ID NO: 56381 - protein, 39 aa, Artificial Sequence
  Cyclic GFR-binding peptide
  MOD_RES (3)..(4)..(36)..(38): Xaa is C or S
PTXXVPTRLSPISILYIDSANNVVYKQYEDMVVESXGXR

SEQ ID NO: 56382 - protein, 26 aa, Artificial Sequence
  Cyclic GFR-binding peptide
TKLSPISILYIDKGVVTYYKQYEGMA

SEQ ID NO: 56383 - protein, 34 aa, Artificial Sequence; identical to SEQ ID NO: 38724
  Cyclic GFR-binding peptide
  MOD_RES (6)..(7): Xaa is C or S

SEQ ID NO: 56384 - protein, 27 aa, Artificial Sequence
  Cyclic GFR-binding peptide
TKLSPISILYIDKGVVTYYKQYEGMAV

SEQ ID NO: 56385 - protein, 32 aa, Artificial Sequence; identical to SEQ ID NO: 38726
  Cyclic GFR-binding peptide
  MOD_RES (3)..(3): Xaa is C or S

SEQ ID NO: 56386 - protein, 37 aa, Artificial Sequence; identical to SEQ ID NO: 35861
  Cyclic GFR-binding peptide
  MOD_RES (6)..(7): Xaa is C or S

SEQ ID NO: 56387 - protein, 25 aa, Artificial Sequence
  Cyclic GFR-binding peptide
PTKLSPISILYIDKGVVTYYKQYEG

SEQ ID NO: 56388 - protein, 31 aa, Artificial Sequence
  Cyclic GFR-binding peptide
  MOD_RES (3)..(4): Xaa is C or S
PTXXVPTRLSPISILYIDSANNVVYKQYEDM

SEQ ID NO: 56389 - protein, 26 aa, Artificial Sequence
  Cyclic GFR-binding peptide
KLSPISILYIDKGVVTYYKQYEGMAV

SEQ ID NO: 56390 - protein, 38 aa, Artificial Sequence; identical to SEQ ID NO: 35869
  Cyclic GFR-binding peptide
  MOD_RES (2)..(3)..(35)..(37): Xaa is C or S

SEQ ID NO: 56391 - protein, 31 aa, Artificial Sequence; identical to SEQ ID NO: 20088
  Cyclic GFR-binding peptide
  MOD_RES (28)..(30): Xaa is C or S

SEQ ID NO: 56392 - protein, 22 aa, Artificial Sequence
  Cyclic GFR-binding peptide
KLSPISILYIDKGVVTYYKQYE

SEQ ID NO: 56393 - protein, 28 aa, Artificial Sequence
  Cyclic GFR-binding peptide
VKTSPISMLYIDNGRVLLYKQYEMIVEE

SEQ ID NO: 56394 - protein, 32 aa, Artificial Sequence; identical to SEQ ID NO: 38736
  Cyclic GFR-binding peptide
  MOD_RES (5)..(6): Xaa is C or S

SEQ ID NO: 56395 - protein, 27 aa, Artificial Sequence
  Cyclic GFR-binding peptide
  MOD_RES (27)..(27): Xaa is C or S
SPISILYIDKGVVTYYKQYEGMAVSEX

SEQ ID NO: 56396 - protein, 40 aa, Artificial Sequence; identical to SEQ ID NO: 35882
  Cyclic GFR-binding peptide
  MOD_RES (5)..(6)..(39): Xaa is C or S

SEQ ID NO: 56397 - protein, 34 aa, Artificial Sequence; identical to SEQ ID NO: 38739
  Cyclic GFR-binding peptide
  MOD_RES (5)..(6): Xaa is C or S

SEQ ID NO: 56398 - protein, 34 aa, Artificial Sequence; identical to SEQ ID NO: 38746
  Cyclic GFR-binding peptide
  MOD_RES (1)..(33): Xaa is C or S

SEQ ID NO: 56399 - protein, 33 aa, Artificial Sequence; identical to SEQ ID NO: 35887
  Cyclic GFR-binding peptide
  MOD_RES (4)..(5): Xaa is C or S

SEQ ID NO: 56400 - protein, 42 aa, Artificial Sequence; identical to SEQ ID NO: 38757
  Cyclic GFR-binding peptide
  MOD_RES (6)..(7)..(39)..(41): Xaa is C or S

SEQ ID NO: 56401 - protein, 38 aa, Artificial Sequence; identical to SEQ ID NO: 35890
  Cyclic GFR-binding peptide
  MOD_RES (4)..(5)..(37): Xaa is C or S

SEQ ID NO: 56402 - protein, 23 aa, Artificial Sequence
  Cyclic GFR-binding peptide
QLSPISVLYIDDSSNVIYKQYEN

SEQ ID NO: 56403 - protein, 25 aa, Artificial Sequence
  Cyclic GFR-binding peptide
KTSPISMLYIDNGRVLLYKQYEMIV

SEQ ID NO: 56404 - protein, 42 aa, Artificial Sequence; identical to SEQ ID NO: 17743
  Cyclic GFR-binding peptide
  MOD_RES (6)..(7)..(39)..(41): Xaa is C or S

SEQ ID NO: 56405 - protein, 33 aa, Artificial Sequence; identical to SEQ ID NO: 38759
  Cyclic GFR-binding peptide
  MOD_RES (2)..(3): Xaa is C or S

SEQ ID NO: 56406 - protein, 42 aa, Artificial Sequence; identical to SEQ ID NO: 17747
  Cyclic GFR-binding peptide
  MOD_RES (6)..(7)..(39)..(41): Xaa is C or S

SEQ ID NO: 56407 - protein, 28 aa, Artificial Sequence
  Cyclic GFR-binding peptide
  MOD_RES (1)..(2): Xaa is C or S
XXVPTRLSPISILYIDSANNVVYKQYED

SEQ ID NO: 56408 - protein, 30 aa, Artificial Sequence
  Cyclic GFR-binding peptide
  MOD_RES (1)..(2): Xaa is C or S
XXAPVKTSPISMLYIDNGRVLLYKQYEMIV

SEQ ID NO: 56409 - protein, 32 aa, Artificial Sequence
  Cyclic GFR-binding peptide
  MOD_RES (30)..(32): Xaa is C or S
TKMSPISMLYINDKQQIIYKQYEGMVVDRXGX

SEQ ID NO: 56410 - protein, 29 aa, Artificial Sequence
  Cyclic GFR-binding peptide
  MOD_RES (26)..(28): Xaa is C or S
EPLPIVYYVGRTPKVEQLSNMVVKSXKXS

SEQ ID NO: 56411 - protein, 35 aa, Artificial Sequence; identical to SEQ ID NO: 38768
  Cyclic GFR-binding peptide
  MOD_RES (4)..(5): Xaa is C or S

SEQ ID NO: 56412 - protein, 22 aa, Artificial Sequence
  Cyclic GFR-binding peptide
SPISVLYIDDMGVPTYKQYEEG

SEQ ID NO: 56413 - protein, 22 aa, Artificial Sequence
  Cyclic GFR-binding peptide
SPISMLYIDEYDKVVYKQYEEM

SEQ ID NO: 56414 - protein, 34 aa, Artificial Sequence; identical to SEQ ID NO: 38777
  Cyclic GFR-binding peptide
  MOD_RES (32)..(34): Xaa is C or S

SEQ ID NO: 56415 - protein, 35 aa, Artificial Sequence; identical to SEQ ID NO: 38779
  Cyclic GFR-binding peptide
  MOD_RES (32)..(34): Xaa is C or S

SEQ ID NO: 56416 - protein, 30 aa, Artificial Sequence; identical to SEQ ID NO: 17763
  Cyclic GFR-binding peptide
  MOD_RES (27)..(29): Xaa is C or S

SEQ ID NO: 56417 - protein, 24 aa, Artificial Sequence
  Cyclic GFR-binding peptide
LSPISVLYIDSSNNVIYKQYENMV

SEQ ID NO: 56418 - protein, 31 aa, Artificial Sequence; identical to SEQ ID NO: 35919
  Cyclic GFR-binding peptide
  MOD_RES (3)..(4): Xaa is C or S

SEQ ID NO: 56419 - protein, 33 aa, Artificial Sequence; identical to SEQ ID NO: 38789
  Cyclic GFR-binding peptide
  MOD_RES (1)..(2): Xaa is C or S

SEQ ID NO: 56420 - protein, 37 aa, Artificial Sequence; identical to SEQ ID NO: 35920
  Cyclic GFR-binding peptide
  MOD_RES (1)..(2)..(35)..(37): Xaa is C or S

SEQ ID NO: 56421 - protein, 31 aa, Artificial Sequence; identical to SEQ ID NO: 35921
  Cyclic GFR-binding peptide
  MOD_RES (30)..(30): Xaa is C or S

SEQ ID NO: 56422 - protein, 36 aa, Artificial Sequence
  Cyclic GFR-binding peptide
  MOD_RES (4)..(5): Xaa is C or S
PPTXXVPTRLSPISILYIDSANNVVYKQYEDMVVES

SEQ ID NO: 56423 - protein, 25 aa, Artificial Sequence
  Cyclic GFR-binding peptide
TELSPISMLYIDENEKVVYKQYEDM

SEQ ID NO: 56424 - protein, 38 aa, Artificial Sequence; identical to SEQ ID NO: 38800
  Cyclic GFR-binding peptide
  MOD_RES (5)..(6)..(38): Xaa is C or S

SEQ ID NO: 56425 - protein, 35 aa, Artificial Sequence; identical to SEQ ID NO: 35925
  Cyclic GFR-binding peptide
  MOD_RES (1)..(2)..(34): Xaa is C or S

SEQ ID NO: 56426 - protein, 30 aa, Artificial Sequence; identical to SEQ ID NO: 38801
  Cyclic GFR-binding peptide
  MOD_RES (28)..(30): Xaa is C or S

SEQ ID NO: 56427 - protein, 35 aa, Artificial Sequence
  Cyclic GFR-binding peptide
  MOD_RES (3)..(4): Xaa is C or S
GPXXTPTKMSPISMLYINDKQQIIYKQYEGMVVDR

SEQ ID NO: 56428 - protein, 31 aa, Artificial Sequence; identical to SEQ ID NO: 20136
  Cyclic GFR-binding peptide
  MOD_RES (28)..(30): Xaa is C or S

SEQ ID NO: 56429 - protein, 26 aa, Artificial Sequence
  Cyclic GFR-binding peptide
APTKLSPISVLYIDDSSNVIYKQYEN

SEQ ID NO: 56430 - protein, 31 aa, Artificial Sequence
  Cyclic GFR-binding peptide
  MOD_RES (28)..(30): Xaa is C or S
LSPISILYIDSANNVVYKQYEDMVVESXGXR

SEQ ID NO: 56431 - protein, 27 aa, Artificial Sequence
  Cyclic GFR-binding peptide
  MOD_RES (1)..(1): Xaa is C or S
XVPTRLSPISILYIDSANNVVYKQYED

SEQ ID NO: 56432 - protein, 25 aa, Artificial Sequence
  Cyclic GFR-binding peptide
TKLSPISILYIDKGVVTYYKQYEGM

SEQ ID NO: 56433 - protein, 32 aa, Artificial Sequence; identical to SEQ ID NO: 35947
  Cyclic GFR-binding peptide
  MOD_RES (5)..(6): Xaa is C or S

SEQ ID NO: 56434 - protein, 33 aa, Artificial Sequence; identical to SEQ ID NO: 35950
  Cyclic GFR-binding peptide
  MOD_RES (6)..(7): Xaa is C or S

SEQ ID NO: 56435 - protein, 27 aa, Artificial Sequence
  Cyclic GFR-binding peptide
  MOD_RES (27)..(27): Xaa is C or S
SPISVLYIDDSSNVIYKQYENMVVRAX

SEQ ID NO: 56436 - protein, 30 aa, Artificial Sequence; identical to SEQ ID NO: 38818
  Cyclic GFR-binding peptide
  MOD_RES (27)..(29): Xaa is C or S

SEQ ID NO: 56437 - protein, 26 aa, Artificial Sequence
  Cyclic GFR-binding peptide
TKLSPISVLYIDDSSNVIYKQYENMV

SEQ ID NO: 56438 - protein, 28 aa, Artificial Sequence
  Cyclic GFR-binding peptide
PTRLSPISILYIDSANNVVYKQYEDMVV

SEQ ID NO: 56439 - protein, 30 aa, Artificial Sequence
  Cyclic GFR-binding peptide
  MOD_RES (29)..(29): Xaa is C or S
VKTSPISMLYIDNGRVLLYKQYEMIVEEXG

SEQ ID NO: 56440 - protein, 29 aa, Artificial Sequence
  Cyclic GFR-binding peptide
  MOD_RES (1)..(1): Xaa is C or S
XAPTQLSPISVLYIDDSSNVIYKQYENMV

SEQ ID NO: 56441 - protein, 28 aa, Artificial Sequence
  Cyclic GFR-binding peptide
APTQLSPISVLYIDDSSNVIYKQYENMV

SEQ ID NO: 56442 - protein, 27 aa, Artificial Sequence
  Cyclic GFR-binding peptide
  MOD_RES (1)..(1): Xaa is C or S
XTPTKMSPISMLYINDKQQIIYKQYEG

SEQ ID NO: 56443 - protein, 24 aa, Artificial Sequence
  Cyclic GFR-binding peptide
RLSPISILYIDSANNVVYKQYEDM

SEQ ID NO: 56444 - protein, 35 aa, Artificial Sequence; identical to SEQ ID NO: 38824
  Cyclic GFR-binding peptide
  MOD_RES (1)..(2)..(35): Xaa is C or S

SEQ ID NO: 56445 - protein, 31 aa, Artificial Sequence; identical to SEQ ID NO: 35956
  Cyclic GFR-binding peptide
  MOD_RES (6)..(6): Xaa is C or S

SEQ ID NO: 56446 - protein, 38 aa, Artificial Sequence; identical to SEQ ID NO: 35959
  Cyclic GFR-binding peptide
  MOD_RES (5)..(6)..(38): Xaa is C or S

SEQ ID NO: 56447 - protein, 25 aa, Artificial Sequence
  Cyclic GFR-binding peptide
TKMSPISMLYINDKQQIIYKQYEGM

SEQ ID NO: 56448 - protein, 30 aa, Artificial Sequence; identical to SEQ ID NO: 38842
  Cyclic GFR-binding peptide
  MOD_RES (4)..(5): Xaa is C or S

SEQ ID NO: 56449 - protein, 33 aa, Artificial Sequence; identical to SEQ ID NO: 35971
  Cyclic GFR-binding peptide
  MOD_RES (3)..(4): Xaa is C or S

SEQ ID NO: 56450 - protein, 31 aa, Artificial Sequence; identical to SEQ ID NO: 35976
  Cyclic GFR-binding peptide
  MOD_RES (5)..(6): Xaa is C or S

SEQ ID NO: 56451 - protein, 33 aa, Artificial Sequence; identical to SEQ ID NO: 35981
  Cyclic GFR-binding peptide
  MOD_RES (1)..(33): Xaa is C or S

SEQ ID NO: 56452 - protein, 39 aa, Artificial Sequence; identical to SEQ ID NO: 35989
  Cyclic GFR-binding peptide
  MOD_RES (4)..(5)..(37)..(39): Xaa is C or S

SEQ ID NO: 56453 - protein, 32 aa, Artificial Sequence
  Cyclic GFR-binding peptide
  MOD_RES (30)..(32): Xaa is C or S
TRLSPISILYIDSANNVVYKQYEDMVVESXGX

SEQ ID NO: 56454 - protein, 30 aa, Artificial Sequence; identical to SEQ ID NO: 20184
  Cyclic GFR-binding peptide
  MOD_RES (27)..(29): Xaa is C or S

SEQ ID NO: 56455 - protein, 39 aa, Artificial Sequence; identical to SEQ ID NO: 38855
  Cyclic GFR-binding peptide
  MOD_RES (6)..(7)..(39): Xaa is C or S

SEQ ID NO: 56456 - protein, 28 aa, Artificial Sequence
  Cyclic GFR-binding peptide
  MOD_RES (1)..(2): Xaa is C or S
XXVPTELSPISMLYIDENEKVVYKQYED

SEQ ID NO: 56457 - protein, 38 aa, Artificial Sequence
  Cyclic GFR-binding peptide
  MOD_RES (6)..(7)..(38): Xaa is C or S
RVPSTXXAPVKTSPISMLYIDNGRVLLYKQYEMIVEEX

SEQ ID NO: 56458 - protein, 38 aa, Artificial Sequence; identical to SEQ ID NO: 35999
  Cyclic GFR-binding peptide
  MOD_RES (3)..(4)..(36)..(38): Xaa is C or S

SEQ ID NO: 56459 - protein, 30 aa, Artificial Sequence; identical to SEQ ID NO: 36000
  Cyclic GFR-binding peptide
  MOD_RES (30)..(30): Xaa is C or S

SEQ ID NO: 56460 - protein, 29 aa, Artificial Sequence
  Cyclic GFR-binding peptide
PVKTSPISMLYIDNGRVLLYKQYEMIVEE

SEQ ID NO: 56461 - protein, 36 aa, Artificial Sequence; identical to SEQ ID NO: 38865
  Cyclic GFR-binding peptide
  MOD_RES (3)..(4)..(36): Xaa is C or S

SEQ ID NO: 56462 - protein, 37 aa, Artificial Sequence
  Cyclic GFR-binding peptide
  MOD_RES (6)..(7): Xaa is C or S
STPPTXXVPTRLSPISILYIDSANNVVYKQYEDMVVE

SEQ ID NO: 56463 - protein, 28 aa, Artificial Sequence
  Cyclic GFR-binding peptide
  MOD_RES (2)..(3): Xaa is C or S
TXXAPVKTSPISMLYIDNGRVLLYKQYE

SEQ ID NO: 56464 - protein, 30 aa, Artificial Sequence; identical to SEQ ID NO: 38871
  Cyclic GFR-binding peptide
  MOD_RES (4)..(5): Xaa is C or S

SEQ ID NO: 56465 - protein, 31 aa, Artificial Sequence; identical to SEQ ID NO: 17834
  Cyclic GFR-binding peptide
  MOD_RES (28)..(30): Xaa is C or S

SEQ ID NO: 56466 - protein, 33 aa, Artificial Sequence; identical to SEQ ID NO: 38872
  Cyclic GFR-binding peptide
  MOD_RES (3)..(4): Xaa is C or S

SEQ ID NO: 56467 - protein, 41 aa, Artificial Sequence; identical to SEQ ID NO: 38875
  Cyclic GFR-binding peptide
  MOD_RES (7)..(39)..(41): Xaa is C or S

SEQ ID NO: 56468 - protein, 31 aa, Artificial Sequence; identical to SEQ ID NO: 38876
  Cyclic GFR-binding peptide
  MOD_RES (1)..(2): Xaa is C or S

SEQ ID NO: 56469 - protein, 30 aa, Artificial Sequence; identical to SEQ ID NO: 36011
  Cyclic GFR-binding peptide
  MOD_RES (30)..(30): Xaa is C or S

SEQ ID NO: 56470 - protein, 37 aa, Artificial Sequence; identical to SEQ ID NO: 36012
  Cyclic GFR-binding peptide
  MOD_RES (6)..(7): Xaa is C or S

SEQ ID NO: 56471 - protein, 39 aa, Artificial Sequence; identical to SEQ ID NO: 36013
  Cyclic GFR-binding peptide
  MOD_RES (6)..(7): Xaa is C or S

SEQ ID NO: 56472 - protein, 25 aa, Artificial Sequence
  Cyclic GFR-binding peptide
TSPISMLYIDNGRVLLYKQYEMIVE

SEQ ID NO: 56473 - protein, 41 aa, Artificial Sequence; identical to SEQ ID NO: 20208
  Cyclic GFR-binding peptide
  MOD_RES (6)..(7)..(38)..(40): Xaa is C or S

SEQ ID NO: 56474 - protein, 32 aa, Artificial Sequence; identical to SEQ ID NO: 36016
  Cyclic GFR-binding peptide
  MOD_RES (1)..(1): Xaa is C or S

SEQ ID NO: 56475 - protein, 31 aa, Artificial Sequence; identical to SEQ ID NO: 17841
  Cyclic GFR-binding peptide
  MOD_RES (28)..(30): Xaa is C or S

SEQ ID NO: 56476 - protein, 26 aa, Artificial Sequence
  Cyclic GFR-binding peptide
  MOD_RES (1)..(1): Xaa is C or S
XAPTKLSPISVLYIDSSNNVIYKQYE

SEQ ID NO: 56477 - protein, 32 aa, Artificial Sequence; identical to SEQ ID NO: 36028
  Cyclic GFR-binding peptide
  MOD_RES (5)..(6): Xaa is C or S

SEQ ID NO: 56478 - protein, 30 aa, Artificial Sequence; identical to SEQ ID NO: 20221
  Cyclic GFR-binding peptide
  MOD_RES (27)..(29): Xaa is C or S

SEQ ID NO: 56479 - protein, 35 aa, Artificial Sequence; identical to SEQ ID NO: 36030
  Cyclic GFR-binding peptide
  MOD_RES (2)..(3)..(35): Xaa is C or S

SEQ ID NO: 56480 - protein, 27 aa, Artificial Sequence
  Cyclic GFR-binding peptide
  MOD_RES (27)..(27): Xaa is C or S
SPISVLYIDSSNNVIYKQYENMVVKAX

SEQ ID NO: 56481 - protein, 26 aa, Artificial Sequence
  Cyclic GFR-binding peptide
ELSPISMLYIDEYDKVVYKQYEEMVV

SEQ ID NO: 56482 - protein, 32 aa, Artificial Sequence; identical to SEQ ID NO: 17860
  Cyclic GFR-binding peptide
  MOD_RES (29)..(31): Xaa is C or S

SEQ ID NO: 56483 - protein, 30 aa, Artificial Sequence; identical to SEQ ID NO: 17861
  Cyclic GFR-binding peptide
  MOD_RES (27)..(29): Xaa is C or S

SEQ ID NO: 56484 - protein, 34 aa, Artificial Sequence; identical to SEQ ID NO: 17865
  Cyclic GFR-binding peptide
  MOD_RES (31)..(33): Xaa is C or S

SEQ ID NO: 56485 - protein, 25 aa, Artificial Sequence
  Cyclic GFR-binding peptide
PTKMSPISMLYINDKQQIIYKQYEG

SEQ ID NO: 56486 - protein, 31 aa, Artificial Sequence; identical to SEQ ID NO: 17869
  Cyclic GFR-binding peptide
  MOD_RES (28)..(30): Xaa is C or S

SEQ ID NO: 56487 - protein, 33 aa, Artificial Sequence; identical to SEQ ID NO: 36043
  Cyclic GFR-binding peptide
  MOD_RES (2)..(3): Xaa is C or S

SEQ ID NO: 56488 - protein, 22 aa, Artificial Sequence
  Cyclic GFR-binding peptide
KTSPISMLYIDNGRVLLYKQYE

SEQ ID NO: 56489 - protein, 23 aa, Artificial Sequence
  Cyclic GFR-binding peptide
KLSPISILYIDKGVVTYYKQYEG

SEQ ID NO: 56490 - protein, 23 aa, Artificial Sequence
  Cyclic GFR-binding peptide
TKLSPISVLYIDDSSNVIYKQYE

SEQ ID NO: 56491 - protein, 42 aa, Artificial Sequence; identical to SEQ ID NO: 36048
  Cyclic GFR-binding peptide
  MOD_RES (6)..(7)..(40)..(42): Xaa is C or S

SEQ ID NO: 56492 - protein, 28 aa, Artificial Sequence
  Cyclic GFR-binding peptide
  MOD_RES (1)..(1): Xaa is C or S
XVPTKLSPISILYIDKGVVTYYKQYEGM

SEQ ID NO: 56493 - protein, 38 aa, Artificial Sequence; identical to SEQ ID NO: 36051
  Cyclic GFR-binding peptide
  MOD_RES (5)..(6)..(38): Xaa is C or S

SEQ ID NO: 56494 - protein, 32 aa, Artificial Sequence
  Cyclic GFR-binding peptide
  MOD_RES (31)..(31): Xaa is C or S
PTRLSPISILYIDSANNVVYKQYEDMVVESXG

SEQ ID NO: 56495 - protein, 36 aa, Artificial Sequence
  Cyclic GFR-binding peptide
  MOD_RES (3)..(4)..(35): Xaa is C or S
STXXAPVKTSPISMLYIDNGRVLLYKQYEMIVEEXG

SEQ ID NO: 56496 - protein, 37 aa, Artificial Sequence; identical to SEQ ID NO: 36053
  Cyclic GFR-binding peptide
  MOD_RES (6)..(7): Xaa is C or S

SEQ ID NO: 56497 - protein, 35 aa, Artificial Sequence; identical to SEQ ID NO: 38930
  Cyclic GFR-binding peptide
  MOD_RES (4)..(5): Xaa is C or S

SEQ ID NO: 56498 - protein, 32 aa, Artificial Sequence
  Cyclic GFR-binding peptide
  MOD_RES (29)..(31): Xaa is C or S
KMSPISMLYINDKQQIIYKQYEGMVVDRXGXS

SEQ ID NO: 56499 - protein, 29 aa, Artificial Sequence
  Cyclic GFR-binding peptide
  MOD_RES (28)..(28): Xaa is C or S
LSPISILYIDSANNVVYKQYEDMVVESXG

SEQ ID NO: 56500 - protein, 35 aa, Artificial Sequence; identical to SEQ ID NO: 36066
  Cyclic GFR-binding peptide
  MOD_RES (4)..(5): Xaa is C or S

SEQ ID NO: 56501 - protein, 42 aa, Artificial Sequence; identical to SEQ ID NO: 36070
  Cyclic GFR-binding peptide
  MOD_RES (6)..(7)..(39)..(41): Xaa is C or S

SEQ ID NO: 56502 - protein, 37 aa, Artificial Sequence
  Cyclic GFR-binding peptide
  MOD_RES (5)..(6): Xaa is C or S
SAGPXXTPTKMSPISMLYINDKQQIIYKQYEGMVVDR

SEQ ID NO: 56503 - protein, 21 aa, Artificial Sequence
  Cyclic GFR-binding peptide
SPISMLYIDEYDKVVYKQYEE

SEQ ID NO: 56504 - protein, 26 aa, Artificial Sequence
  Cyclic GFR-binding peptide
VPTKLSPISILYIDKGVVTYYKQYEG

SEQ ID NO: 56505 - protein, 24 aa, Artificial Sequence
  Cyclic GFR-binding peptide
TKMSPISMLYINDKQQIIYKQYEG

SEQ ID NO: 56506 - protein, 34 aa, Artificial Sequence; identical to SEQ ID NO: 38963
  Cyclic GFR-binding peptide
  MOD_RES (4)..(5): Xaa is C or S

SEQ ID NO: 56507 - protein, 38 aa, Artificial Sequence
  Cyclic GFR-binding peptide
  MOD_RES (5)..(6)..(37): Xaa is C or S
VPSTXXAPVKTSPISMLYIDNGRVLLYKQYEMIVEEXG

SEQ ID NO: 56508 - protein, 34 aa, Artificial Sequence
  Cyclic GFR-binding peptide
  MOD_RES (6)..(7): Xaa is C or S
STPPTXXVPTRLSPISILYIDSANNVVYKQYEDM

SEQ ID NO: 56509 - protein, 32 aa, Artificial Sequence; identical to SEQ ID NO: 36093
  Cyclic GFR-binding peptide
  MOD_RES (6)..(7): Xaa is C or S

SEQ ID NO: 56510 - protein, 39 aa, Artificial Sequence; identical to SEQ ID NO: 38974
  Cyclic GFR-binding peptide
  MOD_RES (6)..(7)..(39): Xaa is C or S

SEQ ID NO: 56511 - protein, 33 aa, Artificial Sequence; identical to SEQ ID NO: 17913
  Cyclic GFR-binding peptide
  MOD_RES (30)..(32): Xaa is C or S

SEQ ID NO: 56512 - protein, 27 aa, Artificial Sequence
  Cyclic GFR-binding peptide
QLSPISVLYIDDSSNVIYKQYENMVVR

SEQ ID NO: 56513 - protein, 26 aa, Artificial Sequence
  Cyclic GFR-binding peptide
KTSPISMLYIDNGRVLLYKQYEMIVE

SEQ ID NO: 56514 - protein, 20 aa, Artificial Sequence
  Cyclic GFR-binding peptide
SPISVLYIDDMGVPTYKQYE

SEQ ID NO: 56515 - protein, 34 aa, Artificial Sequence; identical to SEQ ID NO: 36101
  Cyclic GFR-binding peptide
  MOD_RES (32)..(34): Xaa is C or S

SEQ ID NO: 56516 - protein, 31 aa, Artificial Sequence; identical to SEQ ID NO: 36102
  Cyclic GFR-binding peptide
  MOD_RES (31)..(31): Xaa is C or S

SEQ ID NO: 56517 - protein, 20 aa, Artificial Sequence
  Cyclic GFR-binding peptide
SPISVLYIDDSSNVIYKQYE

SEQ ID NO: 56518 - protein, 29 aa, Artificial Sequence
  Cyclic GFR-binding peptide
VPTRLSPISILYIDSANNVVYKQYEDMVV

SEQ ID NO: 56519 - protein, 36 aa, Artificial Sequence; identical to SEQ ID NO: 38987
  Cyclic GFR-binding peptide
  MOD_RES (5)..(6): Xaa is C or S

SEQ ID NO: 56520 - protein, 42 aa, Artificial Sequence; identical to SEQ ID NO: 17928
  Cyclic GFR-binding peptide
  MOD_RES (6)..(7)..(39)..(41): Xaa is C or S

SEQ ID NO: 56521 - protein, 36 aa, Artificial Sequence; identical to SEQ ID NO: 38993
  Cyclic GFR-binding peptide
  MOD_RES (1)..(2)..(34)..(36): Xaa is C or S

SEQ ID NO: 56522 - protein, 27 aa, Artificial Sequence
  Cyclic GFR-binding peptide
PTKLSPISVLYIDDSSNVIYKQYENMV

SEQ ID NO: 56523 - protein, 29 aa, Artificial Sequence
  Cyclic GFR-binding peptide
  MOD_RES (1)..(2): Xaa is C or S
XXTPTKMSPISMLYINDKQQIIYKQYEGM

SEQ ID NO: 56524 - protein, 25 aa, Artificial Sequence
  Cyclic GFR-binding peptide
TKLSPISVLYIDSSNNVIYKQYENM

SEQ ID NO: 56525 - protein, 31 aa, Artificial Sequence; identical to SEQ ID NO: 20304
  Cyclic GFR-binding peptide
  MOD_RES (28)..(30): Xaa is C or S

SEQ ID NO: 56526 - protein, 27 aa, Artificial Sequence
  Cyclic GFR-binding peptide
PTKLSPISVLYIDSSNNVIYKQYENMV

SEQ ID NO: 56527 - protein, 39 aa, Artificial Sequence; identical to SEQ ID NO: 36118
  Cyclic GFR-binding peptide
  MOD_RES (3)..(4)..(36)..(38): Xaa is C or S

SEQ ID NO: 56528 - protein, 37 aa, Artificial Sequence; identical to SEQ ID NO: 36120
  Cyclic GFR-binding peptide
  MOD_RES (3)..(4)..(36): Xaa is C or S

SEQ ID NO: 56529 - protein, 26 aa, Artificial Sequence
  Cyclic GFR-binding peptide
  MOD_RES (26)..(26): Xaa is C or S
SPISMLYIDNGRVLLYKQYEMIVEEX

SEQ ID NO: 56530 - protein, 26 aa, Artificial Sequence
  Cyclic GFR-binding peptide
RLSPISILYIDSANNVVYKQYEDMVV

SEQ ID NO: 56531 - protein, 21 aa, Artificial Sequence
  Cyclic GFR-binding peptide
SPISILYIDKGVVTYYKQYEG

SEQ ID NO: 56532 - protein, 35 aa, Artificial Sequence; identical to SEQ ID NO: 39014
  Cyclic GFR-binding peptide
  MOD_RES (1)..(2)..(34): Xaa is C or S

SEQ ID NO: 56533 - protein, 39 aa, Artificial Sequence; identical to SEQ ID NO: 36139
  Cyclic GFR-binding peptide
  MOD_RES (5)..(6)..(39): Xaa is C or S

SEQ ID NO: 56534 - protein, 39 aa, Artificial Sequence; identical to SEQ ID NO: 39015
  Cyclic GFR-binding peptide
  MOD_RES (5)..(6)..(38): Xaa is C or S

SEQ ID NO: 56535 - protein, 31 aa, Artificial Sequence
  Cyclic GFR-binding peptide
  MOD_RES (30)..(30): Xaa is C or S
TRLSPISILYIDSANNVVYKQYEDMVVESXG

SEQ ID NO: 56536 - protein, 34 aa, Artificial Sequence; identical to SEQ ID NO: 20318
  Cyclic GFR-binding peptide
  MOD_RES (31)..(33): Xaa is C or S

SEQ ID NO: 56537 - protein, 32 aa, Artificial Sequence; identical to SEQ ID NO: 39020
  Cyclic GFR-binding peptide

SEQ ID NO: 56538 - protein, 21 aa, Artificial Sequence
  Cyclic GFR-binding peptide
SPISMLYIDNGRVLLYKQYEM

SEQ ID NO: 56539 - protein, 35 aa, Artificial Sequence
  Cyclic GFR-binding peptide
  MOD_RES (2)..(3)..(34): Xaa is C or S
TXXAPVKTSPISMLYIDNGRVLLYKQYEMIVEEXG

SEQ ID NO: 56540 - protein, 37 aa, Artificial Sequence
  Cyclic GFR-binding peptide
  MOD_RES (3)..(4)..(35)..(37): Xaa is C or S
STXXAPVKTSPISMLYIDNGRVLLYKQYEMIVEEXGX

SEQ ID NO: 56541 - protein, 36 aa, Artificial Sequence; identical to SEQ ID NO: 36147
  Cyclic GFR-binding peptide
  MOD_RES (7)..(7): Xaa is C or S

SEQ ID NO: 56542 - protein, 36 aa, Artificial Sequence; identical to SEQ ID NO: 36148
  Cyclic GFR-binding peptide
  MOD_RES (5)..(6): Xaa is C or S

SEQ ID NO: 56543 - protein, 33 aa, Artificial Sequence; identical to SEQ ID NO: 39024
  Cyclic GFR-binding peptide
  MOD_RES (7)..(7): Xaa is C or S

SEQ ID NO: 56544 - protein, 31 aa, Artificial Sequence; identical to SEQ ID NO: 36154
  Cyclic GFR-binding peptide
  MOD_RES (29)..(31): Xaa is C or S

SEQ ID NO: 56545 - protein, 30 aa, Artificial Sequence; identical to SEQ ID NO: 39029
  Cyclic GFR-binding peptide

SEQ ID NO: 56546 - protein, 32 aa, Artificial Sequence; identical to SEQ ID NO: 39030
  Cyclic GFR-binding peptide
  MOD_RES (1)..(2): Xaa is C or S

SEQ ID NO: 56547 - protein, 28 aa, Artificial Sequence
  Cyclic GFR-binding peptide
  MOD_RES (1)..(1): Xaa is C or S
XVPTKLSPISVLYIDDMGVPTYKQYEEG

SEQ ID NO: 56548 - protein, 36 aa, Artificial Sequence; identical to SEQ ID NO: 39032
  Cyclic GFR-binding peptide
  MOD_RES (2)..(3)..(35): Xaa is C or S

SEQ ID NO: 56549 - protein, 33 aa, Artificial Sequence
  Cyclic GFR-binding peptide
  MOD_RES (31)..(33): Xaa is C or S
PTRLSPISILYIDSANNVVYKQYEDMVVESXGX

SEQ ID NO: 56550 - protein, 23 aa, Artificial Sequence
  Cyclic GFR-binding peptide
SPISMLYINDKQQIIYKQYEGMV

SEQ ID NO: 56551 - protein, 36 aa, Artificial Sequence
  Cyclic GFR-binding peptide
  MOD_RES (3)..(4)..(36): Xaa is C or S
GPXXTPTKMSPISMLYINDKQQIIYKQYEGMVVDRX

SEQ ID NO: 56552 - protein, 39 aa, Artificial Sequence
  Cyclic GFR-binding peptide
  MOD_RES (6)..(7)..(39): Xaa is C or S
STPPTXXVPTRLSPISILYIDSANNVVYKQYEDMVVESX

SEQ ID NO: 56553 - protein, 35 aa, Artificial Sequence; identical to SEQ ID NO: 39046
  Cyclic GFR-binding peptide
  MOD_RES (3)..(35): Xaa is C or S

SEQ ID NO: 56554 - protein, 34 aa, Artificial Sequence
  Cyclic GFR-binding peptide
  MOD_RES (1)..(2)..(34): Xaa is C or S
XXVPTRLSPISILYIDSANNVVYKQYEDMVVESX

SEQ ID NO: 56555 - protein, 29 aa, Artificial Sequence
  Cyclic GFR-binding peptide
  MOD_RES (1)..(2): Xaa is C or S
XXAPTQLSPISVLYIDDSSNVIYKQYENM

SEQ ID NO: 56556 - protein, 28 aa, Artificial Sequence
  Cyclic GFR-binding peptide
  MOD_RES (1)..(2): Xaa is C or S
XXAPTQLSPISVLYIDDSSNVIYKQYEN

SEQ ID NO: 56557 - protein, 37 aa, Artificial Sequence; identical to SEQ ID NO: 36179
  Cyclic GFR-binding peptide
  MOD_RES (3)..(4)..(36): Xaa is C or S

SEQ ID NO: 56558 - protein, 34 aa, Artificial Sequence; identical to SEQ ID NO: 36180
  Cyclic GFR-binding peptide
  MOD_RES (5)..(6): Xaa is C or S

SEQ ID NO: 56559 - protein, 24 aa, Artificial Sequence
  Cyclic GFR-binding peptide
KTSPISMLYIDNGRVLLYKQYEMI

SEQ ID NO: 56560 - protein, 26 aa, Artificial Sequence
  Cyclic GFR-binding peptide
VPTELSPISMLYIDENEKVVYKQYED

SEQ ID NO: 56561 - protein, 30 aa, Artificial Sequence; identical to SEQ ID NO: 36190
  Cyclic GFR-binding peptide
  MOD_RES (28)..(30): Xaa is C or S

SEQ ID NO: 56562 - protein, 42 aa, Artificial Sequence; identical to SEQ ID NO: 20353
  Cyclic GFR-binding peptide
  MOD_RES (6)..(7)..(39)..(41): Xaa is C or S

SEQ ID NO: 56563 - protein, 31 aa, Artificial Sequence
  Cyclic GFR-binding peptide
  MOD_RES (30)..(30): Xaa is C or S
PVKTSPISMLYIDNGRVLLYKQYEMIVEEXG

SEQ ID NO: 56564 - protein, 23 aa, Artificial Sequence
  Cyclic GFR-binding peptide
KMSPISMLYINDKQQIIYKQYEG

SEQ ID NO: 56565 - protein, 33 aa, Artificial Sequence; identical to SEQ ID NO: 36197
  Cyclic GFR-binding peptide
  MOD_RES (30)..(32): Xaa is C or S

SEQ ID NO: 56566 - protein, 39 aa, Artificial Sequence
  Cyclic GFR-binding peptide
  MOD_RES (5)..(6)..(38): Xaa is C or S
SAGPXXTPTKMSPISMLYINDKQQIIYKQYEGMVVDRXG

SEQ ID NO: 56567 - protein, 25 aa, Artificial Sequence
  Cyclic GFR-binding peptide
PTRLSPISILYIDSANNVVYKQYED

SEQ ID NO: 56568 - protein, 27 aa, Artificial Sequence
  Cyclic GFR-binding peptide
VKTSPISMLYIDNGRVLLYKQYEMIVE

SEQ ID NO: 56569 - protein, 37 aa, Artificial Sequence
  Cyclic GFR-binding peptide
  MOD_RES (1)..(2)..(34)..(36): Xaa is C or S
XXVPTRLSPISILYIDSANNVVYKQYEDMVVESXGXR

SEQ ID NO: 56570 - protein, 26 aa, Artificial Sequence
  Cyclic GFR-binding peptide
TELSPISMLYIDENEKVVYKQYEDMV

SEQ ID NO: 56571 - protein, 24 aa, Artificial Sequence
  Cyclic GFR-binding peptide
PTKLSPISILYIDKGVVTYYKQYE

SEQ ID NO: 56572 - protein, 33 aa, Artificial Sequence; identical to SEQ ID NO: 39069
  Cyclic GFR-binding peptide
  MOD_RES (1)..(33): Xaa is C or S

SEQ ID NO: 56573 - protein, 34 aa, Artificial Sequence; identical to SEQ ID NO: 39071
  Cyclic GFR-binding peptide
  MOD_RES (31)..(33): Xaa is C or S

SEQ ID NO: 56574 - protein, 34 aa, Artificial Sequence; identical to SEQ ID NO: 39072
  Cyclic GFR-binding peptide
  MOD_RES (3)..(4): Xaa is C or S

SEQ ID NO: 56575 - protein, 37 aa, Artificial Sequence; identical to SEQ ID NO: 36208
  Cyclic GFR-binding peptide
  MOD_RES (6)..(7): Xaa is C or S

SEQ ID NO: 56576 - protein, 28 aa, Artificial Sequence
  Cyclic GFR-binding peptide
  MOD_RES (27)..(27): Xaa is C or S
SPISMLYINDKQQIIYKQYEGMVVDRXG

SEQ ID NO: 56577 - protein, 30 aa, Artificial Sequence; identical to SEQ ID NO: 36216
  Cyclic GFR-binding peptide
  MOD_RES (4)..(5): Xaa is C or S

SEQ ID NO: 56578 - protein, 22 aa, Artificial Sequence
  Cyclic GFR-binding peptide
QLSPISVLYIDDSSNVIYKQYE

SEQ ID NO: 56579 - protein, 29 aa, Artificial Sequence
  Cyclic GFR-binding peptide
PTKLSPISVLYIDDMGVPTYKQYEEGMSV

SEQ ID NO: 56580 - protein, 32 aa, Artificial Sequence
  Cyclic GFR-binding peptide
  MOD_RES (1)..(2): Xaa is C or S
XXVPTRLSPISILYIDSANNVVYKQYEDMVVE

SEQ ID NO: 56581 - protein, 25 aa, Artificial Sequence
  Cyclic GFR-binding peptide
PTKLSPISVLYIDDMGVPTYKQYEE

SEQ ID NO: 56582 - protein, 32 aa, Artificial Sequence; identical to SEQ ID NO: 36229
  Cyclic GFR-binding peptide
  MOD_RES (2)..(3): Xaa is C or S

SEQ ID NO: 56583 - protein, 31 aa, Artificial Sequence; identical to SEQ ID NO: 20390
  Cyclic GFR-binding peptide
  MOD_RES (28)..(30): Xaa is C or S

SEQ ID NO: 56584 - protein, 31 aa, Artificial Sequence
  Cyclic GFR-binding peptide
  MOD_RES (1)..(2): Xaa is C or S
XXTPTKMSPISMLYINDKQQIIYKQYEGMVV

SEQ ID NO: 56585 - protein, 27 aa, Artificial Sequence
  Cyclic GFR-binding peptide
VPTKLSPISILYIDKGVVTYYKQYEGM

SEQ ID NO: 56586 - protein, 35 aa, Artificial Sequence
  Cyclic GFR-binding peptide
  MOD_RES (1)..(2)..(34): Xaa is C or S
XXVPTRLSPISILYIDSANNVVYKQYEDMVVESXG

SEQ ID NO: 56587 - protein, 29 aa, Artificial Sequence
  Cyclic GFR-binding peptide
  MOD_RES (27)..(29): Xaa is C or S
SPISMLYIDEYDKVVYKQYEEMVVEGXGX

SEQ ID NO: 56588 - protein, 30 aa, Artificial Sequence
  Cyclic GFR-binding peptide
  MOD_RES (4)..(5): Xaa is C or S
PSTXXAPVKTSPISMLYIDNGRVLLYKQYE

SEQ ID NO: 56589 - protein, 37 aa, Artificial Sequence; identical to SEQ ID NO: 36239
  Cyclic GFR-binding peptide
  MOD_RES (5)..(6): Xaa is C or S

SEQ ID NO: 56590 - protein, 34 aa, Artificial Sequence; identical to SEQ ID NO: 18047
  Cyclic GFR-binding peptide
  MOD_RES (31)..(33): Xaa is C or S

SEQ ID NO: 56591 - protein, 26 aa, Artificial Sequence
  Cyclic GFR-binding peptide
PTKLSPISILYIDKGVVTYYKQYEGM

SEQ ID NO: 56592 - protein, 39 aa, Artificial Sequence; identical to SEQ ID NO: 39116
  Cyclic GFR-binding peptide
  MOD_RES (3)..(4)..(36)..(38): Xaa is C or S

SEQ ID NO: 56593 - protein, 38 aa, Artificial Sequence; identical to SEQ ID NO: 39117
  Cyclic GFR-binding peptide
  MOD_RES (4)..(36)..(38): Xaa is C or S

SEQ ID NO: 56594 - protein, 31 aa, Artificial Sequence; identical to SEQ ID NO: 39118
  Cyclic GFR-binding peptide

SEQ ID NO: 56595 - protein, 29 aa, Artificial Sequence
  Cyclic GFR-binding peptide
PTELSPISMLYIDEYDKVVYKQYEEMVVE

SEQ ID NO: 56596 - protein, 36 aa, Artificial Sequence
  Cyclic GFR-binding peptide
  MOD_RES (5)..(6): Xaa is C or S
TPPTXXVPTRLSPISILYIDSANNVVYKQYEDMVVE

SEQ ID NO: 56597 - protein, 30 aa, Artificial Sequence; identical to SEQ ID NO: 36246
  Cyclic GFR-binding peptide

SEQ ID NO: 56598 - protein, 33 aa, Artificial Sequence
  Cyclic GFR-binding peptide
  MOD_RES (4)..(5): Xaa is C or S
PPTXXVPTRLSPISILYIDSANNVVYKQYEDMV

SEQ ID NO: 56599 - protein, 32 aa, Artificial Sequence; identical to SEQ ID NO: 20411
  Cyclic GFR-binding peptide
  MOD_RES (29)..(31): Xaa is C or S

SEQ ID NO: 56600 - protein, 29 aa, Artificial Sequence
  Cyclic GFR-binding peptide
PTKMSPISMLYINDKQQIIYKQYEGMVVD

SEQ ID NO: 56601 - protein, 30 aa, Artificial Sequence; identical to SEQ ID NO: 18065
  Cyclic GFR-binding peptide
  MOD_RES (27)..(29): Xaa is C or S

SEQ ID NO: 56602 - protein, 38 aa, Artificial Sequence; identical to SEQ ID NO: 39130
  Cyclic GFR-binding peptide
  MOD_RES (6)..(7): Xaa is C or S

SEQ ID NO: 56603 - protein, 33 aa, Artificial Sequence; identical to SEQ ID NO: 39131
  Cyclic GFR-binding peptide
  MOD_RES (32)..(32): Xaa is C or S

SEQ ID NO: 56604 - protein, 37 aa, Artificial Sequence; identical to SEQ ID NO: 36256
  Cyclic GFR-binding peptide
  MOD_RES (4)..(5)..(37): Xaa is C or S

SEQ ID NO: 56605 - protein, 28 aa, Artificial Sequence
  Cyclic GFR-binding peptide
  MOD_RES (1)..(2): Xaa is C or S
XXTPTKMSPISMLYINDKQQIIYKQYEG

SEQ ID NO: 56606 - protein, 21 aa, Artificial Sequence
  Cyclic GFR-binding peptide
LSPISVLYIDSSNNVIYKQYE

SEQ ID NO: 56607 - protein, 25 aa, Artificial Sequence
  Cyclic GFR-binding peptide
TKLSPISVLYIDDMGVPTYKQYEEG

SEQ ID NO: 56608 - protein, 27 aa, Artificial Sequence
  Cyclic GFR-binding peptide
TRLSPISILYIDSANNVVYKQYEDMVV

SEQ ID NO: 56609 - protein, 27 aa, Artificial Sequence
  Cyclic GFR-binding peptide
PTRLSPISILYIDSANNVVYKQYEDMV

SEQ ID NO: 56610 - protein, 31 aa, Artificial Sequence; identical to SEQ ID NO: 36263
  Cyclic GFR-binding peptide
  MOD_RES (2)..(3): Xaa is C or S

SEQ ID NO: 56611 - protein, 33 aa, Artificial Sequence; identical to SEQ ID NO: 18079
  Cyclic GFR-binding peptide
  MOD_RES (30)..(32): Xaa is C or S

SEQ ID NO: 56612 - protein, 37 aa, Artificial Sequence; identical to SEQ ID NO: 39146
  Cyclic GFR-binding peptide
  MOD_RES (4)..(5)..(37): Xaa is C or S

SEQ ID NO: 56613 - protein, 32 aa, Artificial Sequence
  Cyclic GFR-binding peptide
  MOD_RES (2)..(3): Xaa is C or S
PXXTPTKMSPISMLYINDKQQIIYKQYEGMVV

SEQ ID NO: 56614 - protein, 35 aa, Artificial Sequence
  Cyclic GFR-binding peptide
  MOD_RES (1)..(33)..(35): Xaa is C or S
XTPTKMSPISMLYINDKQQIIYKQYEGMVVDRXGX

SEQ ID NO: 56615 - protein, 33 aa, Artificial Sequence; identical to SEQ ID NO: 36269
  Cyclic GFR-binding peptide
  MOD_RES (2)..(3): Xaa is C or S

SEQ ID NO: 56616 - protein, 38 aa, Artificial Sequence; identical to SEQ ID NO: 36273
  Cyclic GFR-binding peptide
  MOD_RES (2)..(3)..(36)..(38): Xaa is C or S

SEQ ID NO: 56617 - protein, 31 aa, Artificial Sequence; identical to SEQ ID NO: 36276
  Cyclic GFR-binding peptide

SEQ ID NO: 56618 - protein, 38 aa, Artificial Sequence; identical to SEQ ID NO: 39153
  Cyclic GFR-binding peptide
  MOD_RES (4)..(5)..(37): Xaa is C or S

SEQ ID NO: 56619 - protein, 28 aa, Artificial Sequence
  Cyclic GFR-binding peptide
  MOD_RES (1)..(2): Xaa is C or S
XXVPTELSPISMLYIDEYDKVVYKQYEE

SEQ ID NO: 56620 - protein, 30 aa, Artificial Sequence
  Cyclic GFR-binding peptide
  MOD_RES (28)..(30): Xaa is C or S
MSPISMLYINDKQQIIYKQYEGMVVDRXGX

SEQ ID NO: 56621 - protein, 32 aa, Artificial Sequence; identical to SEQ ID NO: 36285
  Cyclic GFR-binding peptide
  MOD_RES (31)..(31): Xaa is C or S

SEQ ID NO: 56622 - protein, 27 aa, Artificial Sequence
  Cyclic GFR-binding peptide
APVKTSPISMLYIDNGRVLLYKQYEMI

SEQ ID NO: 56623 - protein, 35 aa, Artificial Sequence; identical to SEQ ID NO: 36289
  Cyclic GFR-binding peptide
  MOD_RES (4)..(5): Xaa is C or S

SEQ ID NO: 56624 - protein, 33 aa, Artificial Sequence; identical to SEQ ID NO: 39169
  Cyclic GFR-binding peptide
  MOD_RES (1)..(33): Xaa is C or S

SEQ ID NO: 56625 - protein, 29 aa, Artificial Sequence
  Cyclic GFR-binding peptide
  MOD_RES (27)..(29): Xaa is C or S
SPISMLYIDENEKVVYKQYEDMVVEGXGX

SEQ ID NO: 56626 - protein, 41 aa, Artificial Sequence; identical to SEQ ID NO: 36293
  Cyclic GFR-binding peptide
  MOD_RES (5)..(6)..(38)..(40): Xaa is C or S

SEQ ID NO: 56627 - protein, 28 aa, Artificial Sequence
  Cyclic GFR-binding peptide
LSPISVLYIDDMGVPTYKQYEEGMSVAE

SEQ ID NO: 56628 - protein, 33 aa, Artificial Sequence; identical to SEQ ID NO: 18102
  Cyclic GFR-binding peptide
  MOD_RES (30)..(32): Xaa is C or S

SEQ ID NO: 56629 - protein, 26 aa, Artificial Sequence
  Cyclic GFR-binding peptide
  MOD_RES (1)..(1): Xaa is C or S
XVPTKLSPISVLYIDDMGVPTYKQYE

SEQ ID NO: 56630 - protein, 33 aa, Artificial Sequence
  Cyclic GFR-binding peptide
  MOD_RES (30)..(32): Xaa is C or S
TKMSPISMLYINDKQQIIYKQYEGMVVDRXGXS

SEQ ID NO: 56631 - protein, 38 aa, Artificial Sequence; identical to SEQ ID NO: 36314
  Cyclic GFR-binding peptide
  MOD_RES (4)..(5)..(37): Xaa is C or S

SEQ ID NO: 56632 - protein, 24 aa, Artificial Sequence
  Cyclic GFR-binding peptide
TKLSPISILYIDKGVVTYYKQYEG

SEQ ID NO: 56633 - protein, 32 aa, Artificial Sequence; identical to SEQ ID NO: 39182
  Cyclic GFR-binding peptide
  MOD_RES (2)..(3): Xaa is C or S

SEQ ID NO: 56634 - protein, 25 aa, Artificial Sequence
  Cyclic GFR-binding peptide
MSPISMLYINDKQQIIYKQYEGMVV

SEQ ID NO: 56635 - protein, 27 aa, Artificial Sequence
  Cyclic GFR-binding peptide
PTKMSPISMLYINDKQQIIYKQYEGMV

SEQ ID NO: 56636 - protein, 33 aa, Artificial Sequence; identical to SEQ ID NO: 36319
  Cyclic GFR-binding peptide
  MOD_RES (3)..(4): Xaa is C or S

SEQ ID NO: 56637 - protein, 39 aa, Artificial Sequence; identical to SEQ ID NO: 39188
  Cyclic GFR-binding peptide
  MOD_RES (5)..(6)..(38): Xaa is C or S

SEQ ID NO: 56638 - protein, 40 aa, Artificial Sequence; identical to SEQ ID NO: 36324
  Cyclic GFR-binding peptide
  MOD_RES (5)..(6)..(38)..(40): Xaa is C or S

SEQ ID NO: 56639 - protein, 28 aa, Artificial Sequence
  Cyclic GFR-binding peptide
  MOD_RES (1)..(1): Xaa is C or S
XAPTKLSPISVLYIDDSSNVIYKQYENM

SEQ ID NO: 56640 - protein, 28 aa, Artificial Sequence
  Cyclic GFR-binding peptide
PTKLSPISVLYIDDMGVPTYKQYEEGMS

SEQ ID NO: 56641 - protein, 32 aa, Artificial Sequence
  Cyclic GFR-binding peptide
  MOD_RES (32)..(32): Xaa is C or S
TPTKMSPISMLYINDKQQIIYKQYEGMVVDRX

SEQ ID NO: 56642 - protein, 29 aa, Artificial Sequence
  Cyclic GFR-binding peptide
  MOD_RES (3)..(4): Xaa is C or S
KAXXVPTKLSPISILYIDKGVVTYYKQYE

SEQ ID NO: 56643 - protein, 35 aa, Artificial Sequence; identical to SEQ ID NO: 36330
  Cyclic GFR-binding peptide
  MOD_RES (5)..(6): Xaa is C or S

SEQ ID NO: 56644 - protein, 20 aa, Artificial Sequence
  Cyclic GFR-binding peptide
SPISILYIDKGVVTYYKQYE

SEQ ID NO: 56645 - protein, 32 aa, Artificial Sequence
  Cyclic GFR-binding peptide
  MOD_RES (5)..(6): Xaa is C or S
VPSTXXAPVKTSPISMLYIDNGRVLLYKQYEM

SEQ ID NO: 56646 - protein, 33 aa, Artificial Sequence; identical to SEQ ID NO: 36335
  Cyclic GFR-binding peptide
  MOD_RES (5)..(6): Xaa is C or S

SEQ ID NO: 56647 - protein, 35 aa, Artificial Sequence; identical to SEQ ID NO: 36336
  Cyclic GFR-binding peptide
  MOD_RES (6)..(7): Xaa is C or S

SEQ ID NO: 56648 - protein, 28 aa, Artificial Sequence
  Cyclic GFR-binding peptide
  MOD_RES (1)..(2): Xaa is C or S
XXVPTKLSPISVLYIDDMGVPTYKQYEE

SEQ ID NO: 56649 - protein, 30 aa, Artificial Sequence; identical to SEQ ID NO: 39200
  Cyclic GFR-binding peptide

SEQ ID NO: 56650 - protein, 37 aa, Artificial Sequence
  Cyclic GFR-binding peptide
  MOD_RES (5)..(6)..(37): Xaa is C or S
VPSTXXAPVKTSPISMLYIDNGRVLLYKQYEMIVEEX

SEQ ID NO: 56651 - protein, 28 aa, Artificial Sequence
  Cyclic GFR-binding peptide
  MOD_RES (27)..(27): Xaa is C or S
SPISILYIDKGVVTYYKQYEGMAVSEXG

SEQ ID NO: 56652 - protein, 29 aa, Artificial Sequence
  Cyclic GFR-binding peptide
  MOD_RES (29)..(29): Xaa is C or S
ELSPISMLYIDEYDKVVYKQYEEMVVEGX

SEQ ID NO: 56653 - protein, 33 aa, Artificial Sequence
  Cyclic GFR-binding peptide
  MOD_RES (6)..(7): Xaa is C or S
STPPTXXVPTRLSPISILYIDSANNVVYKQYED

SEQ ID NO: 56654 - protein, 34 aa, Artificial Sequence; identical to SEQ ID NO: 36340
  Cyclic GFR-binding peptide
  MOD_RES (2)..(3): Xaa is C or S

SEQ ID NO: 56655 - protein, 29 aa, Artificial Sequence
  Cyclic GFR-binding peptide
  MOD_RES (29)..(29): Xaa is C or S
QLSPISVLYIDDSSNVIYKQYENMVVRAX

SEQ ID NO: 56656 - protein, 30 aa, Artificial Sequence
  Cyclic GFR-binding peptide
  MOD_RES (1)..(1): Xaa is C or S
XVPTRLSPISILYIDSANNVVYKQYEDMVV

SEQ ID NO: 56657 - protein, 36 aa, Artificial Sequence; identical to SEQ ID NO: 36349
  Cyclic GFR-binding peptide
  MOD_RES (3)..(35): Xaa is C or S

SEQ ID NO: 56658 - protein, 31 aa, Artificial Sequence
  Cyclic GFR-binding peptide
  MOD_RES (4)..(5): Xaa is C or S
PPTXXVPTRLSPISILYIDSANNVVYKQYED

SEQ ID NO: 56659 - protein, 30 aa, Artificial Sequence; identical to SEQ ID NO: 36351
  Cyclic GFR-binding peptide
  MOD_RES (2)..(3): Xaa is C or S

SEQ ID NO: 56660 - protein, 27 aa, Artificial Sequence
  Cyclic GFR-binding peptide
  MOD_RES (1)..(1): Xaa is C or S
XAPTKLSPISVLYIDDSSNVIYKQYEN

SEQ ID NO: 56661 - protein, 38 aa, Artificial Sequence
  Cyclic GFR-binding peptide
  MOD_RES (2)..(3)..(35)..(37): Xaa is C or S
TXXVPTRLSPISILYIDSANNVVYKQYEDMVVESXGXR

SEQ ID NO: 56662 - protein, 25 aa, Artificial Sequence
  Cyclic GFR-binding peptide
VPTELSPISMLYIDENEKVVYKQYE

SEQ ID NO: 56663 - protein, 35 aa, Artificial Sequence; identical to SEQ ID NO: 36358
  Cyclic GFR-binding peptide
  MOD_RES (32)..(34): Xaa is C or S

SEQ ID NO: 56664 - protein, 34 aa, Artificial Sequence; identical to SEQ ID NO: 36360
  Cyclic GFR-binding peptide
  MOD_RES (6)..(6): Xaa is C or S

SEQ ID NO: 56665 - protein, 39 aa, Artificial Sequence; identical to SEQ ID NO: 39213
  Cyclic GFR-binding peptide
  MOD_RES (5)..(37)..(39): Xaa is C or S

SEQ ID NO: 56666 - protein, 34 aa, Artificial Sequence
  Cyclic GFR-binding peptide
  MOD_RES (31)..(33): Xaa is C or S
PTRLSPISILYIDSANNVVYKQYEDMVVESXGXR

SEQ ID NO: 56667 - protein, 31 aa, Artificial Sequence
  Cyclic GFR-binding peptide
  MOD_RES (2)..(3): Xaa is C or S
TXXAPVKTSPISMLYIDNGRVLLYKQYEMIV

SEQ ID NO: 56668 - protein, 28 aa, Artificial Sequence
  Cyclic GFR-binding peptide
  MOD_RES (28)..(28): Xaa is C or S
LSPISMLYIDENEKVVYKQYEDMVVEGX

SEQ ID NO: 56669 - protein, 34 aa, Artificial Sequence; identical to SEQ ID NO: 39217
  Cyclic GFR-binding peptide
  MOD_RES (4)..(5): Xaa is C or S

SEQ ID NO: 56670 - protein, 35 aa, Artificial Sequence; identical to SEQ ID NO: 36364
  Cyclic GFR-binding peptide
  MOD_RES (6)..(7): Xaa is C or S

SEQ ID NO: 56671 - protein, 32 aa, Artificial Sequence
  Cyclic GFR-binding peptide
  MOD_RES (1)..(2): Xaa is C or S
XXAPVKTSPISMLYIDNGRVLLYKQYEMIVEE

SEQ ID NO: 56672 - protein, 24 aa, Artificial Sequence
  Cyclic GFR-binding peptide
PTKMSPISMLYINDKQQIIYKQYE

SEQ ID NO: 56673 - protein, 36 aa, Artificial Sequence; identical to SEQ ID NO: 36370
  Cyclic GFR-binding peptide
  MOD_RES (3)..(4)..(36): Xaa is C or S

SEQ ID NO: 56674 - protein, 32 aa, Artificial Sequence
  Cyclic GFR-binding peptide
  MOD_RES (1)..(1): Xaa is C or S
XVPTRLSPISILYIDSANNVVYKQYEDMVVES

SEQ ID NO: 56675 - protein, 36 aa, Artificial Sequence; identical to SEQ ID NO: 39221
  Cyclic GFR-binding peptide
  MOD_RES (1)..(2)..(34)..(36): Xaa is C or S

SEQ ID NO: 56676 - protein, 35 aa, Artificial Sequence
  Cyclic GFR-binding peptide
  MOD_RES (1)..(2)..(34): Xaa is C or S
XXTPTKMSPISMLYINDKQQIIYKQYEGMVVDRXG

SEQ ID NO: 56677 - protein, 35 aa, Artificial Sequence
  Cyclic GFR-binding peptide
  MOD_RES (4)..(5): Xaa is C or S
AGPXXTPTKMSPISMLYINDKQQIIYKQYEGMVVD

SEQ ID NO: 56678 - protein, 27 aa, Artificial Sequence
  Cyclic GFR-binding peptide
PVKTSPISMLYIDNGRVLLYKQYEMIV

SEQ ID NO: 56679 - protein, 31 aa, Artificial Sequence; identical to SEQ ID NO: 18158
  Cyclic GFR-binding peptide
  MOD_RES (28)..(30): Xaa is C or S

SEQ ID NO: 56680 - protein, 42 aa, Artificial Sequence; identical to SEQ ID NO: 18160
  Cyclic GFR-binding peptide
  MOD_RES (6)..(7)..(39)..(41): Xaa is C or S

SEQ ID NO: 56681 - protein, 32 aa, Artificial Sequence
  Cyclic GFR-binding peptide
  MOD_RES (6)..(7): Xaa is C or S
RVPSTXXAPVKTSPISMLYIDNGRVLLYKQYE

SEQ ID NO: 56682 - protein, 33 aa, Artificial Sequence; identical to SEQ ID NO: 36377
  Cyclic GFR-binding peptide
  MOD_RES (3)..(4): Xaa is C or S

SEQ ID NO: 56683 - protein, 21 aa, Artificial Sequence
  Cyclic GFR-binding peptide
TSPISMLYIDNGRVLLYKQYE

SEQ ID NO: 56684 - protein, 34 aa, Artificial Sequence; identical to SEQ ID NO: 36380
  Cyclic GFR-binding peptide
  MOD_RES (31)..(33): Xaa is C or S

SEQ ID NO: 56685 - protein, 35 aa, Artificial Sequence; identical to SEQ ID NO: 39228
  Cyclic GFR-binding peptide
  MOD_RES (1)..(33)..(35): Xaa is C or S

SEQ ID NO: 56686 - protein, 23 aa, Artificial Sequence
  Cyclic GFR-binding peptide
RLSPISILYIDSANNVVYKQYED

SEQ ID NO: 56687 - protein, 23 aa, Artificial Sequence
  Cyclic GFR-binding peptide
ELSPISMLYIDENEKVVYKQYED

SEQ ID NO: 56688 - protein, 41 aa, Artificial Sequence; identical to SEQ ID NO: 36386
  Cyclic GFR-binding peptide
  MOD_RES (5)..(6)..(38)..(40): Xaa is C or S

SEQ ID NO: 56689 - protein, 25 aa, Artificial Sequence
  Cyclic GFR-binding peptide
PTELSPISMLYIDEYDKVVYKQYEE

SEQ ID NO: 56690 - protein, 24 aa, Artificial Sequence
  Cyclic GFR-binding peptide
LSPISILYIDSANNVVYKQYEDMV

SEQ ID NO: 56691 - protein, 30 aa, Artificial Sequence; identical to SEQ ID NO: 39239
  Cyclic GFR-binding peptide
  MOD_RES (1)..(2): Xaa is C or S

SEQ ID NO: 56692 - protein, 32 aa, Artificial Sequence; identical to SEQ ID NO: 20527
  Cyclic GFR-binding peptide
  MOD_RES (29)..(31): Xaa is C or S

SEQ ID NO: 56693 - protein, 33 aa, Artificial Sequence; identical to SEQ ID NO: 18179
  Cyclic GFR-binding peptide
  MOD_RES (30)..(32): Xaa is C or S

SEQ ID NO: 56694 - protein, 28 aa, Artificial Sequence
  Cyclic GFR-binding peptide
KLSPISVLYIDDMGVPTYKQYEEGMSVA

SEQ ID NO: 56695 - protein, 22 aa, Artificial Sequence
  Cyclic GFR-binding peptide
LSPISVLYIDSSNNVIYKQYEN

SEQ ID NO: 56696 - protein, 36 aa, Artificial Sequence; identical to SEQ ID NO: 36398
  Cyclic GFR-binding peptide
  MOD_RES (3)..(4)..(36): Xaa is C or S

SEQ ID NO: 56697 - protein, 31 aa, Artificial Sequence; identical to SEQ ID NO: 36399
  Cyclic GFR-binding peptide
  MOD_RES (4)..(5): Xaa is C or S

SEQ ID NO: 56698 - protein, 28 aa, Artificial Sequence
  Cyclic GFR-binding peptide
TKLSPISVLYIDDMGVPTYKQYEEGMSV

SEQ ID NO: 56699 - protein, 40 aa, Artificial Sequence; identical to SEQ ID NO: 36404
  Cyclic GFR-binding peptide
  MOD_RES (4)..(5)..(37)..(39): Xaa is C or S

SEQ ID NO: 56700 - protein, 28 aa, Artificial Sequence
  Cyclic GFR-binding peptide
  MOD_RES (28)..(28): Xaa is C or S
LSPISMLYIDEYDKVVYKQYEEMVVEGX

SEQ ID NO: 56701 - protein, 34 aa, Artificial Sequence; identical to SEQ ID NO: 36410
  Cyclic GFR-binding peptide
  MOD_RES (6)..(7): Xaa is C or S

SEQ ID NO: 56702 - protein, 24 aa, Artificial Sequence
  Cyclic GFR-binding peptide
PTKLSPISVLYIDDSSNVIYKQYE

SEQ ID NO: 56703 - protein, 28 aa, Artificial Sequence
  Cyclic GFR-binding peptide
TRLSPISILYIDSANNVVYKQYEDMVVE

SEQ ID NO: 56704 - protein, 30 aa, Artificial Sequence; identical to SEQ ID NO: 36415
  Cyclic GFR-binding peptide
  MOD_RES (4)..(5): Xaa is C or S

SEQ ID NO: 56705 - protein, 32 aa, Artificial Sequence; identical to SEQ ID NO: 36417
  Cyclic GFR-binding peptide
  MOD_RES (6)..(7): Xaa is C or S

SEQ ID NO: 56706 - protein, 32 aa, Artificial Sequence; identical to SEQ ID NO: 36419
  Cyclic GFR-binding peptide
  MOD_RES (31)..(31): Xaa is C or S

SEQ ID NO: 56707 - protein, 35 aa, Artificial Sequence; identical to SEQ ID NO: 39261
  Cyclic GFR-binding peptide
  MOD_RES (5)..(6): Xaa is C or S

SEQ ID NO: 56708 - protein, 35 aa, Artificial Sequence
  Cyclic GFR-binding peptide
  MOD_RES (32)..(34): Xaa is C or S
VPTRLSPISILYIDSANNVVYKQYEDMVVESXGXR

SEQ ID NO: 56709 - protein, 39 aa, Artificial Sequence; identical to SEQ ID NO: 39263
  Cyclic GFR-binding peptide
  MOD_RES (6)..(7)..(39): Xaa is C or S

SEQ ID NO: 56710 - protein, 31 aa, Artificial Sequence; identical to SEQ ID NO: 39264
  Cyclic GFR-binding peptide
  MOD_RES (29)..(31): Xaa is C or S

SEQ ID NO: 56711 - protein, 31 aa, Artificial Sequence; identical to SEQ ID NO: 36423
  Cyclic GFR-binding peptide
  MOD_RES (2)..(2): Xaa is C or S

SEQ ID NO: 56712 - protein, 34 aa, Artificial Sequence
  Cyclic GFR-binding peptide
  MOD_RES (2)..(3): Xaa is C or S
PXXTPTKMSPISMLYINDKQQIIYKQYEGMVVDR

SEQ ID NO: 56713 - protein, 28 aa, Artificial Sequence
  Cyclic GFR-binding peptide
  MOD_RES (2)..(3): Xaa is C or S
PXXAPTKLSPISVLYIDDSSNVIYKQYE

SEQ ID NO: 56714 - protein, 22 aa, Artificial Sequence
  Cyclic GFR-binding peptide
RLSPISILYIDSANNVVYKQYE

SEQ ID NO: 56715 - protein, 33 aa, Artificial Sequence; identical to SEQ ID NO: 39270
  Cyclic GFR-binding peptide
  MOD_RES (3)..(3): Xaa is C or S

SEQ ID NO: 56716 - protein, 26 aa, Artificial Sequence
  Cyclic GFR-binding peptide
VPTRLSPISILYIDSANNVVYKQYED

SEQ ID NO: 56717 - protein, 41 aa, Artificial Sequence
  Cyclic GFR-binding peptide
  MOD_RES (6)..(7)..(39)..(41): Xaa is C or S
GSAGPXXTPTKMSPISMLYINDKQQIIYKQYEGMVVDRXGX

SEQ ID NO: 56718 - protein, 23 aa, Artificial Sequence
  Cyclic GFR-binding peptide
LSPISVLYIDDSSNVIYKQYENM

SEQ ID NO: 56719 - protein, 39 aa, Artificial Sequence; identical to SEQ ID NO: 39281
  Cyclic GFR-binding peptide
  MOD_RES (3)..(4)..(36)..(38): Xaa is C or S

SEQ ID NO: 56720 - protein, 36 aa, Artificial Sequence
  Cyclic GFR-binding peptide
  MOD_RES (1)..(2)..(34)..(36): Xaa is C or S
XXVPTRLSPISILYIDSANNVVYKQYEDMVVESXGX

SEQ ID NO: 56721 - protein, 38 aa, Artificial Sequence; identical to SEQ ID NO: 39283
  Cyclic GFR-binding peptide
  MOD_RES (2)..(3)..(35)..(37): Xaa is C or S

SEQ ID NO: 56722 - protein, 29 aa, Artificial Sequence
  Cyclic GFR-binding peptide
TKLSPISVLYIDDSSNVIYKQYENMVVRS

SEQ ID NO: 56723 - protein, 33 aa, Artificial Sequence
  Cyclic GFR-binding peptide
  MOD_RES (2)..(3): Xaa is C or S
TXXAPVKTSPISMLYIDNGRVLLYKQYEMIVEE

SEQ ID NO: 56724 - protein, 23 aa, Artificial Sequence
  Cyclic GFR-binding peptide
LSPISILYIDSANNVVYKQYEDM

SEQ ID NO: 56725 - protein, 26 aa, Artificial Sequence
  Cyclic GFR-binding peptide
SPISVLYIDDMGVPTYKQYEEGMSVA

SEQ ID NO: 56726 - protein, 31 aa, Artificial Sequence; identical to SEQ ID NO: 18227
  Cyclic GFR-binding peptide
  MOD_RES (28)..(30): Xaa is C or S

SEQ ID NO: 56727 - protein, 36 aa, Artificial Sequence; identical to SEQ ID NO: 36457
  Cyclic GFR-binding peptide
  MOD_RES (1)..(2)..(34)..(36): Xaa is C or S

SEQ ID NO: 56728 - protein, 26 aa, Artificial Sequence
  Cyclic GFR-binding peptide
  MOD_RES (1)..(1): Xaa is C or S
XAPVKTSPISMLYIDNGRVLLYKQYE

SEQ ID NO: 56729 - protein, 29 aa, Artificial Sequence
  Cyclic GFR-binding peptide
  MOD_RES (1)..(2): Xaa is C or S
XXAPTKLSPISVLYIDSSNNVIYKQYENM

SEQ ID NO: 56730 - protein, 31 aa, Artificial Sequence; identical to SEQ ID NO: 39299
  Cyclic GFR-binding peptide
  MOD_RES (28)..(30): Xaa is C or S

SEQ ID NO: 56731 - protein, 26 aa, Artificial Sequence
  Cyclic GFR-binding peptide
SPISMLYIDENEKVVYKQYEDMVVEG

SEQ ID NO: 56732 - protein, 24 aa, Artificial Sequence
  Cyclic GFR-binding peptide
TKLSPISVLYIDDMGVPTYKQYEE

SEQ ID NO: 56733 - protein, 23 aa, Artificial Sequence
  Cyclic GFR-binding peptide
KTSPISMLYIDNGRVLLYKQYEM

SEQ ID NO: 56734 - protein, 27 aa, Artificial Sequence
  Cyclic GFR-binding peptide
TQLSPISVLYIDDSSNVIYKQYENMVV

SEQ ID NO: 56735 - protein, 29 aa, Artificial Sequence
  Cyclic GFR-binding peptide
PTRLSPISILYIDSANNVVYKQYEDMVVE

SEQ ID NO: 56736 - protein, 37 aa, Artificial Sequence; identical to SEQ ID NO: 39315
  Cyclic GFR-binding peptide
  MOD_RES (4)..(5)..(37): Xaa is C or S

SEQ ID NO: 56737 - protein, 36 aa, Artificial Sequence; identical to SEQ ID NO: 36474
  Cyclic GFR-binding peptide
  MOD_RES (2)..(34)..(36): Xaa is C or S

SEQ ID NO: 56738 - protein, 34 aa, Artificial Sequence
  Cyclic GFR-binding peptide
  MOD_RES (4)..(5): Xaa is C or S
PSTXXAPVKTSPISMLYIDNGRVLLYKQYEMIVE

SEQ ID NO: 56739 - protein, 35 aa, Artificial Sequence; identical to SEQ ID NO: 36487
  Cyclic GFR-binding peptide
  MOD_RES (6)..(7): Xaa is C or S

SEQ ID NO: 56740 - protein, 34 aa, Artificial Sequence
  Cyclic GFR-binding peptide
  MOD_RES (31)..(33): Xaa is C or S
APVKTSPISMLYIDNGRVLLYKQYEMIVEEXGXL

SEQ ID NO: 56741 - protein, 34 aa, Artificial Sequence; identical to SEQ ID NO: 36489
  Cyclic GFR-binding peptide
  MOD_RES (2)..(3): Xaa is C or S

SEQ ID NO: 56742 - protein, 36 aa, Artificial Sequence
  Cyclic GFR-binding peptide
  MOD_RES (2)..(3)..(35): Xaa is C or S
TXXVPTRLSPISILYIDSANNVVYKQYEDMVVESXG

SEQ ID NO: 56743 - protein, 28 aa, Artificial Sequence
  Cyclic GFR-binding peptide
  MOD_RES (27)..(27): Xaa is C or S
SPISVLYIDDSSNVIYKQYENMVVRSXG

SEQ ID NO: 56744 - protein, 28 aa, Artificial Sequence
  Cyclic GFR-binding peptide
  MOD_RES (2)..(3): Xaa is C or S
AXXVPTELSPISMLYIDENEKVVYKQYE

SEQ ID NO: 56745 - protein, 33 aa, Artificial Sequence
  Cyclic GFR-binding peptide
  MOD_RES (5)..(6): Xaa is C or S
SAGPXXTPTKMSPISMLYINDKQQIIYKQYEGM

SEQ ID NO: 56746 - protein, 29 aa, Artificial Sequence
  Cyclic GFR-binding peptide
  MOD_RES (1)..(1): Xaa is C or S
XAPTKLSPISVLYIDSSNNVIYKQYENMV

SEQ ID NO: 56747 - protein, 30 aa, Artificial Sequence; identical to SEQ ID NO: 20603
  Cyclic GFR-binding peptide
  MOD_RES (27)..(29): Xaa is C or S

SEQ ID NO: 56748 - protein, 35 aa, Artificial Sequence; identical to SEQ ID NO: 36503
  Cyclic GFR-binding peptide
  MOD_RES (3)..(4): Xaa is C or S

SEQ ID NO: 56749 - protein, 25 aa, Artificial Sequence
  Cyclic GFR-binding peptide
KMSPISMLYINDKQQIIYKQYEGMV

SEQ ID NO: 56750 - protein, 29 aa, Artificial Sequence
  Cyclic GFR-binding peptide
APTKLSPISVLYIDDSSNVIYKQYENMVV

SEQ ID NO: 56751 - protein, 30 aa, Artificial Sequence
  Cyclic GFR-binding peptide
  MOD_RES (28)..(30): Xaa is C or S
KTSPISMLYIDNGRVLLYKQYEMIVEEXGX

SEQ ID NO: 56752 - protein, 30 aa, Artificial Sequence; identical to SEQ ID NO: 36507
  Cyclic GFR-binding peptide
  MOD_RES (29)..(29): Xaa is C or S

SEQ ID NO: 56753 - protein, 36 aa, Artificial Sequence; identical to SEQ ID NO: 39353
  Cyclic GFR-binding peptide
  MOD_RES (1)..(2)..(34)..(36): Xaa is C or S

SEQ ID NO: 56754 - protein, 42 aa, Artificial Sequence; identical to SEQ ID NO: 20612
  Cyclic GFR-binding peptide
  MOD_RES (6)..(7)..(39)..(41): Xaa is C or S

SEQ ID NO: 56755 - protein, 32 aa, Artificial Sequence; identical to SEQ ID NO: 18277
  Cyclic GFR-binding peptide
  MOD_RES (29)..(31): Xaa is C or S

SEQ ID NO: 56756 - protein, 25 aa, Artificial Sequence
  Cyclic GFR-binding peptide
TQLSPISVLYIDDSSNVIYKQYENM

SEQ ID NO: 56757 - protein, 38 aa, Artificial Sequence; identical to SEQ ID NO: 39358
  Cyclic GFR-binding peptide
  MOD_RES (5)..(6)..(38): Xaa is C or S

SEQ ID NO: 56758 - protein, 34 aa, Artificial Sequence; identical to SEQ ID NO: 36517
  Cyclic GFR-binding peptide
  MOD_RES (5)..(6): Xaa is C or S

SEQ ID NO: 56759 - protein, 40 aa, Artificial Sequence
  Cyclic GFR-binding peptide
  MOD_RES (5)..(6)..(37)..(39): Xaa is C or S
VPSTXXAPVKTSPISMLYIDNGRVLLYKQYEMIVEEXGXL

SEQ ID NO: 56760 - protein, 30 aa, Artificial Sequence; identical to SEQ ID NO: 18287
  Cyclic GFR-binding peptide
  MOD_RES (27)..(29): Xaa is C or S

SEQ ID NO: 56761 - protein, 28 aa, Artificial Sequence
  Cyclic GFR-binding peptide
  MOD_RES (1)..(1): Xaa is C or S
XTPTKMSPISMLYINDKQQIIYKQYEGM

SEQ ID NO: 56762 - protein, 26 aa, Artificial Sequence
  Cyclic GFR-binding peptide
TKLSPISVLYIDDMGVPTYKQYEEGM

SEQ ID NO: 56763 - protein, 34 aa, Artificial Sequence; identical to SEQ ID NO: 39365
  Cyclic GFR-binding peptide
  MOD_RES (1)..(2)..(34): Xaa is C or S

SEQ ID NO: 56764 - protein, 25 aa, Artificial Sequence
  Cyclic GFR-binding peptide
PTKLSPISVLYIDDSSNVIYKQYEN

SEQ ID NO: 56765 - protein, 30 aa, Artificial Sequence; identical to SEQ ID NO: 36527
  Cyclic GFR-binding peptide
  MOD_RES (30)..(30): Xaa is C or S

SEQ ID NO: 56766 - protein, 30 aa, Artificial Sequence; identical to SEQ ID NO: 39371
  Cyclic GFR-binding peptide
  MOD_RES (3)..(4): Xaa is C or S

SEQ ID NO: 56767 - protein, 34 aa, Artificial Sequence; identical to SEQ ID NO: 36530
  Cyclic GFR-binding peptide
  MOD_RES (32)..(34): Xaa is C or S

SEQ ID NO: 56768 - protein, 40 aa, Artificial Sequence; identical to SEQ ID NO: 36531
  Cyclic GFR-binding peptide
  MOD_RES (7)..(39): Xaa is C or S

SEQ ID NO: 56769 - protein, 25 aa, Artificial Sequence
  Cyclic GFR-binding peptide
VPTRLSPISILYIDSANNVVYKQYE

SEQ ID NO: 56770 - protein, 27 aa, Artificial Sequence
  Cyclic GFR-binding peptide
MSPISMLYINDKQQIIYKQYEGMVVDR

SEQ ID NO: 56771 - protein, 38 aa, Artificial Sequence; identical to SEQ ID NO: 36532
  Cyclic GFR-binding peptide
  MOD_RES (6)..(7): Xaa is C or S

SEQ ID NO: 56772 - protein, 34 aa, Artificial Sequence
  Cyclic GFR-binding peptide
  MOD_RES (32)..(34): Xaa is C or S
VPTRLSPISILYIDSANNVVYKQYEDMVVESXGX

SEQ ID NO: 56773 - protein, 36 aa, Artificial Sequence; identical to SEQ ID NO: 36534
  Cyclic GFR-binding peptide
  MOD_RES (3)..(4): Xaa is C or S

SEQ ID NO: 56774 - protein, 30 aa, Artificial Sequence; identical to SEQ ID NO: 18298
  Cyclic GFR-binding peptide
  MOD_RES (27)..(29): Xaa is C or S

SEQ ID NO: 56775 - protein, 32 aa, Artificial Sequence
  Cyclic GFR-binding peptide
  MOD_RES (4)..(5): Xaa is C or S
PPTXXVPTRLSPISILYIDSANNVVYKQYEDM

SEQ ID NO: 56776 - protein, 24 aa, Artificial Sequence
  Cyclic GFR-binding peptide
TKLSPISVLYIDDSSNVIYKQYEN

SEQ ID NO: 56777 - protein, 39 aa, Artificial Sequence; identical to SEQ ID NO: 36540
  Cyclic GFR-binding peptide
  MOD_RES (2)..(3)..(36)..(38): Xaa is C or S

SEQ ID NO: 56778 - protein, 35 aa, Artificial Sequence; identical to SEQ ID NO: 36541
  Cyclic GFR-binding peptide
  MOD_RES (1)..(2)..(34): Xaa is C or S

SEQ ID NO: 56779 - protein, 30 aa, Artificial Sequence; identical to SEQ ID NO: 39385
  Cyclic GFR-binding peptide

SEQ ID NO: 56780 - protein, 31 aa, Artificial Sequence; identical to SEQ ID NO: 39387
  Cyclic GFR-binding peptide
  MOD_RES (5)..(6): Xaa is C or S

SEQ ID NO: 56781 - protein, 38 aa, Artificial Sequence
  Cyclic GFR-binding peptide
  MOD_RES (3)..(4)..(36)..(38): Xaa is C or S
GPXXTPTKMSPISMLYINDKQQIIYKQYEGMVVDRXGX

SEQ ID NO: 56782 - protein, 32 aa, Artificial Sequence; identical to SEQ ID NO: 18303
  Cyclic GFR-binding peptide
  MOD_RES (29)..(31): Xaa is C or S

SEQ ID NO: 56783 - protein, 27 aa, Artificial Sequence
  Cyclic GFR-binding peptide
PTELSPISMLYIDEYDKVVYKQYEEMV

SEQ ID NO: 56784 - protein, 29 aa, Artificial Sequence
  Cyclic GFR-binding peptide
PTKLSPISILYIDKGVVTYYKQYEGMAVS

SEQ ID NO: 56785 - protein, 40 aa, Artificial Sequence; identical to SEQ ID NO: 36549
  Cyclic GFR-binding peptide
  MOD_RES (6)..(38)..(40): Xaa is C or S

SEQ ID NO: 56786 - protein, 35 aa, Artificial Sequence; identical to SEQ ID NO: 36553
  Cyclic GFR-binding peptide
  MOD_RES (1)..(33)..(35): Xaa is C or S

SEQ ID NO: 56787 - protein, 25 aa, Artificial Sequence
  Cyclic GFR-binding peptide
TRLSPISILYIDSANNVVYKQYEDM

SEQ ID NO: 56788 - protein, 36 aa, Artificial Sequence
  Cyclic GFR-binding peptide
  MOD_RES (1)..(2)..(33)..(35): Xaa is C or S
XXAPVKTSPISMLYIDNGRVLLYKQYEMIVEEXGXL

SEQ ID NO: 56789 - protein, 32 aa, Artificial Sequence; identical to SEQ ID NO: 36561
  Cyclic GFR-binding peptide
  MOD_RES (6)..(7): Xaa is C or S

SEQ ID NO: 56790 - protein, 41 aa, Artificial Sequence; identical to SEQ ID NO: 39405
  Cyclic GFR-binding peptide
  MOD_RES (5)..(6)..(38)..(40): Xaa is C or S

SEQ ID NO: 56791 - protein, 27 aa, Artificial Sequence
  Cyclic GFR-binding peptide
  MOD_RES (2)..(2): Xaa is C or S
TXAPTKLSPISVLYIDDSSNVIYKQYE

SEQ ID NO: 56792 - protein, 26 aa, Artificial Sequence
  Cyclic GFR-binding peptide
TELSPISMLYIDEYDKVVYKQYEEMV

SEQ ID NO: 56793 - protein, 32 aa, Artificial Sequence; identical to SEQ ID NO: 20667
  Cyclic GFR-binding peptide
  MOD_RES (29)..(31): Xaa is C or S

SEQ ID NO: 56794 - protein, 29 aa, Artificial Sequence
  Cyclic GFR-binding peptide
  MOD_RES (3)..(4): Xaa is C or S
KAXXAPTKLSPISVLYIDSSNNVIYKQYE

SEQ ID NO: 56795 - protein, 36 aa, Artificial Sequence
  Cyclic GFR-binding peptide
  MOD_RES (2)..(3)..(35): Xaa is C or S
PXXTPTKMSPISMLYINDKQQIIYKQYEGMVVDRXG

SEQ ID NO: 56796 - protein, 40 aa, Artificial Sequence; identical to SEQ ID NO: 39419
  Cyclic GFR-binding peptide
  MOD_RES (4)..(5)..(37)..(39): Xaa is C or S

SEQ ID NO: 56797 - protein, 29 aa, Artificial Sequence
  Cyclic GFR-binding peptide
  MOD_RES (1)..(1): Xaa is C or S
XAPVKTSPISMLYIDNGRVLLYKQYEMIV

SEQ ID NO: 56798 - protein, 24 aa, Artificial Sequence
  Cyclic GFR-binding peptide
PTKLSPISVLYIDDMGVPTYKQYE

SEQ ID NO: 56799 - protein, 30 aa, Artificial Sequence; identical to SEQ ID NO: 39430
  Cyclic GFR-binding peptide
  MOD_RES (28)..(30): Xaa is C or S

SEQ ID NO: 56800 - protein, 28 aa, Artificial Sequence
  Cyclic GFR-binding peptide
VPTRLSPISILYIDSANNVVYKQYEDMV

SEQ ID NO: 56801 - protein, 22 aa, Artificial Sequence
  Cyclic GFR-binding peptide
SPISMLYINDKQQIIYKQYEGM

SEQ ID NO: 56802 - protein, 32 aa, Artificial Sequence; identical to SEQ ID NO: 39433
  Cyclic GFR-binding peptide
  MOD_RES (29)..(31): Xaa is C or S

SEQ ID NO: 56803 - protein, 32 aa, Artificial Sequence
  Cyclic GFR-binding peptide
  MOD_RES (6)..(7): Xaa is C or S
GSAGPXXTPTKMSPISMLYINDKQQIIYKQYE

SEQ ID NO: 56804 - protein, 33 aa, Artificial Sequence; identical to SEQ ID NO: 39436
  Cyclic GFR-binding peptide
  MOD_RES (4)..(5): Xaa is C or S

SEQ ID NO: 56805 - protein, 42 aa, Artificial Sequence; identical to SEQ ID NO: 18353
  Cyclic GFR-binding peptide
  MOD_RES (6)..(7)..(39)..(41): Xaa is C or S

SEQ ID NO: 56806 - protein, 31 aa, Artificial Sequence; identical to SEQ ID NO: 39437
  Cyclic GFR-binding peptide
  MOD_RES (31)..(31): Xaa is C or S

SEQ ID NO: 56807 - protein, 33 aa, Artificial Sequence; identical to SEQ ID NO: 39438
  Cyclic GFR-binding peptide
  MOD_RES (33)..(33): Xaa is C or S

SEQ ID NO: 56808 - protein, 37 aa, Artificial Sequence; identical to SEQ ID NO: 36600
  Cyclic GFR-binding peptide
  MOD_RES (4)..(5)..(37): Xaa is C or S

SEQ ID NO: 56809 - protein, 29 aa, Artificial Sequence
  Cyclic GFR-binding peptide
  MOD_RES (27)..(29): Xaa is C or S
SPISILYIDKGVVTYYKQYEGMAVSEXGX

SEQ ID NO: 56810 - protein, 35 aa, Artificial Sequence; identical to SEQ ID NO: 36606
  Cyclic GFR-binding peptide
  MOD_RES (5)..(6): Xaa is C or S

SEQ ID NO: 56811 - protein, 32 aa, Artificial Sequence; identical to SEQ ID NO: 36608
  Cyclic GFR-binding peptide
  MOD_RES (4)..(5): Xaa is C or S

SEQ ID NO: 56812 - protein, 38 aa, Artificial Sequence; identical to SEQ ID NO: 36611
  Cyclic GFR-binding peptide
  MOD_RES (5)..(6): Xaa is C or S

SEQ ID NO: 56813 - protein, 35 aa, Artificial Sequence; identical to SEQ ID NO: 39445
  Cyclic GFR-binding peptide
  MOD_RES (6)..(7): Xaa is C or S

SEQ ID NO: 56814 - protein, 32 aa, Artificial Sequence; identical to SEQ ID NO: 18366
  Cyclic GFR-binding peptide
  MOD_RES (29)..(31): Xaa is C or S

SEQ ID NO: 56815 - protein, 32 aa, Artificial Sequence
  Cyclic GFR-binding peptide
  MOD_RES (2)..(3): Xaa is C or S
TXXVPTRLSPISILYIDSANNVVYKQYEDMVV

SEQ ID NO: 56816 - protein, 35 aa, Artificial Sequence; identical to SEQ ID NO: 39452
  Cyclic GFR-binding peptide
  MOD_RES (3)..(4): Xaa is C or S

SEQ ID NO: 56817 - protein, 32 aa, Artificial Sequence; identical to SEQ ID NO: 36615
  Cyclic GFR-binding peptide
  MOD_RES (3)..(4): Xaa is C or S

SEQ ID NO: 56818 - protein, 32 aa, Artificial Sequence; identical to SEQ ID NO: 39454
  Cyclic GFR-binding peptide
  MOD_RES (30)..(32): Xaa is C or S

SEQ ID NO: 56819 - protein, 31 aa, Artificial Sequence; identical to SEQ ID NO: 36618
  Cyclic GFR-binding peptide
  MOD_RES (2)..(3): Xaa is C or S

SEQ ID NO: 56820 - protein, 31 aa, Artificial Sequence; identical to SEQ ID NO: 39455
  Cyclic GFR-binding peptide
  MOD_RES (5)..(6): Xaa is C or S

SEQ ID NO: 56821 - protein, 35 aa, Artificial Sequence; identical to SEQ ID NO: 39458
  Cyclic GFR-binding peptide
  MOD_RES (2)..(3): Xaa is C or S

SEQ ID NO: 56822 - protein, 37 aa, Artificial Sequence; identical to SEQ ID NO: 36623
  Cyclic GFR-binding peptide
  MOD_RES (1)..(34)..(36): Xaa is C or S

SEQ ID NO: 56823 - protein, 26 aa, Artificial Sequence
  Cyclic GFR-binding peptide
QLSPISVLYIDDSSNVIYKQYENMVV

SEQ ID NO: 56824 - protein, 30 aa, Artificial Sequence; identical to SEQ ID NO: 36625
  Cyclic GFR-binding peptide
  MOD_RES (3)..(4): Xaa is C or S

SEQ ID NO: 56825 - protein, 42 aa, Artificial Sequence; identical to SEQ ID NO: 18374
  Cyclic GFR-binding peptide
  MOD_RES (7)..(39)..(41): Xaa is C or S

SEQ ID NO: 56826 - protein, 35 aa, Artificial Sequence
  Cyclic GFR-binding peptide
  MOD_RES (1)..(2)..(33)..(35): Xaa is C or S
XXAPVKTSPISMLYIDNGRVLLYKQYEMIVEEXGX

SEQ ID NO: 56827 - protein, 38 aa, Artificial Sequence; identical to SEQ ID NO: 36628
  Cyclic GFR-binding peptide
  MOD_RES (6)..(7): Xaa is C or S

SEQ ID NO: 56828 - protein, 22 aa, Artificial Sequence
  Cyclic GFR-binding peptide
ELSPISMLYIDENEKVVYKQYE

SEQ ID NO: 56829 - protein, 32 aa, Artificial Sequence; identical to SEQ ID NO: 36632
  Cyclic GFR-binding peptide
  MOD_RES (1)..(2): Xaa is C or S

SEQ ID NO: 56830 - protein, 28 aa, Artificial Sequence
  Cyclic GFR-binding peptide
QLSPISVLYIDDSSNVIYKQYENMVVRA

SEQ ID NO: 56831 - protein, 27 aa, Artificial Sequence
  Cyclic GFR-binding peptide
  MOD_RES (27)..(27): Xaa is C or S
SPISMLYIDENEKVVYKQYEDMVVEGX

SEQ ID NO: 56832 - protein, 32 aa, Artificial Sequence; identical to SEQ ID NO: 36639
  Cyclic GFR-binding peptide
  MOD_RES (32)..(32): Xaa is C or S

SEQ ID NO: 56833 - protein, 30 aa, Artificial Sequence; identical to SEQ ID NO: 20698
  Cyclic GFR-binding peptide
  MOD_RES (27)..(29): Xaa is C or S

SEQ ID NO: 56834 - protein, 42 aa, Artificial Sequence; identical to SEQ ID NO: 39471
  Cyclic GFR-binding peptide
  MOD_RES (7)..(39)..(41): Xaa is C or S

SEQ ID NO: 56835 - protein, 23 aa, Artificial Sequence
  Cyclic GFR-binding peptide
ELSPISMLYIDEYDKVVYKQYEE

SEQ ID NO: 56836 - protein, 25 aa, Artificial Sequence
  Cyclic GFR-binding peptide
RLSPISILYIDSANNVVYKQYEDMV

SEQ ID NO: 56837 - protein, 36 aa, Artificial Sequence; identical to SEQ ID NO: 36644
  Cyclic GFR-binding peptide
  MOD_RES (6)..(7): Xaa is C or S

SEQ ID NO: 56838 - protein, 24 aa, Artificial Sequence
  Cyclic GFR-binding peptide
ELSPISMLYIDEYDKVVYKQYEEM

SEQ ID NO: 56839 - protein, 31 aa, Artificial Sequence; identical to SEQ ID NO: 36646
  Cyclic GFR-binding peptide
  MOD_RES (29)..(31): Xaa is C or S

SEQ ID NO: 56840 - protein, 26 aa, Artificial Sequence
  Cyclic GFR-binding peptide
  MOD_RES (1)..(1): Xaa is C or S
XVPTELSPISMLYIDEYDKVVYKQYE

SEQ ID NO: 56841 - protein, 30 aa, Artificial Sequence
  Cyclic GFR-binding peptide
  MOD_RES (2)..(3): Xaa is C or S
TXXVPTRLSPISILYIDSANNVVYKQYEDM

SEQ ID NO: 56842 - protein, 38 aa, Artificial Sequence; identical to SEQ ID NO: 39486
  Cyclic GFR-binding peptide
  MOD_RES (6)..(38): Xaa is C or S

SEQ ID NO: 56843 - protein, 30 aa, Artificial Sequence
  Cyclic GFR-binding peptide
  MOD_RES (27)..(29): Xaa is C or S
TSPISMLYIDNGRVLLYKQYEMIVEEXGXL

SEQ ID NO: 56844 - protein, 35 aa, Artificial Sequence; identical to SEQ ID NO: 39491
  Cyclic GFR-binding peptide
  MOD_RES (5)..(6): Xaa is C or S

SEQ ID NO: 56845 - protein, 24 aa, Artificial Sequence
  Cyclic GFR-binding peptide
LSPISVLYIDDSSNVIYKQYENMV

SEQ ID NO: 56846 - protein, 30 aa, Artificial Sequence; identical to SEQ ID NO: 39492
  Cyclic GFR-binding peptide

SEQ ID NO: 56847 - protein, 33 aa, Artificial Sequence; identical to SEQ ID NO: 36653
  Cyclic GFR-binding peptide
  MOD_RES (31)..(33): Xaa is C or S

SEQ ID NO: 56848 - protein, 41 aa, Artificial Sequence; identical to SEQ ID NO: 36658
  Cyclic GFR-binding peptide
  MOD_RES (5)..(6)..(38)..(40): Xaa is C or S

SEQ ID NO: 56849 - protein, 26 aa, Artificial Sequence
  Cyclic GFR-binding peptide
KMSPISMLYINDKQQIIYKQYEGMVV

SEQ ID NO: 56850 - protein, 25 aa, Artificial Sequence
  Cyclic GFR-binding peptide
LSPISMLYIDENEKVVYKQYEDMVV

SEQ ID NO: 56851 - protein, 31 aa, Artificial Sequence; identical to SEQ ID NO: 36663
  Cyclic GFR-binding peptide
  MOD_RES (1)..(1): Xaa is C or S

SEQ ID NO: 56852 - protein, 31 aa, Artificial Sequence; identical to SEQ ID NO: 18406
  Cyclic GFR-binding peptide
  MOD_RES (28)..(30): Xaa is C or S

SEQ ID NO: 56853 - protein, 32 aa, Artificial Sequence; identical to SEQ ID NO: 36666
  Cyclic GFR-binding peptide
  MOD_RES (1)..(2): Xaa is C or S

SEQ ID NO: 56854 - protein, 34 aa, Artificial Sequence; identical to SEQ ID NO: 39509
  Cyclic GFR-binding peptide
  MOD_RES (32)..(34): Xaa is C or S

SEQ ID NO: 56855 - protein, 34 aa, Artificial Sequence; identical to SEQ ID NO: 36672
  Cyclic GFR-binding peptide
  MOD_RES (1)..(2): Xaa is C or S

SEQ ID NO: 56856 - protein, 31 aa, Artificial Sequence
  Cyclic GFR-binding peptide
  MOD_RES (5)..(6): Xaa is C or S
SAGPXXTPTKMSPISMLYINDKQQIIYKQYE

SEQ ID NO: 56857 - protein, 29 aa, Artificial Sequence
  Cyclic GFR-binding peptide
  MOD_RES (1)..(2): Xaa is C or S
XXVPTKLSPISVLYIDDMGVPTYKQYEEG

SEQ ID NO: 56858 - protein, 29 aa, Artificial Sequence
  Cyclic GFR-binding peptide
  MOD_RES (2)..(3): Xaa is C or S
PXXTPTKMSPISMLYINDKQQIIYKQYEG

SEQ ID NO: 56859 - protein, 33 aa, Artificial Sequence; identical to SEQ ID NO: 39515
  Cyclic GFR-binding peptide
  MOD_RES (32)..(32): Xaa is C or S

SEQ ID NO: 56860 - protein, 30 aa, Artificial Sequence; identical to SEQ ID NO: 36680
  Cyclic GFR-binding peptide
  MOD_RES (4)..(5): Xaa is C or S

SEQ ID NO: 56861 - protein, 28 aa, Artificial Sequence
  Cyclic GFR-binding peptide
  MOD_RES (1)..(1): Xaa is C or S
XAPTKLSPISVLYIDSSNNVIYKQYENM

SEQ ID NO: 56862 - protein, 30 aa, Artificial Sequence
  Cyclic GFR-binding peptide
  MOD_RES (2)..(3): Xaa is C or S
TXXAPVKTSPISMLYIDNGRVLLYKQYEMI

SEQ ID NO: 56863 - protein, 27 aa, Artificial Sequence
  Cyclic GFR-binding peptide
PTKLSPISILYIDKGVVTYYKQYEGMA

SEQ ID NO: 56864 - protein, 32 aa, Artificial Sequence; identical to SEQ ID NO: 36685
  Cyclic GFR-binding peptide
  MOD_RES (4)..(5): Xaa is C or S

SEQ ID NO: 56865 - protein, 34 aa, Artificial Sequence; identical to SEQ ID NO: 39524
  Cyclic GFR-binding peptide
  MOD_RES (3)..(4): Xaa is C or S

SEQ ID NO: 56866 - protein, 36 aa, Artificial Sequence; identical to SEQ ID NO: 39526
  Cyclic GFR-binding peptide
  MOD_RES (3)..(4)..(36): Xaa is C or S

SEQ ID NO: 56867 - protein, 23 aa, Artificial Sequence
  Cyclic GFR-binding peptide
LSPISILYIDKGVVTYYKQYEGM

SEQ ID NO: 56868 - protein, 27 aa, Artificial Sequence
  Cyclic GFR-binding peptide
VPTRLSPISILYIDSANNVVYKQYEDM

SEQ ID NO: 56869 - protein, 23 aa, Artificial Sequence
  Cyclic GFR-binding peptide
KLSPISVLYIDDSSNVIYKQYEN

SEQ ID NO: 56870 - protein, 33 aa, Artificial Sequence; identical to SEQ ID NO: 36690
  Cyclic GFR-binding peptide
  MOD_RES (2)..(3): Xaa is C or S

SEQ ID NO: 56871 - protein, 36 aa, Artificial Sequence
  Cyclic GFR-binding peptide
  MOD_RES (6)..(7): Xaa is C or S
RVPSTXXAPVKTSPISMLYIDNGRVLLYKQYEMIVE

SEQ ID NO: 56872 - protein, 31 aa, Artificial Sequence; identical to SEQ ID NO: 39536
  Cyclic GFR-binding peptide
  MOD_RES (28)..(30): Xaa is C or S

SEQ ID NO: 56873 - protein, 34 aa, Artificial Sequence; identical to SEQ ID NO: 20745
  Cyclic GFR-binding peptide
  MOD_RES (31)..(33): Xaa is C or S

SEQ ID NO: 56874 - protein, 29 aa, Artificial Sequence
  Cyclic GFR-binding peptide
  MOD_RES (1)..(1): Xaa is C or S
XVPTKLSPISILYIDKGVVTYYKQYEGMA

SEQ ID NO: 56875 - protein, 31 aa, Artificial Sequence
  Cyclic GFR-binding peptide
  MOD_RES (1)..(1): Xaa is C or S
XTPTKMSPISMLYINDKQQIIYKQYEGMVVD

SEQ ID NO: 56876 - protein, 27 aa, Artificial Sequence
  Cyclic GFR-binding peptide
SPISVLYIDDMGVPTYKQYEEGMSVAE

SEQ ID NO: 56877 - protein, 27 aa, Artificial Sequence
  Cyclic GFR-binding peptide
LSPISVLYIDSSNNVIYKQYENMVVKA

SEQ ID NO: 56878 - protein, 25 aa, Artificial Sequence
  Cyclic GFR-binding peptide
ELSPISMLYIDEYDKVVYKQYEEMV

SEQ ID NO: 56879 - protein, 34 aa, Artificial Sequence
  Cyclic GFR-binding peptide
  MOD_RES (1)..(33): Xaa is C or S
XTPTKMSPISMLYINDKQQIIYKQYEGMVVDRXG

SEQ ID NO: 56880 - protein, 36 aa, Artificial Sequence; identical to SEQ ID NO: 39550
  Cyclic GFR-binding peptide
  MOD_RES (6)..(7): Xaa is C or S

SEQ ID NO: 56881 - protein, 33 aa, Artificial Sequence; identical to SEQ ID NO: 36722
  Cyclic GFR-binding peptide
  MOD_RES (32)..(32): Xaa is C or S

SEQ ID NO: 56882 - protein, 41 aa, Artificial Sequence; identical to SEQ ID NO: 39554
  Cyclic GFR-binding peptide
  MOD_RES (6)..(7)..(39)..(41): Xaa is C or S

SEQ ID NO: 56883 - protein, 36 aa, Artificial Sequence
  Cyclic GFR-binding peptide
  MOD_RES (6)..(7): Xaa is C or S
STPPTXXVPTRLSPISILYIDSANNVVYKQYEDMVV

SEQ ID NO: 56884 - protein, 32 aa, Artificial Sequence; identical to SEQ ID NO: 36725
  Cyclic GFR-binding peptide
  MOD_RES (7)..(7): Xaa is C or S

SEQ ID NO: 56885 - protein, 34 aa, Artificial Sequence; identical to SEQ ID NO: 18451
  Cyclic GFR-binding peptide
  MOD_RES (31)..(33): Xaa is C or S

SEQ ID NO: 56886 - protein, 23 aa, Artificial Sequence
  Cyclic GFR-binding peptide
TKMSPISMLYINDKQQIIYKQYE

SEQ ID NO: 56887 - protein, 30 aa, Artificial Sequence; identical to SEQ ID NO: 36727
  Cyclic GFR-binding peptide
  MOD_RES (3)..(3): Xaa is C or S

SEQ ID NO: 56888 - protein, 28 aa, Artificial Sequence
  Cyclic GFR-binding peptide
  MOD_RES (2)..(3): Xaa is C or S
AXXVPTELSPISMLYIDEYDKVVYKQYE

SEQ ID NO: 56889 - protein, 42 aa, Artificial Sequence
  Cyclic GFR-binding peptide
  MOD_RES (6)..(7)..(39)..(41): Xaa is C or S
GSAGPXXTPTKMSPISMLYINDKQQIIYKQYEGMVVDRXGXS

SEQ ID NO: 56890 - protein, 32 aa, Artificial Sequence; identical to SEQ ID NO: 36734
  Cyclic GFR-binding peptide
  MOD_RES (3)..(4): Xaa is C or S

SEQ ID NO: 56891 - protein, 24 aa, Artificial Sequence
  Cyclic GFR-binding peptide
KMSPISMLYINDKQQIIYKQYEGM

SEQ ID NO: 56892 - protein, 31 aa, Artificial Sequence; identical to SEQ ID NO: 39565
  Cyclic GFR-binding peptide
  MOD_RES (1)..(2): Xaa is C or S

SEQ ID NO: 56893 - protein, 28 aa, Artificial Sequence
  Cyclic GFR-binding peptide
  MOD_RES (1)..(2): Xaa is C or S
XXAPVKTSPISMLYIDNGRVLLYKQYEM

SEQ ID NO: 56894 - protein, 37 aa, Artificial Sequence
  Cyclic GFR-binding peptide
  MOD_RES (2)..(3)..(35)..(37): Xaa is C or S
PXXTPTKMSPISMLYINDKQQIIYKQYEGMVVDRXGX

SEQ ID NO: 56895 - protein, 30 aa, Artificial Sequence
  Cyclic GFR-binding peptide
  MOD_RES (1)..(2): Xaa is C or S
XXVPTRLSPISILYIDSANNVVYKQYEDMV

SEQ ID NO: 56896 - protein, 38 aa, Artificial Sequence; identical to SEQ ID NO: 36747
  Cyclic GFR-binding peptide
  MOD_RES (2)..(3)..(35)..(37): Xaa is C or S

SEQ ID NO: 56897 - protein, 30 aa, Artificial Sequence; identical to SEQ ID NO: 36751
  Cyclic GFR-binding peptide
  MOD_RES (4)..(5): Xaa is C or S

SEQ ID NO: 56898 - protein, 36 aa, Artificial Sequence
  Cyclic GFR-binding peptide
  MOD_RES (1)..(33)..(35): Xaa is C or S
XVPTRLSPISILYIDSANNVVYKQYEDMVVESXGXR

SEQ ID NO: 56899 - protein, 26 aa, Artificial Sequence
  Cyclic GFR-binding peptide
SPISMLYINDKQQIIYKQYEGMVVDR

SEQ ID NO: 56900 - protein, 26 aa, Artificial Sequence
  Cyclic GFR-binding peptide
  MOD_RES (1)..(1): Xaa is C or S
XAPTQLSPISVLYIDDSSNVIYKQYE

SEQ ID NO: 56901 - protein, 34 aa, Artificial Sequence; identical to SEQ ID NO: 36759
  Cyclic GFR-binding peptide
  MOD_RES (6)..(7): Xaa is C or S

SEQ ID NO: 56902 - protein, 36 aa, Artificial Sequence; identical to SEQ ID NO: 36760
  Cyclic GFR-binding peptide
  MOD_RES (5)..(6): Xaa is C or S

SEQ ID NO: 56903 - protein, 32 aa, Artificial Sequence; identical to SEQ ID NO: 36764
  Cyclic GFR-binding peptide
  MOD_RES (30)..(32): Xaa is C or S

SEQ ID NO: 56904 - protein, 38 aa, Artificial Sequence; identical to SEQ ID NO: 39590
  Cyclic GFR-binding peptide
  MOD_RES (6)..(7): Xaa is C or S

SEQ ID NO: 56905 - protein, 33 aa, Artificial Sequence; identical to SEQ ID NO: 39593
  Cyclic GFR-binding peptide
  MOD_RES (4)..(5): Xaa is C or S

SEQ ID NO: 56906 - protein, 33 aa, Artificial Sequence; identical to SEQ ID NO: 36769
  Cyclic GFR-binding peptide
  MOD_RES (30)..(32): Xaa is C or S

SEQ ID NO: 56907 - protein, 33 aa, Artificial Sequence; identical to SEQ ID NO: 39601
  Cyclic GFR-binding peptide
  MOD_RES (6)..(7): Xaa is C or S

SEQ ID NO: 56908 - protein, 26 aa, Artificial Sequence
  Cyclic GFR-binding peptide
VKTSPISMLYIDNGRVLLYKQYEMIV

SEQ ID NO: 56909 - protein, 31 aa, Artificial Sequence; identical to SEQ ID NO: 39603
  Cyclic GFR-binding peptide

SEQ ID NO: 56910 - protein, 30 aa, Artificial Sequence; identical to SEQ ID NO: 39604
  Cyclic GFR-binding peptide
  MOD_RES (27)..(29): Xaa is C or S

SEQ ID NO: 56911 - protein, 34 aa, Artificial Sequence
  Cyclic GFR-binding peptide
  MOD_RES (5)..(6): Xaa is C or S
SAGPXXTPTKMSPISMLYINDKQQIIYKQYEGMV

SEQ ID NO: 56912 - protein, 31 aa, Artificial Sequence; identical to SEQ ID NO: 36780
  Cyclic GFR-binding peptide
  MOD_RES (30)..(30): Xaa is C or S

SEQ ID NO: 56913 - protein, 39 aa, Artificial Sequence
  Cyclic GFR-binding peptide
  MOD_RES (6)..(7)..(39): Xaa is C or S
HVPKPXXAPTKLSPISVLYIDDSSNVIYKQYENMVVRSX

SEQ ID NO: 56914 - protein, 33 aa, Artificial Sequence; identical to SEQ ID NO: 20798
  Cyclic GFR-binding peptide
  MOD_RES (30)..(32): Xaa is C or S

SEQ ID NO: 56915 - protein, 23 aa, Artificial Sequence
  Cyclic GFR-binding peptide
KLSPISVLYIDDMGVPTYKQYEE

SEQ ID NO: 56916 - protein, 33 aa, Artificial Sequence; identical to SEQ ID NO: 39610
  Cyclic GFR-binding peptide
  MOD_RES (4)..(5): Xaa is C or S

SEQ ID NO: 56917 - protein, 30 aa, Artificial Sequence; identical to SEQ ID NO: 18505
  Cyclic GFR-binding peptide
  MOD_RES (27)..(29): Xaa is C or S

SEQ ID NO: 56918 - protein, 32 aa, Artificial Sequence; identical to SEQ ID NO: 39618
  Cyclic GFR-binding peptide
  MOD_RES (31)..(31): Xaa is C or S

SEQ ID NO: 56919 - protein, 29 aa, Artificial Sequence
  Cyclic GFR-binding peptide
  MOD_RES (1)..(1): Xaa is C or S
XVPTELSPISMLYIDENEKVVYKQYEDMV

SEQ ID NO: 56920 - protein, 37 aa, Artificial Sequence; identical to SEQ ID NO: 36792
  Cyclic GFR-binding peptide
  MOD_RES (2)..(3)..(35)..(37): Xaa is C or S

SEQ ID NO: 56921 - protein, 24 aa, Artificial Sequence
  Cyclic GFR-binding peptide
LSPISILYIDKGVVTYYKQYEGMA

SEQ ID NO: 56922 - protein, 31 aa, Artificial Sequence; identical to SEQ ID NO: 39620
  Cyclic GFR-binding peptide
  MOD_RES (4)..(5): Xaa is C or S

SEQ ID NO: 56923 - protein, 24 aa, Artificial Sequence
  Cyclic GFR-binding peptide
SPISVLYIDDSSNVIYKQYENMVV

SEQ ID NO: 56924 - protein, 32 aa, Artificial Sequence
  Cyclic GFR-binding peptide
  MOD_RES (4)..(5): Xaa is C or S
PSTXXAPVKTSPISMLYIDNGRVLLYKQYEMI

SEQ ID NO: 56925 - protein, 22 aa, Artificial Sequence
  Cyclic GFR-binding peptide
SPISVLYIDSSNNVIYKQYENM

SEQ ID NO: 56926 - protein, 31 aa, Artificial Sequence
  Cyclic GFR-binding peptide
  MOD_RES (29)..(31): Xaa is C or S
VKTSPISMLYIDNGRVLLYKQYEMIVEEXGX

SEQ ID NO: 56927 - protein, 25 aa, Artificial Sequence
  Cyclic GFR-binding peptide
LSPISVLYIDDMGVPTYKQYEEGMS

SEQ ID NO: 56928 - protein, 25 aa, Artificial Sequence
  Cyclic GFR-binding peptide
APTQLSPISVLYIDDSSNVIYKQYE

SEQ ID NO: 56929 - protein, 34 aa, Artificial Sequence; identical to SEQ ID NO: 39630
  Cyclic GFR-binding peptide
  MOD_RES (1)..(2)..(34): Xaa is C or S

SEQ ID NO: 56930 - protein, 28 aa, Artificial Sequence
  Cyclic GFR-binding peptide
PVKTSPISMLYIDNGRVLLYKQYEMIVE

SEQ ID NO: 56931 - protein, 30 aa, Artificial Sequence; identical to SEQ ID NO: 36807
  Cyclic GFR-binding peptide
  MOD_RES (28)..(30): Xaa is C or S

SEQ ID NO: 56932 - protein, 32 aa, Artificial Sequence
  Cyclic GFR-binding peptide
  MOD_RES (32)..(32): Xaa is C or S
VPTRLSPISILYIDSANNVVYKQYEDMVVESX

SEQ ID NO: 56933 - protein, 29 aa, Artificial Sequence
  Cyclic GFR-binding peptide
APTKLSPISVLYIDSSNNVIYKQYENMVV

SEQ ID NO: 56934 - protein, 33 aa, Artificial Sequence
  Cyclic GFR-binding peptide
  MOD_RES (32)..(32): Xaa is C or S
TPTKMSPISMLYINDKQQIIYKQYEGMVVDRXG

SEQ ID NO: 56935 - protein, 36 aa, Artificial Sequence
  Cyclic GFR-binding peptide
  MOD_RES (1)..(33)..(35): Xaa is C or S
XTPTKMSPISMLYINDKQQIIYKQYEGMVVDRXGXS

SEQ ID NO: 56936 - protein, 39 aa, Artificial Sequence
  Cyclic GFR-binding peptide
  MOD_RES (4)..(5)..(36)..(38): Xaa is C or S
PSTXXAPVKTSPISMLYIDNGRVLLYKQYEMIVEEXGXL

SEQ ID NO: 56937 - protein, 32 aa, Artificial Sequence; identical to SEQ ID NO: 39638
  Cyclic GFR-binding peptide
  MOD_RES (30)..(32): Xaa is C or S

SEQ ID NO: 56938 - protein, 33 aa, Artificial Sequence; identical to SEQ ID NO: 36822
  Cyclic GFR-binding peptide
  MOD_RES (3)..(4): Xaa is C or S

SEQ ID NO: 56939 - protein, 30 aa, Artificial Sequence; identical to SEQ ID NO: 36826
  Cyclic GFR-binding peptide
  MOD_RES (30)..(30): Xaa is C or S

SEQ ID NO: 56940 - protein, 28 aa, Artificial Sequence
  Cyclic GFR-binding peptide
  MOD_RES (27)..(27): Xaa is C or S
TSPISMLYIDNGRVLLYKQYEMIVEEXG

SEQ ID NO: 56941 - protein, 27 aa, Artificial Sequence
  Cyclic GFR-binding peptide
  MOD_RES (1)..(2): Xaa is C or S
XXAPVKTSPISMLYIDNGRVLLYKQYE

SEQ ID NO: 56942 - protein, 26 aa, Artificial Sequence
  Cyclic GFR-binding peptide
TRLSPISILYIDSANNVVYKQYEDMV

SEQ ID NO: 56943 - protein, 37 aa, Artificial Sequence; identical to SEQ ID NO: 36831
  Cyclic GFR-binding peptide
  MOD_RES (2)..(3)..(35)..(37): Xaa is C or S

SEQ ID NO: 56944 - protein, 31 aa, Artificial Sequence; identical to SEQ ID NO: 36835
  Cyclic GFR-binding peptide
  MOD_RES (4)..(4): Xaa is C or S

SEQ ID NO: 56945 - protein, 35 aa, Artificial Sequence; identical to SEQ ID NO: 36839
  Cyclic GFR-binding peptide
  MOD_RES (3)..(4): Xaa is C or S

SEQ ID NO: 56946 - protein, 32 aa, Artificial Sequence; identical to SEQ ID NO: 20843
  Cyclic GFR-binding peptide
  MOD_RES (29)..(31): Xaa is C or S

SEQ ID NO: 56947 - protein, 28 aa, Artificial Sequence
  Cyclic GFR-binding peptide
  MOD_RES (2)..(3): Xaa is C or S
AXXVPTKLSPISILYIDKGVVTYYKQYE

SEQ ID NO: 56948 - protein, 31 aa, Artificial Sequence
  Cyclic GFR-binding peptide
  MOD_RES (1)..(1): Xaa is C or S
XAPVKTSPISMLYIDNGRVLLYKQYEMIVEE

SEQ ID NO: 56949 - protein, 30 aa, Artificial Sequence; identical to SEQ ID NO: 36849
  Cyclic GFR-binding peptide
  MOD_RES (5)..(5): Xaa is C or S

SEQ ID NO: 56950 - protein, 29 aa, Artificial Sequence
  Cyclic GFR-binding peptide
  MOD_RES (1)..(2): Xaa is C or S
XXVPTELSPISMLYIDEYDKVVYKQYEEM

SEQ ID NO: 56951 - protein, 31 aa, Artificial Sequence
  Cyclic GFR-binding peptide
  MOD_RES (3)..(4): Xaa is C or S
STXXAPVKTSPISMLYIDNGRVLLYKQYEMI

SEQ ID NO: 56952 - protein, 31 aa, Artificial Sequence; identical to SEQ ID NO: 36853
  Cyclic GFR-binding peptide

SEQ ID NO: 56953 - protein, 36 aa, Artificial Sequence; identical to SEQ ID NO: 39669
  Cyclic GFR-binding peptide
  MOD_RES (33)..(35): Xaa is C or S

SEQ ID NO: 56954 - protein, 34 aa, Artificial Sequence; identical to SEQ ID NO: 39674
  Cyclic GFR-binding peptide
  MOD_RES (6)..(7): Xaa is C or S

SEQ ID NO: 56955 - protein, 38 aa, Artificial Sequence
  Cyclic GFR-binding peptide
  MOD_RES (3)..(4)..(35)..(37): Xaa is C or S
STXXAPVKTSPISMLYIDNGRVLLYKQYEMIVEEXGXL

SEQ ID NO: 56956 - protein, 34 aa, Artificial Sequence
  Cyclic GFR-binding peptide
  MOD_RES (6)..(7): Xaa is C or S
RVPSTXXAPVKTSPISMLYIDNGRVLLYKQYEMI

SEQ ID NO: 56957 - protein, 26 aa, Artificial Sequence
  Cyclic GFR-binding peptide
  MOD_RES (1)..(1): Xaa is C or S
XVPTELSPISMLYIDENEKVVYKQYE

SEQ ID NO: 56958 - protein, 39 aa, Artificial Sequence
  Cyclic GFR-binding peptide
  MOD_RES (4)..(5)..(37)..(39): Xaa is C or S
AGPXXTPTKMSPISMLYINDKQQIIYKQYEGMVVDRXGX

SEQ ID NO: 56959 - protein, 26 aa, Artificial Sequence
  Cyclic GFR-binding peptide
TSPISMLYIDNGRVLLYKQYEMIVEE

SEQ ID NO: 56960 - protein, 21 aa, Artificial Sequence
  Cyclic GFR-binding peptide
SPISILYIDSANNVVYKQYED

SEQ ID NO: 56961 - protein, 20 aa, Artificial Sequence
  Cyclic GFR-binding peptide
SPISMLYIDNGRVLLYKQYE

SEQ ID NO: 56962 - protein, 34 aa, Artificial Sequence; identical to SEQ ID NO: 39686
  Cyclic GFR-binding peptide
  MOD_RES (2)..(34): Xaa is C or S

SEQ ID NO: 56963 - protein, 34 aa, Artificial Sequence
  Cyclic GFR-binding peptide
  MOD_RES (3)..(4): Xaa is C or S
STXXAPVKTSPISMLYIDNGRVLLYKQYEMIVEE

SEQ ID NO: 56964 - protein, 36 aa, Artificial Sequence
  Cyclic GFR-binding peptide
  MOD_RES (5)..(6): Xaa is C or S
VPSTXXAPVKTSPISMLYIDNGRVLLYKQYEMIVEE

SEQ ID NO: 56965 - protein, 37 aa, Artificial Sequence; identical to SEQ ID NO: 39703
  Cyclic GFR-binding peptide
  MOD_RES (5)..(6): Xaa is C or S

SEQ ID NO: 56966 - protein, 22 aa, Artificial Sequence
  Cyclic GFR-binding peptide
LSPISVLYIDDMGVPTYKQYEE

SEQ ID NO: 56967 - protein, 35 aa, Artificial Sequence
  Cyclic GFR-binding peptide
  MOD_RES (6)..(7): Xaa is C or S
HVPKPXXAPTKLSPISVLYIDDSSNVIYKQYENMV

SEQ ID NO: 56968 - protein, 27 aa, Artificial Sequence
  Cyclic GFR-binding peptide
TKLSPISVLYIDDMGVPTYKQYEEGMS

SEQ ID NO: 56969 - protein, 22 aa, Artificial Sequence
  Cyclic GFR-binding peptide
LSPISILYIDSANNVVYKQYED

SEQ ID NO: 56970 - protein, 33 aa, Artificial Sequence; identical to SEQ ID NO: 20886
  Cyclic GFR-binding peptide
  MOD_RES (30)..(32): Xaa is C or S

SEQ ID NO: 56971 - protein, 26 aa, Artificial Sequence
  Cyclic GFR-binding peptide
SPISILYIDSANNVVYKQYEDMVVES

SEQ ID NO: 56972 - protein, 27 aa, Artificial Sequence
  Cyclic GFR-binding peptide
  MOD_RES (1)..(1): Xaa is C or S
XAPTKLSPISVLYIDSSNNVIYKQYEN

SEQ ID NO: 56973 - protein, 40 aa, Artificial Sequence; identical to SEQ ID NO: 36892
  Cyclic GFR-binding peptide
  MOD_RES (4)..(5)..(37)..(39): Xaa is C or S

SEQ ID NO: 56974 - protein, 20 aa, Artificial Sequence
  Cyclic GFR-binding peptide
SPISMLYIDENEKVVYKQYE

SEQ ID NO: 56975 - protein, 28 aa, Artificial Sequence
  Cyclic GFR-binding peptide
TKLSPISVLYIDSSNNVIYKQYENMVVK

SEQ ID NO: 56976 - protein, 32 aa, Artificial Sequence; identical to SEQ ID NO: 39719
  Cyclic GFR-binding peptide
  MOD_RES (30)..(32): Xaa is C or S

SEQ ID NO: 56977 - protein, 38 aa, Artificial Sequence; identical to SEQ ID NO: 36905
  Cyclic GFR-binding peptide
  MOD_RES (3)..(4)..(36)..(38): Xaa is C or S

SEQ ID NO: 56978 - protein, 35 aa, Artificial Sequence; identical to SEQ ID NO: 36908
  Cyclic GFR-binding peptide
  MOD_RES (5)..(5): Xaa is C or S

SEQ ID NO: 56979 - protein, 23 aa, Artificial Sequence
  Cyclic GFR-binding peptide
SPISILYIDKGVVTYYKQYEGMA

SEQ ID NO: 56980 - protein, 29 aa, Artificial Sequence
  Cyclic GFR-binding peptide
  MOD_RES (29)..(29): Xaa is C or S
VKTSPISMLYIDNGRVLLYKQYEMIVEEX

SEQ ID NO: 56981 - protein, 30 aa, Artificial Sequence; identical to SEQ ID NO: 36918
  Cyclic GFR-binding peptide
  MOD_RES (27)..(29): Xaa is C or S

SEQ ID NO: 56982 - protein, 34 aa, Artificial Sequence; identical to SEQ ID NO: 18613
  Cyclic GFR-binding peptide
  MOD_RES (31)..(33): Xaa is C or S

SEQ ID NO: 56983 - protein, 33 aa, Artificial Sequence; identical to SEQ ID NO: 39729
  Cyclic GFR-binding peptide
  MOD_RES (32)..(32): Xaa is C or S

SEQ ID NO: 56984 - protein, 37 aa, Artificial Sequence; identical to SEQ ID NO: 39730
  Cyclic GFR-binding peptide
  MOD_RES (1)..(2)..(34)..(36): Xaa is C or S

SEQ ID NO: 56985 - protein, 40 aa, Artificial Sequence; identical to SEQ ID NO: 39731
  Cyclic GFR-binding peptide
  MOD_RES (6)..(7)..(39): Xaa is C or S

SEQ ID NO: 56986 - protein, 35 aa, Artificial Sequence
  Cyclic GFR-binding peptide
  MOD_RES (32)..(34): Xaa is C or S
TPTKMSPISMLYINDKQQIIYKQYEGMVVDRXGXS

SEQ ID NO: 56987 - protein, 23 aa, Artificial Sequence
  Cyclic GFR-binding peptide
SPISMLYIDENEKVVYKQYEDMV

SEQ ID NO: 56988 - protein, 23 aa, Artificial Sequence
  Cyclic GFR-binding peptide
SPISILYIDSANNVVYKQYEDMV

SEQ ID NO: 56989 - protein, 40 aa, Artificial Sequence
  Cyclic GFR-binding peptide
  MOD_RES (6)..(7)..(38)..(40): Xaa is C or S
RVPSTXXAPVKTSPISMLYIDNGRVLLYKQYEMIVEEXGX

SEQ ID NO: 56990 - protein, 41 aa, Artificial Sequence; identical to SEQ ID NO: 36939
  Cyclic GFR-binding peptide
  MOD_RES (6)..(7)..(40): Xaa is C or S

SEQ ID NO: 56991 - protein, 42 aa, Artificial Sequence; identical to SEQ ID NO: 20918
  Cyclic GFR-binding peptide
  MOD_RES (6)..(7)..(39)..(41): Xaa is C or S

SEQ ID NO: 56992 - protein, 30 aa, Artificial Sequence; identical to SEQ ID NO: 36942
  Cyclic GFR-binding peptide
  MOD_RES (3)..(4): Xaa is C or S

SEQ ID NO: 56993 - protein, 31 aa, Artificial Sequence; identical to SEQ ID NO: 36943
  Cyclic GFR-binding peptide
  MOD_RES (31)..(31): Xaa is C or S

SEQ ID NO: 56994 - protein, 28 aa, Artificial Sequence
  Cyclic GFR-binding peptide
  MOD_RES (28)..(28): Xaa is C or S
SPISVLYIDDMGVPTYKQYEEGMSVAEX

SEQ ID NO: 56995 - protein, 27 aa, Artificial Sequence
  Cyclic GFR-binding peptide
KLSPISVLYIDDSSNVIYKQYENMVVR

SEQ ID NO: 56996 - protein, 25 aa, Artificial Sequence
  Cyclic GFR-binding peptide
SPISVLYIDDMGVPTYKQYEEGMSV

SEQ ID NO: 56997 - protein, 23 aa, Artificial Sequence
  Cyclic GFR-binding peptide
TELSPISMLYIDENEKVVYKQYE

SEQ ID NO: 56998 - protein, 25 aa, Artificial Sequence
  Cyclic GFR-binding peptide
PTELSPISMLYIDENEKVVYKQYED

SEQ ID NO: 56999 - protein, 40 aa, Artificial Sequence; identical to SEQ ID NO: 36958
  Cyclic GFR-binding peptide
  MOD_RES (6)..(7)..(39): Xaa is C or S

SEQ ID NO: 57000 - protein, 26 aa, Artificial Sequence
  Cyclic GFR-binding peptide
APVKTSPISMLYIDNGRVLLYKQYEM

SEQ ID NO: 57001 - protein, 42 aa, Artificial Sequence; identical to SEQ ID NO: 18644
  Cyclic GFR-binding peptide
  MOD_RES (6)..(7)..(39)..(41): Xaa is C or S

SEQ ID NO: 57002 - protein, 40 aa, Artificial Sequence; identical to SEQ ID NO: 36963
  Cyclic GFR-binding peptide
  MOD_RES (5)..(37)..(39): Xaa is C or S

SEQ ID NO: 57003 - protein, 33 aa, Artificial Sequence; identical to SEQ ID NO: 36965
  Cyclic GFR-binding peptide
  MOD_RES (31)..(33): Xaa is C or S

SEQ ID NO: 57004 - protein, 28 aa, Artificial Sequence
  Cyclic GFR-binding peptide
  MOD_RES (28)..(28): Xaa is C or S
LSPISILYIDKGVVTYYKQYEGMAVSEX

SEQ ID NO: 57005 - protein, 31 aa, Artificial Sequence
  Cyclic GFR-binding peptide
  MOD_RES (29)..(31): Xaa is C or S
RLSPISILYIDSANNVVYKQYEDMVVESXGX

SEQ ID NO: 57006 - protein, 38 aa, Artificial Sequence; identical to SEQ ID NO: 39769
  Cyclic GFR-binding peptide
  MOD_RES (3)..(4)..(36)..(38): Xaa is C or S

SEQ ID NO: 57007 - protein, 37 aa, Artificial Sequence; identical to SEQ ID NO: 39770
  Cyclic GFR-binding peptide
  MOD_RES (7)..(7): Xaa is C or S

SEQ ID NO: 57008 - protein, 30 aa, Artificial Sequence
  Cyclic GFR-binding peptide
  MOD_RES (30)..(30): Xaa is C or S
TRLSPISILYIDSANNVVYKQYEDMVVESX

SEQ ID NO: 57009 - protein, 22 aa, Artificial Sequence
  Cyclic GFR-binding peptide
LSPISVLYIDDSSNVIYKQYEN

SEQ ID NO: 57010 - protein, 38 aa, Artificial Sequence; identical to SEQ ID NO: 36975
  Cyclic GFR-binding peptide
  MOD_RES (4)..(5)..(37): Xaa is C or S

SEQ ID NO: 57011 - protein, 35 aa, Artificial Sequence; identical to SEQ ID NO: 39778
  Cyclic GFR-binding peptide
  MOD_RES (2)..(3)..(35): Xaa is C or S

SEQ ID NO: 57012 - protein, 23 aa, Artificial Sequence
  Cyclic GFR-binding peptide
SPISVLYIDSSNNVIYKQYENMV

SEQ ID NO: 57013 - protein, 35 aa, Artificial Sequence; identical to SEQ ID NO: 39781
  Cyclic GFR-binding peptide
  MOD_RES (2)..(3)..(35): Xaa is C or S

SEQ ID NO: 57014 - protein, 26 aa, Artificial Sequence
  Cyclic GFR-binding peptide
MSPISMLYINDKQQIIYKQYEGMVVD

SEQ ID NO: 57015 - protein, 27 aa, Artificial Sequence
  Cyclic GFR-binding peptide
KLSPISVLYIDSSNNVIYKQYENMVVK

SEQ ID NO: 57016 - protein, 30 aa, Artificial Sequence
  Cyclic GFR-binding peptide
  MOD_RES (30)..(30): Xaa is C or S
TKMSPISMLYINDKQQIIYKQYEGMVVDRX

SEQ ID NO: 57017 - protein, 34 aa, Artificial Sequence; identical to SEQ ID NO: 36992
  Cyclic GFR-binding peptide
  MOD_RES (33)..(33): Xaa is C or S

SEQ ID NO: 57018 - protein, 35 aa, Artificial Sequence; identical to SEQ ID NO: 36995
  Cyclic GFR-binding peptide
  MOD_RES (1)..(2)..(34): Xaa is C or S

SEQ ID NO: 57019 - protein, 32 aa, Artificial Sequence; identical to SEQ ID NO: 39791
  Cyclic GFR-binding peptide
  MOD_RES (32)..(32): Xaa is C or S

SEQ ID NO: 57020 - protein, 28 aa, Artificial Sequence
  Cyclic GFR-binding peptide
  MOD_RES (2)..(3): Xaa is C or S
AXXVPTKLSPISVLYIDDMGVPTYKQYE

SEQ ID NO: 57021 - protein, 32 aa, Artificial Sequence; identical to SEQ ID NO: 36999
  Cyclic GFR-binding peptide
  MOD_RES (5)..(6): Xaa is C or S

SEQ ID NO: 57022 - protein, 31 aa, Artificial Sequence; identical to SEQ ID NO: 20959
  Cyclic GFR-binding peptide
  MOD_RES (28)..(30): Xaa is C or S

SEQ ID NO: 57023 - protein, 28 aa, Artificial Sequence
  Cyclic GFR-binding peptide
  MOD_RES (1)..(1): Xaa is C or S
XVPTELSPISMLYIDEYDKVVYKQYEEM

SEQ ID NO: 57024 - protein, 26 aa, Artificial Sequence
  Cyclic GFR-binding peptide
PTKLSPISVLYIDDSSNVIYKQYENM

SEQ ID NO: 57025 - protein, 32 aa, Artificial Sequence; identical to SEQ ID NO: 39797
  Cyclic GFR-binding peptide
  MOD_RES (1)..(1): Xaa is C or S

SEQ ID NO: 57026 - protein, 29 aa, Artificial Sequence
  Cyclic GFR-binding peptide
PTKLSPISVLYIDSSNNVIYKQYENMVVK

SEQ ID NO: 57027 - protein, 28 aa, Artificial Sequence
  Cyclic GFR-binding peptide
VPTELSPISMLYIDEYDKVVYKQYEEMV

SEQ ID NO: 57028 - protein, 36 aa, Artificial Sequence; identical to SEQ ID NO: 37007
  Cyclic GFR-binding peptide
  MOD_RES (4)..(5): Xaa is C or S

SEQ ID NO: 57029 - protein, 30 aa, Artificial Sequence; identical to SEQ ID NO: 37011
  Cyclic GFR-binding peptide
  MOD_RES (2)..(2): Xaa is C or S

SEQ ID NO: 57030 - protein, 40 aa, Artificial Sequence
  Cyclic GFR-binding peptide
  MOD_RES (5)..(6)..(38)..(40): Xaa is C or S
SAGPXXTPTKMSPISMLYINDKQQIIYKQYEGMVVDRXGX

SEQ ID NO: 57031 - protein, 27 aa, Artificial Sequence
  Cyclic GFR-binding peptide
  MOD_RES (1)..(2): Xaa is C or S
XXAPTQLSPISVLYIDDSSNVIYKQYE

SEQ ID NO: 57032 - protein, 25 aa, Artificial Sequence
  Cyclic GFR-binding peptide
LSPISMLYIDEYDKVVYKQYEEMVV

SEQ ID NO: 57033 - protein, 29 aa, Artificial Sequence
  Cyclic GFR-binding peptide
TKLSPISVLYIDDMGVPTYKQYEEGMSVA

SEQ ID NO: 57034 - protein, 28 aa, Artificial Sequence
  Cyclic GFR-binding peptide
  MOD_RES (1)..(2): Xaa is C or S
XXVPTKLSPISILYIDKGVVTYYKQYEG

SEQ ID NO: 57035 - protein, 27 aa, Artificial Sequence
  Cyclic GFR-binding peptide
  MOD_RES (1)..(2): Xaa is C or S
XXTPTKMSPISMLYINDKQQIIYKQYE

SEQ ID NO: 57036 - protein, 36 aa, Artificial Sequence; identical to SEQ ID NO: 39828
  Cyclic GFR-binding peptide
  MOD_RES (4)..(5): Xaa is C or S

SEQ ID NO: 57037 - protein, 28 aa, Artificial Sequence
  Cyclic GFR-binding peptide
  MOD_RES (2)..(3): Xaa is C or S
TXXVPTRLSPISILYIDSANNVVYKQYE

SEQ ID NO: 57038 - protein, 33 aa, Artificial Sequence
  Cyclic GFR-binding peptide
  MOD_RES (1)..(33): Xaa is C or S
XVPTRLSPISILYIDSANNVVYKQYEDMVVESX

SEQ ID NO: 57039 - protein, 27 aa, Artificial Sequence
  Cyclic GFR-binding peptide
  MOD_RES (1)..(1): Xaa is C or S
XVPTKLSPISILYIDKGVVTYYKQYEG

SEQ ID NO: 57040 - protein, 39 aa, Artificial Sequence; identical to SEQ ID NO: 39837
  Cyclic GFR-binding peptide
  MOD_RES (4)..(5)..(37)..(39): Xaa is C or S

SEQ ID NO: 57041 - protein, 37 aa, Artificial Sequence
  Cyclic GFR-binding peptide
  MOD_RES (6)..(7): Xaa is C or S
GSAGPXXTPTKMSPISMLYINDKQQIIYKQYEGMVVD

SEQ ID NO: 57042 - protein, 30 aa, Artificial Sequence; identical to SEQ ID NO: 37047
  Cyclic GFR-binding peptide

SEQ ID NO: 57043 - protein, 34 aa, Artificial Sequence
  Cyclic GFR-binding peptide
  MOD_RES (6)..(7): Xaa is C or S
HVPKPXXAPTKLSPISVLYIDDSSNVIYKQYENM

SEQ ID NO: 57044 - protein, 31 aa, Artificial Sequence; identical to SEQ ID NO: 39839
  Cyclic GFR-binding peptide
  MOD_RES (3)..(4): Xaa is C or S

SEQ ID NO: 57045 - protein, 37 aa, Artificial Sequence; identical to SEQ ID NO: 37049
  Cyclic GFR-binding peptide
  MOD_RES (3)..(4)..(36): Xaa is C or S

SEQ ID NO: 57046 - protein, 39 aa, Artificial Sequence
  Cyclic GFR-binding peptide
  MOD_RES (5)..(6)..(37)..(39): Xaa is C or S
VPSTXXAPVKTSPISMLYIDNGRVLLYKQYEMIVEEXGX

SEQ ID NO: 57047 - protein, 26 aa, Artificial Sequence
  Cyclic GFR-binding peptide
TKLSPISVLYIDSSNNVIYKQYENMV

SEQ ID NO: 57048 - protein, 30 aa, Artificial Sequence; identical to SEQ ID NO: 37056
  Cyclic GFR-binding peptide
  MOD_RES (1)..(1): Xaa is C or S

SEQ ID NO: 57049 - protein, 30 aa, Artificial Sequence; identical to SEQ ID NO: 37060
  Cyclic GFR-binding peptide
  MOD_RES (3)..(4): Xaa is C or S

SEQ ID NO: 57050 - protein, 30 aa, Artificial Sequence; identical to SEQ ID NO: 39852
  Cyclic GFR-binding peptide
  MOD_RES (3)..(4): Xaa is C or S

SEQ ID NO: 57051 - protein, 35 aa, Artificial Sequence; identical to SEQ ID NO: 37066
  Cyclic GFR-binding peptide
  MOD_RES (32)..(34): Xaa is C or S

SEQ ID NO: 57052 - protein, 26 aa, Artificial Sequence
  Cyclic GFR-binding peptide
PTELSPISMLYIDEYDKVVYKQYEEM

SEQ ID NO: 57053 - protein, 28 aa, Artificial Sequence
  Cyclic GFR-binding peptide
  MOD_RES (1)..(2): Xaa is C or S
XXAPTKLSPISVLYIDSSNNVIYKQYEN

SEQ ID NO: 57054 - protein, 40 aa, Artificial Sequence
  Cyclic GFR-binding peptide
  MOD_RES (4)..(5)..(37)..(39): Xaa is C or S
PPTXXVPTRLSPISILYIDSANNVVYKQYEDMVVESXGXR

SEQ ID NO: 57055 - protein, 23 aa, Artificial Sequence
  Cyclic GFR-binding peptide
TRLSPISILYIDSANNVVYKQYE

SEQ ID NO: 57056 - protein, 33 aa, Artificial Sequence
  Cyclic GFR-binding peptide
  MOD_RES (2)..(3): Xaa is C or S
TXXVPTRLSPISILYIDSANNVVYKQYEDMVVE

SEQ ID NO: 57057 - protein, 28 aa, Artificial Sequence
  Cyclic GFR-binding peptide
  MOD_RES (1)..(1): Xaa is C or S
XVPTRLSPISILYIDSANNVVYKQYEDM

SEQ ID NO: 57058 - protein, 41 aa, Artificial Sequence
  Cyclic GFR-binding peptide
  MOD_RES (5)..(6)..(38)..(40): Xaa is C or S
TPPTXXVPTRLSPISILYIDSANNVVYKQYEDMVVESXGXR

SEQ ID NO: 57059 - protein, 31 aa, Artificial Sequence
  Cyclic GFR-binding peptide
  MOD_RES (4)..(5): Xaa is C or S
PSTXXAPVKTSPISMLYIDNGRVLLYKQYEM

SEQ ID NO: 57060 - protein, 40 aa, Artificial Sequence
  Cyclic GFR-binding peptide
  MOD_RES (6)..(7)..(39): Xaa is C or S
GSAGPXXTPTKMSPISMLYINDKQQIIYKQYEGMVVDRXG

SEQ ID NO: 57061 - protein, 31 aa, Artificial Sequence; identical to SEQ ID NO: 37085
  Cyclic GFR-binding peptide
  MOD_RES (31)..(31): Xaa is C or S

SEQ ID NO: 57062 - protein, 24 aa, Artificial Sequence
  Cyclic GFR-binding peptide
KLSPISVLYIDDMGVPTYKQYEEG

SEQ ID NO: 57063 - protein, 34 aa, Artificial Sequence; identical to SEQ ID NO: 37086
  Cyclic GFR-binding peptide
  MOD_RES (6)..(7): Xaa is C or S

SEQ ID NO: 57064 - protein, 36 aa, Artificial Sequence; identical to SEQ ID NO: 37088
  Cyclic GFR-binding peptide
  MOD_RES (5)..(6): Xaa is C or S

SEQ ID NO: 57065 - protein, 28 aa, Artificial Sequence
  Cyclic GFR-binding peptide
ELSPISMLYIDEYDKVVYKQYEEMVVEG

SEQ ID NO: 57066 - protein, 34 aa, Artificial Sequence
  Cyclic GFR-binding peptide
  MOD_RES (1)..(32)..(34): Xaa is C or S
XAPVKTSPISMLYIDNGRVLLYKQYEMIVEEXGX

SEQ ID NO: 57067 - protein, 36 aa, Artificial Sequence
  Cyclic GFR-binding peptide
  MOD_RES (1)..(2)..(34)..(36): Xaa is C or S
XXTPTKMSPISMLYINDKQQIIYKQYEGMVVDRXGX

SEQ ID NO: 57068 - protein, 23 aa, Artificial Sequence
  Cyclic GFR-binding peptide
SPISVLYIDDSSNVIYKQYENMV

SEQ ID NO: 57069 - protein, 33 aa, Artificial Sequence; identical to SEQ ID NO: 39873
  Cyclic GFR-binding peptide
  MOD_RES (1)..(2): Xaa is C or S

SEQ ID NO: 57070 - protein, 30 aa, Artificial Sequence
  Cyclic GFR-binding peptide
  MOD_RES (3)..(4): Xaa is C or S
PTXXVPTRLSPISILYIDSANNVVYKQYED

SEQ ID NO: 57071 - protein, 25 aa, Artificial Sequence
  Cyclic GFR-binding peptide
PTKLSPISVLYIDSSNNVIYKQYEN

SEQ ID NO: 57072 - protein, 30 aa, Artificial Sequence; identical to SEQ ID NO: 39878
  Cyclic GFR-binding peptide
  MOD_RES (29)..(29): Xaa is C or S

SEQ ID NO: 57073 - protein, 33 aa, Artificial Sequence; identical to SEQ ID NO: 21035
  Cyclic GFR-binding peptide
  MOD_RES (30)..(32): Xaa is C or S

SEQ ID NO: 57074 - protein, 23 aa, Artificial Sequence
  Cyclic GFR-binding peptide
LSPISVLYIDSSNNVIYKQYENM

SEQ ID NO: 57075 - protein, 30 aa, Artificial Sequence; identical to SEQ ID NO: 39883
  Cyclic GFR-binding peptide

SEQ ID NO: 57076 - protein, 28 aa, Artificial Sequence
  Cyclic GFR-binding peptide
  MOD_RES (2)..(2): Xaa is C or S
TXAPTKLSPISVLYIDDSSNVIYKQYEN

SEQ ID NO: 57077 - protein, 24 aa, Artificial Sequence
  Cyclic GFR-binding peptide
KLSPISVLYIDSSNNVIYKQYENM

SEQ ID NO: 57078 - protein, 27 aa, Artificial Sequence
  Cyclic GFR-binding peptide
  MOD_RES (1)..(2): Xaa is C or S
XXVPTKLSPISVLYIDDMGVPTYKQYE

SEQ ID NO: 57079 - protein, 34 aa, Artificial Sequence; identical to SEQ ID NO: 18743
  Cyclic GFR-binding peptide
  MOD_RES (31)..(33): Xaa is C or S

SEQ ID NO: 57080 - protein, 30 aa, Artificial Sequence; identical to SEQ ID NO: 39888
  Cyclic GFR-binding peptide
  MOD_RES (30)..(30): Xaa is C or S

SEQ ID NO: 57081 - protein, 31 aa, Artificial Sequence
  Cyclic GFR-binding peptide
  MOD_RES (31)..(31): Xaa is C or S
PTKMSPISMLYINDKQQIIYKQYEGMVVDRX

SEQ ID NO: 57082 - protein, 29 aa, Artificial Sequence
  Cyclic GFR-binding peptide
  MOD_RES (2)..(3): Xaa is C or S
AXXVPTELSPISMLYIDEYDKVVYKQYEE

SEQ ID NO: 57083 - protein, 37 aa, Artificial Sequence; identical to SEQ ID NO: 39892
  Cyclic GFR-binding peptide
  MOD_RES (6)..(7): Xaa is C or S

SEQ ID NO: 57084 - protein, 30 aa, Artificial Sequence; identical to SEQ ID NO: 37112
  Cyclic GFR-binding peptide

SEQ ID NO: 57085 - protein, 32 aa, Artificial Sequence; identical to SEQ ID NO: 21046
  Cyclic GFR-binding peptide
  MOD_RES (29)..(31): Xaa is C or S

SEQ ID NO: 57086 - protein, 35 aa, Artificial Sequence
  Cyclic GFR-binding peptide
  MOD_RES (3)..(4)..(35): Xaa is C or S
STXXAPVKTSPISMLYIDNGRVLLYKQYEMIVEEX

SEQ ID NO: 57087 - protein, 29 aa, Artificial Sequence
  Cyclic GFR-binding peptide
  MOD_RES (1)..(2): Xaa is C or S
XXVPTRLSPISILYIDSANNVVYKQYEDM

SEQ ID NO: 57088 - protein, 35 aa, Artificial Sequence; identical to SEQ ID NO: 37121
  Cyclic GFR-binding peptide
  MOD_RES (1)..(33)..(35): Xaa is C or S

SEQ ID NO: 57089 - protein, 23 aa, Artificial Sequence
  Cyclic GFR-binding peptide
LSPISMLYIDEYDKVVYKQYEEM

SEQ ID NO: 57090 - protein, 32 aa, Artificial Sequence; identical to SEQ ID NO: 18761
  Cyclic GFR-binding peptide
  MOD_RES (29)..(31): Xaa is C or S

SEQ ID NO: 57091 - protein, 32 aa, Artificial Sequence; identical to SEQ ID NO: 37127
  Cyclic GFR-binding peptide
  MOD_RES (31)..(31): Xaa is C or S

SEQ ID NO: 57092 - protein, 33 aa, Artificial Sequence; identical to SEQ ID NO: 21058
  Cyclic GFR-binding peptide
  MOD_RES (30)..(32): Xaa is C or S

SEQ ID NO: 57093 - protein, 34 aa, Artificial Sequence; identical to SEQ ID NO: 37128
  Cyclic GFR-binding peptide
  MOD_RES (7)..(7): Xaa is C or S

SEQ ID NO: 57094 - protein, 25 aa, Artificial Sequence
  Cyclic GFR-binding peptide
ELSPISMLYIDENEKVVYKQYEDMV

SEQ ID NO: 57095 - protein, 29 aa, Artificial Sequence
  Cyclic GFR-binding peptide
  MOD_RES (1)..(1): Xaa is C or S
XVPTRLSPISILYIDSANNVVYKQYEDMV

SEQ ID NO: 57096 - protein, 39 aa, Artificial Sequence; identical to SEQ ID NO: 37139
  Cyclic GFR-binding peptide
  MOD_RES (5)..(6)..(38): Xaa is C or S

SEQ ID NO: 57097 - protein, 31 aa, Artificial Sequence
  Cyclic GFR-binding peptide
  MOD_RES (31)..(31): Xaa is C or S
PTRLSPISILYIDSANNVVYKQYEDMVVESX

SEQ ID NO: 57098 - protein, 29 aa, Artificial Sequence
  Cyclic GFR-binding peptide
  MOD_RES (2)..(3): Xaa is C or S
TXXAPVKTSPISMLYIDNGRVLLYKQYEM

SEQ ID NO: 57099 - protein, 24 aa, Artificial Sequence
  Cyclic GFR-binding peptide
TKLSPISVLYIDSSNNVIYKQYEN

SEQ ID NO: 57100 - protein, 30 aa, Artificial Sequence; identical to SEQ ID NO: 21069
  Cyclic GFR-binding peptide
  MOD_RES (27)..(29): Xaa is C or S

SEQ ID NO: 57101 - protein, 31 aa, Artificial Sequence
  Cyclic GFR-binding peptide
  MOD_RES (28)..(30): Xaa is C or S
KTSPISMLYIDNGRVLLYKQYEMIVEEXGXL

SEQ ID NO: 57102 - protein, 34 aa, Artificial Sequence; identical to SEQ ID NO: 37151
  Cyclic GFR-binding peptide
  MOD_RES (6)..(7): Xaa is C or S

SEQ ID NO: 57103 - protein, 35 aa, Artificial Sequence; identical to SEQ ID NO: 37153
  Cyclic GFR-binding peptide
  MOD_RES (3)..(4): Xaa is C or S

SEQ ID NO: 57104 - protein, 29 aa, Artificial Sequence
  Cyclic GFR-binding peptide
  MOD_RES (1)..(1): Xaa is C or S
XVPTELSPISMLYIDEYDKVVYKQYEEMV

SEQ ID NO: 57105 - protein, 27 aa, Artificial Sequence
  Cyclic GFR-binding peptide
KLSPISVLYIDDMGVPTYKQYEEGMSV

SEQ ID NO: 57106 - protein, 34 aa, Artificial Sequence; identical to SEQ ID NO: 21071
  Cyclic GFR-binding peptide
  MOD_RES (31)..(33): Xaa is C or S

SEQ ID NO: 57107 - protein, 33 aa, Artificial Sequence; identical to SEQ ID NO: 39935
  Cyclic GFR-binding peptide
  MOD_RES (1)..(33): Xaa is C or S

SEQ ID NO: 57108 - protein, 23 aa, Artificial Sequence
  Cyclic GFR-binding peptide
LSPISVLYIDDMGVPTYKQYEEG

SEQ ID NO: 57109 - protein, 38 aa, Artificial Sequence; identical to SEQ ID NO: 39939
  Cyclic GFR-binding peptide
  MOD_RES (4)..(5)..(38): Xaa is C or S

SEQ ID NO: 57110 - protein, 38 aa, Artificial Sequence
  Cyclic GFR-binding peptide
  MOD_RES (5)..(6)..(38): Xaa is C or S
SAGPXXTPTKMSPISMLYINDKQQIIYKQYEGMVVDRX

SEQ ID NO: 57111 - protein, 28 aa, Artificial Sequence
  Cyclic GFR-binding peptide
  MOD_RES (27)..(27): Xaa is C or S
SPISMLYIDENEKVVYKQYEDMVVEGXG

SEQ ID NO: 57112 - protein, 35 aa, Artificial Sequence
  Cyclic GFR-binding peptide
  MOD_RES (6)..(7): Xaa is C or S
RVPSTXXAPVKTSPISMLYIDNGRVLLYKQYEMIV

SEQ ID NO: 57113 - protein, 25 aa, Artificial Sequence
  Cyclic GFR-binding peptide
APTKLSPISVLYIDSSNNVIYKQYE

SEQ ID NO: 57114 - protein, 38 aa, Artificial Sequence
  Cyclic GFR-binding peptide
  MOD_RES (4)..(5)..(37): Xaa is C or S
AGPXXTPTKMSPISMLYINDKQQIIYKQYEGMVVDRXG

SEQ ID NO: 57115 - protein, 33 aa, Artificial Sequence; identical to SEQ ID NO: 37173
  Cyclic GFR-binding peptide
  MOD_RES (5)..(5): Xaa is C or S

SEQ ID NO: 57116 - protein, 29 aa, Artificial Sequence
  Cyclic GFR-binding peptide
TPTKMSPISMLYINDKQQIIYKQYEGMVV

SEQ ID NO: 57117 - protein, 33 aa, Artificial Sequence; identical to SEQ ID NO: 39967
  Cyclic GFR-binding peptide
  MOD_RES (32)..(32): Xaa is C or S

SEQ ID NO: 57118 - protein, 38 aa, Artificial Sequence; identical to SEQ ID NO: 37186
  Cyclic GFR-binding peptide
  MOD_RES (4)..(5)..(37): Xaa is C or S

SEQ ID NO: 57119 - protein, 27 aa, Artificial Sequence
  Cyclic GFR-binding peptide
ELSPISMLYIDEYDKVVYKQYEEMVVE

SEQ ID NO: 57120 - protein, 25 aa, Artificial Sequence
  Cyclic GFR-binding peptide
VPTELSPISMLYIDEYDKVVYKQYE

SEQ ID NO: 57121 - protein, 30 aa, Artificial Sequence
  Cyclic GFR-binding peptide
  MOD_RES (3)..(4): Xaa is C or S
GPXXTPTKMSPISMLYINDKQQIIYKQYEG

SEQ ID NO: 57122 - protein, 35 aa, Artificial Sequence
  Cyclic GFR-binding peptide
  MOD_RES (6)..(7): Xaa is C or S
STPPTXXVPTRLSPISILYIDSANNVVYKQYEDMV

SEQ ID NO: 57123 - protein, 30 aa, Artificial Sequence; identical to SEQ ID NO: 39977
  Cyclic GFR-binding peptide
  MOD_RES (3)..(4): Xaa is C or S

SEQ ID NO: 57124 - protein, 29 aa, Artificial Sequence
  Cyclic GFR-binding peptide
TKMSPISMLYINDKQQIIYKQYEGMVVDR

SEQ ID NO: 57125 - protein, 36 aa, Artificial Sequence; identical to SEQ ID NO: 37194
  Cyclic GFR-binding peptide
  MOD_RES (4)..(5): Xaa is C or S

SEQ ID NO: 57126 - protein, 34 aa, Artificial Sequence; identical to SEQ ID NO: 39980
  Cyclic GFR-binding peptide
  MOD_RES (1)..(33): Xaa is C or S

SEQ ID NO: 57127 - protein, 24 aa, Artificial Sequence
  Cyclic GFR-binding peptide
QLSPISVLYIDDSSNVIYKQYENM

SEQ ID NO: 57128 - protein, 32 aa, Artificial Sequence; identical to SEQ ID NO: 39988
  Cyclic GFR-binding peptide
  MOD_RES (6)..(7): Xaa is C or S

SEQ ID NO: 57129 - protein, 32 aa, Artificial Sequence; identical to SEQ ID NO: 37204
  Cyclic GFR-binding peptide
  MOD_RES (6)..(7): Xaa is C or S

SEQ ID NO: 57130 - protein, 37 aa, Artificial Sequence; identical to SEQ ID NO: 37205
  Cyclic GFR-binding peptide
  MOD_RES (4)..(5)..(37): Xaa is C or S

SEQ ID NO: 57131 - protein, 26 aa, Artificial Sequence
  Cyclic GFR-binding peptide
TQLSPISVLYIDDSSNVIYKQYENMV

SEQ ID NO: 57132 - protein, 21 aa, Artificial Sequence
  Cyclic GFR-binding peptide
LSPISILYIDKGVVTYYKQYE

SEQ ID NO: 57133 - protein, 22 aa, Artificial Sequence
  Cyclic GFR-binding peptide
LSPISMLYIDENEKVVYKQYED

SEQ ID NO: 57134 - protein, 34 aa, Artificial Sequence; identical to SEQ ID NO: 40004
  Cyclic GFR-binding peptide
  MOD_RES (4)..(5): Xaa is C or S

SEQ ID NO: 57135 - protein, 30 aa, Artificial Sequence
  Cyclic GFR-binding peptide
PTRLSPISILYIDSANNVVYKQYEDMVVES

SEQ ID NO: 57136 - protein, 24 aa, Artificial Sequence
  Cyclic GFR-binding peptide
TSPISMLYIDNGRVLLYKQYEMIV

SEQ ID NO: 57137 - protein, 28 aa, Artificial Sequence
  Cyclic GFR-binding peptide
  MOD_RES (28)..(28): Xaa is C or S
LSPISVLYIDSSNNVIYKQYENMVVKAX

SEQ ID NO: 57138 - protein, 30 aa, Artificial Sequence
  Cyclic GFR-binding peptide
  MOD_RES (29)..(29): Xaa is C or S
KMSPISMLYINDKQQIIYKQYEGMVVDRXG

SEQ ID NO: 57139 - protein, 23 aa, Artificial Sequence
  Cyclic GFR-binding peptide
TQLSPISVLYIDDSSNVIYKQYE

SEQ ID NO: 57140 - protein, 24 aa, Artificial Sequence
  Cyclic GFR-binding peptide
TELSPISMLYIDENEKVVYKQYED

SEQ ID NO: 57141 - protein, 37 aa, Artificial Sequence
  Cyclic GFR-binding peptide
  MOD_RES (6)..(7): Xaa is C or S
HVPKPXXAPTKLSPISVLYIDDSSNVIYKQYENMVVR

SEQ ID NO: 57142 - protein, 28 aa, Artificial Sequence
  Cyclic GFR-binding peptide
APTKLSPISVLYIDDSSNVIYKQYENMV

SEQ ID NO: 57143 - protein, 28 aa, Artificial Sequence
  Cyclic GFR-binding peptide
  MOD_RES (1)..(1): Xaa is C or S
XAPTQLSPISVLYIDDSSNVIYKQYENM

SEQ ID NO: 57144 - protein, 26 aa, Artificial Sequence
  Cyclic GFR-binding peptide
APTKLSPISVLYIDSSNNVIYKQYEN

SEQ ID NO: 57145 - protein, 29 aa, Artificial Sequence
  Cyclic GFR-binding peptide
  MOD_RES (2)..(3): Xaa is C or S
PXXAPTKLSPISVLYIDDSSNVIYKQYEN

SEQ ID NO: 57146 - protein, 29 aa, Artificial Sequence
  Cyclic GFR-binding peptide
PTQLSPISVLYIDDSSNVIYKQYENMVVR

SEQ ID NO: 57147 - protein, 29 aa, Artificial Sequence
  Cyclic GFR-binding peptide
  MOD_RES (27)..(29): Xaa is C or S
SPISMLYINDKQQIIYKQYEGMVVDRXGX

SEQ ID NO: 57148 - protein, 28 aa, Artificial Sequence
  Cyclic GFR-binding peptide
  MOD_RES (28)..(28): Xaa is C or S
KTSPISMLYIDNGRVLLYKQYEMIVEEX

SEQ ID NO: 57149 - protein, 35 aa, Artificial Sequence
  Cyclic GFR-binding peptide
  MOD_RES (6)..(7): Xaa is C or S
GSAGPXXTPTKMSPISMLYINDKQQIIYKQYEGMV

SEQ ID NO: 57150 - protein, 29 aa, Artificial Sequence
  Cyclic GFR-binding peptide
  MOD_RES (3)..(4): Xaa is C or S
GPXXTPTKMSPISMLYINDKQQIIYKQYE

SEQ ID NO: 57151 - protein, 30 aa, Artificial Sequence; identical to SEQ ID NO: 40041
  Cyclic GFR-binding peptide

SEQ ID NO: 57152 - protein, 29 aa, Artificial Sequence
  Cyclic GFR-binding peptide
  MOD_RES (27)..(29): Xaa is C or S
SPISVLYIDSSNNVIYKQYENMVVKAXGX

SEQ ID NO: 57153 - protein, 34 aa, Artificial Sequence; identical to SEQ ID NO: 40043
  Cyclic GFR-binding peptide
  MOD_RES (1)..(34): Xaa is C or S

SEQ ID NO: 57154 - protein, 30 aa, Artificial Sequence; identical to SEQ ID NO: 21151
  Cyclic GFR-binding peptide
  MOD_RES (27)..(29): Xaa is C or S

SEQ ID NO: 57155 - protein, 33 aa, Artificial Sequence; identical to SEQ ID NO: 40054
  Cyclic GFR-binding peptide
  MOD_RES (2)..(3): Xaa is C or S

SEQ ID NO: 57156 - protein, 27 aa, Artificial Sequence
  Cyclic GFR-binding peptide
VPTKLSPISVLYIDDMGVPTYKQYEEG

SEQ ID NO: 57157 - protein, 27 aa, Artificial Sequence
  Cyclic GFR-binding peptide
  MOD_RES (1)..(1): Xaa is C or S
XVPTKLSPISVLYIDDMGVPTYKQYEE

SEQ ID NO: 57158 - protein, 27 aa, Artificial Sequence
  Cyclic GFR-binding peptide
PTKLSPISVLYIDDMGVPTYKQYEEGM

SEQ ID NO: 57159 - protein, 29 aa, Artificial Sequence
  Cyclic GFR-binding peptide
  MOD_RES (1)..(1): Xaa is C or S
XAPTKLSPISVLYIDDSSNVIYKQYENMV

SEQ ID NO: 57160 - protein, 33 aa, Artificial Sequence; identical to SEQ ID NO: 37260
  Cyclic GFR-binding peptide
  MOD_RES (30)..(32): Xaa is C or S

SEQ ID NO: 57161 - protein, 26 aa, Artificial Sequence
  Cyclic GFR-binding peptide
LSPISILYIDSANNVVYKQYEDMVVE

SEQ ID NO: 57162 - protein, 32 aa, Artificial Sequence; identical to SEQ ID NO: 40066
  Cyclic GFR-binding peptide
  MOD_RES (32)..(32): Xaa is C or S

SEQ ID NO: 57163 - protein, 24 aa, Artificial Sequence
  Cyclic GFR-binding peptide
TELSPISMLYIDEYDKVVYKQYEE

SEQ ID NO: 57164 - protein, 38 aa, Artificial Sequence; identical to SEQ ID NO: 40067
  Cyclic GFR-binding peptide
  MOD_RES (5)..(6)..(38): Xaa is C or S

SEQ ID NO: 57165 - protein, 26 aa, Artificial Sequence
  Cyclic GFR-binding peptide
  MOD_RES (1)..(1): Xaa is C or S
XVPTKLSPISILYIDKGVVTYYKQYE

SEQ ID NO: 57166 - protein, 30 aa, Artificial Sequence; identical to SEQ ID NO: 40076
  Cyclic GFR-binding peptide
  MOD_RES (2)..(3): Xaa is C or S

SEQ ID NO: 57167 - protein, 34 aa, Artificial Sequence
  Cyclic GFR-binding peptide
  MOD_RES (5)..(6): Xaa is C or S
TPPTXXVPTRLSPISILYIDSANNVVYKQYEDMV

SEQ ID NO: 57168 - protein, 32 aa, Artificial Sequence; identical to SEQ ID NO: 21162
  Cyclic GFR-binding peptide
  MOD_RES (29)..(31): Xaa is C or S

SEQ ID NO: 57169 - protein, 33 aa, Artificial Sequence; identical to SEQ ID NO: 40078
  Cyclic GFR-binding peptide
  MOD_RES (2)..(2): Xaa is C or S

SEQ ID NO: 57170 - protein, 32 aa, Artificial Sequence; identical to SEQ ID NO: 37271
  Cyclic GFR-binding peptide
  MOD_RES (29)..(31): Xaa is C or S

SEQ ID NO: 57171 - protein, 27 aa, Artificial Sequence
  Cyclic GFR-binding peptide
  MOD_RES (27)..(27): Xaa is C or S
SPISILYIDSANNVVYKQYEDMVVESX

SEQ ID NO: 57172 - protein, 35 aa, Artificial Sequence
  Cyclic GFR-binding peptide
  MOD_RES (1)..(33)..(35): Xaa is C or S
XVPTRLSPISILYIDSANNVVYKQYEDMVVESXGX

SEQ ID NO: 57173 - protein, 23 aa, Artificial Sequence
  Cyclic GFR-binding peptide
SPISMLYIDEYDKVVYKQYEEMV

SEQ ID NO: 57174 - protein, 32 aa, Artificial Sequence; identical to SEQ ID NO: 21165
  Cyclic GFR-binding peptide
  MOD_RES (29)..(31): Xaa is C or S

SEQ ID NO: 57175 - protein, 30 aa, Artificial Sequence
  Cyclic GFR-binding peptide
  MOD_RES (29)..(29): Xaa is C or S
RLSPISILYIDSANNVVYKQYEDMVVESXG

SEQ ID NO: 57176 - protein, 36 aa, Artificial Sequence; identical to SEQ ID NO: 37279
  Cyclic GFR-binding peptide
  MOD_RES (6)..(7): Xaa is C or S

SEQ ID NO: 57177 - protein, 28 aa, Artificial Sequence
  Cyclic GFR-binding peptide
TQLSPISVLYIDDSSNVIYKQYENMVVR

SEQ ID NO: 57178 - protein, 42 aa, Artificial Sequence; identical to SEQ ID NO: 21171
  Cyclic GFR-binding peptide
  MOD_RES (7)..(39)..(41): Xaa is C or S

SEQ ID NO: 57179 - protein, 33 aa, Artificial Sequence; identical to SEQ ID NO: 40096
  Cyclic GFR-binding peptide
  MOD_RES (1)..(2): Xaa is C or S

SEQ ID NO: 57180 - protein, 36 aa, Artificial Sequence; identical to SEQ ID NO: 37289
  Cyclic GFR-binding peptide
  MOD_RES (6)..(7): Xaa is C or S

SEQ ID NO: 57181 - protein, 25 aa, Artificial Sequence
  Cyclic GFR-binding peptide
TKLSPISVLYIDDSSNVIYKQYENM

SEQ ID NO: 57182 - protein, 33 aa, Artificial Sequence; identical to SEQ ID NO: 40104
  Cyclic GFR-binding peptide
  MOD_RES (31)..(33): Xaa is C or S

SEQ ID NO: 57183 - protein, 33 aa, Artificial Sequence; identical to SEQ ID NO: 21186
  Cyclic GFR-binding peptide
  MOD_RES (30)..(32): Xaa is C or S

SEQ ID NO: 57184 - protein, 30 aa, Artificial Sequence; identical to SEQ ID NO: 40112
  Cyclic GFR-binding peptide
  MOD_RES (29)..(29): Xaa is C or S

SEQ ID NO: 57185 - protein, 40 aa, Artificial Sequence; identical to SEQ ID NO: 37301
  Cyclic GFR-binding peptide
  MOD_RES (3)..(4)..(37)..(39): Xaa is C or S

SEQ ID NO: 57186 - protein, 37 aa, Artificial Sequence; identical to SEQ ID NO: 40116
  Cyclic GFR-binding peptide
  MOD_RES (4)..(36): Xaa is C or S

SEQ ID NO: 57187 - protein, 32 aa, Artificial Sequence; identical to SEQ ID NO: 37303
  Cyclic GFR-binding peptide
  MOD_RES (30)..(32): Xaa is C or S

SEQ ID NO: 57188 - protein, 36 aa, Artificial Sequence; identical to SEQ ID NO: 40120
  Cyclic GFR-binding peptide
  MOD_RES (2)..(3)..(35): Xaa is C or S

SEQ ID NO: 57189 - protein, 31 aa, Artificial Sequence; identical to SEQ ID NO: 37306
  Cyclic GFR-binding peptide
  MOD_RES (3)..(4): Xaa is C or S

SEQ ID NO: 57190 - protein, 30 aa, Artificial Sequence
  Cyclic GFR-binding peptide
  MOD_RES (1)..(1): Xaa is C or S
XAPVKTSPISMLYIDNGRVLLYKQYEMIVE

SEQ ID NO: 57191 - protein, 36 aa, Artificial Sequence; identical to SEQ ID NO: 37309
  Cyclic GFR-binding peptide
  MOD_RES (1)..(34)..(36): Xaa is C or S

SEQ ID NO: 57192 - protein, 22 aa, Artificial Sequence
  Cyclic GFR-binding peptide
LSPISMLYIDEYDKVVYKQYEE

SEQ ID NO: 57193 - protein, 25 aa, Artificial Sequence
  Cyclic GFR-binding peptide
KLSPISVLYIDSSNNVIYKQYENMV

SEQ ID NO: 57194 - protein, 35 aa, Artificial Sequence; identical to SEQ ID NO: 37314
  Cyclic GFR-binding peptide
  MOD_RES (5)..(6): Xaa is C or S

SEQ ID NO: 57195 - protein, 36 aa, Artificial Sequence; identical to SEQ ID NO: 40132
  Cyclic GFR-binding peptide
  MOD_RES (4)..(36): Xaa is C or S

SEQ ID NO: 57196 - protein, 39 aa, Artificial Sequence; identical to SEQ ID NO: 40133
  Cyclic GFR-binding peptide
  MOD_RES (4)..(5)..(37)..(39): Xaa is C or S

SEQ ID NO: 57197 - protein, 33 aa, Artificial Sequence; identical to SEQ ID NO: 21216
  Cyclic GFR-binding peptide
  MOD_RES (30)..(32): Xaa is C or S

SEQ ID NO: 57198 - protein, 39 aa, Artificial Sequence; identical to SEQ ID NO: 40137
  Cyclic GFR-binding peptide
  MOD_RES (6)..(7)..(39): Xaa is C or S

SEQ ID NO: 57199 - protein, 33 aa, Artificial Sequence; identical to SEQ ID NO: 18946
  Cyclic GFR-binding peptide
  MOD_RES (30)..(32): Xaa is C or S

SEQ ID NO: 57200 - protein, 30 aa, Artificial Sequence; identical to SEQ ID NO: 37324
  Cyclic GFR-binding peptide
  MOD_RES (4)..(4): Xaa is C or S

SEQ ID NO: 57201 - protein, 21 aa, Artificial Sequence
  Cyclic GFR-binding peptide
LSPISILYIDSANNVVYKQYE

SEQ ID NO: 57202 - protein, 25 aa, Artificial Sequence
  Cyclic GFR-binding peptide
TELSPISMLYIDEYDKVVYKQYEEM

SEQ ID NO: 57203 - protein, 33 aa, Artificial Sequence
  Cyclic GFR-binding peptide
  MOD_RES (1)..(32): Xaa is C or S
XAPVKTSPISMLYIDNGRVLLYKQYEMIVEEXG

SEQ ID NO: 57204 - protein, 34 aa, Artificial Sequence; identical to SEQ ID NO: 37332
  Cyclic GFR-binding peptide
  MOD_RES (3)..(3): Xaa is C or S

SEQ ID NO: 57205 - protein, 30 aa, Artificial Sequence; identical to SEQ ID NO: 40155
  Cyclic GFR-binding peptide
  MOD_RES (29)..(29): Xaa is C or S

SEQ ID NO: 57206 - protein, 35 aa, Artificial Sequence; identical to SEQ ID NO: 40157
  Cyclic GFR-binding peptide
  MOD_RES (33)..(35): Xaa is C or S

SEQ ID NO: 57207 - protein, 32 aa, Artificial Sequence; identical to SEQ ID NO: 40158
  Cyclic GFR-binding peptide
  MOD_RES (31)..(31): Xaa is C or S

SEQ ID NO: 57208 - protein, 35 aa, Artificial Sequence; identical to SEQ ID NO: 37338
  Cyclic GFR-binding peptide
  MOD_RES (4)..(5): Xaa is C or S

SEQ ID NO: 57209 - protein, 26 aa, Artificial Sequence
  Cyclic GFR-binding peptide
SPISVLYIDDSSNVIYKQYENMVVRS

SEQ ID NO: 57210 - protein, 27 aa, Artificial Sequence
  Cyclic GFR-binding peptide
VPTELSPISMLYIDEYDKVVYKQYEEM

SEQ ID NO: 57211 - protein, 39 aa, Artificial Sequence; identical to SEQ ID NO: 40164
  Cyclic GFR-binding peptide
  MOD_RES (6)..(7)..(39): Xaa is C or S

SEQ ID NO: 57212 - protein, 36 aa, Artificial Sequence; identical to SEQ ID NO: 40165
  Cyclic GFR-binding peptide
  MOD_RES (2)..(3)..(35): Xaa is C or S

SEQ ID NO: 57213 - protein, 29 aa, Artificial Sequence
  Cyclic GFR-binding peptide
  MOD_RES (1)..(1): Xaa is C or S
XVPTKLSPISVLYIDDMGVPTYKQYEEGM

SEQ ID NO: 57214 - protein, 38 aa, Artificial Sequence
  Cyclic GFR-binding peptide
  MOD_RES (6)..(7): Xaa is C or S
GSAGPXXTPTKMSPISMLYINDKQQIIYKQYEGMVVDR

SEQ ID NO: 57215 - protein, 26 aa, Artificial Sequence
  Cyclic GFR-binding peptide
SPISVLYIDDSSNVIYKQYENMVVRA

SEQ ID NO: 57216 - protein, 30 aa, Artificial Sequence
  Cyclic GFR-binding peptide
  MOD_RES (4)..(5): Xaa is C or S
PPTXXVPTRLSPISILYIDSANNVVYKQYE

SEQ ID NO: 57217 - protein, 34 aa, Artificial Sequence; identical to SEQ ID NO: 21234
  Cyclic GFR-binding peptide
  MOD_RES (31)..(33): Xaa is C or S

SEQ ID NO: 57218 - protein, 32 aa, Artificial Sequence; identical to SEQ ID NO: 40175
  Cyclic GFR-binding peptide
  MOD_RES (2)..(3): Xaa is C or S

SEQ ID NO: 57219 - protein, 29 aa, Artificial Sequence
  Cyclic GFR-binding peptide
  MOD_RES (2)..(3): Xaa is C or S
AXXVPTELSPISMLYIDENEKVVYKQYED

SEQ ID NO: 57220 - protein, 20 aa, Artificial Sequence
  Cyclic GFR-binding peptide
SPISILYIDSANNVVYKQYE

SEQ ID NO: 57221 - protein, 31 aa, Artificial Sequence; identical to SEQ ID NO: 40176
  Cyclic GFR-binding peptide
  MOD_RES (28)..(30): Xaa is C or S

SEQ ID NO: 57222 - protein, 34 aa, Artificial Sequence; identical to SEQ ID NO: 40178
  Cyclic GFR-binding peptide
  MOD_RES (4)..(5): Xaa is C or S

SEQ ID NO: 57223 - protein, 30 aa, Artificial Sequence; identical to SEQ ID NO: 40179
  Cyclic GFR-binding peptide
  MOD_RES (30)..(30): Xaa is C or S

SEQ ID NO: 57224 - protein, 26 aa, Artificial Sequence
  Cyclic GFR-binding peptide
  MOD_RES (1)..(1): Xaa is C or S
XTPTKMSPISMLYINDKQQIIYKQYE

SEQ ID NO: 57225 - protein, 27 aa, Artificial Sequence
  Cyclic GFR-binding peptide
KMSPISMLYINDKQQIIYKQYEGMVVD

SEQ ID NO: 57226 - protein, 32 aa, Artificial Sequence; identical to SEQ ID NO: 40190
  Cyclic GFR-binding peptide
  MOD_RES (1)..(1): Xaa is C or S

SEQ ID NO: 57227 - protein, 41 aa, Artificial Sequence
  Cyclic GFR-binding peptide
  MOD_RES (6)..(7)..(39)..(41): Xaa is C or S
STPPTXXVPTRLSPISILYIDSANNVVYKQYEDMVVESXGX

SEQ ID NO: 57228 - protein, 35 aa, Artificial Sequence; identical to SEQ ID NO: 40196
  Cyclic GFR-binding peptide
  MOD_RES (1)..(33)..(35): Xaa is C or S

SEQ ID NO: 57229 - protein, 37 aa, Artificial Sequence; identical to SEQ ID NO: 37376
  Cyclic GFR-binding peptide
  MOD_RES (3)..(4)..(37): Xaa is C or S

SEQ ID NO: 57230 - protein, 38 aa, Artificial Sequence
  Cyclic GFR-binding peptide
  MOD_RES (2)..(3)..(35)..(37): Xaa is C or S
PXXTPTKMSPISMLYINDKQQIIYKQYEGMVVDRXGXS

SEQ ID NO: 57231 - protein, 28 aa, Artificial Sequence
  Cyclic GFR-binding peptide
VPTKLSPISVLYIDDMGVPTYKQYEEGM

SEQ ID NO: 57232 - protein, 26 aa, Artificial Sequence
  Cyclic GFR-binding peptide
PTKLSPISVLYIDDMGVPTYKQYEEG

SEQ ID NO: 57233 - protein, 21 aa, Artificial Sequence
  Cyclic GFR-binding peptide
LSPISVLYIDDSSNVIYKQYE

SEQ ID NO: 57234 - protein, 21 aa, Artificial Sequence
  Cyclic GFR-binding peptide
LSPISVLYIDDMGVPTYKQYE

SEQ ID NO: 57235 - protein, 35 aa, Artificial Sequence
  Cyclic GFR-binding peptide
  MOD_RES (4)..(5): Xaa is C or S
PPTXXVPTRLSPISILYIDSANNVVYKQYEDMVVE

SEQ ID NO: 57236 - protein, 35 aa, Artificial Sequence; identical to SEQ ID NO: 37383
  Cyclic GFR-binding peptide
  MOD_RES (1)..(2)..(34): Xaa is C or S

SEQ ID NO: 57237 - protein, 29 aa, Artificial Sequence
  Cyclic GFR-binding peptide
  MOD_RES (1)..(2): Xaa is C or S
XXAPTKLSPISVLYIDDSSNVIYKQYENM

SEQ ID NO: 57238 - protein, 33 aa, Artificial Sequence; identical to SEQ ID NO: 37388
  Cyclic GFR-binding peptide
  MOD_RES (30)..(32): Xaa is C or S

SEQ ID NO: 57239 - protein, 27 aa, Artificial Sequence
  Cyclic GFR-binding peptide
LSPISILYIDSANNVVYKQYEDMVVES

SEQ ID NO: 57240 - protein, 34 aa, Artificial Sequence
  Cyclic GFR-binding peptide
  MOD_RES (1)..(2)..(33): Xaa is C or S
XXAPVKTSPISMLYIDNGRVLLYKQYEMIVEEXG

SEQ ID NO: 57241 - protein, 37 aa, Artificial Sequence; identical to SEQ ID NO: 37395
  Cyclic GFR-binding peptide
  MOD_RES (1)..(2)..(34)..(36): Xaa is C or S

SEQ ID NO: 57242 - protein, 23 aa, Artificial Sequence
  Cyclic GFR-binding peptide
VKTSPISMLYIDNGRVLLYKQYE

SEQ ID NO: 57243 - protein, 35 aa, Artificial Sequence; identical to SEQ ID NO: 40210
  Cyclic GFR-binding peptide
  MOD_RES (32)..(34): Xaa is C or S

SEQ ID NO: 57244 - protein, 31 aa, Artificial Sequence; identical to SEQ ID NO: 37399
  Cyclic GFR-binding peptide
  MOD_RES (1)..(2): Xaa is C or S

SEQ ID NO: 57245 - protein, 29 aa, Artificial Sequence
  Cyclic GFR-binding peptide
  MOD_RES (4)..(4): Xaa is C or S
KPTXAPTKLSPISVLYIDDSSNVIYKQYE

SEQ ID NO: 57246 - protein, 24 aa, Artificial Sequence
  Cyclic GFR-binding peptide
PTKLSPISVLYIDSSNNVIYKQYE

SEQ ID NO: 57247 - protein, 31 aa, Artificial Sequence; identical to SEQ ID NO: 37412
  Cyclic GFR-binding peptide
  MOD_RES (28)..(30): Xaa is C or S

SEQ ID NO: 57248 - protein, 32 aa, Artificial Sequence; identical to SEQ ID NO: 37415
  Cyclic GFR-binding peptide
  MOD_RES (5)..(6): Xaa is C or S

SEQ ID NO: 57249 - protein, 26 aa, Artificial Sequence
  Cyclic GFR-binding peptide
VPTKLSPISVLYIDDMGVPTYKQYEE

SEQ ID NO: 57250 - protein, 28 aa, Artificial Sequence
  Cyclic GFR-binding peptide
  MOD_RES (27)..(27): Xaa is C or S
SPISVLYIDSSNNVIYKQYENMVVKAXG

SEQ ID NO: 57251 - protein, 42 aa, Artificial Sequence; identical to SEQ ID NO: 37421
  Cyclic GFR-binding peptide
  MOD_RES (6)..(7)..(39)..(41): Xaa is C or S

SEQ ID NO: 57252 - protein, 34 aa, Artificial Sequence
  Cyclic GFR-binding peptide
  MOD_RES (2)..(3): Xaa is C or S
TXXVPTRLSPISILYIDSANNVVYKQYEDMVVES

SEQ ID NO: 57253 - protein, 26 aa, Artificial Sequence
  Cyclic GFR-binding peptide
LSPISVLYIDDSSNVIYKQYENMVVR

SEQ ID NO: 57254 - protein, 31 aa, Artificial Sequence
  Cyclic GFR-binding peptide
  MOD_RES (5)..(6): Xaa is C or S
VPSTXXAPVKTSPISMLYIDNGRVLLYKQYE

SEQ ID NO: 57255 - protein, 29 aa, Artificial Sequence
  Cyclic GFR-binding peptide
  MOD_RES (29)..(29): Xaa is C or S
KLSPISVLYIDDSSNVIYKQYENMVVRSX

SEQ ID NO: 57256 - protein, 39 aa, Artificial Sequence; identical to SEQ ID NO: 40238
  Cyclic GFR-binding peptide
  MOD_RES (4)..(36)..(38): Xaa is C or S

SEQ ID NO: 57257 - protein, 28 aa, Artificial Sequence
  Cyclic GFR-binding peptide
PTKLSPISVLYIDSSNNVIYKQYENMVV

SEQ ID NO: 57258 - protein, 31 aa, Artificial Sequence; identical to SEQ ID NO: 21307
  Cyclic GFR-binding peptide
  MOD_RES (28)..(30): Xaa is C or S

SEQ ID NO: 57259 - protein, 31 aa, Artificial Sequence
  Cyclic GFR-binding peptide
  MOD_RES (4)..(5): Xaa is C or S
AGPXXTPTKMSPISMLYINDKQQIIYKQYEG

SEQ ID NO: 57260 - protein, 29 aa, Artificial Sequence
  Cyclic GFR-binding peptide
  MOD_RES (3)..(4): Xaa is C or S
KPXXAPTQLSPISVLYIDDSSNVIYKQYE

SEQ ID NO: 57261 - protein, 30 aa, Artificial Sequence; identical to SEQ ID NO: 37445
  Cyclic GFR-binding peptide
  MOD_RES (27)..(29): Xaa is C or S

SEQ ID NO: 57262 - protein, 29 aa, Artificial Sequence
  Cyclic GFR-binding peptide
  MOD_RES (27)..(29): Xaa is C or S
SPISVLYIDDSSNVIYKQYENMVVRSXGX

SEQ ID NO: 57263 - protein, 32 aa, Artificial Sequence; identical to SEQ ID NO: 21321
  Cyclic GFR-binding peptide
  MOD_RES (29)..(31): Xaa is C or S

SEQ ID NO: 57264 - protein, 36 aa, Artificial Sequence; identical to SEQ ID NO: 37452
  Cyclic GFR-binding peptide
  MOD_RES (3)..(4)..(36): Xaa is C or S

SEQ ID NO: 57265 - protein, 42 aa, Artificial Sequence
  Cyclic GFR-binding peptide
  MOD_RES (6)..(7)..(39)..(41): Xaa is C or S
HVPKPXXAPTKLSPISVLYIDDSSNVIYKQYENMVVRSXGXH

SEQ ID NO: 57266 - protein, 34 aa, Artificial Sequence; identical to SEQ ID NO: 40266
  Cyclic GFR-binding peptide
  MOD_RES (5)..(6): Xaa is C or S

SEQ ID NO: 57267 - protein, 34 aa, Artificial Sequence
  Cyclic GFR-binding peptide
  MOD_RES (1)..(2)..(34): Xaa is C or S
XXTPTKMSPISMLYINDKQQIIYKQYEGMVVDRX

SEQ ID NO: 57268 - protein, 33 aa, Artificial Sequence; identical to SEQ ID NO: 37459
  Cyclic GFR-binding peptide
  MOD_RES (31)..(33): Xaa is C or S

SEQ ID NO: 57269 - protein, 39 aa, Artificial Sequence; identical to SEQ ID NO: 40270
  Cyclic GFR-binding peptide
  MOD_RES (4)..(5)..(38): Xaa is C or S

SEQ ID NO: 57270 - protein, 31 aa, Artificial Sequence
  Cyclic GFR-binding peptide
  MOD_RES (29)..(31): Xaa is C or S
KMSPISMLYINDKQQIIYKQYEGMVVDRXGX

SEQ ID NO: 57271 - protein, 28 aa, Artificial Sequence
  Cyclic GFR-binding peptide
TELSPISMLYIDEYDKVVYKQYEEMVVE

SEQ ID NO: 57272 - protein, 32 aa, Artificial Sequence
  Cyclic GFR-binding peptide
  MOD_RES (3)..(4): Xaa is C or S
GPXXTPTKMSPISMLYINDKQQIIYKQYEGMV

SEQ ID NO: 57273 - protein, 31 aa, Artificial Sequence; identical to SEQ ID NO: 37469
  Cyclic GFR-binding peptide
  MOD_RES (30)..(30): Xaa is C or S

SEQ ID NO: 57274 - protein, 29 aa, Artificial Sequence
  Cyclic GFR-binding peptide
APVKTSPISMLYIDNGRVLLYKQYEMIVE

SEQ ID NO: 57275 - protein, 34 aa, Artificial Sequence; identical to SEQ ID NO: 40278
  Cyclic GFR-binding peptide
  MOD_RES (4)..(5): Xaa is C or S

SEQ ID NO: 57276 - protein, 38 aa, Artificial Sequence; identical to SEQ ID NO: 40281
  Cyclic GFR-binding peptide
  MOD_RES (2)..(3)..(35)..(37): Xaa is C or S

SEQ ID NO: 57277 - protein, 38 aa, Artificial Sequence; identical to SEQ ID NO: 40283
  Cyclic GFR-binding peptide
  MOD_RES (3)..(4)..(36)..(38): Xaa is C or S

SEQ ID NO: 57278 - protein, 26 aa, Artificial Sequence
  Cyclic GFR-binding peptide
LSPISMLYIDENEKVVYKQYEDMVVE

SEQ ID NO: 57279 - protein, 32 aa, Artificial Sequence; identical to SEQ ID NO: 37475
  Cyclic GFR-binding peptide
  MOD_RES (30)..(32): Xaa is C or S

SEQ ID NO: 57280 - protein, 34 aa, Artificial Sequence; identical to SEQ ID NO: 40290
  Cyclic GFR-binding peptide
  MOD_RES (5)..(6): Xaa is C or S

SEQ ID NO: 57281 - protein, 34 aa, Artificial Sequence; identical to SEQ ID NO: 37476
  Cyclic GFR-binding peptide
  MOD_RES (32)..(34): Xaa is C or S

SEQ ID NO: 57282 - protein, 28 aa, Artificial Sequence
  Cyclic GFR-binding peptide
RLSPISILYIDSANNVVYKQYEDMVVES

SEQ ID NO: 57283 - protein, 30 aa, Artificial Sequence; identical to SEQ ID NO: 37477
  Cyclic GFR-binding peptide
  MOD_RES (2)..(3): Xaa is C or S

SEQ ID NO: 57284 - protein, 37 aa, Artificial Sequence; identical to SEQ ID NO: 40294
  Cyclic GFR-binding peptide
  MOD_RES (1)..(2)..(34)..(36): Xaa is C or S

SEQ ID NO: 57285 - protein, 38 aa, Artificial Sequence; identical to SEQ ID NO: 40295
  Cyclic GFR-binding peptide
  MOD_RES (1)..(2)..(35)..(37): Xaa is C or S

SEQ ID NO: 57286 - protein, 36 aa, Artificial Sequence; identical to SEQ ID NO: 40297
  Cyclic GFR-binding peptide
  MOD_RES (4)..(5): Xaa is C or S

SEQ ID NO: 57287 - protein, 40 aa, Artificial Sequence; identical to SEQ ID NO: 37487
  Cyclic GFR-binding peptide
  MOD_RES (4)..(5)..(37)..(39): Xaa is C or S

SEQ ID NO: 57288 - protein, 26 aa, Artificial Sequence
  Cyclic GFR-binding peptide
PTQLSPISVLYIDDSSNVIYKQYENM

SEQ ID NO: 57289 - protein, 34 aa, Artificial Sequence; identical to SEQ ID NO: 40302
  Cyclic GFR-binding peptide
  MOD_RES (3)..(4): Xaa is C or S

SEQ ID NO: 57290 - protein, 30 aa, Artificial Sequence; identical to SEQ ID NO: 40303
  Cyclic GFR-binding peptide

SEQ ID NO: 57291 - protein, 37 aa, Artificial Sequence; identical to SEQ ID NO: 37494
  Cyclic GFR-binding peptide
  MOD_RES (3)..(4)..(36): Xaa is C or S

SEQ ID NO: 57292 - protein, 24 aa, Artificial Sequence
  Cyclic GFR-binding peptide
TRLSPISILYIDSANNVVYKQYED

SEQ ID NO: 57293 - protein, 39 aa, Artificial Sequence; identical to SEQ ID NO: 37497
  Cyclic GFR-binding peptide
  MOD_RES (6)..(38): Xaa is C or S

SEQ ID NO: 57294 - protein, 38 aa, Artificial Sequence; identical to SEQ ID NO: 40315
  Cyclic GFR-binding peptide
  MOD_RES (5)..(37): Xaa is C or S

SEQ ID NO: 57295 - protein, 28 aa, Artificial Sequence
  Cyclic GFR-binding peptide
TKMSPISMLYINDKQQIIYKQYEGMVVD

SEQ ID NO: 57296 - protein, 27 aa, Artificial Sequence
  Cyclic GFR-binding peptide
LSPISVLYIDDMGVPTYKQYEEGMSVA

SEQ ID NO: 57297 - protein, 33 aa, Artificial Sequence; identical to SEQ ID NO: 40323
  Cyclic GFR-binding peptide
  MOD_RES (31)..(33): Xaa is C or S

SEQ ID NO: 57298 - protein, 24 aa, Artificial Sequence
  Cyclic GFR-binding peptide
LSPISVLYIDDMGVPTYKQYEEGM

SEQ ID NO: 57299 - protein, 27 aa, Artificial Sequence
  Cyclic GFR-binding peptide
  MOD_RES (1)..(2): Xaa is C or S
XXVPTKLSPISILYIDKGVVTYYKQYE

SEQ ID NO: 57300 - protein, 29 aa, Artificial Sequence
  Cyclic GFR-binding peptide
  MOD_RES (28)..(28): Xaa is C or S
LSPISILYIDKGVVTYYKQYEGMAVSEXG

SEQ ID NO: 57301 - protein, 22 aa, Artificial Sequence
  Cyclic GFR-binding peptide
SPISMLYIDENEKVVYKQYEDM

SEQ ID NO: 57302 - protein, 30 aa, Artificial Sequence
  Cyclic GFR-binding peptide
  MOD_RES (1)..(3): Xaa is C or S
XGXGEVVMDPYVKLVVKENEDFFLMSLSSL

SEQ ID NO: 57303 - protein, 28 aa, Artificial Sequence
  Cyclic GFR-binding peptide
  MOD_RES (1)..(1): Xaa is C or S
XSRVVMNPYVKLIVNSSDDFFLVSLSSL

SEQ ID NO: 57304 - protein, 35 aa, Artificial Sequence
  Cyclic GFR-binding peptide
  MOD_RES (2)..(4): Xaa is C or S
HXGXARVVMNPYVKLIVNSSDDFFLVSLSSLQTPA

SEQ ID NO: 57305 - protein, 24 aa, Artificial Sequence
  Cyclic GFR-binding peptide
PYVKLVVKENEDFFLMSLSSLETP

SEQ ID NO: 57306 - protein, 25 aa, Artificial Sequence
  Cyclic GFR-binding peptide
PYVKLIKPTKGILFFISLSSLDQSV

SEQ ID NO: 57307 - protein, 37 aa, Artificial Sequence
  Cyclic GFR-binding peptide
  MOD_RES (31)..(32): Xaa is C or S
DVVMGPYVKLIIQQKDNFFLMSLSSMKTPTXXPGASG

SEQ ID NO: 57308 - protein, 32 aa, Artificial Sequence
  Cyclic GFR-binding peptide
  MOD_RES (27)..(28): Xaa is C or S
NPYVKLIVNNSSDFFLVSLSSLKTPAXXAKPV

SEQ ID NO: 57309 - protein, 31 aa, Artificial Sequence
  Cyclic GFR-binding peptide
  MOD_RES (1)..(1): Xaa is C or S
XAEVVMDPYVKLVVNNAADFFLISLSSLRAP

SEQ ID NO: 57310 - protein, 26 aa, Artificial Sequence
  Cyclic GFR-binding peptide
SKVIMPYVKLIKPTKGILFFISLSSL

SEQ ID NO: 57311 - protein, 29 aa, Artificial Sequence
  Cyclic GFR-binding peptide
  MOD_RES (1)..(1): Xaa is C or S
XAEVVMDPYVKLVVNNAADFFLISLSSLR

SEQ ID NO: 57312 - protein, 33 aa, Artificial Sequence
  Cyclic GFR-binding peptide
  MOD_RES (2)..(4): Xaa is C or S
HXGXARVVMNPYVKLIVNSSDDFFLVSLSSLQT

SEQ ID NO: 57313 - protein, 32 aa, Artificial Sequence
  Cyclic GFR-binding peptide
  MOD_RES (26)..(27): Xaa is C or S
PYVKLVVNNAADFFLISLSSLRAPVXXSAPAA

SEQ ID NO: 57314 - protein, 30 aa, Artificial Sequence
  Cyclic GFR-binding peptide
  MOD_RES (26)..(27): Xaa is C or S
PYVKLIIQQKDNFFLMSLSSMKTPTXXPGA

SEQ ID NO: 57315 - protein, 38 aa, Artificial Sequence
  Cyclic GFR-binding peptide
  MOD_RES (1)..(3)..(34)..(35): Xaa is C or S
XKXSRVIMPYVKLVKPKRGVLFFISLSSLAQPVXXPAA

SEQ ID NO: 57316 - protein, 30 aa, Artificial Sequence
  Cyclic GFR-binding peptide
  MOD_RES (2)..(2): Xaa is C or S
GXEAVSMGEPYVKLTPVGMDDFFLVSLSSL

SEQ ID NO: 57317 - protein, 29 aa, Artificial Sequence
  Cyclic GFR-binding peptide
EVTMNPYVKLVVNKNEDFFLISLSSMKEP

SEQ ID NO: 57318 - protein, 39 aa, Artificial Sequence
  Cyclic GFR-binding peptide
  MOD_RES (34)..(34): Xaa is C or S
KNHQLFPYVKLHQGQHPKIRFFLMSLSSEETPVXELGED

SEQ ID NO: 57319 - protein, 35 aa, Artificial Sequence
  Cyclic GFR-binding peptide
  MOD_RES (30)..(31): Xaa is C or S
VVMGPYVKLIIQQKDNFFLMSLSSMKTPTXXPGAS

SEQ ID NO: 57320 - protein, 29 aa, Artificial Sequence
  Cyclic GFR-binding peptide
  MOD_RES (29)..(29): Xaa is C or S
VMNPYVKLIVNNSSDFFLVSLSSLKTPAX

SEQ ID NO: 57321 - protein, 27 aa, Artificial Sequence
  Cyclic GFR-binding peptide
LFPYVKLHQGQHPKIRFFLMSLSSEET

SEQ ID NO: 57322 - protein, 32 aa, Artificial Sequence
  Cyclic GFR-binding peptide
  MOD_RES (2)..(2): Xaa is C or S
EXKNHQLFPYVKLHQGQHPKIRFFLMSLSSEE

SEQ ID NO: 57323 - protein, 32 aa, Artificial Sequence
  Cyclic GFR-binding peptide
  MOD_RES (26)..(27): Xaa is C or S
PYVKLVVNNASDFFLISLSSLRTPVXXTPPTS

SEQ ID NO: 57324 - protein, 35 aa, Artificial Sequence
  Cyclic GFR-binding peptide
  MOD_RES (29)..(30): Xaa is C or S
VMGPYVKLIIQQKDNFFLMSLSSMKTPTXXPGASG

SEQ ID NO: 57325 - protein, 30 aa, Artificial Sequence
  Cyclic GFR-binding peptide
  MOD_RES (1)..(1): Xaa is C or S
XGEVVMDPYVKLVVKENEDFFLMSLSSLET

SEQ ID NO: 57326 - protein, 28 aa, Artificial Sequence
  Cyclic GFR-binding peptide
ESVAMGPYVKLYTVVGKDFFLISLSSLK

SEQ ID NO: 57327 - protein, 22 aa, Artificial Sequence
  Cyclic GFR-binding peptide
PYVKLYTVVGKDFFLISLSSLK

SEQ ID NO: 57328 - protein, 36 aa, Artificial Sequence
  Cyclic GFR-binding peptide
  MOD_RES (30)..(31): Xaa is C or S
VVMDPYVKLVVNNAADFFLISLSSLRAPVXXSAPAA

SEQ ID NO: 57329 - protein, 30 aa, Artificial Sequence
  Cyclic GFR-binding peptide
HEELRPYVKLLKPKKRVYEFFLVSLSSHHV

SEQ ID NO: 57330 - protein, 35 aa, Artificial Sequence
  Cyclic GFR-binding peptide
  MOD_RES (1)..(32)..(33): Xaa is C or S
XSKVIMPYVKLIKPTKGILFFISLSSLDQSVXXPS

SEQ ID NO: 57331 - protein, 24 aa, Artificial Sequence
  Cyclic GFR-binding peptide
MDPYVKLVVKENEDFFLMSLSSLE

SEQ ID NO: 57332 - protein, 30 aa, Artificial Sequence
  Cyclic GFR-binding peptide
QLFPYVKLHQGQHPKIRFFLMSLSSEETPV

SEQ ID NO: 57333 - protein, 38 aa, Artificial Sequence
  Cyclic GFR-binding peptide
  MOD_RES (2)..(4)..(36)..(37): Xaa is C or S
RXAXSEVTMNPYVKLVVNKNEDFFLISLSSMKEPVXXP

SEQ ID NO: 57334 - protein, 23 aa, Artificial Sequence
  Cyclic GFR-binding peptide
IMPYVKLLLVRGNDFFLMSLSST

SEQ ID NO: 57335 - protein, 34 aa, Artificial Sequence
  Cyclic GFR-binding peptide
  MOD_RES (29)..(30): Xaa is C or S
VMDPYVKLVVKENEDFFLMSLSSLETPVXXAKPI

SEQ ID NO: 57336 - protein, 35 aa, Artificial Sequence
  Cyclic GFR-binding peptide
  MOD_RES (2)..(35): Xaa is C or S
GXEAVSMGEPYVKLTPVGMDDFFLVSLSSLKTPVX

SEQ ID NO: 57337 - protein, 29 aa, Artificial Sequence
  Cyclic GFR-binding peptide
  MOD_RES (28)..(28): Xaa is C or S
MNPYVKLIVNSSDDFFLVSLSSLKTPAXT

SEQ ID NO: 57338 - protein, 27 aa, Artificial Sequence
  Cyclic GFR-binding peptide
ELRPYVKLLKPKKRVYEFFLVSLSSHH

SEQ ID NO: 57339 - protein, 31 aa, Artificial Sequence
  Cyclic GFR-binding peptide
  MOD_RES (26)..(27): Xaa is C or S
PYVKLVVKENEDFFLMSLSSLETPVXXAKPI

SEQ ID NO: 57340 - protein, 27 aa, Artificial Sequence
  Cyclic GFR-binding peptide
MGEPYVKLTPVGMDDFFLVSLSSLKTP

SEQ ID NO: 57341 - protein, 22 aa, Artificial Sequence
  Cyclic GFR-binding peptide
NPYVKLIVNSSDDFFLVSLSSL

SEQ ID NO: 57342 - protein, 37 aa, Artificial Sequence
  Cyclic GFR-binding peptide
  MOD_RES (31)..(32): Xaa is C or S
RVVMNPYVKLIVNSSDDFFLVSLSSLQTPAXXPKPVT

SEQ ID NO: 57343 - protein, 31 aa, Artificial Sequence
  Cyclic GFR-binding peptide
  MOD_RES (30)..(30): Xaa is C or S
LFPYVKLHQGQHPKIRFFLMSLSSEETPVXE

SEQ ID NO: 57344 - protein, 38 aa, Artificial Sequence
  Cyclic GFR-binding peptide
  MOD_RES (32)..(32): Xaa is C or S
SRVVMNPYVKLIVNSSDDFFLVSLSSLKTPAXTPKTVH

SEQ ID NO: 57345 - protein, 34 aa, Artificial Sequence
  Cyclic GFR-binding peptide
  MOD_RES (2)..(4): Xaa is C or S
RXGXSEVVMDPYVKLVVNNASDFFLISLSSLRTP

SEQ ID NO: 57346 - protein, 25 aa, Artificial Sequence
  Cyclic GFR-binding peptide
DPYVKLVVKENEDFFLMSLSSLETP

SEQ ID NO: 57347 - protein, 29 aa, Artificial Sequence
  Cyclic GFR-binding peptide
  MOD_RES (29)..(29): Xaa is C or S
VMNPYVKLIVNSSDDFFLVSLSSLKTPAX

SEQ ID NO: 57348 - protein, 25 aa, Artificial Sequence
  Cyclic GFR-binding peptide
VMGPYVKLIIQQKDNFFLMSLSSMK

SEQ ID NO: 57349 - protein, 40 aa, Artificial Sequence
  Cyclic GFR-binding peptide
  MOD_RES (2)..(35)..(36): Xaa is C or S
GXEAVSMGEPYVKLTPVGMDDFFLVSLSSLKTPVXXAKGV

SEQ ID NO: 57350 - protein, 34 aa, Artificial Sequence
  Cyclic GFR-binding peptide
  MOD_RES (29)..(30): Xaa is C or S
TMNPYVKLVVNKNEDFFLISLSSMKEPVXXPEPI

SEQ ID NO: 57351 - protein, 32 aa, Artificial Sequence
  Cyclic GFR-binding peptide
  MOD_RES (27)..(28): Xaa is C or S
DPYVKLVVNNAADFFLISLSSLRAPVXXSAPA

SEQ ID NO: 57352 - protein, 30 aa, Artificial Sequence
  Cyclic GFR-binding peptide
  MOD_RES (30)..(30): Xaa is C or S
VVMDPYVKLVVKENEDFFLMSLSSLETPVX

SEQ ID NO: 57353 - protein, 29 aa, Artificial Sequence
  Cyclic GFR-binding peptide
  MOD_RES (26)..(27): Xaa is C or S
PYVKLLLVRGNDFFLMSLSSTKVPAXXTS

SEQ ID NO: 57354 - protein, 36 aa, Artificial Sequence
  Cyclic GFR-binding peptide
  MOD_RES (2)..(34)..(35): Xaa is C or S
AXSEVTMNPYVKLVVNKNEDFFLISLSSMKEPVXXP

SEQ ID NO: 57355 - protein, 22 aa, Artificial Sequence
  Cyclic GFR-binding peptide
MPYVKLIKPTKGILFFISLSSL

SEQ ID NO: 57356 - protein, 36 aa, Artificial Sequence
  Cyclic GFR-binding peptide
  MOD_RES (2)..(33)..(34): Xaa is C or S
KXSRVIMPYVKLVKPKRGVLFFISLSSLAQPVXXPA

SEQ ID NO: 57357 - protein, 36 aa, Artificial Sequence
  Cyclic GFR-binding peptide
  MOD_RES (2)..(35)..(36): Xaa is C or S
GXEAVSMGEPYVKLTPVGMDDFFLVSLSSLKTPVXX

SEQ ID NO: 57358 - protein, 34 aa, Artificial Sequence
  Cyclic GFR-binding peptide
  MOD_RES (29)..(29): Xaa is C or S
VMNPYVKLIVNSSDDFFLVSLSSLKTPAXTPKTV

SEQ ID NO: 57359 - protein, 41 aa, Artificial Sequence
  Cyclic GFR-binding peptide
  MOD_RES (1)..(3)..(35)..(36): Xaa is C or S
XGXSEVVMDPYVKLVVNNASDFFLISLSSLRTPVXXTPPTS

SEQ ID NO: 57360 - protein, 30 aa, Artificial Sequence
  Cyclic GFR-binding peptide
  MOD_RES (27)..(28): Xaa is C or S
MPYVKLVKPTRGVLFFISLSSLDQPVXXPS

SEQ ID NO: 57361 - protein, 32 aa, Artificial Sequence
  Cyclic GFR-binding peptide
HEELRPYVKLLKPKKRVYEFFLVSLSSHHVRS

SEQ ID NO: 57362 - protein, 35 aa, Artificial Sequence
  Cyclic GFR-binding peptide
  MOD_RES (30)..(31): Xaa is C or S
VVMDPYVKLVVNNASDFFLISLSSLRTPVXXTPPT

SEQ ID NO: 57363 - protein, 35 aa, Artificial Sequence
  Cyclic GFR-binding peptide
  MOD_RES (2)..(4)..(35): Xaa is C or S
SXKXSKVIMPYVKLIKPTKGILFFISLSSLDQSVX

SEQ ID NO: 57364 - protein, 32 aa, Artificial Sequence
  Cyclic GFR-binding peptide
  MOD_RES (28)..(29): Xaa is C or S
IMPYVKLIKPTKGILFFISLSSLDQSVXXPSA

SEQ ID NO: 57365 - protein, 34 aa, Artificial Sequence
  Cyclic GFR-binding peptide
  MOD_RES (1)..(32)..(33): Xaa is C or S
XSKVVMPYVKLVKPTRGVLFFISLSSLDQPVXXP

SEQ ID NO: 57366 - protein, 33 aa, Artificial Sequence
  Cyclic GFR-binding peptide
  MOD_RES (32)..(33): Xaa is C or S
RDVVMGPYVKLIIQQKDNFFLMSLSSMKTPTXX

SEQ ID NO: 57367 - protein, 28 aa, Artificial Sequence
  Cyclic GFR-binding peptide
  MOD_RES (2)..(2): Xaa is C or S
GXSRVVMNPYVKLIVNSSDDFFLVSLSS

SEQ ID NO: 57368 - protein, 37 aa, Artificial Sequence
  Cyclic GFR-binding peptide
  MOD_RES (1)..(3)..(35)..(36): Xaa is C or S
XGXAKVVMNPYVKLIVNNSSDFFLVSLSSLKTPAXXA

SEQ ID NO: 57369 - protein, 34 aa, Artificial Sequence
  Cyclic GFR-binding peptide
  MOD_RES (29)..(29): Xaa is C or S
FPYVKLHQGQHPKIRFFLMSLSSEETPVXELGED

SEQ ID NO: 57370 - protein, 39 aa, Artificial Sequence
  Cyclic GFR-binding peptide
  MOD_RES (1)..(33): Xaa is C or S
XSRVVMNPYVKLIVNSSDDFFLVSLSSLKTPAXTPKTVH

SEQ ID NO: 57371 - protein, 25 aa, Artificial Sequence
  Cyclic GFR-binding peptide
RVIMPYVKLVKPKRGVLFFISLSSL

SEQ ID NO: 57372 - protein, 28 aa, Artificial Sequence
  Cyclic GFR-binding peptide
  MOD_RES (1)..(3): Xaa is C or S
XGXEEVIMPYVKLLLVRGNDFFLMSLSS

SEQ ID NO: 57373 - protein, 43 aa, Artificial Sequence
  Cyclic GFR-binding peptide
  MOD_RES (2)..(39): Xaa is C or S
AXELHEELRPYVKLLKPKKRVYEFFLVSLSSHHVRSPQXKVSS

SEQ ID NO: 57374 - protein, 35 aa, Artificial Sequence
  Cyclic GFR-binding peptide
  MOD_RES (33)..(33): Xaa is C or S
NHQLFPYVKLHQGQHPKIRFFLMSLSSEETPVXEL

SEQ ID NO: 57375 - protein, 37 aa, Artificial Sequence
  Cyclic GFR-binding peptide
  MOD_RES (1)..(33)..(34): Xaa is C or S
XARVVMNPYVKLIVNSSDDFFLVSLSSLQTPAXXPKP

SEQ ID NO: 57376 - protein, 33 aa, Artificial Sequence
  Cyclic GFR-binding peptide
  MOD_RES (27)..(28): Xaa is C or S
MPYVKLIKPTKGILFFISLSSLDQSVXXPSASA

SEQ ID NO: 57377 - protein, 36 aa, Artificial Sequence
  Cyclic GFR-binding peptide
  MOD_RES (1)..(33)..(34): Xaa is C or S
XSEVTMNPYVKLVVNKNEDFFLISLSSMKEPVXXPE

SEQ ID NO: 57378 - protein, 26 aa, Artificial Sequence
  Cyclic GFR-binding peptide
SRVIMPYVKLVKPKRGVLFFISLSSL

SEQ ID NO: 57379 - protein, 36 aa, Artificial Sequence
  Cyclic GFR-binding peptide
  MOD_RES (1)..(1): Xaa is C or S
XELHEELRPYVKLLKPKKRVYEFFLVSLSSHHVRSP

SEQ ID NO: 57380 - protein, 35 aa, Artificial Sequence
  Cyclic GFR-binding peptide
  MOD_RES (29)..(30): Xaa is C or S
VMNPYVKLIVNSSDDFFLVSLSSLKTPAXXPKPVY

SEQ ID NO: 57381 - protein, 35 aa, Artificial Sequence
  Cyclic GFR-binding peptide
  MOD_RES (32)..(33): Xaa is C or S
SEVTMNPYVKLVVNKNEDFFLISLSSMKEPVXXPE

SEQ ID NO: 57382 - protein, 34 aa, Artificial Sequence
  Cyclic GFR-binding peptide
  MOD_RES (31)..(32): Xaa is C or S
SKVIMPYVKLIKPTKGILFFISLSSLDQSVXXPS

SEQ ID NO: 57383 - protein, 30 aa, Artificial Sequence
  Cyclic GFR-binding peptide
  MOD_RES (26)..(27): Xaa is C or S
PYVKLVKPKRGVLFFISLSSLAQPVXXPAA

SEQ ID NO: 57384 - protein, 31 aa, Artificial Sequence
  Cyclic GFR-binding peptide
  MOD_RES (29)..(30): Xaa is C or S
VMNPYVKLIVNNSSDFFLVSLSSLKTPAXXA

SEQ ID NO: 57385 - protein, 39 aa, Artificial Sequence
  Cyclic GFR-binding peptide
  MOD_RES (2)..(33)..(34): Xaa is C or S
KXSRVIMPYVKLVKPKRGVLFFISLSSLAQPVXXPAASA

SEQ ID NO: 57386 - protein, 33 aa, Artificial Sequence
  Cyclic GFR-binding peptide
  MOD_RES (30)..(31): Xaa is C or S
VVMGPYVKLIIQQKDNFFLMSLSSMKTPTXXPG

SEQ ID NO: 57387 - protein, 30 aa, Artificial Sequence
  Cyclic GFR-binding peptide
  MOD_RES (29)..(30): Xaa is C or S
VMDPYVKLVVNNASDFFLISLSSLRTPVXX

SEQ ID NO: 57388 - protein, 34 aa, Artificial Sequence
  Cyclic GFR-binding peptide
  MOD_RES (1)..(32)..(33): Xaa is C or S
XEEVIMPYVKLLLVRGNDFFLMSLSSTKVPAXXT

SEQ ID NO: 57389 - protein, 39 aa, Artificial Sequence
  Cyclic GFR-binding peptide
  MOD_RES (2)..(4)..(36)..(37): Xaa is C or S
RXGXGEVVMDPYVKLVVKENEDFFLMSLSSLETPVXXAK

SEQ ID NO: 57390 - protein, 34 aa, Artificial Sequence
  Cyclic GFR-binding peptide
  MOD_RES (32)..(33): Xaa is C or S
AEVVMDPYVKLVVNNAADFFLISLSSLRAPVXXS

SEQ ID NO: 57391 - protein, 31 aa, Artificial Sequence
  Cyclic GFR-binding peptide
  MOD_RES (29)..(30): Xaa is C or S
VIMPYVKLIKPTKGILFFISLSSLDQSVXXP

SEQ ID NO: 57392 - protein, 29 aa, Artificial Sequence
  Cyclic GFR-binding peptide
  MOD_RES (1)..(1): Xaa is C or S
XEEVIMPYVKLLLVRGNDFFLMSLSSTKV

SEQ ID NO: 57393 - protein, 31 aa, Artificial Sequence
  Cyclic GFR-binding peptide
  MOD_RES (2)..(4): Xaa is C or S
HXGXSRVVMNPYVKLIVNSSDDFFLVSLSSL

SEQ ID NO: 57394 - protein, 33 aa, Artificial Sequence
  Cyclic GFR-binding peptide
  MOD_RES (2)..(4): Xaa is C or S
AXAXELHEELRPYVKLLKPKKRVYEFFLVSLSS

SEQ ID NO: 57395 - protein, 35 aa, Artificial Sequence
  Cyclic GFR-binding peptide
  MOD_RES (29)..(30): Xaa is C or S
VIMPYVKLLLVRGNDFFLMSLSSTKVPAXXTSPVR

SEQ ID NO: 57396 - protein, 28 aa, Artificial Sequence
  Cyclic GFR-binding peptide
EVVMDPYVKLVVKENEDFFLMSLSSLET

SEQ ID NO: 57397 - protein, 36 aa, Artificial Sequence
  Cyclic GFR-binding peptide
  MOD_RES (36)..(36): Xaa is C or S
LHEELRPYVKLLKPKKRVYEFFLVSLSSHHVRSPQX

SEQ ID NO: 57398 - protein, 21 aa, Artificial Sequence
  Cyclic GFR-binding peptide
MPYVKLVKPKRGVLFFISLSS

SEQ ID NO: 57399 - protein, 40 aa, Artificial Sequence
  Cyclic GFR-binding peptide
  MOD_RES (2)..(4)..(36)..(37): Xaa is C or S
HXGXAKVVMNPYVKLIVNNSSDFFLVSLSSLKTPAXXAKP

SEQ ID NO: 57400 - protein, 32 aa, Artificial Sequence
  Cyclic GFR-binding peptide
  MOD_RES (26)..(27): Xaa is C or S
PYVKLIVNSSDDFFLVSLSSLKTPAXXPKPVH

SEQ ID NO: 57401 - protein, 26 aa, Artificial Sequence
  Cyclic GFR-binding peptide
KVVMPYVKLVKPTRGVLFFISLSSLD

SEQ ID NO: 57402 - protein, 34 aa, Artificial Sequence
  Cyclic GFR-binding peptide
  MOD_RES (1)..(33)..(34): Xaa is C or S
XSRVVMNPYVKLIVNSSDDFFLVSLSSLKTPAXX

SEQ ID NO: 57403 - protein, 31 aa, Artificial Sequence
  Cyclic GFR-binding peptide
  MOD_RES (2)..(2): Xaa is C or S
GXSRVVMNPYVKLIVNSSDDFFLVSLSSLKT

SEQ ID NO: 57404 - protein, 32 aa, Artificial Sequence
  Cyclic GFR-binding peptide
  MOD_RES (1)..(3): Xaa is C or S
XGXSEVVMDPYVKLVVNNASDFFLISLSSLRT

SEQ ID NO: 57405 - protein, 33 aa, Artificial Sequence
  Cyclic GFR-binding peptide
  MOD_RES (27)..(28): Xaa is C or S
NPYVKLVVNKNEDFFLISLSSMKEPVXXPEPIG

SEQ ID NO: 57406 - protein, 30 aa, Artificial Sequence
  Cyclic GFR-binding peptide
  MOD_RES (29)..(30): Xaa is C or S
VIMPYVKLVKPKRGVLFFISLSSLAQPVXX

SEQ ID NO: 57407 - protein, 20 aa, Artificial Sequence
  Cyclic GFR-binding peptide
PYVKLIIQQKDNFFLMSLSS

SEQ ID NO: 57408 - protein, 34 aa, Artificial Sequence
  Cyclic GFR-binding peptide
  MOD_RES (32)..(33): Xaa is C or S
GEVVMDPYVKLVVKENEDFFLMSLSSLETPVXXA

SEQ ID NO: 57409 - protein, 38 aa, Artificial Sequence
  Cyclic GFR-binding peptide
  MOD_RES (1)..(33)..(34): Xaa is C or S
XAEVVMDPYVKLVVNNAADFFLISLSSLRAPVXXSAPA

SEQ ID NO: 57410 - protein, 29 aa, Artificial Sequence
  Cyclic GFR-binding peptide
SVAMGPYVKLYTVVGKDFFLISLSSLKTP

SEQ ID NO: 57411 - protein, 34 aa, Artificial Sequence
  Cyclic GFR-binding peptide
  MOD_RES (28)..(29): Xaa is C or S
VMPYVKLVKPTRGVLFFISLSSLDQPVXXPSASA

SEQ ID NO: 57412 - protein, 35 aa, Artificial Sequence
  Cyclic GFR-binding peptide
  MOD_RES (34)..(34): Xaa is C or S
EELRPYVKLLKPKKRVYEFFLVSLSSHHVRSPQXK

SEQ ID NO: 57413 - protein, 34 aa, Artificial Sequence
  Cyclic GFR-binding peptide
  MOD_RES (30)..(30): Xaa is C or S
VVMNPYVKLIVNSSDDFFLVSLSSLKTPAXTPKT

SEQ ID NO: 57414 - protein, 26 aa, Artificial Sequence
  Cyclic GFR-binding peptide
VVMNPYVKLIVNNSSDFFLVSLSSLK

SEQ ID NO: 57415 - protein, 29 aa, Artificial Sequence
  Cyclic GFR-binding peptide
  MOD_RES (2)..(2): Xaa is C or S
GXSRVVMNPYVKLIVNSSDDFFLVSLSSL

SEQ ID NO: 57416 - protein, 33 aa, Artificial Sequence
  Cyclic GFR-binding peptide
  MOD_RES (30)..(31): Xaa is C or S
EVIMPYVKLLLVRGNDFFLMSLSSTKVPAXXTS

SEQ ID NO: 57417 - protein, 37 aa, Artificial Sequence
  Cyclic GFR-binding peptide
  MOD_RES (2)..(34)..(35): Xaa is C or S
GXGEVVMDPYVKLVVKENEDFFLMSLSSLETPVXXAK

SEQ ID NO: 57418 - protein, 28 aa, Artificial Sequence
  Cyclic GFR-binding peptide
  MOD_RES (26)..(27): Xaa is C or S
PYVKLIIQQKDNFFLMSLSSMKTPTXXP

SEQ ID NO: 57419 - protein, 37 aa, Artificial Sequence
  Cyclic GFR-binding peptide
  MOD_RES (36)..(36): Xaa is C or S
LHEELRPYVKLLKPKKRVYEFFLVSLSSHHVRSPQXK

SEQ ID NO: 57420 - protein, 31 aa, Artificial Sequence
  Cyclic GFR-binding peptide
  MOD_RES (28)..(29): Xaa is C or S
GEPYVKLTPVGMDDFFLVSLSSLKTPVXXAK

SEQ ID NO: 57421 - protein, 36 aa, Artificial Sequence
  Cyclic GFR-binding peptide
  MOD_RES (2)..(4)..(35)..(36): Xaa is C or S
SXKXSKVVMPYVKLVKPTRGVLFFISLSSLDQPVXX

SEQ ID NO: 57422 - protein, 28 aa, Artificial Sequence
  Cyclic GFR-binding peptide
EVTMNPYVKLVVNKNEDFFLISLSSMKE

SEQ ID NO: 57423 - protein, 36 aa, Artificial Sequence
  Cyclic GFR-binding peptide
ELHEELRPYVKLLKPKKRVYEFFLVSLSSHHVRSPQ

SEQ ID NO: 57424 - protein, 41 aa, Artificial Sequence
  Cyclic GFR-binding peptide
  MOD_RES (1)..(3)..(35)..(36): Xaa is C or S
XGXGEVVMDPYVKLVVKENEDFFLMSLSSLETPVXXAKPIK

SEQ ID NO: 57425 - protein, 23 aa, Artificial Sequence
  Cyclic GFR-binding peptide
PYVKLTPVGMDDFFLVSLSSLKT

SEQ ID NO: 57426 - protein, 29 aa, Artificial Sequence
  Cyclic GFR-binding peptide
  MOD_RES (26)..(27): Xaa is C or S
PYVKLVVKENEDFFLMSLSSLETPVXXAK

SEQ ID NO: 57427 - protein, 35 aa, Artificial Sequence
  Cyclic GFR-binding peptide
  MOD_RES (1)..(3): Xaa is C or S
XAXELHEELRPYVKLLKPKKRVYEFFLVSLSSHHV

SEQ ID NO: 57428 - protein, 33 aa, Artificial Sequence
  Cyclic GFR-binding peptide
  MOD_RES (29)..(30): Xaa is C or S
MGEPYVKLTPVGMDDFFLVSLSSLKTPVXXAKG

SEQ ID NO: 57429 - protein, 33 aa, Artificial Sequence
  Cyclic GFR-binding peptide
  MOD_RES (28)..(29): Xaa is C or S
MNPYVKLIVNNSSDFFLVSLSSLKTPAXXAKPV

SEQ ID NO: 57430 - protein, 26 aa, Artificial Sequence
  Cyclic GFR-binding peptide
VSMGEPYVKLTPVGMDDFFLVSLSSL

SEQ ID NO: 57431 - protein, 32 aa, Artificial Sequence
  Cyclic GFR-binding peptide
ELRPYVKLLKPKKRVYEFFLVSLSSHHVRSPQ

SEQ ID NO: 57432 - protein, 31 aa, Artificial Sequence
  Cyclic GFR-binding peptide
EAVSMGEPYVKLTPVGMDDFFLVSLSSLKTP

SEQ ID NO: 57433 - protein, 28 aa, Artificial Sequence
  Cyclic GFR-binding peptide
GEVVMDPYVKLVVKENEDFFLMSLSSLE

SEQ ID NO: 57434 - protein, 26 aa, Artificial Sequence
  Cyclic GFR-binding peptide
VVMPYVKLVKPTRGVLFFISLSSLDQ

SEQ ID NO: 57435 - protein, 25 aa, Artificial Sequence
  Cyclic GFR-binding peptide
VMNPYVKLIVNSSDDFFLVSLSSLK

SEQ ID NO: 57436 - protein, 33 aa, Artificial Sequence
  Cyclic GFR-binding peptide
  MOD_RES (28)..(29): Xaa is C or S
GEPYVKLTPVGMDDFFLVSLSSLKTPVXXAKGV

SEQ ID NO: 57437 - protein, 38 aa, Artificial Sequence
  Cyclic GFR-binding peptide
  MOD_RES (1)..(33)..(34): Xaa is C or S
XSEVVMDPYVKLVVNNASDFFLISLSSLRTPVXXTPPT

SEQ ID NO: 57438 - protein, 25 aa, Artificial Sequence
  Cyclic GFR-binding peptide
PYVKLVKPKRGVLFFISLSSLAQPV

SEQ ID NO: 57439 - protein, 34 aa, Artificial Sequence
  Cyclic GFR-binding peptide
  MOD_RES (1)..(33)..(34): Xaa is C or S
XESVAMGPYVKLYTVVGKDFFLISLSSLKTPVXX

SEQ ID NO: 57440 - protein, 22 aa, Artificial Sequence
  Cyclic GFR-binding peptide
PYVKLVKPKRGVLFFISLSSLA

SEQ ID NO: 57441 - protein, 33 aa, Artificial Sequence
  Cyclic GFR-binding peptide
  MOD_RES (33)..(33): Xaa is C or S
NHQLFPYVKLHQGQHPKIRFFLMSLSSEETPVX

SEQ ID NO: 57442 - protein, 26 aa, Artificial Sequence
  Cyclic GFR-binding peptide
  MOD_RES (26)..(26): Xaa is C or S
PYVKLVVNKNEDFFLISLSSMKEPVX

SEQ ID NO: 57443 - protein, 35 aa, Artificial Sequence
  Cyclic GFR-binding peptide
  MOD_RES (1)..(33)..(34): Xaa is C or S
XRDVVMGPYVKLIIQQKDNFFLMSLSSMKTPTXXP

SEQ ID NO: 57444 - protein, 27 aa, Artificial Sequence
  Cyclic GFR-binding peptide
VVMNPYVKLIVNNSSDFFLVSLSSLKT

SEQ ID NO: 57445 - protein, 39 aa, Artificial Sequence
  Cyclic GFR-binding peptide
  MOD_RES (2)..(34)..(35): Xaa is C or S
GXESVAMGPYVKLYTVVGKDFFLISLSSLKTPVXXAKSA

SEQ ID NO: 57446 - protein, 23 aa, Artificial Sequence
  Cyclic GFR-binding peptide
PYVKLYTVVGKDFFLISLSSLKT

SEQ ID NO: 57447 - protein, 39 aa, Artificial Sequence
  Cyclic GFR-binding peptide
  MOD_RES (2)..(4)..(38): Xaa is C or S
RXEXKNHQLFPYVKLHQGQHPKIRFFLMSLSSEETPVXE

SEQ ID NO: 57448 - protein, 32 aa, Artificial Sequence
  Cyclic GFR-binding peptide
  MOD_RES (30)..(31): Xaa is C or S
VVMNPYVKLIVNNSSDFFLVSLSSLKTPAXXA

SEQ ID NO: 57449 - protein, 24 aa, Artificial Sequence
  Cyclic GFR-binding peptide
IMPYVKLVKPKRGVLFFISLSSLA

SEQ ID NO: 57450 - protein, 29 aa, Artificial Sequence
  Cyclic GFR-binding peptide
  MOD_RES (2)..(2): Xaa is C or S
KXSRVIMPYVKLVKPKRGVLFFISLSSLA

SEQ ID NO: 57451 - protein, 31 aa, Artificial Sequence
  Cyclic GFR-binding peptide
KNHQLFPYVKLHQGQHPKIRFFLMSLSSEET

SEQ ID NO: 57452 - protein, 32 aa, Artificial Sequence
  Cyclic GFR-binding peptide
  MOD_RES (31)..(31): Xaa is C or S
RVVMNPYVKLIVNSSDDFFLVSLSSLKTPAXT

SEQ ID NO: 57453 - protein, 29 aa, Artificial Sequence
  Cyclic GFR-binding peptide
  MOD_RES (26)..(27): Xaa is C or S
PYVKLVVNNASDFFLISLSSLRTPVXXTP

SEQ ID NO: 57454 - protein, 21 aa, Artificial Sequence
  Cyclic GFR-binding peptide
PYVKLVVKENEDFFLMSLSSL

SEQ ID NO: 57455 - protein, 27 aa, Artificial Sequence
  Cyclic GFR-binding peptide
MGPYVKLIIQQKDNFFLMSLSSMKTPT

SEQ ID NO: 57456 - protein, 40 aa, Artificial Sequence
  Cyclic GFR-binding peptide
  MOD_RES (2)..(4)..(38): Xaa is C or S
RXEXKNHQLFPYVKLHQGQHPKIRFFLMSLSSEETPVXEL

SEQ ID NO: 57457 - protein, 33 aa, Artificial Sequence
  Cyclic GFR-binding peptide
  MOD_RES (2)..(33): Xaa is C or S
GXEEVIMPYVKLLLVRGNDFFLMSLSSTKVPAX

SEQ ID NO: 57458 - protein, 32 aa, Artificial Sequence
  Cyclic GFR-binding peptide
  MOD_RES (28)..(28): Xaa is C or S
MNPYVKLIVNSSDDFFLVSLSSLKTPAXTPKT

SEQ ID NO: 57459 - protein, 32 aa, Artificial Sequence
  Cyclic GFR-binding peptide
  MOD_RES (2)..(4): Xaa is C or S
SXKXSKVIMPYVKLIKPTKGILFFISLSSLDQ

SEQ ID NO: 57460 - protein, 31 aa, Artificial Sequence
  Cyclic GFR-binding peptide
  MOD_RES (30)..(31): Xaa is C or S
VTMNPYVKLVVNKNEDFFLISLSSMKEPVXX

SEQ ID NO: 57461 - protein, 35 aa, Artificial Sequence
  Cyclic GFR-binding peptide
  MOD_RES (32)..(33): Xaa is C or S
RDVVMGPYVKLIIQQKDNFFLMSLSSMKTPTXXPG

SEQ ID NO: 57462 - protein, 29 aa, Artificial Sequence
  Cyclic GFR-binding peptide
  MOD_RES (1)..(3): Xaa is C or S
XGXSRVVMNPYVKLIVNSSDDFFLVSLSS

SEQ ID NO: 57463 - protein, 32 aa, Artificial Sequence
  Cyclic GFR-binding peptide
  MOD_RES (2)..(2): Xaa is C or S
GXAEVVMDPYVKLVVNNAADFFLISLSSLRAP

SEQ ID NO: 57464 - protein, 36 aa, Artificial Sequence
  Cyclic GFR-binding peptide
  MOD_RES (34)..(34): Xaa is C or S
KNHQLFPYVKLHQGQHPKIRFFLMSLSSEETPVXEL

SEQ ID NO: 57465 - protein, 24 aa, Artificial Sequence
  Cyclic GFR-binding peptide
VAMGPYVKLYTVVGKDFFLISLSS

SEQ ID NO: 57466 - protein, 33 aa, Artificial Sequence
  Cyclic GFR-binding peptide
  MOD_RES (1)..(1): Xaa is C or S
XEAVSMGEPYVKLTPVGMDDFFLVSLSSLKTPV

SEQ ID NO: 57467 - protein, 29 aa, Artificial Sequence
  Cyclic GFR-binding peptide
ARVVMNPYVKLIVNSSDDFFLVSLSSLQT

SEQ ID NO: 57468 - protein, 38 aa, Artificial Sequence
  Cyclic GFR-binding peptide
  MOD_RES (32)..(32): Xaa is C or S
HQLFPYVKLHQGQHPKIRFFLMSLSSEETPVXELGEDN

SEQ ID NO: 57469 - protein, 39 aa, Artificial Sequence
  Cyclic GFR-binding peptide
  MOD_RES (2)..(34)..(35): Xaa is C or S
GXRDVVMGPYVKLIIQQKDNFFLMSLSSMKTPTXXPGAS

SEQ ID NO: 57470 - protein, 24 aa, Artificial Sequence
  Cyclic GFR-binding peptide
SMGEPYVKLTPVGMDDFFLVSLSS

SEQ ID NO: 57471 - protein, 32 aa, Artificial Sequence
  Cyclic GFR-binding peptide
  MOD_RES (27)..(28): Xaa is C or S
EPYVKLTPVGMDDFFLVSLSSLKTPVXXAKGV

SEQ ID NO: 57472 - protein, 28 aa, Artificial Sequence
  Cyclic GFR-binding peptide
SVAMGPYVKLYTVVGKDFFLISLSSLKT

SEQ ID NO: 57473 - protein, 25 aa, Artificial Sequence
  Cyclic GFR-binding peptide
VIMPYVKLIKPTKGILFFISLSSLD

SEQ ID NO: 57474 - protein, 35 aa, Artificial Sequence
  Cyclic GFR-binding peptide
  MOD_RES (30)..(31): Xaa is C or S
KVVMPYVKLVKPTRGVLFFISLSSLDQPVXXPSAS

SEQ ID NO: 57475 - protein, 32 aa, Artificial Sequence
  Cyclic GFR-binding peptide
  MOD_RES (30)..(31): Xaa is C or S
VTMNPYVKLVVNKNEDFFLISLSSMKEPVXXP

SEQ ID NO: 57476 - protein, 36 aa, Artificial Sequence
  Cyclic GFR-binding peptide
  MOD_RES (1)..(3): Xaa is C or S
XAXELHEELRPYVKLLKPKKRVYEFFLVSLSSHHVR

SEQ ID NO: 57477 - protein, 30 aa, Artificial Sequence
  Cyclic GFR-binding peptide
  MOD_RES (2)..(2): Xaa is C or S
GXGEVVMDPYVKLVVKENEDFFLMSLSSLE

SEQ ID NO: 57478 - protein, 25 aa, Artificial Sequence
  Cyclic GFR-binding peptide
SRVIMPYVKLVKPKRGVLFFISLSS

SEQ ID NO: 57479 - protein, 30 aa, Artificial Sequence
  Cyclic GFR-binding peptide
  MOD_RES (28)..(29): Xaa is C or S
MNPYVKLIVNSSDDFFLVSLSSLQTPAXXP

SEQ ID NO: 57480 - protein, 22 aa, Artificial Sequence
  Cyclic GFR-binding peptide
DPYVKLVVKENEDFFLMSLSSL

SEQ ID NO: 57481 - protein, 27 aa, Artificial Sequence
  Cyclic GFR-binding peptide
  MOD_RES (27)..(27): Xaa is C or S
MPYVKLVKPKRGVLFFISLSSLAQPVX

SEQ ID NO: 57482 - protein, 28 aa, Artificial Sequence
  Cyclic GFR-binding peptide
  MOD_RES (26)..(27): Xaa is C or S
PYVKLVVNNAADFFLISLSSLRAPVXXS

SEQ ID NO: 57483 - protein, 24 aa, Artificial Sequence
  Cyclic GFR-binding peptide
PYVKLIVNNSSDFFLVSLSSLKTP

SEQ ID NO: 57484 - protein, 31 aa, Artificial Sequence
  Cyclic GFR-binding peptide
  MOD_RES (2)..(4): Xaa is C or S
SXKXSKVVMPYVKLVKPTRGVLFFISLSSLD

SEQ ID NO: 57485 - protein, 34 aa, Artificial Sequence
  Cyclic GFR-binding peptide
  MOD_RES (1)..(3)..(34): Xaa is C or S
XKXSRVIMPYVKLVKPKRGVLFFISLSSLAQPVX

SEQ ID NO: 57486 - protein, 35 aa, Artificial Sequence
  Cyclic GFR-binding peptide
  MOD_RES (29)..(30): Xaa is C or S
VMNPYVKLIVNNSSDFFLVSLSSLKTPAXXAKPVA

SEQ ID NO: 57487 - protein, 33 aa, Artificial Sequence
  Cyclic GFR-binding peptide
  MOD_RES (28)..(29): Xaa is C or S
MDPYVKLVVNNASDFFLISLSSLRTPVXXTPPT

SEQ ID NO: 57488 - protein, 32 aa, Artificial Sequence
  Cyclic GFR-binding peptide
  MOD_RES (1)..(1): Xaa is C or S
XELHEELRPYVKLLKPKKRVYEFFLVSLSSHH

SEQ ID NO: 57489 - protein, 39 aa, Artificial Sequence
  Cyclic GFR-binding peptide
  MOD_RES (2)..(35)..(36): Xaa is C or S
GXEAVSMGEPYVKLTPVGMDDFFLVSLSSLKTPVXXAKG

SEQ ID NO: 57490 - protein, 29 aa, Artificial Sequence
  Cyclic GFR-binding peptide
KVIMPYVKLIKPTKGILFFISLSSLDQSV

SEQ ID NO: 57491 - protein, 22 aa, Artificial Sequence
  Cyclic GFR-binding peptide
IMPYVKLLLVRGNDFFLMSLSS

SEQ ID NO: 57492 - protein, 30 aa, Artificial Sequence
  Cyclic GFR-binding peptide
  MOD_RES (2)..(2): Xaa is C or S
KXSKVIMPYVKLIKPTKGILFFISLSSLDQ

SEQ ID NO: 57493 - protein, 25 aa, Artificial Sequence
  Cyclic GFR-binding peptide
SKVIMPYVKLIKPTKGILFFISLSS

SEQ ID NO: 57494 - protein, 28 aa, Artificial Sequence
  Cyclic GFR-binding peptide
EVVMDPYVKLVVNNASDFFLISLSSLRT

SEQ ID NO: 57495 - protein, 25 aa, Artificial Sequence
  Cyclic GFR-binding peptide
VVMNPYVKLIVNNSSDFFLVSLSSL

SEQ ID NO: 57496 - protein, 31 aa, Artificial Sequence
  Cyclic GFR-binding peptide
  MOD_RES (2)..(2): Xaa is C or S
EXKNHQLFPYVKLHQGQHPKIRFFLMSLSSE

SEQ ID NO: 57497 - protein, 36 aa, Artificial Sequence
  Cyclic GFR-binding peptide
  MOD_RES (33)..(33): Xaa is C or S
ELRPYVKLLKPKKRVYEFFLVSLSSHHVRSPQXKVS

SEQ ID NO: 57498 - protein, 22 aa, Artificial Sequence
  Cyclic GFR-binding peptide
PYVKLVVNNAADFFLISLSSLR

SEQ ID NO: 57499 - protein, 36 aa, Artificial Sequence
  Cyclic GFR-binding peptide
  MOD_RES (2)..(34): Xaa is C or S
GXSRVVMNPYVKLIVNSSDDFFLVSLSSLKTPAXTP

SEQ ID NO: 57500 - protein, 30 aa, Artificial Sequence
  Cyclic GFR-binding peptide
  MOD_RES (2)..(2): Xaa is C or S
GXAEVVMDPYVKLVVNNAADFFLISLSSLR

SEQ ID NO: 57501 - protein, 25 aa, Artificial Sequence
  Cyclic GFR-binding peptide
VSMGEPYVKLTPVGMDDFFLVSLSS

SEQ ID NO: 57502 - protein, 39 aa, Artificial Sequence
  Cyclic GFR-binding peptide
  MOD_RES (1)..(33)..(34): Xaa is C or S
XAKVVMNPYVKLIVNNSSDFFLVSLSSLKTPAXXAKPVA

SEQ ID NO: 57503 - protein, 28 aa, Artificial Sequence
  Cyclic GFR-binding peptide
  MOD_RES (2)..(2): Xaa is C or S
GXESVAMGPYVKLYTVVGKDFFLISLSS

SEQ ID NO: 57504 - protein, 42 aa, Artificial Sequence
  Cyclic GFR-binding peptide
  MOD_RES (2)..(4)..(41): Xaa is C or S
AXAXELHEELRPYVKLLKPKKRVYEFFLVSLSSHHVRSPQXK

SEQ ID NO: 57505 - protein, 34 aa, Artificial Sequence
  Cyclic GFR-binding peptide
  MOD_RES (1)..(33)..(34): Xaa is C or S
XSEVTMNPYVKLVVNKNEDFFLISLSSMKEPVXX

SEQ ID NO: 57506 - protein, 29 aa, Artificial Sequence
  Cyclic GFR-binding peptide
  MOD_RES (1)..(3): Xaa is C or S
XAXSEVTMNPYVKLVVNKNEDFFLISLSS

SEQ ID NO: 57507 - protein, 26 aa, Artificial Sequence
  Cyclic GFR-binding peptide
MPYVKLIKPTKGILFFISLSSLDQSV

SEQ ID NO: 57508 - protein, 34 aa, Artificial Sequence
  Cyclic GFR-binding peptide
  MOD_RES (31)..(32): Xaa is C or S
VSMGEPYVKLTPVGMDDFFLVSLSSLKTPVXXAK

SEQ ID NO: 57509 - protein, 40 aa, Artificial Sequence
  Cyclic GFR-binding peptide
  MOD_RES (2)..(34)..(35): Xaa is C or S
GXRDVVMGPYVKLIIQQKDNFFLMSLSSMKTPTXXPGASG

SEQ ID NO: 57510 - protein, 20 aa, Artificial Sequence
  Cyclic GFR-binding peptide
PYVKLIVNNSSDFFLVSLSS

SEQ ID NO: 57511 - protein, 35 aa, Artificial Sequence
  Cyclic GFR-binding peptide
  MOD_RES (1)..(3)..(35): Xaa is C or S
XAXSEVTMNPYVKLVVNKNEDFFLISLSSMKEPVX

SEQ ID NO: 57512 - protein, 27 aa, Artificial Sequence
  Cyclic GFR-binding peptide
AMGPYVKLYTVVGKDFFLISLSSLKTP

SEQ ID NO: 57513 - protein, 34 aa, Artificial Sequence
  Cyclic GFR-binding peptide
  MOD_RES (32)..(33): Xaa is C or S
ESVAMGPYVKLYTVVGKDFFLISLSSLKTPVXXA

SEQ ID NO: 57514 - protein, 24 aa, Artificial Sequence
  Cyclic GFR-binding peptide
IMPYVKLIKPTKGILFFISLSSLD

SEQ ID NO: 57515 - protein, 34 aa, Artificial Sequence
  Cyclic GFR-binding peptide
  MOD_RES (28)..(29): Xaa is C or S
IMPYVKLIKPTKGILFFISLSSLDQSVXXPSASA

SEQ ID NO: 57516 - protein, 29 aa, Artificial Sequence
  Cyclic GFR-binding peptide
LFPYVKLHQGQHPKIRFFLMSLSSEETPV

SEQ ID NO: 57517 - protein, 31 aa, Artificial Sequence
  Cyclic GFR-binding peptide
  MOD_RES (1)..(3): Xaa is C or S
XGXRDVVMGPYVKLIIQQKDNFFLMSLSSMK

SEQ ID NO: 57518 - protein, 32 aa, Artificial Sequence
  Cyclic GFR-binding peptide
  MOD_RES (31)..(32): Xaa is C or S
SKVIMPYVKLIKPTKGILFFISLSSLDQSVXX

SEQ ID NO: 57519 - protein, 33 aa, Artificial Sequence
  Cyclic GFR-binding peptide
  MOD_RES (32)..(33): Xaa is C or S
AKVVMNPYVKLIVNNSSDFFLVSLSSLKTPAXX

SEQ ID NO: 57520 - protein, 33 aa, Artificial Sequence
  Cyclic GFR-binding peptide
  MOD_RES (1)..(3): Xaa is C or S
XKXSKVVMPYVKLVKPTRGVLFFISLSSLDQPV

SEQ ID NO: 57521 - protein, 30 aa, Artificial Sequence
  Cyclic GFR-binding peptide
  MOD_RES (2)..(2): Xaa is C or S
GXARVVMNPYVKLIVNSSDDFFLVSLSSLQ

SEQ ID NO: 57522 - protein, 25 aa, Artificial Sequence
  Cyclic GFR-binding peptide
VMNPYVKLIVNNSSDFFLVSLSSLK

SEQ ID NO: 57523 - protein, 25 aa, Artificial Sequence
  Cyclic GFR-binding peptide
AMGPYVKLYTVVGKDFFLISLSSLK

SEQ ID NO: 57524 - protein, 34 aa, Artificial Sequence
  Cyclic GFR-binding peptide
  MOD_RES (28)..(29): Xaa is C or S
MNPYVKLIVNSSDDFFLVSLSSLKTPAXXPKPVY

SEQ ID NO: 57525 - protein, 38 aa, Artificial Sequence
  Cyclic GFR-binding peptide
  MOD_RES (1)..(32)..(33): Xaa is C or S
XSRVIMPYVKLVKPKRGVLFFISLSSLAQPVXXPAASA

SEQ ID NO: 57526 - protein, 34 aa, Artificial Sequence
  Cyclic GFR-binding peptide
  MOD_RES (29)..(30): Xaa is C or S
VMDPYVKLVVNNAADFFLISLSSLRAPVXXSAPA

SEQ ID NO: 57527 - protein, 27 aa, Artificial Sequence
  Cyclic GFR-binding peptide
VMDPYVKLVVKENEDFFLMSLSSLETP

SEQ ID NO: 57528 - protein, 24 aa, Artificial Sequence
  Cyclic GFR-binding peptide
MNPYVKLIVNSSDDFFLVSLSSLK

SEQ ID NO: 57529 - protein, 33 aa, Artificial Sequence
  Cyclic GFR-binding peptide
  MOD_RES (27)..(28): Xaa is C or S
MPYVKLVKPTRGVLFFISLSSLDQPVXXPSASA

SEQ ID NO: 57530 - protein, 31 aa, Artificial Sequence
  Cyclic GFR-binding peptide
HQLFPYVKLHQGQHPKIRFFLMSLSSEETPV

SEQ ID NO: 57531 - protein, 21 aa, Artificial Sequence
  Cyclic GFR-binding peptide
PYVKLIKPTKGILFFISLSSL

SEQ ID NO: 57532 - protein, 24 aa, Artificial Sequence
  Cyclic GFR-binding peptide
MDPYVKLVVNNASDFFLISLSSLR

SEQ ID NO: 57533 - protein, 31 aa, Artificial Sequence
  Cyclic GFR-binding peptide
  MOD_RES (26)..(27): Xaa is C or S
PYVKLIVNSSDDFFLVSLSSLQTPAXXPKPV

SEQ ID NO: 57534 - protein, 27 aa, Artificial Sequence
  Cyclic GFR-binding peptide
AEVVMDPYVKLVVNNAADFFLISLSSL

SEQ ID NO: 57535 - protein, 32 aa, Artificial Sequence
  Cyclic GFR-binding peptide
  MOD_RES (1)..(32): Xaa is C or S
XSRVIMPYVKLVKPKRGVLFFISLSSLAQPVX

SEQ ID NO: 57536 - protein, 28 aa, Artificial Sequence
  Cyclic GFR-binding peptide
  MOD_RES (27)..(28): Xaa is C or S
DPYVKLVVNNASDFFLISLSSLRTPVXX

SEQ ID NO: 57537 - protein, 27 aa, Artificial Sequence
  Cyclic GFR-binding peptide
VMNPYVKLIVNSSDDFFLVSLSSLKTP

SEQ ID NO: 57538 - protein, 29 aa, Artificial Sequence
  Cyclic GFR-binding peptide
  MOD_RES (28)..(29): Xaa is C or S
MGPYVKLYTVVGKDFFLISLSSLKTPVXX

SEQ ID NO: 57539 - protein, 30 aa, Artificial Sequence
  Cyclic GFR-binding peptide
  MOD_RES (1)..(1): Xaa is C or S
XSKVIMPYVKLIKPTKGILFFISLSSLDQS

SEQ ID NO: 57540 - protein, 31 aa, Artificial Sequence
  Cyclic GFR-binding peptide
  MOD_RES (1)..(1): Xaa is C or S
XSKVVMPYVKLVKPTRGVLFFISLSSLDQPV

SEQ ID NO: 57541 - protein, 32 aa, Artificial Sequence
  Cyclic GFR-binding peptide
  MOD_RES (1)..(3): Xaa is C or S
XKXSKVVMPYVKLVKPTRGVLFFISLSSLDQP

SEQ ID NO: 57542 - protein, 40 aa, Artificial Sequence
  Cyclic GFR-binding peptide
  MOD_RES (2)..(34)..(35): Xaa is C or S
GXGEVVMDPYVKLVVKENEDFFLMSLSSLETPVXXAKPIK

SEQ ID NO: 57543 - protein, 26 aa, Artificial Sequence
  Cyclic GFR-binding peptide
ESVAMGPYVKLYTVVGKDFFLISLSS

SEQ ID NO: 57544 - protein, 33 aa, Artificial Sequence
  Cyclic GFR-binding peptide
  MOD_RES (1)..(3): Xaa is C or S
XGXESVAMGPYVKLYTVVGKDFFLISLSSLKTP

SEQ ID NO: 57545 - protein, 36 aa, Artificial Sequence
  Cyclic GFR-binding peptide
  MOD_RES (32)..(33): Xaa is C or S
AEVVMDPYVKLVVNNAADFFLISLSSLRAPVXXSAP

SEQ ID NO: 57546 - protein, 27 aa, Artificial Sequence
  Cyclic GFR-binding peptide
SEVVMDPYVKLVVNNASDFFLISLSSL

SEQ ID NO: 57547 - protein, 29 aa, Artificial Sequence
  Cyclic GFR-binding peptide
  MOD_RES (2)..(2): Xaa is C or S
GXAEVVMDPYVKLVVNNAADFFLISLSSL

SEQ ID NO: 57548 - protein, 35 aa, Artificial Sequence
  Cyclic GFR-binding peptide
  MOD_RES (2)..(33)..(34): Xaa is C or S
KXSRVIMPYVKLVKPKRGVLFFISLSSLAQPVXXP

SEQ ID NO: 57549 - protein, 38 aa, Artificial Sequence
  Cyclic GFR-binding peptide
  MOD_RES (32)..(33): Xaa is C or S
SRVVMNPYVKLIVNSSDDFFLVSLSSLKTPAXXPKPVY

SEQ ID NO: 57550 - protein, 33 aa, Artificial Sequence
  Cyclic GFR-binding peptide
  MOD_RES (27)..(28): Xaa is C or S
GPYVKLIIQQKDNFFLMSLSSMKTPTXXPGASG

SEQ ID NO: 57551 - protein, 28 aa, Artificial Sequence
  Cyclic GFR-binding peptide
  MOD_RES (2)..(2): Xaa is C or S
GXARVVMNPYVKLIVNSSDDFFLVSLSS

SEQ ID NO: 57552 - protein, 30 aa, Artificial Sequence
  Cyclic GFR-binding peptide
  MOD_RES (30)..(30): Xaa is C or S
VVMGPYVKLIIQQKDNFFLMSLSSMKTPTX

SEQ ID NO: 57553 - protein, 33 aa, Artificial Sequence
  Cyclic GFR-binding peptide
  MOD_RES (2)..(4): Xaa is C or S
SXGXRDVVMGPYVKLIIQQKDNFFLMSLSSMKT

SEQ ID NO: 57554 - protein, 28 aa, Artificial Sequence
  Cyclic GFR-binding peptide
KNHQLFPYVKLHQGQHPKIRFFLMSLSS

SEQ ID NO: 57555 - protein, 29 aa, Artificial Sequence
  Cyclic GFR-binding peptide
  MOD_RES (29)..(29): Xaa is C or S
VVMPYVKLVKPTRGVLFFISLSSLDQPVX

SEQ ID NO: 57556 - protein, 33 aa, Artificial Sequence
  Cyclic GFR-binding peptide
  MOD_RES (31)..(32): Xaa is C or S
SRVIMPYVKLVKPKRGVLFFISLSSLAQPVXXP

SEQ ID NO: 57557 - protein, 36 aa, Artificial Sequence
  Cyclic GFR-binding peptide
  MOD_RES (32)..(33): Xaa is C or S
AVSMGEPYVKLTPVGMDDFFLVSLSSLKTPVXXAKG

SEQ ID NO: 57558 - protein, 31 aa, Artificial Sequence
  Cyclic GFR-binding peptide
  MOD_RES (1)..(3): Xaa is C or S
XKXSKVVMPYVKLVKPTRGVLFFISLSSLDQ

SEQ ID NO: 57559 - protein, 24 aa, Artificial Sequence
  Cyclic GFR-binding peptide
DPYVKLVVKENEDFFLMSLSSLET

SEQ ID NO: 57560 - protein, 40 aa, Artificial Sequence
  Cyclic GFR-binding peptide
  MOD_RES (2)..(4)..(36)..(37): Xaa is C or S
RXGXSEVVMDPYVKLVVNNASDFFLISLSSLRTPVXXTPP

SEQ ID NO: 57561 - protein, 40 aa, Artificial Sequence
  Cyclic GFR-binding peptide
  MOD_RES (2)..(34): Xaa is C or S
GXSRVVMNPYVKLIVNSSDDFFLVSLSSLKTPAXTPKTVH

SEQ ID NO: 57562 - protein, 33 aa, Artificial Sequence
  Cyclic GFR-binding peptide
  MOD_RES (28)..(29): Xaa is C or S
IMPYVKLVKPKRGVLFFISLSSLAQPVXXPAAS

SEQ ID NO: 57563 - protein, 29 aa, Artificial Sequence
  Cyclic GFR-binding peptide
  MOD_RES (1)..(1): Xaa is C or S
XRDVVMGPYVKLIIQQKDNFFLMSLSSMK

SEQ ID NO: 57564 - protein, 33 aa, Artificial Sequence
  Cyclic GFR-binding peptide
  MOD_RES (31)..(32): Xaa is C or S
RVVMNPYVKLIVNSSDDFFLVSLSSLKTPAXXP

SEQ ID NO: 57565 - protein, 34 aa, Artificial Sequence
  Cyclic GFR-binding peptide
  MOD_RES (1)..(3): Xaa is C or S
XGXSRVVMNPYVKLIVNSSDDFFLVSLSSLKTPA

SEQ ID NO: 57566 - protein, 38 aa, Artificial Sequence
  Cyclic GFR-binding peptide
  MOD_RES (2)..(4)..(35)..(36): Xaa is C or S
SXKXSKVVMPYVKLVKPTRGVLFFISLSSLDQPVXXPS

SEQ ID NO: 57567 - protein, 38 aa, Artificial Sequence
  Cyclic GFR-binding peptide
  MOD_RES (1)..(32)..(33): Xaa is C or S
XEEVIMPYVKLLLVRGNDFFLMSLSSTKVPAXXTSPVR

SEQ ID NO: 57568 - protein, 30 aa, Artificial Sequence
  Cyclic GFR-binding peptide
  MOD_RES (1)..(3): Xaa is C or S
XAXSEVTMNPYVKLVVNKNEDFFLISLSSM

SEQ ID NO: 57569 - protein, 31 aa, Artificial Sequence
  Cyclic GFR-binding peptide
  MOD_RES (1)..(3): Xaa is C or S
XGXAEVVMDPYVKLVVNNAADFFLISLSSLR

SEQ ID NO: 57570 - protein, 36 aa, Artificial Sequence
  Cyclic GFR-binding peptide
  MOD_RES (1)..(3)..(35)..(36): Xaa is C or S
XGXAEVVMDPYVKLVVNNAADFFLISLSSLRAPVXX

SEQ ID NO: 57571 - protein, 35 aa, Artificial Sequence
  Cyclic GFR-binding peptide
  MOD_RES (31)..(31): Xaa is C or S
QLFPYVKLHQGQHPKIRFFLMSLSSEETPVXELGE

SEQ ID NO: 57572 - protein, 23 aa, Artificial Sequence
  Cyclic GFR-binding peptide
PYVKLIVNSSDDFFLVSLSSLKT

SEQ ID NO: 57573 - protein, 36 aa, Artificial Sequence
  Cyclic GFR-binding peptide
  MOD_RES (31)..(32): Xaa is C or S
VSMGEPYVKLTPVGMDDFFLVSLSSLKTPVXXAKGV

SEQ ID NO: 57574 - protein, 30 aa, Artificial Sequence
  Cyclic GFR-binding peptide
  MOD_RES (26)..(27): Xaa is C or S
PYVKLVVNNAADFFLISLSSLRAPVXXSAP

SEQ ID NO: 57575 - protein, 33 aa, Artificial Sequence
  Cyclic GFR-binding peptide
  MOD_RES (31)..(32): Xaa is C or S
EVVMDPYVKLVVNNASDFFLISLSSLRTPVXXT

SEQ ID NO: 57576 - protein, 29 aa, Artificial Sequence
  Cyclic GFR-binding peptide
  MOD_RES (29)..(29): Xaa is C or S
VIMPYVKLLLVRGNDFFLMSLSSTKVPAX

SEQ ID NO: 57577 - protein, 33 aa, Artificial Sequence
  Cyclic GFR-binding peptide
  MOD_RES (30)..(31): Xaa is C or S
VVMDPYVKLVVNNAADFFLISLSSLRAPVXXSA

SEQ ID NO: 57578 - protein, 44 aa, Artificial Sequence
  Cyclic GFR-binding peptide
  MOD_RES (2)..(4)..(38): Xaa is C or S
RXEXKNHQLFPYVKLHQGQHPKIRFFLMSLSSEETPVXELGEDN

SEQ ID NO: 57579 - protein, 31 aa, Artificial Sequence
  Cyclic GFR-binding peptide
  MOD_RES (2)..(2): Xaa is C or S
GXEAVSMGEPYVKLTPVGMDDFFLVSLSSLK

SEQ ID NO: 57580 - protein, 37 aa, Artificial Sequence
  Cyclic GFR-binding peptide
  MOD_RES (33)..(33): Xaa is C or S
NHQLFPYVKLHQGQHPKIRFFLMSLSSEETPVXELGE

SEQ ID NO: 57581 - protein, 31 aa, Artificial Sequence
  Cyclic GFR-binding peptide
ELRPYVKLLKPKKRVYEFFLVSLSSHHVRSP

SEQ ID NO: 57582 - protein, 41 aa, Artificial Sequence
  Cyclic GFR-binding peptide
  MOD_RES (1)..(3)..(35)..(36): Xaa is C or S
XGXAEVVMDPYVKLVVNNAADFFLISLSSLRAPVXXSAPAA

SEQ ID NO: 57583 - protein, 38 aa, Artificial Sequence
  Cyclic GFR-binding peptide
  MOD_RES (2)..(35)..(36): Xaa is C or S
GXEAVSMGEPYVKLTPVGMDDFFLVSLSSLKTPVXXAK

SEQ ID NO: 57584 - protein, 23 aa, Artificial Sequence
  Cyclic GFR-binding peptide
VMNPYVKLIVNNSSDFFLVSLSS

SEQ ID NO: 57585 - protein, 26 aa, Artificial Sequence
  Cyclic GFR-binding peptide
HQLFPYVKLHQGQHPKIRFFLMSLSS

SEQ ID NO: 57586 - protein, 33 aa, Artificial Sequence
  Cyclic GFR-binding peptide
  MOD_RES (32)..(32): Xaa is C or S
SRVVMNPYVKLIVNSSDDFFLVSLSSLKTPAXT

SEQ ID NO: 57587 - protein, 32 aa, Artificial Sequence
  Cyclic GFR-binding peptide
  MOD_RES (2)..(2): Xaa is C or S
KXSKVIMPYVKLIKPTKGILFFISLSSLDQSV

SEQ ID NO: 57588 - protein, 34 aa, Artificial Sequence
  Cyclic GFR-binding peptide
  MOD_RES (33)..(34): Xaa is C or S
EAVSMGEPYVKLTPVGMDDFFLVSLSSLKTPVXX

SEQ ID NO: 57589 - protein, 34 aa, Artificial Sequence
  Cyclic GFR-binding peptide
  MOD_RES (1)..(3): Xaa is C or S
XGXRDVVMGPYVKLIIQQKDNFFLMSLSSMKTPT

SEQ ID NO: 57590 - protein, 31 aa, Artificial Sequence
  Cyclic GFR-binding peptide
  MOD_RES (26)..(27): Xaa is C or S
PYVKLVKPTRGVLFFISLSSLDQPVXXPSAS

SEQ ID NO: 57591 - protein, 30 aa, Artificial Sequence
  Cyclic GFR-binding peptide
HQLFPYVKLHQGQHPKIRFFLMSLSSEETP

SEQ ID NO: 57592 - protein, 32 aa, Artificial Sequence
  Cyclic GFR-binding peptide
  MOD_RES (2)..(2): Xaa is C or S
AXELHEELRPYVKLLKPKKRVYEFFLVSLSSH

SEQ ID NO: 57593 - protein, 38 aa, Artificial Sequence
  Cyclic GFR-binding peptide
  MOD_RES (2)..(34)..(35): Xaa is C or S
GXARVVMNPYVKLIVNSSDDFFLVSLSSLQTPAXXPKP

SEQ ID NO: 57594 - protein, 39 aa, Artificial Sequence
  Cyclic GFR-binding peptide
  MOD_RES (2)..(4)..(35)..(36): Xaa is C or S
SXKXSKVIMPYVKLIKPTKGILFFISLSSLDQSVXXPSA

SEQ ID NO: 57595 - protein, 23 aa, Artificial Sequence
  Cyclic GFR-binding peptide
MPYVKLIKPTKGILFFISLSSLD

SEQ ID NO: 57596 - protein, 38 aa, Artificial Sequence
  Cyclic GFR-binding peptide
  MOD_RES (2)..(34)..(35): Xaa is C or S
AXSEVTMNPYVKLVVNKNEDFFLISLSSMKEPVXXPEP

SEQ ID NO: 57597 - protein, 34 aa, Artificial Sequence
  Cyclic GFR-binding peptide
  MOD_RES (2)..(34): Xaa is C or S
AXSEVTMNPYVKLVVNKNEDFFLISLSSMKEPVX

SEQ ID NO: 57598 - protein, 39 aa, Artificial Sequence
  Cyclic GFR-binding peptide
  MOD_RES (1)..(3)..(34)..(35): Xaa is C or S
XKXSKVIMPYVKLIKPTKGILFFISLSSLDQSVXXPSAS

SEQ ID NO: 57599 - protein, 29 aa, Artificial Sequence
  Cyclic GFR-binding peptide
  MOD_RES (2)..(2): Xaa is C or S
AXSEVTMNPYVKLVVNKNEDFFLISLSSM

SEQ ID NO: 57600 - protein, 37 aa, Artificial Sequence
  Cyclic GFR-binding peptide
  MOD_RES (2)..(4)..(36)..(37): Xaa is C or S
RXGXSEVVMDPYVKLVVNNASDFFLISLSSLRTPVXX

SEQ ID NO: 57601 - protein, 38 aa, Artificial Sequence
  Cyclic GFR-binding peptide
  MOD_RES (1)..(34)..(35): Xaa is C or S
XEAVSMGEPYVKLTPVGMDDFFLVSLSSLKTPVXXAKG

SEQ ID NO: 57602 - protein, 37 aa, Artificial Sequence
  Cyclic GFR-binding peptide
  MOD_RES (2)..(33)..(34): Xaa is C or S
GXEEVIMPYVKLLLVRGNDFFLMSLSSTKVPAXXTSP

SEQ ID NO: 57603 - protein, 39 aa, Artificial Sequence
  Cyclic GFR-binding peptide
  MOD_RES (2)..(34)..(35): Xaa is C or S
GXARVVMNPYVKLIVNSSDDFFLVSLSSLQTPAXXPKPV

SEQ ID NO: 57604 - protein, 29 aa, Artificial Sequence
  Cyclic GFR-binding peptide
RDVVMGPYVKLIIQQKDNFFLMSLSSMKT

SEQ ID NO: 57605 - protein, 41 aa, Artificial Sequence
  Cyclic GFR-binding peptide
  MOD_RES (2)..(4)..(41): Xaa is C or S
AXAXELHEELRPYVKLLKPKKRVYEFFLVSLSSHHVRSPQX

SEQ ID NO: 57606 - protein, 24 aa, Artificial Sequence
  Cyclic GFR-binding peptide
MGPYVKLYTVVGKDFFLISLSSLK

SEQ ID NO: 57607 - protein, 31 aa, Artificial Sequence
  Cyclic GFR-binding peptide
  MOD_RES (30)..(31): Xaa is C or S
VVMDPYVKLVVNNASDFFLISLSSLRTPVXX

SEQ ID NO: 57608 - protein, 30 aa, Artificial Sequence
  Cyclic GFR-binding peptide
EVVMDPYVKLVVNNASDFFLISLSSLRTPV

SEQ ID NO: 57609 - protein, 23 aa, Artificial Sequence
  Cyclic GFR-binding peptide
PYVKLVVNNAADFFLISLSSLRA

SEQ ID NO: 57610 - protein, 34 aa, Artificial Sequence
  Cyclic GFR-binding peptide
  MOD_RES (29)..(30): Xaa is C or S
VMNPYVKLIVNSSDDFFLVSLSSLQTPAXXPKPV

SEQ ID NO: 57611 - protein, 31 aa, Artificial Sequence
  Cyclic GFR-binding peptide
AVSMGEPYVKLTPVGMDDFFLVSLSSLKTPV

SEQ ID NO: 57612 - protein, 29 aa, Artificial Sequence
  Cyclic GFR-binding peptide
ELHEELRPYVKLLKPKKRVYEFFLVSLSS

SEQ ID NO: 57613 - protein, 30 aa, Artificial Sequence
  Cyclic GFR-binding peptide
  MOD_RES (2)..(4): Xaa is C or S
RXGXGEVVMEPYVKLVVKDYEDFFLMSLSS

SEQ ID NO: 57614 - protein, 25 aa, Artificial Sequence
  Cyclic GFR-binding peptide
PYVKLIVNSSDDFFLVSLSSLKTPA

SEQ ID NO: 57615 - protein, 37 aa, Artificial Sequence
  Cyclic GFR-binding peptide
  MOD_RES (1)..(35): Xaa is C or S
XKNHQLFPYVKLHQGQHPKIRFFLMSLSSEETPVXEL

SEQ ID NO: 57616 - protein, 26 aa, Artificial Sequence
  Cyclic GFR-binding peptide
DVVMGPYVKLIIQQKDNFFLMSLSSM

SEQ ID NO: 57617 - protein, 24 aa, Artificial Sequence
  Cyclic GFR-binding peptide
PYVKLHQGQHPKIRFFLMSLSSEE

SEQ ID NO: 57618 - protein, 28 aa, Artificial Sequence
  Cyclic GFR-binding peptide
RDVVMGPYVKLIIQQKDNFFLMSLSSMK

SEQ ID NO: 57619 - protein, 40 aa, Artificial Sequence
  Cyclic GFR-binding peptide
  MOD_RES (1)..(3)..(35)..(36): Xaa is C or S
XGXGEVVMDPYVKLVVKENEDFFLMSLSSLETPVXXAKPI

SEQ ID NO: 57620 - protein, 29 aa, Artificial Sequence
  Cyclic GFR-binding peptide
VAMGPYVKLYTVVGKDFFLISLSSLKTPV

SEQ ID NO: 57621 - protein, 37 aa, Artificial Sequence
  Cyclic GFR-binding peptide
  MOD_RES (2)..(34)..(35): Xaa is C or S
GXSRVVMNPYVKLIVNSSDDFFLVSLSSLKTPAXXPK

SEQ ID NO: 57622 - protein, 34 aa, Artificial Sequence
  Cyclic GFR-binding peptide
  MOD_RES (1)..(33): Xaa is C or S
XSRVVMNPYVKLIVNSSDDFFLVSLSSLKTPAXT

SEQ ID NO: 57623 - protein, 33 aa, Artificial Sequence
  Cyclic GFR-binding peptide
  MOD_RES (1)..(3): Xaa is C or S
XGXAEVVMDPYVKLVVNNAADFFLISLSSLRAP

SEQ ID NO: 57624 - protein, 22 aa, Artificial Sequence
  Cyclic GFR-binding peptide
PYVKLIIQQKDNFFLMSLSSMK

SEQ ID NO: 57625 - protein, 28 aa, Artificial Sequence
  Cyclic GFR-binding peptide
  MOD_RES (2)..(2): Xaa is C or S
KXSKVVMPYVKLVKPTRGVLFFISLSSL

SEQ ID NO: 57626 - protein, 36 aa, Artificial Sequence
  Cyclic GFR-binding peptide
  MOD_RES (30)..(31): Xaa is C or S
VVMGPYVKLIIQQKDNFFLMSLSSMKTPTXXPGASG

SEQ ID NO: 57627 - protein, 34 aa, Artificial Sequence
  Cyclic GFR-binding peptide
  MOD_RES (2)..(33)..(34): Xaa is C or S
GXEEVIMPYVKLLLVRGNDFFLMSLSSTKVPAXX

SEQ ID NO: 57628 - protein, 32 aa, Artificial Sequence
  Cyclic GFR-binding peptide
  MOD_RES (1)..(1): Xaa is C or S
XAEVVMDPYVKLVVNNAADFFLISLSSLRAPV

SEQ ID NO: 57629 - protein, 26 aa, Artificial Sequence
  Cyclic GFR-binding peptide
RPYVKLLKPKKRVYEFFLVSLSSHHV

SEQ ID NO: 57630 - protein, 27 aa, Artificial Sequence
  Cyclic GFR-binding peptide
GEPYVKLTPVGMDDFFLVSLSSLKTPV

SEQ ID NO: 57631 - protein, 40 aa, Artificial Sequence
  Cyclic GFR-binding peptide
  MOD_RES (2)..(36): Xaa is C or S
EXKNHQLFPYVKLHQGQHPKIRFFLMSLSSEETPVXELGE

SEQ ID NO: 57632 - protein, 36 aa, Artificial Sequence
  Cyclic GFR-binding peptide
  MOD_RES (2)..(36): Xaa is C or S
EXKNHQLFPYVKLHQGQHPKIRFFLMSLSSEETPVX

SEQ ID NO: 57633 - protein, 38 aa, Artificial Sequence
  Cyclic GFR-binding peptide
  MOD_RES (33)..(34): Xaa is C or S
EAVSMGEPYVKLTPVGMDDFFLVSLSSLKTPVXXAKGV

SEQ ID NO: 57634 - protein, 29 aa, Artificial Sequence
  Cyclic GFR-binding peptide
KVVMNPYVKLIVNNSSDFFLVSLSSLKTP

SEQ ID NO: 57635 - protein, 34 aa, Artificial Sequence
  Cyclic GFR-binding peptide
  MOD_RES (2)..(33)..(34): Xaa is C or S
KXSKVIMPYVKLIKPTKGILFFISLSSLDQSVXX

SEQ ID NO: 57636 - protein, 42 aa, Artificial Sequence
  Cyclic GFR-binding peptide
  MOD_RES (2)..(39): Xaa is C or S
AXELHEELRPYVKLLKPKKRVYEFFLVSLSSHHVRSPQXKVS

SEQ ID NO: 57637 - protein, 31 aa, Artificial Sequence
  Cyclic GFR-binding peptide
  MOD_RES (31)..(31): Xaa is C or S
RPYVKLLKPKKRVYEFFLVSLSSHHVRSPQX

SEQ ID NO: 57638 - protein, 31 aa, Artificial Sequence
  Cyclic GFR-binding peptide
  MOD_RES (1)..(3): Xaa is C or S
XGXEAVSMGEPYVKLTPVGMDDFFLVSLSSL

SEQ ID NO: 57639 - protein, 41 aa, Artificial Sequence
  Cyclic GFR-binding peptide
  MOD_RES (1)..(3)..(35)..(36): Xaa is C or S
XGXSRVVMNPYVKLIVNSSDDFFLVSLSSLKTPAXXPKPVY

SEQ ID NO: 57640 - protein, 26 aa, Artificial Sequence
  Cyclic GFR-binding peptide
MPYVKLVKPTRGVLFFISLSSLDQPV

SEQ ID NO: 57641 - protein, 38 aa, Artificial Sequence
  Cyclic GFR-binding peptide
  MOD_RES (2)..(36): Xaa is C or S
EXKNHQLFPYVKLHQGQHPKIRFFLMSLSSEETPVXEL

SEQ ID NO: 57642 - protein, 38 aa, Artificial Sequence
  Cyclic GFR-binding peptide
  MOD_RES (1)..(32)..(33): Xaa is C or S
XSKVIMPYVKLIKPTKGILFFISLSSLDQSVXXPSASA

SEQ ID NO: 57643 - protein, 27 aa, Artificial Sequence
  Cyclic GFR-binding peptide
  MOD_RES (27)..(27): Xaa is C or S
MPYVKLIKPTKGILFFISLSSLDQSVX

SEQ ID NO: 57644 - protein, 39 aa, Artificial Sequence
  Cyclic GFR-binding peptide
  MOD_RES (1)..(33)..(34): Xaa is C or S
XSRVVMNPYVKLIVNSSDDFFLVSLSSLKTPAXXPKPVH

SEQ ID NO: 57645 - protein, 30 aa, Artificial Sequence
  Cyclic GFR-binding peptide
  MOD_RES (2)..(4): Xaa is C or S
RXGXESVAMGPYVKLYTVVGKDFFLISLSS

SEQ ID NO: 57646 - protein, 31 aa, Artificial Sequence
  Cyclic GFR-binding peptide
  MOD_RES (29)..(29): Xaa is C or S
FPYVKLHQGQHPKIRFFLMSLSSEETPVXEL

SEQ ID NO: 57647 - protein, 31 aa, Artificial Sequence
  Cyclic GFR-binding peptide
  MOD_RES (30)..(31): Xaa is C or S
KVVMPYVKLVKPTRGVLFFISLSSLDQPVXX

SEQ ID NO: 57648 - protein, 39 aa, Artificial Sequence
  Cyclic GFR-binding peptide
  MOD_RES (1)..(3)..(35)..(36): Xaa is C or S
XGXAEVVMDPYVKLVVNNAADFFLISLSSLRAPVXXSAP

SEQ ID NO: 57649 - protein, 38 aa, Artificial Sequence
  Cyclic GFR-binding peptide
  MOD_RES (1)..(3)..(34)..(35): Xaa is C or S
XKXSKVVMPYVKLVKPTRGVLFFISLSSLDQPVXXPSA

SEQ ID NO: 57650 - protein, 39 aa, Artificial Sequence
  Cyclic GFR-binding peptide
  MOD_RES (1)..(3)..(34)..(35): Xaa is C or S
XKXSKVVMPYVKLVKPTRGVLFFISLSSLDQPVXXPSAS

SEQ ID NO: 57651 - protein, 35 aa, Artificial Sequence
  Cyclic GFR-binding peptide
  MOD_RES (2)..(4): Xaa is C or S
SXGXRDVVMGPYVKLIIQQKDNFFLMSLSSMKTPT

SEQ ID NO: 57652 - protein, 33 aa, Artificial Sequence
  Cyclic GFR-binding peptide
LHEELRPYVKLLKPKKRVYEFFLVSLSSHHVRS

SEQ ID NO: 57653 - protein, 37 aa, Artificial Sequence
  Cyclic GFR-binding peptide
  MOD_RES (2)..(34)..(35): Xaa is C or S
GXAEVVMDPYVKLVVNNAADFFLISLSSLRAPVXXSA

SEQ ID NO: 57654 - protein, 31 aa, Artificial Sequence
  Cyclic GFR-binding peptide
  MOD_RES (28)..(29): Xaa is C or S
MDPYVKLVVNNAADFFLISLSSLRAPVXXSA

SEQ ID NO: 57655 - protein, 28 aa, Artificial Sequence
  Cyclic GFR-binding peptide
  MOD_RES (27)..(28): Xaa is C or S
MPYVKLLLVRGNDFFLMSLSSTKVPAXX

SEQ ID NO: 57656 - protein, 30 aa, Artificial Sequence
  Cyclic GFR-binding peptide
SVAMGPYVKLYTVVGKDFFLISLSSLKTPV

SEQ ID NO: 57657 - protein, 30 aa, Artificial Sequence
  Cyclic GFR-binding peptide
  MOD_RES (2)..(2): Xaa is C or S
KXSRVIMPYVKLVKPKRGVLFFISLSSLAQ

SEQ ID NO: 57658 - protein, 23 aa, Artificial Sequence
  Cyclic GFR-binding peptide
VMPYVKLVKPTRGVLFFISLSSL

SEQ ID NO: 57659 - protein, 29 aa, Artificial Sequence
  Cyclic GFR-binding peptide
  MOD_RES (29)..(29): Xaa is C or S
TMNPYVKLVVNKNEDFFLISLSSMKEPVX

SEQ ID NO: 57660 - protein, 36 aa, Artificial Sequence
  Cyclic GFR-binding peptide
  MOD_RES (30)..(31): Xaa is C or S
VVMNPYVKLIVNSSDDFFLVSLSSLKTPAXXPKPVH

SEQ ID NO: 57661 - protein, 23 aa, Artificial Sequence
  Cyclic GFR-binding peptide
DPYVKLVVKENEDFFLMSLSSLE

SEQ ID NO: 57662 - protein, 26 aa, Artificial Sequence
  Cyclic GFR-binding peptide
VVMDPYVKLVVKENEDFFLMSLSSLE

SEQ ID NO: 57663 - protein, 38 aa, Artificial Sequence
  Cyclic GFR-binding peptide
  MOD_RES (35)..(35): Xaa is C or S
HEELRPYVKLLKPKKRVYEFFLVSLSSHHVRSPQXKVS

SEQ ID NO: 57664 - protein, 31 aa, Artificial Sequence
  Cyclic GFR-binding peptide
  MOD_RES (27)..(28): Xaa is C or S
MPYVKLVKPKRGVLFFISLSSLAQPVXXPAA

SEQ ID NO: 57665 - protein, 36 aa, Artificial Sequence
  Cyclic GFR-binding peptide
  MOD_RES (1)..(32)..(33): Xaa is C or S
XSKVIMPYVKLIKPTKGILFFISLSSLDQSVXXPSA

SEQ ID NO: 57666 - protein, 37 aa, Artificial Sequence
  Cyclic GFR-binding peptide
  MOD_RES (32)..(33): Xaa is C or S
ESVAMGPYVKLYTVVGKDFFLISLSSLKTPVXXAKSA

SEQ ID NO: 57667 - protein, 31 aa, Artificial Sequence
  Cyclic GFR-binding peptide
  MOD_RES (2)..(2): Xaa is C or S
GXEEVIMPYVKLLLVRGNDFFLMSLSSTKVP

SEQ ID NO: 57668 - protein, 37 aa, Artificial Sequence
  Cyclic GFR-binding peptide
  MOD_RES (2)..(4)..(35)..(36): Xaa is C or S
LXGXEEVIMPYVKLLLVRGNDFFLMSLSSTKVPAXXT

SEQ ID NO: 57669 - protein, 33 aa, Artificial Sequence
  Cyclic GFR-binding peptide
  MOD_RES (1)..(3): Xaa is C or S
XAXSEVTMNPYVKLVVNKNEDFFLISLSSMKEP

SEQ ID NO: 57670 - protein, 33 aa, Artificial Sequence
  Cyclic GFR-binding peptide
  MOD_RES (31)..(32): Xaa is C or S
RVVMNPYVKLIVNSSDDFFLVSLSSLQTPAXXP

SEQ ID NO: 57671 - protein, 41 aa, Artificial Sequence
  Cyclic GFR-binding peptide
  MOD_RES (1)..(38): Xaa is C or S
XELHEELRPYVKLLKPKKRVYEFFLVSLSSHHVRSPQXKVS

SEQ ID NO: 57672 - protein, 37 aa, Artificial Sequence
  Cyclic GFR-binding peptide
  MOD_RES (2)..(4)..(35)..(36): Xaa is C or S
SXKXSKVVMPYVKLVKPTRGVLFFISLSSLDQPVXXP

SEQ ID NO: 57673 - protein, 32 aa, Artificial Sequence
  Cyclic GFR-binding peptide
  MOD_RES (1)..(3): Xaa is C or S
XKXSKVIMPYVKLIKPTKGILFFISLSSLDQS

SEQ ID NO: 57674 - protein, 42 aa, Artificial Sequence
  Cyclic GFR-binding peptide
  MOD_RES (2)..(4)..(36): Xaa is C or S
HXGXSRVVMNPYVKLIVNSSDDFFLVSLSSLKTPAXTPKTVH

SEQ ID NO: 57675 - protein, 32 aa, Artificial Sequence
  Cyclic GFR-binding peptide
  MOD_RES (1)..(3): Xaa is C or S
XGXEAVSMGEPYVKLTPVGMDDFFLVSLSSLK

SEQ ID NO: 57676 - protein, 32 aa, Artificial Sequence
  Cyclic GFR-binding peptide
  MOD_RES (30)..(31): Xaa is C or S
VVMDPYVKLVVKENEDFFLMSLSSLETPVXXA

SEQ ID NO: 57677 - protein, 32 aa, Artificial Sequence
  Cyclic GFR-binding peptide
  MOD_RES (30)..(31): Xaa is C or S
RVIMPYVKLVKPKRGVLFFISLSSLAQPVXXP

SEQ ID NO: 57678 - protein, 27 aa, Artificial Sequence
  Cyclic GFR-binding peptide
IMPYVKLVKPKRGVLFFISLSSLAQPV

SEQ ID NO: 57679 - protein, 30 aa, Artificial Sequence
  Cyclic GFR-binding peptide
  MOD_RES (27)..(28): Xaa is C or S
NPYVKLIVNSSDDFFLVSLSSLKTPAXXPK

SEQ ID NO: 57680 - protein, 34 aa, Artificial Sequence
  Cyclic GFR-binding peptide
  MOD_RES (29)..(30): Xaa is C or S
VVMPYVKLVKPTRGVLFFISLSSLDQPVXXPSAS

SEQ ID NO: 57681 - protein, 29 aa, Artificial Sequence
  Cyclic GFR-binding peptide
VVMNPYVKLIVNSSDDFFLVSLSSLQTPA

SEQ ID NO: 57682 - protein, 32 aa, Artificial Sequence
  Cyclic GFR-binding peptide
  MOD_RES (27)..(28): Xaa is C or S
MPYVKLVKPKRGVLFFISLSSLAQPVXXPAAS

SEQ ID NO: 57683 - protein, 34 aa, Artificial Sequence
  Cyclic GFR-binding peptide
  MOD_RES (1)..(33)..(34): Xaa is C or S
XARVVMNPYVKLIVNSSDDFFLVSLSSLQTPAXX

SEQ ID NO: 57684 - protein, 31 aa, Artificial Sequence
  Cyclic GFR-binding peptide
  MOD_RES (27)..(28): Xaa is C or S
GPYVKLYTVVGKDFFLISLSSLKTPVXXAKS

SEQ ID NO: 57685 - protein, 39 aa, Artificial Sequence
  Cyclic GFR-binding peptide
  MOD_RES (2)..(4)..(35)..(36): Xaa is C or S
LXGXEEVIMPYVKLLLVRGNDFFLMSLSSTKVPAXXTSP

SEQ ID NO: 57686 - protein, 32 aa, Artificial Sequence
  Cyclic GFR-binding peptide
  MOD_RES (29)..(30): Xaa is C or S
VMGPYVKLIIQQKDNFFLMSLSSMKTPTXXPG

SEQ ID NO: 57687 - protein, 35 aa, Artificial Sequence
  Cyclic GFR-binding peptide
  MOD_RES (1)..(33)..(34): Xaa is C or S
XESVAMGPYVKLYTVVGKDFFLISLSSLKTPVXXA

SEQ ID NO: 57688 - protein, 33 aa, Artificial Sequence
  Cyclic GFR-binding peptide
  MOD_RES (31)..(31): Xaa is C or S
RPYVKLLKPKKRVYEFFLVSLSSHHVRSPQXKV

SEQ ID NO: 57689 - protein, 36 aa, Artificial Sequence
  Cyclic GFR-binding peptide
  MOD_RES (31)..(32): Xaa is C or S
EVVMDPYVKLVVNNASDFFLISLSSLRTPVXXTPPT

SEQ ID NO: 57690 - protein, 27 aa, Artificial Sequence
  Cyclic GFR-binding peptide
VMNPYVKLIVNNSSDFFLVSLSSLKTP

SEQ ID NO: 57691 - protein, 36 aa, Artificial Sequence
  Cyclic GFR-binding peptide
  MOD_RES (1)..(33): Xaa is C or S
XSRVVMNPYVKLIVNSSDDFFLVSLSSLKTPAXTPK

SEQ ID NO: 57692 - protein, 35 aa, Artificial Sequence
  Cyclic GFR-binding peptide
  MOD_RES (2)..(4): Xaa is C or S
AXAXELHEELRPYVKLLKPKKRVYEFFLVSLSSHH

SEQ ID NO: 57693 - protein, 31 aa, Artificial Sequence
  Cyclic GFR-binding peptide
  MOD_RES (1)..(1): Xaa is C or S
XARVVMNPYVKLIVNSSDDFFLVSLSSLQTP

SEQ ID NO: 57694 - protein, 27 aa, Artificial Sequence
  Cyclic GFR-binding peptide
  MOD_RES (1)..(1): Xaa is C or S
XGEVVMDPYVKLVVKENEDFFLMSLSS

SEQ ID NO: 57695 - protein, 36 aa, Artificial Sequence
  Cyclic GFR-binding peptide
  MOD_RES (1)..(32)..(33): Xaa is C or S
XEEVIMPYVKLLLVRGNDFFLMSLSSTKVPAXXTSP

SEQ ID NO: 57696 - protein, 31 aa, Artificial Sequence
  Cyclic GFR-binding peptide
  MOD_RES (29)..(30): Xaa is C or S
VMDPYVKLVVKENEDFFLMSLSSLETPVXXA

SEQ ID NO: 57697 - protein, 31 aa, Artificial Sequence
  Cyclic GFR-binding peptide
  MOD_RES (31)..(31): Xaa is C or S
DVVMGPYVKLIIQQKDNFFLMSLSSMKTPTX

SEQ ID NO: 57698 - protein, 41 aa, Artificial Sequence
  Cyclic GFR-binding peptide
  MOD_RES (2)..(4)..(35)..(36): Xaa is C or S
LXGXEEVIMPYVKLLLVRGNDFFLMSLSSTKVPAXXTSPVR

SEQ ID NO: 57699 - protein, 34 aa, Artificial Sequence
  Cyclic GFR-binding peptide
  MOD_RES (2)..(4): Xaa is C or S
HXGXAKVVMNPYVKLIVNNSSDFFLVSLSSLKTP

SEQ ID NO: 57700 - protein, 31 aa, Artificial Sequence
  Cyclic GFR-binding peptide
SEVVMDPYVKLVVNNASDFFLISLSSLRTPV

SEQ ID NO: 57701 - protein, 36 aa, Artificial Sequence
  Cyclic GFR-binding peptide
  MOD_RES (31)..(32): Xaa is C or S
SVAMGPYVKLYTVVGKDFFLISLSSLKTPVXXAKSA

SEQ ID NO: 57702 - protein, 22 aa, Artificial Sequence
  Cyclic GFR-binding peptide
GPYVKLIIQQKDNFFLMSLSSM

SEQ ID NO: 57703 - protein, 34 aa, Artificial Sequence
  Cyclic GFR-binding peptide
  MOD_RES (2)..(4): Xaa is C or S
SXKXSRVIMPYVKLVKPKRGVLFFISLSSLAQPV

SEQ ID NO: 57704 - protein, 30 aa, Artificial Sequence
  Cyclic GFR-binding peptide
  MOD_RES (28)..(29): Xaa is C or S
MNPYVKLIVNSSDDFFLVSLSSLKTPAXXP

SEQ ID NO: 57705 - protein, 31 aa, Artificial Sequence
  Cyclic GFR-binding peptide
  MOD_RES (2)..(2): Xaa is C or S
GXESVAMGPYVKLYTVVGKDFFLISLSSLKT

SEQ ID NO: 57706 - protein, 30 aa, Artificial Sequence
  Cyclic GFR-binding peptide
NHQLFPYVKLHQGQHPKIRFFLMSLSSEET

SEQ ID NO: 57707 - protein, 32 aa, Artificial Sequence
  Cyclic GFR-binding peptide
  MOD_RES (2)..(2): Xaa is C or S
GXARVVMNPYVKLIVNSSDDFFLVSLSSLQTP

SEQ ID NO: 57708 - protein, 40 aa, Artificial Sequence
  Cyclic GFR-binding peptide
  MOD_RES (2)..(4)..(35)..(36): Xaa is C or S
SXKXSKVVMPYVKLVKPTRGVLFFISLSSLDQPVXXPSAS

SEQ ID NO: 57709 - protein, 33 aa, Artificial Sequence
  Cyclic GFR-binding peptide
  MOD_RES (28)..(29): Xaa is C or S
MGPYVKLYTVVGKDFFLISLSSLKTPVXXAKSA

SEQ ID NO: 57710 - protein, 34 aa, Artificial Sequence
  Cyclic GFR-binding peptide
  MOD_RES (1)..(3): Xaa is C or S
XGXESVAMGPYVKLYTVVGKDFFLISLSSLKTPV

SEQ ID NO: 57711 - protein, 38 aa, Artificial Sequence
  Cyclic GFR-binding peptide
  MOD_RES (2)..(34): Xaa is C or S
GXSRVVMNPYVKLIVNSSDDFFLVSLSSLKTPAXTPKT

SEQ ID NO: 57712 - protein, 32 aa, Artificial Sequence
  Cyclic GFR-binding peptide
NHQLFPYVKLHQGQHPKIRFFLMSLSSEETPV

SEQ ID NO: 57713 - protein, 41 aa, Artificial Sequence
  Cyclic GFR-binding peptide
  MOD_RES (1)..(3)..(35)..(36): Xaa is C or S
XGXARVVMNPYVKLIVNSSDDFFLVSLSSLQTPAXXPKPVT

SEQ ID NO: 57714 - protein, 39 aa, Artificial Sequence
  Cyclic GFR-binding peptide
  MOD_RES (2)..(4)..(36)..(37): Xaa is C or S
HXGXARVVMNPYVKLIVNSSDDFFLVSLSSLQTPAXXPK

SEQ ID NO: 57715 - protein, 28 aa, Artificial Sequence
  Cyclic GFR-binding peptide
  MOD_RES (27)..(28): Xaa is C or S
NPYVKLIVNSSDDFFLVSLSSLKTPAXX

SEQ ID NO: 57716 - protein, 33 aa, Artificial Sequence
  Cyclic GFR-binding peptide
  MOD_RES (1)..(33): Xaa is C or S
XARVVMNPYVKLIVNSSDDFFLVSLSSLQTPAX

SEQ ID NO: 57717 - protein, 27 aa, Artificial Sequence
  Cyclic GFR-binding peptide
HQLFPYVKLHQGQHPKIRFFLMSLSSE

SEQ ID NO: 57718 - protein, 30 aa, Artificial Sequence
  Cyclic GFR-binding peptide
  MOD_RES (29)..(30): Xaa is C or S
AMGPYVKLYTVVGKDFFLISLSSLKTPVXX

SEQ ID NO: 57719 - protein, 23 aa, Artificial Sequence
  Cyclic GFR-binding peptide
PYVKLVKPTRGVLFFISLSSLDQ

SEQ ID NO: 57720 - protein, 29 aa, Artificial Sequence
  Cyclic GFR-binding peptide
LHEELRPYVKLLKPKKRVYEFFLVSLSSH

SEQ ID NO: 57721 - protein, 28 aa, Artificial Sequence
  Cyclic GFR-binding peptide
  MOD_RES (27)..(28): Xaa is C or S
GPYVKLIIQQKDNFFLMSLSSMKTPTXX

SEQ ID NO: 57722 - protein, 37 aa, Artificial Sequence
  Cyclic GFR-binding peptide
  MOD_RES (32)..(32): Xaa is C or S
SRVVMNPYVKLIVNSSDDFFLVSLSSLKTPAXTPKTV

SEQ ID NO: 57723 - protein, 41 aa, Artificial Sequence
  Cyclic GFR-binding peptide
  MOD_RES (2)..(4)..(36)..(37): Xaa is C or S
RXGXGEVVMDPYVKLVVKENEDFFLMSLSSLETPVXXAKPI

SEQ ID NO: 57724 - protein, 34 aa, Artificial Sequence
  Cyclic GFR-binding peptide
  MOD_RES (29)..(30): Xaa is C or S
VIMPYVKLIKPTKGILFFISLSSLDQSVXXPSAS

SEQ ID NO: 57725 - protein, 25 aa, Artificial Sequence
  Cyclic GFR-binding peptide
MDPYVKLVVNNAADFFLISLSSLRA

SEQ ID NO: 57726 - protein, 30 aa, Artificial Sequence
  Cyclic GFR-binding peptide
LRPYVKLLKPKKRVYEFFLVSLSSHHVRSP

SEQ ID NO: 57727 - protein, 34 aa, Artificial Sequence
  Cyclic GFR-binding peptide
  MOD_RES (34)..(34): Xaa is C or S
KNHQLFPYVKLHQGQHPKIRFFLMSLSSEETPVX

SEQ ID NO: 57728 - protein, 26 aa, Artificial Sequence
  Cyclic GFR-binding peptide
KVIMPYVKLIKPTKGILFFISLSSLD

SEQ ID NO: 57729 - protein, 37 aa, Artificial Sequence
  Cyclic GFR-binding peptide
  MOD_RES (1)..(33)..(34): Xaa is C or S
XSRVVMNPYVKLIVNSSDDFFLVSLSSLKTPAXXPKP

SEQ ID NO: 57730 - protein, 38 aa, Artificial Sequence
  Cyclic GFR-binding peptide
  MOD_RES (1)..(35): Xaa is C or S
XKNHQLFPYVKLHQGQHPKIRFFLMSLSSEETPVXELG

SEQ ID NO: 57731 - protein, 42 aa, Artificial Sequence
  Cyclic GFR-binding peptide
  MOD_RES (1)..(3)..(37): Xaa is C or S
XEXKNHQLFPYVKLHQGQHPKIRFFLMSLSSEETPVXELGED

SEQ ID NO: 57732 - protein, 26 aa, Artificial Sequence
  Cyclic GFR-binding peptide
MNPYVKLIVNNSSDFFLVSLSSLKTP

SEQ ID NO: 57733 - protein, 32 aa, Artificial Sequence
  Cyclic GFR-binding peptide
  MOD_RES (2)..(2): Xaa is C or S
GXSRVVMNPYVKLIVNSSDDFFLVSLSSLKTP

SEQ ID NO: 57734 - protein, 33 aa, Artificial Sequence
  Cyclic GFR-binding peptide
  MOD_RES (28)..(29): Xaa is C or S
MNPYVKLIVNSSDDFFLVSLSSLKTPAXXPKPV

SEQ ID NO: 57735 - protein, 20 aa, Artificial Sequence
  Cyclic GFR-binding peptide
PYVKLVKPKRGVLFFISLSS

SEQ ID NO: 57736 - protein, 41 aa, Artificial Sequence
  Cyclic GFR-binding peptide
  MOD_RES (2)..(4)..(36)..(37): Xaa is C or S
RXGXESVAMGPYVKLYTVVGKDFFLISLSSLKTPVXXAKSA

SEQ ID NO: 57737 - protein, 32 aa, Artificial Sequence
  Cyclic GFR-binding peptide
  MOD_RES (1)..(1): Xaa is C or S
XSRVVMNPYVKLIVNSSDDFFLVSLSSLKTPA

SEQ ID NO: 57738 - protein, 31 aa, Artificial Sequence
  Cyclic GFR-binding peptide
  MOD_RES (27)..(28): Xaa is C or S
MPYVKLLLVRGNDFFLMSLSSTKVPAXXTSP

SEQ ID NO: 57739 - protein, 37 aa, Artificial Sequence
  Cyclic GFR-binding peptide
  MOD_RES (1)..(33): Xaa is C or S
XSRVVMNPYVKLIVNSSDDFFLVSLSSLKTPAXTPKT

SEQ ID NO: 57740 - protein, 29 aa, Artificial Sequence
  Cyclic GFR-binding peptide
  MOD_RES (2)..(2): Xaa is C or S
GXESVAMGPYVKLYTVVGKDFFLISLSSL

SEQ ID NO: 57741 - protein, 29 aa, Artificial Sequence
  Cyclic GFR-binding peptide
AEVVMDPYVKLVVNNAADFFLISLSSLRA

SEQ ID NO: 57742 - protein, 33 aa, Artificial Sequence
  Cyclic GFR-binding peptide
  MOD_RES (2)..(4): Xaa is C or S
LXGXEEVIMPYVKLLLVRGNDFFLMSLSSTKVP

SEQ ID NO: 57743 - protein, 31 aa, Artificial Sequence
  Cyclic GFR-binding peptide
  MOD_RES (28)..(29): Xaa is C or S
MNPYVKLIVNNSSDFFLVSLSSLKTPAXXAK

SEQ ID NO: 57744 - protein, 39 aa, Artificial Sequence
  Cyclic GFR-binding peptide
  MOD_RES (2)..(4)..(35)..(36): Xaa is C or S
SXKXSRVIMPYVKLVKPKRGVLFFISLSSLAQPVXXPAA

SEQ ID NO: 57745 - protein, 31 aa, Artificial Sequence
  Cyclic GFR-binding peptide
  MOD_RES (2)..(2): Xaa is C or S
KXSKVIMPYVKLIKPTKGILFFISLSSLDQS

SEQ ID NO: 57746 - protein, 29 aa, Artificial Sequence
  Cyclic GFR-binding peptide
  MOD_RES (29)..(29): Xaa is C or S
FPYVKLHQGQHPKIRFFLMSLSSEETPVX

SEQ ID NO: 57747 - protein, 27 aa, Artificial Sequence
  Cyclic GFR-binding peptide
MDPYVKLVVNNAADFFLISLSSLRAPV

SEQ ID NO: 57748 - protein, 33 aa, Artificial Sequence
  Cyclic GFR-binding peptide
  MOD_RES (27)..(28): Xaa is C or S
NPYVKLIVNNSSDFFLVSLSSLKTPAXXAKPVA

SEQ ID NO: 57749 - protein, 31 aa, Artificial Sequence
  Cyclic GFR-binding peptide
  MOD_RES (2)..(4): Xaa is C or S
HXGXARVVMNPYVKLIVNSSDDFFLVSLSSL

SEQ ID NO: 57750 - protein, 30 aa, Artificial Sequence
  Cyclic GFR-binding peptide
  MOD_RES (30)..(30): Xaa is C or S
VVMDPYVKLVVNNAADFFLISLSSLRAPVX

SEQ ID NO: 57751 - protein, 42 aa, Artificial Sequence
  Cyclic GFR-binding peptide
  MOD_RES (2)..(4)..(36)..(37): Xaa is C or S
SXGXRDVVMGPYVKLIIQQKDNFFLMSLSSMKTPTXXPGASG

SEQ ID NO: 57752 - protein, 35 aa, Artificial Sequence
  Cyclic GFR-binding peptide
  MOD_RES (1)..(3)..(34)..(35): Xaa is C or S
XKXSRVIMPYVKLVKPKRGVLFFISLSSLAQPVXX

SEQ ID NO: 57753 - protein, 37 aa, Artificial Sequence
  Cyclic GFR-binding peptide
  MOD_RES (2)..(33)..(34): Xaa is C or S
KXSKVIMPYVKLIKPTKGILFFISLSSLDQSVXXPSA

SEQ ID NO: 57754 - protein, 28 aa, Artificial Sequence
  Cyclic GFR-binding peptide
VIMPYVKLIKPTKGILFFISLSSLDQSV

SEQ ID NO: 57755 - protein, 28 aa, Artificial Sequence
  Cyclic GFR-binding peptide
  MOD_RES (27)..(28): Xaa is C or S
DPYVKLVVNNAADFFLISLSSLRAPVXX

SEQ ID NO: 57756 - protein, 29 aa, Artificial Sequence
  Cyclic GFR-binding peptide
AKVVMNPYVKLIVNNSSDFFLVSLSSLKT

SEQ ID NO: 57757 - protein, 33 aa, Artificial Sequence
  Cyclic GFR-binding peptide
  MOD_RES (32)..(33): Xaa is C or S
SEVTMNPYVKLVVNKNEDFFLISLSSMKEPVXX

SEQ ID NO: 57758 - protein, 21 aa, Artificial Sequence
  Cyclic GFR-binding peptide
DPYVKLVVNNASDFFLISLSS

SEQ ID NO: 57759 - protein, 31 aa, Artificial Sequence
  Cyclic GFR-binding peptide
SRVVMNPYVKLIVNSSDDFFLVSLSSLKTPA

SEQ ID NO: 57760 - protein, 32 aa, Artificial Sequence
  Cyclic GFR-binding peptide
  MOD_RES (28)..(29): Xaa is C or S
GEPYVKLTPVGMDDFFLVSLSSLKTPVXXAKG

SEQ ID NO: 57761 - protein, 24 aa, Artificial Sequence
  Cyclic GFR-binding peptide
VVMNPYVKLIVNNSSDFFLVSLSS

SEQ ID NO: 57762 - protein, 34 aa, Artificial Sequence
  Cyclic GFR-binding peptide
  MOD_RES (31)..(31): Xaa is C or S
RVVMNPYVKLIVNSSDDFFLVSLSSLKTPAXTPK

SEQ ID NO: 57763 - protein, 30 aa, Artificial Sequence
  Cyclic GFR-binding peptide
  MOD_RES (27)..(28): Xaa is C or S
DPYVKLVVNNASDFFLISLSSLRTPVXXTP

SEQ ID NO: 57764 - protein, 24 aa, Artificial Sequence
  Cyclic GFR-binding peptide
MPYVKLVKPKRGVLFFISLSSLAQ

SEQ ID NO: 57765 - protein, 29 aa, Artificial Sequence
  Cyclic GFR-binding peptide
  MOD_RES (1)..(1): Xaa is C or S
XARVVMNPYVKLIVNSSDDFFLVSLSSLQ

SEQ ID NO: 57766 - protein, 24 aa, Artificial Sequence
  Cyclic GFR-binding peptide
MNPYVKLIVNNSSDFFLVSLSSLK

SEQ ID NO: 57767 - protein, 32 aa, Artificial Sequence
  Cyclic GFR-binding peptide
  MOD_RES (1)..(3): Xaa is C or S
XGXGEVVMDPYVKLVVKENEDFFLMSLSSLET

SEQ ID NO: 57768 - protein, 30 aa, Artificial Sequence
  Cyclic GFR-binding peptide
  MOD_RES (30)..(30): Xaa is C or S
VVMNPYVKLIVNSSDDFFLVSLSSLQTPAX

SEQ ID NO: 57769 - protein, 25 aa, Artificial Sequence
  Cyclic GFR-binding peptide
VAMGPYVKLYTVVGKDFFLISLSSL

SEQ ID NO: 57770 - protein, 34 aa, Artificial Sequence
  Cyclic GFR-binding peptide
  MOD_RES (28)..(29): Xaa is C or S
MNPYVKLIVNNSSDFFLVSLSSLKTPAXXAKPVA

SEQ ID NO: 57771 - protein, 33 aa, Artificial Sequence
  Cyclic GFR-binding peptide
  MOD_RES (31)..(31): Xaa is C or S
RVVMNPYVKLIVNSSDDFFLVSLSSLKTPAXTP

SEQ ID NO: 57772 - protein, 33 aa, Artificial Sequence
  Cyclic GFR-binding peptide
  MOD_RES (1)..(32)..(33): Xaa is C or S
XSRVIMPYVKLVKPKRGVLFFISLSSLAQPVXX

SEQ ID NO: 57773 - protein, 30 aa, Artificial Sequence
  Cyclic GFR-binding peptide
  MOD_RES (1)..(1): Xaa is C or S
XSRVIMPYVKLVKPKRGVLFFISLSSLAQP

SEQ ID NO: 57774 - protein, 28 aa, Artificial Sequence
  Cyclic GFR-binding peptide
  MOD_RES (1)..(1): Xaa is C or S
XSRVIMPYVKLVKPKRGVLFFISLSSLA

SEQ ID NO: 57775 - protein, 32 aa, Artificial Sequence
  Cyclic GFR-binding peptide
  MOD_RES (1)..(3): Xaa is C or S
XAXELHEELRPYVKLLKPKKRVYEFFLVSLSS

SEQ ID NO: 57776 - protein, 37 aa, Artificial Sequence
  Cyclic GFR-binding peptide
  MOD_RES (1)..(3)..(35)..(36): Xaa is C or S
XGXSEVVMDPYVKLVVNNASDFFLISLSSLRTPVXXT

SEQ ID NO: 57777 - protein, 29 aa, Artificial Sequence
  Cyclic GFR-binding peptide
  MOD_RES (1)..(1): Xaa is C or S
XSKVVMPYVKLVKPTRGVLFFISLSSLDQ

SEQ ID NO: 57778 - protein, 29 aa, Artificial Sequence
  Cyclic GFR-binding peptide
  MOD_RES (27)..(27): Xaa is C or S
NPYVKLIVNSSDDFFLVSLSSLKTPAXTP

SEQ ID NO: 57779 - protein, 35 aa, Artificial Sequence
  Cyclic GFR-binding peptide
  MOD_RES (2)..(4): Xaa is C or S
RXGXEAVSMGEPYVKLTPVGMDDFFLVSLSSLKTP

SEQ ID NO: 57780 - protein, 34 aa, Artificial Sequence
  Cyclic GFR-binding peptide
  MOD_RES (29)..(30): Xaa is C or S
VIMPYVKLLLVRGNDFFLMSLSSTKVPAXXTSPV

SEQ ID NO: 57781 - protein, 36 aa, Artificial Sequence
  Cyclic GFR-binding peptide
  MOD_RES (1)..(33)..(34): Xaa is C or S
XARVVMNPYVKLIVNSSDDFFLVSLSSLQTPAXXPK

SEQ ID NO: 57782 - protein, 35 aa, Artificial Sequence
  Cyclic GFR-binding peptide
  MOD_RES (1)..(3)..(35): Xaa is C or S
XGXGEVVMDPYVKLVVKENEDFFLMSLSSLETPVX

SEQ ID NO: 57783 - protein, 36 aa, Artificial Sequence
  Cyclic GFR-binding peptide
  MOD_RES (32)..(33): Xaa is C or S
GEVVMDPYVKLVVKENEDFFLMSLSSLETPVXXAKP

SEQ ID NO: 57784 - protein, 36 aa, Artificial Sequence
  Cyclic GFR-binding peptide
  MOD_RES (2)..(4)..(36): Xaa is C or S
RXGXSEVVMDPYVKLVVNNASDFFLISLSSLRTPVX

SEQ ID NO: 57785 - protein, 35 aa, Artificial Sequence
  Cyclic GFR-binding peptide
  MOD_RES (1)..(33)..(34): Xaa is C or S
XAEVVMDPYVKLVVNNAADFFLISLSSLRAPVXXS

SEQ ID NO: 57786 - protein, 32 aa, Artificial Sequence
  Cyclic GFR-binding peptide
  MOD_RES (31)..(32): Xaa is C or S
DVVMGPYVKLIIQQKDNFFLMSLSSMKTPTXX

SEQ ID NO: 57787 - protein, 40 aa, Artificial Sequence
  Cyclic GFR-binding peptide
  MOD_RES (1)..(3)..(35)..(36): Xaa is C or S
XGXAEVVMDPYVKLVVNNAADFFLISLSSLRAPVXXSAPA

SEQ ID NO: 57788 - protein, 26 aa, Artificial Sequence
  Cyclic GFR-binding peptide
  MOD_RES (1)..(1): Xaa is C or S
XSRVIMPYVKLVKPKRGVLFFISLSS

SEQ ID NO: 57789 - protein, 33 aa, Artificial Sequence
  Cyclic GFR-binding peptide
  MOD_RES (1)..(3): Xaa is C or S
XGXEEVIMPYVKLLLVRGNDFFLMSLSSTKVPA

SEQ ID NO: 57790 - protein, 30 aa, Artificial Sequence
  Cyclic GFR-binding peptide
  MOD_RES (27)..(28): Xaa is C or S
MPYVKLIKPTKGILFFISLSSLDQSVXXPS

SEQ ID NO: 57791 - protein, 32 aa, Artificial Sequence
  Cyclic GFR-binding peptide
  MOD_RES (2)..(4): Xaa is C or S
RXGXESVAMGPYVKLYTVVGKDFFLISLSSLK

SEQ ID NO: 57792 - protein, 35 aa, Artificial Sequence
  Cyclic GFR-binding peptide
  MOD_RES (32)..(32): Xaa is C or S
SRVVMNPYVKLIVNSSDDFFLVSLSSLKTPAXTPK

SEQ ID NO: 57793 - protein, 37 aa, Artificial Sequence
  Cyclic GFR-binding peptide
  MOD_RES (1)..(1): Xaa is C or S
XELHEELRPYVKLLKPKKRVYEFFLVSLSSHHVRSPQ

SEQ ID NO: 57794 - protein, 36 aa, Artificial Sequence
  Cyclic GFR-binding peptide
  MOD_RES (30)..(31): Xaa is C or S
KVVMPYVKLVKPTRGVLFFISLSSLDQPVXXPSASA

SEQ ID NO: 57795 - protein, 26 aa, Artificial Sequence
  Cyclic GFR-binding peptide
EVTMNPYVKLVVNKNEDFFLISLSSM

SEQ ID NO: 57796 - protein, 29 aa, Artificial Sequence
  Cyclic GFR-binding peptide
  MOD_RES (28)..(29): Xaa is C or S
MDPYVKLVVKENEDFFLMSLSSLETPVXX

SEQ ID NO: 57797 - protein, 33 aa, Artificial Sequence
  Cyclic GFR-binding peptide
  MOD_RES (31)..(32): Xaa is C or S
EEVIMPYVKLLLVRGNDFFLMSLSSTKVPAXXT

SEQ ID NO: 57798 - protein, 25 aa, Artificial Sequence
  Cyclic GFR-binding peptide
LRPYVKLLKPKKRVYEFFLVSLSSH

SEQ ID NO: 57799 - protein, 27 aa, Artificial Sequence
  Cyclic GFR-binding peptide
EVVMDPYVKLVVNNAADFFLISLSSLR

SEQ ID NO: 57800 - protein, 34 aa, Artificial Sequence
  Cyclic GFR-binding peptide
  MOD_RES (30)..(30): Xaa is C or S
PYVKLLKPKKRVYEFFLVSLSSHHVRSPQXKVSS

SEQ ID NO: 57801 - protein, 36 aa, Artificial Sequence
  Cyclic GFR-binding peptide
  MOD_RES (1)..(3)..(35)..(36): Xaa is C or S
XGXSRVVMNPYVKLIVNSSDDFFLVSLSSLKTPAXX

SEQ ID NO: 57802 - protein, 36 aa, Artificial Sequence
  Cyclic GFR-binding peptide
  MOD_RES (34)..(34): Xaa is C or S
EELRPYVKLLKPKKRVYEFFLVSLSSHHVRSPQXKV

SEQ ID NO: 57803 - protein, 29 aa, Artificial Sequence
  Cyclic GFR-binding peptide
  MOD_RES (27)..(28): Xaa is C or S
MPYVKLVKPTRGVLFFISLSSLDQPVXXP

SEQ ID NO: 57804 - protein, 37 aa, Artificial Sequence
  Cyclic GFR-binding peptide
  MOD_RES (2)..(34)..(35): Xaa is C or S
GXAKVVMNPYVKLIVNNSSDFFLVSLSSLKTPAXXAK

SEQ ID NO: 57805 - protein, 27 aa, Artificial Sequence
  Cyclic GFR-binding peptide
MNPYVKLIVNNSSDFFLVSLSSLKTPA

SEQ ID NO: 57806 - protein, 35 aa, Artificial Sequence
  Cyclic GFR-binding peptide
  MOD_RES (29)..(30): Xaa is C or S
VIMPYVKLVKPKRGVLFFISLSSLAQPVXXPAASA

SEQ ID NO: 57807 - protein, 34 aa, Artificial Sequence
  Cyclic GFR-binding peptide
  MOD_RES (2)..(4): Xaa is C or S
SXKXSKVVMPYVKLVKPTRGVLFFISLSSLDQPV

SEQ ID NO: 57808 - protein, 38 aa, Artificial Sequence
  Cyclic GFR-binding peptide
  MOD_RES (1)..(3)..(36)..(37): Xaa is C or S
XGXEAVSMGEPYVKLTPVGMDDFFLVSLSSLKTPVXXA

SEQ ID NO: 57809 - protein, 26 aa, Artificial Sequence
  Cyclic GFR-binding peptide
LFPYVKLHQGQHPKIRFFLMSLSSEE

SEQ ID NO: 57810 - protein, 31 aa, Artificial Sequence
  Cyclic GFR-binding peptide
  MOD_RES (27)..(27): Xaa is C or S
NPYVKLIVNSSDDFFLVSLSSLKTPAXTPKT

SEQ ID NO: 57811 - protein, 28 aa, Artificial Sequence
  Cyclic GFR-binding peptide
  MOD_RES (26)..(27): Xaa is C or S
PYVKLVKPKRGVLFFISLSSLAQPVXXP

SEQ ID NO: 57812 - protein, 37 aa, Artificial Sequence
  Cyclic GFR-binding peptide
  MOD_RES (1)..(3)..(35): Xaa is C or S
XGXSRVVMNPYVKLIVNSSDDFFLVSLSSLKTPAXTP

SEQ ID NO: 57813 - protein, 36 aa, Artificial Sequence
  Cyclic GFR-binding peptide
  MOD_RES (1)..(32)..(33): Xaa is C or S
XSRVIMPYVKLVKPKRGVLFFISLSSLAQPVXXPAA

SEQ ID NO: 57814 - protein, 34 aa, Artificial Sequence
  Cyclic GFR-binding peptide
  MOD_RES (31)..(32): Xaa is C or S
KVVMNPYVKLIVNNSSDFFLVSLSSLKTPAXXAK

SEQ ID NO: 57815 - protein, 24 aa, Artificial Sequence
  Cyclic GFR-binding peptide
DPYVKLVVNNAADFFLISLSSLRA

SEQ ID NO: 57816 - protein, 34 aa, Artificial Sequence
  Cyclic GFR-binding peptide
  MOD_RES (1)..(3): Xaa is C or S
XAXELHEELRPYVKLLKPKKRVYEFFLVSLSSHH

SEQ ID NO: 57817 - protein, 33 aa, Artificial Sequence
  Cyclic GFR-binding peptide
  MOD_RES (32)..(33): Xaa is C or S
SEVVMDPYVKLVVNNASDFFLISLSSLRTPVXX

SEQ ID NO: 57818 - protein, 37 aa, Artificial Sequence
  Cyclic GFR-binding peptide
  MOD_RES (2)..(34)..(35): Xaa is C or S
GXARVVMNPYVKLIVNSSDDFFLVSLSSLQTPAXXPK

SEQ ID NO: 57819 - protein, 30 aa, Artificial Sequence
  Cyclic GFR-binding peptide
  MOD_RES (26)..(26): Xaa is C or S
PYVKLIVNSSDDFFLVSLSSLKTPAXTPKT

SEQ ID NO: 57820 - protein, 44 aa, Artificial Sequence
  Cyclic GFR-binding peptide
  MOD_RES (1)..(3)..(40): Xaa is C or S
XAXELHEELRPYVKLLKPKKRVYEFFLVSLSSHHVRSPQXKVSS

SEQ ID NO: 57821 - protein, 38 aa, Artificial Sequence
  Cyclic GFR-binding peptide
  MOD_RES (2)..(4)..(36)..(37): Xaa is C or S
HXGXSRVVMNPYVKLIVNSSDDFFLVSLSSLKTPAXXP

SEQ ID NO: 57822 - protein, 28 aa, Artificial Sequence
  Cyclic GFR-binding peptide
VVMNPYVKLIVNSSDDFFLVSLSSLKTP

SEQ ID NO: 57823 - protein, 36 aa, Artificial Sequence
  Cyclic GFR-binding peptide
  MOD_RES (1)..(3)..(35)..(36): Xaa is C or S
XGXRDVVMGPYVKLIIQQKDNFFLMSLSSMKTPTXX

SEQ ID NO: 57824 - protein, 27 aa, Artificial Sequence
  Cyclic GFR-binding peptide
VVMNPYVKLIVNSSDDFFLVSLSSLKT

SEQ ID NO: 57825 - protein, 29 aa, Artificial Sequence
  Cyclic GFR-binding peptide
KNHQLFPYVKLHQGQHPKIRFFLMSLSSE

SEQ ID NO: 57826 - protein, 34 aa, Artificial Sequence
  Cyclic GFR-binding peptide
  MOD_RES (1)..(34): Xaa is C or S
XEAVSMGEPYVKLTPVGMDDFFLVSLSSLKTPVX

SEQ ID NO: 57827 - protein, 29 aa, Artificial Sequence
  Cyclic GFR-binding peptide
  MOD_RES (26)..(27): Xaa is C or S
PYVKLIVNSSDDFFLVSLSSLKTPAXXPK

SEQ ID NO: 57828 - protein, 32 aa, Artificial Sequence
  Cyclic GFR-binding peptide
  MOD_RES (27)..(28): Xaa is C or S
MPYVKLIKPTKGILFFISLSSLDQSVXXPSAS

SEQ ID NO: 57829 - protein, 36 aa, Artificial Sequence
  Cyclic GFR-binding peptide
  MOD_RES (32)..(33): Xaa is C or S
RDVVMGPYVKLIIQQKDNFFLMSLSSMKTPTXXPGA

SEQ ID NO: 57830 - protein, 34 aa, Artificial Sequence
  Cyclic GFR-binding peptide
  MOD_RES (2)..(2): Xaa is C or S
GXEAVSMGEPYVKLTPVGMDDFFLVSLSSLKTPV

SEQ ID NO: 57831 - protein, 27 aa, Artificial Sequence
  Cyclic GFR-binding peptide
NHQLFPYVKLHQGQHPKIRFFLMSLSS

SEQ ID NO: 57832 - protein, 34 aa, Artificial Sequence
  Cyclic GFR-binding peptide
  MOD_RES (30)..(31): Xaa is C or S
VVMGPYVKLIIQQKDNFFLMSLSSMKTPTXXPGA

SEQ ID NO: 57833 - protein, 40 aa, Artificial Sequence
  Cyclic GFR-binding peptide
  MOD_RES (2)..(4)..(36)..(37): Xaa is C or S
RXAXSEVTMNPYVKLVVNKNEDFFLISLSSMKEPVXXPEP

SEQ ID NO: 57834 - protein, 29 aa, Artificial Sequence
  Cyclic GFR-binding peptide
EVVMDPYVKLVVNNASDFFLISLSSLRTP

SEQ ID NO: 57835 - protein, 35 aa, Artificial Sequence
  Cyclic GFR-binding peptide
  MOD_RES (30)..(30): Xaa is C or S
VVMNPYVKLIVNSSDDFFLVSLSSLKTPAXTPKTV

SEQ ID NO: 57836 - protein, 29 aa, Artificial Sequence
  Cyclic GFR-binding peptide
VVMDPYVKLVVKENEDFFLMSLSSLETPV

SEQ ID NO: 57837 - protein, 28 aa, Artificial Sequence
  Cyclic GFR-binding peptide
ELRPYVKLLKPKKRVYEFFLVSLSSHHV

SEQ ID NO: 57838 - protein, 26 aa, Artificial Sequence
  Cyclic GFR-binding peptide
VMDPYVKLVVKENEDFFLMSLSSLET

SEQ ID NO: 57839 - protein, 29 aa, Artificial Sequence
  Cyclic GFR-binding peptide
  MOD_RES (2)..(2): Xaa is C or S
KXSKVIMPYVKLIKPTKGILFFISLSSLD

SEQ ID NO: 57840 - protein, 34 aa, Artificial Sequence
  Cyclic GFR-binding peptide
  MOD_RES (30)..(31): Xaa is C or S
RVIMPYVKLVKPKRGVLFFISLSSLAQPVXXPAA

SEQ ID NO: 57841 - protein, 33 aa, Artificial Sequence
  Cyclic GFR-binding peptide
  MOD_RES (30)..(31): Xaa is C or S
VVMDPYVKLVVNNASDFFLISLSSLRTPVXXTP

SEQ ID NO: 57842 - protein, 33 aa, Artificial Sequence
  Cyclic GFR-binding peptide
  MOD_RES (30)..(31): Xaa is C or S
KVVMPYVKLVKPTRGVLFFISLSSLDQPVXXPS

SEQ ID NO: 57843 - protein, 33 aa, Artificial Sequence
  Cyclic GFR-binding peptide
  MOD_RES (28)..(29): Xaa is C or S
MNPYVKLIVNSSDDFFLVSLSSLQTPAXXPKPV

SEQ ID NO: 57844 - protein, 26 aa, Artificial Sequence
  Cyclic GFR-binding peptide
AMGPYVKLYTVVGKDFFLISLSSLKT

SEQ ID NO: 57845 - protein, 23 aa, Artificial Sequence
  Cyclic GFR-binding peptide
VMDPYVKLVVNNASDFFLISLSS

SEQ ID NO: 57846 - protein, 31 aa, Artificial Sequence
  Cyclic GFR-binding peptide
RDVVMGPYVKLIIQQKDNFFLMSLSSMKTPT

SEQ ID NO: 57847 - protein, 27 aa, Artificial Sequence
  Cyclic GFR-binding peptide
VIMPYVKLIKPTKGILFFISLSSLDQS

SEQ ID NO: 57848 - protein, 26 aa, Artificial Sequence
  Cyclic GFR-binding peptide
VMNPYVKLIVNSSDDFFLVSLSSLQT

SEQ ID NO: 57849 - protein, 36 aa, Artificial Sequence
  Cyclic GFR-binding peptide
  MOD_RES (2)..(34)..(35): Xaa is C or S
GXSRVVMNPYVKLIVNSSDDFFLVSLSSLKTPAXXP

SEQ ID NO: 57850 - protein, 32 aa, Artificial Sequence
  Cyclic GFR-binding peptide
  MOD_RES (31)..(32): Xaa is C or S
EVVMDPYVKLVVKENEDFFLMSLSSLETPVXX

SEQ ID NO: 57851 - protein, 28 aa, Artificial Sequence
  Cyclic GFR-binding peptide
  MOD_RES (26)..(27): Xaa is C or S
PYVKLVKPTRGVLFFISLSSLDQPVXXP

SEQ ID NO: 57852 - protein, 30 aa, Artificial Sequence
  Cyclic GFR-binding peptide
RVVMNPYVKLIVNSSDDFFLVSLSSLKTPA

SEQ ID NO: 57853 - protein, 40 aa, Artificial Sequence
  Cyclic GFR-binding peptide
  MOD_RES (2)..(4)..(36)..(37): Xaa is C or S
RXGXGEVVMDPYVKLVVKENEDFFLMSLSSLETPVXXAKP

SEQ ID NO: 57854 - protein, 23 aa, Artificial Sequence
  Cyclic GFR-binding peptide
MPYVKLLLVRGNDFFLMSLSSTK

SEQ ID NO: 57855 - protein, 33 aa, Artificial Sequence
  Cyclic GFR-binding peptide
  MOD_RES (32)..(33): Xaa is C or S
ARVVMNPYVKLIVNSSDDFFLVSLSSLQTPAXX

SEQ ID NO: 57856 - protein, 30 aa, Artificial Sequence
  Cyclic GFR-binding peptide
  MOD_RES (28)..(29): Xaa is C or S
MGPYVKLIIQQKDNFFLMSLSSMKTPTXXP

SEQ ID NO: 57857 - protein, 33 aa, Artificial Sequence
  Cyclic GFR-binding peptide
  MOD_RES (30)..(31): Xaa is C or S
VVMNPYVKLIVNSSDDFFLVSLSSLQTPAXXPK

SEQ ID NO: 57858 - protein, 27 aa, Artificial Sequence
  Cyclic GFR-binding peptide
  MOD_RES (1)..(1): Xaa is C or S
XSKVVMPYVKLVKPTRGVLFFISLSSL

SEQ ID NO: 57859 - protein, 25 aa, Artificial Sequence
  Cyclic GFR-binding peptide
PYVKLLKPKKRVYEFFLVSLSSHHV

SEQ ID NO: 57860 - protein, 33 aa, Artificial Sequence
  Cyclic GFR-binding peptide
  MOD_RES (1)..(33): Xaa is C or S
XGEVVMDPYVKLVVKENEDFFLMSLSSLETPVX

SEQ ID NO: 57861 - protein, 36 aa, Artificial Sequence
  Cyclic GFR-binding peptide
  MOD_RES (32)..(33): Xaa is C or S
ESVAMGPYVKLYTVVGKDFFLISLSSLKTPVXXAKS

SEQ ID NO: 57862 - protein, 28 aa, Artificial Sequence
  Cyclic GFR-binding peptide
  MOD_RES (2)..(2): Xaa is C or S
GXAEVVMDPYVKLVVNNAADFFLISLSS

SEQ ID NO: 57863 - protein, 31 aa, Artificial Sequence
  Cyclic GFR-binding peptide
  MOD_RES (31)..(31): Xaa is C or S
KVVMNPYVKLIVNNSSDFFLVSLSSLKTPAX

SEQ ID NO: 57864 - protein, 31 aa, Artificial Sequence
  Cyclic GFR-binding peptide
  MOD_RES (30)..(31): Xaa is C or S
SMGEPYVKLTPVGMDDFFLVSLSSLKTPVXX

SEQ ID NO: 57865 - protein, 31 aa, Artificial Sequence
  Cyclic GFR-binding peptide
  MOD_RES (29)..(30): Xaa is C or S
VMGPYVKLIIQQKDNFFLMSLSSMKTPTXXP

SEQ ID NO: 57866 - protein, 40 aa, Artificial Sequence
  Cyclic GFR-binding peptide
  MOD_RES (1)..(3)..(35)..(36): Xaa is C or S
XGXARVVMNPYVKLIVNSSDDFFLVSLSSLQTPAXXPKPV

SEQ ID NO: 57867 - protein, 36 aa, Artificial Sequence
  Cyclic GFR-binding peptide
  MOD_RES (1)..(33)..(34): Xaa is C or S
XRDVVMGPYVKLIIQQKDNFFLMSLSSMKTPTXXPG

SEQ ID NO: 57868 - protein, 28 aa, Artificial Sequence
  Cyclic GFR-binding peptide
SRVVMNPYVKLIVNSSDDFFLVSLSSLK

SEQ ID NO: 57869 - protein, 29 aa, Artificial Sequence
  Cyclic GFR-binding peptide
  MOD_RES (26)..(27): Xaa is C or S
PYVKLVVNKNEDFFLISLSSMKEPVXXPE

SEQ ID NO: 57870 - protein, 28 aa, Artificial Sequence
  Cyclic GFR-binding peptide
  MOD_RES (27)..(28): Xaa is C or S
NPYVKLIVNNSSDFFLVSLSSLKTPAXX

SEQ ID NO: 57871 - protein, 31 aa, Artificial Sequence
  Cyclic GFR-binding peptide
  MOD_RES (29)..(29): Xaa is C or S
VMNPYVKLIVNSSDDFFLVSLSSLKTPAXTP

SEQ ID NO: 57872 - protein, 39 aa, Artificial Sequence
  Cyclic GFR-binding peptide
  MOD_RES (1)..(38): Xaa is C or S
XELHEELRPYVKLLKPKKRVYEFFLVSLSSHHVRSPQXK

SEQ ID NO: 57873 - protein, 30 aa, Artificial Sequence
  Cyclic GFR-binding peptide
  MOD_RES (29)..(30): Xaa is C or S
VMDPYVKLVVNNAADFFLISLSSLRAPVXX

SEQ ID NO: 57874 - protein, 25 aa, Artificial Sequence
  Cyclic GFR-binding peptide
VVMDPYVKLVVNNASDFFLISLSSL

SEQ ID NO: 57875 - protein, 32 aa, Artificial Sequence
  Cyclic GFR-binding peptide
  MOD_RES (1)..(1): Xaa is C or S
XRDVVMGPYVKLIIQQKDNFFLMSLSSMKTPT

SEQ ID NO: 57876 - protein, 34 aa, Artificial Sequence
  Cyclic GFR-binding peptide
  MOD_RES (1)..(3): Xaa is C or S
XEXKNHQLFPYVKLHQGQHPKIRFFLMSLSSEET

SEQ ID NO: 57877 - protein, 36 aa, Artificial Sequence
  Cyclic GFR-binding peptide
  MOD_RES (2)..(4): Xaa is C or S
RXGXEAVSMGEPYVKLTPVGMDDFFLVSLSSLKTPV

SEQ ID NO: 57878 - protein, 35 aa, Artificial Sequence
  Cyclic GFR-binding peptide
  MOD_RES (2)..(34)..(35): Xaa is C or S
GXSEVVMDPYVKLVVNNASDFFLISLSSLRTPVXX

SEQ ID NO: 57879 - protein, 35 aa, Artificial Sequence
  Cyclic GFR-binding peptide
  MOD_RES (30)..(31): Xaa is C or S
EVIMPYVKLLLVRGNDFFLMSLSSTKVPAXXTSPV

SEQ ID NO: 57880 - protein, 31 aa, Artificial Sequence
  Cyclic GFR-binding peptide
  MOD_RES (1)..(3): Xaa is C or S
XGXGEVVMDPYVKLVVKENEDFFLMSLSSLE

SEQ ID NO: 57881 - protein, 40 aa, Artificial Sequence
  Cyclic GFR-binding peptide
  MOD_RES (34)..(34): Xaa is C or S
KNHQLFPYVKLHQGQHPKIRFFLMSLSSEETPVXELGEDN

SEQ ID NO: 57882 - protein, 25 aa, Artificial Sequence
  Cyclic GFR-binding peptide
DPYVKLVVNNAADFFLISLSSLRAP

SEQ ID NO: 57883 - protein, 32 aa, Artificial Sequence
  Cyclic GFR-binding peptide
  MOD_RES (32)..(32): Xaa is C or S
AEVVMDPYVKLVVNNAADFFLISLSSLRAPVX

SEQ ID NO: 57884 - protein, 39 aa, Artificial Sequence
  Cyclic GFR-binding peptide
  MOD_RES (2)..(4)..(36)..(37): Xaa is C or S
RXAXSEVTMNPYVKLVVNKNEDFFLISLSSMKEPVXXPE

SEQ ID NO: 57885 - protein, 33 aa, Artificial Sequence
  Cyclic GFR-binding peptide
  MOD_RES (2)..(4): Xaa is C or S
RXGXEAVSMGEPYVKLTPVGMDDFFLVSLSSLK

SEQ ID NO: 57886 - protein, 43 aa, Artificial Sequence
  Cyclic GFR-binding peptide
  MOD_RES (1)..(3)..(37): Xaa is C or S
XEXKNHQLFPYVKLHQGQHPKIRFFLMSLSSEETPVXELGEDN

SEQ ID NO: 57887 - protein, 31 aa, Artificial Sequence
  Cyclic GFR-binding peptide
  MOD_RES (2)..(4): Xaa is C or S
HXGXAKVVMNPYVKLIVNNSSDFFLVSLSSL

SEQ ID NO: 57888 - protein, 28 aa, Artificial Sequence
  Cyclic GFR-binding peptide
  MOD_RES (27)..(28): Xaa is C or S
EPYVKLTPVGMDDFFLVSLSSLKTPVXX

SEQ ID NO: 57889 - protein, 36 aa, Artificial Sequence
  Cyclic GFR-binding peptide
  MOD_RES (1)..(33)..(34): Xaa is C or S
XAEVVMDPYVKLVVNNAADFFLISLSSLRAPVXXSA

SEQ ID NO: 57890 - protein, 23 aa, Artificial Sequence
  Cyclic GFR-binding peptide
GPYVKLIIQQKDNFFLMSLSSMK

SEQ ID NO: 57891 - protein, 32 aa, Artificial Sequence
  Cyclic GFR-binding peptide
  MOD_RES (30)..(30): Xaa is C or S
LFPYVKLHQGQHPKIRFFLMSLSSEETPVXEL

SEQ ID NO: 57892 - protein, 28 aa, Artificial Sequence
  Cyclic GFR-binding peptide
  MOD_RES (28)..(28): Xaa is C or S
MDPYVKLVVKENEDFFLMSLSSLETPVX

SEQ ID NO: 57893 - protein, 31 aa, Artificial Sequence
  Cyclic GFR-binding peptide
  MOD_RES (2)..(2): Xaa is C or S
AXELHEELRPYVKLLKPKKRVYEFFLVSLSS

SEQ ID NO: 57894 - protein, 38 aa, Artificial Sequence
  Cyclic GFR-binding peptide
  MOD_RES (2)..(4)..(38): Xaa is C or S
RXEXKNHQLFPYVKLHQGQHPKIRFFLMSLSSEETPVX

SEQ ID NO: 57895 - protein, 27 aa, Artificial Sequence
  Cyclic GFR-binding peptide
LRPYVKLLKPKKRVYEFFLVSLSSHHV

SEQ ID NO: 57896 - protein, 30 aa, Artificial Sequence
  Cyclic GFR-binding peptide
  MOD_RES (1)..(1): Xaa is C or S
XARVVMNPYVKLIVNSSDDFFLVSLSSLQT

SEQ ID NO: 57897 - protein, 26 aa, Artificial Sequence
  Cyclic GFR-binding peptide
TMNPYVKLVVNKNEDFFLISLSSMKE

SEQ ID NO: 57898 - protein, 38 aa, Artificial Sequence
  Cyclic GFR-binding peptide
  MOD_RES (1)..(33)..(34): Xaa is C or S
XARVVMNPYVKLIVNSSDDFFLVSLSSLQTPAXXPKPV

SEQ ID NO: 57899 - protein, 27 aa, Artificial Sequence
  Cyclic GFR-binding peptide
DVVMGPYVKLIIQQKDNFFLMSLSSMK

SEQ ID NO: 57900 - protein, 32 aa, Artificial Sequence
  Cyclic GFR-binding peptide
  MOD_RES (30)..(31): Xaa is C or S
VVMNPYVKLIVNSSDDFFLVSLSSLKTPAXXP

SEQ ID NO: 57901 - protein, 30 aa, Artificial Sequence
  Cyclic GFR-binding peptide
  MOD_RES (2)..(4): Xaa is C or S
RXGXGEVVMDPYVKLVVKENEDFFLMSLSS

SEQ ID NO: 57902 - protein, 31 aa, Artificial Sequence
  Cyclic GFR-binding peptide
  MOD_RES (28)..(29): Xaa is C or S
MGPYVKLIIQQKDNFFLMSLSSMKTPTXXPG

SEQ ID NO: 57903 - protein, 25 aa, Artificial Sequence
  Cyclic GFR-binding peptide
MPYVKLVKPKRGVLFFISLSSLAQP

SEQ ID NO: 57904 - protein, 26 aa, Artificial Sequence
  Cyclic GFR-binding peptide
PYVKLHQGQHPKIRFFLMSLSSEETP

SEQ ID NO: 57905 - protein, 31 aa, Artificial Sequence
  Cyclic GFR-binding peptide
  MOD_RES (31)..(31): Xaa is C or S
EVVMDPYVKLVVKENEDFFLMSLSSLETPVX

SEQ ID NO: 57906 - protein, 31 aa, Artificial Sequence
  Cyclic GFR-binding peptide
  MOD_RES (1)..(3): Xaa is C or S
XEXKNHQLFPYVKLHQGQHPKIRFFLMSLSS

SEQ ID NO: 57907 - protein, 34 aa, Artificial Sequence
  Cyclic GFR-binding peptide
  MOD_RES (2)..(34): Xaa is C or S
GXGEVVMDPYVKLVVKENEDFFLMSLSSLETPVX

SEQ ID NO: 57908 - protein, 34 aa, Artificial Sequence
  Cyclic GFR-binding peptide
  MOD_RES (28)..(29): Xaa is C or S
IMPYVKLLLVRGNDFFLMSLSSTKVPAXXTSPVR

SEQ ID NO: 57909 - protein, 39 aa, Artificial Sequence
  Cyclic GFR-binding peptide
  MOD_RES (2)..(4)..(36)..(37): Xaa is C or S
HXGXAKVVMNPYVKLIVNNSSDFFLVSLSSLKTPAXXAK

SEQ ID NO: 57910 - protein, 35 aa, Artificial Sequence
  Cyclic GFR-binding peptide
  MOD_RES (1)..(3)..(34)..(35): Xaa is C or S
XKXSKVVMPYVKLVKPTRGVLFFISLSSLDQPVXX

SEQ ID NO: 57911 - protein, 35 aa, Artificial Sequence
  Cyclic GFR-binding peptide
  MOD_RES (1)..(3)..(35): Xaa is C or S
XGXESVAMGPYVKLYTVVGKDFFLISLSSLKTPVX

SEQ ID NO: 57912 - protein, 35 aa, Artificial Sequence
  Cyclic GFR-binding peptide
  MOD_RES (31)..(32): Xaa is C or S
EVTMNPYVKLVVNKNEDFFLISLSSMKEPVXXPEP

SEQ ID NO: 57913 - protein, 23 aa, Artificial Sequence
  Cyclic GFR-binding peptide
PYVKLHQGQHPKIRFFLMSLSSE

SEQ ID NO: 57914 - protein, 23 aa, Artificial Sequence
  Cyclic GFR-binding peptide
IMPYVKLIKPTKGILFFISLSSL

SEQ ID NO: 57915 - protein, 32 aa, Artificial Sequence
  Cyclic GFR-binding peptide
  MOD_RES (2)..(4): Xaa is C or S
HXGXSRVVMNPYVKLIVNSSDDFFLVSLSSLK

SEQ ID NO: 57916 - protein, 28 aa, Artificial Sequence
  Cyclic GFR-binding peptide
  MOD_RES (1)..(1): Xaa is C or S
XGEVVMDPYVKLVVKENEDFFLMSLSSL

SEQ ID NO: 57917 - protein, 37 aa, Artificial Sequence
  Cyclic GFR-binding peptide
  MOD_RES (1)..(3)..(34)..(35): Xaa is C or S
XKXSRVIMPYVKLVKPKRGVLFFISLSSLAQPVXXPA

SEQ ID NO: 57918 - protein, 31 aa, Artificial Sequence
  Cyclic GFR-binding peptide
  MOD_RES (29)..(30): Xaa is C or S
VMDPYVKLVVNNAADFFLISLSSLRAPVXXS

SEQ ID NO: 57919 - protein, 27 aa, Artificial Sequence
  Cyclic GFR-binding peptide
  MOD_RES (1)..(1): Xaa is C or S
XAEVVMDPYVKLVVNNAADFFLISLSS

SEQ ID NO: 57920 - protein, 32 aa, Artificial Sequence
  Cyclic GFR-binding peptide
  MOD_RES (31)..(32): Xaa is C or S
SKVVMPYVKLVKPTRGVLFFISLSSLDQPVXX

SEQ ID NO: 57921 - protein, 27 aa, Artificial Sequence
  Cyclic GFR-binding peptide
  MOD_RES (1)..(1): Xaa is C or S
XRDVVMGPYVKLIIQQKDNFFLMSLSS

SEQ ID NO: 57922 - protein, 30 aa, Artificial Sequence
  Cyclic GFR-binding peptide
  MOD_RES (2)..(4): Xaa is C or S
SXKXSKVVMPYVKLVKPTRGVLFFISLSSL

SEQ ID NO: 57923 - protein, 29 aa, Artificial Sequence
  Cyclic GFR-binding peptide
  MOD_RES (2)..(4): Xaa is C or S
SXKXSKVVMPYVKLVKPTRGVLFFISLSS

SEQ ID NO: 57924 - protein, 32 aa, Artificial Sequence
  Cyclic GFR-binding peptide
  MOD_RES (2)..(4): Xaa is C or S
RXAXSEVTMNPYVKLVVNKNEDFFLISLSSMK

SEQ ID NO: 57925 - protein, 25 aa, Artificial Sequence
  Cyclic GFR-binding peptide
PYVKLIVNNSSDFFLVSLSSLKTPA

SEQ ID NO: 57926 - protein, 23 aa, Artificial Sequence
  Cyclic GFR-binding peptide
FPYVKLHQGQHPKIRFFLMSLSS

SEQ ID NO: 57927 - protein, 35 aa, Artificial Sequence
  Cyclic GFR-binding peptide
  MOD_RES (33)..(33): Xaa is C or S
ELRPYVKLLKPKKRVYEFFLVSLSSHHVRSPQXKV

SEQ ID NO: 57928 - protein, 26 aa, Artificial Sequence
  Cyclic GFR-binding peptide
VMPYVKLVKPTRGVLFFISLSSLDQP

SEQ ID NO: 57929 - protein, 35 aa, Artificial Sequence
  Cyclic GFR-binding peptide
  MOD_RES (29)..(30): Xaa is C or S
AMGPYVKLYTVVGKDFFLISLSSLKTPVXXAKSAK

SEQ ID NO: 57930 - protein, 37 aa, Artificial Sequence
  Cyclic GFR-binding peptide
  MOD_RES (32)..(33): Xaa is C or S
SRVVMNPYVKLIVNSSDDFFLVSLSSLKTPAXXPKPV

SEQ ID NO: 57931 - protein, 30 aa, Artificial Sequence
  Cyclic GFR-binding peptide
  MOD_RES (1)..(1): Xaa is C or S
XESVAMGPYVKLYTVVGKDFFLISLSSLKT

SEQ ID NO: 57932 - protein, 29 aa, Artificial Sequence
  Cyclic GFR-binding peptide
VVMDPYVKLVVNNAADFFLISLSSLRAPV

SEQ ID NO: 57933 - protein, 26 aa, Artificial Sequence
  Cyclic GFR-binding peptide
VTMNPYVKLVVNKNEDFFLISLSSMK

SEQ ID NO: 57934 - protein, 39 aa, Artificial Sequence
  Cyclic GFR-binding peptide
  MOD_RES (35)..(35): Xaa is C or S
HEELRPYVKLLKPKKRVYEFFLVSLSSHHVRSPQXKVSS

SEQ ID NO: 57935 - protein, 22 aa, Artificial Sequence
  Cyclic GFR-binding peptide
IMPYVKLVKPKRGVLFFISLSS

SEQ ID NO: 57936 - protein, 32 aa, Artificial Sequence
  Cyclic GFR-binding peptide
  MOD_RES (26)..(27): Xaa is C or S
PYVKLIVNSSDDFFLVSLSSLQTPAXXPKPVT

SEQ ID NO: 57937 - protein, 35 aa, Artificial Sequence
  Cyclic GFR-binding peptide
  MOD_RES (29)..(30): Xaa is C or S
VIMPYVKLIKPTKGILFFISLSSLDQSVXXPSASA

SEQ ID NO: 57938 - protein, 33 aa, Artificial Sequence
  Cyclic GFR-binding peptide
  MOD_RES (27)..(28): Xaa is C or S
NPYVKLIVNSSDDFFLVSLSSLQTPAXXPKPVT

SEQ ID NO: 57939 - protein, 37 aa, Artificial Sequence
  Cyclic GFR-binding peptide
  MOD_RES (1)..(32)..(33): Xaa is C or S
XEEVIMPYVKLLLVRGNDFFLMSLSSTKVPAXXTSPV

SEQ ID NO: 57940 - protein, 29 aa, Artificial Sequence
  Cyclic GFR-binding peptide
  MOD_RES (1)..(3): Xaa is C or S
XGXAKVVMNPYVKLIVNNSSDFFLVSLSS

SEQ ID NO: 57941 - protein, 31 aa, Artificial Sequence
  Cyclic GFR-binding peptide
  MOD_RES (2)..(4): Xaa is C or S
SXKXSRVIMPYVKLVKPKRGVLFFISLSSLA

SEQ ID NO: 57942 - protein, 40 aa, Artificial Sequence
  Cyclic GFR-binding peptide
  MOD_RES (1)..(3)..(35)..(36): Xaa is C or S
XGXRDVVMGPYVKLIIQQKDNFFLMSLSSMKTPTXXPGAS

SEQ ID NO: 57943 - protein, 25 aa, Artificial Sequence
  Cyclic GFR-binding peptide
EEVIMPYVKLLLVRGNDFFLMSLSS

SEQ ID NO: 57944 - protein, 38 aa, Artificial Sequence
  Cyclic GFR-binding peptide
  MOD_RES (32)..(33): Xaa is C or S
SEVVMDPYVKLVVNNASDFFLISLSSLRTPVXXTPPTS

SEQ ID NO: 57945 - protein, 32 aa, Artificial Sequence
  Cyclic GFR-binding peptide
  MOD_RES (2)..(4): Xaa is C or S
HXGXAKVVMNPYVKLIVNNSSDFFLVSLSSLK

SEQ ID NO: 57946 - protein, 40 aa, Artificial Sequence
  Cyclic GFR-binding peptide
  MOD_RES (1)..(3)..(35)..(36): Xaa is C or S
XAXSEVTMNPYVKLVVNKNEDFFLISLSSMKEPVXXPEPI

SEQ ID NO: 57947 - protein, 29 aa, Artificial Sequence
  Cyclic GFR-binding peptide
GEVVMDPYVKLVVKENEDFFLMSLSSLET

SEQ ID NO: 57948 - protein, 29 aa, Artificial Sequence
  Cyclic GFR-binding peptide
ESVAMGPYVKLYTVVGKDFFLISLSSLKT

SEQ ID NO: 57949 - protein, 25 aa, Artificial Sequence
  Cyclic GFR-binding peptide
DVVMGPYVKLIIQQKDNFFLMSLSS

SEQ ID NO: 57950 - protein, 27 aa, Artificial Sequence
  Cyclic GFR-binding peptide
VMPYVKLVKPTRGVLFFISLSSLDQPV

SEQ ID NO: 57951 - protein, 40 aa, Artificial Sequence
  Cyclic GFR-binding peptide
  MOD_RES (2)..(4)..(36)..(37): Xaa is C or S
SXGXRDVVMGPYVKLIIQQKDNFFLMSLSSMKTPTXXPGA

SEQ ID NO: 57952 - protein, 35 aa, Artificial Sequence
  Cyclic GFR-binding peptide
  MOD_RES (1)..(3): Xaa is C or S
XEXKNHQLFPYVKLHQGQHPKIRFFLMSLSSEETP

SEQ ID NO: 57953 - protein, 28 aa, Artificial Sequence
  Cyclic GFR-binding peptide
  MOD_RES (28)..(28): Xaa is C or S
IMPYVKLIKPTKGILFFISLSSLDQSVX

SEQ ID NO: 57954 - protein, 31 aa, Artificial Sequence
  Cyclic GFR-binding peptide
  MOD_RES (2)..(4): Xaa is C or S
RXGXSEVVMDPYVKLVVNNASDFFLISLSSL

SEQ ID NO: 57955 - protein, 29 aa, Artificial Sequence
  Cyclic GFR-binding peptide
VTMNPYVKLVVNKNEDFFLISLSSMKEPV

SEQ ID NO: 57956 - protein, 38 aa, Artificial Sequence
  Cyclic GFR-binding peptide
  MOD_RES (34)..(34): Xaa is C or S
EELRPYVKLLKPKKRVYEFFLVSLSSHHVRSPQXKVSS

SEQ ID NO: 57957 - protein, 40 aa, Artificial Sequence
  Cyclic GFR-binding peptide
  MOD_RES (36)..(36): Xaa is C or S
LHEELRPYVKLLKPKKRVYEFFLVSLSSHHVRSPQXKVSS

SEQ ID NO: 57958 - protein, 29 aa, Artificial Sequence
  Cyclic GFR-binding peptide
  MOD_RES (1)..(3): Xaa is C or S
XKXSKVVMPYVKLVKPTRGVLFFISLSSL

SEQ ID NO: 57959 - protein, 24 aa, Artificial Sequence
  Cyclic GFR-binding peptide
NPYVKLIVNSSDDFFLVSLSSLQT

SEQ ID NO: 57960 - protein, 33 aa, Artificial Sequence
  Cyclic GFR-binding peptide
  MOD_RES (32)..(33): Xaa is C or S
GEVVMDPYVKLVVKENEDFFLMSLSSLETPVXX

SEQ ID NO: 57961 - protein, 30 aa, Artificial Sequence
  Cyclic GFR-binding peptide
  MOD_RES (29)..(30): Xaa is C or S
VMGPYVKLIIQQKDNFFLMSLSSMKTPTXX

SEQ ID NO: 57962 - protein, 24 aa, Artificial Sequence
  Cyclic GFR-binding peptide
MGPYVKLIIQQKDNFFLMSLSSMK

SEQ ID NO: 57963 - protein, 38 aa, Artificial Sequence
  Cyclic GFR-binding peptide
  MOD_RES (1)..(3)..(35)..(36): Xaa is C or S
XGXRDVVMGPYVKLIIQQKDNFFLMSLSSMKTPTXXPG

SEQ ID NO: 57964 - protein, 25 aa, Artificial Sequence
  Cyclic GFR-binding peptide
VTMNPYVKLVVNKNEDFFLISLSSM

SEQ ID NO: 57965 - protein, 29 aa, Artificial Sequence
  Cyclic GFR-binding peptide
VSMGEPYVKLTPVGMDDFFLVSLSSLKTP

SEQ ID NO: 57966 - protein, 24 aa, Artificial Sequence
  Cyclic GFR-binding peptide
VVMDPYVKLVVNNAADFFLISLSS

SEQ ID NO: 57967 - protein, 42 aa, Artificial Sequence
  Cyclic GFR-binding peptide
  MOD_RES (1)..(3)..(40): Xaa is C or S
XAXELHEELRPYVKLLKPKKRVYEFFLVSLSSHHVRSPQXKV

SEQ ID NO: 57968 - protein, 27 aa, Artificial Sequence
  Cyclic GFR-binding peptide
  MOD_RES (26)..(27): Xaa is C or S
PYVKLIIQQKDNFFLMSLSSMKTPTXX

SEQ ID NO: 57969 - protein, 36 aa, Artificial Sequence
  Cyclic GFR-binding peptide
  MOD_RES (2)..(34)..(35): Xaa is C or S
GXSEVVMDPYVKLVVNNASDFFLISLSSLRTPVXXT

SEQ ID NO: 57970 - protein, 27 aa, Artificial Sequence
  Cyclic GFR-binding peptide
RPYVKLLKPKKRVYEFFLVSLSSHHVR

SEQ ID NO: 57971 - protein, 32 aa, Artificial Sequence
  Cyclic GFR-binding peptide
  MOD_RES (26)..(27): Xaa is C or S
PYVKLTPVGMDDFFLVSLSSLKTPVXXAKGVK

SEQ ID NO: 57972 - protein, 29 aa, Artificial Sequence
  Cyclic GFR-binding peptide
  MOD_RES (1)..(3): Xaa is C or S
XKXSKVIMPYVKLIKPTKGILFFISLSSL

SEQ ID NO: 57973 - protein, 33 aa, Artificial Sequence
  Cyclic GFR-binding peptide
  MOD_RES (30)..(30): Xaa is C or S
PYVKLLKPKKRVYEFFLVSLSSHHVRSPQXKVS

SEQ ID NO: 57974 - protein, 30 aa, Artificial Sequence
  Cyclic GFR-binding peptide
  MOD_RES (30)..(30): Xaa is C or S
VVMNPYVKLIVNNSSDFFLVSLSSLKTPAX

SEQ ID NO: 57975 - protein, 21 aa, Artificial Sequence
  Cyclic GFR-binding peptide
PYVKLYTVVGKDFFLISLSSL

SEQ ID NO: 57976 - protein, 28 aa, Artificial Sequence
  Cyclic GFR-binding peptide
  MOD_RES (1)..(1): Xaa is C or S
XSEVVMDPYVKLVVNNASDFFLISLSSL

SEQ ID NO: 57977 - protein, 28 aa, Artificial Sequence
  Cyclic GFR-binding peptide
LFPYVKLHQGQHPKIRFFLMSLSSEETP

SEQ ID NO: 57978 - protein, 26 aa, Artificial Sequence
  Cyclic GFR-binding peptide
QLFPYVKLHQGQHPKIRFFLMSLSSE

SEQ ID NO: 57979 - protein, 27 aa, Artificial Sequence
  Cyclic GFR-binding peptide
  MOD_RES (1)..(1): Xaa is C or S
XESVAMGPYVKLYTVVGKDFFLISLSS

SEQ ID NO: 57980 - protein, 33 aa, Artificial Sequence
  Cyclic GFR-binding peptide
  MOD_RES (1)..(3): Xaa is C or S
XKXSRVIMPYVKLVKPKRGVLFFISLSSLAQPV

SEQ ID NO: 57981 - protein, 31 aa, Artificial Sequence
  Cyclic GFR-binding peptide
  MOD_RES (2)..(2): Xaa is C or S
KXSRVIMPYVKLVKPKRGVLFFISLSSLAQP

SEQ ID NO: 57982 - protein, 34 aa, Artificial Sequence
  Cyclic GFR-binding peptide
  MOD_RES (30)..(30): Xaa is C or S
LFPYVKLHQGQHPKIRFFLMSLSSEETPVXELGE

SEQ ID NO: 57983 - protein, 43 aa, Artificial Sequence
  Cyclic GFR-binding peptide
  MOD_RES (1)..(3)..(40): Xaa is C or S
XAXELHEELRPYVKLLKPKKRVYEFFLVSLSSHHVRSPQXKVS

SEQ ID NO: 57984 - protein, 33 aa, Artificial Sequence
  Cyclic GFR-binding peptide
  MOD_RES (1)..(3): Xaa is C or S
XKXSKVIMPYVKLIKPTKGILFFISLSSLDQSV

SEQ ID NO: 57985 - protein, 32 aa, Artificial Sequence
  Cyclic GFR-binding peptide
  MOD_RES (28)..(29): Xaa is C or S
MNPYVKLIVNSSDDFFLVSLSSLKTPAXXPKP

SEQ ID NO: 57986 - protein, 34 aa, Artificial Sequence
  Cyclic GFR-binding peptide
  MOD_RES (28)..(29): Xaa is C or S
GEPYVKLTPVGMDDFFLVSLSSLKTPVXXAKGVK

SEQ ID NO: 57987 - protein, 39 aa, Artificial Sequence
  Cyclic GFR-binding peptide
  MOD_RES (1)..(3)..(34)..(35): Xaa is C or S
XKXSRVIMPYVKLVKPKRGVLFFISLSSLAQPVXXPAAS

SEQ ID NO: 57988 - protein, 36 aa, Artificial Sequence
  Cyclic GFR-binding peptide
  MOD_RES (2)..(34)..(35): Xaa is C or S
GXAEVVMDPYVKLVVNNAADFFLISLSSLRAPVXXS

SEQ ID NO: 57989 - protein, 26 aa, Artificial Sequence
  Cyclic GFR-binding peptide
LRPYVKLLKPKKRVYEFFLVSLSSHH

SEQ ID NO: 57990 - protein, 26 aa, Artificial Sequence
  Cyclic GFR-binding peptide
MDPYVKLVVNNAADFFLISLSSLRAP

SEQ ID NO: 57991 - protein, 29 aa, Artificial Sequence
  Cyclic GFR-binding peptide
  MOD_RES (2)..(2): Xaa is C or S
GXEEVIMPYVKLLLVRGNDFFLMSLSSTK

SEQ ID NO: 57992 - protein, 21 aa, Artificial Sequence
  Cyclic GFR-binding peptide
PYVKLIVNSSDDFFLVSLSSL

SEQ ID NO: 57993 - protein, 23 aa, Artificial Sequence
  Cyclic GFR-binding peptide
NPYVKLIVNSSDDFFLVSLSSLQ

SEQ ID NO: 57994 - protein, 28 aa, Artificial Sequence
  Cyclic GFR-binding peptide
RVVMNPYVKLIVNSSDDFFLVSLSSLKT

SEQ ID NO: 57995 - protein, 32 aa, Artificial Sequence
  Cyclic GFR-binding peptide
  MOD_RES (30)..(31): Xaa is C or S
VVMNPYVKLIVNSSDDFFLVSLSSLQTPAXXP

SEQ ID NO: 57996 - protein, 37 aa, Artificial Sequence
  Cyclic GFR-binding peptide
  MOD_RES (1)..(33)..(34): Xaa is C or S
XGEVVMDPYVKLVVKENEDFFLMSLSSLETPVXXAKP

SEQ ID NO: 57997 - protein, 39 aa, Artificial Sequence
  Cyclic GFR-binding peptide
  MOD_RES (1)..(3)..(35)..(36): Xaa is C or S
XGXGEVVMDPYVKLVVKENEDFFLMSLSSLETPVXXAKP

SEQ ID NO: 57998 - protein, 29 aa, Artificial Sequence
  Cyclic GFR-binding peptide
RVIMPYVKLVKPKRGVLFFISLSSLAQPV

SEQ ID NO: 57999 - protein, 30 aa, Artificial Sequence
  Cyclic GFR-binding peptide
  MOD_RES (2)..(2): Xaa is C or S
GXEEVIMPYVKLLLVRGNDFFLMSLSSTKV

SEQ ID NO: 58000 - protein, 33 aa, Artificial Sequence
  Cyclic GFR-binding peptide
  MOD_RES (2)..(4): Xaa is C or S
RXGXESVAMGPYVKLYTVVGKDFFLISLSSLKT

SEQ ID NO: 58001 - protein, 30 aa, Artificial Sequence
  Cyclic GFR-binding peptide
  MOD_RES (1)..(3): Xaa is C or S
XGXARVVMNPYVKLIVNSSDDFFLVSLSSL

SEQ ID NO: 58002 - protein, 33 aa, Artificial Sequence
  Cyclic GFR-binding peptide
  MOD_RES (31)..(32): Xaa is C or S
EVVMDPYVKLVVKENEDFFLMSLSSLETPVXXA

SEQ ID NO: 58003 - protein, 35 aa, Artificial Sequence
  Cyclic GFR-binding peptide
  MOD_RES (2)..(4)..(35): Xaa is C or S
SXKXSKVVMPYVKLVKPTRGVLFFISLSSLDQPVX

SEQ ID NO: 58004 - protein, 32 aa, Artificial Sequence
  Cyclic GFR-binding peptide
  MOD_RES (2)..(4): Xaa is C or S
SXGXRDVVMGPYVKLIIQQKDNFFLMSLSSMK

SEQ ID NO: 58005 - protein, 30 aa, Artificial Sequence
  Cyclic GFR-binding peptide
  MOD_RES (27)..(28): Xaa is C or S
MPYVKLLLVRGNDFFLMSLSSTKVPAXXTS

SEQ ID NO: 58006 - protein, 38 aa, Artificial Sequence
  Cyclic GFR-binding peptide
  MOD_RES (1)..(3)..(35)..(36): Xaa is C or S
XGXESVAMGPYVKLYTVVGKDFFLISLSSLKTPVXXAK

SEQ ID NO: 58007 - protein, 32 aa, Artificial Sequence
  Cyclic GFR-binding peptide
  MOD_RES (2)..(4): Xaa is C or S
HXGXARVVMNPYVKLIVNSSDDFFLVSLSSLQ

SEQ ID NO: 58008 - protein, 22 aa, Artificial Sequence
  Cyclic GFR-binding peptide
GEPYVKLTPVGMDDFFLVSLSS

SEQ ID NO: 58009 - protein, 41 aa, Artificial Sequence
  Cyclic GFR-binding peptide
  MOD_RES (1)..(35): Xaa is C or S
XKNHQLFPYVKLHQGQHPKIRFFLMSLSSEETPVXELGEDN

SEQ ID NO: 58010 - protein, 27 aa, Artificial Sequence
  Cyclic GFR-binding peptide
  MOD_RES (26)..(27): Xaa is C or S
PYVKLVVNNAADFFLISLSSLRAPVXX

SEQ ID NO: 58011 - protein, 38 aa, Artificial Sequence
  Cyclic GFR-binding peptide
  MOD_RES (2)..(33)..(34): Xaa is C or S
KXSRVIMPYVKLVKPKRGVLFFISLSSLAQPVXXPAAS

SEQ ID NO: 58012 - protein, 36 aa, Artificial Sequence
  Cyclic GFR-binding peptide
  MOD_RES (31)..(32): Xaa is C or S
SRVIMPYVKLVKPKRGVLFFISLSSLAQPVXXPAAS

SEQ ID NO: 58013 - protein, 33 aa, Artificial Sequence
  Cyclic GFR-binding peptide
  MOD_RES (32)..(33): Xaa is C or S
SRVVMNPYVKLIVNSSDDFFLVSLSSLKTPAXX

SEQ ID NO: 58014 - protein, 34 aa, Artificial Sequence
  Cyclic GFR-binding peptide
  MOD_RES (31)..(32): Xaa is C or S
RVVMNPYVKLIVNSSDDFFLVSLSSLQTPAXXPK

SEQ ID NO: 58015 - protein, 36 aa, Artificial Sequence
  Cyclic GFR-binding peptide
  MOD_RES (1)..(3)..(35)..(36): Xaa is C or S
XAXSEVTMNPYVKLVVNKNEDFFLISLSSMKEPVXX

SEQ ID NO: 58016 - protein, 33 aa, Artificial Sequence
  Cyclic GFR-binding peptide
  MOD_RES (1)..(33): Xaa is C or S
XSRVVMNPYVKLIVNSSDDFFLVSLSSLKTPAX

SEQ ID NO: 58017 - protein, 40 aa, Artificial Sequence
  Cyclic GFR-binding peptide
  MOD_RES (1)..(3)..(35)..(36): Xaa is C or S
XGXESVAMGPYVKLYTVVGKDFFLISLSSLKTPVXXAKSA

SEQ ID NO: 58018 - protein, 24 aa, Artificial Sequence
  Cyclic GFR-binding peptide
MGEPYVKLTPVGMDDFFLVSLSSL

SEQ ID NO: 58019 - protein, 31 aa, Artificial Sequence
  Cyclic GFR-binding peptide
  MOD_RES (29)..(30): Xaa is C or S
AMGPYVKLYTVVGKDFFLISLSSLKTPVXXA

SEQ ID NO: 58020 - protein, 28 aa, Artificial Sequence
  Cyclic GFR-binding peptide
  MOD_RES (26)..(27): Xaa is C or S
PYVKLVVNNASDFFLISLSSLRTPVXXT

SEQ ID NO: 58021 - protein, 29 aa, Artificial Sequence
  Cyclic GFR-binding peptide
  MOD_RES (29)..(29): Xaa is C or S
VMDPYVKLVVKENEDFFLMSLSSLETPVX

SEQ ID NO: 58022 - protein, 36 aa, Artificial Sequence
  Cyclic GFR-binding peptide
  MOD_RES (1)..(33)..(34): Xaa is C or S
XSEVVMDPYVKLVVNNASDFFLISLSSLRTPVXXTP

SEQ ID NO: 58023 - protein, 38 aa, Artificial Sequence
  Cyclic GFR-binding peptide
  MOD_RES (32)..(33): Xaa is C or S
AVSMGEPYVKLTPVGMDDFFLVSLSSLKTPVXXAKGVK

SEQ ID NO: 58024 - protein, 35 aa, Artificial Sequence
  Cyclic GFR-binding peptide
  MOD_RES (29)..(30): Xaa is C or S
TMNPYVKLVVNKNEDFFLISLSSMKEPVXXPEPIG

SEQ ID NO: 58025 - protein, 33 aa, Artificial Sequence
  Cyclic GFR-binding peptide
  MOD_RES (1)..(3): Xaa is C or S
XAXELHEELRPYVKLLKPKKRVYEFFLVSLSSH

SEQ ID NO: 58026 - protein, 32 aa, Artificial Sequence
  Cyclic GFR-binding peptide
  MOD_RES (1)..(3): Xaa is C or S
XGXARVVMNPYVKLIVNSSDDFFLVSLSSLQT

SEQ ID NO: 58027 - protein, 37 aa, Artificial Sequence
  Cyclic GFR-binding peptide
  MOD_RES (31)..(32): Xaa is C or S
EVVMDPYVKLVVKENEDFFLMSLSSLETPVXXAKPIK

SEQ ID NO: 58028 - protein, 28 aa, Artificial Sequence
  Cyclic GFR-binding peptide
HEELRPYVKLLKPKKRVYEFFLVSLSSH

SEQ ID NO: 58029 - protein, 33 aa, Artificial Sequence
  Cyclic GFR-binding peptide
  MOD_RES (28)..(29): Xaa is C or S
VMPYVKLVKPTRGVLFFISLSSLDQPVXXPSAS

SEQ ID NO: 58030 - protein, 39 aa, Artificial Sequence
  Cyclic GFR-binding peptide
  MOD_RES (1)..(33)..(34): Xaa is C or S
XRDVVMGPYVKLIIQQKDNFFLMSLSSMKTPTXXPGASG

SEQ ID NO: 58031 - protein, 25 aa, Artificial Sequence
  Cyclic GFR-binding peptide
SVAMGPYVKLYTVVGKDFFLISLSS

SEQ ID NO: 58032 - protein, 24 aa, Artificial Sequence
  Cyclic GFR-binding peptide
GPYVKLIIQQKDNFFLMSLSSMKT

SEQ ID NO: 58033 - protein, 37 aa, Artificial Sequence
  Cyclic GFR-binding peptide
  MOD_RES (32)..(33): Xaa is C or S
RDVVMGPYVKLIIQQKDNFFLMSLSSMKTPTXXPGAS

SEQ ID NO: 58034 - protein, 29 aa, Artificial Sequence
  Cyclic GFR-binding peptide
  MOD_RES (26)..(27): Xaa is C or S
PYVKLVKPKRGVLFFISLSSLAQPVXXPA

SEQ ID NO: 58035 - protein, 31 aa, Artificial Sequence
  Cyclic GFR-binding peptide
  MOD_RES (28)..(29): Xaa is C or S
MNPYVKLIVNSSDDFFLVSLSSLQTPAXXPK

SEQ ID NO: 58036 - protein, 33 aa, Artificial Sequence
  Cyclic GFR-binding peptide
  MOD_RES (1)..(3): Xaa is C or S
XGXARVVMNPYVKLIVNSSDDFFLVSLSSLQTP

SEQ ID NO: 58037 - protein, 31 aa, Artificial Sequence
  Cyclic GFR-binding peptide
  MOD_RES (1)..(1): Xaa is C or S
XSRVVMNPYVKLIVNSSDDFFLVSLSSLKTP

SEQ ID NO: 58038 - protein, 31 aa, Artificial Sequence
  Cyclic GFR-binding peptide
  MOD_RES (29)..(30): Xaa is C or S
VIMPYVKLVKPKRGVLFFISLSSLAQPVXXP

SEQ ID NO: 58039 - protein, 29 aa, Artificial Sequence
  Cyclic GFR-binding peptide
  MOD_RES (1)..(3): Xaa is C or S
XGXRDVVMGPYVKLIIQQKDNFFLMSLSS

SEQ ID NO: 58040 - protein, 31 aa, Artificial Sequence
  Cyclic GFR-binding peptide
  MOD_RES (2)..(2): Xaa is C or S
AXSEVTMNPYVKLVVNKNEDFFLISLSSMKE

SEQ ID NO: 58041 - protein, 33 aa, Artificial Sequence
  Cyclic GFR-binding peptide
  MOD_RES (32)..(33): Xaa is C or S
ESVAMGPYVKLYTVVGKDFFLISLSSLKTPVXX

SEQ ID NO: 58042 - protein, 28 aa, Artificial Sequence
  Cyclic GFR-binding peptide
ARVVMNPYVKLIVNSSDDFFLVSLSSLQ

SEQ ID NO: 58043 - protein, 32 aa, Artificial Sequence
  Cyclic GFR-binding peptide
  MOD_RES (26)..(26): Xaa is C or S
PYVKLIVNSSDDFFLVSLSSLKTPAXTPKTVH

SEQ ID NO: 58044 - protein, 42 aa, Artificial Sequence
  Cyclic GFR-binding peptide
  MOD_RES (2)..(4)..(36)..(37): Xaa is C or S
RXGXSEVVMDPYVKLVVNNASDFFLISLSSLRTPVXXTPPTS

SEQ ID NO: 58045 - protein, 33 aa, Artificial Sequence
  Cyclic GFR-binding peptide
  MOD_RES (2)..(33): Xaa is C or S
KXSRVIMPYVKLVKPKRGVLFFISLSSLAQPVX

SEQ ID NO: 58046 - protein, 23 aa, Artificial Sequence
  Cyclic GFR-binding peptide
PYVKLIIQQKDNFFLMSLSSMKT

SEQ ID NO: 58047 - protein, 32 aa, Artificial Sequence
  Cyclic GFR-binding peptide
  MOD_RES (2)..(2): Xaa is C or S
GXGEVVMDPYVKLVVKENEDFFLMSLSSLETP

SEQ ID NO: 58048 - protein, 38 aa, Artificial Sequence
  Cyclic GFR-binding peptide
  MOD_RES (2)..(4)..(36)..(37): Xaa is C or S
RXGXSEVVMDPYVKLVVNNASDFFLISLSSLRTPVXXT

SEQ ID NO: 58049 - protein, 36 aa, Artificial Sequence
  Cyclic GFR-binding peptide
  MOD_RES (1)..(3)..(34)..(35): Xaa is C or S
XGXEEVIMPYVKLLLVRGNDFFLMSLSSTKVPAXXT

SEQ ID NO: 58050 - protein, 28 aa, Artificial Sequence
  Cyclic GFR-binding peptide
VMDPYVKLVVNNAADFFLISLSSLRAPV

SEQ ID NO: 58051 - protein, 30 aa, Artificial Sequence
  Cyclic GFR-binding peptide
EELRPYVKLLKPKKRVYEFFLVSLSSHHVR

SEQ ID NO: 58052 - protein, 33 aa, Artificial Sequence
  Cyclic GFR-binding peptide
  MOD_RES (27)..(28): Xaa is C or S
EPYVKLTPVGMDDFFLVSLSSLKTPVXXAKGVK

SEQ ID NO: 58053 - protein, 25 aa, Artificial Sequence
  Cyclic GFR-binding peptide
PYVKLVVNNASDFFLISLSSLRTPV

SEQ ID NO: 58054 - protein, 41 aa, Artificial Sequence
  Cyclic GFR-binding peptide
  MOD_RES (2)..(4)..(36)..(37): Xaa is C or S
HXGXAKVVMNPYVKLIVNNSSDFFLVSLSSLKTPAXXAKPV

SEQ ID NO: 58055 - protein, 39 aa, Artificial Sequence
  Cyclic GFR-binding peptide
  MOD_RES (1)..(33)..(34): Xaa is C or S
XARVVMNPYVKLIVNSSDDFFLVSLSSLQTPAXXPKPVT

SEQ ID NO: 58056 - protein, 36 aa, Artificial Sequence
  Cyclic GFR-binding peptide
  MOD_RES (31)..(32): Xaa is C or S
SKVVMPYVKLVKPTRGVLFFISLSSLDQPVXXPSAS

SEQ ID NO: 58057 - protein, 33 aa, Artificial Sequence
  Cyclic GFR-binding peptide
  MOD_RES (28)..(29): Xaa is C or S
IMPYVKLIKPTKGILFFISLSSLDQSVXXPSAS

SEQ ID NO: 58058 - protein, 30 aa, Artificial Sequence
  Cyclic GFR-binding peptide
  MOD_RES (30)..(30): Xaa is C or S
EVIMPYVKLLLVRGNDFFLMSLSSTKVPAX

SEQ ID NO: 58059 - protein, 37 aa, Artificial Sequence
  Cyclic GFR-binding peptide
  MOD_RES (31)..(32): Xaa is C or S
SRVIMPYVKLVKPKRGVLFFISLSSLAQPVXXPAASA

SEQ ID NO: 58060 - protein, 32 aa, Artificial Sequence
  Cyclic GFR-binding peptide
  MOD_RES (2)..(4): Xaa is C or S
RXGXGEVVMEPYVKLVVKDYEDFFLMSLSSLE

SEQ ID NO: 58061 - protein, 28 aa, Artificial Sequence
  Cyclic GFR-binding peptide
AKVVMNPYVKLIVNNSSDFFLVSLSSLK

SEQ ID NO: 58062 - protein, 28 aa, Artificial Sequence
  Cyclic GFR-binding peptide
EVIMPYVKLLLVRGNDFFLMSLSSTKVP

SEQ ID NO: 58063 - protein, 32 aa, Artificial Sequence
  Cyclic GFR-binding peptide
  MOD_RES (32)..(32): Xaa is C or S
ARVVMNPYVKLIVNSSDDFFLVSLSSLQTPAX

SEQ ID NO: 58064 - protein, 39 aa, Artificial Sequence
  Cyclic GFR-binding peptide
  MOD_RES (2)..(4)..(35)..(36): Xaa is C or S
SXKXSKVVMPYVKLVKPTRGVLFFISLSSLDQPVXXPSA

SEQ ID NO: 58065 - protein, 33 aa, Artificial Sequence
  Cyclic GFR-binding peptide
  MOD_RES (1)..(3): Xaa is C or S
XGXSRVVMNPYVKLIVNSSDDFFLVSLSSLKTP

SEQ ID NO: 58066 - protein, 32 aa, Artificial Sequence
  Cyclic GFR-binding peptide
  MOD_RES (2)..(4): Xaa is C or S
RXEXKNHQLFPYVKLHQGQHPKIRFFLMSLSS

SEQ ID NO: 58067 - protein, 27 aa, Artificial Sequence
  Cyclic GFR-binding peptide
  MOD_RES (1)..(1): Xaa is C or S
XSKVIMPYVKLIKPTKGILFFISLSSL

SEQ ID NO: 58068 - protein, 26 aa, Artificial Sequence
  Cyclic GFR-binding peptide
  MOD_RES (26)..(26): Xaa is C or S
PYVKLIKPTKGILFFISLSSLDQSVX

SEQ ID NO: 58069 - protein, 27 aa, Artificial Sequence
  Cyclic GFR-binding peptide
  MOD_RES (26)..(27): Xaa is C or S
PYVKLYTVVGKDFFLISLSSLKTPVXX

SEQ ID NO: 58070 - protein, 29 aa, Artificial Sequence
  Cyclic GFR-binding peptide
  MOD_RES (1)..(1): Xaa is C or S
XSEVVMDPYVKLVVNNASDFFLISLSSLR

SEQ ID NO: 58071 - protein, 39 aa, Artificial Sequence
  Cyclic GFR-binding peptide
  MOD_RES (2)..(4)..(36)..(37): Xaa is C or S
RXGXSEVVMDPYVKLVVNNASDFFLISLSSLRTPVXXTP

SEQ ID NO: 58072 - protein, 35 aa, Artificial Sequence
  Cyclic GFR-binding peptide
  MOD_RES (31)..(32): Xaa is C or S
RVVMNPYVKLIVNSSDDFFLVSLSSLKTPAXXPKP

SEQ ID NO: 58073 - protein, 37 aa, Artificial Sequence
  Cyclic GFR-binding peptide
  MOD_RES (1)..(3)..(35)..(36): Xaa is C or S
XGXSRVVMNPYVKLIVNSSDDFFLVSLSSLKTPAXXP

SEQ ID NO: 58074 - protein, 38 aa, Artificial Sequence
  Cyclic GFR-binding peptide
  MOD_RES (1)..(33)..(34): Xaa is C or S
XGEVVMDPYVKLVVKENEDFFLMSLSSLETPVXXAKPI

SEQ ID NO: 58075 - protein, 38 aa, Artificial Sequence
  Cyclic GFR-binding peptide
  MOD_RES (2)..(34)..(35): Xaa is C or S
GXAKVVMNPYVKLIVNNSSDFFLVSLSSLKTPAXXAKP

SEQ ID NO: 58076 - protein, 31 aa, Artificial Sequence
  Cyclic GFR-binding peptide
  MOD_RES (2)..(4): Xaa is C or S
RXGXAEVVMDPYVKLVVNNAADFFLISLSSL

SEQ ID NO: 58077 - protein, 23 aa, Artificial Sequence
  Cyclic GFR-binding peptide
MGEPYVKLTPVGMDDFFLVSLSS

SEQ ID NO: 58078 - protein, 26 aa, Artificial Sequence
  Cyclic GFR-binding peptide
SKVVMPYVKLVKPTRGVLFFISLSSL

SEQ ID NO: 58079 - protein, 30 aa, Artificial Sequence
  Cyclic GFR-binding peptide
  MOD_RES (29)..(30): Xaa is C or S
VMNPYVKLIVNSSDDFFLVSLSSLQTPAXX

SEQ ID NO: 58080 - protein, 40 aa, Artificial Sequence
  Cyclic GFR-binding peptide
  MOD_RES (1)..(3)..(36)..(37): Xaa is C or S
XGXEAVSMGEPYVKLTPVGMDDFFLVSLSSLKTPVXXAKG

SEQ ID NO: 58081 - protein, 26 aa, Artificial Sequence
  Cyclic GFR-binding peptide
  MOD_RES (26)..(26): Xaa is C or S
PYVKLVKPKRGVLFFISLSSLAQPVX

SEQ ID NO: 58082 - protein, 36 aa, Artificial Sequence
  Cyclic GFR-binding peptide
  MOD_RES (1)..(3)..(34)..(35): Xaa is C or S
XKXSKVIMPYVKLIKPTKGILFFISLSSLDQSVXXP

SEQ ID NO: 58083 - protein, 36 aa, Artificial Sequence
  Cyclic GFR-binding peptide
  MOD_RES (1)..(3)..(34)..(35): Xaa is C or S
XKXSRVIMPYVKLVKPKRGVLFFISLSSLAQPVXXP

SEQ ID NO: 58084 - protein, 24 aa, Artificial Sequence
  Cyclic GFR-binding peptide
KVVMPYVKLVKPTRGVLFFISLSS

SEQ ID NO: 58085 - protein, 25 aa, Artificial Sequence
  Cyclic GFR-binding peptide
IMPYVKLLLVRGNDFFLMSLSSTKV

SEQ ID NO: 58086 - protein, 41 aa, Artificial Sequence
  Cyclic GFR-binding peptide
  MOD_RES (2)..(35)..(36): Xaa is C or S
GXEAVSMGEPYVKLTPVGMDDFFLVSLSSLKTPVXXAKGVK

SEQ ID NO: 58087 - protein, 37 aa, Artificial Sequence
  Cyclic GFR-binding peptide
  MOD_RES (2)..(4)..(36)..(37): Xaa is C or S
SXGXRDVVMGPYVKLIIQQKDNFFLMSLSSMKTPTXX

SEQ ID NO: 58088 - protein, 30 aa, Artificial Sequence
  Cyclic GFR-binding peptide
  MOD_RES (2)..(2): Xaa is C or S
KXSKVVMPYVKLVKPTRGVLFFISLSSLDQ

SEQ ID NO: 58089 - protein, 35 aa, Artificial Sequence
  Cyclic GFR-binding peptide
  MOD_RES (31)..(31): Xaa is C or S
RPYVKLLKPKKRVYEFFLVSLSSHHVRSPQXKVSS

SEQ ID NO: 58090 - protein, 37 aa, Artificial Sequence
  Cyclic GFR-binding peptide
  MOD_RES (1)..(33)..(34): Xaa is C or S
XESVAMGPYVKLYTVVGKDFFLISLSSLKTPVXXAKS

SEQ ID NO: 58091 - protein, 36 aa, Artificial Sequence
  Cyclic GFR-binding peptide
  MOD_RES (30)..(31): Xaa is C or S
SMGEPYVKLTPVGMDDFFLVSLSSLKTPVXXAKGVK

SEQ ID NO: 58092 - protein, 29 aa, Artificial Sequence
  Cyclic GFR-binding peptide
  MOD_RES (29)..(29): Xaa is C or S
VMDPYVKLVVNNAADFFLISLSSLRAPVX

SEQ ID NO: 58093 - protein, 40 aa, Artificial Sequence
  Cyclic GFR-binding peptide
  MOD_RES (1)..(3)..(34)..(35): Xaa is C or S
XKXSKVVMPYVKLVKPTRGVLFFISLSSLDQPVXXPSASA

SEQ ID NO: 58094 - protein, 30 aa, Artificial Sequence
  Cyclic GFR-binding peptide
  MOD_RES (29)..(30): Xaa is C or S
VIMPYVKLIKPTKGILFFISLSSLDQSVXX

SEQ ID NO: 58095 - protein, 38 aa, Artificial Sequence
  Cyclic GFR-binding peptide
  MOD_RES (1)..(33)..(34): Xaa is C or S
XESVAMGPYVKLYTVVGKDFFLISLSSLKTPVXXAKSA

SEQ ID NO: 58096 - protein, 27 aa, Artificial Sequence
  Cyclic GFR-binding peptide
VMNPYVKLIVNSSDDFFLVSLSSLQTP

SEQ ID NO: 58097 - protein, 30 aa, Artificial Sequence
  Cyclic GFR-binding peptide
ARVVMNPYVKLIVNSSDDFFLVSLSSLQTP

SEQ ID NO: 58098 - protein, 34 aa, Artificial Sequence
  Cyclic GFR-binding peptide
  MOD_RES (1)..(3): Xaa is C or S
XGXEAVSMGEPYVKLTPVGMDDFFLVSLSSLKTP

SEQ ID NO: 58099 - protein, 35 aa, Artificial Sequence
  Cyclic GFR-binding peptide
  MOD_RES (1)..(34)..(35): Xaa is C or S
XEAVSMGEPYVKLTPVGMDDFFLVSLSSLKTPVXX

SEQ ID NO: 58100 - protein, 23 aa, Artificial Sequence
  Cyclic GFR-binding peptide
MGPYVKLIIQQKDNFFLMSLSSM

SEQ ID NO: 58101 - protein, 26 aa, Artificial Sequence
  Cyclic GFR-binding peptide
RVIMPYVKLVKPKRGVLFFISLSSLA

SEQ ID NO: 58102 - protein, 29 aa, Artificial Sequence
  Cyclic GFR-binding peptide
  MOD_RES (1)..(1): Xaa is C or S
XESVAMGPYVKLYTVVGKDFFLISLSSLK

SEQ ID NO: 58103 - protein, 30 aa, Artificial Sequence
  Cyclic GFR-binding peptide
  MOD_RES (2)..(4): Xaa is C or S
HXGXSRVVMNPYVKLIVNSSDDFFLVSLSS

SEQ ID NO: 58104 - protein, 30 aa, Artificial Sequence
  Cyclic GFR-binding peptide
  MOD_RES (27)..(28): Xaa is C or S
MPYVKLVKPKRGVLFFISLSSLAQPVXXPA

SEQ ID NO: 58105 - protein, 20 aa, Artificial Sequence
  Cyclic GFR-binding peptide
PYVKLIKPTKGILFFISLSS

SEQ ID NO: 58106 - protein, 32 aa, Artificial Sequence
  Cyclic GFR-binding peptide
  MOD_RES (28)..(29): Xaa is C or S
IMPYVKLVKPKRGVLFFISLSSLAQPVXXPAA

SEQ ID NO: 58107 - protein, 35 aa, Artificial Sequence
  Cyclic GFR-binding peptide
  MOD_RES (32)..(33): Xaa is C or S
SRVVMNPYVKLIVNSSDDFFLVSLSSLKTPAXXPK

SEQ ID NO: 58108 - protein, 29 aa, Artificial Sequence
  Cyclic GFR-binding peptide
EELRPYVKLLKPKKRVYEFFLVSLSSHHV

SEQ ID NO: 58109 - protein, 37 aa, Artificial Sequence
  Cyclic GFR-binding peptide
  MOD_RES (1)..(32)..(33): Xaa is C or S
XSRVIMPYVKLVKPKRGVLFFISLSSLAQPVXXPAAS

SEQ ID NO: 58110 - protein, 37 aa, Artificial Sequence
  Cyclic GFR-binding peptide
  MOD_RES (2)..(4)..(35)..(36): Xaa is C or S
SXKXSKVIMPYVKLIKPTKGILFFISLSSLDQSVXXP

SEQ ID NO: 58111 - protein, 31 aa, Artificial Sequence
  Cyclic GFR-binding peptide
  MOD_RES (31)..(31): Xaa is C or S
SKVIMPYVKLIKPTKGILFFISLSSLDQSVX

SEQ ID NO: 58112 - protein, 37 aa, Artificial Sequence
  Cyclic GFR-binding peptide
  MOD_RES (2)..(4)..(36)..(37): Xaa is C or S
RXGXGEVVMDPYVKLVVKENEDFFLMSLSSLETPVXX

SEQ ID NO: 58113 - protein, 28 aa, Artificial Sequence
  Cyclic GFR-binding peptide
  MOD_RES (26)..(27): Xaa is C or S
PYVKLYTVVGKDFFLISLSSLKTPVXXA

SEQ ID NO: 58114 - protein, 30 aa, Artificial Sequence
  Cyclic GFR-binding peptide
  MOD_RES (28)..(28): Xaa is C or S
MNPYVKLIVNSSDDFFLVSLSSLKTPAXTP

SEQ ID NO: 58115 - protein, 27 aa, Artificial Sequence
  Cyclic GFR-binding peptide
SMGEPYVKLTPVGMDDFFLVSLSSLKT

SEQ ID NO: 58116 - protein, 29 aa, Artificial Sequence
  Cyclic GFR-binding peptide
  MOD_RES (28)..(29): Xaa is C or S
IMPYVKLIKPTKGILFFISLSSLDQSVXX

SEQ ID NO: 58117 - protein, 32 aa, Artificial Sequence
  Cyclic GFR-binding peptide
  MOD_RES (31)..(32): Xaa is C or S
EEVIMPYVKLLLVRGNDFFLMSLSSTKVPAXX

SEQ ID NO: 58118 - protein, 34 aa, Artificial Sequence
  Cyclic GFR-binding peptide
  MOD_RES (2)..(34): Xaa is C or S
GXSRVVMNPYVKLIVNSSDDFFLVSLSSLKTPAX

SEQ ID NO: 58119 - protein, 31 aa, Artificial Sequence
  Cyclic GFR-binding peptide
  MOD_RES (31)..(31): Xaa is C or S
SRVIMPYVKLVKPKRGVLFFISLSSLAQPVX

SEQ ID NO: 58120 - protein, 32 aa, Artificial Sequence
  Cyclic GFR-binding peptide
  MOD_RES (26)..(27): Xaa is C or S
PYVKLVVKENEDFFLMSLSSLETPVXXAKPIK

SEQ ID NO: 58121 - protein, 38 aa, Artificial Sequence
  Cyclic GFR-binding peptide
  MOD_RES (2)..(33)..(34): Xaa is C or S
GXEEVIMPYVKLLLVRGNDFFLMSLSSTKVPAXXTSPV

SEQ ID NO: 58122 - protein, 34 aa, Artificial Sequence
  Cyclic GFR-binding peptide
  MOD_RES (29)..(30): Xaa is C or S
VIMPYVKLVKPKRGVLFFISLSSLAQPVXXPAAS

SEQ ID NO: 58123 - protein, 33 aa, Artificial Sequence
  Cyclic GFR-binding peptide
  MOD_RES (1)..(1): Xaa is C or S
XKNHQLFPYVKLHQGQHPKIRFFLMSLSSEETP

SEQ ID NO: 58124 - protein, 28 aa, Artificial Sequence
  Cyclic GFR-binding peptide
MGEPYVKLTPVGMDDFFLVSLSSLKTPV

SEQ ID NO: 58125 - protein, 31 aa, Artificial Sequence
  Cyclic GFR-binding peptide
  MOD_RES (31)..(31): Xaa is C or S
RVVMNPYVKLIVNSSDDFFLVSLSSLKTPAX

SEQ ID NO: 58126 - protein, 29 aa, Artificial Sequence
  Cyclic GFR-binding peptide
  MOD_RES (1)..(1): Xaa is C or S
XAKVVMNPYVKLIVNNSSDFFLVSLSSLK

SEQ ID NO: 58127 - protein, 33 aa, Artificial Sequence
  Cyclic GFR-binding peptide
  MOD_RES (2)..(4): Xaa is C or S
RXGXAEVVMDPYVKLVVNNAADFFLISLSSLRA

SEQ ID NO: 58128 - protein, 34 aa, Artificial Sequence
  Cyclic GFR-binding peptide
  MOD_RES (32)..(33): Xaa is C or S
AKVVMNPYVKLIVNNSSDFFLVSLSSLKTPAXXA

SEQ ID NO: 58129 - protein, 34 aa, Artificial Sequence
  Cyclic GFR-binding peptide
  MOD_RES (32)..(32): Xaa is C or S
LRPYVKLLKPKKRVYEFFLVSLSSHHVRSPQXKV

SEQ ID NO: 58130 - protein, 33 aa, Artificial Sequence
  Cyclic GFR-binding peptide
  MOD_RES (29)..(30): Xaa is C or S
VMDPYVKLVVNNAADFFLISLSSLRAPVXXSAP

SEQ ID NO: 58131 - protein, 32 aa, Artificial Sequence
  Cyclic GFR-binding peptide
  MOD_RES (1)..(3): Xaa is C or S
XGXAKVVMNPYVKLIVNNSSDFFLVSLSSLKT

SEQ ID NO: 58132 - protein, 27 aa, Artificial Sequence
  Cyclic GFR-binding peptide
  MOD_RES (1)..(1): Xaa is C or S
XSRVVMNPYVKLIVNSSDDFFLVSLSS

SEQ ID NO: 58133 - protein, 41 aa, Artificial Sequence
  Cyclic GFR-binding peptide
  MOD_RES (2)..(4)..(36)..(37): Xaa is C or S
HXGXARVVMNPYVKLIVNSSDDFFLVSLSSLQTPAXXPKPV

SEQ ID NO: 58134 - protein, 28 aa, Artificial Sequence
  Cyclic GFR-binding peptide
PYVKLLKPKKRVYEFFLVSLSSHHVRSP

SEQ ID NO: 58135 - protein, 38 aa, Artificial Sequence
  Cyclic GFR-binding peptide
  MOD_RES (32)..(33): Xaa is C or S
SRVVMNPYVKLIVNSSDDFFLVSLSSLKTPAXXPKPVH

SEQ ID NO: 58136 - protein, 28 aa, Artificial Sequence
  Cyclic GFR-binding peptide
LHEELRPYVKLLKPKKRVYEFFLVSLSS

SEQ ID NO: 58137 - protein, 27 aa, Artificial Sequence
  Cyclic GFR-binding peptide
  MOD_RES (1)..(1): Xaa is C or S
XSRVIMPYVKLVKPKRGVLFFISLSSL

SEQ ID NO: 58138 - protein, 33 aa, Artificial Sequence
  Cyclic GFR-binding peptide
  MOD_RES (27)..(28): Xaa is C or S
MPYVKLVKPKRGVLFFISLSSLAQPVXXPAASA

SEQ ID NO: 58139 - protein, 30 aa, Artificial Sequence
  Cyclic GFR-binding peptide
  MOD_RES (30)..(30): Xaa is C or S
VVMNPYVKLIVNSSDDFFLVSLSSLKTPAX

SEQ ID NO: 58140 - protein, 21 aa, Artificial Sequence
  Cyclic GFR-binding peptide
PYVKLTPVGMDDFFLVSLSSL

SEQ ID NO: 58141 - protein, 20 aa, Artificial Sequence
  Cyclic GFR-binding peptide
PYVKLVVNNASDFFLISLSS

SEQ ID NO: 58142 - protein, 24 aa, Artificial Sequence
  Cyclic GFR-binding peptide
KVIMPYVKLIKPTKGILFFISLSS

SEQ ID NO: 58143 - protein, 26 aa, Artificial Sequence
  Cyclic GFR-binding peptide
VMGPYVKLIIQQKDNFFLMSLSSMKT

SEQ ID NO: 58144 - protein, 29 aa, Artificial Sequence
  Cyclic GFR-binding peptide
  MOD_RES (28)..(29): Xaa is C or S
VMPYVKLVKPTRGVLFFISLSSLDQPVXX

SEQ ID NO: 58145 - protein, 33 aa, Artificial Sequence
  Cyclic GFR-binding peptide
  MOD_RES (28)..(28): Xaa is C or S
PYVKLHQGQHPKIRFFLMSLSSEETPVXELGED

SEQ ID NO: 58146 - protein, 35 aa, Artificial Sequence
  Cyclic GFR-binding peptide
  MOD_RES (34)..(34): Xaa is C or S
KNHQLFPYVKLHQGQHPKIRFFLMSLSSEETPVXE

SEQ ID NO: 58147 - protein, 25 aa, Artificial Sequence
  Cyclic GFR-binding peptide
PYVKLVVNNAADFFLISLSSLRAPV

SEQ ID NO: 58148 - protein, 23 aa, Artificial Sequence
  Cyclic GFR-binding peptide
GPYVKLYTVVGKDFFLISLSSLK

SEQ ID NO: 58149 - protein, 24 aa, Artificial Sequence
  Cyclic GFR-binding peptide
VTMNPYVKLVVNKNEDFFLISLSS

SEQ ID NO: 58150 - protein, 23 aa, Artificial Sequence
  Cyclic GFR-binding peptide
AMGPYVKLYTVVGKDFFLISLSS

SEQ ID NO: 58151 - protein, 29 aa, Artificial Sequence
  Cyclic GFR-binding peptide
  MOD_RES (26)..(27): Xaa is C or S
PYVKLIIQQKDNFFLMSLSSMKTPTXXPG

SEQ ID NO: 58152 - protein, 28 aa, Artificial Sequence
  Cyclic GFR-binding peptide
KVIMPYVKLIKPTKGILFFISLSSLDQS

SEQ ID NO: 58153 - protein, 38 aa, Artificial Sequence
  Cyclic GFR-binding peptide
  MOD_RES (2)..(4)..(36)..(37): Xaa is C or S
RXGXESVAMGPYVKLYTVVGKDFFLISLSSLKTPVXXA

SEQ ID NO: 58154 - protein, 32 aa, Artificial Sequence
  Cyclic GFR-binding peptide
  MOD_RES (1)..(3): Xaa is C or S
XGXSRVVMNPYVKLIVNSSDDFFLVSLSSLKT

SEQ ID NO: 58155 - protein, 34 aa, Artificial Sequence
  Cyclic GFR-binding peptide
  MOD_RES (2)..(34): Xaa is C or S
GXESVAMGPYVKLYTVVGKDFFLISLSSLKTPVX

SEQ ID NO: 58156 - protein, 34 aa, Artificial Sequence
  Cyclic GFR-binding peptide
  MOD_RES (1)..(3)..(34): Xaa is C or S
XKXSKVVMPYVKLVKPTRGVLFFISLSSLDQPVX

SEQ ID NO: 58157 - protein, 28 aa, Artificial Sequence
  Cyclic GFR-binding peptide
VSMGEPYVKLTPVGMDDFFLVSLSSLKT

SEQ ID NO: 58158 - protein, 32 aa, Artificial Sequence
  Cyclic GFR-binding peptide
  MOD_RES (32)..(32): Xaa is C or S
SEVTMNPYVKLVVNKNEDFFLISLSSMKEPVX

SEQ ID NO: 58159 - protein, 35 aa, Artificial Sequence
  Cyclic GFR-binding peptide
  MOD_RES (1)..(1): Xaa is C or S
XELHEELRPYVKLLKPKKRVYEFFLVSLSSHHVRS

SEQ ID NO: 58160 - protein, 32 aa, Artificial Sequence
  Cyclic GFR-binding peptide
  MOD_RES (29)..(30): Xaa is C or S
VIMPYVKLVKPKRGVLFFISLSSLAQPVXXPA

SEQ ID NO: 58161 - protein, 31 aa, Artificial Sequence
  Cyclic GFR-binding peptide
  MOD_RES (28)..(29): Xaa is C or S
MDPYVKLVVKENEDFFLMSLSSLETPVXXAK

SEQ ID NO: 58162 - protein, 30 aa, Artificial Sequence
  Cyclic GFR-binding peptide
EAVSMGEPYVKLTPVGMDDFFLVSLSSLKT

SEQ ID NO: 58163 - protein, 29 aa, Artificial Sequence
  Cyclic GFR-binding peptide
VVMNPYVKLIVNNSSDFFLVSLSSLKTPA

SEQ ID NO: 58164 - protein, 30 aa, Artificial Sequence
  Cyclic GFR-binding peptide
  MOD_RES (30)..(30): Xaa is C or S
PYVKLLKPKKRVYEFFLVSLSSHHVRSPQX

SEQ ID NO: 58165 - protein, 28 aa, Artificial Sequence
  Cyclic GFR-binding peptide
VMDPYVKLVVKENEDFFLMSLSSLETPV

SEQ ID NO: 58166 - protein, 34 aa, Artificial Sequence
  Cyclic GFR-binding peptide
HEELRPYVKLLKPKKRVYEFFLVSLSSHHVRSPQ

SEQ ID NO: 58167 - protein, 27 aa, Artificial Sequence
  Cyclic GFR-binding peptide
GEVVMDPYVKLVVKENEDFFLMSLSSL

SEQ ID NO: 58168 - protein, 30 aa, Artificial Sequence
  Cyclic GFR-binding peptide
  MOD_RES (27)..(28): Xaa is C or S
DPYVKLVVKENEDFFLMSLSSLETPVXXAK

SEQ ID NO: 58169 - protein, 30 aa, Artificial Sequence
  Cyclic GFR-binding peptide
KVVMNPYVKLIVNNSSDFFLVSLSSLKTPA

SEQ ID NO: 58170 - protein, 30 aa, Artificial Sequence
  Cyclic GFR-binding peptide
  MOD_RES (30)..(30): Xaa is C or S
RVIMPYVKLVKPKRGVLFFISLSSLAQPVX

SEQ ID NO: 58171 - protein, 32 aa, Artificial Sequence
  Cyclic GFR-binding peptide
  MOD_RES (29)..(30): Xaa is C or S
VMDPYVKLVVNNAADFFLISLSSLRAPVXXSA

SEQ ID NO: 58172 - protein, 27 aa, Artificial Sequence
  Cyclic GFR-binding peptide
SRVIMPYVKLVKPKRGVLFFISLSSLA

SEQ ID NO: 58173 - protein, 27 aa, Artificial Sequence
  Cyclic GFR-binding peptide
  MOD_RES (1)..(1): Xaa is C or S
XAKVVMNPYVKLIVNNSSDFFLVSLSS

SEQ ID NO: 58174 - protein, 28 aa, Artificial Sequence
  Cyclic GFR-binding peptide
  MOD_RES (27)..(28): Xaa is C or S
DPYVKLVVKENEDFFLMSLSSLETPVXX

SEQ ID NO: 58175 - protein, 38 aa, Artificial Sequence
  Cyclic GFR-binding peptide
  MOD_RES (2)..(4): Xaa is C or S
AXAXELHEELRPYVKLLKPKKRVYEFFLVSLSSHHVRS

SEQ ID NO: 58176 - protein, 27 aa, Artificial Sequence
  Cyclic GFR-binding peptide
RVIMPYVKLVKPKRGVLFFISLSSLAQ

SEQ ID NO: 58177 - protein, 38 aa, Artificial Sequence
  Cyclic GFR-binding peptide
  MOD_RES (1)..(3)..(35)..(36): Xaa is C or S
XGXGEVVMDPYVKLVVKENEDFFLMSLSSLETPVXXAK

SEQ ID NO: 58178 - protein, 25 aa, Artificial Sequence
  Cyclic GFR-binding peptide
MDPYVKLVVKENEDFFLMSLSSLET

SEQ ID NO: 58179 - protein, 35 aa, Artificial Sequence
  Cyclic GFR-binding peptide
  MOD_RES (29)..(30): Xaa is C or S
VMDPYVKLVVNNASDFFLISLSSLRTPVXXTPPTS

SEQ ID NO: 58180 - protein, 25 aa, Artificial Sequence
  Cyclic GFR-binding peptide
MPYVKLIKPTKGILFFISLSSLDQS

SEQ ID NO: 58181 - protein, 37 aa, Artificial Sequence
  Cyclic GFR-binding peptide
  MOD_RES (32)..(33): Xaa is C or S
GEVVMDPYVKLVVKENEDFFLMSLSSLETPVXXAKPI

SEQ ID NO: 58182 - protein, 36 aa, Artificial Sequence
  Cyclic GFR-binding peptide
  MOD_RES (2)..(34)..(35): Xaa is C or S
GXGEVVMDPYVKLVVKENEDFFLMSLSSLETPVXXA

SEQ ID NO: 58183 - protein, 31 aa, Artificial Sequence
  Cyclic GFR-binding peptide
  MOD_RES (26)..(27): Xaa is C or S
PYVKLVVNNASDFFLISLSSLRTPVXXTPPT

SEQ ID NO: 58184 - protein, 36 aa, Artificial Sequence
  Cyclic GFR-binding peptide
  MOD_RES (1)..(33)..(34): Xaa is C or S
XSRVVMNPYVKLIVNSSDDFFLVSLSSLKTPAXXPK

SEQ ID NO: 58185 - protein, 23 aa, Artificial Sequence
  Cyclic GFR-binding peptide
VIMPYVKLIKPTKGILFFISLSS

SEQ ID NO: 58186 - protein, 30 aa, Artificial Sequence
  Cyclic GFR-binding peptide
  MOD_RES (28)..(29): Xaa is C or S
MGPYVKLYTVVGKDFFLISLSSLKTPVXXA

SEQ ID NO: 58187 - protein, 27 aa, Artificial Sequence
  Cyclic GFR-binding peptide
  MOD_RES (2)..(2): Xaa is C or S
KXSKVIMPYVKLIKPTKGILFFISLSS

SEQ ID NO: 58188 - protein, 34 aa, Artificial Sequence
  Cyclic GFR-binding peptide
  MOD_RES (2)..(34): Xaa is C or S
GXSEVVMDPYVKLVVNNASDFFLISLSSLRTPVX

SEQ ID NO: 58189 - protein, 24 aa, Artificial Sequence
  Cyclic GFR-binding peptide
GPYVKLYTVVGKDFFLISLSSLKT

SEQ ID NO: 58190 - protein, 27 aa, Artificial Sequence
  Cyclic GFR-binding peptide
  MOD_RES (26)..(27): Xaa is C or S
PYVKLTPVGMDDFFLVSLSSLKTPVXX

SEQ ID NO: 58191 - protein, 29 aa, Artificial Sequence
  Cyclic GFR-binding peptide
  MOD_RES (27)..(28): Xaa is C or S
MPYVKLVKPKRGVLFFISLSSLAQPVXXP

SEQ ID NO: 58192 - protein, 33 aa, Artificial Sequence
  Cyclic GFR-binding peptide
  MOD_RES (1)..(3): Xaa is C or S
XGXAKVVMNPYVKLIVNNSSDFFLVSLSSLKTP

SEQ ID NO: 58193 - protein, 30 aa, Artificial Sequence
  Cyclic GFR-binding peptide
  MOD_RES (28)..(29): Xaa is C or S
MNPYVKLVVNKNEDFFLISLSSMKEPVXXP

SEQ ID NO: 58194 - protein, 26 aa, Artificial Sequence
  Cyclic GFR-binding peptide
VVMDPYVKLVVNNAADFFLISLSSLR

SEQ ID NO: 58195 - protein, 26 aa, Artificial Sequence
  Cyclic GFR-binding peptide
KVVMNPYVKLIVNNSSDFFLVSLSSL

SEQ ID NO: 58196 - protein, 20 aa, Artificial Sequence
  Cyclic GFR-binding peptide
PYVKLVVKENEDFFLMSLSS

SEQ ID NO: 58197 - protein, 35 aa, Artificial Sequence
  Cyclic GFR-binding peptide
  MOD_RES (1)..(33): Xaa is C or S
XSRVVMNPYVKLIVNSSDDFFLVSLSSLKTPAXTP

SEQ ID NO: 58198 - protein, 30 aa, Artificial Sequence
  Cyclic GFR-binding peptide
ELHEELRPYVKLLKPKKRVYEFFLVSLSSH

SEQ ID NO: 58199 - protein, 26 aa, Artificial Sequence
  Cyclic GFR-binding peptide
VIMPYVKLIKPTKGILFFISLSSLDQ

SEQ ID NO: 58200 - protein, 33 aa, Artificial Sequence
  Cyclic GFR-binding peptide
  MOD_RES (27)..(28): Xaa is C or S
NPYVKLIVNSSDDFFLVSLSSLKTPAXXPKPVY

SEQ ID NO: 58201 - protein, 35 aa, Artificial Sequence
  Cyclic GFR-binding peptide
  MOD_RES (1)..(32)..(33): Xaa is C or S
XSKVVMPYVKLVKPTRGVLFFISLSSLDQPVXXPS

SEQ ID NO: 58202 - protein, 35 aa, Artificial Sequence
  Cyclic GFR-binding peptide
  MOD_RES (1)..(3)..(35): Xaa is C or S
XGXSRVVMNPYVKLIVNSSDDFFLVSLSSLKTPAX

SEQ ID NO: 58203 - protein, 27 aa, Artificial Sequence
  Cyclic GFR-binding peptide
MDPYVKLVVKENEDFFLMSLSSLETPV

SEQ ID NO: 58204 - protein, 34 aa, Artificial Sequence
  Cyclic GFR-binding peptide
  MOD_RES (2)..(34): Xaa is C or S
GXAEVVMDPYVKLVVNNAADFFLISLSSLRAPVX

SEQ ID NO: 58205 - protein, 35 aa, Artificial Sequence
  Cyclic GFR-binding peptide
  MOD_RES (32)..(33): Xaa is C or S
ARVVMNPYVKLIVNSSDDFFLVSLSSLQTPAXXPK

SEQ ID NO: 58206 - protein, 23 aa, Artificial Sequence
  Cyclic GFR-binding peptide
VMGPYVKLIIQQKDNFFLMSLSS

SEQ ID NO: 58207 - protein, 34 aa, Artificial Sequence
  Cyclic GFR-binding peptide
LHEELRPYVKLLKPKKRVYEFFLVSLSSHHVRSP

SEQ ID NO: 58208 - protein, 33 aa, Artificial Sequence
  Cyclic GFR-binding peptide
  MOD_RES (1)..(32)..(33): Xaa is C or S
XSKVIMPYVKLIKPTKGILFFISLSSLDQSVXX

SEQ ID NO: 58209 - protein, 26 aa, Artificial Sequence
  Cyclic GFR-binding peptide
NPYVKLIVNSSDDFFLVSLSSLKTPA

SEQ ID NO: 58210 - protein, 28 aa, Artificial Sequence
  Cyclic GFR-binding peptide
  MOD_RES (28)..(28): Xaa is C or S
VMPYVKLVKPTRGVLFFISLSSLDQPVX

SEQ ID NO: 58211 - protein, 35 aa, Artificial Sequence
  Cyclic GFR-binding peptide
  MOD_RES (2)..(33)..(34): Xaa is C or S
KXSKVIMPYVKLIKPTKGILFFISLSSLDQSVXXP

SEQ ID NO: 58212 - protein, 30 aa, Artificial Sequence
  Cyclic GFR-binding peptide
  MOD_RES (28)..(29): Xaa is C or S
MDPYVKLVVKENEDFFLMSLSSLETPVXXA

SEQ ID NO: 58213 - protein, 24 aa, Artificial Sequence
  Cyclic GFR-binding peptide
VVMPYVKLVKPTRGVLFFISLSSL

SEQ ID NO: 58214 - protein, 26 aa, Artificial Sequence
  Cyclic GFR-binding peptide
AKVVMNPYVKLIVNNSSDFFLVSLSS

SEQ ID NO: 58215 - protein, 28 aa, Artificial Sequence
  Cyclic GFR-binding peptide
  MOD_RES (28)..(28): Xaa is C or S
MGPYVKLYTVVGKDFFLISLSSLKTPVX

SEQ ID NO: 58216 - protein, 31 aa, Artificial Sequence
  Cyclic GFR-binding peptide
NHQLFPYVKLHQGQHPKIRFFLMSLSSEETP

SEQ ID NO: 58217 - protein, 27 aa, Artificial Sequence
  Cyclic GFR-binding peptide
  MOD_RES (1)..(1): Xaa is C or S
XARVVMNPYVKLIVNSSDDFFLVSLSS

SEQ ID NO: 58218 - protein, 30 aa, Artificial Sequence
  Cyclic GFR-binding peptide
  MOD_RES (26)..(27): Xaa is C or S
PYVKLIVNSSDDFFLVSLSSLKTPAXXPKP

SEQ ID NO: 58219 - protein, 38 aa, Artificial Sequence
  Cyclic GFR-binding peptide
  MOD_RES (1)..(3)..(35): Xaa is C or S
XGXSRVVMNPYVKLIVNSSDDFFLVSLSSLKTPAXTPK

SEQ ID NO: 58220 - protein, 28 aa, Artificial Sequence
  Cyclic GFR-binding peptide
VVMDPYVKLVVNNAADFFLISLSSLRAP

SEQ ID NO: 58221 - protein, 26 aa, Artificial Sequence
  Cyclic GFR-binding peptide
VVMNPYVKLIVNSSDDFFLVSLSSLK

SEQ ID NO: 58222 - protein, 29 aa, Artificial Sequence
  Cyclic GFR-binding peptide
SEVVMDPYVKLVVNNASDFFLISLSSLRT

SEQ ID NO: 58223 - protein, 32 aa, Artificial Sequence
  Cyclic GFR-binding peptide
  MOD_RES (1)..(3): Xaa is C or S
XGXEEVIMPYVKLLLVRGNDFFLMSLSSTKVP

SEQ ID NO: 58224 - protein, 25 aa, Artificial Sequence
  Cyclic GFR-binding peptide
FPYVKLHQGQHPKIRFFLMSLSSEE

SEQ ID NO: 58225 - protein, 24 aa, Artificial Sequence
  Cyclic GFR-binding peptide
PYVKLVVNKNEDFFLISLSSMKEP

SEQ ID NO: 58226 - protein, 37 aa, Artificial Sequence
  Cyclic GFR-binding peptide
  MOD_RES (2)..(33)..(34): Xaa is C or S
KXSKVVMPYVKLVKPTRGVLFFISLSSLDQPVXXPSA

SEQ ID NO: 58227 - protein, 35 aa, Artificial Sequence
  Cyclic GFR-binding peptide
  MOD_RES (32)..(33): Xaa is C or S
ESVAMGPYVKLYTVVGKDFFLISLSSLKTPVXXAK

SEQ ID NO: 58228 - protein, 32 aa, Artificial Sequence
  Cyclic GFR-binding peptide
  MOD_RES (32)..(32): Xaa is C or S
ESVAMGPYVKLYTVVGKDFFLISLSSLKTPVX

SEQ ID NO: 58229 - protein, 41 aa, Artificial Sequence
  Cyclic GFR-binding peptide
  MOD_RES (2)..(4)..(35)..(36): Xaa is C or S
SXKXSKVVMPYVKLVKPTRGVLFFISLSSLDQPVXXPSASA

SEQ ID NO: 58230 - protein, 27 aa, Artificial Sequence
  Cyclic GFR-binding peptide
  MOD_RES (27)..(27): Xaa is C or S
NPYVKLVVNKNEDFFLISLSSMKEPVX

SEQ ID NO: 58231 - protein, 27 aa, Artificial Sequence
  Cyclic GFR-binding peptide
IMPYVKLIKPTKGILFFISLSSLDQSV

SEQ ID NO: 58232 - protein, 31 aa, Artificial Sequence
  Cyclic GFR-binding peptide
  MOD_RES (30)..(31): Xaa is C or S
VVMNPYVKLIVNNSSDFFLVSLSSLKTPAXX

SEQ ID NO: 58233 - protein, 36 aa, Artificial Sequence
  Cyclic GFR-binding peptide
  MOD_RES (2)..(33)..(34): Xaa is C or S
GXEEVIMPYVKLLLVRGNDFFLMSLSSTKVPAXXTS

SEQ ID NO: 58234 - protein, 29 aa, Artificial Sequence
  Cyclic GFR-binding peptide
DVVMGPYVKLIIQQKDNFFLMSLSSMKTP

SEQ ID NO: 58235 - protein, 25 aa, Artificial Sequence
  Cyclic GFR-binding peptide
GPYVKLIIQQKDNFFLMSLSSMKTP

SEQ ID NO: 58236 - protein, 27 aa, Artificial Sequence
  Cyclic GFR-binding peptide
VSMGEPYVKLTPVGMDDFFLVSLSSLK

SEQ ID NO: 58237 - protein, 40 aa, Artificial Sequence
  Cyclic GFR-binding peptide
  MOD_RES (1)..(38): Xaa is C or S
XELHEELRPYVKLLKPKKRVYEFFLVSLSSHHVRSPQXKV

SEQ ID NO: 58238 - protein, 42 aa, Artificial Sequence
  Cyclic GFR-binding peptide
  MOD_RES (2)..(4)..(36)..(37): Xaa is C or S
RXGXESVAMGPYVKLYTVVGKDFFLISLSSLKTPVXXAKSAK

SEQ ID NO: 58239 - protein, 35 aa, Artificial Sequence
  Cyclic GFR-binding peptide
  MOD_RES (1)..(3)..(34)..(35): Xaa is C or S
XGXEEVIMPYVKLLLVRGNDFFLMSLSSTKVPAXX

SEQ ID NO: 58240 - protein, 26 aa, Artificial Sequence
  Cyclic GFR-binding peptide
MDPYVKLVVKENEDFFLMSLSSLETP

SEQ ID NO: 58241 - protein, 31 aa, Artificial Sequence
  Cyclic GFR-binding peptide
  MOD_RES (30)..(31): Xaa is C or S
EVIMPYVKLLLVRGNDFFLMSLSSTKVPAXX

SEQ ID NO: 58242 - protein, 37 aa, Artificial Sequence
  Cyclic GFR-binding peptide
  MOD_RES (1)..(3)..(35)..(36): Xaa is C or S
XAXSEVTMNPYVKLVVNKNEDFFLISLSSMKEPVXXP

SEQ ID NO: 58243 - protein, 30 aa, Artificial Sequence
  Cyclic GFR-binding peptide
  MOD_RES (28)..(29): Xaa is C or S
IMPYVKLVKPKRGVLFFISLSSLAQPVXXP

SEQ ID NO: 58244 - protein, 31 aa, Artificial Sequence
  Cyclic GFR-binding peptide
  MOD_RES (28)..(29): Xaa is C or S
MGPYVKLYTVVGKDFFLISLSSLKTPVXXAK

SEQ ID NO: 58245 - protein, 31 aa, Artificial Sequence
  Cyclic GFR-binding peptide
  MOD_RES (30)..(31): Xaa is C or S
RVIMPYVKLVKPKRGVLFFISLSSLAQPVXX

SEQ ID NO: 58246 - protein, 31 aa, Artificial Sequence
  Cyclic GFR-binding peptide
  MOD_RES (28)..(29): Xaa is C or S
IMPYVKLVKPKRGVLFFISLSSLAQPVXXPA

SEQ ID NO: 58247 - protein, 25 aa, Artificial Sequence
  Cyclic GFR-binding peptide
PYVKLHQGQHPKIRFFLMSLSSEET

SEQ ID NO: 58248 - protein, 31 aa, Artificial Sequence
  Cyclic GFR-binding peptide
  MOD_RES (2)..(2): Xaa is C or S
GXARVVMNPYVKLIVNSSDDFFLVSLSSLQT

SEQ ID NO: 58249 - protein, 37 aa, Artificial Sequence
  Cyclic GFR-binding peptide
  MOD_RES (1)..(3)..(36)..(37): Xaa is C or S
XGXEAVSMGEPYVKLTPVGMDDFFLVSLSSLKTPVXX

SEQ ID NO: 58250 - protein, 27 aa, Artificial Sequence
  Cyclic GFR-binding peptide
  MOD_RES (26)..(27): Xaa is C or S
PYVKLLLVRGNDFFLMSLSSTKVPAXX

SEQ ID NO: 58251 - protein, 35 aa, Artificial Sequence
  Cyclic GFR-binding peptide
  MOD_RES (1)..(33)..(34): Xaa is C or S
XGEVVMDPYVKLVVKENEDFFLMSLSSLETPVXXA

SEQ ID NO: 58252 - protein, 32 aa, Artificial Sequence
  Cyclic GFR-binding peptide
  MOD_RES (2)..(2): Xaa is C or S
GXRDVVMGPYVKLIIQQKDNFFLMSLSSMKTP

SEQ ID NO: 58253 - protein, 24 aa, Artificial Sequence
  Cyclic GFR-binding peptide
RVIMPYVKLVKPKRGVLFFISLSS

SEQ ID NO: 58254 - protein, 29 aa, Artificial Sequence
  Cyclic GFR-binding peptide
  MOD_RES (2)..(4): Xaa is C or S
SXKXSKVIMPYVKLIKPTKGILFFISLSS

SEQ ID NO: 58255 - protein, 27 aa, Artificial Sequence
  Cyclic GFR-binding peptide
  MOD_RES (27)..(27): Xaa is C or S
NPYVKLIVNSSDDFFLVSLSSLQTPAX

SEQ ID NO: 58256 - protein, 37 aa, Artificial Sequence
  Cyclic GFR-binding peptide
  MOD_RES (2)..(4)..(37): Xaa is C or S
RXGXEAVSMGEPYVKLTPVGMDDFFLVSLSSLKTPVX

SEQ ID NO: 58257 - protein, 33 aa, Artificial Sequence
  Cyclic GFR-binding peptide
  MOD_RES (27)..(28): Xaa is C or S
NPYVKLIVNSSDDFFLVSLSSLKTPAXXPKPVH

SEQ ID NO: 58258 - protein, 30 aa, Artificial Sequence
  Cyclic GFR-binding peptide
AVSMGEPYVKLTPVGMDDFFLVSLSSLKTP

SEQ ID NO: 58259 - protein, 35 aa, Artificial Sequence
  Cyclic GFR-binding peptide
  MOD_RES (1)..(33)..(34): Xaa is C or S
XARVVMNPYVKLIVNSSDDFFLVSLSSLQTPAXXP

SEQ ID NO: 58260 - protein, 32 aa, Artificial Sequence
  Cyclic GFR-binding peptide
  MOD_RES (27)..(28): Xaa is C or S
MPYVKLVKPTRGVLFFISLSSLDQPVXXPSAS

SEQ ID NO: 58261 - protein, 33 aa, Artificial Sequence
  Cyclic GFR-binding peptide
  MOD_RES (29)..(29): Xaa is C or S
VMNPYVKLIVNSSDDFFLVSLSSLKTPAXTPKT

SEQ ID NO: 58262 - protein, 26 aa, Artificial Sequence
  Cyclic GFR-binding peptide
IMPYVKLIKPTKGILFFISLSSLDQS

SEQ ID NO: 58263 - protein, 25 aa, Artificial Sequence
  Cyclic GFR-binding peptide
VMPYVKLVKPTRGVLFFISLSSLDQ

SEQ ID NO: 58264 - protein, 36 aa, Artificial Sequence
  Cyclic GFR-binding peptide
  MOD_RES (30)..(31): Xaa is C or S
VVMNPYVKLIVNSSDDFFLVSLSSLKTPAXXPKPVY

SEQ ID NO: 58265 - protein, 28 aa, Artificial Sequence
  Cyclic GFR-binding peptide
KVVMNPYVKLIVNNSSDFFLVSLSSLKT

SEQ ID NO: 58266 - protein, 35 aa, Artificial Sequence
  Cyclic GFR-binding peptide
  MOD_RES (30)..(31): Xaa is C or S
VAMGPYVKLYTVVGKDFFLISLSSLKTPVXXAKSA

SEQ ID NO: 58267 - protein, 35 aa, Artificial Sequence
  Cyclic GFR-binding peptide
  MOD_RES (32)..(33): Xaa is C or S
AEVVMDPYVKLVVNNAADFFLISLSSLRAPVXXSA

SEQ ID NO: 58268 - protein, 39 aa, Artificial Sequence
  Cyclic GFR-binding peptide
  MOD_RES (1)..(35): Xaa is C or S
XKNHQLFPYVKLHQGQHPKIRFFLMSLSSEETPVXELGE

SEQ ID NO: 58269 - protein, 25 aa, Artificial Sequence
  Cyclic GFR-binding peptide
MGPYVKLYTVVGKDFFLISLSSLKT

SEQ ID NO: 58270 - protein, 34 aa, Artificial Sequence
  Cyclic GFR-binding peptide
  MOD_RES (2)..(34): Xaa is C or S
GXRDVVMGPYVKLIIQQKDNFFLMSLSSMKTPTX

SEQ ID NO: 58271 - protein, 28 aa, Artificial Sequence
  Cyclic GFR-binding peptide
AVSMGEPYVKLTPVGMDDFFLVSLSSLK

SEQ ID NO: 58272 - protein, 39 aa, Artificial Sequence
  Cyclic GFR-binding peptide
  MOD_RES (37)..(37): Xaa is C or S
ELHEELRPYVKLLKPKKRVYEFFLVSLSSHHVRSPQXKV

SEQ ID NO: 58273 - protein, 26 aa, Artificial Sequence
  Cyclic GFR-binding peptide
MGPYVKLIIQQKDNFFLMSLSSMKTP

SEQ ID NO: 58274 - protein, 26 aa, Artificial Sequence
  Cyclic GFR-binding peptide
DPYVKLVVNNASDFFLISLSSLRTPV

SEQ ID NO: 58275 - protein, 32 aa, Artificial Sequence
  Cyclic GFR-binding peptide
  MOD_RES (32)..(32): Xaa is C or S
SRVVMNPYVKLIVNSSDDFFLVSLSSLKTPAX

SEQ ID NO: 58276 - protein, 27 aa, Artificial Sequence
  Cyclic GFR-binding peptide
IMPYVKLLLVRGNDFFLMSLSSTKVPA

SEQ ID NO: 58277 - protein, 23 aa, Artificial Sequence
  Cyclic GFR-binding peptide
MDPYVKLVVKENEDFFLMSLSSL

SEQ ID NO: 58278 - protein, 23 aa, Artificial Sequence
  Cyclic GFR-binding peptide
PYVKLVVNNASDFFLISLSSLRT

SEQ ID NO: 58279 - protein, 32 aa, Artificial Sequence
  Cyclic GFR-binding peptide
  MOD_RES (32)..(32): Xaa is C or S
GEVVMDPYVKLVVKENEDFFLMSLSSLETPVX

SEQ ID NO: 58280 - protein, 30 aa, Artificial Sequence
  Cyclic GFR-binding peptide
  MOD_RES (1)..(1): Xaa is C or S
XSKVVMPYVKLVKPTRGVLFFISLSSLDQP

SEQ ID NO: 58281 - protein, 32 aa, Artificial Sequence
  Cyclic GFR-binding peptide
  MOD_RES (2)..(2): Xaa is C or S
GXEAVSMGEPYVKLTPVGMDDFFLVSLSSLKT

SEQ ID NO: 58282 - protein, 40 aa, Artificial Sequence
  Cyclic GFR-binding peptide
  MOD_RES (1)..(3)..(34)..(35): Xaa is C or S
XKXSKVIMPYVKLIKPTKGILFFISLSSLDQSVXXPSASA

SEQ ID NO: 58283 - protein, 42 aa, Artificial Sequence
  Cyclic GFR-binding peptide
  MOD_RES (1)..(3)..(36)..(37): Xaa is C or S
XGXEAVSMGEPYVKLTPVGMDDFFLVSLSSLKTPVXXAKGVK

SEQ ID NO: 58284 - protein, 26 aa, Artificial Sequence
  Cyclic GFR-binding peptide
DPYVKLVVKENEDFFLMSLSSLETPV

SEQ ID NO: 58285 - protein, 23 aa, Artificial Sequence
  Cyclic GFR-binding peptide
PYVKLVVKENEDFFLMSLSSLET

SEQ ID NO: 58286 - protein, 28 aa, Artificial Sequence
  Cyclic GFR-binding peptide
  MOD_RES (28)..(28): Xaa is C or S
PYVKLHQGQHPKIRFFLMSLSSEETPVX

SEQ ID NO: 58287 - protein, 22 aa, Artificial Sequence
  Cyclic GFR-binding peptide
DPYVKLVVNNAADFFLISLSSL

SEQ ID NO: 58288 - protein, 23 aa, Artificial Sequence
  Cyclic GFR-binding peptide
VMNPYVKLIVNSSDDFFLVSLSS

SEQ ID NO: 58289 - protein, 34 aa, Artificial Sequence
  Cyclic GFR-binding peptide
  MOD_RES (31)..(31): Xaa is C or S
QLFPYVKLHQGQHPKIRFFLMSLSSEETPVXELG

SEQ ID NO: 58290 - protein, 29 aa, Artificial Sequence
  Cyclic GFR-binding peptide
  MOD_RES (26)..(27): Xaa is C or S
PYVKLVVNNAADFFLISLSSLRAPVXXSA

SEQ ID NO: 58291 - protein, 42 aa, Artificial Sequence
  Cyclic GFR-binding peptide
  MOD_RES (2)..(4)..(36)..(37): Xaa is C or S
RXGXAEVVMDPYVKLVVNNAADFFLISLSSLRAPVXXSAPAA

SEQ ID NO: 58292 - protein, 30 aa, Artificial Sequence
  Cyclic GFR-binding peptide
  MOD_RES (29)..(29): Xaa is C or S
FPYVKLHQGQHPKIRFFLMSLSSEETPVXE

SEQ ID NO: 58293 - protein, 25 aa, Artificial Sequence
  Cyclic GFR-binding peptide
EVVMDPYVKLVVNNAADFFLISLSS

SEQ ID NO: 58294 - protein, 32 aa, Artificial Sequence
  Cyclic GFR-binding peptide
  MOD_RES (26)..(27): Xaa is C or S
PYVKLVKPTRGVLFFISLSSLDQPVXXPSASA

SEQ ID NO: 58295 - protein, 33 aa, Artificial Sequence
  Cyclic GFR-binding peptide
  MOD_RES (2)..(2): Xaa is C or S
GXAKVVMNPYVKLIVNNSSDFFLVSLSSLKTPA

SEQ ID NO: 58296 - protein, 41 aa, Artificial Sequence
  Cyclic GFR-binding peptide
  MOD_RES (2)..(39): Xaa is C or S
AXELHEELRPYVKLLKPKKRVYEFFLVSLSSHHVRSPQXKV

SEQ ID NO: 58297 - protein, 37 aa, Artificial Sequence
  Cyclic GFR-binding peptide
  MOD_RES (1)..(3)..(35)..(36): Xaa is C or S
XGXAEVVMDPYVKLVVNNAADFFLISLSSLRAPVXXS

SEQ ID NO: 58298 - protein, 38 aa, Artificial Sequence
  Cyclic GFR-binding peptide
  MOD_RES (1)..(3)..(35)..(36): Xaa is C or S
XAXSEVTMNPYVKLVVNKNEDFFLISLSSMKEPVXXPE

SEQ ID NO: 58299 - protein, 32 aa, Artificial Sequence
  Cyclic GFR-binding peptide
  MOD_RES (26)..(27): Xaa is C or S
PYVKLVKPKRGVLFFISLSSLAQPVXXPAASA

SEQ ID NO: 58300 - protein, 36 aa, Artificial Sequence
  Cyclic GFR-binding peptide
  MOD_RES (30)..(31): Xaa is C or S
RVIMPYVKLVKPKRGVLFFISLSSLAQPVXXPAASA

SEQ ID NO: 58301 - protein, 40 aa, Artificial Sequence
  Cyclic GFR-binding peptide
  MOD_RES (2)..(34)..(35): Xaa is C or S
GXSRVVMNPYVKLIVNSSDDFFLVSLSSLKTPAXXPKPVY

SEQ ID NO: 58302 - protein, 30 aa, Artificial Sequence
  Cyclic GFR-binding peptide
  MOD_RES (29)..(29): Xaa is C or S
VMNPYVKLIVNSSDDFFLVSLSSLKTPAXT

SEQ ID NO: 58303 - protein, 30 aa, Artificial Sequence
  Cyclic GFR-binding peptide
  MOD_RES (1)..(3): Xaa is C or S
XGXRDVVMGPYVKLIIQQKDNFFLMSLSSM

SEQ ID NO: 58304 - protein, 35 aa, Artificial Sequence
  Cyclic GFR-binding peptide
  MOD_RES (1)..(3)..(35): Xaa is C or S
XGXARVVMNPYVKLIVNSSDDFFLVSLSSLQTPAX

SEQ ID NO: 58305 - protein, 27 aa, Artificial Sequence
  Cyclic GFR-binding peptide
  MOD_RES (27)..(27): Xaa is C or S
DPYVKLVVKENEDFFLMSLSSLETPVX

SEQ ID NO: 58306 - protein, 34 aa, Artificial Sequence
  Cyclic GFR-binding peptide
  MOD_RES (29)..(30): Xaa is C or S
VMGPYVKLIIQQKDNFFLMSLSSMKTPTXXPGAS

SEQ ID NO: 58307 - protein, 29 aa, Artificial Sequence
  Cyclic GFR-binding peptide
  MOD_RES (2)..(2): Xaa is C or S
GXEAVSMGEPYVKLTPVGMDDFFLVSLSS

SEQ ID NO: 58308 - protein, 28 aa, Artificial Sequence
  Cyclic GFR-binding peptide
AEVVMDPYVKLVVNNAADFFLISLSSLR

SEQ ID NO: 58309 - protein, 37 aa, Artificial Sequence
  Cyclic GFR-binding peptide
  MOD_RES (1)..(3)..(35)..(36): Xaa is C or S
XGXARVVMNPYVKLIVNSSDDFFLVSLSSLQTPAXXP

SEQ ID NO: 58310 - protein, 43 aa, Artificial Sequence
  Cyclic GFR-binding peptide
  MOD_RES (2)..(4)..(41): Xaa is C or S
AXAXELHEELRPYVKLLKPKKRVYEFFLVSLSSHHVRSPQXKV

SEQ ID NO: 58311 - protein, 38 aa, Artificial Sequence
  Cyclic GFR-binding peptide
  MOD_RES (1)..(3): Xaa is C or S
XAXELHEELRPYVKLLKPKKRVYEFFLVSLSSHHVRSP

SEQ ID NO: 58312 - protein, 24 aa, Artificial Sequence
  Cyclic GFR-binding peptide
PYVKLYTVVGKDFFLISLSSLKTP

SEQ ID NO: 58313 - protein, 26 aa, Artificial Sequence
  Cyclic GFR-binding peptide
VIMPYVKLLLVRGNDFFLMSLSSTKV

SEQ ID NO: 58314 - protein, 37 aa, Artificial Sequence
  Cyclic GFR-binding peptide
  MOD_RES (37)..(37): Xaa is C or S
ELHEELRPYVKLLKPKKRVYEFFLVSLSSHHVRSPQX

SEQ ID NO: 58315 - protein, 24 aa, Artificial Sequence
  Cyclic GFR-binding peptide
PYVKLIVNSSDDFFLVSLSSLKTP

SEQ ID NO: 58316 - protein, 27 aa, Artificial Sequence
  Cyclic GFR-binding peptide
HEELRPYVKLLKPKKRVYEFFLVSLSS

SEQ ID NO: 58317 - protein, 33 aa, Artificial Sequence
  Cyclic GFR-binding peptide
  MOD_RES (30)..(31): Xaa is C or S
VVMNPYVKLIVNNSSDFFLVSLSSLKTPAXXAK

SEQ ID NO: 58318 - protein, 39 aa, Artificial Sequence
  Cyclic GFR-binding peptide
  MOD_RES (1)..(3)..(35)..(36): Xaa is C or S
XAXSEVTMNPYVKLVVNKNEDFFLISLSSMKEPVXXPEP

SEQ ID NO: 58319 - protein, 26 aa, Artificial Sequence
  Cyclic GFR-binding peptide
IMPYVKLLLVRGNDFFLMSLSSTKVP

SEQ ID NO: 58320 - protein, 24 aa, Artificial Sequence
  Cyclic GFR-binding peptide
PYVKLTPVGMDDFFLVSLSSLKTP

SEQ ID NO: 58321 - protein, 42 aa, Artificial Sequence
  Cyclic GFR-binding peptide
  MOD_RES (2)..(4)..(36)..(37): Xaa is C or S
HXGXAKVVMNPYVKLIVNNSSDFFLVSLSSLKTPAXXAKPVA

SEQ ID NO: 58322 - protein, 22 aa, Artificial Sequence
  Cyclic GFR-binding peptide
PYVKLHQGQHPKIRFFLMSLSS

SEQ ID NO: 58323 - protein, 34 aa, Artificial Sequence
  Cyclic GFR-binding peptide
  MOD_RES (31)..(32): Xaa is C or S
RVVMNPYVKLIVNSSDDFFLVSLSSLKTPAXXPK

SEQ ID NO: 58324 - protein, 31 aa, Artificial Sequence
  Cyclic GFR-binding peptide
  MOD_RES (1)..(3): Xaa is C or S
XGXSEVVMDPYVKLVVNNASDFFLISLSSLR

SEQ ID NO: 58325 - protein, 31 aa, Artificial Sequence
  Cyclic GFR-binding peptide
LRPYVKLLKPKKRVYEFFLVSLSSHHVRSPQ

SEQ ID NO: 58326 - protein, 34 aa, Artificial Sequence
  Cyclic GFR-binding peptide
  MOD_RES (2)..(4): Xaa is C or S
LXGXEEVIMPYVKLLLVRGNDFFLMSLSSTKVPA

SEQ ID NO: 58327 - protein, 26 aa, Artificial Sequence
  Cyclic GFR-binding peptide
  MOD_RES (1)..(1): Xaa is C or S
XSKVIMPYVKLIKPTKGILFFISLSS

SEQ ID NO: 58328 - protein, 32 aa, Artificial Sequence
  Cyclic GFR-binding peptide
  MOD_RES (1)..(32): Xaa is C or S
XEEVIMPYVKLLLVRGNDFFLMSLSSTKVPAX

SEQ ID NO: 58329 - protein, 29 aa, Artificial Sequence
  Cyclic GFR-binding peptide
  MOD_RES (27)..(28): Xaa is C or S
GPYVKLYTVVGKDFFLISLSSLKTPVXXA

SEQ ID NO: 58330 - protein, 27 aa, Artificial Sequence
  Cyclic GFR-binding peptide
EELRPYVKLLKPKKRVYEFFLVSLSSH

SEQ ID NO: 58331 - protein, 31 aa, Artificial Sequence
  Cyclic GFR-binding peptide
  MOD_RES (2)..(4): Xaa is C or S
RXAXSEVTMNPYVKLVVNKNEDFFLISLSSM

SEQ ID NO: 58332 - protein, 35 aa, Artificial Sequence
  Cyclic GFR-binding peptide
  MOD_RES (1)..(3)..(34)..(35): Xaa is C or S
XKXSKVIMPYVKLIKPTKGILFFISLSSLDQSVXX

SEQ ID NO: 58333 - protein, 27 aa, Artificial Sequence
  Cyclic GFR-binding peptide
PYVKLLKPKKRVYEFFLVSLSSHHVRS

SEQ ID NO: 58334 - protein, 40 aa, Artificial Sequence
  Cyclic GFR-binding peptide
  MOD_RES (1)..(3)..(40): Xaa is C or S
XAXELHEELRPYVKLLKPKKRVYEFFLVSLSSHHVRSPQX

SEQ ID NO: 58335 - protein, 37 aa, Artificial Sequence
  Cyclic GFR-binding peptide
  MOD_RES (2)..(34)..(35): Xaa is C or S
AXSEVTMNPYVKLVVNKNEDFFLISLSSMKEPVXXPE

SEQ ID NO: 58336 - protein, 22 aa, Artificial Sequence
  Cyclic GFR-binding peptide
MDPYVKLVVNNASDFFLISLSS

SEQ ID NO: 58337 - protein, 30 aa, Artificial Sequence
  Cyclic GFR-binding peptide
VSMGEPYVKLTPVGMDDFFLVSLSSLKTPV

SEQ ID NO: 58338 - protein, 29 aa, Artificial Sequence
  Cyclic GFR-binding peptide
VVMGPYVKLIIQQKDNFFLMSLSSMKTPT

SEQ ID NO: 58339 - protein, 24 aa, Artificial Sequence
  Cyclic GFR-binding peptide
VVMNPYVKLIVNSSDDFFLVSLSS

SEQ ID NO: 58340 - protein, 25 aa, Artificial Sequence
  Cyclic GFR-binding peptide
SMGEPYVKLTPVGMDDFFLVSLSSL

SEQ ID NO: 58341 - protein, 39 aa, Artificial Sequence
  Cyclic GFR-binding peptide
  MOD_RES (1)..(3)..(35)..(36): Xaa is C or S
XGXESVAMGPYVKLYTVVGKDFFLISLSSLKTPVXXAKS

SEQ ID NO: 58342 - protein, 38 aa, Artificial Sequence
  Cyclic GFR-binding peptide
  MOD_RES (32)..(33): Xaa is C or S
ARVVMNPYVKLIVNSSDDFFLVSLSSLQTPAXXPKPVT

SEQ ID NO: 58343 - protein, 28 aa, Artificial Sequence
  Cyclic GFR-binding peptide
  MOD_RES (27)..(28): Xaa is C or S
NPYVKLIVNSSDDFFLVSLSSLQTPAXX

SEQ ID NO: 58344 - protein, 27 aa, Artificial Sequence
  Cyclic GFR-binding peptide
  MOD_RES (26)..(27): Xaa is C or S
PYVKLIKPTKGILFFISLSSLDQSVXX

SEQ ID NO: 58345 - protein, 29 aa, Artificial Sequence
  Cyclic GFR-binding peptide
  MOD_RES (26)..(27): Xaa is C or S
PYVKLVKPTRGVLFFISLSSLDQPVXXPS

SEQ ID NO: 58346 - protein, 34 aa, Artificial Sequence
  Cyclic GFR-binding peptide
  MOD_RES (28)..(29): Xaa is C or S
MNPYVKLIVNSSDDFFLVSLSSLQTPAXXPKPVT

SEQ ID NO: 58347 - protein, 31 aa, Artificial Sequence
  Cyclic GFR-binding peptide
  MOD_RES (29)..(30): Xaa is C or S
VIMPYVKLLLVRGNDFFLMSLSSTKVPAXXT

SEQ ID NO: 58348 - protein, 35 aa, Artificial Sequence
  Cyclic GFR-binding peptide
  MOD_RES (32)..(33): Xaa is C or S
GEVVMDPYVKLVVKENEDFFLMSLSSLETPVXXAK

SEQ ID NO: 58349 - protein, 33 aa, Artificial Sequence
  Cyclic GFR-binding peptide
  MOD_RES (28)..(28): Xaa is C or S
MNPYVKLIVNSSDDFFLVSLSSLKTPAXTPKTV

SEQ ID NO: 58350 - protein, 38 aa, Artificial Sequence
  Cyclic GFR-binding peptide
  MOD_RES (2)..(4)..(36)..(37): Xaa is C or S
HXGXARVVMNPYVKLIVNSSDDFFLVSLSSLQTPAXXP

SEQ ID NO: 58351 - protein, 27 aa, Artificial Sequence
  Cyclic GFR-binding peptide
VMDPYVKLVVNNASDFFLISLSSLRTP

SEQ ID NO: 58352 - protein, 37 aa, Artificial Sequence
  Cyclic GFR-binding peptide
  MOD_RES (2)..(2): Xaa is C or S
AXELHEELRPYVKLLKPKKRVYEFFLVSLSSHHVRSP

SEQ ID NO: 58353 - protein, 36 aa, Artificial Sequence
  Cyclic GFR-binding peptide
  MOD_RES (32)..(33): Xaa is C or S
SEVVMDPYVKLVVNNASDFFLISLSSLRTPVXXTPP

SEQ ID NO: 58354 - protein, 32 aa, Artificial Sequence
  Cyclic GFR-binding peptide
  MOD_RES (29)..(29): Xaa is C or S
FPYVKLHQGQHPKIRFFLMSLSSEETPVXELG

SEQ ID NO: 58355 - protein, 36 aa, Artificial Sequence
  Cyclic GFR-binding peptide
  MOD_RES (2)..(4)..(36): Xaa is C or S
RXAXSEVTMNPYVKLVVNKNEDFFLISLSSMKEPVX

SEQ ID NO: 58356 - protein, 30 aa, Artificial Sequence
  Cyclic GFR-binding peptide
  MOD_RES (2)..(4): Xaa is C or S
SXKXSRVIMPYVKLVKPKRGVLFFISLSSL

SEQ ID NO: 58357 - protein, 32 aa, Artificial Sequence
  Cyclic GFR-binding peptide
  MOD_RES (28)..(29): Xaa is C or S
MNPYVKLIVNNSSDFFLVSLSSLKTPAXXAKP

SEQ ID NO: 58358 - protein, 35 aa, Artificial Sequence
  Cyclic GFR-binding peptide
  MOD_RES (29)..(29): Xaa is C or S
FPYVKLHQGQHPKIRFFLMSLSSEETPVXELGEDN

SEQ ID NO: 58359 - protein, 25 aa, Artificial Sequence
  Cyclic GFR-binding peptide
GPYVKLYTVVGKDFFLISLSSLKTP

SEQ ID NO: 58360 - protein, 30 aa, Artificial Sequence
  Cyclic GFR-binding peptide
  MOD_RES (2)..(4): Xaa is C or S
HXGXARVVMNPYVKLIVNSSDDFFLVSLSS

SEQ ID NO: 58361 - protein, 37 aa, Artificial Sequence
  Cyclic GFR-binding peptide
  MOD_RES (2)..(4)..(36)..(37): Xaa is C or S
RXGXESVAMGPYVKLYTVVGKDFFLISLSSLKTPVXX

SEQ ID NO: 58362 - protein, 33 aa, Artificial Sequence
  Cyclic GFR-binding peptide
ELHEELRPYVKLLKPKKRVYEFFLVSLSSHHVR

SEQ ID NO: 58363 - protein, 34 aa, Artificial Sequence
  Cyclic GFR-binding peptide
  MOD_RES (30)..(31): Xaa is C or S
KVIMPYVKLIKPTKGILFFISLSSLDQSVXXPSA

SEQ ID NO: 58364 - protein, 34 aa, Artificial Sequence
  Cyclic GFR-binding peptide
  MOD_RES (1)..(32)..(33): Xaa is C or S
XSRVIMPYVKLVKPKRGVLFFISLSSLAQPVXXP

SEQ ID NO: 58365 - protein, 29 aa, Artificial Sequence
  Cyclic GFR-binding peptide
ELRPYVKLLKPKKRVYEFFLVSLSSHHVR

SEQ ID NO: 58366 - protein, 29 aa, Artificial Sequence
  Cyclic GFR-binding peptide
  MOD_RES (28)..(29): Xaa is C or S
IMPYVKLLLVRGNDFFLMSLSSTKVPAXX

SEQ ID NO: 58367 - protein, 21 aa, Artificial Sequence
  Cyclic GFR-binding peptide
NPYVKLVVNKNEDFFLISLSS

SEQ ID NO: 58368 - protein, 35 aa, Artificial Sequence
  Cyclic GFR-binding peptide
  MOD_RES (31)..(31): Xaa is C or S
RVVMNPYVKLIVNSSDDFFLVSLSSLKTPAXTPKT

SEQ ID NO: 58369 - protein, 28 aa, Artificial Sequence
  Cyclic GFR-binding peptide
RVVMNPYVKLIVNSSDDFFLVSLSSLQT

SEQ ID NO: 58370 - protein, 34 aa, Artificial Sequence
  Cyclic GFR-binding peptide
  MOD_RES (1)..(3): Xaa is C or S
XGXAEVVMDPYVKLVVNNAADFFLISLSSLRAPV

SEQ ID NO: 58371 - protein, 22 aa, Artificial Sequence
  Cyclic GFR-binding peptide
NPYVKLIVNNSSDFFLVSLSSL

SEQ ID NO: 58372 - protein, 35 aa, Artificial Sequence
  Cyclic GFR-binding peptide
  MOD_RES (1)..(3)..(35): Xaa is C or S
XGXSEVVMDPYVKLVVNNASDFFLISLSSLRTPVX

SEQ ID NO: 58373 - protein, 40 aa, Artificial Sequence
  Cyclic GFR-binding peptide
  MOD_RES (1)..(3)..(35)..(36): Xaa is C or S
XGXSEVVMDPYVKLVVNNASDFFLISLSSLRTPVXXTPPT

SEQ ID NO: 58374 - protein, 28 aa, Artificial Sequence
  Cyclic GFR-binding peptide
NHQLFPYVKLHQGQHPKIRFFLMSLSSE

SEQ ID NO: 58375 - protein, 31 aa, Artificial Sequence
  Cyclic GFR-binding peptide
  MOD_RES (1)..(1): Xaa is C or S
XKNHQLFPYVKLHQGQHPKIRFFLMSLSSEE

SEQ ID NO: 58376 - protein, 35 aa, Artificial Sequence
  Cyclic GFR-binding peptide
  MOD_RES (31)..(32): Xaa is C or S
EEVIMPYVKLLLVRGNDFFLMSLSSTKVPAXXTSP

SEQ ID NO: 58377 - protein, 26 aa, Artificial Sequence
  Cyclic GFR-binding peptide
VMNPYVKLIVNNSSDFFLVSLSSLKT

SEQ ID NO: 58378 - protein, 36 aa, Artificial Sequence
  Cyclic GFR-binding peptide
  MOD_RES (31)..(32): Xaa is C or S
SKVIMPYVKLIKPTKGILFFISLSSLDQSVXXPSAS

SEQ ID NO: 58379 - protein, 37 aa, Artificial Sequence
  Cyclic GFR-binding peptide
  MOD_RES (2)..(34)..(35): Xaa is C or S
GXESVAMGPYVKLYTVVGKDFFLISLSSLKTPVXXAK

SEQ ID NO: 58380 - protein, 27 aa, Artificial Sequence
  Cyclic GFR-binding peptide
  MOD_RES (27)..(27): Xaa is C or S
MPYVKLVKPTRGVLFFISLSSLDQPVX

SEQ ID NO: 58381 - protein, 24 aa, Artificial Sequence
  Cyclic GFR-binding peptide
TMNPYVKLVVNKNEDFFLISLSSM

SEQ ID NO: 58382 - protein, 28 aa, Artificial Sequence
  Cyclic GFR-binding peptide
  MOD_RES (27)..(28): Xaa is C or S
MPYVKLVKPTRGVLFFISLSSLDQPVXX

SEQ ID NO: 58383 - protein, 22 aa, Artificial Sequence
  Cyclic GFR-binding peptide
PYVKLIVNSSDDFFLVSLSSLQ

SEQ ID NO: 58384 - protein, 33 aa, Artificial Sequence
  Cyclic GFR-binding peptide
  MOD_RES (2)..(4): Xaa is C or S
RXGXGEVVMDPYVKLVVKENEDFFLMSLSSLET

SEQ ID NO: 58385 - protein, 22 aa, Artificial Sequence
  Cyclic GFR-binding peptide
MNPYVKLIVNSSDDFFLVSLSS

SEQ ID NO: 58386 - protein, 27 aa, Artificial Sequence
  Cyclic GFR-binding peptide
  MOD_RES (26)..(27): Xaa is C or S
PYVKLIVNSSDDFFLVSLSSLQTPAXX

SEQ ID NO: 58387 - protein, 30 aa, Artificial Sequence
  Cyclic GFR-binding peptide
  MOD_RES (1)..(3): Xaa is C or S
XKXSKVIMPYVKLIKPTKGILFFISLSSLD

SEQ ID NO: 58388 - protein, 23 aa, Artificial Sequence
  Cyclic GFR-binding peptide
VIMPYVKLVKPKRGVLFFISLSS

SEQ ID NO: 58389 - protein, 36 aa, Artificial Sequence
  Cyclic GFR-binding peptide
  MOD_RES (30)..(30): Xaa is C or S
VVMNPYVKLIVNSSDDFFLVSLSSLKTPAXTPKTVH

SEQ ID NO: 58390 - protein, 37 aa, Artificial Sequence
  Cyclic GFR-binding peptide
  MOD_RES (32)..(33): Xaa is C or S
ARVVMNPYVKLIVNSSDDFFLVSLSSLQTPAXXPKPV

SEQ ID NO: 58391 - protein, 28 aa, Artificial Sequence
  Cyclic GFR-binding peptide
  MOD_RES (28)..(28): Xaa is C or S
IMPYVKLLLVRGNDFFLMSLSSTKVPAX

SEQ ID NO: 58392 - protein, 28 aa, Artificial Sequence
  Cyclic GFR-binding peptide
  MOD_RES (27)..(28): Xaa is C or S
NPYVKLVVNKNEDFFLISLSSMKEPVXX

SEQ ID NO: 58393 - protein, 28 aa, Artificial Sequence
  Cyclic GFR-binding peptide
DVVMGPYVKLIIQQKDNFFLMSLSSMKT

SEQ ID NO: 58394 - protein, 40 aa, Artificial Sequence
  Cyclic GFR-binding peptide
  MOD_RES (2)..(4)..(36)..(37): Xaa is C or S
HXGXSRVVMNPYVKLIVNSSDDFFLVSLSSLKTPAXXPKP

SEQ ID NO: 58395 - protein, 36 aa, Artificial Sequence
  Cyclic GFR-binding peptide
  MOD_RES (30)..(31): Xaa is C or S
VTMNPYVKLVVNKNEDFFLISLSSMKEPVXXPEPIG

SEQ ID NO: 58396 - protein, 33 aa, Artificial Sequence
  Cyclic GFR-binding peptide
  MOD_RES (30)..(31): Xaa is C or S
RVIMPYVKLVKPKRGVLFFISLSSLAQPVXXPA

SEQ ID NO: 58397 - protein, 29 aa, Artificial Sequence
  Cyclic GFR-binding peptide
  MOD_RES (1)..(3): Xaa is C or S
XGXEEVIMPYVKLLLVRGNDFFLMSLSST

SEQ ID NO: 58398 - protein, 37 aa, Artificial Sequence
  Cyclic GFR-binding peptide
  MOD_RES (1)..(3): Xaa is C or S
XAXELHEELRPYVKLLKPKKRVYEFFLVSLSSHHVRS

SEQ ID NO: 58399 - protein, 36 aa, Artificial Sequence
  Cyclic GFR-binding peptide
  MOD_RES (2)..(34)..(35): Xaa is C or S
GXRDVVMGPYVKLIIQQKDNFFLMSLSSMKTPTXXP

SEQ ID NO: 58400 - protein, 39 aa, Artificial Sequence
  Cyclic GFR-binding peptide
  MOD_RES (1)..(33)..(34): Xaa is C or S
XSEVVMDPYVKLVVNNASDFFLISLSSLRTPVXXTPPTS

SEQ ID NO: 58401 - protein, 26 aa, Artificial Sequence
  Cyclic GFR-binding peptide
  MOD_RES (26)..(26): Xaa is C or S
PYVKLLLVRGNDFFLMSLSSTKVPAX

SEQ ID NO: 58402 - protein, 37 aa, Artificial Sequence
  Cyclic GFR-binding peptide
  MOD_RES (1)..(33)..(34): Xaa is C or S
XSEVVMDPYVKLVVNNASDFFLISLSSLRTPVXXTPP

SEQ ID NO: 58403 - protein, 38 aa, Artificial Sequence
  Cyclic GFR-binding peptide
  MOD_RES (1)..(3)..(34)..(35): Xaa is C or S
XGXEEVIMPYVKLLLVRGNDFFLMSLSSTKVPAXXTSP

SEQ ID NO: 58404 - protein, 30 aa, Artificial Sequence
  Cyclic GFR-binding peptide
EVTMNPYVKLVVNKNEDFFLISLSSMKEPV

SEQ ID NO: 58405 - protein, 28 aa, Artificial Sequence
  Cyclic GFR-binding peptide
  MOD_RES (26)..(27): Xaa is C or S
PYVKLTPVGMDDFFLVSLSSLKTPVXXA

SEQ ID NO: 58406 - protein, 32 aa, Artificial Sequence
  Cyclic GFR-binding peptide
  MOD_RES (26)..(27): Xaa is C or S
PYVKLVVNKNEDFFLISLSSMKEPVXXPEPIG

SEQ ID NO: 58407 - protein, 40 aa, Artificial Sequence
  Cyclic GFR-binding peptide
  MOD_RES (2)..(34)..(35): Xaa is C or S
AXSEVTMNPYVKLVVNKNEDFFLISLSSMKEPVXXPEPIG

SEQ ID NO: 58408 - protein, 29 aa, Artificial Sequence
  Cyclic GFR-binding peptide
  MOD_RES (27)..(28): Xaa is C or S
DPYVKLVVNNASDFFLISLSSLRTPVXXT

SEQ ID NO: 58409 - protein, 37 aa, Artificial Sequence
  Cyclic GFR-binding peptide
  MOD_RES (31)..(32): Xaa is C or S
SKVIMPYVKLIKPTKGILFFISLSSLDQSVXXPSASA

SEQ ID NO: 58410 - protein, 34 aa, Artificial Sequence
  Cyclic GFR-binding peptide
  MOD_RES (2)..(4): Xaa is C or S
RXGXESVAMGPYVKLYTVVGKDFFLISLSSLKTP

SEQ ID NO: 58411 - protein, 39 aa, Artificial Sequence
  Cyclic GFR-binding peptide
  MOD_RES (2)..(4): Xaa is C or S
AXAXELHEELRPYVKLLKPKKRVYEFFLVSLSSHHVRSP

SEQ ID NO: 58412 - protein, 36 aa, Artificial Sequence
  Cyclic GFR-binding peptide
  MOD_RES (1)..(3): Xaa is C or S
XEXKNHQLFPYVKLHQGQHPKIRFFLMSLSSEETPV

SEQ ID NO: 58413 - protein, 33 aa, Artificial Sequence
  Cyclic GFR-binding peptide
  MOD_RES (2)..(2): Xaa is C or S
AXELHEELRPYVKLLKPKKRVYEFFLVSLSSHH

SEQ ID NO: 58414 - protein, 38 aa, Artificial Sequence
  Cyclic GFR-binding peptide
  MOD_RES (1)..(38): Xaa is C or S
XELHEELRPYVKLLKPKKRVYEFFLVSLSSHHVRSPQX

SEQ ID NO: 58415 - protein, 27 aa, Artificial Sequence
  Cyclic GFR-binding peptide
ESVAMGPYVKLYTVVGKDFFLISLSSL

SEQ ID NO: 58416 - protein, 27 aa, Artificial Sequence
  Cyclic GFR-binding peptide
VVMDPYVKLVVNNAADFFLISLSSLRA

SEQ ID NO: 58417 - protein, 33 aa, Artificial Sequence
  Cyclic GFR-binding peptide
  MOD_RES (2)..(2): Xaa is C or S
AXSEVTMNPYVKLVVNKNEDFFLISLSSMKEPV

SEQ ID NO: 58418 - protein, 30 aa, Artificial Sequence
  Cyclic GFR-binding peptide
  MOD_RES (1)..(1): Xaa is C or S
XAEVVMDPYVKLVVNNAADFFLISLSSLRA

SEQ ID NO: 58419 - protein, 30 aa, Artificial Sequence
  Cyclic GFR-binding peptide
  MOD_RES (29)..(30): Xaa is C or S
TMNPYVKLVVNKNEDFFLISLSSMKEPVXX

SEQ ID NO: 58420 - protein, 26 aa, Artificial Sequence
  Cyclic GFR-binding peptide
RVVMNPYVKLIVNSSDDFFLVSLSSL

SEQ ID NO: 58421 - protein, 31 aa, Artificial Sequence
  Cyclic GFR-binding peptide
  MOD_RES (2)..(4): Xaa is C or S
RXGXGEVVMDPYVKLVVKENEDFFLMSLSSL

SEQ ID NO: 58422 - protein, 33 aa, Artificial Sequence
  Cyclic GFR-binding peptide
  MOD_RES (27)..(28): Xaa is C or S
DPYVKLVVKENEDFFLMSLSSLETPVXXAKPIK

SEQ ID NO: 58423 - protein, 25 aa, Artificial Sequence
  Cyclic GFR-binding peptide
NPYVKLIVNSSDDFFLVSLSSLQTP

SEQ ID NO: 58424 - protein, 31 aa, Artificial Sequence
  Cyclic GFR-binding peptide
  MOD_RES (31)..(31): Xaa is C or S
SKVVMPYVKLVKPTRGVLFFISLSSLDQPVX

SEQ ID NO: 58425 - protein, 38 aa, Artificial Sequence
  Cyclic GFR-binding peptide
  MOD_RES (32)..(33): Xaa is C or S
AKVVMNPYVKLIVNNSSDFFLVSLSSLKTPAXXAKPVA

SEQ ID NO: 58426 - protein, 29 aa, Artificial Sequence
  Cyclic GFR-binding peptide
EVIMPYVKLLLVRGNDFFLMSLSSTKVPA

SEQ ID NO: 58427 - protein, 34 aa, Artificial Sequence
  Cyclic GFR-binding peptide
  MOD_RES (30)..(31): Xaa is C or S
VAMGPYVKLYTVVGKDFFLISLSSLKTPVXXAKS

SEQ ID NO: 58428 - protein, 21 aa, Artificial Sequence
  Cyclic GFR-binding peptide
DPYVKLVVKENEDFFLMSLSS

SEQ ID NO: 58429 - protein, 31 aa, Artificial Sequence
  Cyclic GFR-binding peptide
  MOD_RES (28)..(29): Xaa is C or S
MNPYVKLIVNSSDDFFLVSLSSLKTPAXXPK

SEQ ID NO: 58430 - protein, 36 aa, Artificial Sequence
  Cyclic GFR-binding peptide
  MOD_RES (31)..(32): Xaa is C or S
EEVIMPYVKLLLVRGNDFFLMSLSSTKVPAXXTSPV

SEQ ID NO: 58431 - protein, 29 aa, Artificial Sequence
  Cyclic GFR-binding peptide
  MOD_RES (2)..(2): Xaa is C or S
GXARVVMNPYVKLIVNSSDDFFLVSLSSL

SEQ ID NO: 58432 - protein, 30 aa, Artificial Sequence
  Cyclic GFR-binding peptide
  MOD_RES (2)..(2): Xaa is C or S
GXESVAMGPYVKLYTVVGKDFFLISLSSLK

SEQ ID NO: 58433 - protein, 28 aa, Artificial Sequence
  Cyclic GFR-binding peptide
  MOD_RES (1)..(1): Xaa is C or S
XSKVVMPYVKLVKPTRGVLFFISLSSLD

SEQ ID NO: 58434 - protein, 33 aa, Artificial Sequence
  Cyclic GFR-binding peptide
  MOD_RES (1)..(32)..(33): Xaa is C or S
XSKVVMPYVKLVKPTRGVLFFISLSSLDQPVXX

SEQ ID NO: 58435 - protein, 28 aa, Artificial Sequence
  Cyclic GFR-binding peptide
  MOD_RES (26)..(27): Xaa is C or S
PYVKLIVNSSDDFFLVSLSSLKTPAXXP

SEQ ID NO: 58436 - protein, 31 aa, Artificial Sequence
  Cyclic GFR-binding peptide
  MOD_RES (28)..(29): Xaa is C or S
MDPYVKLVVNNASDFFLISLSSLRTPVXXTP

SEQ ID NO: 58437 - protein, 38 aa, Artificial Sequence
  Cyclic GFR-binding peptide
  MOD_RES (2)..(4)..(36)..(37): Xaa is C or S
RXGXGEVVMDPYVKLVVKENEDFFLMSLSSLETPVXXA

SEQ ID NO: 58438 - protein, 27 aa, Artificial Sequence
  Cyclic GFR-binding peptide
  MOD_RES (26)..(27): Xaa is C or S
PYVKLVVNKNEDFFLISLSSMKEPVXX

SEQ ID NO: 58439 - protein, 22 aa, Artificial Sequence
  Cyclic GFR-binding peptide
PYVKLIKPTKGILFFISLSSLD

SEQ ID NO: 58440 - protein, 27 aa, Artificial Sequence
  Cyclic GFR-binding peptide
RVVMNPYVKLIVNSSDDFFLVSLSSLQ

SEQ ID NO: 58441 - protein, 33 aa, Artificial Sequence
  Cyclic GFR-binding peptide
  MOD_RES (29)..(30): Xaa is C or S
VMNPYVKLIVNSSDDFFLVSLSSLQTPAXXPKP

SEQ ID NO: 58442 - protein, 26 aa, Artificial Sequence
  Cyclic GFR-binding peptide
GPYVKLIIQQKDNFFLMSLSSMKTPT

SEQ ID NO: 58443 - protein, 33 aa, Artificial Sequence
  Cyclic GFR-binding peptide
  MOD_RES (2)..(4): Xaa is C or S
RXGXSEVVMDPYVKLVVNNASDFFLISLSSLRT

SEQ ID NO: 58444 - protein, 33 aa, Artificial Sequence
  Cyclic GFR-binding peptide
  MOD_RES (33)..(33): Xaa is C or S
EAVSMGEPYVKLTPVGMDDFFLVSLSSLKTPVX

SEQ ID NO: 58445 - protein, 32 aa, Artificial Sequence
  Cyclic GFR-binding peptide
  MOD_RES (28)..(29): Xaa is C or S
MGPYVKLIIQQKDNFFLMSLSSMKTPTXXPGA

SEQ ID NO: 58446 - protein, 33 aa, Artificial Sequence
  Cyclic GFR-binding peptide
  MOD_RES (31)..(32): Xaa is C or S
SKVVMPYVKLVKPTRGVLFFISLSSLDQPVXXP

SEQ ID NO: 58447 - protein, 27 aa, Artificial Sequence
  Cyclic GFR-binding peptide
PYVKLHQGQHPKIRFFLMSLSSEETPV

SEQ ID NO: 58448 - protein, 29 aa, Artificial Sequence
  Cyclic GFR-binding peptide
HEELRPYVKLLKPKKRVYEFFLVSLSSHH

SEQ ID NO: 58449 - protein, 32 aa, Artificial Sequence
  Cyclic GFR-binding peptide
  MOD_RES (29)..(30): Xaa is C or S
VMNPYVKLIVNSSDDFFLVSLSSLQTPAXXPK

SEQ ID NO: 58450 - protein, 27 aa, Artificial Sequence
  Cyclic GFR-binding peptide
VIMPYVKLVKPKRGVLFFISLSSLAQP

SEQ ID NO: 58451 - protein, 37 aa, Artificial Sequence
  Cyclic GFR-binding peptide
  MOD_RES (34)..(34): Xaa is C or S
KNHQLFPYVKLHQGQHPKIRFFLMSLSSEETPVXELG

SEQ ID NO: 58452 - protein, 31 aa, Artificial Sequence
  Cyclic GFR-binding peptide
  MOD_RES (1)..(1): Xaa is C or S
XEEVIMPYVKLLLVRGNDFFLMSLSSTKVPA

SEQ ID NO: 58453 - protein, 35 aa, Artificial Sequence
  Cyclic GFR-binding peptide
  MOD_RES (31)..(32): Xaa is C or S
EVVMDPYVKLVVKENEDFFLMSLSSLETPVXXAKP

SEQ ID NO: 58454 - protein, 30 aa, Artificial Sequence
  Cyclic GFR-binding peptide
RVVMNPYVKLIVNSSDDFFLVSLSSLQTPA

SEQ ID NO: 58455 - protein, 32 aa, Artificial Sequence
  Cyclic GFR-binding peptide
  MOD_RES (2)..(2): Xaa is C or S
KXSRVIMPYVKLVKPKRGVLFFISLSSLAQPV

SEQ ID NO: 58456 - protein, 31 aa, Artificial Sequence
  Cyclic GFR-binding peptide
  MOD_RES (26)..(27): Xaa is C or S
PYVKLVKPKRGVLFFISLSSLAQPVXXPAAS

SEQ ID NO: 58457 - protein, 28 aa, Artificial Sequence
  Cyclic GFR-binding peptide
VMDPYVKLVVNNASDFFLISLSSLRTPV

SEQ ID NO: 58458 - protein, 31 aa, Artificial Sequence
  Cyclic GFR-binding peptide
  MOD_RES (2)..(4): Xaa is C or S
LXGXEEVIMPYVKLLLVRGNDFFLMSLSSTK

SEQ ID NO: 58459 - protein, 29 aa, Artificial Sequence
  Cyclic GFR-binding peptide
  MOD_RES (1)..(3): Xaa is C or S
XGXGEVVMDPYVKLVVKENEDFFLMSLSS

SEQ ID NO: 58460 - protein, 34 aa, Artificial Sequence
  Cyclic GFR-binding peptide
  MOD_RES (30)..(31): Xaa is C or S
VVMNPYVKLIVNSSDDFFLVSLSSLKTPAXXPKP

SEQ ID NO: 58461 - protein, 36 aa, Artificial Sequence
  Cyclic GFR-binding peptide
  MOD_RES (2)..(4)..(36): Xaa is C or S
HXGXARVVMNPYVKLIVNSSDDFFLVSLSSLQTPAX

SEQ ID NO: 58462 - protein, 28 aa, Artificial Sequence
  Cyclic GFR-binding peptide
VIMPYVKLVKPKRGVLFFISLSSLAQPV

SEQ ID NO: 58463 - protein, 37 aa, Artificial Sequence
  Cyclic GFR-binding peptide
  MOD_RES (35)..(35): Xaa is C or S
HEELRPYVKLLKPKKRVYEFFLVSLSSHHVRSPQXKV

SEQ ID NO: 58464 - protein, 32 aa, Artificial Sequence
  Cyclic GFR-binding peptide
  MOD_RES (2)..(2): Xaa is C or S
GXAKVVMNPYVKLIVNNSSDFFLVSLSSLKTP

SEQ ID NO: 58465 - protein, 28 aa, Artificial Sequence
  Cyclic GFR-binding peptide
VVMNPYVKLIVNNSSDFFLVSLSSLKTP

SEQ ID NO: 58466 - protein, 33 aa, Artificial Sequence
  Cyclic GFR-binding peptide
  MOD_RES (29)..(30): Xaa is C or S
VMNPYVKLIVNNSSDFFLVSLSSLKTPAXXAKP

SEQ ID NO: 58467 - protein, 26 aa, Artificial Sequence
  Cyclic GFR-binding peptide
FPYVKLHQGQHPKIRFFLMSLSSEET

SEQ ID NO: 58468 - protein, 24 aa, Artificial Sequence
  Cyclic GFR-binding peptide
VMPYVKLVKPTRGVLFFISLSSLD

SEQ ID NO: 58469 - protein, 32 aa, Artificial Sequence
  Cyclic GFR-binding peptide
  MOD_RES (27)..(28): Xaa is C or S
MPYVKLLLVRGNDFFLMSLSSTKVPAXXTSPV

SEQ ID NO: 58470 - protein, 26 aa, Artificial Sequence
  Cyclic GFR-binding peptide
EVVMDPYVKLVVKENEDFFLMSLSSL

SEQ ID NO: 58471 - protein, 27 aa, Artificial Sequence
  Cyclic GFR-binding peptide
  MOD_RES (2)..(2): Xaa is C or S
GXEEVIMPYVKLLLVRGNDFFLMSLSS

SEQ ID NO: 58472 - protein, 32 aa, Artificial Sequence
  Cyclic GFR-binding peptide
  MOD_RES (29)..(30): Xaa is C or S
VMNPYVKLIVNNSSDFFLVSLSSLKTPAXXAK

SEQ ID NO: 58473 - protein, 35 aa, Artificial Sequence
  Cyclic GFR-binding peptide
  MOD_RES (31)..(32): Xaa is C or S
EVVMDPYVKLVVNNASDFFLISLSSLRTPVXXTPP

SEQ ID NO: 58474 - protein, 42 aa, Artificial Sequence
  Cyclic GFR-binding peptide
  MOD_RES (2)..(4)..(36)..(37): Xaa is C or S
HXGXSRVVMNPYVKLIVNSSDDFFLVSLSSLKTPAXXPKPVY

SEQ ID NO: 58475 - protein, 32 aa, Artificial Sequence
  Cyclic GFR-binding peptide
EAVSMGEPYVKLTPVGMDDFFLVSLSSLKTPV

SEQ ID NO: 58476 - protein, 35 aa, Artificial Sequence
  Cyclic GFR-binding peptide
  MOD_RES (1)..(3)..(35): Xaa is C or S
XGXAKVVMNPYVKLIVNNSSDFFLVSLSSLKTPAX

SEQ ID NO: 58477 - protein, 33 aa, Artificial Sequence
  Cyclic GFR-binding peptide
  MOD_RES (1)..(3): Xaa is C or S
XEXKNHQLFPYVKLHQGQHPKIRFFLMSLSSEE

SEQ ID NO: 58478 - protein, 32 aa, Artificial Sequence
  Cyclic GFR-binding peptide
  MOD_RES (30)..(31): Xaa is C or S
KVVMPYVKLVKPTRGVLFFISLSSLDQPVXXP

SEQ ID NO: 58479 - protein, 36 aa, Artificial Sequence
  Cyclic GFR-binding peptide
  MOD_RES (30)..(30): Xaa is C or S
LFPYVKLHQGQHPKIRFFLMSLSSEETPVXELGEDN

SEQ ID NO: 58480 - protein, 39 aa, Artificial Sequence
  Cyclic GFR-binding peptide
  MOD_RES (2)..(33)..(34): Xaa is C or S
GXEEVIMPYVKLLLVRGNDFFLMSLSSTKVPAXXTSPVR

SEQ ID NO: 58481 - protein, 24 aa, Artificial Sequence
  Cyclic GFR-binding peptide
MPYVKLIKPTKGILFFISLSSLDQ

SEQ ID NO: 58482 - protein, 28 aa, Artificial Sequence
  Cyclic GFR-binding peptide
EEVIMPYVKLLLVRGNDFFLMSLSSTKV

SEQ ID NO: 58483 - protein, 33 aa, Artificial Sequence
  Cyclic GFR-binding peptide
  MOD_RES (32)..(32): Xaa is C or S
HQLFPYVKLHQGQHPKIRFFLMSLSSEETPVXE

SEQ ID NO: 58484 - protein, 33 aa, Artificial Sequence
  Cyclic GFR-binding peptide
  MOD_RES (30)..(31): Xaa is C or S
VVMNPYVKLIVNSSDDFFLVSLSSLKTPAXXPK

SEQ ID NO: 58485 - protein, 40 aa, Artificial Sequence
  Cyclic GFR-binding peptide
  MOD_RES (37)..(37): Xaa is C or S
ELHEELRPYVKLLKPKKRVYEFFLVSLSSHHVRSPQXKVS

SEQ ID NO: 58486 - protein, 30 aa, Artificial Sequence
  Cyclic GFR-binding peptide
  MOD_RES (29)..(30): Xaa is C or S
VMNPYVKLIVNNSSDFFLVSLSSLKTPAXX

SEQ ID NO: 58487 - protein, 26 aa, Artificial Sequence
  Cyclic GFR-binding peptide
  MOD_RES (26)..(26): Xaa is C or S
PYVKLTPVGMDDFFLVSLSSLKTPVX

SEQ ID NO: 58488 - protein, 34 aa, Artificial Sequence
  Cyclic GFR-binding peptide
  MOD_RES (2)..(4): Xaa is C or S
RXEXKNHQLFPYVKLHQGQHPKIRFFLMSLSSEE

SEQ ID NO: 58489 - protein, 32 aa, Artificial Sequence
  Cyclic GFR-binding peptide
  MOD_RES (30)..(31): Xaa is C or S
SMGEPYVKLTPVGMDDFFLVSLSSLKTPVXXA

SEQ ID NO: 58490 - protein, 36 aa, Artificial Sequence
  Cyclic GFR-binding peptide
  MOD_RES (2)..(4)..(36): Xaa is C or S
RXGXESVAMGPYVKLYTVVGKDFFLISLSSLKTPVX

SEQ ID NO: 58491 - protein, 29 aa, Artificial Sequence
  Cyclic GFR-binding peptide
  MOD_RES (26)..(27): Xaa is C or S
PYVKLIVNSSDDFFLVSLSSLQTPAXXPK

SEQ ID NO: 58492 - protein, 36 aa, Artificial Sequence
  Cyclic GFR-binding peptide
  MOD_RES (2)..(4)..(36): Xaa is C or S
HXGXSRVVMNPYVKLIVNSSDDFFLVSLSSLKTPAX

SEQ ID NO: 58493 - protein, 24 aa, Artificial Sequence
  Cyclic GFR-binding peptide
VIMPYVKLLLVRGNDFFLMSLSST

SEQ ID NO: 58494 - protein, 27 aa, Artificial Sequence
  Cyclic GFR-binding peptide
  MOD_RES (27)..(27): Xaa is C or S
DPYVKLVVNNASDFFLISLSSLRTPVX

SEQ ID NO: 58495 - protein, 34 aa, Artificial Sequence
  Cyclic GFR-binding peptide
  MOD_RES (1)..(3): Xaa is C or S
XGXGEVVMDPYVKLVVKENEDFFLMSLSSLETPV

SEQ ID NO: 58496 - protein, 32 aa, Artificial Sequence
  Cyclic GFR-binding peptide
  MOD_RES (31)..(32): Xaa is C or S
SRVIMPYVKLVKPKRGVLFFISLSSLAQPVXX

SEQ ID NO: 58497 - protein, 23 aa, Artificial Sequence
  Cyclic GFR-binding peptide
VVMPYVKLVKPTRGVLFFISLSS

SEQ ID NO: 58498 - protein, 40 aa, Artificial Sequence
  Cyclic GFR-binding peptide
  MOD_RES (1)..(3)..(35)..(36): Xaa is C or S
XGXAKVVMNPYVKLIVNNSSDFFLVSLSSLKTPAXXAKPV

SEQ ID NO: 58499 - protein, 27 aa, Artificial Sequence
  Cyclic GFR-binding peptide
MGPYVKLYTVVGKDFFLISLSSLKTPV

SEQ ID NO: 58500 - protein, 40 aa, Artificial Sequence
  Cyclic GFR-binding peptide
  MOD_RES (2)..(4)..(35)..(36): Xaa is C or S
SXKXSRVIMPYVKLVKPKRGVLFFISLSSLAQPVXXPAAS

SEQ ID NO: 58501 - protein, 32 aa, Artificial Sequence
  Cyclic GFR-binding peptide
  MOD_RES (29)..(30): Xaa is C or S
AMGPYVKLYTVVGKDFFLISLSSLKTPVXXAK

SEQ ID NO: 58502 - protein, 36 aa, Artificial Sequence
  Cyclic GFR-binding peptide
  MOD_RES (30)..(31): Xaa is C or S
VVMDPYVKLVVKENEDFFLMSLSSLETPVXXAKPIK

SEQ ID NO: 58503 - protein, 28 aa, Artificial Sequence
  Cyclic GFR-binding peptide
  MOD_RES (28)..(28): Xaa is C or S
GEPYVKLTPVGMDDFFLVSLSSLKTPVX

SEQ ID NO: 58504 - protein, 41 aa, Artificial Sequence
  Cyclic GFR-binding peptide
  MOD_RES (2)..(4)..(35)..(36): Xaa is C or S
SXKXSRVIMPYVKLVKPKRGVLFFISLSSLAQPVXXPAASA

SEQ ID NO: 58505 - protein, 30 aa, Artificial Sequence
  Cyclic GFR-binding peptide
  MOD_RES (2)..(4): Xaa is C or S
RXGXSEVVMDPYVKLVVNNASDFFLISLSS

SEQ ID NO: 58506 - protein, 29 aa, Artificial Sequence
  Cyclic GFR-binding peptide
  MOD_RES (28)..(29): Xaa is C or S
MNPYVKLIVNSSDDFFLVSLSSLQTPAXX

SEQ ID NO: 58507 - protein, 32 aa, Artificial Sequence
  Cyclic GFR-binding peptide
  MOD_RES (30)..(31): Xaa is C or S
VVMGPYVKLIIQQKDNFFLMSLSSMKTPTXXP

SEQ ID NO: 58508 - protein, 31 aa, Artificial Sequence
  Cyclic GFR-binding peptide
  MOD_RES (27)..(28): Xaa is C or S
NPYVKLVVNKNEDFFLISLSSMKEPVXXPEP

SEQ ID NO: 58509 - protein, 26 aa, Artificial Sequence
  Cyclic GFR-binding peptide
MGPYVKLYTVVGKDFFLISLSSLKTP

SEQ ID NO: 58510 - protein, 36 aa, Artificial Sequence
  Cyclic GFR-binding peptide
  MOD_RES (2)..(34)..(35): Xaa is C or S
GXARVVMNPYVKLIVNSSDDFFLVSLSSLQTPAXXP

SEQ ID NO: 58511 - protein, 28 aa, Artificial Sequence
  Cyclic GFR-binding peptide
  MOD_RES (28)..(28): Xaa is C or S
MNPYVKLIVNSSDDFFLVSLSSLKTPAX

SEQ ID NO: 58512 - protein, 37 aa, Artificial Sequence
  Cyclic GFR-binding peptide
  MOD_RES (31)..(31): Xaa is C or S
RVVMNPYVKLIVNSSDDFFLVSLSSLKTPAXTPKTVH

SEQ ID NO: 58513 - protein, 34 aa, Artificial Sequence
  Cyclic GFR-binding peptide
  MOD_RES (31)..(32): Xaa is C or S
EVTMNPYVKLVVNKNEDFFLISLSSMKEPVXXPE

SEQ ID NO: 58514 - protein, 32 aa, Artificial Sequence
  Cyclic GFR-binding peptide
  MOD_RES (26)..(27): Xaa is C or S
PYVKLIIQQKDNFFLMSLSSMKTPTXXPGASG

SEQ ID NO: 58515 - protein, 38 aa, Artificial Sequence
  Cyclic GFR-binding peptide
  MOD_RES (37)..(37): Xaa is C or S
ELHEELRPYVKLLKPKKRVYEFFLVSLSSHHVRSPQXK

SEQ ID NO: 58516 - protein, 35 aa, Artificial Sequence
  Cyclic GFR-binding peptide
  MOD_RES (33)..(34): Xaa is C or S
EAVSMGEPYVKLTPVGMDDFFLVSLSSLKTPVXXA

SEQ ID NO: 58517 - protein, 26 aa, Artificial Sequence
  Cyclic GFR-binding peptide
ELRPYVKLLKPKKRVYEFFLVSLSSH

SEQ ID NO: 58518 - protein, 32 aa, Artificial Sequence
  Cyclic GFR-binding peptide
  MOD_RES (32)..(32): Xaa is C or S
SEVVMDPYVKLVVNNASDFFLISLSSLRTPVX

SEQ ID NO: 58519 - protein, 31 aa, Artificial Sequence
  Cyclic GFR-binding peptide
  MOD_RES (27)..(28): Xaa is C or S
MPYVKLIKPTKGILFFISLSSLDQSVXXPSA

SEQ ID NO: 58520 - protein, 29 aa, Artificial Sequence
  Cyclic GFR-binding peptide
SEVTMNPYVKLVVNKNEDFFLISLSSMKE

SEQ ID NO: 58521 - protein, 24 aa, Artificial Sequence
  Cyclic GFR-binding peptide
PYVKLIIQQKDNFFLMSLSSMKTP

SEQ ID NO: 58522 - protein, 36 aa, Artificial Sequence
  Cyclic GFR-binding peptide
  MOD_RES (1)..(32)..(33): Xaa is C or S
XSKVVMPYVKLVKPTRGVLFFISLSSLDQPVXXPSA

SEQ ID NO: 58523 - protein, 33 aa, Artificial Sequence
  Cyclic GFR-binding peptide
  MOD_RES (2)..(4): Xaa is C or S
HXGXSRVVMNPYVKLIVNSSDDFFLVSLSSLKT

SEQ ID NO: 58524 - protein, 32 aa, Artificial Sequence
  Cyclic GFR-binding peptide
  MOD_RES (32)..(32): Xaa is C or S
LRPYVKLLKPKKRVYEFFLVSLSSHHVRSPQX

SEQ ID NO: 58525 - protein, 31 aa, Artificial Sequence
  Cyclic GFR-binding peptide
  MOD_RES (31)..(31): Xaa is C or S
RVVMNPYVKLIVNSSDDFFLVSLSSLQTPAX

SEQ ID NO: 58526 - protein, 36 aa, Artificial Sequence
  Cyclic GFR-binding peptide
  MOD_RES (32)..(33): Xaa is C or S
SEVTMNPYVKLVVNKNEDFFLISLSSMKEPVXXPEP

SEQ ID NO: 58527 - protein, 21 aa, Artificial Sequence
  Cyclic GFR-binding peptide
MPYVKLIKPTKGILFFISLSS

SEQ ID NO: 58528 - protein, 27 aa, Artificial Sequence
  Cyclic GFR-binding peptide
KVVMNPYVKLIVNNSSDFFLVSLSSLK

SEQ ID NO: 58529 - protein, 30 aa, Artificial Sequence
  Cyclic GFR-binding peptide
  MOD_RES (29)..(30): Xaa is C or S
VMNPYVKLIVNSSDDFFLVSLSSLKTPAXX

SEQ ID NO: 58530 - protein, 40 aa, Artificial Sequence
  Cyclic GFR-binding peptide
  MOD_RES (1)..(35): Xaa is C or S
XKNHQLFPYVKLHQGQHPKIRFFLMSLSSEETPVXELGED

SEQ ID NO: 58531 - protein, 34 aa, Artificial Sequence
  Cyclic GFR-binding peptide
  MOD_RES (28)..(29): Xaa is C or S
MDPYVKLVVNNASDFFLISLSSLRTPVXXTPPTS

SEQ ID NO: 58532 - protein, 22 aa, Artificial Sequence
  Cyclic GFR-binding peptide
MPYVKLVKPKRGVLFFISLSSL

SEQ ID NO: 58533 - protein, 29 aa, Artificial Sequence
  Cyclic GFR-binding peptide
  MOD_RES (1)..(3): Xaa is C or S
XKXSRVIMPYVKLVKPKRGVLFFISLSSL

SEQ ID NO: 58534 - protein, 40 aa, Artificial Sequence
  Cyclic GFR-binding peptide
  MOD_RES (2)..(4)..(35)..(36): Xaa is C or S
LXGXEEVIMPYVKLLLVRGNDFFLMSLSSTKVPAXXTSPV

SEQ ID NO: 58535 - protein, 25 aa, Artificial Sequence
  Cyclic GFR-binding peptide
RVVMNPYVKLIVNSSDDFFLVSLSS

SEQ ID NO: 58536 - protein, 36 aa, Artificial Sequence
  Cyclic GFR-binding peptide
  MOD_RES (2)..(4)..(36): Xaa is C or S
HXGXAKVVMNPYVKLIVNNSSDFFLVSLSSLKTPAX

SEQ ID NO: 58537 - protein, 35 aa, Artificial Sequence
  Cyclic GFR-binding peptide
  MOD_RES (2)..(4): Xaa is C or S
HXGXSRVVMNPYVKLIVNSSDDFFLVSLSSLKTPA

SEQ ID NO: 58538 - protein, 39 aa, Artificial Sequence
  Cyclic GFR-binding peptide
  MOD_RES (33)..(34): Xaa is C or S
EAVSMGEPYVKLTPVGMDDFFLVSLSSLKTPVXXAKGVK

SEQ ID NO: 58539 - protein, 41 aa, Artificial Sequence
  Cyclic GFR-binding peptide
  MOD_RES (2)..(4)..(36)..(37): Xaa is C or S
RXGXAEVVMDPYVKLVVNNAADFFLISLSSLRAPVXXSAPA

SEQ ID NO: 58540 - protein, 25 aa, Artificial Sequence
  Cyclic GFR-binding peptide
LFPYVKLHQGQHPKIRFFLMSLSSE

SEQ ID NO: 58541 - protein, 37 aa, Artificial Sequence
  Cyclic GFR-binding peptide
  MOD_RES (2)..(34)..(35): Xaa is C or S
GXSEVVMDPYVKLVVNNASDFFLISLSSLRTPVXXTP

SEQ ID NO: 58542 - protein, 30 aa, Artificial Sequence
  Cyclic GFR-binding peptide
  MOD_RES (28)..(29): Xaa is C or S
MDPYVKLVVNNASDFFLISLSSLRTPVXXT

SEQ ID NO: 58543 - protein, 39 aa, Artificial Sequence
  Cyclic GFR-binding peptide
  MOD_RES (2)..(34)..(35): Xaa is C or S
GXAEVVMDPYVKLVVNNAADFFLISLSSLRAPVXXSAPA

SEQ ID NO: 58544 - protein, 25 aa, Artificial Sequence
  Cyclic GFR-binding peptide
MNPYVKLIVNNSSDFFLVSLSSLKT

SEQ ID NO: 58545 - protein, 32 aa, Artificial Sequence
  Cyclic GFR-binding peptide
  MOD_RES (27)..(28): Xaa is C or S
GPYVKLIIQQKDNFFLMSLSSMKTPTXXPGAS

SEQ ID NO: 58546 - protein, 21 aa, Artificial Sequence
  Cyclic GFR-binding peptide
NPYVKLIVNSSDDFFLVSLSS

SEQ ID NO: 58547 - protein, 31 aa, Artificial Sequence
  Cyclic GFR-binding peptide
  MOD_RES (31)..(31): Xaa is C or S
QLFPYVKLHQGQHPKIRFFLMSLSSEETPVX

SEQ ID NO: 58548 - protein, 29 aa, Artificial Sequence
  Cyclic GFR-binding peptide
  MOD_RES (26)..(27): Xaa is C or S
PYVKLIKPTKGILFFISLSSLDQSVXXPS

SEQ ID NO: 58549 - protein, 37 aa, Artificial Sequence
  Cyclic GFR-binding peptide
  MOD_RES (1)..(32)..(33): Xaa is C or S
XSKVIMPYVKLIKPTKGILFFISLSSLDQSVXXPSAS

SEQ ID NO: 58550 - protein, 39 aa, Artificial Sequence
  Cyclic GFR-binding peptide
  MOD_RES (2)..(33)..(34): Xaa is C or S
KXSKVIMPYVKLIKPTKGILFFISLSSLDQSVXXPSASA

SEQ ID NO: 58551 - protein, 21 aa, Artificial Sequence
  Cyclic GFR-binding peptide
PYVKLVVNNASDFFLISLSSL

SEQ ID NO: 58552 - protein, 34 aa, Artificial Sequence
  Cyclic GFR-binding peptide
  MOD_RES (32)..(33): Xaa is C or S
AVSMGEPYVKLTPVGMDDFFLVSLSSLKTPVXXA

SEQ ID NO: 58553 - protein, 35 aa, Artificial Sequence
  Cyclic GFR-binding peptide
  MOD_RES (29)..(29): Xaa is C or S
VMNPYVKLIVNSSDDFFLVSLSSLKTPAXTPKTVH

SEQ ID NO: 58554 - protein, 36 aa, Artificial Sequence
  Cyclic GFR-binding peptide
  MOD_RES (31)..(31): Xaa is C or S
QLFPYVKLHQGQHPKIRFFLMSLSSEETPVXELGED

SEQ ID NO: 58555 - protein, 33 aa, Artificial Sequence
  Cyclic GFR-binding peptide
  MOD_RES (31)..(32): Xaa is C or S
DVVMGPYVKLIIQQKDNFFLMSLSSMKTPTXXP

SEQ ID NO: 58556 - protein, 27 aa, Artificial Sequence
  Cyclic GFR-binding peptide
EVIMPYVKLLLVRGNDFFLMSLSSTKV

SEQ ID NO: 58557 - protein, 30 aa, Artificial Sequence
  Cyclic GFR-binding peptide
  MOD_RES (26)..(27): Xaa is C or S
PYVKLVKPTRGVLFFISLSSLDQPVXXPSA

SEQ ID NO: 58558 - protein, 35 aa, Artificial Sequence
  Cyclic GFR-binding peptide
  MOD_RES (2)..(4): Xaa is C or S
RXGXAEVVMDPYVKLVVNNAADFFLISLSSLRAPV

SEQ ID NO: 58559 - protein, 27 aa, Artificial Sequence
  Cyclic GFR-binding peptide
SEVTMNPYVKLVVNKNEDFFLISLSSM

SEQ ID NO: 58560 - protein, 37 aa, Artificial Sequence
  Cyclic GFR-binding peptide
  MOD_RES (32)..(33): Xaa is C or S
SEVTMNPYVKLVVNKNEDFFLISLSSMKEPVXXPEPI

SEQ ID NO: 58561 - protein, 35 aa, Artificial Sequence
  Cyclic GFR-binding peptide
  MOD_RES (2)..(4)..(35): Xaa is C or S
SXKXSRVIMPYVKLVKPKRGVLFFISLSSLAQPVX

SEQ ID NO: 58562 - protein, 32 aa, Artificial Sequence
  Cyclic GFR-binding peptide
  MOD_RES (2)..(4): Xaa is C or S
RXGXAEVVMDPYVKLVVNNAADFFLISLSSLR

SEQ ID NO: 58563 - protein, 37 aa, Artificial Sequence
  Cyclic GFR-binding peptide
  MOD_RES (31)..(32): Xaa is C or S
RVVMNPYVKLIVNSSDDFFLVSLSSLKTPAXXPKPVH

SEQ ID NO: 58564 - protein, 26 aa, Artificial Sequence
  Cyclic GFR-binding peptide
NPYVKLVVNKNEDFFLISLSSMKEPV

SEQ ID NO: 58565 - protein, 31 aa, Artificial Sequence
  Cyclic GFR-binding peptide
  MOD_RES (26)..(27): Xaa is C or S
PYVKLIIQQKDNFFLMSLSSMKTPTXXPGAS

SEQ ID NO: 58566 - protein, 28 aa, Artificial Sequence
  Cyclic GFR-binding peptide
  MOD_RES (2)..(2): Xaa is C or S
KXSRVIMPYVKLVKPKRGVLFFISLSSL

SEQ ID NO: 58567 - protein, 28 aa, Artificial Sequence
  Cyclic GFR-binding peptide
VMNPYVKLIVNNSSDFFLVSLSSLKTPA

SEQ ID NO: 58568 - protein, 35 aa, Artificial Sequence
  Cyclic GFR-binding peptide
  MOD_RES (2)..(4): Xaa is C or S
HXGXAKVVMNPYVKLIVNNSSDFFLVSLSSLKTPA

SEQ ID NO: 58569 - protein, 37 aa, Artificial Sequence
  Cyclic GFR-binding peptide
  MOD_RES (32)..(32): Xaa is C or S
HQLFPYVKLHQGQHPKIRFFLMSLSSEETPVXELGED

SEQ ID NO: 58570 - protein, 29 aa, Artificial Sequence
  Cyclic GFR-binding peptide
  MOD_RES (29)..(29): Xaa is C or S
VMDPYVKLVVNNASDFFLISLSSLRTPVX

SEQ ID NO: 58571 - protein, 29 aa, Artificial Sequence
  Cyclic GFR-binding peptide
  MOD_RES (27)..(28): Xaa is C or S
DPYVKLVVNNAADFFLISLSSLRAPVXXS

SEQ ID NO: 58572 - protein, 32 aa, Artificial Sequence
  Cyclic GFR-binding peptide
  MOD_RES (26)..(27): Xaa is C or S
PYVKLYTVVGKDFFLISLSSLKTPVXXAKSAK

SEQ ID NO: 58573 - protein, 31 aa, Artificial Sequence
  Cyclic GFR-binding peptide
  MOD_RES (2)..(4): Xaa is C or S
SXKXSKVIMPYVKLIKPTKGILFFISLSSLD

SEQ ID NO: 58574 - protein, 28 aa, Artificial Sequence
  Cyclic GFR-binding peptide
VIMPYVKLLLVRGNDFFLMSLSSTKVPA

SEQ ID NO: 58575 - protein, 24 aa, Artificial Sequence
  Cyclic GFR-binding peptide
VIMPYVKLIKPTKGILFFISLSSL

SEQ ID NO: 58576 - protein, 24 aa, Artificial Sequence
  Cyclic GFR-binding peptide
PYVKLLKPKKRVYEFFLVSLSSHH

SEQ ID NO: 58577 - protein, 33 aa, Artificial Sequence
  Cyclic GFR-binding peptide
KNHQLFPYVKLHQGQHPKIRFFLMSLSSEETPV

SEQ ID NO: 58578 - protein, 36 aa, Artificial Sequence
  Cyclic GFR-binding peptide
  MOD_RES (1)..(3)..(35)..(36): Xaa is C or S
XGXGEVVMDPYVKLVVKENEDFFLMSLSSLETPVXX

SEQ ID NO: 58579 - protein, 34 aa, Artificial Sequence
  Cyclic GFR-binding peptide
  MOD_RES (29)..(30): Xaa is C or S
VMNPYVKLIVNNSSDFFLVSLSSLKTPAXXAKPV

SEQ ID NO: 58580 - protein, 35 aa, Artificial Sequence
  Cyclic GFR-binding peptide
  MOD_RES (1)..(33)..(34): Xaa is C or S
XSRVVMNPYVKLIVNSSDDFFLVSLSSLKTPAXXP

SEQ ID NO: 58581 - protein, 35 aa, Artificial Sequence
  Cyclic GFR-binding peptide
  MOD_RES (29)..(30): Xaa is C or S
VVMPYVKLVKPTRGVLFFISLSSLDQPVXXPSASA

SEQ ID NO: 58582 - protein, 30 aa, Artificial Sequence
  Cyclic GFR-binding peptide
GEVVMDPYVKLVVKENEDFFLMSLSSLETP

SEQ ID NO: 58583 - protein, 42 aa, Artificial Sequence
  Cyclic GFR-binding peptide
  MOD_RES (2)..(4)..(36)..(37): Xaa is C or S
HXGXARVVMNPYVKLIVNSSDDFFLVSLSSLQTPAXXPKPVT

SEQ ID NO: 58584 - protein, 32 aa, Artificial Sequence
  Cyclic GFR-binding peptide
  MOD_RES (27)..(28): Xaa is C or S
DPYVKLVVKENEDFFLMSLSSLETPVXXAKPI

SEQ ID NO: 58585 - protein, 39 aa, Artificial Sequence
  Cyclic GFR-binding peptide
  MOD_RES (2)..(33)..(34): Xaa is C or S
KXSKVVMPYVKLVKPTRGVLFFISLSSLDQPVXXPSASA

SEQ ID NO: 58586 - protein, 38 aa, Artificial Sequence
  Cyclic GFR-binding peptide
  MOD_RES (32)..(33): Xaa is C or S
GEVVMDPYVKLVVKENEDFFLMSLSSLETPVXXAKPIK

SEQ ID NO: 58587 - protein, 36 aa, Artificial Sequence
  Cyclic GFR-binding peptide
  MOD_RES (2)..(33)..(34): Xaa is C or S
KXSKVVMPYVKLVKPTRGVLFFISLSSLDQPVXXPS

SEQ ID NO: 58588 - protein, 35 aa, Artificial Sequence
  Cyclic GFR-binding peptide
  MOD_RES (32)..(32): Xaa is C or S
LRPYVKLLKPKKRVYEFFLVSLSSHHVRSPQXKVS

SEQ ID NO: 58589 - protein, 27 aa, Artificial Sequence
  Cyclic GFR-binding peptide
EVVMDPYVKLVVKENEDFFLMSLSSLE

SEQ ID NO: 58590 - protein, 29 aa, Artificial Sequence
  Cyclic GFR-binding peptide
  MOD_RES (1)..(1): Xaa is C or S
XGEVVMDPYVKLVVKENEDFFLMSLSSLE

SEQ ID NO: 58591 - protein, 32 aa, Artificial Sequence
  Cyclic GFR-binding peptide
  MOD_RES (30)..(30): Xaa is C or S
VVMNPYVKLIVNSSDDFFLVSLSSLKTPAXTP

SEQ ID NO: 58592 - protein, 36 aa, Artificial Sequence
  Cyclic GFR-binding peptide
  MOD_RES (32)..(32): Xaa is C or S
HQLFPYVKLHQGQHPKIRFFLMSLSSEETPVXELGE

SEQ ID NO: 58593 - protein, 34 aa, Artificial Sequence
  Cyclic GFR-binding peptide
  MOD_RES (1)..(3): Xaa is C or S
XGXARVVMNPYVKLIVNSSDDFFLVSLSSLQTPA

SEQ ID NO: 58594 - protein, 29 aa, Artificial Sequence
  Cyclic GFR-binding peptide
  MOD_RES (27)..(28): Xaa is C or S
NPYVKLIVNSSDDFFLVSLSSLQTPAXXP

SEQ ID NO: 58595 - protein, 39 aa, Artificial Sequence
  Cyclic GFR-binding peptide
  MOD_RES (1)..(3)..(37): Xaa is C or S
XEXKNHQLFPYVKLHQGQHPKIRFFLMSLSSEETPVXEL

SEQ ID NO: 58596 - protein, 32 aa, Artificial Sequence
  Cyclic GFR-binding peptide
  MOD_RES (27)..(28): Xaa is C or S
DPYVKLVVNNASDFFLISLSSLRTPVXXTPPT

SEQ ID NO: 58597 - protein, 26 aa, Artificial Sequence
  Cyclic GFR-binding peptide
EVVMDPYVKLVVNNASDFFLISLSSL

SEQ ID NO: 58598 - protein, 20 aa, Artificial Sequence
  Cyclic GFR-binding peptide
PYVKLVVNKNEDFFLISLSS

SEQ ID NO: 58599 - protein, 36 aa, Artificial Sequence
  Cyclic GFR-binding peptide
  MOD_RES (35)..(35): Xaa is C or S
HEELRPYVKLLKPKKRVYEFFLVSLSSHHVRSPQXK

SEQ ID NO: 58600 - protein, 26 aa, Artificial Sequence
  Cyclic GFR-binding peptide
NPYVKLIVNSSDDFFLVSLSSLQTPA

SEQ ID NO: 58601 - protein, 29 aa, Artificial Sequence
  Cyclic GFR-binding peptide
VVMDPYVKLVVNNASDFFLISLSSLRTPV

SEQ ID NO: 58602 - protein, 34 aa, Artificial Sequence
  Cyclic GFR-binding peptide
  MOD_RES (2)..(4): Xaa is C or S
AXAXELHEELRPYVKLLKPKKRVYEFFLVSLSSH

SEQ ID NO: 58603 - protein, 36 aa, Artificial Sequence
  Cyclic GFR-binding peptide
  MOD_RES (1)..(3)..(34)..(35): Xaa is C or S
XKXSKVVMPYVKLVKPTRGVLFFISLSSLDQPVXXP

SEQ ID NO: 58604 - protein, 32 aa, Artificial Sequence
  Cyclic GFR-binding peptide
  MOD_RES (29)..(30): Xaa is C or S
VVMPYVKLVKPTRGVLFFISLSSLDQPVXXPS

SEQ ID NO: 58605 - protein, 24 aa, Artificial Sequence
  Cyclic GFR-binding peptide
LFPYVKLHQGQHPKIRFFLMSLSS

SEQ ID NO: 58606 - protein, 31 aa, Artificial Sequence
  Cyclic GFR-binding peptide
  MOD_RES (30)..(31): Xaa is C or S
VVMGPYVKLIIQQKDNFFLMSLSSMKTPTXX

SEQ ID NO: 58607 - protein, 30 aa, Artificial Sequence
  Cyclic GFR-binding peptide
  MOD_RES (1)..(3): Xaa is C or S
XGXEEVIMPYVKLLLVRGNDFFLMSLSSTK

SEQ ID NO: 58608 - protein, 28 aa, Artificial Sequence
  Cyclic GFR-binding peptide
EVVMDPYVKLVVNNAADFFLISLSSLRA

SEQ ID NO: 58609 - protein, 40 aa, Artificial Sequence
  Cyclic GFR-binding peptide
  MOD_RES (2)..(4)..(36)..(37): Xaa is C or S
RXGXAEVVMDPYVKLVVNNAADFFLISLSSLRAPVXXSAP

SEQ ID NO: 58610 - protein, 40 aa, Artificial Sequence
  Cyclic GFR-binding peptide
  MOD_RES (2)..(34)..(35): Xaa is C or S
GXESVAMGPYVKLYTVVGKDFFLISLSSLKTPVXXAKSAK

SEQ ID NO: 58611 - protein, 22 aa, Artificial Sequence
  Cyclic GFR-binding peptide
PYVKLVVNNASDFFLISLSSLR

SEQ ID NO: 58612 - protein, 29 aa, Artificial Sequence
  Cyclic GFR-binding peptide
  MOD_RES (28)..(29): Xaa is C or S
MGPYVKLIIQQKDNFFLMSLSSMKTPTXX

SEQ ID NO: 58613 - protein, 23 aa, Artificial Sequence
  Cyclic GFR-binding peptide
PYVKLIVNSSDDFFLVSLSSLQT

SEQ ID NO: 58614 - protein, 25 aa, Artificial Sequence
  Cyclic GFR-binding peptide
EVVMDPYVKLVVNNASDFFLISLSS

SEQ ID NO: 58615 - protein, 31 aa, Artificial Sequence
  Cyclic GFR-binding peptide
  MOD_RES (26)..(27): Xaa is C or S
PYVKLIVNSSDDFFLVSLSSLKTPAXXPKPV

SEQ ID NO: 58616 - protein, 25 aa, Artificial Sequence
  Cyclic GFR-binding peptide
GEPYVKLTPVGMDDFFLVSLSSLKT

SEQ ID NO: 58617 - protein, 32 aa, Artificial Sequence
  Cyclic GFR-binding peptide
  MOD_RES (2)..(2): Xaa is C or S
AXSEVTMNPYVKLVVNKNEDFFLISLSSMKEP

SEQ ID NO: 58618 - protein, 27 aa, Artificial Sequence
  Cyclic GFR-binding peptide
  MOD_RES (27)..(27): Xaa is C or S
NPYVKLIVNNSSDFFLVSLSSLKTPAX

SEQ ID NO: 58619 - protein, 29 aa, Artificial Sequence
  Cyclic GFR-binding peptide
RVVMNPYVKLIVNSSDDFFLVSLSSLQTP

SEQ ID NO: 58620 - protein, 21 aa, Artificial Sequence
  Cyclic GFR-binding peptide
EPYVKLTPVGMDDFFLVSLSS

SEQ ID NO: 58621 - protein, 36 aa, Artificial Sequence
  Cyclic GFR-binding peptide
  MOD_RES (33)..(34): Xaa is C or S
EAVSMGEPYVKLTPVGMDDFFLVSLSSLKTPVXXAK

SEQ ID NO: 58622 - protein, 30 aa, Artificial Sequence
  Cyclic GFR-binding peptide
  MOD_RES (30)..(30): Xaa is C or S
KVVMPYVKLVKPTRGVLFFISLSSLDQPVX

SEQ ID NO: 58623 - protein, 36 aa, Artificial Sequence
  Cyclic GFR-binding peptide
  MOD_RES (2)..(4)..(36): Xaa is C or S
RXGXAEVVMDPYVKLVVNNAADFFLISLSSLRAPVX

SEQ ID NO: 58624 - protein, 29 aa, Artificial Sequence
  Cyclic GFR-binding peptide
  MOD_RES (29)..(29): Xaa is C or S
VIMPYVKLVKPKRGVLFFISLSSLAQPVX

SEQ ID NO: 58625 - protein, 34 aa, Artificial Sequence
  Cyclic GFR-binding peptide
  MOD_RES (1)..(33)..(34): Xaa is C or S
XAKVVMNPYVKLIVNNSSDFFLVSLSSLKTPAXX

SEQ ID NO: 58626 - protein, 35 aa, Artificial Sequence
  Cyclic GFR-binding peptide
  MOD_RES (29)..(30): Xaa is C or S
MGEPYVKLTPVGMDDFFLVSLSSLKTPVXXAKGVK

SEQ ID NO: 58627 - protein, 39 aa, Artificial Sequence
  Cyclic GFR-binding peptide
  MOD_RES (2)..(34)..(35): Xaa is C or S
GXGEVVMDPYVKLVVKENEDFFLMSLSSLETPVXXAKPI

SEQ ID NO: 58628 - protein, 27 aa, Artificial Sequence
  Cyclic GFR-binding peptide
TMNPYVKLVVNKNEDFFLISLSSMKEP

SEQ ID NO: 58629 - protein, 28 aa, Artificial Sequence
  Cyclic GFR-binding peptide
VVMPYVKLVKPTRGVLFFISLSSLDQPV

SEQ ID NO: 58630 - protein, 36 aa, Artificial Sequence
  Cyclic GFR-binding peptide
  MOD_RES (2)..(4): Xaa is C or S
AXAXELHEELRPYVKLLKPKKRVYEFFLVSLSSHHV

SEQ ID NO: 58631 - protein, 37 aa, Artificial Sequence
  Cyclic GFR-binding peptide
  MOD_RES (2)..(36): Xaa is C or S
EXKNHQLFPYVKLHQGQHPKIRFFLMSLSSEETPVXE

SEQ ID NO: 58632 - protein, 29 aa, Artificial Sequence
  Cyclic GFR-binding peptide
KVVMPYVKLVKPTRGVLFFISLSSLDQPV

SEQ ID NO: 58633 - protein, 22 aa, Artificial Sequence
  Cyclic GFR-binding peptide
PYVKLIVNNSSDFFLVSLSSLK

SEQ ID NO: 58634 - protein, 26 aa, Artificial Sequence
  Cyclic GFR-binding peptide
  MOD_RES (26)..(26): Xaa is C or S
PYVKLIVNNSSDFFLVSLSSLKTPAX

SEQ ID NO: 58635 - protein, 25 aa, Artificial Sequence
  Cyclic GFR-binding peptide
IMPYVKLIKPTKGILFFISLSSLDQ

SEQ ID NO: 58636 - protein, 28 aa, Artificial Sequence
  Cyclic GFR-binding peptide
VVMNPYVKLIVNSSDDFFLVSLSSLQTP

SEQ ID NO: 58637 - protein, 28 aa, Artificial Sequence
  Cyclic GFR-binding peptide
HQLFPYVKLHQGQHPKIRFFLMSLSSEE

SEQ ID NO: 58638 - protein, 23 aa, Artificial Sequence
  Cyclic GFR-binding peptide
VMDPYVKLVVNNAADFFLISLSS

SEQ ID NO: 58639 - protein, 35 aa, Artificial Sequence
  Cyclic GFR-binding peptide
  MOD_RES (2)..(2): Xaa is C or S
EXKNHQLFPYVKLHQGQHPKIRFFLMSLSSEETPV

SEQ ID NO: 58640 - protein, 26 aa, Artificial Sequence
  Cyclic GFR-binding peptide
EVIMPYVKLLLVRGNDFFLMSLSSTK

SEQ ID NO: 58641 - protein, 29 aa, Artificial Sequence
  Cyclic GFR-binding peptide
  MOD_RES (27)..(28): Xaa is C or S
NPYVKLVVNKNEDFFLISLSSMKEPVXXP

SEQ ID NO: 58642 - protein, 22 aa, Artificial Sequence
  Cyclic GFR-binding peptide
VMPYVKLVKPTRGVLFFISLSS

SEQ ID NO: 58643 - protein, 26 aa, Artificial Sequence
  Cyclic GFR-binding peptide
MPYVKLLLVRGNDFFLMSLSSTKVPA

SEQ ID NO: 58644 - protein, 34 aa, Artificial Sequence
  Cyclic GFR-binding peptide
  MOD_RES (31)..(32): Xaa is C or S
EVVMDPYVKLVVNNAADFFLISLSSLRAPVXXSA

SEQ ID NO: 58645 - protein, 21 aa, Artificial Sequence
  Cyclic GFR-binding peptide
GPYVKLIIQQKDNFFLMSLSS

SEQ ID NO: 58646 - protein, 25 aa, Artificial Sequence
  Cyclic GFR-binding peptide
EVVMDPYVKLVVKENEDFFLMSLSS

SEQ ID NO: 58647 - protein, 40 aa, Artificial Sequence
  Cyclic GFR-binding peptide
  MOD_RES (2)..(4): Xaa is C or S
AXAXELHEELRPYVKLLKPKKRVYEFFLVSLSSHHVRSPQ

SEQ ID NO: 58648 - protein, 36 aa, Artificial Sequence
  Cyclic GFR-binding peptide
  MOD_RES (2)..(33)..(34): Xaa is C or S
KXSKVIMPYVKLIKPTKGILFFISLSSLDQSVXXPS

SEQ ID NO: 58649 - protein, 30 aa, Artificial Sequence
  Cyclic GFR-binding peptide
  MOD_RES (27)..(28): Xaa is C or S
NPYVKLIVNSSDDFFLVSLSSLQTPAXXPK

SEQ ID NO: 58650 - protein, 26 aa, Artificial Sequence
  Cyclic GFR-binding peptide
  MOD_RES (26)..(26): Xaa is C or S
PYVKLYTVVGKDFFLISLSSLKTPVX

SEQ ID NO: 58651 - protein, 34 aa, Artificial Sequence
  Cyclic GFR-binding peptide
  MOD_RES (30)..(31): Xaa is C or S
VVMNPYVKLIVNNSSDFFLVSLSSLKTPAXXAKP

SEQ ID NO: 58652 - protein, 37 aa, Artificial Sequence
  Cyclic GFR-binding peptide
  MOD_RES (33)..(33): Xaa is C or S
ELRPYVKLLKPKKRVYEFFLVSLSSHHVRSPQXKVSS

SEQ ID NO: 58653 - protein, 25 aa, Artificial Sequence
  Cyclic GFR-binding peptide
KVVMPYVKLVKPTRGVLFFISLSSL

SEQ ID NO: 58654 - protein, 35 aa, Artificial Sequence
  Cyclic GFR-binding peptide
  MOD_RES (2)..(34)..(35): Xaa is C or S
GXGEVVMDPYVKLVVKENEDFFLMSLSSLETPVXX

SEQ ID NO: 58655 - protein, 30 aa, Artificial Sequence
  Cyclic GFR-binding peptide
  MOD_RES (2)..(2): Xaa is C or S
AXSEVTMNPYVKLVVNKNEDFFLISLSSMK

SEQ ID NO: 58656 - protein, 26 aa, Artificial Sequence
  Cyclic GFR-binding peptide
VIMPYVKLVKPKRGVLFFISLSSLAQ

SEQ ID NO: 58657 - protein, 30 aa, Artificial Sequence
  Cyclic GFR-binding peptide
  MOD_RES (1)..(3): Xaa is C or S
XGXSRVVMNPYVKLIVNSSDDFFLVSLSSL

SEQ ID NO: 58658 - protein, 32 aa, Artificial Sequence
  Cyclic GFR-binding peptide
  MOD_RES (30)..(30): Xaa is C or S
PYVKLLKPKKRVYEFFLVSLSSHHVRSPQXKV

SEQ ID NO: 58659 - protein, 34 aa, Artificial Sequence
  Cyclic GFR-binding peptide
  MOD_RES (1)..(3)..(34): Xaa is C or S
XKXSKVIMPYVKLIKPTKGILFFISLSSLDQSVX

SEQ ID NO: 58660 - protein, 33 aa, Artificial Sequence
  Cyclic GFR-binding peptide
  MOD_RES (1)..(3): Xaa is C or S
XGXSEVVMDPYVKLVVNNASDFFLISLSSLRTP

SEQ ID NO: 58661 - protein, 25 aa, Artificial Sequence
  Cyclic GFR-binding peptide
VVMPYVKLVKPTRGVLFFISLSSLD

SEQ ID NO: 58662 - protein, 37 aa, Artificial Sequence
  Cyclic GFR-binding peptide
  MOD_RES (31)..(32): Xaa is C or S
SKVVMPYVKLVKPTRGVLFFISLSSLDQPVXXPSASA

SEQ ID NO: 58663 - protein, 35 aa, Artificial Sequence
  Cyclic GFR-binding peptide
  MOD_RES (1)..(33)..(34): Xaa is C or S
XAKVVMNPYVKLIVNNSSDFFLVSLSSLKTPAXXA

SEQ ID NO: 58664 - protein, 35 aa, Artificial Sequence
  Cyclic GFR-binding peptide
  MOD_RES (2)..(4): Xaa is C or S
RXAXSEVTMNPYVKLVVNKNEDFFLISLSSMKEPV

SEQ ID NO: 58665 - protein, 31 aa, Artificial Sequence
  Cyclic GFR-binding peptide
  MOD_RES (27)..(28): Xaa is C or S
MPYVKLVKPTRGVLFFISLSSLDQPVXXPSA

SEQ ID NO: 58666 - protein, 38 aa, Artificial Sequence
  Cyclic GFR-binding peptide
  MOD_RES (2)..(4)..(36)..(37): Xaa is C or S
SXGXRDVVMGPYVKLIIQQKDNFFLMSLSSMKTPTXXP

SEQ ID NO: 58667 - protein, 31 aa, Artificial Sequence
  Cyclic GFR-binding peptide
  MOD_RES (1)..(3): Xaa is C or S
XGXARVVMNPYVKLIVNSSDDFFLVSLSSLQ

SEQ ID NO: 58668 - protein, 32 aa, Artificial Sequence
  Cyclic GFR-binding peptide
  MOD_RES (1)..(1): Xaa is C or S
XGEVVMDPYVKLVVKENEDFFLMSLSSLETPV

SEQ ID NO: 58669 - protein, 32 aa, Artificial Sequence
  Cyclic GFR-binding peptide
  MOD_RES (32)..(32): Xaa is C or S
RDVVMGPYVKLIIQQKDNFFLMSLSSMKTPTX

SEQ ID NO: 58670 - protein, 30 aa, Artificial Sequence
  Cyclic GFR-binding peptide
DVVMGPYVKLIIQQKDNFFLMSLSSMKTPT

SEQ ID NO: 58671 - protein, 23 aa, Artificial Sequence
  Cyclic GFR-binding peptide
VIMPYVKLLLVRGNDFFLMSLSS

SEQ ID NO: 58672 - protein, 28 aa, Artificial Sequence
  Cyclic GFR-binding peptide
SMGEPYVKLTPVGMDDFFLVSLSSLKTP

SEQ ID NO: 58673 - protein, 30 aa, Artificial Sequence
  Cyclic GFR-binding peptide
SKVVMPYVKLVKPTRGVLFFISLSSLDQPV

SEQ ID NO: 58674 - protein, 32 aa, Artificial Sequence
  Cyclic GFR-binding peptide
  MOD_RES (1)..(1): Xaa is C or S
XEAVSMGEPYVKLTPVGMDDFFLVSLSSLKTP

SEQ ID NO: 58675 - protein, 26 aa, Artificial Sequence
  Cyclic GFR-binding peptide
  MOD_RES (26)..(26): Xaa is C or S
PYVKLIVNSSDDFFLVSLSSLQTPAX

SEQ ID NO: 58676 - protein, 28 aa, Artificial Sequence
  Cyclic GFR-binding peptide
EELRPYVKLLKPKKRVYEFFLVSLSSHH

SEQ ID NO: 58677 - protein, 33 aa, Artificial Sequence
  Cyclic GFR-binding peptide
  MOD_RES (31)..(32): Xaa is C or S
SKVIMPYVKLIKPTKGILFFISLSSLDQSVXXP

SEQ ID NO: 58678 - protein, 32 aa, Artificial Sequence
  Cyclic GFR-binding peptide
  MOD_RES (1)..(3): Xaa is C or S
XAXSEVTMNPYVKLVVNKNEDFFLISLSSMKE

SEQ ID NO: 58679 - protein, 29 aa, Artificial Sequence
  Cyclic GFR-binding peptide
  MOD_RES (28)..(28): Xaa is C or S
PYVKLHQGQHPKIRFFLMSLSSEETPVXE

SEQ ID NO: 58680 - protein, 27 aa, Artificial Sequence
  Cyclic GFR-binding peptide
VMDPYVKLVVNNAADFFLISLSSLRAP

SEQ ID NO: 58681 - protein, 37 aa, Artificial Sequence
  Cyclic GFR-binding peptide
  MOD_RES (31)..(32): Xaa is C or S
EVTMNPYVKLVVNKNEDFFLISLSSMKEPVXXPEPIG

SEQ ID NO: 58682 - protein, 30 aa, Artificial Sequence
  Cyclic GFR-binding peptide
  MOD_RES (2)..(4): Xaa is C or S
RXGXAEVVMDPYVKLVVNNAADFFLISLSS

SEQ ID NO: 58683 - protein, 35 aa, Artificial Sequence
  Cyclic GFR-binding peptide
  MOD_RES (30)..(31): Xaa is C or S
KVIMPYVKLIKPTKGILFFISLSSLDQSVXXPSAS

SEQ ID NO: 58684 - protein, 40 aa, Artificial Sequence
  Cyclic GFR-binding peptide
  MOD_RES (2)..(4)..(37)..(38): Xaa is C or S
RXGXEAVSMGEPYVKLTPVGMDDFFLVSLSSLKTPVXXAK

SEQ ID NO: 58685 - protein, 36 aa, Artificial Sequence
  Cyclic GFR-binding peptide
  MOD_RES (1)..(3)..(35): Xaa is C or S
XGXSRVVMNPYVKLIVNSSDDFFLVSLSSLKTPAXT

SEQ ID NO: 58686 - protein, 42 aa, Artificial Sequence
  Cyclic GFR-binding peptide
  MOD_RES (2)..(4)..(36)..(37): Xaa is C or S
RXAXSEVTMNPYVKLVVNKNEDFFLISLSSMKEPVXXPEPIG

SEQ ID NO: 58687 - protein, 32 aa, Artificial Sequence
  Cyclic GFR-binding peptide
  MOD_RES (1)..(3): Xaa is C or S
XKXSRVIMPYVKLVKPKRGVLFFISLSSLAQP

SEQ ID NO: 58688 - protein, 29 aa, Artificial Sequence
  Cyclic GFR-binding peptide
VVMNPYVKLIVNSSDDFFLVSLSSLKTPA

SEQ ID NO: 58689 - protein, 28 aa, Artificial Sequence
  Cyclic GFR-binding peptide
  MOD_RES (2)..(2): Xaa is C or S
GXAKVVMNPYVKLIVNNSSDFFLVSLSS

SEQ ID NO: 58690 - protein, 26 aa, Artificial Sequence
  Cyclic GFR-binding peptide
  MOD_RES (26)..(26): Xaa is C or S
PYVKLIIQQKDNFFLMSLSSMKTPTX

SEQ ID NO: 58691 - protein, 37 aa, Artificial Sequence
  Cyclic GFR-binding peptide
  MOD_RES (31)..(32): Xaa is C or S
EVVMDPYVKLVVNNAADFFLISLSSLRAPVXXSAPAA

SEQ ID NO: 58692 - protein, 38 aa, Artificial Sequence
  Cyclic GFR-binding peptide
  MOD_RES (1)..(32)..(33): Xaa is C or S
XSKVVMPYVKLVKPTRGVLFFISLSSLDQPVXXPSASA

SEQ ID NO: 58693 - protein, 34 aa, Artificial Sequence
  Cyclic GFR-binding peptide
  MOD_RES (30)..(31): Xaa is C or S
VVMNPYVKLIVNSSDDFFLVSLSSLQTPAXXPKP

SEQ ID NO: 58694 - protein, 20 aa, Artificial Sequence
  Cyclic GFR-binding peptide
PYVKLTPVGMDDFFLVSLSS

SEQ ID NO: 58695 - protein, 41 aa, Artificial Sequence
  Cyclic GFR-binding peptide
  MOD_RES (1)..(3)..(37): Xaa is C or S
XEXKNHQLFPYVKLHQGQHPKIRFFLMSLSSEETPVXELGE

SEQ ID NO: 58696 - protein, 33 aa, Artificial Sequence
  Cyclic GFR-binding peptide
  MOD_RES (30)..(31): Xaa is C or S
VTMNPYVKLVVNKNEDFFLISLSSMKEPVXXPE

SEQ ID NO: 58697 - protein, 28 aa, Artificial Sequence
  Cyclic GFR-binding peptide
KVVMPYVKLVKPTRGVLFFISLSSLDQP

SEQ ID NO: 58698 - protein, 41 aa, Artificial Sequence
  Cyclic GFR-binding peptide
  MOD_RES (2)..(4)..(36): Xaa is C or S
HXGXSRVVMNPYVKLIVNSSDDFFLVSLSSLKTPAXTPKTV

SEQ ID NO: 58699 - protein, 39 aa, Artificial Sequence
  Cyclic GFR-binding peptide
  MOD_RES (2)..(34)..(35): Xaa is C or S
GXSRVVMNPYVKLIVNSSDDFFLVSLSSLKTPAXXPKPV

SEQ ID NO: 58700 - protein, 33 aa, Artificial Sequence
  Cyclic GFR-binding peptide
  MOD_RES (1)..(33): Xaa is C or S
XAEVVMDPYVKLVVNNAADFFLISLSSLRAPVX

SEQ ID NO: 58701 - protein, 28 aa, Artificial Sequence
  Cyclic GFR-binding peptide
VMNPYVKLIVNSSDDFFLVSLSSLKTPA

SEQ ID NO: 58702 - protein, 25 aa, Artificial Sequence
  Cyclic GFR-binding peptide
MGPYVKLIIQQKDNFFLMSLSSMKT

SEQ ID NO: 58703 - protein, 30 aa, Artificial Sequence
  Cyclic GFR-binding peptide
  MOD_RES (30)..(30): Xaa is C or S
VVMDPYVKLVVNNASDFFLISLSSLRTPVX

SEQ ID NO: 58704 - protein, 40 aa, Artificial Sequence
  Cyclic GFR-binding peptide
  MOD_RES (2)..(4)..(35)..(36): Xaa is C or S
SXKXSKVIMPYVKLIKPTKGILFFISLSSLDQSVXXPSAS

SEQ ID NO: 58705 - protein, 36 aa, Artificial Sequence
  Cyclic GFR-binding peptide
  MOD_RES (1)..(34)..(35): Xaa is C or S
XEAVSMGEPYVKLTPVGMDDFFLVSLSSLKTPVXXA

SEQ ID NO: 58706 - protein, 38 aa, Artificial Sequence
  Cyclic GFR-binding peptide
  MOD_RES (34)..(34): Xaa is C or S
KNHQLFPYVKLHQGQHPKIRFFLMSLSSEETPVXELGE

SEQ ID NO: 58707 - protein, 35 aa, Artificial Sequence
  Cyclic GFR-binding peptide
  MOD_RES (31)..(32): Xaa is C or S
RVVMNPYVKLIVNSSDDFFLVSLSSLQTPAXXPKP

SEQ ID NO: 58708 - protein, 32 aa, Artificial Sequence
  Cyclic GFR-binding peptide
  MOD_RES (31)..(32): Xaa is C or S
EVVMDPYVKLVVNNAADFFLISLSSLRAPVXX

SEQ ID NO: 58709 - protein, 40 aa, Artificial Sequence
  Cyclic GFR-binding peptide
  MOD_RES (1)..(3)..(37): Xaa is C or S
XEXKNHQLFPYVKLHQGQHPKIRFFLMSLSSEETPVXELG

SEQ ID NO: 58710 - protein, 31 aa, Artificial Sequence
  Cyclic GFR-binding peptide
  MOD_RES (26)..(26): Xaa is C or S
PYVKLIVNSSDDFFLVSLSSLKTPAXTPKTV

SEQ ID NO: 58711 - protein, 27 aa, Artificial Sequence
  Cyclic GFR-binding peptide
FPYVKLHQGQHPKIRFFLMSLSSEETP

SEQ ID NO: 58712 - protein, 36 aa, Artificial Sequence
  Cyclic GFR-binding peptide
  MOD_RES (31)..(32): Xaa is C or S
EVVMDPYVKLVVKENEDFFLMSLSSLETPVXXAKPI

SEQ ID NO: 58713 - protein, 29 aa, Artificial Sequence
  Cyclic GFR-binding peptide
EVVMDPYVKLVVNNAADFFLISLSSLRAP

SEQ ID NO: 58714 - protein, 25 aa, Artificial Sequence
  Cyclic GFR-binding peptide
VVMDPYVKLVVNNAADFFLISLSSL

SEQ ID NO: 58715 - protein, 31 aa, Artificial Sequence
  Cyclic GFR-binding peptide
  MOD_RES (27)..(28): Xaa is C or S
DPYVKLVVKENEDFFLMSLSSLETPVXXAKP

SEQ ID NO: 58716 - protein, 23 aa, Artificial Sequence
  Cyclic GFR-binding peptide
VMDPYVKLVVKENEDFFLMSLSS

SEQ ID NO: 58717 - protein, 33 aa, Artificial Sequence
  Cyclic GFR-binding peptide
  MOD_RES (29)..(30): Xaa is C or S
VIMPYVKLIKPTKGILFFISLSSLDQSVXXPSA

SEQ ID NO: 58718 - protein, 39 aa, Artificial Sequence
  Cyclic GFR-binding peptide
  MOD_RES (2)..(34)..(35): Xaa is C or S
GXSEVVMDPYVKLVVNNASDFFLISLSSLRTPVXXTPPT

SEQ ID NO: 58719 - protein, 35 aa, Artificial Sequence
  Cyclic GFR-binding peptide
  MOD_RES (1)..(3): Xaa is C or S
XGXEAVSMGEPYVKLTPVGMDDFFLVSLSSLKTPV

SEQ ID NO: 58720 - protein, 31 aa, Artificial Sequence
  Cyclic GFR-binding peptide
  MOD_RES (30)..(31): Xaa is C or S
VVMDPYVKLVVNNAADFFLISLSSLRAPVXX

SEQ ID NO: 58721 - protein, 35 aa, Artificial Sequence
  Cyclic GFR-binding peptide
  MOD_RES (30)..(31): Xaa is C or S
VTMNPYVKLVVNKNEDFFLISLSSMKEPVXXPEPI

SEQ ID NO: 58722 - protein, 22 aa, Artificial Sequence
  Cyclic GFR-binding peptide
MNPYVKLVVNKNEDFFLISLSS

SEQ ID NO: 58723 - protein, 31 aa, Artificial Sequence
  Cyclic GFR-binding peptide
  MOD_RES (30)..(31): Xaa is C or S
VVMDPYVKLVVKENEDFFLMSLSSLETPVXX

SEQ ID NO: 58724 - protein, 29 aa, Artificial Sequence
  Cyclic GFR-binding peptide
  MOD_RES (27)..(28): Xaa is C or S
GPYVKLIIQQKDNFFLMSLSSMKTPTXXP

SEQ ID NO: 58725 - protein, 31 aa, Artificial Sequence
  Cyclic GFR-binding peptide
  MOD_RES (28)..(28): Xaa is C or S
PYVKLHQGQHPKIRFFLMSLSSEETPVXELG

SEQ ID NO: 58726 - protein, 31 aa, Artificial Sequence
  Cyclic GFR-binding peptide
  MOD_RES (26)..(27): Xaa is C or S
PYVKLVVNNAADFFLISLSSLRAPVXXSAPA

SEQ ID NO: 58727 - protein, 36 aa, Artificial Sequence
  Cyclic GFR-binding peptide
  MOD_RES (1)..(33)..(34): Xaa is C or S
XGEVVMDPYVKLVVKENEDFFLMSLSSLETPVXXAK

SEQ ID NO: 58728 - protein, 40 aa, Artificial Sequence
  Cyclic GFR-binding peptide
  MOD_RES (2)..(39): Xaa is C or S
AXELHEELRPYVKLLKPKKRVYEFFLVSLSSHHVRSPQXK

SEQ ID NO: 58729 - protein, 35 aa, Artificial Sequence
  Cyclic GFR-binding peptide
  MOD_RES (1)..(35): Xaa is C or S
XKNHQLFPYVKLHQGQHPKIRFFLMSLSSEETPVX

SEQ ID NO: 58730 - protein, 37 aa, Artificial Sequence
  Cyclic GFR-binding peptide
  MOD_RES (2)..(4)..(36)..(37): Xaa is C or S
RXAXSEVTMNPYVKLVVNKNEDFFLISLSSMKEPVXX

SEQ ID NO: 58731 - protein, 37 aa, Artificial Sequence
  Cyclic GFR-binding peptide
  MOD_RES (2)..(4)..(36)..(37): Xaa is C or S
HXGXSRVVMNPYVKLIVNSSDDFFLVSLSSLKTPAXX

SEQ ID NO: 58732 - protein, 33 aa, Artificial Sequence
  Cyclic GFR-binding peptide
  MOD_RES (28)..(29): Xaa is C or S
IMPYVKLLLVRGNDFFLMSLSSTKVPAXXTSPV

SEQ ID NO: 58733 - protein, 34 aa, Artificial Sequence
  Cyclic GFR-binding peptide
  MOD_RES (33)..(33): Xaa is C or S
ELRPYVKLLKPKKRVYEFFLVSLSSHHVRSPQXK

SEQ ID NO: 58734 - protein, 41 aa, Artificial Sequence
  Cyclic GFR-binding peptide
  MOD_RES (1)..(3)..(35)..(36): Xaa is C or S
XGXAKVVMNPYVKLIVNNSSDFFLVSLSSLKTPAXXAKPVA

SEQ ID NO: 58735 - protein, 31 aa, Artificial Sequence
  Cyclic GFR-binding peptide
  MOD_RES (1)..(3): Xaa is C or S
XKXSRVIMPYVKLVKPKRGVLFFISLSSLAQ

SEQ ID NO: 58736 - protein, 38 aa, Artificial Sequence
  Cyclic GFR-binding peptide
  MOD_RES (32)..(33): Xaa is C or S
AEVVMDPYVKLVVNNAADFFLISLSSLRAPVXXSAPAA

SEQ ID NO: 58737 - protein, 31 aa, Artificial Sequence
  Cyclic GFR-binding peptide
  MOD_RES (2)..(4): Xaa is C or S
SXGXRDVVMGPYVKLIIQQKDNFFLMSLSSM

SEQ ID NO: 58738 - protein, 31 aa, Artificial Sequence
  Cyclic GFR-binding peptide
  MOD_RES (1)..(3): Xaa is C or S
XKXSKVIMPYVKLIKPTKGILFFISLSSLDQ

SEQ ID NO: 58739 - protein, 31 aa, Artificial Sequence
  Cyclic GFR-binding peptide
  MOD_RES (26)..(27): Xaa is C or S
PYVKLTPVGMDDFFLVSLSSLKTPVXXAKGV

SEQ ID NO: 58740 - protein, 28 aa, Artificial Sequence
  Cyclic GFR-binding peptide
  MOD_RES (28)..(28): Xaa is C or S
MGPYVKLIIQQKDNFFLMSLSSMKTPTX

SEQ ID NO: 58741 - protein, 32 aa, Artificial Sequence
  Cyclic GFR-binding peptide
  MOD_RES (26)..(27): Xaa is C or S
PYVKLIVNSSDDFFLVSLSSLKTPAXXPKPVY

SEQ ID NO: 58742 - protein, 31 aa, Artificial Sequence
  Cyclic GFR-binding peptide
  MOD_RES (31)..(31): Xaa is C or S
EEVIMPYVKLLLVRGNDFFLMSLSSTKVPAX

SEQ ID NO: 58743 - protein, 33 aa, Artificial Sequence
  Cyclic GFR-binding peptide
  MOD_RES (30)..(31): Xaa is C or S
VVMDPYVKLVVKENEDFFLMSLSSLETPVXXAK

SEQ ID NO: 58744 - protein, 34 aa, Artificial Sequence
  Cyclic GFR-binding peptide
  MOD_RES (1)..(33)..(34): Xaa is C or S
XRDVVMGPYVKLIIQQKDNFFLMSLSSMKTPTXX

SEQ ID NO: 58745 - protein, 31 aa, Artificial Sequence
  Cyclic GFR-binding peptide
  MOD_RES (26)..(27): Xaa is C or S
PYVKLLLVRGNDFFLMSLSSTKVPAXXTSPV

SEQ ID NO: 58746 - protein, 32 aa, Artificial Sequence
  Cyclic GFR-binding peptide
  MOD_RES (27)..(28): Xaa is C or S
GPYVKLYTVVGKDFFLISLSSLKTPVXXAKSA

SEQ ID NO: 58747 - protein, 34 aa, Artificial Sequence
  Cyclic GFR-binding peptide
  MOD_RES (32)..(32): Xaa is C or S
SRVVMNPYVKLIVNSSDDFFLVSLSSLKTPAXTP

SEQ ID NO: 58748 - protein, 22 aa, Artificial Sequence
  Cyclic GFR-binding peptide
DPYVKLVVNNASDFFLISLSSL

SEQ ID NO: 58749 - protein, 31 aa, Artificial Sequence
  Cyclic GFR-binding peptide
ESVAMGPYVKLYTVVGKDFFLISLSSLKTPV

SEQ ID NO: 58750 - protein, 30 aa, Artificial Sequence
  Cyclic GFR-binding peptide
ESVAMGPYVKLYTVVGKDFFLISLSSLKTP

SEQ ID NO: 58751 - protein, 23 aa, Artificial Sequence
  Cyclic GFR-binding peptide
PYVKLLKPKKRVYEFFLVSLSSH

SEQ ID NO: 58752 - protein, 34 aa, Artificial Sequence
  Cyclic GFR-binding peptide
  MOD_RES (2)..(34): Xaa is C or S
GXARVVMNPYVKLIVNSSDDFFLVSLSSLQTPAX

SEQ ID NO: 58753 - protein, 32 aa, Artificial Sequence
  Cyclic GFR-binding peptide
  MOD_RES (31)..(32): Xaa is C or S
RVVMNPYVKLIVNSSDDFFLVSLSSLKTPAXX

SEQ ID NO: 58754 - protein, 35 aa, Artificial Sequence
  Cyclic GFR-binding peptide
  MOD_RES (2)..(2): Xaa is C or S
AXELHEELRPYVKLLKPKKRVYEFFLVSLSSHHVR

SEQ ID NO: 58755 - protein, 30 aa, Artificial Sequence
  Cyclic GFR-binding peptide
  MOD_RES (28)..(28): Xaa is C or S
PYVKLHQGQHPKIRFFLMSLSSEETPVXEL

SEQ ID NO: 58756 - protein, 35 aa, Artificial Sequence
  Cyclic GFR-binding peptide
  MOD_RES (30)..(31): Xaa is C or S
VVMDPYVKLVVKENEDFFLMSLSSLETPVXXAKPI

SEQ ID NO: 58757 - protein, 24 aa, Artificial Sequence
  Cyclic GFR-binding peptide
PYVKLIKPTKGILFFISLSSLDQS

SEQ ID NO: 58758 - protein, 34 aa, Artificial Sequence
  Cyclic GFR-binding peptide
  MOD_RES (2)..(4): Xaa is C or S
RXGXGEVVMDPYVKLVVKENEDFFLMSLSSLETP

SEQ ID NO: 58759 - protein, 23 aa, Artificial Sequence
  Cyclic GFR-binding peptide
NPYVKLIVNSSDDFFLVSLSSLK

SEQ ID NO: 58760 - protein, 41 aa, Artificial Sequence
  Cyclic GFR-binding peptide
  MOD_RES (2)..(4)..(36)..(37): Xaa is C or S
SXGXRDVVMGPYVKLIIQQKDNFFLMSLSSMKTPTXXPGAS

SEQ ID NO: 58761 - protein, 34 aa, Artificial Sequence
  Cyclic GFR-binding peptide
  MOD_RES (1)..(3)..(34): Xaa is C or S
XGXEEVIMPYVKLLLVRGNDFFLMSLSSTKVPAX

SEQ ID NO: 58762 - protein, 30 aa, Artificial Sequence
  Cyclic GFR-binding peptide
KNHQLFPYVKLHQGQHPKIRFFLMSLSSEE

SEQ ID NO: 58763 - protein, 23 aa, Artificial Sequence
  Cyclic GFR-binding peptide
PYVKLIVNNSSDFFLVSLSSLKT

SEQ ID NO: 58764 - protein, 34 aa, Artificial Sequence
  Cyclic GFR-binding peptide
  MOD_RES (1)..(32)..(33): Xaa is C or S
XSKVIMPYVKLIKPTKGILFFISLSSLDQSVXXP

SEQ ID NO: 58765 - protein, 34 aa, Artificial Sequence
  Cyclic GFR-binding peptide
  MOD_RES (2)..(34): Xaa is C or S
GXAKVVMNPYVKLIVNNSSDFFLVSLSSLKTPAX

SEQ ID NO: 58766 - protein, 32 aa, Artificial Sequence
  Cyclic GFR-binding peptide
  MOD_RES (2)..(4): Xaa is C or S
RXGXSEVVMDPYVKLVVNNASDFFLISLSSLR

SEQ ID NO: 58767 - protein, 34 aa, Artificial Sequence
  Cyclic GFR-binding peptide
  MOD_RES (31)..(32): Xaa is C or S
EVVMDPYVKLVVKENEDFFLMSLSSLETPVXXAK

SEQ ID NO: 58768 - protein, 38 aa, Artificial Sequence
  Cyclic GFR-binding peptide
  MOD_RES (2)..(4)..(35)..(36): Xaa is C or S
SXKXSKVIMPYVKLIKPTKGILFFISLSSLDQSVXXPS

SEQ ID NO: 58769 - protein, 24 aa, Artificial Sequence
  Cyclic GFR-binding peptide
NPYVKLIVNSSDDFFLVSLSSLKT

SEQ ID NO: 58770 - protein, 41 aa, Artificial Sequence
  Cyclic GFR-binding peptide
  MOD_RES (2)..(4)..(37)..(38): Xaa is C or S
RXGXEAVSMGEPYVKLTPVGMDDFFLVSLSSLKTPVXXAKG

SEQ ID NO: 58771 - protein, 36 aa, Artificial Sequence
  Cyclic GFR-binding peptide
  MOD_RES (32)..(33): Xaa is C or S
AKVVMNPYVKLIVNNSSDFFLVSLSSLKTPAXXAKP

SEQ ID NO: 58772 - protein, 30 aa, Artificial Sequence
  Cyclic GFR-binding peptide
  MOD_RES (26)..(27): Xaa is C or S
PYVKLVVKENEDFFLMSLSSLETPVXXAKP

SEQ ID NO: 58773 - protein, 34 aa, Artificial Sequence
  Cyclic GFR-binding peptide
  MOD_RES (28)..(29): Xaa is C or S
MNPYVKLVVNKNEDFFLISLSSMKEPVXXPEPIG

SEQ ID NO: 58774 - protein, 28 aa, Artificial Sequence
  Cyclic GFR-binding peptide
RVIMPYVKLVKPKRGVLFFISLSSLAQP

SEQ ID NO: 58775 - protein, 25 aa, Artificial Sequence
  Cyclic GFR-binding peptide
PYVKLVVKENEDFFLMSLSSLETPV

SEQ ID NO: 58776 - protein, 27 aa, Artificial Sequence
  Cyclic GFR-binding peptide
  MOD_RES (27)..(27): Xaa is C or S
GPYVKLIIQQKDNFFLMSLSSMKTPTX

SEQ ID NO: 58777 - protein, 28 aa, Artificial Sequence
  Cyclic GFR-binding peptide
  MOD_RES (27)..(28): Xaa is C or S
MPYVKLIKPTKGILFFISLSSLDQSVXX

SEQ ID NO: 58778 - protein, 25 aa, Artificial Sequence
  Cyclic GFR-binding peptide
VVMDPYVKLVVKENEDFFLMSLSSL

SEQ ID NO: 58779 - protein, 21 aa, Artificial Sequence
  Cyclic GFR-binding peptide
PYVKLVVNKNEDFFLISLSSM

SEQ ID NO: 58780 - protein, 33 aa, Artificial Sequence
  Cyclic GFR-binding peptide
  MOD_RES (28)..(29): Xaa is C or S
MGPYVKLIIQQKDNFFLMSLSSMKTPTXXPGAS

SEQ ID NO: 58781 - protein, 36 aa, Artificial Sequence
  Cyclic GFR-binding peptide
  MOD_RES (32)..(33): Xaa is C or S
ARVVMNPYVKLIVNSSDDFFLVSLSSLQTPAXXPKP

SEQ ID NO: 58782 - protein, 32 aa, Artificial Sequence
  Cyclic GFR-binding peptide
  MOD_RES (1)..(3): Xaa is C or S
XGXESVAMGPYVKLYTVVGKDFFLISLSSLKT

SEQ ID NO: 58783 - protein, 26 aa, Artificial Sequence
  Cyclic GFR-binding peptide
VVMNPYVKLIVNSSDDFFLVSLSSLQ

SEQ ID NO: 58784 - protein, 34 aa, Artificial Sequence
  Cyclic GFR-binding peptide
  MOD_RES (2)..(4): Xaa is C or S
HXGXARVVMNPYVKLIVNSSDDFFLVSLSSLQTP

SEQ ID NO: 58785 - protein, 42 aa, Artificial Sequence
  Cyclic GFR-binding peptide
  MOD_RES (2)..(4)..(38): Xaa is C or S
RXEXKNHQLFPYVKLHQGQHPKIRFFLMSLSSEETPVXELGE

SEQ ID NO: 58786 - protein, 30 aa, Artificial Sequence
  Cyclic GFR-binding peptide
RPYVKLLKPKKRVYEFFLVSLSSHHVRSPQ

SEQ ID NO: 58787 - protein, 37 aa, Artificial Sequence
  Cyclic GFR-binding peptide
  MOD_RES (2)..(35)..(36): Xaa is C or S
GXEAVSMGEPYVKLTPVGMDDFFLVSLSSLKTPVXXA

SEQ ID NO: 58788 - protein, 38 aa, Artificial Sequence
  Cyclic GFR-binding peptide
  MOD_RES (1)..(33)..(34): Xaa is C or S
XRDVVMGPYVKLIIQQKDNFFLMSLSSMKTPTXXPGAS

SEQ ID NO: 58789 - protein, 37 aa, Artificial Sequence
  Cyclic GFR-binding peptide
  MOD_RES (2)..(33)..(34): Xaa is C or S
KXSRVIMPYVKLVKPKRGVLFFISLSSLAQPVXXPAA

SEQ ID NO: 58790 - protein, 38 aa, Artificial Sequence
  Cyclic GFR-binding peptide
  MOD_RES (1)..(33)..(34): Xaa is C or S
XSRVVMNPYVKLIVNSSDDFFLVSLSSLKTPAXXPKPV

SEQ ID NO: 58791 - protein, 25 aa, Artificial Sequence
  Cyclic GFR-binding peptide
MNPYVKLIVNSSDDFFLVSLSSLQT

SEQ ID NO: 58792 - protein, 28 aa, Artificial Sequence
  Cyclic GFR-binding peptide
SKVVMPYVKLVKPTRGVLFFISLSSLDQ

SEQ ID NO: 58793 - protein, 31 aa, Artificial Sequence
  Cyclic GFR-binding peptide
  MOD_RES (2)..(2): Xaa is C or S
GXGEVVMDPYVKLVVKENEDFFLMSLSSLET

SEQ ID NO: 58794 - protein, 38 aa, Artificial Sequence
  Cyclic GFR-binding peptide
  MOD_RES (2)..(4)..(37)..(38): Xaa is C or S
RXGXEAVSMGEPYVKLTPVGMDDFFLVSLSSLKTPVXX

SEQ ID NO: 58795 - protein, 29 aa, Artificial Sequence
  Cyclic GFR-binding peptide
PYVKLLKPKKRVYEFFLVSLSSHHVRSPQ

SEQ ID NO: 58796 - protein, 31 aa, Artificial Sequence
  Cyclic GFR-binding peptide
  MOD_RES (29)..(30): Xaa is C or S
VMDPYVKLVVNNASDFFLISLSSLRTPVXXT

SEQ ID NO: 58797 - protein, 26 aa, Artificial Sequence
  Cyclic GFR-binding peptide
GEVVMDPYVKLVVKENEDFFLMSLSS

SEQ ID NO: 58798 - protein, 30 aa, Artificial Sequence
  Cyclic GFR-binding peptide
  MOD_RES (26)..(27): Xaa is C or S
PYVKLLLVRGNDFFLMSLSSTKVPAXXTSP

SEQ ID NO: 58799 - protein, 34 aa, Artificial Sequence
  Cyclic GFR-binding peptide
  MOD_RES (2)..(33)..(34): Xaa is C or S
KXSRVIMPYVKLVKPKRGVLFFISLSSLAQPVXX

SEQ ID NO: 58800 - protein, 26 aa, Artificial Sequence
  Cyclic GFR-binding peptide
PYVKLLKPKKRVYEFFLVSLSSHHVR

SEQ ID NO: 58801 - protein, 32 aa, Artificial Sequence
  Cyclic GFR-binding peptide
  MOD_RES (31)..(32): Xaa is C or S
RVVMNPYVKLIVNSSDDFFLVSLSSLQTPAXX

SEQ ID NO: 58802 - protein, 25 aa, Artificial Sequence
  Cyclic GFR-binding peptide
MPYVKLLLVRGNDFFLMSLSSTKVP

SEQ ID NO: 58803 - protein, 22 aa, Artificial Sequence
  Cyclic GFR-binding peptide
PYVKLVVKENEDFFLMSLSSLE

SEQ ID NO: 58804 - protein, 26 aa, Artificial Sequence
  Cyclic GFR-binding peptide
AVSMGEPYVKLTPVGMDDFFLVSLSS

SEQ ID NO: 58805 - protein, 38 aa, Artificial Sequence
  Cyclic GFR-binding peptide
  MOD_RES (33)..(33): Xaa is C or S
NHQLFPYVKLHQGQHPKIRFFLMSLSSEETPVXELGED

SEQ ID NO: 58806 - protein, 29 aa, Artificial Sequence
  Cyclic GFR-binding peptide
  MOD_RES (1)..(1): Xaa is C or S
XEAVSMGEPYVKLTPVGMDDFFLVSLSSL

SEQ ID NO: 58807 - protein, 23 aa, Artificial Sequence
  Cyclic GFR-binding peptide
MDPYVKLVVNNAADFFLISLSSL

SEQ ID NO: 58808 - protein, 27 aa, Artificial Sequence
  Cyclic GFR-binding peptide
  MOD_RES (27)..(27): Xaa is C or S
MPYVKLLLVRGNDFFLMSLSSTKVPAX

SEQ ID NO: 58809 - protein, 32 aa, Artificial Sequence
  Cyclic GFR-binding peptide
  MOD_RES (30)..(31): Xaa is C or S
VVMDPYVKLVVNNASDFFLISLSSLRTPVXXT

SEQ ID NO: 58810 - protein, 26 aa, Artificial Sequence
  Cyclic GFR-binding peptide
  MOD_RES (26)..(26): Xaa is C or S
PYVKLVKPTRGVLFFISLSSLDQPVX

SEQ ID NO: 58811 - protein, 29 aa, Artificial Sequence
  Cyclic GFR-binding peptide
SRVVMNPYVKLIVNSSDDFFLVSLSSLKT

SEQ ID NO: 58812 - protein, 34 aa, Artificial Sequence
  Cyclic GFR-binding peptide
  MOD_RES (32)..(33): Xaa is C or S
SRVVMNPYVKLIVNSSDDFFLVSLSSLKTPAXXP

SEQ ID NO: 58813 - protein, 38 aa, Artificial Sequence
  Cyclic GFR-binding peptide
  MOD_RES (1)..(3)..(35)..(36): Xaa is C or S
XGXAEVVMDPYVKLVVNNAADFFLISLSSLRAPVXXSA

SEQ ID NO: 58814 - protein, 32 aa, Artificial Sequence
  Cyclic GFR-binding peptide
  MOD_RES (28)..(28): Xaa is C or S
PYVKLHQGQHPKIRFFLMSLSSEETPVXELGE

SEQ ID NO: 58815 - protein, 26 aa, Artificial Sequence
  Cyclic GFR-binding peptide
VVMGPYVKLIIQQKDNFFLMSLSSMK

SEQ ID NO: 58816 - protein, 30 aa, Artificial Sequence
  Cyclic GFR-binding peptide
  MOD_RES (1)..(1): Xaa is C or S
XSEVVMDPYVKLVVNNASDFFLISLSSLRT

SEQ ID NO: 58817 - protein, 27 aa, Artificial Sequence
  Cyclic GFR-binding peptide
RVVMNPYVKLIVNSSDDFFLVSLSSLK

SEQ ID NO: 58818 - protein, 41 aa, Artificial Sequence
  Cyclic GFR-binding peptide
  MOD_RES (1)..(3)..(36)..(37): Xaa is C or S
XGXEAVSMGEPYVKLTPVGMDDFFLVSLSSLKTPVXXAKGV

SEQ ID NO: 58819 - protein, 24 aa, Artificial Sequence
  Cyclic GFR-binding peptide
LRPYVKLLKPKKRVYEFFLVSLSS

SEQ ID NO: 58820 - protein, 23 aa, Artificial Sequence
  Cyclic GFR-binding peptide
EPYVKLTPVGMDDFFLVSLSSLK

SEQ ID NO: 58821 - protein, 24 aa, Artificial Sequence
  Cyclic GFR-binding peptide
PYVKLVKPKRGVLFFISLSSLAQP

SEQ ID NO: 58822 - protein, 30 aa, Artificial Sequence
  Cyclic GFR-binding peptide
RDVVMGPYVKLIIQQKDNFFLMSLSSMKTP

SEQ ID NO: 58823 - protein, 24 aa, Artificial Sequence
  Cyclic GFR-binding peptide
RPYVKLLKPKKRVYEFFLVSLSSH

SEQ ID NO: 58824 - protein, 28 aa, Artificial Sequence
  Cyclic GFR-binding peptide
  MOD_RES (27)..(28): Xaa is C or S
MPYVKLVKPKRGVLFFISLSSLAQPVXX

SEQ ID NO: 58825 - protein, 31 aa, Artificial Sequence
  Cyclic GFR-binding peptide
  MOD_RES (1)..(3): Xaa is C or S
XAXSEVTMNPYVKLVVNKNEDFFLISLSSMK

SEQ ID NO: 58826 - protein, 31 aa, Artificial Sequence
  Cyclic GFR-binding peptide
  MOD_RES (29)..(30): Xaa is C or S
VMNPYVKLIVNSSDDFFLVSLSSLQTPAXXP

SEQ ID NO: 58827 - protein, 32 aa, Artificial Sequence
  Cyclic GFR-binding peptide
  MOD_RES (2)..(2): Xaa is C or S
GXEEVIMPYVKLLLVRGNDFFLMSLSSTKVPA

SEQ ID NO: 58828 - protein, 29 aa, Artificial Sequence
  Cyclic GFR-binding peptide
  MOD_RES (28)..(29): Xaa is C or S
MNPYVKLIVNNSSDFFLVSLSSLKTPAXX

SEQ ID NO: 58829 - protein, 30 aa, Artificial Sequence
  Cyclic GFR-binding peptide
  MOD_RES (1)..(3): Xaa is C or S
XGXAEVVMDPYVKLVVNNAADFFLISLSSL

SEQ ID NO: 58830 - protein, 31 aa, Artificial Sequence
  Cyclic GFR-binding peptide
  MOD_RES (1)..(1): Xaa is C or S
XEAVSMGEPYVKLTPVGMDDFFLVSLSSLKT

SEQ ID NO: 58831 - protein, 23 aa, Artificial Sequence
  Cyclic GFR-binding peptide
TMNPYVKLVVNKNEDFFLISLSS

SEQ ID NO: 58832 - protein, 30 aa, Artificial Sequence
  Cyclic GFR-binding peptide
  MOD_RES (30)..(30): Xaa is C or S
VTMNPYVKLVVNKNEDFFLISLSSMKEPVX

SEQ ID NO: 58833 - protein, 32 aa, Artificial Sequence
  Cyclic GFR-binding peptide
  MOD_RES (1)..(3): Xaa is C or S
XGXAEVVMDPYVKLVVNNAADFFLISLSSLRA

SEQ ID NO: 58834 - protein, 38 aa, Artificial Sequence
  Cyclic GFR-binding peptide
  MOD_RES (1)..(33)..(34): Xaa is C or S
XSEVTMNPYVKLVVNKNEDFFLISLSSMKEPVXXPEPI

SEQ ID NO: 58835 - protein, 33 aa, Artificial Sequence
  Cyclic GFR-binding peptide
  MOD_RES (2)..(2): Xaa is C or S
GXEAVSMGEPYVKLTPVGMDDFFLVSLSSLKTP

SEQ ID NO: 58836 - protein, 26 aa, Artificial Sequence
  Cyclic GFR-binding peptide
EELRPYVKLLKPKKRVYEFFLVSLSS

SEQ ID NO: 58837 - protein, 38 aa, Artificial Sequence
  Cyclic GFR-binding peptide
  MOD_RES (2)..(4)..(36)..(37): Xaa is C or S
RXGXAEVVMDPYVKLVVNNAADFFLISLSSLRAPVXXS

SEQ ID NO: 58838 - protein, 33 aa, Artificial Sequence
  Cyclic GFR-binding peptide
  MOD_RES (27)..(28): Xaa is C or S
MPYVKLLLVRGNDFFLMSLSSTKVPAXXTSPVR

SEQ ID NO: 58839 - protein, 21 aa, Artificial Sequence
  Cyclic GFR-binding peptide
PYVKLVKPKRGVLFFISLSSL

SEQ ID NO: 58840 - protein, 21 aa, Artificial Sequence
  Cyclic GFR-binding peptide
PYVKLIVNNSSDFFLVSLSSL

SEQ ID NO: 58841 - protein, 32 aa, Artificial Sequence
  Cyclic GFR-binding peptide
  MOD_RES (31)..(32): Xaa is C or S
VSMGEPYVKLTPVGMDDFFLVSLSSLKTPVXX

SEQ ID NO: 58842 - protein, 23 aa, Artificial Sequence
  Cyclic GFR-binding peptide
PYVKLLLVRGNDFFLMSLSSTKV

SEQ ID NO: 58843 - protein, 20 aa, Artificial Sequence
  Cyclic GFR-binding peptide
PYVKLIVNSSDDFFLVSLSS

SEQ ID NO: 58844 - protein, 29 aa, Artificial Sequence
  Cyclic GFR-binding peptide
  MOD_RES (26)..(27): Xaa is C or S
PYVKLIVNNSSDFFLVSLSSLKTPAXXAK

SEQ ID NO: 58845 - protein, 28 aa, Artificial Sequence
  Cyclic GFR-binding peptide
LRPYVKLLKPKKRVYEFFLVSLSSHHVR

SEQ ID NO: 58846 - protein, 30 aa, Artificial Sequence
  Cyclic GFR-binding peptide
  MOD_RES (26)..(27): Xaa is C or S
PYVKLVVNNASDFFLISLSSLRTPVXXTPP

SEQ ID NO: 58847 - protein, 36 aa, Artificial Sequence
  Cyclic GFR-binding peptide
  MOD_RES (2)..(4)..(35)..(36): Xaa is C or S
LXGXEEVIMPYVKLLLVRGNDFFLMSLSSTKVPAXX

SEQ ID NO: 58848 - protein, 22 aa, Artificial Sequence
  Cyclic GFR-binding peptide
PYVKLVVNKNEDFFLISLSSMK

SEQ ID NO: 58849 - protein, 33 aa, Artificial Sequence
  Cyclic GFR-binding peptide
  MOD_RES (27)..(28): Xaa is C or S
GPYVKLYTVVGKDFFLISLSSLKTPVXXAKSAK

SEQ ID NO: 58850 - protein, 34 aa, Artificial Sequence
  Cyclic GFR-binding peptide
  MOD_RES (2)..(4): Xaa is C or S
RXGXAEVVMDPYVKLVVNNAADFFLISLSSLRAP

SEQ ID NO: 58851 - protein, 30 aa, Artificial Sequence
  Cyclic GFR-binding peptide
  MOD_RES (2)..(4): Xaa is C or S
LXGXEEVIMPYVKLLLVRGNDFFLMSLSST

SEQ ID NO: 58852 - protein, 34 aa, Artificial Sequence
  Cyclic GFR-binding peptide
  MOD_RES (2)..(4): Xaa is C or S
SXGXRDVVMGPYVKLIIQQKDNFFLMSLSSMKTP

SEQ ID NO: 58853 - protein, 44 aa, Artificial Sequence
  Cyclic GFR-binding peptide
  MOD_RES (2)..(4)..(41): Xaa is C or S
AXAXELHEELRPYVKLLKPKKRVYEFFLVSLSSHHVRSPQXKVS

SEQ ID NO: 58854 - protein, 29 aa, Artificial Sequence
  Cyclic GFR-binding peptide
LRPYVKLLKPKKRVYEFFLVSLSSHHVRS

SEQ ID NO: 58855 - protein, 26 aa, Artificial Sequence
  Cyclic GFR-binding peptide
RDVVMGPYVKLIIQQKDNFFLMSLSS

SEQ ID NO: 58856 - protein, 30 aa, Artificial Sequence
  Cyclic GFR-binding peptide
  MOD_RES (1)..(3): Xaa is C or S
XKXSKVVMPYVKLVKPTRGVLFFISLSSLD

SEQ ID NO: 58857 - protein, 39 aa, Artificial Sequence
  Cyclic GFR-binding peptide
  MOD_RES (2)..(34)..(35): Xaa is C or S
GXAKVVMNPYVKLIVNNSSDFFLVSLSSLKTPAXXAKPV

SEQ ID NO: 58858 - protein, 33 aa, Artificial Sequence
  Cyclic GFR-binding peptide
  MOD_RES (1)..(3): Xaa is C or S
XGXGEVVMDPYVKLVVKENEDFFLMSLSSLETP

SEQ ID NO: 58859 - protein, 25 aa, Artificial Sequence
  Cyclic GFR-binding peptide
PYVKLIVNSSDDFFLVSLSSLQTPA

SEQ ID NO: 58860 - protein, 30 aa, Artificial Sequence
  Cyclic GFR-binding peptide
  MOD_RES (2)..(4): Xaa is C or S
SXKXSKVIMPYVKLIKPTKGILFFISLSSL

SEQ ID NO: 58861 - protein, 38 aa, Artificial Sequence
  Cyclic GFR-binding peptide
  MOD_RES (2)..(4)..(36): Xaa is C or S
HXGXSRVVMNPYVKLIVNSSDDFFLVSLSSLKTPAXTP

SEQ ID NO: 58862 - protein, 29 aa, Artificial Sequence
  Cyclic GFR-binding peptide
  MOD_RES (26)..(27): Xaa is C or S
PYVKLYTVVGKDFFLISLSSLKTPVXXAK

SEQ ID NO: 58863 - protein, 31 aa, Artificial Sequence
  Cyclic GFR-binding peptide
  MOD_RES (2)..(2): Xaa is C or S
GXRDVVMGPYVKLIIQQKDNFFLMSLSSMKT

SEQ ID NO: 58864 - protein, 34 aa, Artificial Sequence
  Cyclic GFR-binding peptide
  MOD_RES (31)..(32): Xaa is C or S
EVVMDPYVKLVVNNASDFFLISLSSLRTPVXXTP

SEQ ID NO: 58865 - protein, 30 aa, Artificial Sequence
  Cyclic GFR-binding peptide
ELRPYVKLLKPKKRVYEFFLVSLSSHHVRS

SEQ ID NO: 58866 - protein, 33 aa, Artificial Sequence
  Cyclic GFR-binding peptide
  MOD_RES (1)..(3): Xaa is C or S
XGXEAVSMGEPYVKLTPVGMDDFFLVSLSSLKT

SEQ ID NO: 58867 - protein, 28 aa, Artificial Sequence
  Cyclic GFR-binding peptide
  MOD_RES (1)..(1): Xaa is C or S
XSEVTMNPYVKLVVNKNEDFFLISLSSM

SEQ ID NO: 58868 - protein, 35 aa, Artificial Sequence
  Cyclic GFR-binding peptide
  MOD_RES (1)..(33)..(34): Xaa is C or S
XSEVTMNPYVKLVVNKNEDFFLISLSSMKEPVXXP

SEQ ID NO: 58869 - protein, 28 aa, Artificial Sequence
  Cyclic GFR-binding peptide
SRVIMPYVKLVKPKRGVLFFISLSSLAQ

SEQ ID NO: 58870 - protein, 41 aa, Artificial Sequence
  Cyclic GFR-binding peptide
  MOD_RES (2)..(4)..(38): Xaa is C or S
RXEXKNHQLFPYVKLHQGQHPKIRFFLMSLSSEETPVXELG

SEQ ID NO: 58871 - protein, 29 aa, Artificial Sequence
  Cyclic GFR-binding peptide
  MOD_RES (26)..(26): Xaa is C or S
PYVKLIVNSSDDFFLVSLSSLKTPAXTPK

SEQ ID NO: 58872 - protein, 30 aa, Artificial Sequence
  Cyclic GFR-binding peptide
AKVVMNPYVKLIVNNSSDFFLVSLSSLKTP

SEQ ID NO: 58873 - protein, 31 aa, Artificial Sequence
  Cyclic GFR-binding peptide
ARVVMNPYVKLIVNSSDDFFLVSLSSLQTPA

SEQ ID NO: 58874 - protein, 23 aa, Artificial Sequence
  Cyclic GFR-binding peptide
NPYVKLIVNNSSDFFLVSLSSLK

SEQ ID NO: 58875 - protein, 32 aa, Artificial Sequence
  Cyclic GFR-binding peptide
EELRPYVKLLKPKKRVYEFFLVSLSSHHVRSP

SEQ ID NO: 58876 - protein, 29 aa, Artificial Sequence
  Cyclic GFR-binding peptide
  MOD_RES (1)..(1): Xaa is C or S
XSKVIMPYVKLIKPTKGILFFISLSSLDQ

SEQ ID NO: 58877 - protein, 32 aa, Artificial Sequence
  Cyclic GFR-binding peptide
  MOD_RES (2)..(2): Xaa is C or S
GXSEVVMDPYVKLVVNNASDFFLISLSSLRTP

SEQ ID NO: 58878 - protein, 38 aa, Artificial Sequence
  Cyclic GFR-binding peptide
  MOD_RES (36)..(36): Xaa is C or S
LHEELRPYVKLLKPKKRVYEFFLVSLSSHHVRSPQXKV

SEQ ID NO: 58879 - protein, 38 aa, Artificial Sequence
  Cyclic GFR-binding peptide
  MOD_RES (2)..(34)..(35): Xaa is C or S
GXSEVVMDPYVKLVVNNASDFFLISLSSLRTPVXXTPP

SEQ ID NO: 58880 - protein, 27 aa, Artificial Sequence
  Cyclic GFR-binding peptide
KVVMPYVKLVKPTRGVLFFISLSSLDQ

SEQ ID NO: 58881 - protein, 34 aa, Artificial Sequence
  Cyclic GFR-binding peptide
  MOD_RES (32)..(33): Xaa is C or S
SEVTMNPYVKLVVNKNEDFFLISLSSMKEPVXXP

SEQ ID NO: 58882 - protein, 26 aa, Artificial Sequence
  Cyclic GFR-binding peptide
VMDPYVKLVVNNAADFFLISLSSLRA

SEQ ID NO: 58883 - protein, 34 aa, Artificial Sequence
  Cyclic GFR-binding peptide
  MOD_RES (32)..(33): Xaa is C or S
RDVVMGPYVKLIIQQKDNFFLMSLSSMKTPTXXP

SEQ ID NO: 58884 - protein, 37 aa, Artificial Sequence
  Cyclic GFR-binding peptide
  MOD_RES (1)..(33)..(34): Xaa is C or S
XAEVVMDPYVKLVVNNAADFFLISLSSLRAPVXXSAP

SEQ ID NO: 58885 - protein, 31 aa, Artificial Sequence
  Cyclic GFR-binding peptide
  MOD_RES (27)..(28): Xaa is C or S
NPYVKLIVNSSDDFFLVSLSSLQTPAXXPKP

SEQ ID NO: 58886 - protein, 27 aa, Artificial Sequence
  Cyclic GFR-binding peptide
  MOD_RES (27)..(27): Xaa is C or S
EPYVKLTPVGMDDFFLVSLSSLKTPVX

SEQ ID NO: 58887 - protein, 33 aa, Artificial Sequence
  Cyclic GFR-binding peptide
  MOD_RES (29)..(30): Xaa is C or S
VIMPYVKLVKPKRGVLFFISLSSLAQPVXXPAA

SEQ ID NO: 58888 - protein, 32 aa, Artificial Sequence
  Cyclic GFR-binding peptide
  MOD_RES (2)..(4): Xaa is C or S
LXGXEEVIMPYVKLLLVRGNDFFLMSLSSTKV

SEQ ID NO: 58889 - protein, 31 aa, Artificial Sequence
  Cyclic GFR-binding peptide
  MOD_RES (1)..(3): Xaa is C or S
XGXESVAMGPYVKLYTVVGKDFFLISLSSLK

SEQ ID NO: 58890 - protein, 32 aa, Artificial Sequence
  Cyclic GFR-binding peptide
  MOD_RES (2)..(4): Xaa is C or S
RXGXEAVSMGEPYVKLTPVGMDDFFLVSLSSL

SEQ ID NO: 58891 - protein, 29 aa, Artificial Sequence
  Cyclic GFR-binding peptide
  MOD_RES (2)..(2): Xaa is C or S
GXRDVVMGPYVKLIIQQKDNFFLMSLSSM

SEQ ID NO: 58892 - protein, 29 aa, Artificial Sequence
  Cyclic GFR-binding peptide
  MOD_RES (2)..(2): Xaa is C or S
GXSEVVMDPYVKLVVNNASDFFLISLSSL

SEQ ID NO: 58893 - protein, 28 aa, Artificial Sequence
  Cyclic GFR-binding peptide
  MOD_RES (2)..(2): Xaa is C or S
GXGEVVMDPYVKLVVKENEDFFLMSLSS

SEQ ID NO: 58894 - protein, 39 aa, Artificial Sequence
  Cyclic GFR-binding peptide
  MOD_RES (1)..(33)..(34): Xaa is C or S
XSEVTMNPYVKLVVNKNEDFFLISLSSMKEPVXXPEPIG

SEQ ID NO: 58895 - protein, 32 aa, Artificial Sequence
  Cyclic GFR-binding peptide
  MOD_RES (27)..(27): Xaa is C or S
NPYVKLIVNSSDDFFLVSLSSLKTPAXTPKTV

SEQ ID NO: 58896 - protein, 32 aa, Artificial Sequence
  Cyclic GFR-binding peptide
LHEELRPYVKLLKPKKRVYEFFLVSLSSHHVR

SEQ ID NO: 58897 - protein, 32 aa, Artificial Sequence
  Cyclic GFR-binding peptide
  MOD_RES (31)..(31): Xaa is C or S
QLFPYVKLHQGQHPKIRFFLMSLSSEETPVXE

SEQ ID NO: 58898 - protein, 34 aa, Artificial Sequence
  Cyclic GFR-binding peptide
  MOD_RES (31)..(32): Xaa is C or S
EEVIMPYVKLLLVRGNDFFLMSLSSTKVPAXXTS

SEQ ID NO: 58899 - protein, 39 aa, Artificial Sequence
  Cyclic GFR-binding peptide
  MOD_RES (1)..(3)..(35)..(36): Xaa is C or S
XGXRDVVMGPYVKLIIQQKDNFFLMSLSSMKTPTXXPGA

SEQ ID NO: 58900 - protein, 31 aa, Artificial Sequence
  Cyclic GFR-binding peptide
  MOD_RES (29)..(30): Xaa is C or S
VMNPYVKLIVNSSDDFFLVSLSSLKTPAXXP

SEQ ID NO: 58901 - protein, 34 aa, Artificial Sequence
  Cyclic GFR-binding peptide
  MOD_RES (33)..(33): Xaa is C or S
NHQLFPYVKLHQGQHPKIRFFLMSLSSEETPVXE

SEQ ID NO: 58902 - protein, 24 aa, Artificial Sequence
  Cyclic GFR-binding peptide
EVIMPYVKLLLVRGNDFFLMSLSS

SEQ ID NO: 58903 - protein, 45 aa, Artificial Sequence
  Cyclic GFR-binding peptide
  MOD_RES (2)..(4)..(41): Xaa is C or S
AXAXELHEELRPYVKLLKPKKRVYEFFLVSLSSHHVRSPQXKVSS

SEQ ID NO: 58904 - protein, 35 aa, Artificial Sequence
  Cyclic GFR-binding peptide
  MOD_RES (2)..(33)..(34): Xaa is C or S
KXSKVVMPYVKLVKPTRGVLFFISLSSLDQPVXXP

SEQ ID NO: 58905 - protein, 31 aa, Artificial Sequence
  Cyclic GFR-binding peptide
  MOD_RES (2)..(2): Xaa is C or S
GXAKVVMNPYVKLIVNNSSDFFLVSLSSLKT

SEQ ID NO: 58906 - protein, 25 aa, Artificial Sequence
  Cyclic GFR-binding peptide
IMPYVKLVKPKRGVLFFISLSSLAQ

SEQ ID NO: 58907 - protein, 27 aa, Artificial Sequence
  Cyclic GFR-binding peptide
SKVVMPYVKLVKPTRGVLFFISLSSLD

SEQ ID NO: 58908 - protein, 24 aa, Artificial Sequence
  Cyclic GFR-binding peptide
MPYVKLLLVRGNDFFLMSLSSTKV

SEQ ID NO: 58909 - protein, 37 aa, Artificial Sequence
  Cyclic GFR-binding peptide
  MOD_RES (31)..(32): Xaa is C or S
EEVIMPYVKLLLVRGNDFFLMSLSSTKVPAXXTSPVR

SEQ ID NO: 58910 - protein, 36 aa, Artificial Sequence
  Cyclic GFR-binding peptide
  MOD_RES (30)..(31): Xaa is C or S
KVIMPYVKLIKPTKGILFFISLSSLDQSVXXPSASA

SEQ ID NO: 58911 - protein, 27 aa, Artificial Sequence
  Cyclic GFR-binding peptide
  MOD_RES (27)..(27): Xaa is C or S
NPYVKLIVNSSDDFFLVSLSSLKTPAX

SEQ ID NO: 58912 - protein, 32 aa, Artificial Sequence
  Cyclic GFR-binding peptide
  MOD_RES (28)..(29): Xaa is C or S
MDPYVKLVVNNASDFFLISLSSLRTPVXXTPP

SEQ ID NO: 58913 - protein, 31 aa, Artificial Sequence
  Cyclic GFR-binding peptide
  MOD_RES (31)..(31): Xaa is C or S
VSMGEPYVKLTPVGMDDFFLVSLSSLKTPVX

SEQ ID NO: 58914 - protein, 24 aa, Artificial Sequence
  Cyclic GFR-binding peptide
NPYVKLIVNNSSDFFLVSLSSLKT

SEQ ID NO: 58915 - protein, 32 aa, Artificial Sequence
  Cyclic GFR-binding peptide
  MOD_RES (31)..(32): Xaa is C or S
KVVMNPYVKLIVNNSSDFFLVSLSSLKTPAXX

SEQ ID NO: 58916 - protein, 30 aa, Artificial Sequence
  Cyclic GFR-binding peptide
  MOD_RES (1)..(1): Xaa is C or S
XKNHQLFPYVKLHQGQHPKIRFFLMSLSSE

SEQ ID NO: 58917 - protein, 31 aa, Artificial Sequence
  Cyclic GFR-binding peptide
ELHEELRPYVKLLKPKKRVYEFFLVSLSSHH

SEQ ID NO: 58918 - protein, 37 aa, Artificial Sequence
  Cyclic GFR-binding peptide
  MOD_RES (33)..(34): Xaa is C or S
EAVSMGEPYVKLTPVGMDDFFLVSLSSLKTPVXXAKG

SEQ ID NO: 58919 - protein, 39 aa, Artificial Sequence
  Cyclic GFR-binding peptide
  MOD_RES (2)..(34)..(35): Xaa is C or S
AXSEVTMNPYVKLVVNKNEDFFLISLSSMKEPVXXPEPI

SEQ ID NO: 58920 - protein, 38 aa, Artificial Sequence
  Cyclic GFR-binding peptide
  MOD_RES (2)..(2): Xaa is C or S
AXELHEELRPYVKLLKPKKRVYEFFLVSLSSHHVRSPQ

SEQ ID NO: 58921 - protein, 32 aa, Artificial Sequence
  Cyclic GFR-binding peptide
  MOD_RES (1)..(1): Xaa is C or S
XARVVMNPYVKLIVNSSDDFFLVSLSSLQTPA

SEQ ID NO: 58922 - protein, 30 aa, Artificial Sequence
  Cyclic GFR-binding peptide
  MOD_RES (29)..(30): Xaa is C or S
VMDPYVKLVVKENEDFFLMSLSSLETPVXX

SEQ ID NO: 58923 - protein, 37 aa, Artificial Sequence
  Cyclic GFR-binding peptide
  MOD_RES (31)..(32): Xaa is C or S
RVVMNPYVKLIVNSSDDFFLVSLSSLKTPAXXPKPVY

SEQ ID NO: 58924 - protein, 29 aa, Artificial Sequence
  Cyclic GFR-binding peptide
  MOD_RES (27)..(28): Xaa is C or S
MPYVKLLLVRGNDFFLMSLSSTKVPAXXT

SEQ ID NO: 58925 - protein, 23 aa, Artificial Sequence
  Cyclic GFR-binding peptide
MGPYVKLYTVVGKDFFLISLSSL

SEQ ID NO: 58926 - protein, 34 aa, Artificial Sequence
  Cyclic GFR-binding peptide
  MOD_RES (30)..(31): Xaa is C or S
SMGEPYVKLTPVGMDDFFLVSLSSLKTPVXXAKG

SEQ ID NO: 58927 - protein, 33 aa, Artificial Sequence
  Cyclic GFR-binding peptide
  MOD_RES (27)..(28): Xaa is C or S
DPYVKLVVNNASDFFLISLSSLRTPVXXTPPTS

SEQ ID NO: 58928 - protein, 26 aa, Artificial Sequence
  Cyclic GFR-binding peptide
VVMDPYVKLVVNNASDFFLISLSSLR

SEQ ID NO: 58929 - protein, 24 aa, Artificial Sequence
  Cyclic GFR-binding peptide
PYVKLVKPTRGVLFFISLSSLDQP

SEQ ID NO: 58930 - protein, 31 aa, Artificial Sequence
  Cyclic GFR-binding peptide
  MOD_RES (27)..(28): Xaa is C or S
EPYVKLTPVGMDDFFLVSLSSLKTPVXXAKG

SEQ ID NO: 58931 - protein, 39 aa, Artificial Sequence
  Cyclic GFR-binding peptide
  MOD_RES (2)..(4)..(36)..(37): Xaa is C or S
SXGXRDVVMGPYVKLIIQQKDNFFLMSLSSMKTPTXXPG

SEQ ID NO: 58932 - protein, 31 aa, Artificial Sequence
  Cyclic GFR-binding peptide
GEVVMDPYVKLVVKENEDFFLMSLSSLETPV

SEQ ID NO: 58933 - protein, 26 aa, Artificial Sequence
  Cyclic GFR-binding peptide
AEVVMDPYVKLVVNNAADFFLISLSS

SEQ ID NO: 58934 - protein, 36 aa, Artificial Sequence
  Cyclic GFR-binding peptide
  MOD_RES (2)..(2): Xaa is C or S
AXELHEELRPYVKLLKPKKRVYEFFLVSLSSHHVRS

SEQ ID NO: 58935 - protein, 27 aa, Artificial Sequence
  Cyclic GFR-binding peptide
  MOD_RES (26)..(27): Xaa is C or S
PYVKLVKPKRGVLFFISLSSLAQPVXX

SEQ ID NO: 58936 - protein, 29 aa, Artificial Sequence
  Cyclic GFR-binding peptide
  MOD_RES (29)..(29): Xaa is C or S
VIMPYVKLIKPTKGILFFISLSSLDQSVX

SEQ ID NO: 58937 - protein, 31 aa, Artificial Sequence
  Cyclic GFR-binding peptide
  MOD_RES (29)..(30): Xaa is C or S
TMNPYVKLVVNKNEDFFLISLSSMKEPVXXP

SEQ ID NO: 58938 - protein, 24 aa, Artificial Sequence
  Cyclic GFR-binding peptide
PYVKLVVNNAADFFLISLSSLRAP

SEQ ID NO: 58939 - protein, 26 aa, Artificial Sequence
  Cyclic GFR-binding peptide
MDPYVKLVVNNASDFFLISLSSLRTP

SEQ ID NO: 58940 - protein, 37 aa, Artificial Sequence
  Cyclic GFR-binding peptide
  MOD_RES (31)..(31): Xaa is C or S
QLFPYVKLHQGQHPKIRFFLMSLSSEETPVXELGEDN

SEQ ID NO: 58941 - protein, 23 aa, Artificial Sequence
  Cyclic GFR-binding peptide
PYVKLVKPKRGVLFFISLSSLAQ

SEQ ID NO: 58942 - protein, 30 aa, Artificial Sequence
  Cyclic GFR-binding peptide
  MOD_RES (2)..(4): Xaa is C or S
SXGXRDVVMGPYVKLIIQQKDNFFLMSLSS

SEQ ID NO: 58943 - protein, 29 aa, Artificial Sequence
  Cyclic GFR-binding peptide
  MOD_RES (28)..(29): Xaa is C or S
IMPYVKLVKPKRGVLFFISLSSLAQPVXX

SEQ ID NO: 58944 - protein, 32 aa, Artificial Sequence
  Cyclic GFR-binding peptide
  MOD_RES (27)..(28): Xaa is C or S
NPYVKLIVNSSDDFFLVSLSSLKTPAXXPKPV

SEQ ID NO: 58945 - protein, 31 aa, Artificial Sequence
  Cyclic GFR-binding peptide
  MOD_RES (1)..(1): Xaa is C or S
XGEVVMDPYVKLVVKENEDFFLMSLSSLETP

SEQ ID NO: 58946 - protein, 23 aa, Artificial Sequence
  Cyclic GFR-binding peptide
MPYVKLVKPKRGVLFFISLSSLA

SEQ ID NO: 58947 - protein, 36 aa, Artificial Sequence
  Cyclic GFR-binding peptide
  MOD_RES (1)..(3)..(35)..(36): Xaa is C or S
XGXARVVMNPYVKLIVNSSDDFFLVSLSSLQTPAXX

SEQ ID NO: 58948 - protein, 29 aa, Artificial Sequence
  Cyclic GFR-binding peptide
  MOD_RES (27)..(28): Xaa is C or S
NPYVKLIVNNSSDFFLVSLSSLKTPAXXA

SEQ ID NO: 58949 - protein, 29 aa, Artificial Sequence
  Cyclic GFR-binding peptide
  MOD_RES (29)..(29): Xaa is C or S
MGEPYVKLTPVGMDDFFLVSLSSLKTPVX

SEQ ID NO: 58950 - protein, 28 aa, Artificial Sequence
  Cyclic GFR-binding peptide
  MOD_RES (28)..(28): Xaa is C or S
MNPYVKLIVNNSSDFFLVSLSSLKTPAX

SEQ ID NO: 58951 - protein, 34 aa, Artificial Sequence
  Cyclic GFR-binding peptide
  MOD_RES (30)..(31): Xaa is C or S
EVIMPYVKLLLVRGNDFFLMSLSSTKVPAXXTSP

SEQ ID NO: 58952 - protein, 28 aa, Artificial Sequence
  Cyclic GFR-binding peptide
  MOD_RES (27)..(27): Xaa is C or S
NPYVKLIVNSSDDFFLVSLSSLKTPAXT

SEQ ID NO: 58953 - protein, 29 aa, Artificial Sequence
  Cyclic GFR-binding peptide
  MOD_RES (28)..(29): Xaa is C or S
GEPYVKLTPVGMDDFFLVSLSSLKTPVXX

SEQ ID NO: 58954 - protein, 38 aa, Artificial Sequence
  Cyclic GFR-binding peptide
  MOD_RES (32)..(33): Xaa is C or S
ESVAMGPYVKLYTVVGKDFFLISLSSLKTPVXXAKSAK

SEQ ID NO: 58955 - protein, 25 aa, Artificial Sequence
  Cyclic GFR-binding peptide
KVVMNPYVKLIVNNSSDFFLVSLSS

SEQ ID NO: 58956 - protein, 31 aa, Artificial Sequence
  Cyclic GFR-binding peptide
  MOD_RES (30)..(30): Xaa is C or S
VVMNPYVKLIVNSSDDFFLVSLSSLKTPAXT

SEQ ID NO: 58957 - protein, 40 aa, Artificial Sequence
  Cyclic GFR-binding peptide
  MOD_RES (2)..(4)..(36)..(37): Xaa is C or S
HXGXARVVMNPYVKLIVNSSDDFFLVSLSSLQTPAXXPKP

SEQ ID NO: 58958 - protein, 24 aa, Artificial Sequence
  Cyclic GFR-binding peptide
VMNPYVKLIVNNSSDFFLVSLSSL

SEQ ID NO: 58959 - protein, 21 aa, Artificial Sequence
  Cyclic GFR-binding peptide
PYVKLLLVRGNDFFLMSLSST

SEQ ID NO: 58960 - protein, 35 aa, Artificial Sequence
  Cyclic GFR-binding peptide
  MOD_RES (2)..(34)..(35): Xaa is C or S
GXAKVVMNPYVKLIVNNSSDFFLVSLSSLKTPAXX

SEQ ID NO: 58961 - protein, 33 aa, Artificial Sequence
  Cyclic GFR-binding peptide
  MOD_RES (28)..(29): Xaa is C or S
MNPYVKLVVNKNEDFFLISLSSMKEPVXXPEPI

SEQ ID NO: 58962 - protein, 27 aa, Artificial Sequence
  Cyclic GFR-binding peptide
AKVVMNPYVKLIVNNSSDFFLVSLSSL

SEQ ID NO: 58963 - protein, 35 aa, Artificial Sequence
  Cyclic GFR-binding peptide
  MOD_RES (1)..(33)..(34): Xaa is C or S
XSEVVMDPYVKLVVNNASDFFLISLSSLRTPVXXT

SEQ ID NO: 58964 - protein, 29 aa, Artificial Sequence
  Cyclic GFR-binding peptide
  MOD_RES (29)..(29): Xaa is C or S
VMNPYVKLIVNSSDDFFLVSLSSLQTPAX

SEQ ID NO: 58965 - protein, 26 aa, Artificial Sequence
  Cyclic GFR-binding peptide
VMNPYVKLIVNSSDDFFLVSLSSLKT

SEQ ID NO: 58966 - protein, 30 aa, Artificial Sequence
  Cyclic GFR-binding peptide
  MOD_RES (28)..(29): Xaa is C or S
MDPYVKLVVNNAADFFLISLSSLRAPVXXS

SEQ ID NO: 58967 - protein, 34 aa, Artificial Sequence
  Cyclic GFR-binding peptide
  MOD_RES (28)..(29): Xaa is C or S
MGPYVKLIIQQKDNFFLMSLSSMKTPTXXPGASG

SEQ ID NO: 58968 - protein, 32 aa, Artificial Sequence
  Cyclic GFR-binding peptide
  MOD_RES (32)..(32): Xaa is C or S
HQLFPYVKLHQGQHPKIRFFLMSLSSEETPVX

SEQ ID NO: 58969 - protein, 33 aa, Artificial Sequence
  Cyclic GFR-binding peptide
  MOD_RES (30)..(30): Xaa is C or S
VVMNPYVKLIVNSSDDFFLVSLSSLKTPAXTPK

SEQ ID NO: 58970 - protein, 28 aa, Artificial Sequence
  Cyclic GFR-binding peptide
  MOD_RES (28)..(28): Xaa is C or S
IMPYVKLVKPKRGVLFFISLSSLAQPVX

SEQ ID NO: 58971 - protein, 36 aa, Artificial Sequence
  Cyclic GFR-binding peptide
  MOD_RES (1)..(3)..(35)..(36): Xaa is C or S
XGXAKVVMNPYVKLIVNNSSDFFLVSLSSLKTPAXX

SEQ ID NO: 58972 - protein, 30 aa, Artificial Sequence
  Cyclic GFR-binding peptide
  MOD_RES (1)..(1): Xaa is C or S
XSEVTMNPYVKLVVNKNEDFFLISLSSMKE

SEQ ID NO: 58973 - protein, 41 aa, Artificial Sequence
  Cyclic GFR-binding peptide
  MOD_RES (2)..(4)..(35)..(36): Xaa is C or S
SXKXSKVIMPYVKLIKPTKGILFFISLSSLDQSVXXPSASA

SEQ ID NO: 58974 - protein, 30 aa, Artificial Sequence
  Cyclic GFR-binding peptide
  MOD_RES (1)..(1): Xaa is C or S
XRDVVMGPYVKLIIQQKDNFFLMSLSSMKT

SEQ ID NO: 58975 - protein, 40 aa, Artificial Sequence
  Cyclic GFR-binding peptide
  MOD_RES (1)..(3)..(34)..(35): Xaa is C or S
XKXSRVIMPYVKLVKPKRGVLFFISLSSLAQPVXXPAASA

SEQ ID NO: 58976 - protein, 31 aa, Artificial Sequence
  Cyclic GFR-binding peptide
  MOD_RES (1)..(3): Xaa is C or S
XGXEEVIMPYVKLLLVRGNDFFLMSLSSTKV

SEQ ID NO: 58977 - protein, 24 aa, Artificial Sequence
  Cyclic GFR-binding peptide
FPYVKLHQGQHPKIRFFLMSLSSE

SEQ ID NO: 58978 - protein, 23 aa, Artificial Sequence
  Cyclic GFR-binding peptide
RPYVKLLKPKKRVYEFFLVSLSS

SEQ ID NO: 58979 - protein, 33 aa, Artificial Sequence
  Cyclic GFR-binding peptide
  MOD_RES (2)..(4): Xaa is C or S
RXAXSEVTMNPYVKLVVNKNEDFFLISLSSMKE

SEQ ID NO: 58980 - protein, 36 aa, Artificial Sequence
  Cyclic GFR-binding peptide
  MOD_RES (2)..(4)..(35)..(36): Xaa is C or S
SXKXSKVIMPYVKLIKPTKGILFFISLSSLDQSVXX

SEQ ID NO: 58981 - protein, 36 aa, Artificial Sequence
  Cyclic GFR-binding peptide
  MOD_RES (31)..(32): Xaa is C or S
RVVMNPYVKLIVNSSDDFFLVSLSSLKTPAXXPKPV

SEQ ID NO: 58982 - protein, 33 aa, Artificial Sequence
  Cyclic GFR-binding peptide
  MOD_RES (2)..(2): Xaa is C or S
GXARVVMNPYVKLIVNSSDDFFLVSLSSLQTPA

SEQ ID NO: 58983 - protein, 29 aa, Artificial Sequence
  Cyclic GFR-binding peptide
  MOD_RES (27)..(28): Xaa is C or S
EPYVKLTPVGMDDFFLVSLSSLKTPVXXA

SEQ ID NO: 58984 - protein, 26 aa, Artificial Sequence
  Cyclic GFR-binding peptide
EEVIMPYVKLLLVRGNDFFLMSLSST

SEQ ID NO: 58985 - protein, 38 aa, Artificial Sequence
  Cyclic GFR-binding peptide
  MOD_RES (2)..(4)..(35)..(36): Xaa is C or S
LXGXEEVIMPYVKLLLVRGNDFFLMSLSSTKVPAXXTS

SEQ ID NO: 58986 - protein, 30 aa, Artificial Sequence
  Cyclic GFR-binding peptide
  MOD_RES (2)..(2): Xaa is C or S
GXSEVVMDPYVKLVVNNASDFFLISLSSLR

SEQ ID NO: 58987 - protein, 28 aa, Artificial Sequence
  Cyclic GFR-binding peptide
  MOD_RES (1)..(1): Xaa is C or S
XEAVSMGEPYVKLTPVGMDDFFLVSLSS

SEQ ID NO: 58988 - protein, 33 aa, Artificial Sequence
  Cyclic GFR-binding peptide
  MOD_RES (28)..(29): Xaa is C or S
MDPYVKLVVNNAADFFLISLSSLRAPVXXSAPA

SEQ ID NO: 58989 - protein, 20 aa, Artificial Sequence
  Cyclic GFR-binding peptide
PYVKLYTVVGKDFFLISLSS

SEQ ID NO: 58990 - protein, 33 aa, Artificial Sequence
  Cyclic GFR-binding peptide
  MOD_RES (2)..(4): Xaa is C or S
HXGXAKVVMNPYVKLIVNNSSDFFLVSLSSLKT

SEQ ID NO: 58991 - protein, 22 aa, Artificial Sequence
  Cyclic GFR-binding peptide
MGPYVKLIIQQKDNFFLMSLSS

SEQ ID NO: 58992 - protein, 33 aa, Artificial Sequence
  Cyclic GFR-binding peptide
  MOD_RES (2)..(2): Xaa is C or S
GXAEVVMDPYVKLVVNNAADFFLISLSSLRAPV

SEQ ID NO: 58993 - protein, 26 aa, Artificial Sequence
  Cyclic GFR-binding peptide
SEVVMDPYVKLVVNNASDFFLISLSS

SEQ ID NO: 58994 - protein, 35 aa, Artificial Sequence
  Cyclic GFR-binding peptide
  MOD_RES (29)..(30): Xaa is C or S
VMDPYVKLVVNNAADFFLISLSSLRAPVXXSAPAA

SEQ ID NO: 58995 - protein, 30 aa, Artificial Sequence
  Cyclic GFR-binding peptide
SRVVMNPYVKLIVNSSDDFFLVSLSSLKTP

SEQ ID NO: 58996 - protein, 24 aa, Artificial Sequence
  Cyclic GFR-binding peptide
EPYVKLTPVGMDDFFLVSLSSLKT

SEQ ID NO: 58997 - protein, 22 aa, Artificial Sequence
  Cyclic GFR-binding peptide
MPYVKLVKPTRGVLFFISLSSL

SEQ ID NO: 58998 - protein, 32 aa, Artificial Sequence
  Cyclic GFR-binding peptide
  MOD_RES (29)..(30): Xaa is C or S
MGEPYVKLTPVGMDDFFLVSLSSLKTPVXXAK

SEQ ID NO: 58999 - protein, 34 aa, Artificial Sequence
  Cyclic GFR-binding peptide
  MOD_RES (29)..(30): Xaa is C or S
VMDPYVKLVVNNASDFFLISLSSLRTPVXXTPPT

SEQ ID NO: 59000 - protein, 20 aa, Artificial Sequence
  Cyclic GFR-binding peptide
PYVKLLLVRGNDFFLMSLSS

SEQ ID NO: 59001 - protein, 31 aa, Artificial Sequence
  Cyclic GFR-binding peptide
  MOD_RES (27)..(28): Xaa is C or S
NPYVKLIVNNSSDFFLVSLSSLKTPAXXAKP

SEQ ID NO: 59002 - protein, 33 aa, Artificial Sequence
  Cyclic GFR-binding peptide
  MOD_RES (31)..(32): Xaa is C or S
SVAMGPYVKLYTVVGKDFFLISLSSLKTPVXXA

SEQ ID NO: 59003 - protein, 27 aa, Artificial Sequence
  Cyclic GFR-binding peptide
RDVVMGPYVKLIIQQKDNFFLMSLSSM

SEQ ID NO: 59004 - protein, 30 aa, Artificial Sequence
  Cyclic GFR-binding peptide
  MOD_RES (29)..(30): Xaa is C or S
VIMPYVKLLLVRGNDFFLMSLSSTKVPAXX

SEQ ID NO: 59005 - protein, 29 aa, Artificial Sequence
  Cyclic GFR-binding peptide
  MOD_RES (2)..(2): Xaa is C or S
GXAKVVMNPYVKLIVNNSSDFFLVSLSSL

SEQ ID NO: 59006 - protein, 37 aa, Artificial Sequence
  Cyclic GFR-binding peptide
  MOD_RES (32)..(33): Xaa is C or S
AVSMGEPYVKLTPVGMDDFFLVSLSSLKTPVXXAKGV

SEQ ID NO: 59007 - protein, 37 aa, Artificial Sequence
  Cyclic GFR-binding peptide
  MOD_RES (2)..(4)..(36)..(37): Xaa is C or S
RXGXAEVVMDPYVKLVVNNAADFFLISLSSLRAPVXX

SEQ ID NO: 59008 - protein, 41 aa, Artificial Sequence
  Cyclic GFR-binding peptide
  MOD_RES (1)..(3)..(35)..(36): Xaa is C or S
XGXSRVVMNPYVKLIVNSSDDFFLVSLSSLKTPAXXPKPVH

SEQ ID NO: 59009 - protein, 33 aa, Artificial Sequence
  Cyclic GFR-binding peptide
  MOD_RES (30)..(31): Xaa is C or S
KVIMPYVKLIKPTKGILFFISLSSLDQSVXXPS

SEQ ID NO: 59010 - protein, 36 aa, Artificial Sequence
  Cyclic GFR-binding peptide
  MOD_RES (30)..(31): Xaa is C or S
VVMNPYVKLIVNNSSDFFLVSLSSLKTPAXXAKPVA

SEQ ID NO: 59011 - protein, 30 aa, Artificial Sequence
  Cyclic GFR-binding peptide
  MOD_RES (27)..(28): Xaa is C or S
GPYVKLYTVVGKDFFLISLSSLKTPVXXAK

SEQ ID NO: 59012 - protein, 35 aa, Artificial Sequence
  Cyclic GFR-binding peptide
  MOD_RES (2)..(34)..(35): Xaa is C or S
AXSEVTMNPYVKLVVNKNEDFFLISLSSMKEPVXX

SEQ ID NO: 59013 - protein, 33 aa, Artificial Sequence
  Cyclic GFR-binding peptide
  MOD_RES (29)..(30): Xaa is C or S
AMGPYVKLYTVVGKDFFLISLSSLKTPVXXAKS

SEQ ID NO: 59014 - protein, 36 aa, Artificial Sequence
  Cyclic GFR-binding peptide
  MOD_RES (30)..(31): Xaa is C or S
VVMDPYVKLVVNNASDFFLISLSSLRTPVXXTPPTS

SEQ ID NO: 59015 - protein, 27 aa, Artificial Sequence
  Cyclic GFR-binding peptide
SKVIMPYVKLIKPTKGILFFISLSSLD

SEQ ID NO: 59016 - protein, 39 aa, Artificial Sequence
  Cyclic GFR-binding peptide
  MOD_RES (1)..(3)..(35): Xaa is C or S
XGXSRVVMNPYVKLIVNSSDDFFLVSLSSLKTPAXTPKT

SEQ ID NO: 59017 - protein, 33 aa, Artificial Sequence
  Cyclic GFR-binding peptide
  MOD_RES (29)..(30): Xaa is C or S
VVMPYVKLVKPTRGVLFFISLSSLDQPVXXPSA

SEQ ID NO: 59018 - protein, 29 aa, Artificial Sequence
  Cyclic GFR-binding peptide
  MOD_RES (2)..(4): Xaa is C or S
SXKXSRVIMPYVKLVKPKRGVLFFISLSS

SEQ ID NO: 59019 - protein, 41 aa, Artificial Sequence
  Cyclic GFR-binding peptide
  MOD_RES (1)..(3)..(35)..(36): Xaa is C or S
XGXRDVVMGPYVKLIIQQKDNFFLMSLSSMKTPTXXPGASG

SEQ ID NO: 59020 - protein, 24 aa, Artificial Sequence
  Cyclic GFR-binding peptide
IMPYVKLLLVRGNDFFLMSLSSTK

SEQ ID NO: 59021 - protein, 33 aa, Artificial Sequence
  Cyclic GFR-binding peptide
  MOD_RES (2)..(2): Xaa is C or S
GXESVAMGPYVKLYTVVGKDFFLISLSSLKTPV

SEQ ID NO: 59022 - protein, 33 aa, Artificial Sequence
  Cyclic GFR-binding peptide
  MOD_RES (2)..(2): Xaa is C or S
GXSRVVMNPYVKLIVNSSDDFFLVSLSSLKTPA

SEQ ID NO: 59023 - protein, 36 aa, Artificial Sequence
  Cyclic GFR-binding peptide
  MOD_RES (1)..(3)..(35)..(36): Xaa is C or S
XGXSEVVMDPYVKLVVNNASDFFLISLSSLRTPVXX

SEQ ID NO: 59024 - protein, 28 aa, Artificial Sequence
  Cyclic GFR-binding peptide
  MOD_RES (1)..(3): Xaa is C or S
XKXSKVIMPYVKLIKPTKGILFFISLSS

SEQ ID NO: 59025 - protein, 33 aa, Artificial Sequence
  Cyclic GFR-binding peptide
  MOD_RES (30)..(31): Xaa is C or S
SMGEPYVKLTPVGMDDFFLVSLSSLKTPVXXAK

SEQ ID NO: 59026 - protein, 40 aa, Artificial Sequence
  Cyclic GFR-binding peptide
  MOD_RES (1)..(34)..(35): Xaa is C or S
XEAVSMGEPYVKLTPVGMDDFFLVSLSSLKTPVXXAKGVK

SEQ ID NO: 59027 - protein, 29 aa, Artificial Sequence
  Cyclic GFR-binding peptide
SKVVMPYVKLVKPTRGVLFFISLSSLDQP

SEQ ID NO: 59028 - protein, 25 aa, Artificial Sequence
  Cyclic GFR-binding peptide
NPYVKLIVNNSSDFFLVSLSSLKTP

SEQ ID NO: 59029 - protein, 26 aa, Artificial Sequence
  Cyclic GFR-binding peptide
  MOD_RES (26)..(26): Xaa is C or S
PYVKLVVNNAADFFLISLSSLRAPVX

SEQ ID NO: 59030 - protein, 33 aa, Artificial Sequence
  Cyclic GFR-binding peptide
  MOD_RES (2)..(33): Xaa is C or S
KXSKVIMPYVKLIKPTKGILFFISLSSLDQSVX

SEQ ID NO: 59031 - protein, 30 aa, Artificial Sequence
  Cyclic GFR-binding peptide
  MOD_RES (29)..(30): Xaa is C or S
VVMPYVKLVKPTRGVLFFISLSSLDQPVXX

SEQ ID NO: 59032 - protein, 28 aa, Artificial Sequence
  Cyclic GFR-binding peptide
  MOD_RES (1)..(3): Xaa is C or S
XKXSRVIMPYVKLVKPKRGVLFFISLSS

SEQ ID NO: 59033 - protein, 30 aa, Artificial Sequence
  Cyclic GFR-binding peptide
  MOD_RES (1)..(1): Xaa is C or S
XAKVVMNPYVKLIVNNSSDFFLVSLSSLKT

SEQ ID NO: 59034 - protein, 30 aa, Artificial Sequence
  Cyclic GFR-binding peptide
SEVTMNPYVKLVVNKNEDFFLISLSSMKEP

SEQ ID NO: 59035 - protein, 35 aa, Artificial Sequence
  Cyclic GFR-binding peptide
  MOD_RES (30)..(31): Xaa is C or S
RVIMPYVKLVKPKRGVLFFISLSSLAQPVXXPAAS

SEQ ID NO: 59036 - protein, 37 aa, Artificial Sequence
  Cyclic GFR-binding peptide
  MOD_RES (1)..(3)..(37): Xaa is C or S
XEXKNHQLFPYVKLHQGQHPKIRFFLMSLSSEETPVX

SEQ ID NO: 59037 - protein, 31 aa, Artificial Sequence
  Cyclic GFR-binding peptide
  MOD_RES (2)..(2): Xaa is C or S
GXAEVVMDPYVKLVVNNAADFFLISLSSLRA

SEQ ID NO: 59038 - protein, 26 aa, Artificial Sequence
  Cyclic GFR-binding peptide
MNPYVKLIVNSSDDFFLVSLSSLQTP

SEQ ID NO: 59039 - protein, 31 aa, Artificial Sequence
  Cyclic GFR-binding peptide
  MOD_RES (31)..(31): Xaa is C or S
EVVMDPYVKLVVNNAADFFLISLSSLRAPVX

SEQ ID NO: 59040 - protein, 32 aa, Artificial Sequence
  Cyclic GFR-binding peptide
  MOD_RES (28)..(29): Xaa is C or S
MDPYVKLVVKENEDFFLMSLSSLETPVXXAKP

SEQ ID NO: 59041 - protein, 30 aa, Artificial Sequence
  Cyclic GFR-binding peptide
EVVMDPYVKLVVNNAADFFLISLSSLRAPV

SEQ ID NO: 59042 - protein, 30 aa, Artificial Sequence
  Cyclic GFR-binding peptide
  MOD_RES (26)..(27): Xaa is C or S
PYVKLIVNNSSDFFLVSLSSLKTPAXXAKP

SEQ ID NO: 59043 - protein, 35 aa, Artificial Sequence
  Cyclic GFR-binding peptide
  MOD_RES (31)..(32): Xaa is C or S
VSMGEPYVKLTPVGMDDFFLVSLSSLKTPVXXAKG

SEQ ID NO: 59044 - protein, 36 aa, Artificial Sequence
  Cyclic GFR-binding peptide
  MOD_RES (1)..(33)..(34): Xaa is C or S
XAKVVMNPYVKLIVNNSSDFFLVSLSSLKTPAXXAK

SEQ ID NO: 59045 - protein, 31 aa, Artificial Sequence
  Cyclic GFR-binding peptide
  MOD_RES (28)..(29): Xaa is C or S
IMPYVKLLLVRGNDFFLMSLSSTKVPAXXTS

SEQ ID NO: 59046 - protein, 38 aa, Artificial Sequence
  Cyclic GFR-binding peptide
  MOD_RES (1)..(3)..(37): Xaa is C or S
XEXKNHQLFPYVKLHQGQHPKIRFFLMSLSSEETPVXE

SEQ ID NO: 59047 - protein, 27 aa, Artificial Sequence
  Cyclic GFR-binding peptide
  MOD_RES (1)..(1): Xaa is C or S
XSEVTMNPYVKLVVNKNEDFFLISLSS

SEQ ID NO: 59048 - protein, 30 aa, Artificial Sequence
  Cyclic GFR-binding peptide
EVVMDPYVKLVVKENEDFFLMSLSSLETPV

SEQ ID NO: 59049 - protein, 21 aa, Artificial Sequence
  Cyclic GFR-binding peptide
MPYVKLVKPTRGVLFFISLSS

SEQ ID NO: 59050 - protein, 28 aa, Artificial Sequence
  Cyclic GFR-binding peptide
SEVTMNPYVKLVVNKNEDFFLISLSSMK

SEQ ID NO: 59051 - protein, 24 aa, Artificial Sequence
  Cyclic GFR-binding peptide
DPYVKLVVNNASDFFLISLSSLRT

SEQ ID NO: 59052 - protein, 31 aa, Artificial Sequence
  Cyclic GFR-binding peptide
  MOD_RES (27)..(28): Xaa is C or S
DPYVKLVVNNASDFFLISLSSLRTPVXXTPP

SEQ ID NO: 59053 - protein, 25 aa, Artificial Sequence
  Cyclic GFR-binding peptide
PYVKLVVNKNEDFFLISLSSMKEPV

SEQ ID NO: 59054 - protein, 30 aa, Artificial Sequence
  Cyclic GFR-binding peptide
  MOD_RES (26)..(27): Xaa is C or S
PYVKLVVNKNEDFFLISLSSMKEPVXXPEP

SEQ ID NO: 59055 - protein, 28 aa, Artificial Sequence
  Cyclic GFR-binding peptide
  MOD_RES (1)..(1): Xaa is C or S
XSKVIMPYVKLIKPTKGILFFISLSSLD

SEQ ID NO: 59056 - protein, 31 aa, Artificial Sequence
  Cyclic GFR-binding peptide
  MOD_RES (30)..(31): Xaa is C or S
VVMNPYVKLIVNSSDDFFLVSLSSLKTPAXX

SEQ ID NO: 59057 - protein, 35 aa, Artificial Sequence
  Cyclic GFR-binding peptide
  MOD_RES (30)..(30): Xaa is C or S
LFPYVKLHQGQHPKIRFFLMSLSSEETPVXELGED

SEQ ID NO: 59058 - protein, 38 aa, Artificial Sequence
  Cyclic GFR-binding peptide
  MOD_RES (2)..(34)..(35): Xaa is C or S
GXSRVVMNPYVKLIVNSSDDFFLVSLSSLKTPAXXPKP

SEQ ID NO: 59059 - protein, 36 aa, Artificial Sequence
  Cyclic GFR-binding peptide
  MOD_RES (32)..(32): Xaa is C or S
LRPYVKLLKPKKRVYEFFLVSLSSHHVRSPQXKVSS

SEQ ID NO: 59060 - protein, 32 aa, Artificial Sequence
  Cyclic GFR-binding peptide
  MOD_RES (30)..(31): Xaa is C or S
KVIMPYVKLIKPTKGILFFISLSSLDQSVXXP

SEQ ID NO: 59061 - protein, 31 aa, Artificial Sequence
  Cyclic GFR-binding peptide
  MOD_RES (30)..(31): Xaa is C or S
KVIMPYVKLIKPTKGILFFISLSSLDQSVXX

SEQ ID NO: 59062 - protein, 31 aa, Artificial Sequence
  Cyclic GFR-binding peptide
  MOD_RES (2)..(2): Xaa is C or S
KXSKVVMPYVKLVKPTRGVLFFISLSSLDQP

SEQ ID NO: 59063 - protein, 29 aa, Artificial Sequence
  Cyclic GFR-binding peptide
SMGEPYVKLTPVGMDDFFLVSLSSLKTPV

SEQ ID NO: 59064 - protein, 27 aa, Artificial Sequence
  Cyclic GFR-binding peptide
  MOD_RES (26)..(27): Xaa is C or S
PYVKLVVNNASDFFLISLSSLRTPVXX

SEQ ID NO: 59065 - protein, 41 aa, Artificial Sequence
  Cyclic GFR-binding peptide
  MOD_RES (2)..(36): Xaa is C or S
EXKNHQLFPYVKLHQGQHPKIRFFLMSLSSEETPVXELGED

SEQ ID NO: 59066 - protein, 23 aa, Artificial Sequence
  Cyclic GFR-binding peptide
PYVKLIKPTKGILFFISLSSLDQ

SEQ ID NO: 59067 - protein, 39 aa, Artificial Sequence
  Cyclic GFR-binding peptide
  MOD_RES (2)..(4)..(36)..(37): Xaa is C or S
RXGXAEVVMDPYVKLVVNNAADFFLISLSSLRAPVXXSA

SEQ ID NO: 59068 - protein, 31 aa, Artificial Sequence
  Cyclic GFR-binding peptide
  MOD_RES (1)..(1): Xaa is C or S
XSRVIMPYVKLVKPKRGVLFFISLSSLAQPV

SEQ ID NO: 59069 - protein, 30 aa, Artificial Sequence
  Cyclic GFR-binding peptide
  MOD_RES (1)..(1): Xaa is C or S
XEEVIMPYVKLLLVRGNDFFLMSLSSTKVP

SEQ ID NO: 59070 - protein, 35 aa, Artificial Sequence
  Cyclic GFR-binding peptide
  MOD_RES (2)..(4): Xaa is C or S
RXGXGEVVMDPYVKLVVKENEDFFLMSLSSLETPV

SEQ ID NO: 59071 - protein, 35 aa, Artificial Sequence
  Cyclic GFR-binding peptide
  MOD_RES (32)..(33): Xaa is C or S
AVSMGEPYVKLTPVGMDDFFLVSLSSLKTPVXXAK

SEQ ID NO: 59072 - protein, 29 aa, Artificial Sequence
  Cyclic GFR-binding peptide
  MOD_RES (29)..(29): Xaa is C or S
VMGPYVKLIIQQKDNFFLMSLSSMKTPTX

SEQ ID NO: 59073 - protein, 29 aa, Artificial Sequence
  Cyclic GFR-binding peptide
  MOD_RES (1)..(3): Xaa is C or S
XGXSEVVMDPYVKLVVNNASDFFLISLSS

SEQ ID NO: 59074 - protein, 22 aa, Artificial Sequence
  Cyclic GFR-binding peptide
GPYVKLYTVVGKDFFLISLSSL

SEQ ID NO: 59075 - protein, 28 aa, Artificial Sequence
  Cyclic GFR-binding peptide
VMGPYVKLIIQQKDNFFLMSLSSMKTPT

SEQ ID NO: 59076 - protein, 30 aa, Artificial Sequence
  Cyclic GFR-binding peptide
  MOD_RES (27)..(28): Xaa is C or S
DPYVKLVVNNAADFFLISLSSLRAPVXXSA

SEQ ID NO: 59077 - protein, 29 aa, Artificial Sequence
  Cyclic GFR-binding peptide
  MOD_RES (28)..(29): Xaa is C or S
MDPYVKLVVNNAADFFLISLSSLRAPVXX

SEQ ID NO: 59078 - protein, 33 aa, Artificial Sequence
  Cyclic GFR-binding peptide
EELRPYVKLLKPKKRVYEFFLVSLSSHHVRSPQ

SEQ ID NO: 59079 - protein, 30 aa, Artificial Sequence
  Cyclic GFR-binding peptide
  MOD_RES (1)..(3): Xaa is C or S
XGXSEVVMDPYVKLVVNNASDFFLISLSSL

SEQ ID NO: 59080 - protein, 27 aa, Artificial Sequence
  Cyclic GFR-binding peptide
KVIMPYVKLIKPTKGILFFISLSSLDQ

SEQ ID NO: 59081 - protein, 25 aa, Artificial Sequence
  Cyclic GFR-binding peptide
PYVKLYTVVGKDFFLISLSSLKTPV

SEQ ID NO: 59082 - protein, 34 aa, Artificial Sequence
  Cyclic GFR-binding peptide
  MOD_RES (2)..(2): Xaa is C or S
EXKNHQLFPYVKLHQGQHPKIRFFLMSLSSEETP

SEQ ID NO: 59083 - protein, 25 aa, Artificial Sequence
  Cyclic GFR-binding peptide
EPYVKLTPVGMDDFFLVSLSSLKTP

SEQ ID NO: 59084 - protein, 33 aa, Artificial Sequence
  Cyclic GFR-binding peptide
  MOD_RES (1)..(33): Xaa is C or S
XAKVVMNPYVKLIVNNSSDFFLVSLSSLKTPAX

SEQ ID NO: 59085 - protein, 31 aa, Artificial Sequence
  Cyclic GFR-binding peptide
AKVVMNPYVKLIVNNSSDFFLVSLSSLKTPA

SEQ ID NO: 59086 - protein, 38 aa, Artificial Sequence
  Cyclic GFR-binding peptide
  MOD_RES (2)..(33)..(34): Xaa is C or S
KXSKVIMPYVKLIKPTKGILFFISLSSLDQSVXXPSAS

SEQ ID NO: 59087 - protein, 26 aa, Artificial Sequence
  Cyclic GFR-binding peptide
SMGEPYVKLTPVGMDDFFLVSLSSLK

SEQ ID NO: 59088 - protein, 25 aa, Artificial Sequence
  Cyclic GFR-binding peptide
VMDPYVKLVVKENEDFFLMSLSSLE

SEQ ID NO: 59089 - protein, 36 aa, Artificial Sequence
  Cyclic GFR-binding peptide
  MOD_RES (2)..(4)..(36): Xaa is C or S
RXGXGEVVMDPYVKLVVKENEDFFLMSLSSLETPVX

SEQ ID NO: 59090 - protein, 32 aa, Artificial Sequence
  Cyclic GFR-binding peptide
  MOD_RES (29)..(30): Xaa is C or S
VIMPYVKLIKPTKGILFFISLSSLDQSVXXPS

SEQ ID NO: 59091 - protein, 33 aa, Artificial Sequence
  Cyclic GFR-binding peptide
  MOD_RES (2)..(2): Xaa is C or S
EXKNHQLFPYVKLHQGQHPKIRFFLMSLSSEET

SEQ ID NO: 59092 - protein, 34 aa, Artificial Sequence
  Cyclic GFR-binding peptide
  MOD_RES (2)..(4): Xaa is C or S
RXAXSEVTMNPYVKLVVNKNEDFFLISLSSMKEP

SEQ ID NO: 59093 - protein, 31 aa, Artificial Sequence
  Cyclic GFR-binding peptide
  MOD_RES (30)..(31): Xaa is C or S
VVMNPYVKLIVNSSDDFFLVSLSSLQTPAXX

SEQ ID NO: 59094 - protein, 25 aa, Artificial Sequence
  Cyclic GFR-binding peptide
PYVKLLLVRGNDFFLMSLSSTKVPA

SEQ ID NO: 59095 - protein, 27 aa, Artificial Sequence
  Cyclic GFR-binding peptide
  MOD_RES (26)..(27): Xaa is C or S
PYVKLVKPTRGVLFFISLSSLDQPVXX

SEQ ID NO: 59096 - protein, 36 aa, Artificial Sequence
  Cyclic GFR-binding peptide
  MOD_RES (31)..(32): Xaa is C or S
DVVMGPYVKLIIQQKDNFFLMSLSSMKTPTXXPGAS

SEQ ID NO: 59097 - protein, 31 aa, Artificial Sequence
  Cyclic GFR-binding peptide
SEVTMNPYVKLVVNKNEDFFLISLSSMKEPV

SEQ ID NO: 59098 - protein, 31 aa, Artificial Sequence
  Cyclic GFR-binding peptide
  MOD_RES (1)..(1): Xaa is C or S
XSEVTMNPYVKLVVNKNEDFFLISLSSMKEP

SEQ ID NO: 59099 - protein, 39 aa, Artificial Sequence
  Cyclic GFR-binding peptide
  MOD_RES (2)..(39): Xaa is C or S
AXELHEELRPYVKLLKPKKRVYEFFLVSLSSHHVRSPQX

SEQ ID NO: 59100 - protein, 34 aa, Artificial Sequence
  Cyclic GFR-binding peptide
  MOD_RES (1)..(33)..(34): Xaa is C or S
XGEVVMDPYVKLVVKENEDFFLMSLSSLETPVXX

SEQ ID NO: 59101 - protein, 35 aa, Artificial Sequence
  Cyclic GFR-binding peptide
  MOD_RES (30)..(31): Xaa is C or S
SMGEPYVKLTPVGMDDFFLVSLSSLKTPVXXAKGV

SEQ ID NO: 59102 - protein, 34 aa, Artificial Sequence
  Cyclic GFR-binding peptide
  MOD_RES (28)..(28): Xaa is C or S
MNPYVKLIVNSSDDFFLVSLSSLKTPAXTPKTVH

SEQ ID NO: 59103 - protein, 27 aa, Artificial Sequence
  Cyclic GFR-binding peptide
  MOD_RES (1)..(1): Xaa is C or S
XEEVIMPYVKLLLVRGNDFFLMSLSST

SEQ ID NO: 59104 - protein, 39 aa, Artificial Sequence
  Cyclic GFR-binding peptide
  MOD_RES (1)..(33)..(34): Xaa is C or S
XAEVVMDPYVKLVVNNAADFFLISLSSLRAPVXXSAPAA

SEQ ID NO: 59105 - protein, 32 aa, Artificial Sequence
  Cyclic GFR-binding peptide
  MOD_RES (28)..(29): Xaa is C or S
IMPYVKLLLVRGNDFFLMSLSSTKVPAXXTSP

SEQ ID NO: 59106 - protein, 30 aa, Artificial Sequence
  Cyclic GFR-binding peptide
  MOD_RES (1)..(3): Xaa is C or S
XGXESVAMGPYVKLYTVVGKDFFLISLSSL

SEQ ID NO: 59107 - protein, 22 aa, Artificial Sequence
  Cyclic GFR-binding peptide
MNPYVKLIVNNSSDFFLVSLSS

SEQ ID NO: 59108 - protein, 36 aa, Artificial Sequence
  Cyclic GFR-binding peptide
  MOD_RES (30)..(31): Xaa is C or S
EVIMPYVKLLLVRGNDFFLMSLSSTKVPAXXTSPVR

SEQ ID NO: 59109 - protein, 29 aa, Artificial Sequence
  Cyclic GFR-binding peptide
RVVMNPYVKLIVNSSDDFFLVSLSSLKTP

SEQ ID NO: 59110 - protein, 34 aa, Artificial Sequence
  Cyclic GFR-binding peptide
  MOD_RES (1)..(3): Xaa is C or S
XGXSEVVMDPYVKLVVNNASDFFLISLSSLRTPV

SEQ ID NO: 59111 - protein, 37 aa, Artificial Sequence
  Cyclic GFR-binding peptide
  MOD_RES (32)..(33): Xaa is C or S
AKVVMNPYVKLIVNNSSDFFLVSLSSLKTPAXXAKPV

SEQ ID NO: 59112 - protein, 23 aa, Artificial Sequence
  Cyclic GFR-binding peptide
MNPYVKLIVNNSSDFFLVSLSSL

SEQ ID NO: 59113 - protein, 38 aa, Artificial Sequence
  Cyclic GFR-binding peptide
  MOD_RES (2)..(4)..(36)..(37): Xaa is C or S
HXGXAKVVMNPYVKLIVNNSSDFFLVSLSSLKTPAXXA

SEQ ID NO: 59114 - protein, 23 aa, Artificial Sequence
  Cyclic GFR-binding peptide
MPYVKLVKPTRGVLFFISLSSLD

SEQ ID NO: 59115 - protein, 33 aa, Artificial Sequence
  Cyclic GFR-binding peptide
  MOD_RES (2)..(4): Xaa is C or S
RXEXKNHQLFPYVKLHQGQHPKIRFFLMSLSSE

SEQ ID NO: 59116 - protein, 24 aa, Artificial Sequence
  Cyclic GFR-binding peptide
VVMGPYVKLIIQQKDNFFLMSLSS

SEQ ID NO: 59117 - protein, 26 aa, Artificial Sequence
  Cyclic GFR-binding peptide
SVAMGPYVKLYTVVGKDFFLISLSSL

SEQ ID NO: 59118 - protein, 25 aa, Artificial Sequence
  Cyclic GFR-binding peptide
RPYVKLLKPKKRVYEFFLVSLSSHH

SEQ ID NO: 59119 - protein, 39 aa, Artificial Sequence
  Cyclic GFR-binding peptide
  MOD_RES (1)..(33)..(34): Xaa is C or S
XSRVVMNPYVKLIVNSSDDFFLVSLSSLKTPAXXPKPVY

SEQ ID NO: 59120 - protein, 30 aa, Artificial Sequence
  Cyclic GFR-binding peptide
  MOD_RES (1)..(1): Xaa is C or S
XELHEELRPYVKLLKPKKRVYEFFLVSLSS

SEQ ID NO: 59121 - protein, 25 aa, Artificial Sequence
  Cyclic GFR-binding peptide
SKVVMPYVKLVKPTRGVLFFISLSS

SEQ ID NO: 59122 - protein, 35 aa, Artificial Sequence
  Cyclic GFR-binding peptide
  MOD_RES (30)..(31): Xaa is C or S
VVMNPYVKLIVNSSDDFFLVSLSSLQTPAXXPKPV

SEQ ID NO: 59123 - protein, 32 aa, Artificial Sequence
  Cyclic GFR-binding peptide
  MOD_RES (31)..(32): Xaa is C or S
EVVMDPYVKLVVNNASDFFLISLSSLRTPVXX

SEQ ID NO: 59124 - protein, 32 aa, Artificial Sequence
  Cyclic GFR-binding peptide
  MOD_RES (1)..(1): Xaa is C or S
XESVAMGPYVKLYTVVGKDFFLISLSSLKTPV

SEQ ID NO: 59125 - protein, 34 aa, Artificial Sequence
  Cyclic GFR-binding peptide
  MOD_RES (28)..(28): Xaa is C or S
PYVKLHQGQHPKIRFFLMSLSSEETPVXELGEDN

SEQ ID NO: 59126 - protein, 34 aa, Artificial Sequence
  Cyclic GFR-binding peptide
  MOD_RES (30)..(31): Xaa is C or S
VVMDPYVKLVVKENEDFFLMSLSSLETPVXXAKP

SEQ ID NO: 59127 - protein, 33 aa, Artificial Sequence
  Cyclic GFR-binding peptide
  MOD_RES (32)..(33): Xaa is C or S
AVSMGEPYVKLTPVGMDDFFLVSLSSLKTPVXX

SEQ ID NO: 59128 - protein, 31 aa, Artificial Sequence
  Cyclic GFR-binding peptide
  MOD_RES (29)..(30): Xaa is C or S
MGEPYVKLTPVGMDDFFLVSLSSLKTPVXXA

SEQ ID NO: 59129 - protein, 30 aa, Artificial Sequence
  Cyclic GFR-binding peptide
  MOD_RES (26)..(27): Xaa is C or S
PYVKLIKPTKGILFFISLSSLDQSVXXPSA

SEQ ID NO: 59130 - protein, 37 aa, Artificial Sequence
  Cyclic GFR-binding peptide
  MOD_RES (31)..(32): Xaa is C or S
VSMGEPYVKLTPVGMDDFFLVSLSSLKTPVXXAKGVK

SEQ ID NO: 59131 - protein, 35 aa, Artificial Sequence
  Cyclic GFR-binding peptide
LHEELRPYVKLLKPKKRVYEFFLVSLSSHHVRSPQ

SEQ ID NO: 59132 - protein, 32 aa, Artificial Sequence
  Cyclic GFR-binding peptide
  MOD_RES (28)..(29): Xaa is C or S
MNPYVKLIVNSSDDFFLVSLSSLQTPAXXPKP

SEQ ID NO: 59133 - protein, 35 aa, Artificial Sequence
  Cyclic GFR-binding peptide
  MOD_RES (29)..(30): Xaa is C or S
VMDPYVKLVVKENEDFFLMSLSSLETPVXXAKPIK

SEQ ID NO: 59134 - protein, 43 aa, Artificial Sequence
  Cyclic GFR-binding peptide
  MOD_RES (2)..(4)..(38): Xaa is C or S
RXEXKNHQLFPYVKLHQGQHPKIRFFLMSLSSEETPVXELGED

SEQ ID NO: 59135 - protein, 30 aa, Artificial Sequence
  Cyclic GFR-binding peptide
  MOD_RES (2)..(4): Xaa is C or S
RXAXSEVTMNPYVKLVVNKNEDFFLISLSS

SEQ ID NO: 59136 - protein, 28 aa, Artificial Sequence
  Cyclic GFR-binding peptide
  MOD_RES (28)..(28): Xaa is C or S
MDPYVKLVVNNASDFFLISLSSLRTPVX

SEQ ID NO: 59137 - protein, 26 aa, Artificial Sequence
  Cyclic GFR-binding peptide
GPYVKLYTVVGKDFFLISLSSLKTPV

SEQ ID NO: 59138 - protein, 35 aa, Artificial Sequence
  Cyclic GFR-binding peptide
  MOD_RES (2)..(4): Xaa is C or S
RXEXKNHQLFPYVKLHQGQHPKIRFFLMSLSSEET

SEQ ID NO: 59139 - protein, 24 aa, Artificial Sequence
  Cyclic GFR-binding peptide
VMDPYVKLVVNNASDFFLISLSSL

SEQ ID NO: 59140 - protein, 30 aa, Artificial Sequence
  Cyclic GFR-binding peptide
  MOD_RES (1)..(3): Xaa is C or S
XGXAKVVMNPYVKLIVNNSSDFFLVSLSSL

SEQ ID NO: 59141 - protein, 34 aa, Artificial Sequence
  Cyclic GFR-binding peptide
  MOD_RES (31)..(32): Xaa is C or S
DVVMGPYVKLIIQQKDNFFLMSLSSMKTPTXXPG

SEQ ID NO: 59142 - protein, 27 aa, Artificial Sequence
  Cyclic GFR-binding peptide
EEVIMPYVKLLLVRGNDFFLMSLSSTK

SEQ ID NO: 59143 - protein, 29 aa, Artificial Sequence
  Cyclic GFR-binding peptide
  MOD_RES (28)..(29): Xaa is C or S
MNPYVKLVVNKNEDFFLISLSSMKEPVXX

SEQ ID NO: 59144 - protein, 23 aa, Artificial Sequence
  Cyclic GFR-binding peptide
DPYVKLVVNNASDFFLISLSSLR

SEQ ID NO: 59145 - protein, 30 aa, Artificial Sequence
  Cyclic GFR-binding peptide
  MOD_RES (2)..(2): Xaa is C or S
EXKNHQLFPYVKLHQGQHPKIRFFLMSLSS

SEQ ID NO: 59146 - protein, 28 aa, Artificial Sequence
  Cyclic GFR-binding peptide
  MOD_RES (1)..(1): Xaa is C or S
XARVVMNPYVKLIVNSSDDFFLVSLSSL

SEQ ID NO: 59147 - protein, 32 aa, Artificial Sequence
  Cyclic GFR-binding peptide
  MOD_RES (32)..(32): Xaa is C or S
AVSMGEPYVKLTPVGMDDFFLVSLSSLKTPVX

SEQ ID NO: 59148 - protein, 25 aa, Artificial Sequence
  Cyclic GFR-binding peptide
PYVKLIIQQKDNFFLMSLSSMKTPT

SEQ ID NO: 59149 - protein, 40 aa, Artificial Sequence
  Cyclic GFR-binding peptide
  MOD_RES (2)..(34)..(35): Xaa is C or S
GXSRVVMNPYVKLIVNSSDDFFLVSLSSLKTPAXXPKPVH

SEQ ID NO: 59150 - protein, 35 aa, Artificial Sequence
  Cyclic GFR-binding peptide
  MOD_RES (2)..(34)..(35): Xaa is C or S
GXRDVVMGPYVKLIIQQKDNFFLMSLSSMKTPTXX

SEQ ID NO: 59151 - protein, 37 aa, Artificial Sequence
  Cyclic GFR-binding peptide
  MOD_RES (1)..(33)..(34): Xaa is C or S
XRDVVMGPYVKLIIQQKDNFFLMSLSSMKTPTXXPGA

SEQ ID NO: 59152 - protein, 39 aa, Artificial Sequence
  Cyclic GFR-binding peptide
  MOD_RES (2)..(4)..(36)..(37): Xaa is C or S
RXGXESVAMGPYVKLYTVVGKDFFLISLSSLKTPVXXAK

SEQ ID NO: 59153 - protein, 36 aa, Artificial Sequence
  Cyclic GFR-binding peptide
  MOD_RES (31)..(32): Xaa is C or S
EVVMDPYVKLVVNNAADFFLISLSSLRAPVXXSAPA

SEQ ID NO: 59154 - protein, 37 aa, Artificial Sequence
  Cyclic GFR-binding peptide
  MOD_RES (2)..(4): Xaa is C or S
RXEXKNHQLFPYVKLHQGQHPKIRFFLMSLSSEETPV

SEQ ID NO: 59155 - protein, 25 aa, Artificial Sequence
  Cyclic GFR-binding peptide
MPYVKLVKPTRGVLFFISLSSLDQP

SEQ ID NO: 59156 - protein, 41 aa, Artificial Sequence
  Cyclic GFR-binding peptide
  MOD_RES (2)..(4)..(36)..(37): Xaa is C or S
RXGXSEVVMDPYVKLVVNNASDFFLISLSSLRTPVXXTPPT

SEQ ID NO: 59157 - protein, 30 aa, Artificial Sequence
  Cyclic GFR-binding peptide
  MOD_RES (28)..(29): Xaa is C or S
VMPYVKLVKPTRGVLFFISLSSLDQPVXXP

SEQ ID NO: 59158 - protein, 39 aa, Artificial Sequence
  Cyclic GFR-binding peptide
  MOD_RES (2)..(34): Xaa is C or S
GXSRVVMNPYVKLIVNSSDDFFLVSLSSLKTPAXTPKTV

SEQ ID NO: 59159 - protein, 33 aa, Artificial Sequence
  Cyclic GFR-binding peptide
  MOD_RES (30)..(30): Xaa is C or S
LFPYVKLHQGQHPKIRFFLMSLSSEETPVXELG

SEQ ID NO: 59160 - protein, 36 aa, Artificial Sequence
  Cyclic GFR-binding peptide
  MOD_RES (2)..(4): Xaa is C or S
RXEXKNHQLFPYVKLHQGQHPKIRFFLMSLSSEETP

SEQ ID NO: 59161 - protein, 33 aa, Artificial Sequence
  Cyclic GFR-binding peptide
  MOD_RES (1)..(33): Xaa is C or S
XSEVTMNPYVKLVVNKNEDFFLISLSSMKEPVX

SEQ ID NO: 59162 - protein, 21 aa, Artificial Sequence
  Cyclic GFR-binding peptide
GPYVKLYTVVGKDFFLISLSS

SEQ ID NO: 59163 - protein, 40 aa, Artificial Sequence
  Cyclic GFR-binding peptide
  MOD_RES (2)..(34)..(35): Xaa is C or S
GXSEVVMDPYVKLVVNNASDFFLISLSSLRTPVXXTPPTS

SEQ ID NO: 59164 - protein, 25 aa, Artificial Sequence
  Cyclic GFR-binding peptide
NPYVKLIVNSSDDFFLVSLSSLKTP

SEQ ID NO: 59165 - protein, 24 aa, Artificial Sequence
  Cyclic GFR-binding peptide
AMGPYVKLYTVVGKDFFLISLSSL

SEQ ID NO: 59166 - protein, 24 aa, Artificial Sequence
  Cyclic GFR-binding peptide
GEPYVKLTPVGMDDFFLVSLSSLK

SEQ ID NO: 59167 - protein, 34 aa, Artificial Sequence
  Cyclic GFR-binding peptide
  MOD_RES (30)..(31): Xaa is C or S
VVMDPYVKLVVNNASDFFLISLSSLRTPVXXTPP

SEQ ID NO: 59168 - protein, 40 aa, Artificial Sequence
  Cyclic GFR-binding peptide
  MOD_RES (2)..(34)..(35): Xaa is C or S
GXARVVMNPYVKLIVNSSDDFFLVSLSSLQTPAXXPKPVT

SEQ ID NO: 59169 - protein, 37 aa, Artificial Sequence
  Cyclic GFR-binding peptide
  MOD_RES (32)..(33): Xaa is C or S
AEVVMDPYVKLVVNNAADFFLISLSSLRAPVXXSAPA

SEQ ID NO: 59170 - protein, 27 aa, Artificial Sequence
  Cyclic GFR-binding peptide
  MOD_RES (2)..(2): Xaa is C or S
KXSRVIMPYVKLVKPKRGVLFFISLSS

SEQ ID NO: 59171 - protein, 26 aa, Artificial Sequence
  Cyclic GFR-binding peptide
EVVMDPYVKLVVNNAADFFLISLSSL

SEQ ID NO: 59172 - protein, 21 aa, Artificial Sequence
  Cyclic GFR-binding peptide
MPYVKLLLVRGNDFFLMSLSS

SEQ ID NO: 59173 - protein, 32 aa, Artificial Sequence
  Cyclic GFR-binding peptide
  MOD_RES (2)..(2): Xaa is C or S
GXESVAMGPYVKLYTVVGKDFFLISLSSLKTP

SEQ ID NO: 59174 - protein, 29 aa, Artificial Sequence
  Cyclic GFR-binding peptide
  MOD_RES (26)..(27): Xaa is C or S
PYVKLTPVGMDDFFLVSLSSLKTPVXXAK

SEQ ID NO: 59175 - protein, 28 aa, Artificial Sequence
  Cyclic GFR-binding peptide
SKVIMPYVKLIKPTKGILFFISLSSLDQ

SEQ ID NO: 59176 - protein, 34 aa, Artificial Sequence
  Cyclic GFR-binding peptide
  MOD_RES (32)..(32): Xaa is C or S
HQLFPYVKLHQGQHPKIRFFLMSLSSEETPVXEL

SEQ ID NO: 59177 - protein, 40 aa, Artificial Sequence
  Cyclic GFR-binding peptide
  MOD_RES (1)..(3)..(35): Xaa is C or S
XGXSRVVMNPYVKLIVNSSDDFFLVSLSSLKTPAXTPKTV

SEQ ID NO: 59178 - protein, 38 aa, Artificial Sequence
  Cyclic GFR-binding peptide
  MOD_RES (2)..(34)..(35): Xaa is C or S
GXAEVVMDPYVKLVVNNAADFFLISLSSLRAPVXXSAP

SEQ ID NO: 59179 - protein, 38 aa, Artificial Sequence
  Cyclic GFR-binding peptide
  MOD_RES (2)..(34)..(35): Xaa is C or S
GXRDVVMGPYVKLIIQQKDNFFLMSLSSMKTPTXXPGA

SEQ ID NO: 59180 - protein, 30 aa, Artificial Sequence
  Cyclic GFR-binding peptide
  MOD_RES (30)..(30): Xaa is C or S
VAMGPYVKLYTVVGKDFFLISLSSLKTPVX

SEQ ID NO: 59181 - protein, 39 aa, Artificial Sequence
  Cyclic GFR-binding peptide
  MOD_RES (2)..(36): Xaa is C or S
EXKNHQLFPYVKLHQGQHPKIRFFLMSLSSEETPVXELG

SEQ ID NO: 59182 - protein, 27 aa, Artificial Sequence
  Cyclic GFR-binding peptide
  MOD_RES (26)..(27): Xaa is C or S
PYVKLIVNNSSDFFLVSLSSLKTPAXX

SEQ ID NO: 59183 - protein, 29 aa, Artificial Sequence
  Cyclic GFR-binding peptide
EAVSMGEPYVKLTPVGMDDFFLVSLSSLK

SEQ ID NO: 59184 - protein, 24 aa, Artificial Sequence
  Cyclic GFR-binding peptide
VVMDPYVKLVVKENEDFFLMSLSS

SEQ ID NO: 59185 - protein, 25 aa, Artificial Sequence
  Cyclic GFR-binding peptide
KVIMPYVKLIKPTKGILFFISLSSL

SEQ ID NO: 59186 - protein, 31 aa, Artificial Sequence
  Cyclic GFR-binding peptide
  MOD_RES (28)..(29): Xaa is C or S
MNPYVKLVVNKNEDFFLISLSSMKEPVXXPE

SEQ ID NO: 59187 - protein, 37 aa, Artificial Sequence
  Cyclic GFR-binding peptide
  MOD_RES (2)..(34)..(35): Xaa is C or S
GXRDVVMGPYVKLIIQQKDNFFLMSLSSMKTPTXXPG

SEQ ID NO: 59188 - protein, 33 aa, Artificial Sequence
  Cyclic GFR-binding peptide
  MOD_RES (27)..(27): Xaa is C or S
NPYVKLIVNSSDDFFLVSLSSLKTPAXTPKTVH

SEQ ID NO: 59189 - protein, 34 aa, Artificial Sequence
  Cyclic GFR-binding peptide
  MOD_RES (31)..(31): Xaa is C or S
RPYVKLLKPKKRVYEFFLVSLSSHHVRSPQXKVS

SEQ ID NO: 59190 - protein, 25 aa, Artificial Sequence
  Cyclic GFR-binding peptide
MNPYVKLIVNSSDDFFLVSLSSLKT

SEQ ID NO: 59191 - protein, 27 aa, Artificial Sequence
  Cyclic GFR-binding peptide
AVSMGEPYVKLTPVGMDDFFLVSLSSL

SEQ ID NO: 59192 - protein, 33 aa, Artificial Sequence
  Cyclic GFR-binding peptide
  MOD_RES (1)..(1): Xaa is C or S
XELHEELRPYVKLLKPKKRVYEFFLVSLSSHHV

SEQ ID NO: 59193 - protein, 29 aa, Artificial Sequence
  Cyclic GFR-binding peptide
  MOD_RES (1)..(1): Xaa is C or S
XSRVVMNPYVKLIVNSSDDFFLVSLSSLK

SEQ ID NO: 59194 - protein, 31 aa, Artificial Sequence
  Cyclic GFR-binding peptide
LHEELRPYVKLLKPKKRVYEFFLVSLSSHHV

SEQ ID NO: 59195 - protein, 42 aa, Artificial Sequence
  Cyclic GFR-binding peptide
  MOD_RES (2)..(4)..(36)..(37): Xaa is C or S
RXGXGEVVMEPYVKLVVKDYEDFFLMSLSSLETPVXXAKPIS

SEQ ID NO: 59196 - protein, 33 aa, Artificial Sequence
  Cyclic GFR-binding peptide
  MOD_RES (1)..(3): Xaa is C or S
XGXRDVVMGPYVKLIIQQKDNFFLMSLSSMKTP

SEQ ID NO: 59197 - protein, 32 aa, Artificial Sequence
  Cyclic GFR-binding peptide
  MOD_RES (1)..(32): Xaa is C or S
XSKVVMPYVKLVKPTRGVLFFISLSSLDQPVX

SEQ ID NO: 59198 - protein, 33 aa, Artificial Sequence
  Cyclic GFR-binding peptide
HEELRPYVKLLKPKKRVYEFFLVSLSSHHVRSP

SEQ ID NO: 59199 - protein, 29 aa, Artificial Sequence
  Cyclic GFR-binding peptide
NHQLFPYVKLHQGQHPKIRFFLMSLSSEE

SEQ ID NO: 59200 - protein, 26 aa, Artificial Sequence
  Cyclic GFR-binding peptide
  MOD_RES (1)..(1): Xaa is C or S
XEEVIMPYVKLLLVRGNDFFLMSLSS

SEQ ID NO: 59201 - protein, 33 aa, Artificial Sequence
  Cyclic GFR-binding peptide
  MOD_RES (2)..(4): Xaa is C or S
SXKXSRVIMPYVKLVKPKRGVLFFISLSSLAQP

SEQ ID NO: 59202 - protein, 34 aa, Artificial Sequence
  Cyclic GFR-binding peptide
  MOD_RES (34)..(34): Xaa is C or S
EELRPYVKLLKPKKRVYEFFLVSLSSHHVRSPQX

SEQ ID NO: 59203 - protein, 39 aa, Artificial Sequence
  Cyclic GFR-binding peptide
  MOD_RES (1)..(3)..(36)..(37): Xaa is C or S
XGXEAVSMGEPYVKLTPVGMDDFFLVSLSSLKTPVXXAK

SEQ ID NO: 59204 - protein, 34 aa, Artificial Sequence
  Cyclic GFR-binding peptide
  MOD_RES (29)..(30): Xaa is C or S
VMNPYVKLIVNSSDDFFLVSLSSLKTPAXXPKPV

SEQ ID NO: 59205 - protein, 31 aa, Artificial Sequence
  Cyclic GFR-binding peptide
  MOD_RES (2)..(4): Xaa is C or S
RXGXEAVSMGEPYVKLTPVGMDDFFLVSLSS

SEQ ID NO: 59206 - protein, 26 aa, Artificial Sequence
  Cyclic GFR-binding peptide
MNPYVKLVVNKNEDFFLISLSSMKEP

SEQ ID NO: 59207 - protein, 30 aa, Artificial Sequence
  Cyclic GFR-binding peptide
  MOD_RES (28)..(29): Xaa is C or S
MNPYVKLIVNNSSDFFLVSLSSLKTPAXXA

SEQ ID NO: 59208 - protein, 25 aa, Artificial Sequence
  Cyclic GFR-binding peptide
PYVKLVKPTRGVLFFISLSSLDQPV

SEQ ID NO: 59209 - protein, 27 aa, Artificial Sequence
  Cyclic GFR-binding peptide
  MOD_RES (26)..(27): Xaa is C or S
PYVKLVVKENEDFFLMSLSSLETPVXX

SEQ ID NO: 59210 - protein, 28 aa, Artificial Sequence
  Cyclic GFR-binding peptide
AMGPYVKLYTVVGKDFFLISLSSLKTPV

SEQ ID NO: 59211 - protein, 26 aa, Artificial Sequence
  Cyclic GFR-binding peptide
  MOD_RES (26)..(26): Xaa is C or S
PYVKLVVKENEDFFLMSLSSLETPVX

SEQ ID NO: 59212 - protein, 39 aa, Artificial Sequence
  Cyclic GFR-binding peptide
  MOD_RES (1)..(3)..(35)..(36): Xaa is C or S
XGXSEVVMDPYVKLVVNNASDFFLISLSSLRTPVXXTPP

SEQ ID NO: 59213 - protein, 37 aa, Artificial Sequence
  Cyclic GFR-binding peptide
  MOD_RES (1)..(3)..(35)..(36): Xaa is C or S
XGXRDVVMGPYVKLIIQQKDNFFLMSLSSMKTPTXXP

SEQ ID NO: 59214 - protein, 32 aa, Artificial Sequence
  Cyclic GFR-binding peptide
  MOD_RES (28)..(29): Xaa is C or S
MNPYVKLVVNKNEDFFLISLSSMKEPVXXPEP

SEQ ID NO: 59215 - protein, 38 aa, Artificial Sequence
  Cyclic GFR-binding peptide
  MOD_RES (1)..(3)..(35)..(36): Xaa is C or S
XGXARVVMNPYVKLIVNSSDDFFLVSLSSLQTPAXXPK

SEQ ID NO: 59216 - protein, 31 aa, Artificial Sequence
  Cyclic GFR-binding peptide
  MOD_RES (1)..(1): Xaa is C or S
XSKVIMPYVKLIKPTKGILFFISLSSLDQSV

SEQ ID NO: 59217 - protein, 30 aa, Artificial Sequence
  Cyclic GFR-binding peptide
  MOD_RES (29)..(30): Xaa is C or S
MGEPYVKLTPVGMDDFFLVSLSSLKTPVXX

SEQ ID NO: 59218 - protein, 36 aa, Artificial Sequence
  Cyclic GFR-binding peptide
  MOD_RES (2)..(34)..(35): Xaa is C or S
GXAKVVMNPYVKLIVNNSSDFFLVSLSSLKTPAXXA

SEQ ID NO: 59219 - protein, 37 aa, Artificial Sequence
  Cyclic GFR-binding peptide
  MOD_RES (1)..(33)..(34): Xaa is C or S
XSEVTMNPYVKLVVNKNEDFFLISLSSMKEPVXXPEP

SEQ ID NO: 59220 - protein, 30 aa, Artificial Sequence
  Cyclic GFR-binding peptide
AEVVMDPYVKLVVNNAADFFLISLSSLRAP

SEQ ID NO: 59221 - protein, 34 aa, Artificial Sequence
  Cyclic GFR-binding peptide
  MOD_RES (2)..(4): Xaa is C or S
SXKXSKVIMPYVKLIKPTKGILFFISLSSLDQSV

SEQ ID NO: 59222 - protein, 41 aa, Artificial Sequence
  Cyclic GFR-binding peptide
  MOD_RES (1)..(3)..(35)..(36): Xaa is C or S
XAXSEVTMNPYVKLVVNKNEDFFLISLSSMKEPVXXPEPIG

SEQ ID NO: 59223 - protein, 33 aa, Artificial Sequence
  Cyclic GFR-binding peptide
  MOD_RES (31)..(32): Xaa is C or S
EVVMDPYVKLVVNNAADFFLISLSSLRAPVXXS

SEQ ID NO: 59224 - protein, 22 aa, Artificial Sequence
  Cyclic GFR-binding peptide
MPYVKLLLVRGNDFFLMSLSST

SEQ ID NO: 59225 - protein, 25 aa, Artificial Sequence
  Cyclic GFR-binding peptide
VVMNPYVKLIVNSSDDFFLVSLSSL

SEQ ID NO: 59226 - protein, 27 aa, Artificial Sequence
  Cyclic GFR-binding peptide
VTMNPYVKLVVNKNEDFFLISLSSMKE

SEQ ID NO: 59227 - protein, 31 aa, Artificial Sequence
  Cyclic GFR-binding peptide
  MOD_RES (27)..(28): Xaa is C or S
GPYVKLIIQQKDNFFLMSLSSMKTPTXXPGA

SEQ ID NO: 59228 - protein, 38 aa, Artificial Sequence
  Cyclic GFR-binding peptide
  MOD_RES (2)..(33)..(34): Xaa is C or S
KXSKVVMPYVKLVKPTRGVLFFISLSSLDQPVXXPSAS

SEQ ID NO: 59229 - protein, 36 aa, Artificial Sequence
  Cyclic GFR-binding peptide
  MOD_RES (1)..(33)..(34): Xaa is C or S
XESVAMGPYVKLYTVVGKDFFLISLSSLKTPVXXAK

SEQ ID NO: 59230 - protein, 35 aa, Artificial Sequence
  Cyclic GFR-binding peptide
  MOD_RES (2)..(4): Xaa is C or S
RXGXSEVVMDPYVKLVVNNASDFFLISLSSLRTPV

SEQ ID NO: 59231 - protein, 38 aa, Artificial Sequence
  Cyclic GFR-binding peptide
  MOD_RES (1)..(3)..(34)..(35): Xaa is C or S
XKXSKVIMPYVKLIKPTKGILFFISLSSLDQSVXXPSA

SEQ ID NO: 59232 - protein, 42 aa, Artificial Sequence
  Cyclic GFR-binding peptide
  MOD_RES (2)..(36): Xaa is C or S
EXKNHQLFPYVKLHQGQHPKIRFFLMSLSSEETPVXELGEDN

SEQ ID NO: 59233 - protein, 28 aa, Artificial Sequence
  Cyclic GFR-binding peptide
  MOD_RES (28)..(28): Xaa is C or S
MDPYVKLVVNNAADFFLISLSSLRAPVX

SEQ ID NO: 59234 - protein, 30 aa, Artificial Sequence
  Cyclic GFR-binding peptide
  MOD_RES (2)..(2): Xaa is C or S
GXSRVVMNPYVKLIVNSSDDFFLVSLSSLK

SEQ ID NO: 59235 - protein, 30 aa, Artificial Sequence
  Cyclic GFR-binding peptide
  MOD_RES (26)..(27): Xaa is C or S
PYVKLYTVVGKDFFLISLSSLKTPVXXAKS

SEQ ID NO: 59236 - protein, 37 aa, Artificial Sequence
  Cyclic GFR-binding peptide
  MOD_RES (1)..(34)..(35): Xaa is C or S
XEAVSMGEPYVKLTPVGMDDFFLVSLSSLKTPVXXAK

SEQ ID NO: 59237 - protein, 35 aa, Artificial Sequence
  Cyclic GFR-binding peptide
  MOD_RES (1)..(32)..(33): Xaa is C or S
XSRVIMPYVKLVKPKRGVLFFISLSSLAQPVXXPA

SEQ ID NO: 59238 - protein, 35 aa, Artificial Sequence
  Cyclic GFR-binding peptide
  MOD_RES (32)..(33): Xaa is C or S
SEVVMDPYVKLVVNNASDFFLISLSSLRTPVXXTP

SEQ ID NO: 59239 - protein, 28 aa, Artificial Sequence
  Cyclic GFR-binding peptide
  MOD_RES (1)..(1): Xaa is C or S
XEEVIMPYVKLLLVRGNDFFLMSLSSTK

SEQ ID NO: 59240 - protein, 41 aa, Artificial Sequence
  Cyclic GFR-binding peptide
  MOD_RES (37)..(37): Xaa is C or S
ELHEELRPYVKLLKPKKRVYEFFLVSLSSHHVRSPQXKVSS

SEQ ID NO: 59241 - protein, 32 aa, Artificial Sequence
  Cyclic GFR-binding peptide
  MOD_RES (31)..(32): Xaa is C or S
SVAMGPYVKLYTVVGKDFFLISLSSLKTPVXX

SEQ ID NO: 59242 - protein, 27 aa, Artificial Sequence
  Cyclic GFR-binding peptide
  MOD_RES (27)..(27): Xaa is C or S
DPYVKLVVNNAADFFLISLSSLRAPVX

SEQ ID NO: 59243 - protein, 32 aa, Artificial Sequence
  Cyclic GFR-binding peptide
  MOD_RES (1)..(1): Xaa is C or S
XKNHQLFPYVKLHQGQHPKIRFFLMSLSSEET

SEQ ID NO: 59244 - protein, 21 aa, Artificial Sequence
  Cyclic GFR-binding peptide
NPYVKLIVNNSSDFFLVSLSS

SEQ ID NO: 59245 - protein, 39 aa, Artificial Sequence
  Cyclic GFR-binding peptide
  MOD_RES (1)..(3)..(35)..(36): Xaa is C or S
XGXARVVMNPYVKLIVNSSDDFFLVSLSSLQTPAXXPKP

SEQ ID NO: 59246 - protein, 25 aa, Artificial Sequence
  Cyclic GFR-binding peptide
MNPYVKLVVNKNEDFFLISLSSMKE

SEQ ID NO: 59247 - protein, 27 aa, Artificial Sequence
  Cyclic GFR-binding peptide
EAVSMGEPYVKLTPVGMDDFFLVSLSS

SEQ ID NO: 59248 - protein, 33 aa, Artificial Sequence
  Cyclic GFR-binding peptide
  MOD_RES (2)..(2): Xaa is C or S
GXGEVVMDPYVKLVVKENEDFFLMSLSSLETPV

SEQ ID NO: 59249 - protein, 31 aa, Artificial Sequence
  Cyclic GFR-binding peptide
AEVVMDPYVKLVVNNAADFFLISLSSLRAPV

SEQ ID NO: 59250 - protein, 28 aa, Artificial Sequence
  Cyclic GFR-binding peptide
TMNPYVKLVVNKNEDFFLISLSSMKEPV

SEQ ID NO: 59251 - protein, 25 aa, Artificial Sequence
  Cyclic GFR-binding peptide
VIMPYVKLLLVRGNDFFLMSLSSTK

SEQ ID NO: 59252 - protein, 29 aa, Artificial Sequence
  Cyclic GFR-binding peptide
HQLFPYVKLHQGQHPKIRFFLMSLSSEET

SEQ ID NO: 59253 - protein, 34 aa, Artificial Sequence
  Cyclic GFR-binding peptide
  MOD_RES (31)..(32): Xaa is C or S
SRVIMPYVKLVKPKRGVLFFISLSSLAQPVXXPA

SEQ ID NO: 59254 - protein, 35 aa, Artificial Sequence
  Cyclic GFR-binding peptide
  MOD_RES (31)..(32): Xaa is C or S
EVVMDPYVKLVVNNAADFFLISLSSLRAPVXXSAP

SEQ ID NO: 59255 - protein, 40 aa, Artificial Sequence
  Cyclic GFR-binding peptide
  MOD_RES (1)..(3)..(35)..(36): Xaa is C or S
XGXSRVVMNPYVKLIVNSSDDFFLVSLSSLKTPAXXPKPV

SEQ ID NO: 59256 - protein, 27 aa, Artificial Sequence
  Cyclic GFR-binding peptide
VVMPYVKLVKPTRGVLFFISLSSLDQP

SEQ ID NO: 59257 - protein, 30 aa, Artificial Sequence
  Cyclic GFR-binding peptide
LHEELRPYVKLLKPKKRVYEFFLVSLSSHH

SEQ ID NO: 59258 - protein, 22 aa, Artificial Sequence
  Cyclic GFR-binding peptide
MDPYVKLVVNNAADFFLISLSS

SEQ ID NO: 59259 - protein, 29 aa, Artificial Sequence
  Cyclic GFR-binding peptide
SRVIMPYVKLVKPKRGVLFFISLSSLAQP

SEQ ID NO: 59260 - protein, 33 aa, Artificial Sequence
  Cyclic GFR-binding peptide
  MOD_RES (29)..(30): Xaa is C or S
TMNPYVKLVVNKNEDFFLISLSSMKEPVXXPEP

SEQ ID NO: 59261 - protein, 28 aa, Artificial Sequence
  Cyclic GFR-binding peptide
VMNPYVKLIVNSSDDFFLVSLSSLQTPA

SEQ ID NO: 59262 - protein, 27 aa, Artificial Sequence
  Cyclic GFR-binding peptide
EVVMDPYVKLVVNNASDFFLISLSSLR

SEQ ID NO: 59263 - protein, 34 aa, Artificial Sequence
  Cyclic GFR-binding peptide
  MOD_RES (2)..(4): Xaa is C or S
RXGXGEVVMEPYVKLVVKDYEDFFLMSLSSLETP

SEQ ID NO: 59264 - protein, 33 aa, Artificial Sequence
  Cyclic GFR-binding peptide
  MOD_RES (27)..(28): Xaa is C or S
DPYVKLVVNNAADFFLISLSSLRAPVXXSAPAA

SEQ ID NO: 59265 - protein, 30 aa, Artificial Sequence
  Cyclic GFR-binding peptide
  MOD_RES (30)..(30): Xaa is C or S
SMGEPYVKLTPVGMDDFFLVSLSSLKTPVX

SEQ ID NO: 59266 - protein, 31 aa, Artificial Sequence
  Cyclic GFR-binding peptide
  MOD_RES (30)..(30): Xaa is C or S
PYVKLLKPKKRVYEFFLVSLSSHHVRSPQXK

SEQ ID NO: 59267 - protein, 39 aa, Artificial Sequence
  Cyclic GFR-binding peptide
  MOD_RES (33)..(33): Xaa is C or S
NHQLFPYVKLHQGQHPKIRFFLMSLSSEETPVXELGEDN

SEQ ID NO: 59268 - protein, 30 aa, Artificial Sequence
  Cyclic GFR-binding peptide
  MOD_RES (27)..(28): Xaa is C or S
NPYVKLVVNKNEDFFLISLSSMKEPVXXPE

SEQ ID NO: 59269 - protein, 37 aa, Artificial Sequence
  Cyclic GFR-binding peptide
  MOD_RES (2)..(4)..(35)..(36): Xaa is C or S
SXKXSRVIMPYVKLVKPKRGVLFFISLSSLAQPVXXP

SEQ ID NO: 59270 - protein, 35 aa, Artificial Sequence
  Cyclic GFR-binding peptide
  MOD_RES (29)..(30): Xaa is C or S
VMNPYVKLIVNSSDDFFLVSLSSLQTPAXXPKPVT

SEQ ID NO: 59271 - protein, 33 aa, Artificial Sequence
  Cyclic GFR-binding peptide
  MOD_RES (31)..(31): Xaa is C or S
QLFPYVKLHQGQHPKIRFFLMSLSSEETPVXEL

SEQ ID NO: 59272 - protein, 23 aa, Artificial Sequence
  Cyclic GFR-binding peptide
DPYVKLVVNNAADFFLISLSSLR

SEQ ID NO: 59273 - protein, 24 aa, Artificial Sequence
  Cyclic GFR-binding peptide
VVMDPYVKLVVNNASDFFLISLSS

SEQ ID NO: 59274 - protein, 28 aa, Artificial Sequence
  Cyclic GFR-binding peptide
  MOD_RES (26)..(27): Xaa is C or S
PYVKLVVKENEDFFLMSLSSLETPVXXA

SEQ ID NO: 59275 - protein, 36 aa, Artificial Sequence
  Cyclic GFR-binding peptide
  MOD_RES (32)..(32): Xaa is C or S
SRVVMNPYVKLIVNSSDDFFLVSLSSLKTPAXTPKT

SEQ ID NO: 59276 - protein, 35 aa, Artificial Sequence
  Cyclic GFR-binding peptide
  MOD_RES (31)..(32): Xaa is C or S
DVVMGPYVKLIIQQKDNFFLMSLSSMKTPTXXPGA

SEQ ID NO: 59277 - protein, 36 aa, Artificial Sequence
  Cyclic GFR-binding peptide
  MOD_RES (2)..(4)..(36): Xaa is C or S
SXGXRDVVMGPYVKLIIQQKDNFFLMSLSSMKTPTX

SEQ ID NO: 59278 - protein, 32 aa, Artificial Sequence
  Cyclic GFR-binding peptide
  MOD_RES (2)..(4): Xaa is C or S
SXKXSRVIMPYVKLVKPKRGVLFFISLSSLAQ

SEQ ID NO: 59279 - protein, 34 aa, Artificial Sequence
  Cyclic GFR-binding peptide
  MOD_RES (32)..(33): Xaa is C or S
ARVVMNPYVKLIVNSSDDFFLVSLSSLQTPAXXP

SEQ ID NO: 59280 - protein, 31 aa, Artificial Sequence
  Cyclic GFR-binding peptide
  MOD_RES (31)..(31): Xaa is C or S
EVTMNPYVKLVVNKNEDFFLISLSSMKEPVX

SEQ ID NO: 59281 - protein, 32 aa, Artificial Sequence
  Cyclic GFR-binding peptide
  MOD_RES (2)..(4): Xaa is C or S
SXKXSKVVMPYVKLVKPTRGVLFFISLSSLDQ

SEQ ID NO: 59282 - protein, 33 aa, Artificial Sequence
  Cyclic GFR-binding peptide
  MOD_RES (29)..(30): Xaa is C or S
VMGPYVKLIIQQKDNFFLMSLSSMKTPTXXPGA

SEQ ID NO: 59283 - protein, 34 aa, Artificial Sequence
  Cyclic GFR-binding peptide
  MOD_RES (29)..(30): Xaa is C or S
MGEPYVKLTPVGMDDFFLVSLSSLKTPVXXAKGV

SEQ ID NO: 59284 - protein, 34 aa, Artificial Sequence
  Cyclic GFR-binding peptide
  MOD_RES (28)..(29): Xaa is C or S
IMPYVKLVKPKRGVLFFISLSSLAQPVXXPAASA

SEQ ID NO: 59285 - protein, 25 aa, Artificial Sequence
  Cyclic GFR-binding peptide
VMNPYVKLIVNSSDDFFLVSLSSLQ

SEQ ID NO: 59286 - protein, 24 aa, Artificial Sequence
  Cyclic GFR-binding peptide
VMNPYVKLIVNSSDDFFLVSLSSL

SEQ ID NO: 59287 - protein, 23 aa, Artificial Sequence
  Cyclic GFR-binding peptide
MDPYVKLVVNNASDFFLISLSSL

SEQ ID NO: 59288 - protein, 29 aa, Artificial Sequence
  Cyclic GFR-binding peptide
  MOD_RES (27)..(28): Xaa is C or S
DPYVKLVVKENEDFFLMSLSSLETPVXXA

SEQ ID NO: 59289 - protein, 34 aa, Artificial Sequence
  Cyclic GFR-binding peptide
  MOD_RES (31)..(32): Xaa is C or S
SVAMGPYVKLYTVVGKDFFLISLSSLKTPVXXAK

SEQ ID NO: 59290 - protein, 30 aa, Artificial Sequence
  Cyclic GFR-binding peptide
  MOD_RES (28)..(29): Xaa is C or S
IMPYVKLLLVRGNDFFLMSLSSTKVPAXXT

SEQ ID NO: 59291 - protein, 32 aa, Artificial Sequence
  Cyclic GFR-binding peptide
  MOD_RES (1)..(3): Xaa is C or S
XGXRDVVMGPYVKLIIQQKDNFFLMSLSSMKT

SEQ ID NO: 59292 - protein, 32 aa, Artificial Sequence
  Cyclic GFR-binding peptide
KNHQLFPYVKLHQGQHPKIRFFLMSLSSEETP

SEQ ID NO: 59293 - protein, 37 aa, Artificial Sequence
  Cyclic GFR-binding peptide
  MOD_RES (2)..(4)..(36): Xaa is C or S
HXGXSRVVMNPYVKLIVNSSDDFFLVSLSSLKTPAXT

SEQ ID NO: 59294 - protein, 31 aa, Artificial Sequence
  Cyclic GFR-binding peptide
EELRPYVKLLKPKKRVYEFFLVSLSSHHVRS

SEQ ID NO: 59295 - protein, 34 aa, Artificial Sequence
  Cyclic GFR-binding peptide
  MOD_RES (28)..(29): Xaa is C or S
MDPYVKLVVKENEDFFLMSLSSLETPVXXAKPIK

SEQ ID NO: 59296 - protein, 29 aa, Artificial Sequence
  Cyclic GFR-binding peptide
  MOD_RES (1)..(3): Xaa is C or S
XGXAEVVMDPYVKLVVNNAADFFLISLSS

SEQ ID NO: 59297 - protein, 27 aa, Artificial Sequence
  Cyclic GFR-binding peptide
  MOD_RES (2)..(2): Xaa is C or S
KXSKVVMPYVKLVKPTRGVLFFISLSS

SEQ ID NO: 59298 - protein, 41 aa, Artificial Sequence
  Cyclic GFR-binding peptide
  MOD_RES (2)..(4)..(36)..(37): Xaa is C or S
RXAXSEVTMNPYVKLVVNKNEDFFLISLSSMKEPVXXPEPI

SEQ ID NO: 59299 - protein, 33 aa, Artificial Sequence
  Cyclic GFR-binding peptide
  MOD_RES (1)..(33): Xaa is C or S
XRDVVMGPYVKLIIQQKDNFFLMSLSSMKTPTX

SEQ ID NO: 59300 - protein, 35 aa, Artificial Sequence
  Cyclic GFR-binding peptide
  MOD_RES (1)..(3)..(35): Xaa is C or S
XGXAEVVMDPYVKLVVNNAADFFLISLSSLRAPVX

SEQ ID NO: 59301 - protein, 35 aa, Artificial Sequence
  Cyclic GFR-binding peptide
  MOD_RES (31)..(32): Xaa is C or S
SKVIMPYVKLIKPTKGILFFISLSSLDQSVXXPSA

SEQ ID NO: 59302 - protein, 42 aa, Artificial Sequence
  Cyclic GFR-binding peptide
  MOD_RES (1)..(38): Xaa is C or S
XELHEELRPYVKLLKPKKRVYEFFLVSLSSHHVRSPQXKVSS

SEQ ID NO: 59303 - protein, 27 aa, Artificial Sequence
  Cyclic GFR-binding peptide
MDPYVKLVVNNASDFFLISLSSLRTPV

SEQ ID NO: 59304 - protein, 30 aa, Artificial Sequence
  Cyclic GFR-binding peptide
  MOD_RES (30)..(30): Xaa is C or S
LFPYVKLHQGQHPKIRFFLMSLSSEETPVX

SEQ ID NO: 59305 - protein, 28 aa, Artificial Sequence
  Cyclic GFR-binding peptide
  MOD_RES (26)..(27): Xaa is C or S
PYVKLIVNNSSDFFLVSLSSLKTPAXXA

SEQ ID NO: 59306 - protein, 27 aa, Artificial Sequence
  Cyclic GFR-binding peptide
VVMNPYVKLIVNSSDDFFLVSLSSLQT

SEQ ID NO: 59307 - protein, 29 aa, Artificial Sequence
  Cyclic GFR-binding peptide
SKVIMPYVKLIKPTKGILFFISLSSLDQS

SEQ ID NO: 59308 - protein, 31 aa, Artificial Sequence
  Cyclic GFR-binding peptide
  MOD_RES (26)..(27): Xaa is C or S
PYVKLYTVVGKDFFLISLSSLKTPVXXAKSA

SEQ ID NO: 59309 - protein, 38 aa, Artificial Sequence
  Cyclic GFR-binding peptide
  MOD_RES (1)..(3)..(35)..(36): Xaa is C or S
XGXAKVVMNPYVKLIVNNSSDFFLVSLSSLKTPAXXAK

SEQ ID NO: 59310 - protein, 34 aa, Artificial Sequence
  Cyclic GFR-binding peptide
  MOD_RES (1)..(1): Xaa is C or S
XKNHQLFPYVKLHQGQHPKIRFFLMSLSSEETPV

SEQ ID NO: 59311 - protein, 22 aa, Artificial Sequence
  Cyclic GFR-binding peptide
PYVKLLKPKKRVYEFFLVSLSS

SEQ ID NO: 59312 - protein, 25 aa, Artificial Sequence
  Cyclic GFR-binding peptide
EVTMNPYVKLVVNKNEDFFLISLSS

SEQ ID NO: 59313 - protein, 30 aa, Artificial Sequence
  Cyclic GFR-binding peptide
  MOD_RES (2)..(2): Xaa is C or S
GXRDVVMGPYVKLIIQQKDNFFLMSLSSMK

SEQ ID NO: 59314 - protein, 38 aa, Artificial Sequence
  Cyclic GFR-binding peptide
  MOD_RES (1)..(33): Xaa is C or S
XSRVVMNPYVKLIVNSSDDFFLVSLSSLKTPAXTPKTV

SEQ ID NO: 59315 - protein, 25 aa, Artificial Sequence
  Cyclic GFR-binding peptide
DPYVKLVVNNASDFFLISLSSLRTP

SEQ ID NO: 59316 - protein, 22 aa, Artificial Sequence
  Cyclic GFR-binding peptide
PYVKLLLVRGNDFFLMSLSSTK

SEQ ID NO: 59317 - protein, 32 aa, Artificial Sequence
  Cyclic GFR-binding peptide
  MOD_RES (26)..(27): Xaa is C or S
PYVKLIVNNSSDFFLVSLSSLKTPAXXAKPVA

SEQ ID NO: 59318 - protein, 34 aa, Artificial Sequence
  Cyclic GFR-binding peptide
  MOD_RES (1)..(33)..(34): Xaa is C or S
XAEVVMDPYVKLVVNNAADFFLISLSSLRAPVXX

SEQ ID NO: 59319 - protein, 28 aa, Artificial Sequence
  Cyclic GFR-binding peptide
FPYVKLHQGQHPKIRFFLMSLSSEETPV

SEQ ID NO: 59320 - protein, 28 aa, Artificial Sequence
  Cyclic GFR-binding peptide
RPYVKLLKPKKRVYEFFLVSLSSHHVRS

SEQ ID NO: 59321 - protein, 32 aa, Artificial Sequence
  Cyclic GFR-binding peptide
  MOD_RES (2)..(2): Xaa is C or S
KXSKVVMPYVKLVKPTRGVLFFISLSSLDQPV

SEQ ID NO: 59322 - protein, 24 aa, Artificial Sequence
  Cyclic GFR-binding peptide
VIMPYVKLVKPKRGVLFFISLSSL

SEQ ID NO: 59323 - protein, 30 aa, Artificial Sequence
  Cyclic GFR-binding peptide
  MOD_RES (27)..(28): Xaa is C or S
GPYVKLIIQQKDNFFLMSLSSMKTPTXXPG

SEQ ID NO: 59324 - protein, 25 aa, Artificial Sequence
  Cyclic GFR-binding peptide
VMDPYVKLVVNNAADFFLISLSSLR

SEQ ID NO: 59325 - protein, 41 aa, Artificial Sequence
  Cyclic GFR-binding peptide
  MOD_RES (1)..(3)..(35): Xaa is C or S
XGXSRVVMNPYVKLIVNSSDDFFLVSLSSLKTPAXTPKTVH

SEQ ID NO: 59326 - protein, 22 aa, Artificial Sequence
  Cyclic GFR-binding peptide
PYVKLVKPTRGVLFFISLSSLD

SEQ ID NO: 59327 - protein, 26 aa, Artificial Sequence
  Cyclic GFR-binding peptide
SEVTMNPYVKLVVNKNEDFFLISLSS

SEQ ID NO: 59328 - protein, 39 aa, Artificial Sequence
  Cyclic GFR-binding peptide
  MOD_RES (36)..(36): Xaa is C or S
LHEELRPYVKLLKPKKRVYEFFLVSLSSHHVRSPQXKVS

SEQ ID NO: 59329 - protein, 30 aa, Artificial Sequence
  Cyclic GFR-binding peptide
  MOD_RES (1)..(1): Xaa is C or S
XEAVSMGEPYVKLTPVGMDDFFLVSLSSLK

SEQ ID NO: 59330 - protein, 25 aa, Artificial Sequence
  Cyclic GFR-binding peptide
TMNPYVKLVVNKNEDFFLISLSSMK

SEQ ID NO: 59331 - protein, 38 aa, Artificial Sequence
  Cyclic GFR-binding peptide
  MOD_RES (1)..(3)..(35)..(36): Xaa is C or S
XGXSEVVMDPYVKLVVNNASDFFLISLSSLRTPVXXTP

SEQ ID NO: 59332 - protein, 25 aa, Artificial Sequence
  Cyclic GFR-binding peptide
PYVKLTPVGMDDFFLVSLSSLKTPV

SEQ ID NO: 59333 - protein, 32 aa, Artificial Sequence
  Cyclic GFR-binding peptide
  MOD_RES (31)..(32): Xaa is C or S
EVTMNPYVKLVVNKNEDFFLISLSSMKEPVXX

SEQ ID NO: 59334 - protein, 27 aa, Artificial Sequence
  Cyclic GFR-binding peptide
SRVVMNPYVKLIVNSSDDFFLVSLSSL

SEQ ID NO: 59335 - protein, 26 aa, Artificial Sequence
  Cyclic GFR-binding peptide
VMDPYVKLVVNNASDFFLISLSSLRT

SEQ ID NO: 59336 - protein, 32 aa, Artificial Sequence
  Cyclic GFR-binding peptide
  MOD_RES (2)..(4): Xaa is C or S
RXGXGEVVMDPYVKLVVKENEDFFLMSLSSLE

SEQ ID NO: 59337 - protein, 28 aa, Artificial Sequence
  Cyclic GFR-binding peptide
VAMGPYVKLYTVVGKDFFLISLSSLKTP

SEQ ID NO: 59338 - protein, 37 aa, Artificial Sequence
  Cyclic GFR-binding peptide
  MOD_RES (31)..(32): Xaa is C or S
SVAMGPYVKLYTVVGKDFFLISLSSLKTPVXXAKSAK

SEQ ID NO: 59339 - protein, 37 aa, Artificial Sequence
  Cyclic GFR-binding peptide
  MOD_RES (2)..(34): Xaa is C or S
GXSRVVMNPYVKLIVNSSDDFFLVSLSSLKTPAXTPK

SEQ ID NO: 59340 - protein, 27 aa, Artificial Sequence
  Cyclic GFR-binding peptide
ARVVMNPYVKLIVNSSDDFFLVSLSSL

SEQ ID NO: 59341 - protein, 29 aa, Artificial Sequence
  Cyclic GFR-binding peptide
  MOD_RES (1)..(3): Xaa is C or S
XGXESVAMGPYVKLYTVVGKDFFLISLSS

SEQ ID NO: 59342 - protein, 33 aa, Artificial Sequence
  Cyclic GFR-binding peptide
  MOD_RES (1)..(32)..(33): Xaa is C or S
XEEVIMPYVKLLLVRGNDFFLMSLSSTKVPAXX

SEQ ID NO: 59343 - protein, 27 aa, Artificial Sequence
  Cyclic GFR-binding peptide
SVAMGPYVKLYTVVGKDFFLISLSSLK

SEQ ID NO: 59344 - protein, 33 aa, Artificial Sequence
  Cyclic GFR-binding peptide
  MOD_RES (31)..(32): Xaa is C or S
EVTMNPYVKLVVNKNEDFFLISLSSMKEPVXXP

SEQ ID NO: 59345 - protein, 33 aa, Artificial Sequence
  Cyclic GFR-binding peptide
  MOD_RES (32)..(33): Xaa is C or S
AEVVMDPYVKLVVNNAADFFLISLSSLRAPVXX

SEQ ID NO: 59346 - protein, 25 aa, Artificial Sequence
  Cyclic GFR-binding peptide
QLFPYVKLHQGQHPKIRFFLMSLSS

SEQ ID NO: 59347 - protein, 37 aa, Artificial Sequence
  Cyclic GFR-binding peptide
  MOD_RES (34)..(34): Xaa is C or S
EELRPYVKLLKPKKRVYEFFLVSLSSHHVRSPQXKVS

SEQ ID NO: 59348 - protein, 28 aa, Artificial Sequence
  Cyclic GFR-binding peptide
  MOD_RES (28)..(28): Xaa is C or S
MNPYVKLVVNKNEDFFLISLSSMKEPVX

SEQ ID NO: 59349 - protein, 23 aa, Artificial Sequence
  Cyclic GFR-binding peptide
NPYVKLVVNKNEDFFLISLSSMK

SEQ ID NO: 59350 - protein, 33 aa, Artificial Sequence
  Cyclic GFR-binding peptide
  MOD_RES (32)..(32): Xaa is C or S
LRPYVKLLKPKKRVYEFFLVSLSSHHVRSPQXK

SEQ ID NO: 59351 - protein, 25 aa, Artificial Sequence
  Cyclic GFR-binding peptide
MDPYVKLVVNNASDFFLISLSSLRT

SEQ ID NO: 59352 - protein, 26 aa, Artificial Sequence
  Cyclic GFR-binding peptide
  MOD_RES (1)..(1): Xaa is C or S
XSKVVMPYVKLVKPTRGVLFFISLSS

SEQ ID NO: 59353 - protein, 31 aa, Artificial Sequence
  Cyclic GFR-binding peptide
  MOD_RES (28)..(28): Xaa is C or S
MNPYVKLIVNSSDDFFLVSLSSLKTPAXTPK

SEQ ID NO: 59354 - protein, 32 aa, Artificial Sequence
  Cyclic GFR-binding peptide
  MOD_RES (30)..(31): Xaa is C or S
VAMGPYVKLYTVVGKDFFLISLSSLKTPVXXA

SEQ ID NO: 59355 - protein, 34 aa, Artificial Sequence
  Cyclic GFR-binding peptide
  MOD_RES (1)..(33)..(34): Xaa is C or S
XSEVVMDPYVKLVVNNASDFFLISLSSLRTPVXX

SEQ ID NO: 59356 - protein, 32 aa, Artificial Sequence
  Cyclic GFR-binding peptide
  MOD_RES (1)..(1): Xaa is C or S
XSEVTMNPYVKLVVNKNEDFFLISLSSMKEPV

SEQ ID NO: 59357 - protein, 29 aa, Artificial Sequence
  Cyclic GFR-binding peptide
  MOD_RES (2)..(2): Xaa is C or S
GXGEVVMDPYVKLVVKENEDFFLMSLSSL

SEQ ID NO: 59358 - protein, 24 aa, Artificial Sequence
  Cyclic GFR-binding peptide
NPYVKLVVNKNEDFFLISLSSMKE

SEQ ID NO: 59359 - protein, 33 aa, Artificial Sequence
  Cyclic GFR-binding peptide
  MOD_RES (30)..(31): Xaa is C or S
VAMGPYVKLYTVVGKDFFLISLSSLKTPVXXAK

SEQ ID NO: 59360 - protein, 28 aa, Artificial Sequence
  Cyclic GFR-binding peptide
  MOD_RES (26)..(27): Xaa is C or S
PYVKLLLVRGNDFFLMSLSSTKVPAXXT

SEQ ID NO: 59361 - protein, 25 aa, Artificial Sequence
  Cyclic GFR-binding peptide
MGEPYVKLTPVGMDDFFLVSLSSLK

SEQ ID NO: 59362 - protein, 34 aa, Artificial Sequence
  Cyclic GFR-binding peptide
  MOD_RES (1)..(3): Xaa is C or S
XGXAKVVMNPYVKLIVNNSSDFFLVSLSSLKTPA

SEQ ID NO: 59363 - protein, 33 aa, Artificial Sequence
  Cyclic GFR-binding peptide
  MOD_RES (29)..(29): Xaa is C or S
FPYVKLHQGQHPKIRFFLMSLSSEETPVXELGE

SEQ ID NO: 59364 - protein, 37 aa, Artificial Sequence
  Cyclic GFR-binding peptide
  MOD_RES (32)..(33): Xaa is C or S
SEVVMDPYVKLVVNNASDFFLISLSSLRTPVXXTPPT

SEQ ID NO: 59365 - protein, 40 aa, Artificial Sequence
  Cyclic GFR-binding peptide
  MOD_RES (1)..(3)..(34)..(35): Xaa is C or S
XGXEEVIMPYVKLLLVRGNDFFLMSLSSTKVPAXXTSPVR

SEQ ID NO: 59366 - protein, 26 aa, Artificial Sequence
  Cyclic GFR-binding peptide
DPYVKLVVNNAADFFLISLSSLRAPV

SEQ ID NO: 59367 - protein, 31 aa, Artificial Sequence
  Cyclic GFR-binding peptide
  MOD_RES (2)..(2): Xaa is C or S
GXSEVVMDPYVKLVVNNASDFFLISLSSLRT

SEQ ID NO: 59368 - protein, 31 aa, Artificial Sequence
  Cyclic GFR-binding peptide
  MOD_RES (1)..(1): Xaa is C or S
XRDVVMGPYVKLIIQQKDNFFLMSLSSMKTP

SEQ ID NO: 59369 - protein, 33 aa, Artificial Sequence
  Cyclic GFR-binding peptide
  MOD_RES (31)..(32): Xaa is C or S
KVVMNPYVKLIVNNSSDFFLVSLSSLKTPAXXA

SEQ ID NO: 59370 - protein, 32 aa, Artificial Sequence
  Cyclic GFR-binding peptide
  MOD_RES (26)..(27): Xaa is C or S
PYVKLLLVRGNDFFLMSLSSTKVPAXXTSPVR

SEQ ID NO: 59371 - protein, 25 aa, Artificial Sequence
  Cyclic GFR-binding peptide
VIMPYVKLVKPKRGVLFFISLSSLA

SEQ ID NO: 59372 - protein, 30 aa, Artificial Sequence
  Cyclic GFR-binding peptide
  MOD_RES (26)..(27): Xaa is C or S
PYVKLTPVGMDDFFLVSLSSLKTPVXXAKG

SEQ ID NO: 59373 - protein, 33 aa, Artificial Sequence
  Cyclic GFR-binding peptide
  MOD_RES (2)..(4): Xaa is C or S
SXKXSKVVMPYVKLVKPTRGVLFFISLSSLDQP

SEQ ID NO: 59374 - protein, 22 aa, Artificial Sequence
  Cyclic GFR-binding peptide
MDPYVKLVVKENEDFFLMSLSS

SEQ ID NO: 59375 - protein, 27 aa, Artificial Sequence
  Cyclic GFR-binding peptide
  MOD_RES (27)..(27): Xaa is C or S
GPYVKLYTVVGKDFFLISLSSLKTPVX

SEQ ID NO: 59376 - protein, 31 aa, Artificial Sequence
  Cyclic GFR-binding peptide
  MOD_RES (31)..(31): Xaa is C or S
EVVMDPYVKLVVNNASDFFLISLSSLRTPVX

SEQ ID NO: 59377 - protein, 30 aa, Artificial Sequence
  Cyclic GFR-binding peptide
  MOD_RES (1)..(1): Xaa is C or S
XSRVVMNPYVKLIVNSSDDFFLVSLSSLKT

SEQ ID NO: 59378 - protein, 31 aa, Artificial Sequence
  Cyclic GFR-binding peptide
  MOD_RES (2)..(4): Xaa is C or S
RXGXGEVVMEPYVKLVVKDYEDFFLMSLSSL

SEQ ID NO: 59379 - protein, 32 aa, Artificial Sequence
  Cyclic GFR-binding peptide
  MOD_RES (29)..(30): Xaa is C or S
VMNPYVKLIVNSSDDFFLVSLSSLKTPAXXPK

SEQ ID NO: 59380 - protein, 33 aa, Artificial Sequence
  Cyclic GFR-binding peptide
  MOD_RES (28)..(29): Xaa is C or S
MDPYVKLVVKENEDFFLMSLSSLETPVXXAKPI

SEQ ID NO: 59381 - protein, 28 aa, Artificial Sequence
  Cyclic GFR-binding peptide
  MOD_RES (1)..(3): Xaa is C or S
XKXSKVVMPYVKLVKPTRGVLFFISLSS

SEQ ID NO: 59382 - protein, 37 aa, Artificial Sequence
  Cyclic GFR-binding peptide
  MOD_RES (1)..(3)..(35)..(36): Xaa is C or S
XGXGEVVMDPYVKLVVKENEDFFLMSLSSLETPVXXA

SEQ ID NO: 59383 - protein, 23 aa, Artificial Sequence
  Cyclic GFR-binding peptide
MNPYVKLVVNKNEDFFLISLSSM

SEQ ID NO: 59384 - protein, 30 aa, Artificial Sequence
  Cyclic GFR-binding peptide
SEVVMDPYVKLVVNNASDFFLISLSSLRTP

SEQ ID NO: 59385 - protein, 25 aa, Artificial Sequence
  Cyclic GFR-binding peptide
VVMGPYVKLIIQQKDNFFLMSLSSM

SEQ ID NO: 59386 - protein, 39 aa, Artificial Sequence
  Cyclic GFR-binding peptide
  MOD_RES (1)..(3)..(35)..(36): Xaa is C or S
XGXSRVVMNPYVKLIVNSSDDFFLVSLSSLKTPAXXPKP

SEQ ID NO: 59387 - protein, 32 aa, Artificial Sequence
  Cyclic GFR-binding peptide
  MOD_RES (26)..(27): Xaa is C or S
PYVKLIKPTKGILFFISLSSLDQSVXXPSASA

SEQ ID NO: 59388 - protein, 30 aa, Artificial Sequence
  Cyclic GFR-binding peptide
  MOD_RES (27)..(27): Xaa is C or S
NPYVKLIVNSSDDFFLVSLSSLKTPAXTPK

SEQ ID NO: 59389 - protein, 24 aa, Artificial Sequence
  Cyclic GFR-binding peptide
MNPYVKLIVNSSDDFFLVSLSSLQ

SEQ ID NO: 59390 - protein, 33 aa, Artificial Sequence
  Cyclic GFR-binding peptide
  MOD_RES (2)..(2): Xaa is C or S
GXRDVVMGPYVKLIIQQKDNFFLMSLSSMKTPT

SEQ ID NO: 59391 - protein, 29 aa, Artificial Sequence
  Cyclic GFR-binding peptide
  MOD_RES (2)..(2): Xaa is C or S
KXSKVVMPYVKLVKPTRGVLFFISLSSLD

SEQ ID NO: 59392 - protein, 35 aa, Artificial Sequence
  Cyclic GFR-binding peptide
  MOD_RES (2)..(34)..(35): Xaa is C or S
GXSRVVMNPYVKLIVNSSDDFFLVSLSSLKTPAXX

SEQ ID NO: 59393 - protein, 20 aa, Artificial Sequence
  Cyclic GFR-binding peptide
PYVKLVKPTRGVLFFISLSS

SEQ ID NO: 59394 - protein, 32 aa, Artificial Sequence
  Cyclic GFR-binding peptide
  MOD_RES (29)..(29): Xaa is C or S
VMNPYVKLIVNSSDDFFLVSLSSLKTPAXTPK

SEQ ID NO: 59395 - protein, 31 aa, Artificial Sequence
  Cyclic GFR-binding peptide
  MOD_RES (1)..(3): Xaa is C or S
XGXAKVVMNPYVKLIVNNSSDFFLVSLSSLK

SEQ ID NO: 59396 - protein, 27 aa, Artificial Sequence
  Cyclic GFR-binding peptide
MNPYVKLIVNSSDDFFLVSLSSLKTPA

SEQ ID NO: 59397 - protein, 27 aa, Artificial Sequence
  Cyclic GFR-binding peptide
VVMDPYVKLVVNNASDFFLISLSSLRT

SEQ ID NO: 59398 - protein, 28 aa, Artificial Sequence
  Cyclic GFR-binding peptide
  MOD_RES (1)..(1): Xaa is C or S
XESVAMGPYVKLYTVVGKDFFLISLSSL

SEQ ID NO: 59399 - protein, 36 aa, Artificial Sequence
  Cyclic GFR-binding peptide
  MOD_RES (31)..(31): Xaa is C or S
RVVMNPYVKLIVNSSDDFFLVSLSSLKTPAXTPKTV

SEQ ID NO: 59400 - protein, 28 aa, Artificial Sequence
  Cyclic GFR-binding peptide
VVMDPYVKLVVNNASDFFLISLSSLRTP

SEQ ID NO: 59401 - protein, 35 aa, Artificial Sequence
  Cyclic GFR-binding peptide
  MOD_RES (29)..(30): Xaa is C or S
VMNPYVKLIVNSSDDFFLVSLSSLKTPAXXPKPVH

SEQ ID NO: 59402 - protein, 34 aa, Artificial Sequence
  Cyclic GFR-binding peptide
  MOD_RES (28)..(29): Xaa is C or S
MNPYVKLIVNSSDDFFLVSLSSLKTPAXXPKPVH

SEQ ID NO: 59403 - protein, 31 aa, Artificial Sequence
  Cyclic GFR-binding peptide
  MOD_RES (26)..(27): Xaa is C or S
PYVKLVVNKNEDFFLISLSSMKEPVXXPEPI

SEQ ID NO: 59404 - protein, 27 aa, Artificial Sequence
  Cyclic GFR-binding peptide
VMGPYVKLIIQQKDNFFLMSLSSMKTP

SEQ ID NO: 59405 - protein, 38 aa, Artificial Sequence
  Cyclic GFR-binding peptide
  MOD_RES (1)..(3)..(35)..(36): Xaa is C or S
XGXSRVVMNPYVKLIVNSSDDFFLVSLSSLKTPAXXPK

SEQ ID NO: 59406 - protein, 35 aa, Artificial Sequence
  Cyclic GFR-binding peptide
  MOD_RES (30)..(31): Xaa is C or S
VVMNPYVKLIVNNSSDFFLVSLSSLKTPAXXAKPV

SEQ ID NO: 59407 - protein, 28 aa, Artificial Sequence
  Cyclic GFR-binding peptide
  MOD_RES (2)..(2): Xaa is C or S
GXSEVVMDPYVKLVVNNASDFFLISLSS

SEQ ID NO: 59408 - protein, 33 aa, Artificial Sequence
  Cyclic GFR-binding peptide
  MOD_RES (29)..(30): Xaa is C or S
VIMPYVKLLLVRGNDFFLMSLSSTKVPAXXTSP

SEQ ID NO: 59409 - protein, 37 aa, Artificial Sequence
  Cyclic GFR-binding peptide
  MOD_RES (1)..(32)..(33): Xaa is C or S
XSKVVMPYVKLVKPTRGVLFFISLSSLDQPVXXPSAS

SEQ ID NO: 59410 - protein, 29 aa, Artificial Sequence
  Cyclic GFR-binding peptide
  MOD_RES (27)..(28): Xaa is C or S
MPYVKLIKPTKGILFFISLSSLDQSVXXP

SEQ ID NO: 59411 - protein, 32 aa, Artificial Sequence
  Cyclic GFR-binding peptide
  MOD_RES (29)..(30): Xaa is C or S
VMDPYVKLVVKENEDFFLMSLSSLETPVXXAK

SEQ ID NO: 59412 - protein, 32 aa, Artificial Sequence
  Cyclic GFR-binding peptide
  MOD_RES (29)..(30): Xaa is C or S
VIMPYVKLLLVRGNDFFLMSLSSTKVPAXXTS

SEQ ID NO: 59413 - protein, 42 aa, Artificial Sequence
  Cyclic GFR-binding peptide
  MOD_RES (2)..(4)..(36)..(37): Xaa is C or S
HXGXSRVVMNPYVKLIVNSSDDFFLVSLSSLKTPAXXPKPVH

SEQ ID NO: 59414 - protein, 30 aa, Artificial Sequence
  Cyclic GFR-binding peptide
  MOD_RES (28)..(29): Xaa is C or S
GEPYVKLTPVGMDDFFLVSLSSLKTPVXXA

SEQ ID NO: 59415 - protein, 32 aa, Artificial Sequence
  Cyclic GFR-binding peptide
  MOD_RES (29)..(30): Xaa is C or S
TMNPYVKLVVNKNEDFFLISLSSMKEPVXXPE

SEQ ID NO: 59416 - protein, 42 aa, Artificial Sequence
  Cyclic GFR-binding peptide
  MOD_RES (2)..(4)..(36)..(37): Xaa is C or S
RXGXGEVVMDPYVKLVVKENEDFFLMSLSSLETPVXXAKPIK

SEQ ID NO: 59417 - protein, 31 aa, Artificial Sequence
  Cyclic GFR-binding peptide
  MOD_RES (1)..(1): Xaa is C or S
XELHEELRPYVKLLKPKKRVYEFFLVSLSSH

SEQ ID NO: 59418 - protein, 36 aa, Artificial Sequence
  Cyclic GFR-binding peptide
  MOD_RES (2)..(34)..(35): Xaa is C or S
GXESVAMGPYVKLYTVVGKDFFLISLSSLKTPVXXA

SEQ ID NO: 59419 - protein, 23 aa, Artificial Sequence
  Cyclic GFR-binding peptide
MNPYVKLIVNSSDDFFLVSLSSL

SEQ ID NO: 59420 - protein, 33 aa, Artificial Sequence
  Cyclic GFR-binding peptide
  MOD_RES (2)..(4): Xaa is C or S
SXKXSKVIMPYVKLIKPTKGILFFISLSSLDQS

SEQ ID NO: 59421 - protein, 32 aa, Artificial Sequence
  Cyclic GFR-binding peptide
  MOD_RES (1)..(1): Xaa is C or S
XAKVVMNPYVKLIVNNSSDFFLVSLSSLKTPA

SEQ ID NO: 59422 - protein, 30 aa, Artificial Sequence
  Cyclic GFR-binding peptide
  MOD_RES (30)..(30): Xaa is C or S
KVIMPYVKLIKPTKGILFFISLSSLDQSVX

SEQ ID NO: 59423 - protein, 39 aa, Artificial Sequence
  Cyclic GFR-binding peptide
  MOD_RES (1)..(3): Xaa is C or S
XAXELHEELRPYVKLLKPKKRVYEFFLVSLSSHHVRSPQ

SEQ ID NO: 59424 - protein, 37 aa, Artificial Sequence
  Cyclic GFR-binding peptide
  MOD_RES (2)..(4): Xaa is C or S
AXAXELHEELRPYVKLLKPKKRVYEFFLVSLSSHHVR

SEQ ID NO: 59425 - protein, 43 aa, Artificial Sequence
  Cyclic GFR-binding peptide
  MOD_RES (2)..(4)..(37)..(38): Xaa is C or S
RXGXEAVSMGEPYVKLTPVGMDDFFLVSLSSLKTPVXXAKGVK

SEQ ID NO: 59426 - protein, 30 aa, Artificial Sequence
  Cyclic GFR-binding peptide
  MOD_RES (1)..(3): Xaa is C or S
XGXEAVSMGEPYVKLTPVGMDDFFLVSLSS

SEQ ID NO: 59427 - protein, 31 aa, Artificial Sequence
  Cyclic GFR-binding peptide
  MOD_RES (2)..(4): Xaa is C or S
RXGXESVAMGPYVKLYTVVGKDFFLISLSSL

SEQ ID NO: 59428 - protein, 29 aa, Artificial Sequence
  Cyclic GFR-binding peptide
QLFPYVKLHQGQHPKIRFFLMSLSSEETP

SEQ ID NO: 59429 - protein, 21 aa, Artificial Sequence
  Cyclic GFR-binding peptide
PYVKLIIQQKDNFFLMSLSSM

SEQ ID NO: 59430 - protein, 41 aa, Artificial Sequence
  Cyclic GFR-binding peptide
  MOD_RES (1)..(3)..(40): Xaa is C or S
XAXELHEELRPYVKLLKPKKRVYEFFLVSLSSHHVRSPQXK

SEQ ID NO: 59431 - protein, 26 aa, Artificial Sequence
  Cyclic GFR-binding peptide
GEPYVKLTPVGMDDFFLVSLSSLKTP

SEQ ID NO: 59432 - protein, 27 aa, Artificial Sequence
  Cyclic GFR-binding peptide
VIMPYVKLLLVRGNDFFLMSLSSTKVP

SEQ ID NO: 59433 - protein, 32 aa, Artificial Sequence
  Cyclic GFR-binding peptide
  MOD_RES (30)..(31): Xaa is C or S
EVIMPYVKLLLVRGNDFFLMSLSSTKVPAXXT

SEQ ID NO: 59434 - protein, 39 aa, Artificial Sequence
  Cyclic GFR-binding peptide
  MOD_RES (1)..(34)..(35): Xaa is C or S
XEAVSMGEPYVKLTPVGMDDFFLVSLSSLKTPVXXAKGV

SEQ ID NO: 59435 - protein, 28 aa, Artificial Sequence
  Cyclic GFR-binding peptide
  MOD_RES (28)..(28): Xaa is C or S
MNPYVKLIVNSSDDFFLVSLSSLQTPAX

SEQ ID NO: 59436 - protein, 31 aa, Artificial Sequence
  Cyclic GFR-binding peptide
HEELRPYVKLLKPKKRVYEFFLVSLSSHHVR

SEQ ID NO: 59437 - protein, 22 aa, Artificial Sequence
  Cyclic GFR-binding peptide
MGPYVKLYTVVGKDFFLISLSS

SEQ ID NO: 59438 - protein, 40 aa, Artificial Sequence
  Cyclic GFR-binding peptide
  MOD_RES (2)..(34)..(35): Xaa is C or S
GXAEVVMDPYVKLVVNNAADFFLISLSSLRAPVXXSAPAA

SEQ ID NO: 59439 - protein, 27 aa, Artificial Sequence
  Cyclic GFR-binding peptide
  MOD_RES (26)..(26): Xaa is C or S
PYVKLIVNSSDDFFLVSLSSLKTPAXT

SEQ ID NO: 59440 - protein, 34 aa, Artificial Sequence
  Cyclic GFR-binding peptide
  MOD_RES (30)..(31): Xaa is C or S
VTMNPYVKLVVNKNEDFFLISLSSMKEPVXXPEP

SEQ ID NO: 59441 - protein, 33 aa, Artificial Sequence
  Cyclic GFR-binding peptide
  MOD_RES (29)..(30): Xaa is C or S
VMNPYVKLIVNSSDDFFLVSLSSLKTPAXXPKP

SEQ ID NO: 59442 - protein, 34 aa, Artificial Sequence
  Cyclic GFR-binding peptide
  MOD_RES (2)..(2): Xaa is C or S
AXELHEELRPYVKLLKPKKRVYEFFLVSLSSHHV

SEQ ID NO: 59443 - protein, 24 aa, Artificial Sequence
  Cyclic GFR-binding peptide
PYVKLLLVRGNDFFLMSLSSTKVP

SEQ ID NO: 59444 - protein, 37 aa, Artificial Sequence
  Cyclic GFR-binding peptide
  MOD_RES (1)..(3)..(34)..(35): Xaa is C or S
XGXEEVIMPYVKLLLVRGNDFFLMSLSSTKVPAXXTS

SEQ ID NO: 59445 - protein, 32 aa, Artificial Sequence
  Cyclic GFR-binding peptide
  MOD_RES (28)..(29): Xaa is C or S
MDPYVKLVVNNAADFFLISLSSLRAPVXXSAP

SEQ ID NO: 59446 - protein, 32 aa, Artificial Sequence
  Cyclic GFR-binding peptide
  MOD_RES (28)..(29): Xaa is C or S
VMPYVKLVKPTRGVLFFISLSSLDQPVXXPSA

SEQ ID NO: 59447 - protein, 37 aa, Artificial Sequence
  Cyclic GFR-binding peptide
  MOD_RES (31)..(32): Xaa is C or S
EVVMDPYVKLVVNNASDFFLISLSSLRTPVXXTPPTS

SEQ ID NO: 59448 - protein, 24 aa, Artificial Sequence
  Cyclic GFR-binding peptide
PYVKLIVNSSDDFFLVSLSSLQTP

SEQ ID NO: 59449 - protein, 28 aa, Artificial Sequence
  Cyclic GFR-binding peptide
EAVSMGEPYVKLTPVGMDDFFLVSLSSL

SEQ ID NO: 59450 - protein, 27 aa, Artificial Sequence
  Cyclic GFR-binding peptide
VVMGPYVKLIIQQKDNFFLMSLSSMKT

SEQ ID NO: 59451 - protein, 31 aa, Artificial Sequence
  Cyclic GFR-binding peptide
  MOD_RES (31)..(31): Xaa is C or S
SVAMGPYVKLYTVVGKDFFLISLSSLKTPVX

SEQ ID NO: 59452 - protein, 30 aa, Artificial Sequence
  Cyclic GFR-binding peptide
  MOD_RES (2)..(2): Xaa is C or S
GXAKVVMNPYVKLIVNNSSDFFLVSLSSLK

SEQ ID NO: 59453 - protein, 36 aa, Artificial Sequence
  Cyclic GFR-binding peptide
  MOD_RES (30)..(31): Xaa is C or S
VVMNPYVKLIVNSSDDFFLVSLSSLQTPAXXPKPVT

SEQ ID NO: 59454 - protein, 35 aa, Artificial Sequence
  Cyclic GFR-binding peptide
  MOD_RES (1)..(32)..(33): Xaa is C or S
XEEVIMPYVKLLLVRGNDFFLMSLSSTKVPAXXTS

SEQ ID NO: 59455 - protein, 30 aa, Artificial Sequence
  Cyclic GFR-binding peptide
  MOD_RES (28)..(29): Xaa is C or S
IMPYVKLIKPTKGILFFISLSSLDQSVXXP

SEQ ID NO: 59456 - protein, 34 aa, Artificial Sequence
  Cyclic GFR-binding peptide
  MOD_RES (1)..(1): Xaa is C or S
XELHEELRPYVKLLKPKKRVYEFFLVSLSSHHVR

SEQ ID NO: 59457 - protein, 33 aa, Artificial Sequence
  Cyclic GFR-binding peptide
  MOD_RES (33)..(33): Xaa is C or S
ELRPYVKLLKPKKRVYEFFLVSLSSHHVRSPQX

SEQ ID NO: 59458 - protein, 32 aa, Artificial Sequence
  Cyclic GFR-binding peptide
  MOD_RES (1)..(32): Xaa is C or S
XSKVIMPYVKLIKPTKGILFFISLSSLDQSVX

SEQ ID NO: 59459 - protein, 35 aa, Artificial Sequence
  Cyclic GFR-binding peptide
  MOD_RES (2)..(34): Xaa is C or S
GXSRVVMNPYVKLIVNSSDDFFLVSLSSLKTPAXT

SEQ ID NO: 59460 - protein, 26 aa, Artificial Sequence
  Cyclic GFR-binding peptide
VAMGPYVKLYTVVGKDFFLISLSSLK

SEQ ID NO: 59461 - protein, 26 aa, Artificial Sequence
  Cyclic GFR-binding peptide
EPYVKLTPVGMDDFFLVSLSSLKTPV

SEQ ID NO: 59462 - protein, 33 aa, Artificial Sequence
  Cyclic GFR-binding peptide
  MOD_RES (1)..(33): Xaa is C or S
XSEVVMDPYVKLVVNNASDFFLISLSSLRTPVX

SEQ ID NO: 59463 - protein, 35 aa, Artificial Sequence
  Cyclic GFR-binding peptide
  MOD_RES (32)..(32): Xaa is C or S
HQLFPYVKLHQGQHPKIRFFLMSLSSEETPVXELG

SEQ ID NO: 59464 - protein, 36 aa, Artificial Sequence
  Cyclic GFR-binding peptide
  MOD_RES (32)..(33): Xaa is C or S
SRVVMNPYVKLIVNSSDDFFLVSLSSLKTPAXXPKP

SEQ ID NO: 59465 - protein, 26 aa, Artificial Sequence
  Cyclic GFR-binding peptide
  MOD_RES (26)..(26): Xaa is C or S
PYVKLVVNNASDFFLISLSSLRTPVX

SEQ ID NO: 59466 - protein, 23 aa, Artificial Sequence
  Cyclic GFR-binding peptide
GEPYVKLTPVGMDDFFLVSLSSL

SEQ ID NO: 59467 - protein, 31 aa, Artificial Sequence
  Cyclic GFR-binding peptide
  MOD_RES (1)..(3): Xaa is C or S
XGXSRVVMNPYVKLIVNSSDDFFLVSLSSLK

SEQ ID NO: 59468 - protein, 38 aa, Artificial Sequence
  Cyclic GFR-binding peptide
  MOD_RES (2)..(34)..(35): Xaa is C or S
GXESVAMGPYVKLYTVVGKDFFLISLSSLKTPVXXAKS

SEQ ID NO: 59469 - protein, 35 aa, Artificial Sequence
  Cyclic GFR-binding peptide
  MOD_RES (32)..(33): Xaa is C or S
AKVVMNPYVKLIVNNSSDFFLVSLSSLKTPAXXAK

SEQ ID NO: 59470 - protein, 41 aa, Artificial Sequence
  Cyclic GFR-binding peptide
  MOD_RES (2)..(4)..(36)..(37): Xaa is C or S
HXGXSRVVMNPYVKLIVNSSDDFFLVSLSSLKTPAXXPKPV

SEQ ID NO: 59471 - protein, 28 aa, Artificial Sequence
  Cyclic GFR-binding peptide
  MOD_RES (26)..(27): Xaa is C or S
PYVKLIVNSSDDFFLVSLSSLQTPAXXP

SEQ ID NO: 59472 - protein, 30 aa, Artificial Sequence
  Cyclic GFR-binding peptide
  MOD_RES (26)..(27): Xaa is C or S
PYVKLIVNSSDDFFLVSLSSLQTPAXXPKP

SEQ ID NO: 59473 - protein, 28 aa, Artificial Sequence
  Cyclic GFR-binding peptide
  MOD_RES (26)..(27): Xaa is C or S
PYVKLIKPTKGILFFISLSSLDQSVXXP

SEQ ID NO: 59474 - protein, 36 aa, Artificial Sequence
  Cyclic GFR-binding peptide
  MOD_RES (30)..(31): Xaa is C or S
VAMGPYVKLYTVVGKDFFLISLSSLKTPVXXAKSAK

SEQ ID NO: 59475 - protein, 39 aa, Artificial Sequence
  Cyclic GFR-binding peptide
  MOD_RES (1)..(33)..(34): Xaa is C or S
XGEVVMDPYVKLVVKENEDFFLMSLSSLETPVXXAKPIK

SEQ ID NO: 59476 - protein, 35 aa, Artificial Sequence
  Cyclic GFR-binding peptide
  MOD_RES (2)..(33)..(34): Xaa is C or S
GXEEVIMPYVKLLLVRGNDFFLMSLSSTKVPAXXT

SEQ ID NO: 59477 - protein, 24 aa, Artificial Sequence
  Cyclic GFR-binding peptide
PYVKLVVNNASDFFLISLSSLRTP

SEQ ID NO: 59478 - protein, 35 aa, Artificial Sequence
  Cyclic GFR-binding peptide
ELHEELRPYVKLLKPKKRVYEFFLVSLSSHHVRSP

SEQ ID NO: 59479 - protein, 37 aa, Artificial Sequence
  Cyclic GFR-binding peptide
  MOD_RES (2)..(4)..(36)..(37): Xaa is C or S
HXGXARVVMNPYVKLIVNSSDDFFLVSLSSLQTPAXX

SEQ ID NO: 59480 - protein, 24 aa, Artificial Sequence
  Cyclic GFR-binding peptide
VMGPYVKLIIQQKDNFFLMSLSSM

SEQ ID NO: 59481 - protein, 32 aa, Artificial Sequence
  Cyclic GFR-binding peptide
  MOD_RES (30)..(31): Xaa is C or S
VVMDPYVKLVVNNAADFFLISLSSLRAPVXXS

SEQ ID NO: 59482 - protein, 32 aa, Artificial Sequence
  Cyclic GFR-binding peptide
  MOD_RES (1)..(1): Xaa is C or S
XSEVVMDPYVKLVVNNASDFFLISLSSLRTPV

SEQ ID NO: 59483 - protein, 35 aa, Artificial Sequence
  Cyclic GFR-binding peptide
  MOD_RES (2)..(4)..(35): Xaa is C or S
LXGXEEVIMPYVKLLLVRGNDFFLMSLSSTKVPAX

SEQ ID NO: 59484 - protein, 26 aa, Artificial Sequence
  Cyclic GFR-binding peptide
NPYVKLIVNNSSDFFLVSLSSLKTPA

SEQ ID NO: 59485 - protein, 28 aa, Artificial Sequence
  Cyclic GFR-binding peptide
SEVVMDPYVKLVVNNASDFFLISLSSLR

SEQ ID NO: 59486 - protein, 35 aa, Artificial Sequence
  Cyclic GFR-binding peptide
  MOD_RES (30)..(31): Xaa is C or S
VVMDPYVKLVVNNAADFFLISLSSLRAPVXXSAPA

SEQ ID NO: 59487 - protein, 31 aa, Artificial Sequence
  Cyclic GFR-binding peptide
  MOD_RES (26)..(27): Xaa is C or S
PYVKLIVNNSSDFFLVSLSSLKTPAXXAKPV

SEQ ID NO: 59488 - protein, 34 aa, Artificial Sequence
  Cyclic GFR-binding peptide
ELHEELRPYVKLLKPKKRVYEFFLVSLSSHHVRS

SEQ ID NO: 59489 - protein, 24 aa, Artificial Sequence
  Cyclic GFR-binding peptide
MNPYVKLVVNKNEDFFLISLSSMK

SEQ ID NO: 59490 - protein, 39 aa, Artificial Sequence
  Cyclic GFR-binding peptide
  MOD_RES (1)..(3)..(34)..(35): Xaa is C or S
XGXEEVIMPYVKLLLVRGNDFFLMSLSSTKVPAXXTSPV

SEQ ID NO: 59491 - protein, 27 aa, Artificial Sequence
  Cyclic GFR-binding peptide
MNPYVKLVVNKNEDFFLISLSSMKEPV

SEQ ID NO: 59492 - protein, 29 aa, Artificial Sequence
  Cyclic GFR-binding peptide
  MOD_RES (1)..(1): Xaa is C or S
XKNHQLFPYVKLHQGQHPKIRFFLMSLSS

SEQ ID NO: 59493 - protein, 39 aa, Artificial Sequence
  Cyclic GFR-binding peptide
  MOD_RES (1)..(3)..(35)..(36): Xaa is C or S
XGXAKVVMNPYVKLIVNNSSDFFLVSLSSLKTPAXXAKP

SEQ ID NO: 59494 - protein, 27 aa, Artificial Sequence
  Cyclic GFR-binding peptide
VAMGPYVKLYTVVGKDFFLISLSSLKT

SEQ ID NO: 59495 - protein, 30 aa, Artificial Sequence
  Cyclic GFR-binding peptide
SKVIMPYVKLIKPTKGILFFISLSSLDQSV

SEQ ID NO: 59496 - protein, 21 aa, Artificial Sequence
  Cyclic GFR-binding peptide
PYVKLVVNNAADFFLISLSSL

SEQ ID NO: 59497 - protein, 27 aa, Artificial Sequence
  Cyclic GFR-binding peptide
  MOD_RES (1)..(1): Xaa is C or S
XSEVVMDPYVKLVVNNASDFFLISLSS

SEQ ID NO: 59498 - protein, 38 aa, Artificial Sequence
  Cyclic GFR-binding peptide
  MOD_RES (2)..(34)..(35): Xaa is C or S
GXGEVVMDPYVKLVVKENEDFFLMSLSSLETPVXXAKP

SEQ ID NO: 59499 - protein, 35 aa, Artificial Sequence
  Cyclic GFR-binding peptide
  MOD_RES (31)..(32): Xaa is C or S
KVVMNPYVKLIVNNSSDFFLVSLSSLKTPAXXAKP

SEQ ID NO: 59500 - protein, 38 aa, Artificial Sequence
  Cyclic GFR-binding peptide
  MOD_RES (1)..(33)..(34): Xaa is C or S
XAKVVMNPYVKLIVNNSSDFFLVSLSSLKTPAXXAKPV

SEQ ID NO: 59501 - protein, 26 aa, Artificial Sequence
  Cyclic GFR-binding peptide
SRVVMNPYVKLIVNSSDDFFLVSLSS

SEQ ID NO: 59502 - protein, 34 aa, Artificial Sequence
  Cyclic GFR-binding peptide
  MOD_RES (31)..(32): Xaa is C or S
SKVVMPYVKLVKPTRGVLFFISLSSLDQPVXXPS

SEQ ID NO: 59503 - protein, 31 aa, Artificial Sequence
  Cyclic GFR-binding peptide
  MOD_RES (26)..(27): Xaa is C or S
PYVKLIKPTKGILFFISLSSLDQSVXXPSAS

SEQ ID NO: 59504 - protein, 21 aa, Artificial Sequence
  Cyclic GFR-binding peptide
PYVKLVKPTRGVLFFISLSSL

SEQ ID NO: 59505 - protein, 35 aa, Artificial Sequence
  Cyclic GFR-binding peptide
  MOD_RES (31)..(32): Xaa is C or S
SVAMGPYVKLYTVVGKDFFLISLSSLKTPVXXAKS

SEQ ID NO: 59506 - protein, 32 aa, Artificial Sequence
  Cyclic GFR-binding peptide
  MOD_RES (27)..(28): Xaa is C or S
NPYVKLVVNKNEDFFLISLSSMKEPVXXPEPI

SEQ ID NO: 59507 - protein, 30 aa, Artificial Sequence
  Cyclic GFR-binding peptide
EEVIMPYVKLLLVRGNDFFLMSLSSTKVPA

SEQ ID NO: 59508 - protein, 36 aa, Artificial Sequence
  Cyclic GFR-binding peptide
  MOD_RES (1)..(35): Xaa is C or S
XKNHQLFPYVKLHQGQHPKIRFFLMSLSSEETPVXE

SEQ ID NO: 59509 - protein, 34 aa, Artificial Sequence
  Cyclic GFR-binding peptide
  MOD_RES (2)..(33)..(34): Xaa is C or S
KXSKVVMPYVKLVKPTRGVLFFISLSSLDQPVXX

SEQ ID NO: 59510 - protein, 36 aa, Artificial Sequence
  Cyclic GFR-binding peptide
  MOD_RES (2)..(4)..(35)..(36): Xaa is C or S
SXKXSRVIMPYVKLVKPKRGVLFFISLSSLAQPVXX

SEQ ID NO: 59511 - protein, 40 aa, Artificial Sequence
  Cyclic GFR-binding peptide
  MOD_RES (2)..(4)..(36): Xaa is C or S
HXGXSRVVMNPYVKLIVNSSDDFFLVSLSSLKTPAXTPKT

SEQ ID NO: 59512 - protein, 36 aa, Artificial Sequence
  Cyclic GFR-binding peptide
  MOD_RES (31)..(32): Xaa is C or S
RVVMNPYVKLIVNSSDDFFLVSLSSLQTPAXXPKPV

SEQ ID NO: 59513 - protein, 41 aa, Artificial Sequence
  Cyclic GFR-binding peptide
  MOD_RES (1)..(3)..(35)..(36): Xaa is C or S
XGXESVAMGPYVKLYTVVGKDFFLISLSSLKTPVXXAKSAK

SEQ ID NO: 59514 - protein, 34 aa, Artificial Sequence
  Cyclic GFR-binding peptide
  MOD_RES (28)..(29): Xaa is C or S
MGPYVKLYTVVGKDFFLISLSSLKTPVXXAKSAK

SEQ ID NO: 59515 - protein, 36 aa, Artificial Sequence
  Cyclic GFR-binding peptide
  MOD_RES (31)..(32): Xaa is C or S
EVTMNPYVKLVVNKNEDFFLISLSSMKEPVXXPEPI

SEQ ID NO: 59516 - protein, 26 aa, Artificial Sequence
  Cyclic GFR-binding peptide
IMPYVKLVKPKRGVLFFISLSSLAQP

SEQ ID NO: 59517 - protein, 31 aa, Artificial Sequence
  Cyclic GFR-binding peptide
  MOD_RES (1)..(1): Xaa is C or S
XAKVVMNPYVKLIVNNSSDFFLVSLSSLKTP

SEQ ID NO: 59518 - protein, 28 aa, Artificial Sequence
  Cyclic GFR-binding peptide
  MOD_RES (2)..(2): Xaa is C or S
AXSEVTMNPYVKLVVNKNEDFFLISLSS

SEQ ID NO: 59519 - protein, 35 aa, Artificial Sequence
  Cyclic GFR-binding peptide
  MOD_RES (31)..(32): Xaa is C or S
SRVIMPYVKLVKPKRGVLFFISLSSLAQPVXXPAA

SEQ ID NO: 59520 - protein, 37 aa, Artificial Sequence
  Cyclic GFR-binding peptide
  MOD_RES (31)..(32): Xaa is C or S
KVVMNPYVKLIVNNSSDFFLVSLSSLKTPAXXAKPVA

SEQ ID NO: 59521 - protein, 39 aa, Artificial Sequence
  Cyclic GFR-binding peptide
  MOD_RES (2)..(4)..(37)..(38): Xaa is C or S
RXGXEAVSMGEPYVKLTPVGMDDFFLVSLSSLKTPVXXA

SEQ ID NO: 59522 - protein, 39 aa, Artificial Sequence
  Cyclic GFR-binding peptide
  MOD_RES (1)..(33)..(34): Xaa is C or S
XESVAMGPYVKLYTVVGKDFFLISLSSLKTPVXXAKSAK

SEQ ID NO: 59523 - protein, 33 aa, Artificial Sequence
  Cyclic GFR-binding peptide
  MOD_RES (1)..(33): Xaa is C or S
XESVAMGPYVKLYTVVGKDFFLISLSSLKTPVX

SEQ ID NO: 59524 - protein, 22 aa, Artificial Sequence
  Cyclic GFR-binding peptide
PYVKLIVNSSDDFFLVSLSSLK

SEQ ID NO: 59525 - protein, 36 aa, Artificial Sequence
  Cyclic GFR-binding peptide
  MOD_RES (1)..(3)..(35)..(36): Xaa is C or S
XGXESVAMGPYVKLYTVVGKDFFLISLSSLKTPVXX

SEQ ID NO: 59526 - protein, 28 aa, Artificial Sequence
  Cyclic GFR-binding peptide
  MOD_RES (26)..(26): Xaa is C or S
PYVKLIVNSSDDFFLVSLSSLKTPAXTP

SEQ ID NO: 59527 - protein, 29 aa, Artificial Sequence
  Cyclic GFR-binding peptide
AVSMGEPYVKLTPVGMDDFFLVSLSSLKT

SEQ ID NO: 59528 - protein, 22 aa, Artificial Sequence
  Cyclic GFR-binding peptide
NPYVKLVVNKNEDFFLISLSSM

SEQ ID NO: 59529 - protein, 22 aa, Artificial Sequence
  Cyclic GFR-binding peptide
PYVKLTPVGMDDFFLVSLSSLK

SEQ ID NO: 59530 - protein, 28 aa, Artificial Sequence
  Cyclic GFR-binding peptide
VVMGPYVKLIIQQKDNFFLMSLSSMKTP

SEQ ID NO: 59531 - protein, 34 aa, Artificial Sequence
  Cyclic GFR-binding peptide
  MOD_RES (30)..(31): Xaa is C or S
VVMDPYVKLVVNNAADFFLISLSSLRAPVXXSAP

SEQ ID NO: 59532 - protein, 33 aa, Artificial Sequence
  Cyclic GFR-binding peptide
  MOD_RES (29)..(30): Xaa is C or S
VMDPYVKLVVKENEDFFLMSLSSLETPVXXAKP

SEQ ID NO: 59533 - protein, 34 aa, Artificial Sequence
  Cyclic GFR-binding peptide
  MOD_RES (28)..(29): Xaa is C or S
MDPYVKLVVNNAADFFLISLSSLRAPVXXSAPAA

SEQ ID NO: 59534 - protein, 25 aa, Artificial Sequence
  Cyclic GFR-binding peptide
ELRPYVKLLKPKKRVYEFFLVSLSS

SEQ ID NO: 59535 - protein, 26 aa, Artificial Sequence
  Cyclic GFR-binding peptide
  MOD_RES (26)..(26): Xaa is C or S
PYVKLIVNSSDDFFLVSLSSLKTPAX

SEQ ID NO: 59536 - protein, 30 aa, Artificial Sequence
  Cyclic GFR-binding peptide
  MOD_RES (2)..(4): Xaa is C or S
HXGXAKVVMNPYVKLIVNNSSDFFLVSLSS

SEQ ID NO: 59537 - protein, 29 aa, Artificial Sequence
  Cyclic GFR-binding peptide
RPYVKLLKPKKRVYEFFLVSLSSHHVRSP

SEQ ID NO: 59538 - protein, 29 aa, Artificial Sequence
  Cyclic GFR-binding peptide
  MOD_RES (29)..(29): Xaa is C or S
AMGPYVKLYTVVGKDFFLISLSSLKTPVX

SEQ ID NO: 59539 - protein, 35 aa, Artificial Sequence
  Cyclic GFR-binding peptide
  MOD_RES (30)..(31): Xaa is C or S
VVMNPYVKLIVNSSDDFFLVSLSSLKTPAXXPKPV

SEQ ID NO: 59540 - protein, 27 aa, Artificial Sequence
  Cyclic GFR-binding peptide
  MOD_RES (26)..(27): Xaa is C or S
PYVKLIVNSSDDFFLVSLSSLKTPAXX

SEQ ID NO: 59541 - protein, 42 aa, Artificial Sequence
  Cyclic GFR-binding peptide
  MOD_RES (2)..(4)..(37)..(38): Xaa is C or S
RXGXEAVSMGEPYVKLTPVGMDDFFLVSLSSLKTPVXXAKGV

SEQ ID NO: 59542 - protein, 29 aa, Artificial Sequence
  Cyclic GFR-binding peptide
  MOD_RES (1)..(1): Xaa is C or S
XSEVTMNPYVKLVVNKNEDFFLISLSSMK

SEQ ID NO: 59543 - protein, 37 aa, Artificial Sequence
  Cyclic GFR-binding peptide
  MOD_RES (2)..(4)..(36)..(37): Xaa is C or S
HXGXAKVVMNPYVKLIVNNSSDFFLVSLSSLKTPAXX

SEQ ID NO: 59544 - protein, 29 aa, Artificial Sequence
  Cyclic GFR-binding peptide
  MOD_RES (2)..(4): Xaa is C or S
LXGXEEVIMPYVKLLLVRGNDFFLMSLSS

SEQ ID NO: 59545 - protein, 25 aa, Artificial Sequence
  Cyclic GFR-binding peptide
VMDPYVKLVVNNASDFFLISLSSLR

SEQ ID NO: 59546 - protein, 24 aa, Artificial Sequence
  Cyclic GFR-binding peptide
MDPYVKLVVNNAADFFLISLSSLR

SEQ ID NO: 59547 - protein, 29 aa, Artificial Sequence
  Cyclic GFR-binding peptide
EEVIMPYVKLLLVRGNDFFLMSLSSTKVP

SEQ ID NO: 59548 - protein, 40 aa, Artificial Sequence
  Cyclic GFR-binding peptide
  MOD_RES (2)..(4)..(36)..(37): Xaa is C or S
RXGXESVAMGPYVKLYTVVGKDFFLISLSSLKTPVXXAKS

SEQ ID NO: 59549 - protein, 26 aa, Artificial Sequence
  Cyclic GFR-binding peptide
ARVVMNPYVKLIVNSSDDFFLVSLSS

SEQ ID NO: 59550 - protein, 38 aa, Artificial Sequence
  Cyclic GFR-binding peptide
  MOD_RES (32)..(33): Xaa is C or S
SEVTMNPYVKLVVNKNEDFFLISLSSMKEPVXXPEPIG

SEQ ID NO: 59551 - protein, 36 aa, Artificial Sequence
  Cyclic GFR-binding peptide
  MOD_RES (31)..(32): Xaa is C or S
KVVMNPYVKLIVNNSSDFFLVSLSSLKTPAXXAKPV

SEQ ID NO: 59552 - protein, 28 aa, Artificial Sequence
  Cyclic GFR-binding peptide
QLFPYVKLHQGQHPKIRFFLMSLSSEET

SEQ ID NO: 59553 - protein, 23 aa, Artificial Sequence
  Cyclic GFR-binding peptide
IMPYVKLVKPKRGVLFFISLSSL

SEQ ID NO: 59554 - protein, 31 aa, Artificial Sequence
  Cyclic GFR-binding peptide
  MOD_RES (27)..(28): Xaa is C or S
DPYVKLVVNNAADFFLISLSSLRAPVXXSAP

SEQ ID NO: 59555 - protein, 32 aa, Artificial Sequence
  Cyclic GFR-binding peptide
  MOD_RES (1)..(3): Xaa is C or S
XEXKNHQLFPYVKLHQGQHPKIRFFLMSLSSE

SEQ ID NO: 59556 - protein, 28 aa, Artificial Sequence
  Cyclic GFR-binding peptide
  MOD_RES (2)..(2): Xaa is C or S
GXEEVIMPYVKLLLVRGNDFFLMSLSST

SEQ ID NO: 59557 - protein, 28 aa, Artificial Sequence
  Cyclic GFR-binding peptide
VVMDPYVKLVVKENEDFFLMSLSSLETP

SEQ ID NO: 59558 - protein, 39 aa, Artificial Sequence
  Cyclic GFR-binding peptide
  MOD_RES (2)..(4)..(36): Xaa is C or S
HXGXSRVVMNPYVKLIVNSSDDFFLVSLSSLKTPAXTPK

SEQ ID NO: 59559 - protein, 23 aa, Artificial Sequence
  Cyclic GFR-binding peptide
PYVKLVVNKNEDFFLISLSSMKE

SEQ ID NO: 59560 - protein, 31 aa, Artificial Sequence
  Cyclic GFR-binding peptide
  MOD_RES (30)..(31): Xaa is C or S
VAMGPYVKLYTVVGKDFFLISLSSLKTPVXX

SEQ ID NO: 59561 - protein, 27 aa, Artificial Sequence
  Cyclic GFR-binding peptide
VVMDPYVKLVVKENEDFFLMSLSSLET

SEQ ID NO: 59562 - protein, 31 aa, Artificial Sequence
  Cyclic GFR-binding peptide
  MOD_RES (28)..(29): Xaa is C or S
IMPYVKLIKPTKGILFFISLSSLDQSVXXPS

SEQ ID NO: 59563 - protein, 34 aa, Artificial Sequence
  Cyclic GFR-binding peptide
  MOD_RES (32)..(33): Xaa is C or S
SEVVMDPYVKLVVNNASDFFLISLSSLRTPVXXT

SEQ ID NO: 59564 - protein, 29 aa, Artificial Sequence
  Cyclic GFR-binding peptide
  MOD_RES (28)..(29): Xaa is C or S
MDPYVKLVVNNASDFFLISLSSLRTPVXX

SEQ ID NO: 59565 - protein, 35 aa, Artificial Sequence
  Cyclic GFR-binding peptide
  MOD_RES (31)..(32): Xaa is C or S
SKVVMPYVKLVKPTRGVLFFISLSSLDQPVXXPSA

SEQ ID NO: 59566 - protein, 29 aa, Artificial Sequence
  Cyclic GFR-binding peptide
  MOD_RES (28)..(29): Xaa is C or S
MNPYVKLIVNSSDDFFLVSLSSLKTPAXX

SEQ ID NO: 59567 - protein, 28 aa, Artificial Sequence
  Cyclic GFR-binding peptide
  MOD_RES (2)..(2): Xaa is C or S
GXRDVVMGPYVKLIIQQKDNFFLMSLSS

SEQ ID NO: 59568 - protein, 28 aa, Artificial Sequence
  Cyclic GFR-binding peptide
  MOD_RES (26)..(27): Xaa is C or S
PYVKLVVNKNEDFFLISLSSMKEPVXXP

SEQ ID NO: 59569 - protein, 33 aa, Artificial Sequence
  Cyclic GFR-binding peptide
  MOD_RES (31)..(32): Xaa is C or S
VSMGEPYVKLTPVGMDDFFLVSLSSLKTPVXXA

SEQ ID NO: 59570 - protein, 27 aa, Artificial Sequence
  Cyclic GFR-binding peptide
EVTMNPYVKLVVNKNEDFFLISLSSMK

SEQ ID NO: 59571 - protein, 22 aa, Artificial Sequence
  Cyclic GFR-binding peptide
IMPYVKLIKPTKGILFFISLSS

SEQ ID NO: 59572 - protein, 26 aa, Artificial Sequence
  Cyclic GFR-binding peptide
MPYVKLVKPKRGVLFFISLSSLAQPV

SEQ ID NO: 59573 - protein, 32 aa, Artificial Sequence
  Cyclic GFR-binding peptide
  MOD_RES (27)..(28): Xaa is C or S
NPYVKLIVNSSDDFFLVSLSSLQTPAXXPKPV

SEQ ID NO: 59574 - protein, 28 aa, Artificial Sequence
  Cyclic GFR-binding peptide
  MOD_RES (1)..(1): Xaa is C or S
XRDVVMGPYVKLIIQQKDNFFLMSLSSM

SEQ ID NO: 59575 - protein, 28 aa, Artificial Sequence
  Cyclic GFR-binding peptide
  MOD_RES (1)..(1): Xaa is C or S
XAKVVMNPYVKLIVNNSSDFFLVSLSSL

SEQ ID NO: 59576 - protein, 24 aa, Artificial Sequence
  Cyclic GFR-binding peptide
VMDPYVKLVVKENEDFFLMSLSSL

SEQ ID NO: 59577 - protein, 31 aa, Artificial Sequence
  Cyclic GFR-binding peptide
  MOD_RES (27)..(28): Xaa is C or S
NPYVKLIVNSSDDFFLVSLSSLKTPAXXPKP

SEQ ID NO: 59578 - protein, 38 aa, Artificial Sequence
  Cyclic GFR-binding peptide
  MOD_RES (2)..(4)..(35)..(36): Xaa is C or S
SXKXSRVIMPYVKLVKPKRGVLFFISLSSLAQPVXXPA

SEQ ID NO: 59579 - protein, 30 aa, Artificial Sequence
  Cyclic GFR-binding peptide
SRVIMPYVKLVKPKRGVLFFISLSSLAQPV

SEQ ID NO: 59580 - protein, 25 aa, Artificial Sequence
  Cyclic GFR-binding peptide
EVIMPYVKLLLVRGNDFFLMSLSST

SEQ ID NO: 59581 - protein, 29 aa, Artificial Sequence
  Cyclic GFR-binding peptide
  MOD_RES (1)..(1): Xaa is C or S
XSRVIMPYVKLVKPKRGVLFFISLSSLAQ

SEQ ID NO: 59582 - protein, 27 aa, Artificial Sequence
  Cyclic GFR-binding peptide
QLFPYVKLHQGQHPKIRFFLMSLSSEE

SEQ ID NO: 59583 - protein, 34 aa, Artificial Sequence
  Cyclic GFR-binding peptide
  MOD_RES (1)..(3): Xaa is C or S
XAXSEVTMNPYVKLVVNKNEDFFLISLSSMKEPV

SEQ ID NO: 59584 - protein, 37 aa, Artificial Sequence
  Cyclic GFR-binding peptide
  MOD_RES (1)..(3)..(34)..(35): Xaa is C or S
XKXSKVIMPYVKLIKPTKGILFFISLSSLDQSVXXPS

SEQ ID NO: 59585 - protein, 29 aa, Artificial Sequence
  Cyclic GFR-binding peptide
  MOD_RES (27)..(28): Xaa is C or S
NPYVKLIVNSSDDFFLVSLSSLKTPAXXP

SEQ ID NO: 59586 - protein, 37 aa, Artificial Sequence
  Cyclic GFR-binding peptide
  MOD_RES (1)..(33)..(34): Xaa is C or S
XAKVVMNPYVKLIVNNSSDFFLVSLSSLKTPAXXAKP

SEQ ID NO: 59587 - protein, 37 aa, Artificial Sequence
  Cyclic GFR-binding peptide
  MOD_RES (1)..(3)..(35)..(36): Xaa is C or S
XGXESVAMGPYVKLYTVVGKDFFLISLSSLKTPVXXA

SEQ ID NO: 59588 - protein, 28 aa, Artificial Sequence
  Cyclic GFR-binding peptide
  MOD_RES (1)..(1): Xaa is C or S
XAEVVMDPYVKLVVNNAADFFLISLSSL

SEQ ID NO: 59589 - protein, 33 aa, Artificial Sequence
  Cyclic GFR-binding peptide
  MOD_RES (2)..(2): Xaa is C or S
GXSEVVMDPYVKLVVNNASDFFLISLSSLRTPV

SEQ ID NO: 59590 - protein, 28 aa, Artificial Sequence
  Cyclic GFR-binding peptide
  MOD_RES (27)..(28): Xaa is C or S
GPYVKLYTVVGKDFFLISLSSLKTPVXX

SEQ ID NO: 59591 - protein, 34 aa, Artificial Sequence
  Cyclic GFR-binding peptide
  MOD_RES (29)..(30): Xaa is C or S
AMGPYVKLYTVVGKDFFLISLSSLKTPVXXAKSA

SEQ ID NO: 59592 - protein, 31 aa, Artificial Sequence
  Cyclic GFR-binding peptide
  MOD_RES (28)..(29): Xaa is C or S
VMPYVKLVKPTRGVLFFISLSSLDQPVXXPS

SEQ ID NO: 59593 - protein, 29 aa, Artificial Sequence
  Cyclic GFR-binding peptide
  MOD_RES (1)..(3): Xaa is C or S
XGXARVVMNPYVKLIVNSSDDFFLVSLSS

SEQ ID NO: 59594 - protein, 30 aa, Artificial Sequence
  Cyclic GFR-binding peptide
  MOD_RES (1)..(3): Xaa is C or S
XKXSRVIMPYVKLVKPKRGVLFFISLSSLA

SEQ ID NO: 59595 - protein, 36 aa, Artificial Sequence
  Cyclic GFR-binding peptide
  MOD_RES (33)..(33): Xaa is C or S
NHQLFPYVKLHQGQHPKIRFFLMSLSSEETPVXELG

SEQ ID NO: 59596 - protein, 31 aa, Artificial Sequence
  Cyclic GFR-binding peptide
  MOD_RES (29)..(30): Xaa is C or S
VVMPYVKLVKPTRGVLFFISLSSLDQPVXXP

SEQ ID NO: 59597 - protein, 35 aa, Artificial Sequence
  Cyclic GFR-binding peptide
  MOD_RES (2)..(34)..(35): Xaa is C or S
GXESVAMGPYVKLYTVVGKDFFLISLSSLKTPVXX

SEQ ID NO: 59598 - protein, 32 aa, Artificial Sequence
  Cyclic GFR-binding peptide
ELHEELRPYVKLLKPKKRVYEFFLVSLSSHHV

SEQ ID NO: 59599 - protein, 24 aa, Artificial Sequence
  Cyclic GFR-binding peptide
MPYVKLVKPTRGVLFFISLSSLDQ

SEQ ID NO: 59600 - protein, 32 aa, Artificial Sequence
  Cyclic GFR-binding peptide
  MOD_RES (29)..(30): Xaa is C or S
VMDPYVKLVVNNASDFFLISLSSLRTPVXXTP

SEQ ID NO: 59601 - protein, 40 aa, Artificial Sequence
  Cyclic GFR-binding peptide
  MOD_RES (2)..(34)..(35): Xaa is C or S
GXAKVVMNPYVKLIVNNSSDFFLVSLSSLKTPAXXAKPVA

SEQ ID NO: 59602 - protein, 36 aa, Artificial Sequence
  Cyclic GFR-binding peptide
  MOD_RES (1)..(3)..(36): Xaa is C or S
XGXEAVSMGEPYVKLTPVGMDDFFLVSLSSLKTPVX

SEQ ID NO: 59603 - protein, 34 aa, Artificial Sequence
  Cyclic GFR-binding peptide
  MOD_RES (2)..(4): Xaa is C or S
HXGXSRVVMNPYVKLIVNSSDDFFLVSLSSLKTP

SEQ ID NO: 59604 - protein, 21 aa, Artificial Sequence
  Cyclic GFR-binding peptide
DPYVKLVVNNAADFFLISLSS

SEQ ID NO: 59605 - protein, 30 aa, Artificial Sequence
  Cyclic GFR-binding peptide
  MOD_RES (27)..(28): Xaa is C or S
EPYVKLTPVGMDDFFLVSLSSLKTPVXXAK

SEQ ID NO: 59606 - protein, 35 aa, Artificial Sequence
  Cyclic GFR-binding peptide
  MOD_RES (2)..(34)..(35): Xaa is C or S
GXARVVMNPYVKLIVNSSDDFFLVSLSSLQTPAXX

SEQ ID NO: 59607 - protein, 31 aa, Artificial Sequence
  Cyclic GFR-binding peptide
  MOD_RES (1)..(1): Xaa is C or S
XSEVVMDPYVKLVVNNASDFFLISLSSLRTP

SEQ ID NO: 59608 - protein, 39 aa, Artificial Sequence
  Cyclic GFR-binding peptide
  MOD_RES (2)..(4)..(36)..(37): Xaa is C or S
HXGXSRVVMNPYVKLIVNSSDDFFLVSLSSLKTPAXXPK

SEQ ID NO: 59609 - protein, 35 aa, Artificial Sequence
  Cyclic GFR-binding peptide
  MOD_RES (1)..(3)..(35): Xaa is C or S
XGXRDVVMGPYVKLIIQQKDNFFLMSLSSMKTPTX

SEQ ID NO: 59610 - protein, 28 aa, Artificial Sequence
  Cyclic GFR-binding peptide
VTMNPYVKLVVNKNEDFFLISLSSMKEP

SEQ ID NO: 59611 - protein, 26 aa, Artificial Sequence
  Cyclic GFR-binding peptide
MNPYVKLIVNSSDDFFLVSLSSLKTP

SEQ ID NO: 59612 - protein, 26 aa, Artificial Sequence
  Cyclic GFR-binding peptide
MGEPYVKLTPVGMDDFFLVSLSSLKT

SEQ ID NO: 59613 - protein, 32 aa, Artificial Sequence
  Cyclic GFR-binding peptide
  MOD_RES (28)..(29): Xaa is C or S
MGPYVKLYTVVGKDFFLISLSSLKTPVXXAKS

SEQ ID NO: 59614 - protein, 33 aa, Artificial Sequence
  Cyclic GFR-binding peptide
  MOD_RES (2)..(4): Xaa is C or S
RXGXGEVVMEPYVKLVVKDYEDFFLMSLSSLET

SEQ ID NO: 59615 - protein, 33 aa, Artificial Sequence
  Cyclic GFR-binding peptide
  MOD_RES (29)..(30): Xaa is C or S
VMDPYVKLVVNNASDFFLISLSSLRTPVXXTPP

SEQ ID NO: 59616 - protein, 32 aa, Artificial Sequence
  Cyclic GFR-binding peptide
  MOD_RES (32)..(32): Xaa is C or S
AKVVMNPYVKLIVNNSSDFFLVSLSSLKTPAX

SEQ ID NO: 59617 - protein, 38 aa, Artificial Sequence
  Cyclic GFR-binding peptide
  MOD_RES (32)..(33): Xaa is C or S
RDVVMGPYVKLIIQQKDNFFLMSLSSMKTPTXXPGASG

SEQ ID NO: 59618 - protein, 32 aa, Artificial Sequence
  Cyclic GFR-binding peptide
  MOD_RES (31)..(31): Xaa is C or S
RPYVKLLKPKKRVYEFFLVSLSSHHVRSPQXK

SEQ ID NO: 59619 - protein, 30 aa, Artificial Sequence
  Cyclic GFR-binding peptide
  MOD_RES (27)..(28): Xaa is C or S
NPYVKLIVNNSSDFFLVSLSSLKTPAXXAK

SEQ ID NO: 59620 - protein, 27 aa, Artificial Sequence
  Cyclic GFR-binding peptide
MNPYVKLIVNSSDDFFLVSLSSLQTPA

SEQ ID NO: 59621 - protein, 35 aa, Artificial Sequence
  Cyclic GFR-binding peptide
  MOD_RES (2)..(34)..(35): Xaa is C or S
GXAEVVMDPYVKLVVNNAADFFLISLSSLRAPVXX

SEQ ID NO: 59622 - protein, 35 aa, Artificial Sequence
  Cyclic GFR-binding peptide
  MOD_RES (35)..(35): Xaa is C or S
HEELRPYVKLLKPKKRVYEFFLVSLSSHHVRSPQX

SEQ ID NO: 59623 - protein, 37 aa, Artificial Sequence
  Cyclic GFR-binding peptide
  MOD_RES (1)..(3)..(34)..(35): Xaa is C or S
XKXSKVVMPYVKLVKPTRGVLFFISLSSLDQPVXXPS

SEQ ID NO: 59624 - protein, 35 aa, Artificial Sequence
  Cyclic GFR-binding peptide
  MOD_RES (2)..(4): Xaa is C or S
RXGXESVAMGPYVKLYTVVGKDFFLISLSSLKTPV

SEQ ID NO: 59625 - protein, 24 aa, Artificial Sequence
  Cyclic GFR-binding peptide
VMDPYVKLVVNNAADFFLISLSSL

SEQ ID NO: 59626 - protein, 34 aa, Artificial Sequence
  Cyclic GFR-binding peptide
  MOD_RES (2)..(4): Xaa is C or S
RXGXEAVSMGEPYVKLTPVGMDDFFLVSLSSLKT

SEQ ID NO: 59627 - protein, 25 aa, Artificial Sequence
  Cyclic GFR-binding peptide
NPYVKLVVNKNEDFFLISLSSMKEP

SEQ ID NO: 59628 - protein, 31 aa, Artificial Sequence
  Cyclic GFR-binding peptide
  MOD_RES (1)..(1): Xaa is C or S
XESVAMGPYVKLYTVVGKDFFLISLSSLKTP

SEQ ID NO: 59629 - protein, 22 aa, Artificial Sequence
  Cyclic GFR-binding peptide
EPYVKLTPVGMDDFFLVSLSSL

SEQ ID NO: 59630 - protein, 28 aa, Artificial Sequence
  Cyclic GFR-binding peptide
  MOD_RES (2)..(2): Xaa is C or S
KXSKVIMPYVKLIKPTKGILFFISLSSL

SEQ ID NO: 59631 - protein, 29 aa, Artificial Sequence
  Cyclic GFR-binding peptide
EVVMDPYVKLVVKENEDFFLMSLSSLETP

SEQ ID NO: 59632 - protein, 20 aa, Artificial Sequence
  Cyclic GFR-binding peptide
PYVKLVVNNAADFFLISLSS

SEQ ID NO: 59633 - protein, 34 aa, Artificial Sequence
  Cyclic GFR-binding peptide
  MOD_RES (30)..(31): Xaa is C or S
KVVMPYVKLVKPTRGVLFFISLSSLDQPVXXPSA

SEQ ID NO: 59634 - protein, 33 aa, Artificial Sequence
  Cyclic GFR-binding peptide
  MOD_RES (2)..(33): Xaa is C or S
KXSKVVMPYVKLVKPTRGVLFFISLSSLDQPVX

SEQ ID NO: 59635 - protein, 28 aa, Artificial Sequence
  Cyclic GFR-binding peptide
  MOD_RES (28)..(28): Xaa is C or S
LSSLSVLFFDDSSNVILKVYPNMVVRSX

SEQ ID NO: 59636 - protein, 35 aa, Artificial Sequence
  Cyclic GFR-binding peptide
  MOD_RES (32)..(34): Xaa is C or S
APTQLSSLSVLFFDDSSNVILKVYPNMVVRAXGXH

SEQ ID NO: 59637 - protein, 25 aa, Artificial Sequence
  Cyclic GFR-binding peptide
VSQDLSSLSILFFIGKTPKILKVYP

SEQ ID NO: 59638 - protein, 37 aa, Artificial Sequence
  Cyclic GFR-binding peptide
  MOD_RES (6)..(7): Xaa is C or S
GSAGPXXTPTKMSSLSMLFFNDKQQIILKVYPGMVVD

SEQ ID NO: 59639 - protein, 32 aa, Artificial Sequence
  Cyclic GFR-binding peptide
  MOD_RES (5)..(6): Xaa is C or S
VPKAXXAPTKLSSLSVLFFDSSNNVILKVYPN

SEQ ID NO: 59640 - protein, 31 aa, Artificial Sequence
  Cyclic GFR-binding peptide
  MOD_RES (31)..(31): Xaa is C or S
PARLSSLSILFFDAANNVVLKVYPDMVVEAX

SEQ ID NO: 59641 - protein, 26 aa, Artificial Sequence
  Cyclic GFR-binding peptide
LSSLSILFFIGKTPKILKVYPMIVKS

SEQ ID NO: 59642 - protein, 29 aa, Artificial Sequence
  Cyclic GFR-binding peptide
  MOD_RES (29)..(29): Xaa is C or S
RLSSLSILFFDAANNVVLKVYPDMVVEAX

SEQ ID NO: 59643 - protein, 33 aa, Artificial Sequence
  Cyclic GFR-binding peptide
  MOD_RES (30)..(32): Xaa is C or S
TQLSSLSVLFFDDSSNVILKVYPNMVVRAXGXH

SEQ ID NO: 59644 - protein, 32 aa, Artificial Sequence
  Cyclic GFR-binding peptide
  MOD_RES (6)..(7): Xaa is C or S
AAPASXXVPARLSSLSILFFDAANNVVLKVYP

SEQ ID NO: 59645 - protein, 30 aa, Artificial Sequence
  Cyclic GFR-binding peptide
  MOD_RES (4)..(5): Xaa is C or S
AGPXXTPTKMSSLSMLFFNDKQQIILKVYP

SEQ ID NO: 59646 - protein, 38 aa, Artificial Sequence
  Cyclic GFR-binding peptide
  MOD_RES (4)..(5)..(36)..(38): Xaa is C or S
AAPXXVPQALSSLSILFFVGRKPKVLKVYPMIVRSXKX

SEQ ID NO: 59647 - protein, 30 aa, Artificial Sequence
  Cyclic GFR-binding peptide
  MOD_RES (29)..(29): Xaa is C or S
LSSLSVLFFDDMGVPTLKVYPEGMSVAEXG

SEQ ID NO: 59648 - protein, 29 aa, Artificial Sequence
  Cyclic GFR-binding peptide
PEKMSSLSILFFDENKNVVLKVYPNMTVE

SEQ ID NO: 59649 - protein, 39 aa, Artificial Sequence
  Cyclic GFR-binding peptide
  MOD_RES (6)..(6): Xaa is C or S
DEGLEXVPTEESSLSMLFFRIKPHQGQHLKVYPFLQHNK

SEQ ID NO: 59650 - protein, 35 aa, Artificial Sequence
  Cyclic GFR-binding peptide
  MOD_RES (5)..(6): Xaa is C or S
SAGPXXTPTKMSSLSMLFFNDKQQIILKVYPGMVV

SEQ ID NO: 59651 - protein, 29 aa, Artificial Sequence
  Cyclic GFR-binding peptide
  MOD_RES (1)..(1): Xaa is C or S
XAPTKLSSLSVLFFDSSNNVILKVYPNMV

SEQ ID NO: 59652 - protein, 27 aa, Artificial Sequence
  Cyclic GFR-binding peptide
TEESSLSMLFFRIKPHQGQHLKVYPFL

SEQ ID NO: 59653 - protein, 32 aa, Artificial Sequence
  Cyclic GFR-binding peptide
  MOD_RES (31)..(31): Xaa is C or S
EESSLSMLFFRIKPHQGQHLKVYPFLQHNKXE

SEQ ID NO: 59654 - protein, 32 aa, Artificial Sequence
  Cyclic GFR-binding peptide
  MOD_RES (6)..(7): Xaa is C or S
STPPTXXVPTRLSSLSILFFDSANNVVLKVYP

SEQ ID NO: 59655 - protein, 35 aa, Artificial Sequence
  Cyclic GFR-binding peptide
  MOD_RES (6)..(7): Xaa is C or S
GSAGPXXTPTKMSSLSMLFFNDKQQIILKVYPGMV

SEQ ID NO: 59656 - protein, 28 aa, Artificial Sequence
  Cyclic GFR-binding peptide
KLSSLSILFFDKGVVTYLKVYPGMAVSE

SEQ ID NO: 59657 - protein, 22 aa, Artificial Sequence
  Cyclic GFR-binding peptide
KLSSLSILFFDKGVVTYLKVYP

SEQ ID NO: 59658 - protein, 36 aa, Artificial Sequence
  Cyclic GFR-binding peptide
  MOD_RES (6)..(7): Xaa is C or S
AAPASXXVPARLSSLSILFFDAANNVVLKVYPDMVV

SEQ ID NO: 59659 - protein, 30 aa, Artificial Sequence
  Cyclic GFR-binding peptide
VHHSSLSVLFFEYVRKKPKLLKVYPRLEEH

SEQ ID NO: 59660 - protein, 35 aa, Artificial Sequence
  Cyclic GFR-binding peptide
  MOD_RES (3)..(4)..(35): Xaa is C or S
SPXXVSQDLSSLSILFFIGKTPKILKVYPMIVKSX

SEQ ID NO: 59661 - protein, 30 aa, Artificial Sequence
  Cyclic GFR-binding peptide
VPTEESSLSMLFFRIKPHQGQHLKVYPFLQ

SEQ ID NO: 59662 - protein, 38 aa, Artificial Sequence
  Cyclic GFR-binding peptide
  MOD_RES (2)..(3)..(35)..(37): Xaa is C or S
PXXVPEKMSSLSILFFDENKNVVLKVYPNMTVESXAXR

SEQ ID NO: 59663 - protein, 23 aa, Artificial Sequence
  Cyclic GFR-binding peptide
TSSLSMLFFDNGRVLLLKVYPMI

SEQ ID NO: 59664 - protein, 35 aa, Artificial Sequence
  Cyclic GFR-binding peptide
  MOD_RES (1)..(34): Xaa is C or S
XVPTKLSSLSVLFFDDMGVPTLKVYPEGMSVAEXG

SEQ ID NO: 59665 - protein, 29 aa, Artificial Sequence
  Cyclic GFR-binding peptide
  MOD_RES (2)..(2): Xaa is C or S
TXAPTKLSSLSVLFFDDSSNVILKVYPNM

SEQ ID NO: 59666 - protein, 27 aa, Artificial Sequence
  Cyclic GFR-binding peptide
HHSSLSVLFFEYVRKKPKLLKVYPRLE

SEQ ID NO: 59667 - protein, 27 aa, Artificial Sequence
  Cyclic GFR-binding peptide
PTKLSSLSVLFFDDMGVPTLKVYPEGM

SEQ ID NO: 59668 - protein, 22 aa, Artificial Sequence
  Cyclic GFR-binding peptide
LSSLSVLFFDDSSNVILKVYPN

SEQ ID NO: 59669 - protein, 37 aa, Artificial Sequence
  Cyclic GFR-binding peptide
  MOD_RES (6)..(7): Xaa is C or S
TVPKPXXAPTQLSSLSVLFFDDSSNVILKVYPNMVVR

SEQ ID NO: 59670 - protein, 31 aa, Artificial Sequence
  Cyclic GFR-binding peptide
  MOD_RES (2)..(2): Xaa is C or S
EXVPTEESSLSMLFFRIKPHQGQHLKVYPFL

SEQ ID NO: 59671 - protein, 38 aa, Artificial Sequence
  Cyclic GFR-binding peptide
  MOD_RES (7)..(7): Xaa is C or S
HVTKPTXAPTKLSSLSVLFFDDSSNVILKVYPNMVVRS

SEQ ID NO: 59672 - protein, 34 aa, Artificial Sequence
  Cyclic GFR-binding peptide
  MOD_RES (31)..(33): Xaa is C or S
PTRLSSLSILFFDSANNVVLKVYPDMVVESXGXR

SEQ ID NO: 59673 - protein, 29 aa, Artificial Sequence
  Cyclic GFR-binding peptide
  MOD_RES (1)..(1): Xaa is C or S
XAPTKLSSLSVLFFDDSSNVILKVYPNMV

SEQ ID NO: 59674 - protein, 25 aa, Artificial Sequence
  Cyclic GFR-binding peptide
KMSSLSMLFFNDKQQIILKVYPGMV

SEQ ID NO: 59675 - protein, 40 aa, Artificial Sequence
  Cyclic GFR-binding peptide
  MOD_RES (5)..(6)..(39): Xaa is C or S
VGKAXXVPTKLSSLSVLFFDDMGVPTLKVYPEGMSVAEXG

SEQ ID NO: 59676 - protein, 34 aa, Artificial Sequence
  Cyclic GFR-binding peptide
  MOD_RES (5)..(6): Xaa is C or S
IPEPXXVPEKMSSLSILFFDENKNVVLKVYPNMT

SEQ ID NO: 59677 - protein, 32 aa, Artificial Sequence
  Cyclic GFR-binding peptide
  MOD_RES (5)..(6): Xaa is C or S
APASXXVPARLSSLSILFFDAANNVVLKVYPD

SEQ ID NO: 59678 - protein, 29 aa, Artificial Sequence
  Cyclic GFR-binding peptide
  MOD_RES (3)..(4): Xaa is C or S
STXXAPVKTSSLSMLFFDNGRVLLLKVYP

SEQ ID NO: 59679 - protein, 36 aa, Artificial Sequence
  Cyclic GFR-binding peptide
  MOD_RES (2)..(3)..(35): Xaa is C or S
PXXVPEKMSSLSILFFDENKNVVLKVYPNMTVESXA

SEQ ID NO: 59680 - protein, 22 aa, Artificial Sequence
  Cyclic GFR-binding peptide
LSSLSILFFIGKTPKILKVYPM

SEQ ID NO: 59681 - protein, 36 aa, Artificial Sequence
  Cyclic GFR-binding peptide
  MOD_RES (3)..(4)..(35): Xaa is C or S
APXXVPQALSSLSILFFVGRKPKVLKVYPMIVRSXK

SEQ ID NO: 59682 - protein, 36 aa, Artificial Sequence
  Cyclic GFR-binding peptide
  MOD_RES (1)..(2)..(35): Xaa is C or S
XXVPTKLSSLSVLFFDDMGVPTLKVYPEGMSVAEXG

SEQ ID NO: 59683 - protein, 34 aa, Artificial Sequence
  Cyclic GFR-binding peptide
  MOD_RES (6)..(6): Xaa is C or S
VTKPTXAPTKLSSLSVLFFDDSSNVILKVYPNMV

SEQ ID NO: 59684 - protein, 41 aa, Artificial Sequence
  Cyclic GFR-binding peptide
  MOD_RES (6)..(7)..(39)..(41): Xaa is C or S
STPPTXXVPTRLSSLSILFFDSANNVVLKVYPDMVVESXGX

SEQ ID NO: 59685 - protein, 30 aa, Artificial Sequence
  Cyclic GFR-binding peptide
  MOD_RES (3)..(4): Xaa is C or S
SPXXVPQDLSSLSILFFVGRTPKVLKVYPM

SEQ ID NO: 59686 - protein, 32 aa, Artificial Sequence
  Cyclic GFR-binding peptide
SRVHHSSLSVLFFEYVRKKPKLLKVYPRLEEH

SEQ ID NO: 59687 - protein, 35 aa, Artificial Sequence
  Cyclic GFR-binding peptide
  MOD_RES (5)..(6): Xaa is C or S
TPPTXXVPTRLSSLSILFFDSANNVVLKVYPDMVV

SEQ ID NO: 59688 - protein, 35 aa, Artificial Sequence
  Cyclic GFR-binding peptide
  MOD_RES (1)..(32)..(34): Xaa is C or S
XVSQDLSSLSILFFIGKTPKILKVYPMIVKSXKXS

SEQ ID NO: 59689 - protein, 32 aa, Artificial Sequence
  Cyclic GFR-binding peptide
  MOD_RES (4)..(5): Xaa is C or S
ASPXXVSQDLSSLSILFFIGKTPKILKVYPMI

SEQ ID NO: 59690 - protein, 34 aa, Artificial Sequence
  Cyclic GFR-binding peptide
  MOD_RES (2)..(3)..(34): Xaa is C or S
PXXVPQDLSSLSILFFVGRTPKVLKVYPMVVKSX

SEQ ID NO: 59691 - protein, 33 aa, Artificial Sequence
  Cyclic GFR-binding peptide
  MOD_RES (1)..(2): Xaa is C or S
XXTPTKMSSLSMLFFNDKQQIILKVYPGMVVDR

SEQ ID NO: 59692 - protein, 28 aa, Artificial Sequence
  Cyclic GFR-binding peptide
  MOD_RES (27)..(27): Xaa is C or S
SSLSVLFFDDSSNVILKVYPNMVVRSXG

SEQ ID NO: 59693 - protein, 37 aa, Artificial Sequence
  Cyclic GFR-binding peptide
  MOD_RES (2)..(3)..(35)..(37): Xaa is C or S
AXXAPTKLSSLSVLFFDSSNNVILKVYPNMVVKAXGX

SEQ ID NO: 59694 - protein, 34 aa, Artificial Sequence
  Cyclic GFR-binding peptide
  MOD_RES (6)..(6): Xaa is C or S
DEGLEXVPTEESSLSMLFFRIKPHQGQHLKVYPF

SEQ ID NO: 59695 - protein, 39 aa, Artificial Sequence
  Cyclic GFR-binding peptide
  MOD_RES (7)..(39): Xaa is C or S
HVTKPTXAPTKLSSLSVLFFDDSSNVILKVYPNMVVRSX

SEQ ID NO: 59696 - protein, 25 aa, Artificial Sequence
  Cyclic GFR-binding peptide
LSSLSILFFVGRKPKVLKVYPMIVR

SEQ ID NO: 59697 - protein, 28 aa, Artificial Sequence
  Cyclic GFR-binding peptide
  MOD_RES (26)..(28): Xaa is C or S
SSLSMLFFDNGRVLLLKVYPMIVEEXGX

SEQ ID NO: 59698 - protein, 43 aa, Artificial Sequence
  Cyclic GFR-binding peptide
  MOD_RES (5)..(42): Xaa is C or S
SSVKXQPSRVHHSSLSVLFFEYVRKKPKLLKVYPRLEEHLEXA

SEQ ID NO: 59699 - protein, 35 aa, Artificial Sequence
  Cyclic GFR-binding peptide
  MOD_RES (3)..(3): Xaa is C or S
LEXVPTEESSLSMLFFRIKPHQGQHLKVYPFLQHN

SEQ ID NO: 59700 - protein, 37 aa, Artificial Sequence
  Cyclic GFR-binding peptide
  MOD_RES (4)..(5)..(37): Xaa is C or S
PKPXXAPTQLSSLSVLFFDDSSNVILKVYPNMVVRAX

SEQ ID NO: 59701 - protein, 33 aa, Artificial Sequence
  Cyclic GFR-binding peptide
  MOD_RES (6)..(7): Xaa is C or S
ASASPXXVSQDLSSLSILFFIGKTPKILKVYPM

SEQ ID NO: 59702 - protein, 36 aa, Artificial Sequence
  Cyclic GFR-binding peptide
  MOD_RES (3)..(4)..(36): Xaa is C or S
EPXXVPEKMSSLSILFFDENKNVVLKVYPNMTVESX

SEQ ID NO: 59703 - protein, 26 aa, Artificial Sequence
  Cyclic GFR-binding peptide
LSSLSILFFVGRKPKVLKVYPMIVRS

SEQ ID NO: 59704 - protein, 36 aa, Artificial Sequence
  Cyclic GFR-binding peptide
  MOD_RES (36)..(36): Xaa is C or S
PSRVHHSSLSVLFFEYVRKKPKLLKVYPRLEEHLEX

SEQ ID NO: 59705 - protein, 35 aa, Artificial Sequence
  Cyclic GFR-binding peptide
  MOD_RES (6)..(7): Xaa is C or S
YVPKPXXAPTKLSSLSVLFFDDSSNVILKVYPNMV

SEQ ID NO: 59706 - protein, 35 aa, Artificial Sequence
  Cyclic GFR-binding peptide
  MOD_RES (3)..(4): Xaa is C or S
EPXXVPEKMSSLSILFFDENKNVVLKVYPNMTVES

SEQ ID NO: 59707 - protein, 34 aa, Artificial Sequence
  Cyclic GFR-binding peptide
  MOD_RES (3)..(4): Xaa is C or S
SPXXVSQDLSSLSILFFIGKTPKILKVYPMIVKS

SEQ ID NO: 59708 - protein, 30 aa, Artificial Sequence
  Cyclic GFR-binding peptide
  MOD_RES (4)..(5): Xaa is C or S
AAPXXVPQALSSLSILFFVGRKPKVLKVYP

SEQ ID NO: 59709 - protein, 31 aa, Artificial Sequence
  Cyclic GFR-binding peptide
  MOD_RES (2)..(3): Xaa is C or S
AXXAPTKLSSLSVLFFDSSNNVILKVYPNMV

SEQ ID NO: 59710 - protein, 39 aa, Artificial Sequence
  Cyclic GFR-binding peptide
  MOD_RES (6)..(7)..(38): Xaa is C or S
ASAAPXXVPQALSSLSILFFVGRKPKVLKVYPMIVRSXK

SEQ ID NO: 59711 - protein, 33 aa, Artificial Sequence
  Cyclic GFR-binding peptide
  MOD_RES (3)..(4): Xaa is C or S
GPXXTPTKMSSLSMLFFNDKQQIILKVYPGMVV

SEQ ID NO: 59712 - protein, 30 aa, Artificial Sequence
  Cyclic GFR-binding peptide
  MOD_RES (1)..(2): Xaa is C or S
XXVPTRLSSLSILFFDSANNVVLKVYPDMV

SEQ ID NO: 59713 - protein, 34 aa, Artificial Sequence
  Cyclic GFR-binding peptide
  MOD_RES (2)..(3)..(34): Xaa is C or S
TXXAPVKTSSLSMLFFDNGRVLLLKVYPMIVEEX

SEQ ID NO: 59714 - protein, 34 aa, Artificial Sequence
  Cyclic GFR-binding peptide
  MOD_RES (2)..(3): Xaa is C or S
SXXVPARLSSLSILFFDAANNVVLKVYPDMVVEA

SEQ ID NO: 59715 - protein, 31 aa, Artificial Sequence
  Cyclic GFR-binding peptide
  MOD_RES (2)..(3): Xaa is C or S
PXXVSQDLSSLSILFFIGKTPKILKVYPMIV

SEQ ID NO: 59716 - protein, 29 aa, Artificial Sequence
  Cyclic GFR-binding peptide
  MOD_RES (29)..(29): Xaa is C or S
VKTSSLSMLFFDNGRVLLLKVYPMIVEEX

SEQ ID NO: 59717 - protein, 31 aa, Artificial Sequence
  Cyclic GFR-binding peptide
  MOD_RES (28)..(30): Xaa is C or S
LSSLSVLFFDDSSNVILKVYPNMVVRSXGXH

SEQ ID NO: 59718 - protein, 33 aa, Artificial Sequence
  Cyclic GFR-binding peptide
  MOD_RES (30)..(32): Xaa is C or S
SSLSVLFFEYVRKKPKLLKVYPRLEEHLEXAXA

SEQ ID NO: 59719 - protein, 35 aa, Artificial Sequence
  Cyclic GFR-binding peptide
  MOD_RES (6)..(7): Xaa is C or S
RVPSTXXAPVKTSSLSMLFFDNGRVLLLKVYPMIV

SEQ ID NO: 59720 - protein, 36 aa, Artificial Sequence
  Cyclic GFR-binding peptide
  MOD_RES (1)..(1): Xaa is C or S
XQPSRVHHSSLSVLFFEYVRKKPKLLKVYPRLEEHL

SEQ ID NO: 59721 - protein, 21 aa, Artificial Sequence
  Cyclic GFR-binding peptide
SSLSILFFVGRKPKVLKVYPM

SEQ ID NO: 59722 - protein, 40 aa, Artificial Sequence
  Cyclic GFR-binding peptide
  MOD_RES (4)..(5)..(37)..(39): Xaa is C or S
PKAXXAPTKLSSLSVLFFDSSNNVILKVYPNMVVKAXGXH

SEQ ID NO: 59723 - protein, 32 aa, Artificial Sequence
  Cyclic GFR-binding peptide
  MOD_RES (6)..(7): Xaa is C or S
HVPKPXXAPTKLSSLSVLFFDDSSNVILKVYP

SEQ ID NO: 59724 - protein, 26 aa, Artificial Sequence
  Cyclic GFR-binding peptide
DLSSLSILFFVGRTPKVLKVYPMVVK

SEQ ID NO: 59725 - protein, 34 aa, Artificial Sequence
  Cyclic GFR-binding peptide
  MOD_RES (1)..(2)..(34): Xaa is C or S
XXAPTKLSSLSVLFFDDSSNVILKVYPNMVVRSX

SEQ ID NO: 59726 - protein, 31 aa, Artificial Sequence
  Cyclic GFR-binding peptide
  MOD_RES (30)..(30): Xaa is C or S
TKLSSLSVLFFDDSSNVILKVYPNMVVRSXG

SEQ ID NO: 59727 - protein, 32 aa, Artificial Sequence
  Cyclic GFR-binding peptide
  MOD_RES (30)..(32): Xaa is C or S
TRLSSLSILFFDSANNVVLKVYPDMVVESXGX

SEQ ID NO: 59728 - protein, 33 aa, Artificial Sequence
  Cyclic GFR-binding peptide
  MOD_RES (6)..(7): Xaa is C or S
GIPEPXXVPEKMSSLSILFFDENKNVVLKVYPN

SEQ ID NO: 59729 - protein, 30 aa, Artificial Sequence
  Cyclic GFR-binding peptide
  MOD_RES (1)..(2): Xaa is C or S
XXVPQALSSLSILFFVGRKPKVLKVYPMIV

SEQ ID NO: 59730 - protein, 20 aa, Artificial Sequence
  Cyclic GFR-binding peptide
SSLSMLFFNDKQQIILKVYP

SEQ ID NO: 59731 - protein, 38 aa, Artificial Sequence
  Cyclic GFR-binding peptide
  MOD_RES (5)..(6)..(38): Xaa is C or S
APASXXVPARLSSLSILFFDAANNVVLKVYPDMVVEAX

SEQ ID NO: 59732 - protein, 29 aa, Artificial Sequence
  Cyclic GFR-binding peptide
PTKLSSLSILFFDKGVVTYLKVYPGMAVS

SEQ ID NO: 59733 - protein, 34 aa, Artificial Sequence
  Cyclic GFR-binding peptide
  MOD_RES (6)..(7): Xaa is C or S
ASASPXXVPQDLSSLSILFFVGRTPKVLKVYPMV

SEQ ID NO: 59734 - protein, 35 aa, Artificial Sequence
  Cyclic GFR-binding peptide
  MOD_RES (2)..(2): Xaa is C or S
KXQPSRVHHSSLSVLFFEYVRKKPKLLKVYPRLEE

SEQ ID NO: 59735 - protein, 34 aa, Artificial Sequence
  Cyclic GFR-binding peptide
  MOD_RES (5)..(5): Xaa is C or S
TKPTXAPTKLSSLSVLFFDDSSNVILKVYPNMVV

SEQ ID NO: 59736 - protein, 26 aa, Artificial Sequence
  Cyclic GFR-binding peptide
KLSSLSVLFFDSSNNVILKVYPNMVV

SEQ ID NO: 59737 - protein, 29 aa, Artificial Sequence
  Cyclic GFR-binding peptide
  MOD_RES (28)..(28): Xaa is C or S
LSSLSVLFFDDSSNVILKVYPNMVVRSXG

SEQ ID NO: 59738 - protein, 33 aa, Artificial Sequence
  Cyclic GFR-binding peptide
  MOD_RES (3)..(4): Xaa is C or S
STXXAPVKTSSLSMLFFDNGRVLLLKVYPMIVE

SEQ ID NO: 59739 - protein, 28 aa, Artificial Sequence
  Cyclic GFR-binding peptide
  MOD_RES (2)..(3): Xaa is C or S
PXXTPTKMSSLSMLFFNDKQQIILKVYP

SEQ ID NO: 59740 - protein, 37 aa, Artificial Sequence
  Cyclic GFR-binding peptide
  MOD_RES (2)..(2): Xaa is C or S
KXQPSRVHHSSLSVLFFEYVRKKPKLLKVYPRLEEHL

SEQ ID NO: 59741 - protein, 31 aa, Artificial Sequence
  Cyclic GFR-binding peptide
  MOD_RES (3)..(4): Xaa is C or S
KAXXVPTKLSSLSVLFFDDMGVPTLKVYPEG

SEQ ID NO: 59742 - protein, 36 aa, Artificial Sequence
  Cyclic GFR-binding peptide
  MOD_RES (1)..(2)..(33)..(35): Xaa is C or S
XXVPQDLSSLSILFFVGRTPKVLKVYPMVVKSXKXS

SEQ ID NO: 59743 - protein, 28 aa, Artificial Sequence
  Cyclic GFR-binding peptide
EKMSSLSILFFDENKNVVLKVYPNMTVE

SEQ ID NO: 59744 - protein, 36 aa, Artificial Sequence
  Cyclic GFR-binding peptide
QPSRVHHSSLSVLFFEYVRKKPKLLKVYPRLEEHLE

SEQ ID NO: 59745 - protein, 23 aa, Artificial Sequence
  Cyclic GFR-binding peptide
TKLSSLSVLFFDDMGVPTLKVYP

SEQ ID NO: 59746 - protein, 35 aa, Artificial Sequence
  Cyclic GFR-binding peptide
  MOD_RES (33)..(35): Xaa is C or S
VHHSSLSVLFFEYVRKKPKLLKVYPRLEEHLEXAX

SEQ ID NO: 59747 - protein, 33 aa, Artificial Sequence
  Cyclic GFR-binding peptide
  MOD_RES (4)..(5): Xaa is C or S
GKAXXVPTKLSSLSVLFFDDMGVPTLKVYPEGM

SEQ ID NO: 59748 - protein, 33 aa, Artificial Sequence
  Cyclic GFR-binding peptide
  MOD_RES (5)..(6): Xaa is C or S
VPKAXXAPTKLSSLSVLFFDSSNNVILKVYPNM

SEQ ID NO: 59749 - protein, 26 aa, Artificial Sequence
  Cyclic GFR-binding peptide
LSSLSVLFFDDMGVPTLKVYPEGMSV

SEQ ID NO: 59750 - protein, 32 aa, Artificial Sequence
  Cyclic GFR-binding peptide
QPSRVHHSSLSVLFFEYVRKKPKLLKVYPRLE

SEQ ID NO: 59751 - protein, 31 aa, Artificial Sequence
  Cyclic GFR-binding peptide
PTKLSSLSVLFFDDMGVPTLKVYPEGMSVAE

SEQ ID NO: 59752 - protein, 26 aa, Artificial Sequence
  Cyclic GFR-binding peptide
QDLSSLSILFFVGRTPKVLKVYPMVV

SEQ ID NO: 59753 - protein, 25 aa, Artificial Sequence
  Cyclic GFR-binding peptide
KLSSLSVLFFDDSSNVILKVYPNMV

SEQ ID NO: 59754 - protein, 33 aa, Artificial Sequence
  Cyclic GFR-binding peptide
  MOD_RES (5)..(6): Xaa is C or S
VGKAXXVPTKLSSLSVLFFDDMGVPTLKVYPEG

SEQ ID NO: 59755 - protein, 38 aa, Artificial Sequence
  Cyclic GFR-binding peptide
  MOD_RES (5)..(6)..(38): Xaa is C or S
TPPTXXVPTRLSSLSILFFDSANNVVLKVYPDMVVESX

SEQ ID NO: 59756 - protein, 25 aa, Artificial Sequence
  Cyclic GFR-binding peptide
VPQALSSLSILFFVGRKPKVLKVYP

SEQ ID NO: 59757 - protein, 34 aa, Artificial Sequence
  Cyclic GFR-binding peptide
  MOD_RES (1)..(2)..(34): Xaa is C or S
XXVPTKLSSLSILFFDKGVVTYLKVYPGMAVSEX

SEQ ID NO: 59758 - protein, 22 aa, Artificial Sequence
  Cyclic GFR-binding peptide
ALSSLSILFFVGRKPKVLKVYP

SEQ ID NO: 59759 - protein, 33 aa, Artificial Sequence
  Cyclic GFR-binding peptide
  MOD_RES (1)..(1): Xaa is C or S
XVPTEESSLSMLFFRIKPHQGQHLKVYPFLQHN

SEQ ID NO: 59760 - protein, 26 aa, Artificial Sequence
  Cyclic GFR-binding peptide
  MOD_RES (1)..(1): Xaa is C or S
XVPEKMSSLSILFFDENKNVVLKVYP

SEQ ID NO: 59761 - protein, 35 aa, Artificial Sequence
  Cyclic GFR-binding peptide
  MOD_RES (2)..(3)..(35): Xaa is C or S
PXXTPTKMSSLSMLFFNDKQQIILKVYPGMVVDRX

SEQ ID NO: 59762 - protein, 27 aa, Artificial Sequence
  Cyclic GFR-binding peptide
TKLSSLSVLFFDSSNNVILKVYPNMVV

SEQ ID NO: 59763 - protein, 39 aa, Artificial Sequence
  Cyclic GFR-binding peptide
  MOD_RES (5)..(6)..(38): Xaa is C or S
ASKAXXVPTKLSSLSILFFDKGVVTYLKVYPGMAVSEXG

SEQ ID NO: 59764 - protein, 23 aa, Artificial Sequence
  Cyclic GFR-binding peptide
TKLSSLSILFFDKGVVTYLKVYP

SEQ ID NO: 59765 - protein, 39 aa, Artificial Sequence
  Cyclic GFR-binding peptide
  MOD_RES (2)..(36)..(38): Xaa is C or S
EXVPTEESSLSMLFFRIKPHQGQHLKVYPFLQHNKXEXR

SEQ ID NO: 59766 - protein, 32 aa, Artificial Sequence
  Cyclic GFR-binding peptide
  MOD_RES (2)..(3): Xaa is C or S
AXXAPTKLSSLSVLFFDSSNNVILKVYPNMVV

SEQ ID NO: 59767 - protein, 24 aa, Artificial Sequence
  Cyclic GFR-binding peptide
ALSSLSILFFVGRKPKVLKVYPMI

SEQ ID NO: 59768 - protein, 29 aa, Artificial Sequence
  Cyclic GFR-binding peptide
  MOD_RES (28)..(28): Xaa is C or S
ALSSLSILFFVGRKPKVLKVYPMIVRSXK

SEQ ID NO: 59769 - protein, 31 aa, Artificial Sequence
  Cyclic GFR-binding peptide
TEESSLSMLFFRIKPHQGQHLKVYPFLQHNK

SEQ ID NO: 59770 - protein, 32 aa, Artificial Sequence
  Cyclic GFR-binding peptide
  MOD_RES (2)..(2): Xaa is C or S
TXAPTKLSSLSVLFFDDSSNVILKVYPNMVVR

SEQ ID NO: 59771 - protein, 29 aa, Artificial Sequence
  Cyclic GFR-binding peptide
  MOD_RES (3)..(4): Xaa is C or S
PTXXVPTRLSSLSILFFDSANNVVLKVYP

SEQ ID NO: 59772 - protein, 27 aa, Artificial Sequence
  Cyclic GFR-binding peptide
TPTKMSSLSMLFFNDKQQIILKVYPGM

SEQ ID NO: 59773 - protein, 40 aa, Artificial Sequence
  Cyclic GFR-binding peptide
  MOD_RES (3)..(37)..(39): Xaa is C or S
LEXVPTEESSLSMLFFRIKPHQGQHLKVYPFLQHNKXEXR

SEQ ID NO: 59774 - protein, 33 aa, Artificial Sequence
  Cyclic GFR-binding peptide
  MOD_RES (1)..(32): Xaa is C or S
XAPVKTSSLSMLFFDNGRVLLLKVYPMIVEEXG

SEQ ID NO: 59775 - protein, 32 aa, Artificial Sequence
  Cyclic GFR-binding peptide
  MOD_RES (5)..(5): Xaa is C or S
TKPTXAPTKLSSLSVLFFDDSSNVILKVYPNM

SEQ ID NO: 59776 - protein, 32 aa, Artificial Sequence
  Cyclic GFR-binding peptide
  MOD_RES (29)..(31): Xaa is C or S
QDLSSLSILFFIGKTPKILKVYPMIVKSXKXS

SEQ ID NO: 59777 - protein, 31 aa, Artificial Sequence
  Cyclic GFR-binding peptide
  MOD_RES (1)..(2): Xaa is C or S
XXVPEKMSSLSILFFDENKNVVLKVYPNMTV

SEQ ID NO: 59778 - protein, 35 aa, Artificial Sequence
  Cyclic GFR-binding peptide
  MOD_RES (3)..(4): Xaa is C or S
GPXXTPTKMSSLSMLFFNDKQQIILKVYPGMVVDR

SEQ ID NO: 59779 - protein, 29 aa, Artificial Sequence
  Cyclic GFR-binding peptide
  MOD_RES (27)..(29): Xaa is C or S
SSLSVLFFDDSSNVILKVYPNMVVRSXGX

SEQ ID NO: 59780 - protein, 32 aa, Artificial Sequence
  Cyclic GFR-binding peptide
  MOD_RES (31)..(31): Xaa is C or S
PARLSSLSILFFDAANNVVLKVYPDMVVEAXG

SEQ ID NO: 59781 - protein, 36 aa, Artificial Sequence
  Cyclic GFR-binding peptide
  MOD_RES (3)..(3): Xaa is C or S
LEXVPTEESSLSMLFFRIKPHQGQHLKVYPFLQHNK

SEQ ID NO: 59782 - protein, 24 aa, Artificial Sequence
  Cyclic GFR-binding peptide
SSLSILFFDKGVVTYLKVYPGMAV

SEQ ID NO: 59783 - protein, 33 aa, Artificial Sequence
  Cyclic GFR-binding peptide
  MOD_RES (33)..(33): Xaa is C or S
VPTKLSSLSVLFFDDMGVPTLKVYPEGMSVAEX

SEQ ID NO: 59784 - protein, 29 aa, Artificial Sequence
  Cyclic GFR-binding peptide
TQLSSLSVLFFDDSSNVILKVYPNMVVRA

SEQ ID NO: 59785 - protein, 38 aa, Artificial Sequence
  Cyclic GFR-binding peptide
  MOD_RES (7)..(7): Xaa is C or S
NDEGLEXVPTEESSLSMLFFRIKPHQGQHLKVYPFLQH

SEQ ID NO: 59786 - protein, 39 aa, Artificial Sequence
  Cyclic GFR-binding peptide
  MOD_RES (5)..(6)..(38): Xaa is C or S
SAGPXXTPTKMSSLSMLFFNDKQQIILKVYPGMVVDRXG

SEQ ID NO: 59787 - protein, 24 aa, Artificial Sequence
  Cyclic GFR-binding peptide
SSLSVLFFDDMGVPTLKVYPEGMS

SEQ ID NO: 59788 - protein, 32 aa, Artificial Sequence
  Cyclic GFR-binding peptide
  MOD_RES (5)..(6): Xaa is C or S
VGKAXXVPTKLSSLSVLFFDDMGVPTLKVYPE

SEQ ID NO: 59789 - protein, 28 aa, Artificial Sequence
  Cyclic GFR-binding peptide
TKLSSLSILFFDKGVVTYLKVYPGMAVS

SEQ ID NO: 59790 - protein, 25 aa, Artificial Sequence
  Cyclic GFR-binding peptide
DLSSLSILFFIGKTPKILKVYPMIV

SEQ ID NO: 59791 - protein, 35 aa, Artificial Sequence
  Cyclic GFR-binding peptide
  MOD_RES (5)..(6): Xaa is C or S
SASPXXVPQDLSSLSILFFVGRTPKVLKVYPMVVK

SEQ ID NO: 59792 - protein, 32 aa, Artificial Sequence
  Cyclic GFR-binding peptide
  MOD_RES (2)..(3): Xaa is C or S
PXXVPEKMSSLSILFFDENKNVVLKVYPNMTV

SEQ ID NO: 59793 - protein, 36 aa, Artificial Sequence
  Cyclic GFR-binding peptide
  MOD_RES (34)..(36): Xaa is C or S
RVHHSSLSVLFFEYVRKKPKLLKVYPRLEEHLEXAX

SEQ ID NO: 59794 - protein, 25 aa, Artificial Sequence
  Cyclic GFR-binding peptide
SSLSILFFVGRKPKVLKVYPMIVRS

SEQ ID NO: 59795 - protein, 30 aa, Artificial Sequence
  Cyclic GFR-binding peptide
  MOD_RES (2)..(3): Xaa is C or S
PXXAPTQLSSLSVLFFDDSSNVILKVYPNM

SEQ ID NO: 59796 - protein, 27 aa, Artificial Sequence
  Cyclic GFR-binding peptide
  MOD_RES (1)..(1): Xaa is C or S
XVPQALSSLSILFFVGRKPKVLKVYPM

SEQ ID NO: 59797 - protein, 28 aa, Artificial Sequence
  Cyclic GFR-binding peptide
  MOD_RES (2)..(3): Xaa is C or S
SXXVPARLSSLSILFFDAANNVVLKVYP

SEQ ID NO: 59798 - protein, 24 aa, Artificial Sequence
  Cyclic GFR-binding peptide
PTKLSSLSVLFFDSSNNVILKVYP

SEQ ID NO: 59799 - protein, 31 aa, Artificial Sequence
  Cyclic GFR-binding peptide
  MOD_RES (28)..(30): Xaa is C or S
DLSSLSILFFVGRTPKVLKVYPMVVKSXKXS

SEQ ID NO: 59800 - protein, 34 aa, Artificial Sequence
  Cyclic GFR-binding peptide
  MOD_RES (1)..(32)..(34): Xaa is C or S
XVPQALSSLSILFFVGRKPKVLKVYPMIVRSXKX

SEQ ID NO: 59801 - protein, 35 aa, Artificial Sequence
  Cyclic GFR-binding peptide
  MOD_RES (6)..(7): Xaa is C or S
AVPKAXXAPTKLSSLSVLFFDSSNNVILKVYPNMV

SEQ ID NO: 59802 - protein, 33 aa, Artificial Sequence
  Cyclic GFR-binding peptide
  MOD_RES (5)..(6): Xaa is C or S
TPPTXXVPTRLSSLSILFFDSANNVVLKVYPDM

SEQ ID NO: 59803 - protein, 32 aa, Artificial Sequence
  Cyclic GFR-binding peptide
  MOD_RES (32)..(32): Xaa is C or S
HHSSLSVLFFEYVRKKPKLLKVYPRLEEHLEX

SEQ ID NO: 59804 - protein, 39 aa, Artificial Sequence
  Cyclic GFR-binding peptide
  MOD_RES (4)..(5)..(38): Xaa is C or S
GKAXXVPTKLSSLSVLFFDDMGVPTLKVYPEGMSVAEXG

SEQ ID NO: 59805 - protein, 29 aa, Artificial Sequence
  Cyclic GFR-binding peptide
VSQDLSSLSILFFIGKTPKILKVYPMIVK

SEQ ID NO: 59806 - protein, 22 aa, Artificial Sequence
  Cyclic GFR-binding peptide
SSLSMLFFDNGRVLLLKVYPMI

SEQ ID NO: 59807 - protein, 30 aa, Artificial Sequence
  Cyclic GFR-binding peptide
  MOD_RES (29)..(29): Xaa is C or S
QDLSSLSILFFIGKTPKILKVYPMIVKSXK

SEQ ID NO: 59808 - protein, 25 aa, Artificial Sequence
  Cyclic GFR-binding peptide
SSLSILFFIGKTPKILKVYPMIVKS

SEQ ID NO: 59809 - protein, 28 aa, Artificial Sequence
  Cyclic GFR-binding peptide
TRLSSLSILFFDSANNVVLKVYPDMVVE

SEQ ID NO: 59810 - protein, 25 aa, Artificial Sequence
  Cyclic GFR-binding peptide
LSSLSVLFFDSSNNVILKVYPNMVV

SEQ ID NO: 59811 - protein, 31 aa, Artificial Sequence
  Cyclic GFR-binding peptide
  MOD_RES (30)..(30): Xaa is C or S
ESSLSMLFFRIKPHQGQHLKVYPFLQHNKXE

SEQ ID NO: 59812 - protein, 36 aa, Artificial Sequence
  Cyclic GFR-binding peptide
  MOD_RES (4)..(4): Xaa is C or S
SVKXQPSRVHHSSLSVLFFEYVRKKPKLLKVYPRLE

SEQ ID NO: 59813 - protein, 22 aa, Artificial Sequence
  Cyclic GFR-binding peptide
RLSSLSILFFDAANNVVLKVYP

SEQ ID NO: 59814 - protein, 36 aa, Artificial Sequence
  Cyclic GFR-binding peptide
  MOD_RES (3)..(35): Xaa is C or S
PTXAPTKLSSLSVLFFDDSSNVILKVYPNMVVRSXG

SEQ ID NO: 59815 - protein, 30 aa, Artificial Sequence
  Cyclic GFR-binding peptide
  MOD_RES (29)..(29): Xaa is C or S
RLSSLSILFFDAANNVVLKVYPDMVVEAXG

SEQ ID NO: 59816 - protein, 25 aa, Artificial Sequence
  Cyclic GFR-binding peptide
SSLSVLFFDDMGVPTLKVYPEGMSV

SEQ ID NO: 59817 - protein, 39 aa, Artificial Sequence
  Cyclic GFR-binding peptide
  MOD_RES (6)..(7)..(39): Xaa is C or S
AVPKAXXAPTKLSSLSVLFFDSSNNVILKVYPNMVVKAX

SEQ ID NO: 59818 - protein, 28 aa, Artificial Sequence
  Cyclic GFR-binding peptide
  MOD_RES (27)..(27): Xaa is C or S
SSLSILFFDKGVVTYLKVYPGMAVSEXG

SEQ ID NO: 59819 - protein, 42 aa, Artificial Sequence
  Cyclic GFR-binding peptide
  MOD_RES (2)..(39)..(41): Xaa is C or S
KXQPSRVHHSSLSVLFFEYVRKKPKLLKVYPRLEEHLEXAXA

SEQ ID NO: 59820 - protein, 34 aa, Artificial Sequence
  Cyclic GFR-binding peptide
  MOD_RES (1)..(2)..(34): Xaa is C or S
XXVPEKMSSLSILFFDENKNVVLKVYPNMTVESX

SEQ ID NO: 59821 - protein, 29 aa, Artificial Sequence
  Cyclic GFR-binding peptide
  MOD_RES (27)..(29): Xaa is C or S
SSLSILFFDENKNVVLKVYPNMTVESXAX

SEQ ID NO: 59822 - protein, 26 aa, Artificial Sequence
  Cyclic GFR-binding peptide
VSQDLSSLSILFFIGKTPKILKVYPM

SEQ ID NO: 59823 - protein, 34 aa, Artificial Sequence
  Cyclic GFR-binding peptide
  MOD_RES (3)..(4): Xaa is C or S
KAXXVPTKLSSLSVLFFDDMGVPTLKVYPEGMSV

SEQ ID NO: 59824 - protein, 40 aa, Artificial Sequence
  Cyclic GFR-binding peptide
  MOD_RES (6)..(7)..(39): Xaa is C or S
GSAGPXXTPTKMSSLSMLFFNDKQQIILKVYPGMVVDRXG

SEQ ID NO: 59825 - protein, 20 aa, Artificial Sequence
  Cyclic GFR-binding peptide
SSLSVLFFDSSNNVILKVYP

SEQ ID NO: 59826 - protein, 35 aa, Artificial Sequence
  Cyclic GFR-binding peptide
  MOD_RES (1)..(33)..(35): Xaa is C or S
XVPEKMSSLSILFFDENKNVVLKVYPNMTVESXAX

SEQ ID NO: 59827 - protein, 27 aa, Artificial Sequence
  Cyclic GFR-binding peptide
PTKLSSLSILFFDKGVVTYLKVYPGMA

SEQ ID NO: 59828 - protein, 34 aa, Artificial Sequence
  Cyclic GFR-binding peptide
  MOD_RES (2)..(3): Xaa is C or S
AXXVPTKLSSLSILFFDKGVVTYLKVYPGMAVSE

SEQ ID NO: 59829 - protein, 24 aa, Artificial Sequence
  Cyclic GFR-binding peptide
DLSSLSILFFIGKTPKILKVYPMI

SEQ ID NO: 59830 - protein, 34 aa, Artificial Sequence
  Cyclic GFR-binding peptide
  MOD_RES (6)..(7): Xaa is C or S
ASASPXXVSQDLSSLSILFFIGKTPKILKVYPMI

SEQ ID NO: 59831 - protein, 29 aa, Artificial Sequence
  Cyclic GFR-binding peptide
VPTEESSLSMLFFRIKPHQGQHLKVYPFL

SEQ ID NO: 59832 - protein, 31 aa, Artificial Sequence
  Cyclic GFR-binding peptide
  MOD_RES (29)..(31): Xaa is C or S
KMSSLSMLFFNDKQQIILKVYPGMVVDRXGX

SEQ ID NO: 59833 - protein, 32 aa, Artificial Sequence
  Cyclic GFR-binding peptide
  MOD_RES (1)..(2): Xaa is C or S
XXVSQDLSSLSILFFIGKTPKILKVYPMIVKS

SEQ ID NO: 59834 - protein, 33 aa, Artificial Sequence
  Cyclic GFR-binding peptide
  MOD_RES (1)..(2): Xaa is C or S
XXAPTKLSSLSVLFFDSSNNVILKVYPNMVVKA

SEQ ID NO: 59835 - protein, 33 aa, Artificial Sequence
  Cyclic GFR-binding peptide
  MOD_RES (31)..(33): Xaa is C or S
VPQDLSSLSILFFVGRTPKVLKVYPMVVKSXKX

SEQ ID NO: 59836 - protein, 30 aa, Artificial Sequence
  Cyclic GFR-binding peptide
  MOD_RES (29)..(29): Xaa is C or S
QLSSLSVLFFDDSSNVILKVYPNMVVRAXG

SEQ ID NO: 59837 - protein, 25 aa, Artificial Sequence
  Cyclic GFR-binding peptide
KLSSLSVLFFDSSNNVILKVYPNMV

SEQ ID NO: 59838 - protein, 25 aa, Artificial Sequence
  Cyclic GFR-binding peptide
KLSSLSILFFDKGVVTYLKVYPGMA

SEQ ID NO: 59839 - protein, 34 aa, Artificial Sequence
  Cyclic GFR-binding peptide
  MOD_RES (6)..(7): Xaa is C or S
YVPKPXXAPTKLSSLSVLFFDDSSNVILKVYPNM

SEQ ID NO: 59840 - protein, 38 aa, Artificial Sequence
  Cyclic GFR-binding peptide
  MOD_RES (6)..(7)..(38): Xaa is C or S
ASAAPXXVPQALSSLSILFFVGRKPKVLKVYPMIVRSX

SEQ ID NO: 59841 - protein, 34 aa, Artificial Sequence
  Cyclic GFR-binding peptide
  MOD_RES (5)..(6): Xaa is C or S
APASXXVPARLSSLSILFFDAANNVVLKVYPDMV

SEQ ID NO: 59842 - protein, 24 aa, Artificial Sequence
  Cyclic GFR-binding peptide
KLSSLSVLFFDDSSNVILKVYPNM

SEQ ID NO: 59843 - protein, 33 aa, Artificial Sequence
  Cyclic GFR-binding peptide
  MOD_RES (6)..(7): Xaa is C or S
ASASPXXVPQDLSSLSILFFVGRTPKVLKVYPM

SEQ ID NO: 59844 - protein, 31 aa, Artificial Sequence
  Cyclic GFR-binding peptide
VPTEESSLSMLFFRIKPHQGQHLKVYPFLQH

SEQ ID NO: 59845 - protein, 21 aa, Artificial Sequence
  Cyclic GFR-binding peptide
LSSLSILFFIGKTPKILKVYP

SEQ ID NO: 59846 - protein, 24 aa, Artificial Sequence
  Cyclic GFR-binding peptide
RLSSLSILFFDSANNVVLKVYPDM

SEQ ID NO: 59847 - protein, 31 aa, Artificial Sequence
  Cyclic GFR-binding peptide
  MOD_RES (5)..(6): Xaa is C or S
VPKPXXAPTQLSSLSVLFFDDSSNVILKVYP

SEQ ID NO: 59848 - protein, 27 aa, Artificial Sequence
  Cyclic GFR-binding peptide
LSSLSILFFDAANNVVLKVYPDMVVEA

SEQ ID NO: 59849 - protein, 32 aa, Artificial Sequence
  Cyclic GFR-binding peptide
  MOD_RES (1)..(32): Xaa is C or S
XVPQALSSLSILFFVGRKPKVLKVYPMIVRSX

SEQ ID NO: 59850 - protein, 28 aa, Artificial Sequence
  Cyclic GFR-binding peptide
  MOD_RES (1)..(2): Xaa is C or S
XXVPTRLSSLSILFFDSANNVVLKVYPD

SEQ ID NO: 59851 - protein, 27 aa, Artificial Sequence
  Cyclic GFR-binding peptide
PTKLSSLSVLFFDDSSNVILKVYPNMV

SEQ ID NO: 59852 - protein, 29 aa, Artificial Sequence
  Cyclic GFR-binding peptide
  MOD_RES (1)..(2): Xaa is C or S
XXVPTKLSSLSILFFDKGVVTYLKVYPGM

SEQ ID NO: 59853 - protein, 30 aa, Artificial Sequence
  Cyclic GFR-binding peptide
  MOD_RES (30)..(30): Xaa is C or S
SQDLSSLSILFFIGKTPKILKVYPMIVKSX

SEQ ID NO: 59854 - protein, 31 aa, Artificial Sequence
  Cyclic GFR-binding peptide
  MOD_RES (31)..(31): Xaa is C or S
VPQDLSSLSILFFVGRTPKVLKVYPMVVKSX

SEQ ID NO: 59855 - protein, 32 aa, Artificial Sequence
  Cyclic GFR-binding peptide
  MOD_RES (30)..(32): Xaa is C or S
PQDLSSLSILFFVGRTPKVLKVYPMVVKSXKX

SEQ ID NO: 59856 - protein, 26 aa, Artificial Sequence
  Cyclic GFR-binding peptide
SSLSILFFDKGVVTYLKVYPGMAVSE

SEQ ID NO: 59857 - protein, 33 aa, Artificial Sequence
  Cyclic GFR-binding peptide
  MOD_RES (31)..(33): Xaa is C or S
PTKLSSLSILFFDKGVVTYLKVYPGMAVSEXGX

SEQ ID NO: 59858 - protein, 36 aa, Artificial Sequence
  Cyclic GFR-binding peptide
  MOD_RES (4)..(5): Xaa is C or S
PASXXVPARLSSLSILFFDAANNVVLKVYPDMVVEA

SEQ ID NO: 59859 - protein, 27 aa, Artificial Sequence
  Cyclic GFR-binding peptide
LSSLSILFFDSANNVVLKVYPDMVVES

SEQ ID NO: 59860 - protein, 29 aa, Artificial Sequence
  Cyclic GFR-binding peptide
  MOD_RES (28)..(28): Xaa is C or S
LSSLSILFFDAANNVVLKVYPDMVVEAXG

SEQ ID NO: 59861 - protein, 35 aa, Artificial Sequence
  Cyclic GFR-binding peptide
  MOD_RES (2)..(3)..(34): Xaa is C or S
PXXVPQALSSLSILFFVGRKPKVLKVYPMIVRSXK

SEQ ID NO: 59862 - protein, 38 aa, Artificial Sequence
  Cyclic GFR-binding peptide
  MOD_RES (6)..(7): Xaa is C or S
YVPKPXXAPTKLSSLSVLFFDDSSNVILKVYPNMVVRS

SEQ ID NO: 59863 - protein, 33 aa, Artificial Sequence
  Cyclic GFR-binding peptide
  MOD_RES (6)..(7): Xaa is C or S
GSAGPXXTPTKMSSLSMLFFNDKQQIILKVYPG

SEQ ID NO: 59864 - protein, 28 aa, Artificial Sequence
  Cyclic GFR-binding peptide
  MOD_RES (27)..(27): Xaa is C or S
SSLSVLFFDDSSNVILKVYPNMVVRAXG

SEQ ID NO: 59865 - protein, 30 aa, Artificial Sequence
  Cyclic GFR-binding peptide
  MOD_RES (1)..(1): Xaa is C or S
XTPTKMSSLSMLFFNDKQQIILKVYPGMVV

SEQ ID NO: 59866 - protein, 33 aa, Artificial Sequence
  Cyclic GFR-binding peptide
  MOD_RES (30)..(32): Xaa is C or S
TKMSSLSMLFFNDKQQIILKVYPGMVVDRXGXS

SEQ ID NO: 59867 - protein, 28 aa, Artificial Sequence
  Cyclic GFR-binding peptide
SSLSMLFFRIKPHQGQHLKVYPFLQHNK

SEQ ID NO: 59868 - protein, 29 aa, Artificial Sequence
  Cyclic GFR-binding peptide
  MOD_RES (1)..(1): Xaa is C or S
XVPQDLSSLSILFFVGRTPKVLKVYPMVV

SEQ ID NO: 59869 - protein, 33 aa, Artificial Sequence
  Cyclic GFR-binding peptide
  MOD_RES (2)..(3): Xaa is C or S
PXXVPQALSSLSILFFVGRKPKVLKVYPMIVRS

SEQ ID NO: 59870 - protein, 36 aa, Artificial Sequence
  Cyclic GFR-binding peptide
  MOD_RES (4)..(5): Xaa is C or S
GKAXXVPTKLSSLSVLFFDDMGVPTLKVYPEGMSVA

SEQ ID NO: 59871 - protein, 31 aa, Artificial Sequence
  Cyclic GFR-binding peptide
  MOD_RES (29)..(31): Xaa is C or S
QDLSSLSILFFVGRTPKVLKVYPMVVKSXKX

SEQ ID NO: 59872 - protein, 40 aa, Artificial Sequence
  Cyclic GFR-binding peptide
  MOD_RES (4)..(5)..(37)..(39): Xaa is C or S
PPTXXVPTRLSSLSILFFDSANNVVLKVYPDMVVESXGXR

SEQ ID NO: 59873 - protein, 40 aa, Artificial Sequence
  Cyclic GFR-binding peptide
  MOD_RES (7)..(39): Xaa is C or S
HVTKPTXAPTKLSSLSVLFFDDSSNVILKVYPNMVVRSXG

SEQ ID NO: 59874 - protein, 33 aa, Artificial Sequence
  Cyclic GFR-binding peptide
  MOD_RES (5)..(6): Xaa is C or S
SAAPXXVPQALSSLSILFFVGRKPKVLKVYPMI

SEQ ID NO: 59875 - protein, 29 aa, Artificial Sequence
  Cyclic GFR-binding peptide
  MOD_RES (29)..(29): Xaa is C or S
KMSSLSMLFFNDKQQIILKVYPGMVVDRX

SEQ ID NO: 59876 - protein, 33 aa, Artificial Sequence
  Cyclic GFR-binding peptide
  MOD_RES (2)..(3): Xaa is C or S
PXXAPTKLSSLSVLFFDDSSNVILKVYPNMVVR

SEQ ID NO: 59877 - protein, 34 aa, Artificial Sequence
  Cyclic GFR-binding peptide
  MOD_RES (32)..(34): Xaa is C or S
APTKLSSLSVLFFDDSSNVILKVYPNMVVRSXGX

SEQ ID NO: 59878 - protein, 38 aa, Artificial Sequence
  Cyclic GFR-binding peptide
  MOD_RES (3)..(4)..(35)..(37): Xaa is C or S
SPXXVPQDLSSLSILFFVGRTPKVLKVYPMVVKSXKXS

SEQ ID NO: 59879 - protein, 38 aa, Artificial Sequence
  Cyclic GFR-binding peptide
  MOD_RES (6)..(7)..(38): Xaa is C or S
RVPSTXXAPVKTSSLSMLFFDNGRVLLLKVYPMIVEEX

SEQ ID NO: 59880 - protein, 30 aa, Artificial Sequence
  Cyclic GFR-binding peptide
  MOD_RES (28)..(30): Xaa is C or S
MSSLSILFFDENKNVVLKVYPNMTVESXAX

SEQ ID NO: 59881 - protein, 31 aa, Artificial Sequence
  Cyclic GFR-binding peptide
  MOD_RES (29)..(31): Xaa is C or S
RLSSLSILFFDAANNVVLKVYPDMVVEAXGX

SEQ ID NO: 59882 - protein, 36 aa, Artificial Sequence
  Cyclic GFR-binding peptide
  MOD_RES (1)..(2)..(34)..(36): Xaa is C or S
XXVPARLSSLSILFFDAANNVVLKVYPDMVVEAXGX

SEQ ID NO: 59883 - protein, 35 aa, Artificial Sequence
  Cyclic GFR-binding peptide
  MOD_RES (5)..(5): Xaa is C or S
EGLEXVPTEESSLSMLFFRIKPHQGQHLKVYPFLQ

SEQ ID NO: 59884 - protein, 23 aa, Artificial Sequence
  Cyclic GFR-binding peptide
TKLSSLSVLFFDDSSNVILKVYP

SEQ ID NO: 59885 - protein, 36 aa, Artificial Sequence
  Cyclic GFR-binding peptide
  MOD_RES (5)..(6): Xaa is C or S
VGKAXXVPTKLSSLSVLFFDDMGVPTLKVYPEGMSV

SEQ ID NO: 59886 - protein, 30 aa, Artificial Sequence
  Cyclic GFR-binding peptide
  MOD_RES (4)..(5): Xaa is C or S
PASXXVPARLSSLSILFFDAANNVVLKVYP

SEQ ID NO: 59887 - protein, 33 aa, Artificial Sequence
  Cyclic GFR-binding peptide
  MOD_RES (2)..(3): Xaa is C or S
TXXVPTRLSSLSILFFDSANNVVLKVYPDMVVE

SEQ ID NO: 59888 - protein, 29 aa, Artificial Sequence
  Cyclic GFR-binding peptide
  MOD_RES (1)..(1): Xaa is C or S
XAPVKTSSLSMLFFDNGRVLLLKVYPMIV

SEQ ID NO: 59889 - protein, 33 aa, Artificial Sequence
  Cyclic GFR-binding peptide
  MOD_RES (3)..(4): Xaa is C or S
ASXXVPARLSSLSILFFDAANNVVLKVYPDMVV

SEQ ID NO: 59890 - protein, 44 aa, Artificial Sequence
  Cyclic GFR-binding peptide
  MOD_RES (7)..(41)..(43): Xaa is C or S
NDEGLEXVPTEESSLSMLFFRIKPHQGQHLKVYPFLQHNKXEXR

SEQ ID NO: 59891 - protein, 31 aa, Artificial Sequence
  Cyclic GFR-binding peptide
  MOD_RES (30)..(30): Xaa is C or S
KLSSLSVLFFDDMGVPTLKVYPEGMSVAEXG

SEQ ID NO: 59892 - protein, 37 aa, Artificial Sequence
  Cyclic GFR-binding peptide
  MOD_RES (5)..(5): Xaa is C or S
EGLEXVPTEESSLSMLFFRIKPHQGQHLKVYPFLQHN

SEQ ID NO: 59893 - protein, 31 aa, Artificial Sequence
  Cyclic GFR-binding peptide
PSRVHHSSLSVLFFEYVRKKPKLLKVYPRLE

SEQ ID NO: 59894 - protein, 41 aa, Artificial Sequence
  Cyclic GFR-binding peptide
  MOD_RES (6)..(7)..(39)..(41): Xaa is C or S
AAPASXXVPARLSSLSILFFDAANNVVLKVYPDMVVEAXGX

SEQ ID NO: 59895 - protein, 38 aa, Artificial Sequence
  Cyclic GFR-binding peptide
  MOD_RES (3)..(4)..(37): Xaa is C or S
KAXXVPTKLSSLSVLFFDDMGVPTLKVYPEGMSVAEXG

SEQ ID NO: 59896 - protein, 23 aa, Artificial Sequence
  Cyclic GFR-binding peptide
SSLSVLFFDSSNNVILKVYPNMV

SEQ ID NO: 59897 - protein, 26 aa, Artificial Sequence
  Cyclic GFR-binding peptide
SSLSMLFFRIKPHQGQHLKVYPFLQH

SEQ ID NO: 59898 - protein, 33 aa, Artificial Sequence
  Cyclic GFR-binding peptide
  MOD_RES (2)..(2): Xaa is C or S
TXAPTKLSSLSVLFFDDSSNVILKVYPNMVVRS

SEQ ID NO: 59899 - protein, 32 aa, Artificial Sequence
  Cyclic GFR-binding peptide
  MOD_RES (31)..(31): Xaa is C or S
VSQDLSSLSILFFIGKTPKILKVYPMIVKSXK

SEQ ID NO: 59900 - protein, 34 aa, Artificial Sequence
  Cyclic GFR-binding peptide
  MOD_RES (1)..(2): Xaa is C or S
XXVPTKLSSLSVLFFDDMGVPTLKVYPEGMSVAE

SEQ ID NO: 59901 - protein, 34 aa, Artificial Sequence
  Cyclic GFR-binding peptide
  MOD_RES (32)..(34): Xaa is C or S
TPTKMSSLSMLFFNDKQQIILKVYPGMVVDRXGX

SEQ ID NO: 59902 - protein, 31 aa, Artificial Sequence
  Cyclic GFR-binding peptide
  MOD_RES (5)..(6): Xaa is C or S
SASPXXVPQDLSSLSILFFVGRTPKVLKVYP

SEQ ID NO: 59903 - protein, 30 aa, Artificial Sequence
  Cyclic GFR-binding peptide
PTEESSLSMLFFRIKPHQGQHLKVYPFLQH

SEQ ID NO: 59904 - protein, 32 aa, Artificial Sequence
  Cyclic GFR-binding peptide
  MOD_RES (31)..(31): Xaa is C or S
HSSLSVLFFEYVRKKPKLLKVYPRLEEHLEXA

SEQ ID NO: 59905 - protein, 38 aa, Artificial Sequence
  Cyclic GFR-binding peptide
  MOD_RES (4)..(5)..(37): Xaa is C or S
PKPXXAPTQLSSLSVLFFDDSSNVILKVYPNMVVRAXG

SEQ ID NO: 59906 - protein, 39 aa, Artificial Sequence
  Cyclic GFR-binding peptide
  MOD_RES (4)..(5)..(36)..(38): Xaa is C or S
ASPXXVSQDLSSLSILFFIGKTPKILKVYPMIVKSXKXS

SEQ ID NO: 59907 - protein, 23 aa, Artificial Sequence
  Cyclic GFR-binding peptide
DLSSLSILFFIGKTPKILKVYPM

SEQ ID NO: 59908 - protein, 38 aa, Artificial Sequence
  Cyclic GFR-binding peptide
  MOD_RES (4)..(5)..(37): Xaa is C or S
PEPXXVPEKMSSLSILFFDENKNVVLKVYPNMTVESXA

SEQ ID NO: 59909 - protein, 34 aa, Artificial Sequence
  Cyclic GFR-binding peptide
  MOD_RES (1)..(33): Xaa is C or S
XVPEKMSSLSILFFDENKNVVLKVYPNMTVESXA

SEQ ID NO: 59910 - protein, 39 aa, Artificial Sequence
  Cyclic GFR-binding peptide
  MOD_RES (5)..(6)..(37)..(39): Xaa is C or S
SASPXXVSQDLSSLSILFFIGKTPKILKVYPMIVKSXKX

SEQ ID NO: 59911 - protein, 29 aa, Artificial Sequence
  Cyclic GFR-binding peptide
  MOD_RES (28)..(28): Xaa is C or S
MSSLSILFFDENKNVVLKVYPNMTVESXA

SEQ ID NO: 59912 - protein, 37 aa, Artificial Sequence
  Cyclic GFR-binding peptide
  MOD_RES (1)..(2)..(34)..(36): Xaa is C or S
XXVPTRLSSLSILFFDSANNVVLKVYPDMVVESXGXR

SEQ ID NO: 59913 - protein, 38 aa, Artificial Sequence
  Cyclic GFR-binding peptide
  MOD_RES (4)..(5)..(38): Xaa is C or S
GKAXXVPTKLSSLSVLFFDDMGVPTLKVYPEGMSVAEX

SEQ ID NO: 59914 - protein, 37 aa, Artificial Sequence
  Cyclic GFR-binding peptide
  MOD_RES (4)..(5)..(36): Xaa is C or S
PSTXXAPVKTSSLSMLFFDNGRVLLLKVYPMIVEEXG

SEQ ID NO: 59915 - protein, 39 aa, Artificial Sequence
  Cyclic GFR-binding peptide
  MOD_RES (5)..(6)..(38): Xaa is C or S
VPKPXXAPTQLSSLSVLFFDDSSNVILKVYPNMVVRAXG

SEQ ID NO: 59916 - protein, 29 aa, Artificial Sequence
  Cyclic GFR-binding peptide
TKMSSLSMLFFNDKQQIILKVYPGMVVDR

SEQ ID NO: 59917 - protein, 41 aa, Artificial Sequence
  Cyclic GFR-binding peptide
  MOD_RES (1)..(38)..(40): Xaa is C or S
XQPSRVHHSSLSVLFFEYVRKKPKLLKVYPRLEEHLEXAXA

SEQ ID NO: 59918 - protein, 24 aa, Artificial Sequence
  Cyclic GFR-binding peptide
KLSSLSILFFDKGVVTYLKVYPGM

SEQ ID NO: 59919 - protein, 31 aa, Artificial Sequence
  Cyclic GFR-binding peptide
  MOD_RES (1)..(2): Xaa is C or S
XXVPTRLSSLSILFFDSANNVVLKVYPDMVV

SEQ ID NO: 59920 - protein, 30 aa, Artificial Sequence
  Cyclic GFR-binding peptide
VPTRLSSLSILFFDSANNVVLKVYPDMVVE

SEQ ID NO: 59921 - protein, 23 aa, Artificial Sequence
  Cyclic GFR-binding peptide
ARLSSLSILFFDAANNVVLKVYP

SEQ ID NO: 59922 - protein, 34 aa, Artificial Sequence
  Cyclic GFR-binding peptide
  MOD_RES (5)..(6): Xaa is C or S
VPKPXXAPTQLSSLSVLFFDDSSNVILKVYPNMV

SEQ ID NO: 59923 - protein, 31 aa, Artificial Sequence
  Cyclic GFR-binding peptide
VPTKLSSLSVLFFDDMGVPTLKVYPEGMSVA

SEQ ID NO: 59924 - protein, 29 aa, Artificial Sequence
  Cyclic GFR-binding peptide
SSLSVLFFEYVRKKPKLLKVYPRLEEHLE

SEQ ID NO: 59925 - protein, 25 aa, Artificial Sequence
  Cyclic GFR-binding peptide
APTKLSSLSVLFFDDSSNVILKVYP

SEQ ID NO: 59926 - protein, 37 aa, Artificial Sequence
  Cyclic GFR-binding peptide
  MOD_RES (3)..(37): Xaa is C or S
LEXVPTEESSLSMLFFRIKPHQGQHLKVYPFLQHNKX

SEQ ID NO: 59927 - protein, 26 aa, Artificial Sequence
  Cyclic GFR-binding peptide
MSSLSMLFFNDKQQIILKVYPGMVVD

SEQ ID NO: 59928 - protein, 24 aa, Artificial Sequence
  Cyclic GFR-binding peptide
EESSLSMLFFRIKPHQGQHLKVYP

SEQ ID NO: 59929 - protein, 28 aa, Artificial Sequence
  Cyclic GFR-binding peptide
KMSSLSMLFFNDKQQIILKVYPGMVVDR

SEQ ID NO: 59930 - protein, 29 aa, Artificial Sequence
  Cyclic GFR-binding peptide
VPTKLSSLSILFFDKGVVTYLKVYPGMAV

SEQ ID NO: 59931 - protein, 37 aa, Artificial Sequence
  Cyclic GFR-binding peptide
  MOD_RES (3)..(4)..(36): Xaa is C or S
KPXXAPTKLSSLSVLFFDDSSNVILKVYPNMVVRSXG

SEQ ID NO: 59932 - protein, 34 aa, Artificial Sequence
  Cyclic GFR-binding peptide
  MOD_RES (2)..(34): Xaa is C or S
TXAPTKLSSLSVLFFDDSSNVILKVYPNMVVRSX

SEQ ID NO: 59933 - protein, 33 aa, Artificial Sequence
  Cyclic GFR-binding peptide
  MOD_RES (31)..(33): Xaa is C or S
PARLSSLSILFFDAANNVVLKVYPDMVVEAXGX

SEQ ID NO: 59934 - protein, 22 aa, Artificial Sequence
  Cyclic GFR-binding peptide
KMSSLSMLFFNDKQQIILKVYP

SEQ ID NO: 59935 - protein, 28 aa, Artificial Sequence
  Cyclic GFR-binding peptide
  MOD_RES (27)..(27): Xaa is C or S
LSSLSILFFVGRTPKVLKVYPMVVKSXK

SEQ ID NO: 59936 - protein, 36 aa, Artificial Sequence
  Cyclic GFR-binding peptide
  MOD_RES (6)..(7): Xaa is C or S
GSAGPXXTPTKMSSLSMLFFNDKQQIILKVYPGMVV

SEQ ID NO: 59937 - protein, 34 aa, Artificial Sequence
  Cyclic GFR-binding peptide
  MOD_RES (1)..(2)..(33): Xaa is C or S
XXAPVKTSSLSMLFFDNGRVLLLKVYPMIVEEXG

SEQ ID NO: 59938 - protein, 32 aa, Artificial Sequence
  Cyclic GFR-binding peptide
  MOD_RES (32)..(32): Xaa is C or S
VPARLSSLSILFFDAANNVVLKVYPDMVVEAX

SEQ ID NO: 59939 - protein, 26 aa, Artificial Sequence
  Cyclic GFR-binding peptide
VHHSSLSVLFFEYVRKKPKLLKVYPR

SEQ ID NO: 59940 - protein, 27 aa, Artificial Sequence
  Cyclic GFR-binding peptide
VPTKLSSLSVLFFDDMGVPTLKVYPEG

SEQ ID NO: 59941 - protein, 40 aa, Artificial Sequence
  Cyclic GFR-binding peptide
  MOD_RES (5)..(39): Xaa is C or S
EGLEXVPTEESSLSMLFFRIKPHQGQHLKVYPFLQHNKXE

SEQ ID NO: 59942 - protein, 36 aa, Artificial Sequence
  Cyclic GFR-binding peptide
  MOD_RES (1)..(35): Xaa is C or S
XVPTEESSLSMLFFRIKPHQGQHLKVYPFLQHNKXE

SEQ ID NO: 59943 - protein, 38 aa, Artificial Sequence
  Cyclic GFR-binding peptide
  MOD_RES (5)..(6): Xaa is C or S
VGKAXXVPTKLSSLSVLFFDDMGVPTLKVYPEGMSVAE

SEQ ID NO: 59944 - protein, 29 aa, Artificial Sequence
  Cyclic GFR-binding peptide
PTKLSSLSVLFFDSSNNVILKVYPNMVVK

SEQ ID NO: 59945 - protein, 34 aa, Artificial Sequence
  Cyclic GFR-binding peptide
  MOD_RES (1)..(2)..(33): Xaa is C or S
XXVSQDLSSLSILFFIGKTPKILKVYPMIVKSXK

SEQ ID NO: 59946 - protein, 42 aa, Artificial Sequence
  Cyclic GFR-binding peptide
  MOD_RES (4)..(41): Xaa is C or S
SVKXQPSRVHHSSLSVLFFEYVRKKPKLLKVYPRLEEHLEXA

SEQ ID NO: 59947 - protein, 31 aa, Artificial Sequence
  Cyclic GFR-binding peptide
  MOD_RES (1)..(1): Xaa is C or S
XQPSRVHHSSLSVLFFEYVRKKPKLLKVYPR

SEQ ID NO: 59948 - protein, 31 aa, Artificial Sequence
  Cyclic GFR-binding peptide
  MOD_RES (29)..(31): Xaa is C or S
LSSLSVLFFDDMGVPTLKVYPEGMSVAEXGX

SEQ ID NO: 59949 - protein, 41 aa, Artificial Sequence
  Cyclic GFR-binding peptide
  MOD_RES (6)..(7)..(39)..(41): Xaa is C or S
YVPKPXXAPTKLSSLSVLFFDDSSNVILKVYPNMVVRSXGX

SEQ ID NO: 59950 - protein, 26 aa, Artificial Sequence
  Cyclic GFR-binding peptide
VPQDLSSLSILFFVGRTPKVLKVYPM

SEQ ID NO: 59951 - protein, 38 aa, Artificial Sequence
  Cyclic GFR-binding peptide
  MOD_RES (3)..(37): Xaa is C or S
LEXVPTEESSLSMLFFRIKPHQGQHLKVYPFLQHNKXE

SEQ ID NO: 59952 - protein, 38 aa, Artificial Sequence
  Cyclic GFR-binding peptide
  MOD_RES (6)..(7)..(38): Xaa is C or S
ASASPXXVSQDLSSLSILFFIGKTPKILKVYPMIVKSX

SEQ ID NO: 59953 - protein, 27 aa, Artificial Sequence
  Cyclic GFR-binding peptide
  MOD_RES (1)..(1): Xaa is C or S
XVSQDLSSLSILFFIGKTPKILKVYPM

SEQ ID NO: 59954 - protein, 39 aa, Artificial Sequence
  Cyclic GFR-binding peptide
  MOD_RES (6)..(7)..(39): Xaa is C or S
HVPKPXXAPTKLSSLSVLFFDDSSNVILKVYPNMVVRSX

SEQ ID NO: 59955 - protein, 30 aa, Artificial Sequence
  Cyclic GFR-binding peptide
  MOD_RES (27)..(29): Xaa is C or S
SSLSILFFDKGVVTYLKVYPGMAVSEXGXR

SEQ ID NO: 59956 - protein, 31 aa, Artificial Sequence
  Cyclic GFR-binding peptide
  MOD_RES (3)..(3): Xaa is C or S
LEXVPTEESSLSMLFFRIKPHQGQHLKVYPF

SEQ ID NO: 59957 - protein, 31 aa, Artificial Sequence
  Cyclic GFR-binding peptide
  MOD_RES (1)..(2): Xaa is C or S
XXVPQDLSSLSILFFVGRTPKVLKVYPMVVK

SEQ ID NO: 59958 - protein, 39 aa, Artificial Sequence
  Cyclic GFR-binding peptide
  MOD_RES (4)..(5)..(37)..(39): Xaa is C or S
PASXXVPARLSSLSILFFDAANNVVLKVYPDMVVEAXGX

SEQ ID NO: 59959 - protein, 38 aa, Artificial Sequence
  Cyclic GFR-binding peptide
  MOD_RES (4)..(5)..(36)..(38): Xaa is C or S
ASPXXVPQDLSSLSILFFVGRTPKVLKVYPMVVKSXKX

SEQ ID NO: 59960 - protein, 39 aa, Artificial Sequence
  Cyclic GFR-binding peptide
  MOD_RES (5)..(6)..(37)..(39): Xaa is C or S
SASPXXVPQDLSSLSILFFVGRTPKVLKVYPMVVKSXKX

SEQ ID NO: 59961 - protein, 35 aa, Artificial Sequence
  Cyclic GFR-binding peptide
  MOD_RES (32)..(34): Xaa is C or S
TPTKMSSLSMLFFNDKQQIILKVYPGMVVDRXGXS

SEQ ID NO: 59962 - protein, 33 aa, Artificial Sequence
  Cyclic GFR-binding peptide
SRVHHSSLSVLFFEYVRKKPKLLKVYPRLEEHL

SEQ ID NO: 59963 - protein, 37 aa, Artificial Sequence
  Cyclic GFR-binding peptide
  MOD_RES (3)..(4)..(36): Xaa is C or S
ASXXVPARLSSLSILFFDAANNVVLKVYPDMVVEAXG

SEQ ID NO: 59964 - protein, 31 aa, Artificial Sequence
  Cyclic GFR-binding peptide
  MOD_RES (3)..(4): Xaa is C or S
ASXXVPARLSSLSILFFDAANNVVLKVYPDM

SEQ ID NO: 59965 - protein, 28 aa, Artificial Sequence
  Cyclic GFR-binding peptide
  MOD_RES (1)..(2): Xaa is C or S
XXAPVKTSSLSMLFFDNGRVLLLKVYPM

SEQ ID NO: 59966 - protein, 30 aa, Artificial Sequence
  Cyclic GFR-binding peptide
VPTKLSSLSILFFDKGVVTYLKVYPGMAVS

SEQ ID NO: 59967 - protein, 30 aa, Artificial Sequence
  Cyclic GFR-binding peptide
  MOD_RES (29)..(29): Xaa is C or S
QALSSLSILFFVGRKPKVLKVYPMIVRSXK

SEQ ID NO: 59968 - protein, 23 aa, Artificial Sequence
  Cyclic GFR-binding peptide
LSSLSILFFVGRTPKVLKVYPMV

SEQ ID NO: 59969 - protein, 29 aa, Artificial Sequence
  Cyclic GFR-binding peptide
  MOD_RES (1)..(1): Xaa is C or S
XVPEKMSSLSILFFDENKNVVLKVYPNMT

SEQ ID NO: 59970 - protein, 36 aa, Artificial Sequence
  Cyclic GFR-binding peptide
  MOD_RES (6)..(7): Xaa is C or S
HVPKPXXAPTKLSSLSVLFFDDSSNVILKVYPNMVV

SEQ ID NO: 59971 - protein, 38 aa, Artificial Sequence
  Cyclic GFR-binding peptide
  MOD_RES (4)..(4): Xaa is C or S
SVKXQPSRVHHSSLSVLFFEYVRKKPKLLKVYPRLEEH

SEQ ID NO: 59972 - protein, 31 aa, Artificial Sequence
  Cyclic GFR-binding peptide
  MOD_RES (4)..(5): Xaa is C or S
AAPXXVPQALSSLSILFFVGRKPKVLKVYPM

SEQ ID NO: 59973 - protein, 36 aa, Artificial Sequence
  Cyclic GFR-binding peptide
  MOD_RES (4)..(5)..(36): Xaa is C or S
ASPXXVSQDLSSLSILFFIGKTPKILKVYPMIVKSX

SEQ ID NO: 59974 - protein, 37 aa, Artificial Sequence
  Cyclic GFR-binding peptide
  MOD_RES (5)..(6): Xaa is C or S
ASKAXXVPTKLSSLSILFFDKGVVTYLKVYPGMAVSE

SEQ ID NO: 59975 - protein, 31 aa, Artificial Sequence
  Cyclic GFR-binding peptide
  MOD_RES (30)..(30): Xaa is C or S
PVKTSSLSMLFFDNGRVLLLKVYPMIVEEXG

SEQ ID NO: 59976 - protein, 37 aa, Artificial Sequence
  Cyclic GFR-binding peptide
  MOD_RES (2)..(3)..(34)..(36): Xaa is C or S
TXXAPVKTSSLSMLFFDNGRVLLLKVYPMIVEEXGXL

SEQ ID NO: 59977 - protein, 33 aa, Artificial Sequence
  Cyclic GFR-binding peptide
  MOD_RES (31)..(33): Xaa is C or S
PEKMSSLSILFFDENKNVVLKVYPNMTVESXAX

SEQ ID NO: 59978 - protein, 33 aa, Artificial Sequence
  Cyclic GFR-binding peptide
  MOD_RES (2)..(3): Xaa is C or S
PXXAPTQLSSLSVLFFDDSSNVILKVYPNMVVR

SEQ ID NO: 59979 - protein, 41 aa, Artificial Sequence
  Cyclic GFR-binding peptide
  MOD_RES (4)..(41): Xaa is C or S
SVKXQPSRVHHSSLSVLFFEYVRKKPKLLKVYPRLEEHLEX

SEQ ID NO: 59980 - protein, 37 aa, Artificial Sequence
  Cyclic GFR-binding peptide
  MOD_RES (2)..(3)..(34)..(36): Xaa is C or S
PXXVPQDLSSLSILFFVGRTPKVLKVYPMVVKSXKXS

SEQ ID NO: 59981 - protein, 32 aa, Artificial Sequence
  Cyclic GFR-binding peptide
  MOD_RES (30)..(32): Xaa is C or S
SQDLSSLSILFFIGKTPKILKVYPMIVKSXKX

SEQ ID NO: 59982 - protein, 42 aa, Artificial Sequence
  Cyclic GFR-binding peptide
  MOD_RES (7)..(39)..(41): Xaa is C or S
HVTKPTXAPTKLSSLSVLFFDDSSNVILKVYPNMVVRSXGXH

SEQ ID NO: 59983 - protein, 32 aa, Artificial Sequence
  Cyclic GFR-binding peptide
  MOD_RES (30)..(32): Xaa is C or S
KLSSLSVLFFDDMGVPTLKVYPEGMSVAEXGX

SEQ ID NO: 59984 - protein, 32 aa, Artificial Sequence
  Cyclic GFR-binding peptide
  MOD_RES (2)..(3): Xaa is C or S
PXXVPQALSSLSILFFVGRKPKVLKVYPMIVR

SEQ ID NO: 59985 - protein, 27 aa, Artificial Sequence
  Cyclic GFR-binding peptide
VPQALSSLSILFFVGRKPKVLKVYPMI

SEQ ID NO: 59986 - protein, 30 aa, Artificial Sequence
  Cyclic GFR-binding peptide
  MOD_RES (3)..(4): Xaa is C or S
KPXXAPTKLSSLSVLFFDDSSNVILKVYPN

SEQ ID NO: 59987 - protein, 34 aa, Artificial Sequence
  Cyclic GFR-binding peptide
  MOD_RES (5)..(6): Xaa is C or S
SASPXXVPQDLSSLSILFFVGRTPKVLKVYPMVV

SEQ ID NO: 59988 - protein, 29 aa, Artificial Sequence
  Cyclic GFR-binding peptide
APTQLSSLSVLFFDDSSNVILKVYPNMVV

SEQ ID NO: 59989 - protein, 32 aa, Artificial Sequence
  Cyclic GFR-binding peptide
  MOD_RES (5)..(6): Xaa is C or S
SAAPXXVPQALSSLSILFFVGRKPKVLKVYPM

SEQ ID NO: 59990 - protein, 34 aa, Artificial Sequence
  Cyclic GFR-binding peptide
  MOD_RES (1)..(2)..(34): Xaa is C or S
XXAPTQLSSLSVLFFDDSSNVILKVYPNMVVRAX

SEQ ID NO: 59991 - protein, 31 aa, Artificial Sequence
  Cyclic GFR-binding peptide
  MOD_RES (4)..(5): Xaa is C or S
SKAXXVPTKLSSLSILFFDKGVVTYLKVYPG

SEQ ID NO: 59992 - protein, 39 aa, Artificial Sequence
  Cyclic GFR-binding peptide
  MOD_RES (4)..(5)..(36)..(38): Xaa is C or S
PSTXXAPVKTSSLSMLFFDNGRVLLLKVYPMIVEEXGXL

SEQ ID NO: 59993 - protein, 32 aa, Artificial Sequence
  Cyclic GFR-binding peptide
  MOD_RES (3)..(4): Xaa is C or S
GPXXTPTKMSSLSMLFFNDKQQIILKVYPGMV

SEQ ID NO: 59994 - protein, 35 aa, Artificial Sequence
  Cyclic GFR-binding peptide
  MOD_RES (2)..(3)..(35): Xaa is C or S
AXXVPTKLSSLSILFFDKGVVTYLKVYPGMAVSEX

SEQ ID NO: 59995 - protein, 33 aa, Artificial Sequence
  Cyclic GFR-binding peptide
  MOD_RES (3)..(3): Xaa is C or S
VKXQPSRVHHSSLSVLFFEYVRKKPKLLKVYPR

SEQ ID NO: 59996 - protein, 36 aa, Artificial Sequence
  Cyclic GFR-binding peptide
  MOD_RES (5)..(6): Xaa is C or S
TPPTXXVPTRLSSLSILFFDSANNVVLKVYPDMVVE

SEQ ID NO: 59997 - protein, 27 aa, Artificial Sequence
  Cyclic GFR-binding peptide
PTKLSSLSVLFFDSSNNVILKVYPNMV

SEQ ID NO: 59998 - protein, 36 aa, Artificial Sequence
  Cyclic GFR-binding peptide
  MOD_RES (4)..(36): Xaa is C or S
KPTXAPTKLSSLSVLFFDDSSNVILKVYPNMVVRSX

SEQ ID NO: 59999 - protein, 35 aa, Artificial Sequence
  Cyclic GFR-binding peptide
  MOD_RES (32)..(34): Xaa is C or S
HHSSLSVLFFEYVRKKPKLLKVYPRLEEHLEXAXA

SEQ ID NO: 60000 - protein, 31 aa, Artificial Sequence
  Cyclic GFR-binding peptide
  MOD_RES (31)..(31): Xaa is C or S
PTQLSSLSVLFFDDSSNVILKVYPNMVVRAX

SEQ ID NO: 60001 - protein, 36 aa, Artificial Sequence
  Cyclic GFR-binding peptide
  MOD_RES (4)..(5)..(36): Xaa is C or S
PSTXXAPVKTSSLSMLFFDNGRVLLLKVYPMIVEEX

SEQ ID NO: 60002 - protein, 31 aa, Artificial Sequence
  Cyclic GFR-binding peptide
  MOD_RES (1)..(1): Xaa is C or S
XTPTKMSSLSMLFFNDKQQIILKVYPGMVVD

SEQ ID NO: 60003 - protein, 41 aa, Artificial Sequence
  Cyclic GFR-binding peptide
  MOD_RES (6)..(7)..(38)..(40): Xaa is C or S
RVPSTXXAPVKTSSLSMLFFDNGRVLLLKVYPMIVEEXGXL

SEQ ID NO: 60004 - protein, 34 aa, Artificial Sequence
  Cyclic GFR-binding peptide
  MOD_RES (31)..(33): Xaa is C or S
PTKLSSLSVLFFDSSNNVILKVYPNMVVKAXGXH

SEQ ID NO: 60005 - protein, 31 aa, Artificial Sequence
  Cyclic GFR-binding peptide
VPTRLSSLSILFFDSANNVVLKVYPDMVVES

SEQ ID NO: 60006 - protein, 36 aa, Artificial Sequence
  Cyclic GFR-binding peptide
  MOD_RES (5)..(6): Xaa is C or S
ASKAXXVPTKLSSLSILFFDKGVVTYLKVYPGMAVS

SEQ ID NO: 60007 - protein, 22 aa, Artificial Sequence
  Cyclic GFR-binding peptide
MSSLSMLFFNDKQQIILKVYPG

SEQ ID NO: 60008 - protein, 34 aa, Artificial Sequence
  Cyclic GFR-binding peptide
  MOD_RES (31)..(33): Xaa is C or S
VPQALSSLSILFFVGRKPKVLKVYPMIVRSXKXS

SEQ ID NO: 60009 - protein, 30 aa, Artificial Sequence
  Cyclic GFR-binding peptide
  MOD_RES (2)..(3): Xaa is C or S
PXXAPTKLSSLSVLFFDDSSNVILKVYPNM

SEQ ID NO: 60010 - protein, 31 aa, Artificial Sequence
  Cyclic GFR-binding peptide
  MOD_RES (30)..(30): Xaa is C or S
TKLSSLSILFFDKGVVTYLKVYPGMAVSEXG

SEQ ID NO: 60011 - protein, 30 aa, Artificial Sequence
  Cyclic GFR-binding peptide
TEESSLSMLFFRIKPHQGQHLKVYPFLQHN

SEQ ID NO: 60012 - protein, 32 aa, Artificial Sequence
  Cyclic GFR-binding peptide
  MOD_RES (31)..(31): Xaa is C or S
PTQLSSLSVLFFDDSSNVILKVYPNMVVRAXG

SEQ ID NO: 60013 - protein, 40 aa, Artificial Sequence
  Cyclic GFR-binding peptide
  MOD_RES (5)..(6)..(37)..(39): Xaa is C or S
SASPXXVPQDLSSLSILFFVGRTPKVLKVYPMVVKSXKXS

SEQ ID NO: 60014 - protein, 33 aa, Artificial Sequence
  Cyclic GFR-binding peptide
  MOD_RES (5)..(6): Xaa is C or S
ASKAXXVPTKLSSLSILFFDKGVVTYLKVYPGM

SEQ ID NO: 60015 - protein, 34 aa, Artificial Sequence
  Cyclic GFR-binding peptide
  MOD_RES (32)..(34): Xaa is C or S
VPTKLSSLSILFFDKGVVTYLKVYPGMAVSEXGX

SEQ ID NO: 60016 - protein, 38 aa, Artificial Sequence
  Cyclic GFR-binding peptide
  MOD_RES (5)..(37): Xaa is C or S
TKPTXAPTKLSSLSVLFFDDSSNVILKVYPNMVVRSXG

SEQ ID NO: 60017 - protein, 32 aa, Artificial Sequence
  Cyclic GFR-binding peptide
VPTEESSLSMLFFRIKPHQGQHLKVYPFLQHN

SEQ ID NO: 60018 - protein, 41 aa, Artificial Sequence
  Cyclic GFR-binding peptide
  MOD_RES (6)..(7)..(39)..(41): Xaa is C or S
TVPKPXXAPTQLSSLSVLFFDDSSNVILKVYPNMVVRAXGX

SEQ ID NO: 60019 - protein, 39 aa, Artificial Sequence
  Cyclic GFR-binding peptide
  MOD_RES (3)..(4)..(36)..(38): Xaa is C or S
KPXXAPTQLSSLSVLFFDDSSNVILKVYPNMVVRAXGXH

SEQ ID NO: 60020 - protein, 28 aa, Artificial Sequence
  Cyclic GFR-binding peptide
  MOD_RES (1)..(2): Xaa is C or S
XXAPTKLSSLSVLFFDDSSNVILKVYPN

SEQ ID NO: 60021 - protein, 33 aa, Artificial Sequence
  Cyclic GFR-binding peptide
  MOD_RES (1)..(33): Xaa is C or S
XAPTQLSSLSVLFFDDSSNVILKVYPNMVVRAX

SEQ ID NO: 60022 - protein, 27 aa, Artificial Sequence
  Cyclic GFR-binding peptide
ESSLSMLFFRIKPHQGQHLKVYPFLQH

SEQ ID NO: 60023 - protein, 30 aa, Artificial Sequence
  Cyclic GFR-binding peptide
  MOD_RES (1)..(2): Xaa is C or S
XXVPTKLSSLSILFFDKGVVTYLKVYPGMA

SEQ ID NO: 60024 - protein, 23 aa, Artificial Sequence
  Cyclic GFR-binding peptide
QDLSSLSILFFVGRTPKVLKVYP

SEQ ID NO: 60025 - protein, 29 aa, Artificial Sequence
  Cyclic GFR-binding peptide
HSSLSVLFFEYVRKKPKLLKVYPRLEEHL

SEQ ID NO: 60026 - protein, 28 aa, Artificial Sequence
  Cyclic GFR-binding peptide
  MOD_RES (1)..(2): Xaa is C or S
XXTPTKMSSLSMLFFNDKQQIILKVYPG

SEQ ID NO: 60027 - protein, 37 aa, Artificial Sequence
  Cyclic GFR-binding peptide
  MOD_RES (6)..(6): Xaa is C or S
VTKPTXAPTKLSSLSVLFFDDSSNVILKVYPNMVVRS

SEQ ID NO: 60028 - protein, 34 aa, Artificial Sequence
  Cyclic GFR-binding peptide
  MOD_RES (5)..(6): Xaa is C or S
SASPXXVSQDLSSLSILFFIGKTPKILKVYPMIV

SEQ ID NO: 60029 - protein, 25 aa, Artificial Sequence
  Cyclic GFR-binding peptide
ARLSSLSILFFDAANNVVLKVYPDM

SEQ ID NO: 60030 - protein, 30 aa, Artificial Sequence
  Cyclic GFR-binding peptide
PSRVHHSSLSVLFFEYVRKKPKLLKVYPRL

SEQ ID NO: 60031 - protein, 34 aa, Artificial Sequence
  Cyclic GFR-binding peptide
  MOD_RES (1)..(1): Xaa is C or S
XVPTEESSLSMLFFRIKPHQGQHLKVYPFLQHNK

SEQ ID NO: 60032 - protein, 26 aa, Artificial Sequence
  Cyclic GFR-binding peptide
DLSSLSILFFIGKTPKILKVYPMIVK

SEQ ID NO: 60033 - protein, 37 aa, Artificial Sequence
  Cyclic GFR-binding peptide
  MOD_RES (4)..(5)..(37): Xaa is C or S
PKPXXAPTKLSSLSVLFFDDSSNVILKVYPNMVVRSX

SEQ ID NO: 60034 - protein, 38 aa, Artificial Sequence
  Cyclic GFR-binding peptide
  MOD_RES (4)..(38): Xaa is C or S
GLEXVPTEESSLSMLFFRIKPHQGQHLKVYPFLQHNKX

SEQ ID NO: 60035 - protein, 42 aa, Artificial Sequence
  Cyclic GFR-binding peptide
  MOD_RES (6)..(40)..(42): Xaa is C or S
DEGLEXVPTEESSLSMLFFRIKPHQGQHLKVYPFLQHNKXEX

SEQ ID NO: 60036 - protein, 26 aa, Artificial Sequence
  Cyclic GFR-binding peptide
PTKLSSLSVLFFDSSNNVILKVYPNM

SEQ ID NO: 60037 - protein, 32 aa, Artificial Sequence
  Cyclic GFR-binding peptide
  MOD_RES (31)..(31): Xaa is C or S
PTKLSSLSVLFFDDSSNVILKVYPNMVVRSXG

SEQ ID NO: 60038 - protein, 33 aa, Artificial Sequence
  Cyclic GFR-binding peptide
  MOD_RES (5)..(6): Xaa is C or S
VPKPXXAPTKLSSLSVLFFDDSSNVILKVYPNM

SEQ ID NO: 60039 - protein, 20 aa, Artificial Sequence
  Cyclic GFR-binding peptide
SSLSILFFVGRKPKVLKVYP

SEQ ID NO: 60040 - protein, 41 aa, Artificial Sequence
  Cyclic GFR-binding peptide
  MOD_RES (5)..(6)..(38)..(40): Xaa is C or S
ASKAXXVPTKLSSLSILFFDKGVVTYLKVYPGMAVSEXGXR

SEQ ID NO: 60041 - protein, 32 aa, Artificial Sequence
  Cyclic GFR-binding peptide
  MOD_RES (32)..(32): Xaa is C or S
APTKLSSLSVLFFDDSSNVILKVYPNMVVRSX

SEQ ID NO: 60042 - protein, 31 aa, Artificial Sequence
  Cyclic GFR-binding peptide
  MOD_RES (4)..(5): Xaa is C or S
PSTXXAPVKTSSLSMLFFDNGRVLLLKVYPM

SEQ ID NO: 60043 - protein, 37 aa, Artificial Sequence
  Cyclic GFR-binding peptide
  MOD_RES (5)..(37): Xaa is C or S
TKPTXAPTKLSSLSVLFFDDSSNVILKVYPNMVVRSX

SEQ ID NO: 60044 - protein, 29 aa, Artificial Sequence
  Cyclic GFR-binding peptide
  MOD_RES (28)..(28): Xaa is C or S
LSSLSILFFDKGVVTYLKVYPGMAVSEXG

SEQ ID NO: 60045 - protein, 29 aa, Artificial Sequence
  Cyclic GFR-binding peptide
ARLSSLSILFFDAANNVVLKVYPDMVVEA

SEQ ID NO: 60046 - protein, 33 aa, Artificial Sequence
  Cyclic GFR-binding peptide
  MOD_RES (30)..(32): Xaa is C or S
PVKTSSLSMLFFDNGRVLLLKVYPMIVEEXGXL

SEQ ID NO: 60047 - protein, 31 aa, Artificial Sequence
  Cyclic GFR-binding peptide
  MOD_RES (3)..(4): Xaa is C or S
KAXXAPTKLSSLSVLFFDSSNNVILKVYPNM

SEQ ID NO: 60048 - protein, 39 aa, Artificial Sequence
  Cyclic GFR-binding peptide
  MOD_RES (4)..(5)..(36)..(38): Xaa is C or S
AAPXXVPQALSSLSILFFVGRKPKVLKVYPMIVRSXKXS

SEQ ID NO: 60049 - protein, 31 aa, Artificial Sequence
  Cyclic GFR-binding peptide
  MOD_RES (30)..(30): Xaa is C or S
SQDLSSLSILFFIGKTPKILKVYPMIVKSXK

SEQ ID NO: 60050 - protein, 29 aa, Artificial Sequence
  Cyclic GFR-binding peptide
  MOD_RES (1)..(1): Xaa is C or S
XVPTEESSLSMLFFRIKPHQGQHLKVYPF

SEQ ID NO: 60051 - protein, 27 aa, Artificial Sequence
  Cyclic GFR-binding peptide
VPARLSSLSILFFDAANNVVLKVYPDM

SEQ ID NO: 60052 - protein, 33 aa, Artificial Sequence
  Cyclic GFR-binding peptide
  MOD_RES (6)..(7): Xaa is C or S
AVPKAXXAPTKLSSLSVLFFDSSNNVILKVYPN

SEQ ID NO: 60053 - protein, 31 aa, Artificial Sequence
  Cyclic GFR-binding peptide
  MOD_RES (28)..(30): Xaa is C or S
LSSLSVLFFDDSSNVILKVYPNMVVRAXGXH

SEQ ID NO: 60054 - protein, 30 aa, Artificial Sequence
  Cyclic GFR-binding peptide
  MOD_RES (1)..(1): Xaa is C or S
XVPARLSSLSILFFDAANNVVLKVYPDMVV

SEQ ID NO: 60055 - protein, 42 aa, Artificial Sequence
  Cyclic GFR-binding peptide
  MOD_RES (6)..(7)..(39)..(41): Xaa is C or S
GSAGPXXTPTKMSSLSMLFFNDKQQIILKVYPGMVVDRXGXS

SEQ ID NO: 60056 - protein, 35 aa, Artificial Sequence
  Cyclic GFR-binding peptide
  MOD_RES (1)..(2)..(33)..(35): Xaa is C or S
XXVPQALSSLSILFFVGRKPKVLKVYPMIVRSXKX

SEQ ID NO: 60057 - protein, 37 aa, Artificial Sequence
  Cyclic GFR-binding peptide
  MOD_RES (4)..(5)..(36): Xaa is C or S
ASPXXVSQDLSSLSILFFIGKTPKILKVYPMIVKSXK

SEQ ID NO: 60058 - protein, 28 aa, Artificial Sequence
  Cyclic GFR-binding peptide
VSQDLSSLSILFFIGKTPKILKVYPMIV

SEQ ID NO: 60059 - protein, 28 aa, Artificial Sequence
  Cyclic GFR-binding peptide
  MOD_RES (1)..(2): Xaa is C or S
XXVPARLSSLSILFFDAANNVVLKVYPD

SEQ ID NO: 60060 - protein, 29 aa, Artificial Sequence
  Cyclic GFR-binding peptide
TKLSSLSVLFFDSSNNVILKVYPNMVVKA

SEQ ID NO: 60061 - protein, 33 aa, Artificial Sequence
  Cyclic GFR-binding peptide
  MOD_RES (1)..(2): Xaa is C or S
XXVPEKMSSLSILFFDENKNVVLKVYPNMTVES

SEQ ID NO: 60062 - protein, 21 aa, Artificial Sequence
  Cyclic GFR-binding peptide
SSLSILFFDSANNVVLKVYPD

SEQ ID NO: 60063 - protein, 31 aa, Artificial Sequence
  Cyclic GFR-binding peptide
APTKLSSLSVLFFDDSSNVILKVYPNMVVRS

SEQ ID NO: 60064 - protein, 32 aa, Artificial Sequence
  Cyclic GFR-binding peptide
  MOD_RES (4)..(5): Xaa is C or S
GKAXXVPTKLSSLSVLFFDDMGVPTLKVYPEG

SEQ ID NO: 60065 - protein, 24 aa, Artificial Sequence
  Cyclic GFR-binding peptide
SSLSVLFFDSSNNVILKVYPNMVV

SEQ ID NO: 60066 - protein, 34 aa, Artificial Sequence
  Cyclic GFR-binding peptide
  MOD_RES (4)..(4): Xaa is C or S
KPTXAPTKLSSLSVLFFDDSSNVILKVYPNMVVR

SEQ ID NO: 60067 - protein, 30 aa, Artificial Sequence
  Cyclic GFR-binding peptide
  MOD_RES (3)..(4): Xaa is C or S
PTXXVPTRLSSLSILFFDSANNVVLKVYPD

SEQ ID NO: 60068 - protein, 24 aa, Artificial Sequence
  Cyclic GFR-binding peptide
QALSSLSILFFVGRKPKVLKVYPM

SEQ ID NO: 60069 - protein, 29 aa, Artificial Sequence
  Cyclic GFR-binding peptide
  MOD_RES (29)..(29): Xaa is C or S
QLSSLSVLFFDDSSNVILKVYPNMVVRAX

SEQ ID NO: 60070 - protein, 24 aa, Artificial Sequence
  Cyclic GFR-binding peptide
KLSSLSVLFFDSSNNVILKVYPNM

SEQ ID NO: 60071 - protein, 30 aa, Artificial Sequence
  Cyclic GFR-binding peptide
  MOD_RES (1)..(1): Xaa is C or S
XAPTQLSSLSVLFFDDSSNVILKVYPNMVV

SEQ ID NO: 60072 - protein, 25 aa, Artificial Sequence
  Cyclic GFR-binding peptide
LSSLSILFFDKGVVTYLKVYPGMAV

SEQ ID NO: 60073 - protein, 34 aa, Artificial Sequence
  Cyclic GFR-binding peptide
  MOD_RES (6)..(7): Xaa is C or S
AVPKAXXAPTKLSSLSVLFFDSSNNVILKVYPNM

SEQ ID NO: 60074 - protein, 33 aa, Artificial Sequence
  Cyclic GFR-binding peptide
  MOD_RES (3)..(3): Xaa is C or S
PTXAPTKLSSLSVLFFDDSSNVILKVYPNMVVR

SEQ ID NO: 60075 - protein, 33 aa, Artificial Sequence
  Cyclic GFR-binding peptide
  MOD_RES (1)..(2)..(33): Xaa is C or S
XXVPQALSSLSILFFVGRKPKVLKVYPMIVRSX

SEQ ID NO: 60076 - protein, 30 aa, Artificial Sequence
  Cyclic GFR-binding peptide
  MOD_RES (30)..(30): Xaa is C or S
PQALSSLSILFFVGRKPKVLKVYPMIVRSX

SEQ ID NO: 60077 - protein, 28 aa, Artificial Sequence
  Cyclic GFR-binding peptide
  MOD_RES (28)..(28): Xaa is C or S
ALSSLSILFFVGRKPKVLKVYPMIVRSX

SEQ ID NO: 60078 - protein, 32 aa, Artificial Sequence
  Cyclic GFR-binding peptide
  MOD_RES (30)..(32): Xaa is C or S
SSLSVLFFEYVRKKPKLLKVYPRLEEHLEXAX

SEQ ID NO: 60079 - protein, 37 aa, Artificial Sequence
  Cyclic GFR-binding peptide
  MOD_RES (2)..(3)..(35)..(37): Xaa is C or S
TXXVPTRLSSLSILFFDSANNVVLKVYPDMVVESXGX

SEQ ID NO: 60080 - protein, 29 aa, Artificial Sequence
  Cyclic GFR-binding peptide
  MOD_RES (29)..(29): Xaa is C or S
QDLSSLSILFFVGRTPKVLKVYPMVVKSX

SEQ ID NO: 60081 - protein, 29 aa, Artificial Sequence
  Cyclic GFR-binding peptide
  MOD_RES (3)..(3): Xaa is C or S
PTXAPTKLSSLSVLFFDDSSNVILKVYPN

SEQ ID NO: 60082 - protein, 35 aa, Artificial Sequence
  Cyclic GFR-binding peptide
  MOD_RES (32)..(34): Xaa is C or S
PTKLSSLSVLFFDDMGVPTLKVYPEGMSVAEXGXR

SEQ ID NO: 60083 - protein, 34 aa, Artificial Sequence
  Cyclic GFR-binding peptide
  MOD_RES (5)..(6): Xaa is C or S
VPSTXXAPVKTSSLSMLFFDNGRVLLLKVYPMIV

SEQ ID NO: 60084 - protein, 36 aa, Artificial Sequence
  Cyclic GFR-binding peptide
  MOD_RES (3)..(4)..(36): Xaa is C or S
KPXXAPTQLSSLSVLFFDDSSNVILKVYPNMVVRAX

SEQ ID NO: 60085 - protein, 36 aa, Artificial Sequence
  Cyclic GFR-binding peptide
  MOD_RES (1)..(33)..(35): Xaa is C or S
XVPTRLSSLSILFFDSANNVVLKVYPDMVVESXGXR

SEQ ID NO: 60086 - protein, 35 aa, Artificial Sequence
  Cyclic GFR-binding peptide
  MOD_RES (2)..(3)..(35): Xaa is C or S
SXXVPARLSSLSILFFDAANNVVLKVYPDMVVEAX

SEQ ID NO: 60087 - protein, 32 aa, Artificial Sequence
  Cyclic GFR-binding peptide
  MOD_RES (1)..(2): Xaa is C or S
XXTPTKMSSLSMLFFNDKQQIILKVYPGMVVD

SEQ ID NO: 60088 - protein, 40 aa, Artificial Sequence
  Cyclic GFR-binding peptide
  MOD_RES (5)..(6)..(38)..(40): Xaa is C or S
APASXXVPARLSSLSILFFDAANNVVLKVYPDMVVEAXGX

SEQ ID NO: 60089 - protein, 26 aa, Artificial Sequence
  Cyclic GFR-binding peptide
  MOD_RES (26)..(26): Xaa is C or S
SSLSILFFVGRKPKVLKVYPMIVRSX

SEQ ID NO: 60090 - protein, 33 aa, Artificial Sequence
  Cyclic GFR-binding peptide
  MOD_RES (31)..(33): Xaa is C or S
APVKTSSLSMLFFDNGRVLLLKVYPMIVEEXGX

SEQ ID NO: 60091 - protein, 30 aa, Artificial Sequence
  Cyclic GFR-binding peptide
  MOD_RES (3)..(4): Xaa is C or S
SPXXVSQDLSSLSILFFIGKTPKILKVYPM

SEQ ID NO: 60092 - protein, 32 aa, Artificial Sequence
  Cyclic GFR-binding peptide
  MOD_RES (29)..(31): Xaa is C or S
KLSSLSILFFDKGVVTYLKVYPGMAVSEXGXR

SEQ ID NO: 60093 - protein, 35 aa, Artificial Sequence
  Cyclic GFR-binding peptide
  MOD_RES (4)..(4): Xaa is C or S
KPTXAPTKLSSLSVLFFDDSSNVILKVYPNMVVRS

SEQ ID NO: 60094 - protein, 37 aa, Artificial Sequence
  Cyclic GFR-binding peptide
  MOD_RES (37)..(37): Xaa is C or S
QPSRVHHSSLSVLFFEYVRKKPKLLKVYPRLEEHLEX

SEQ ID NO: 60095 - protein, 36 aa, Artificial Sequence
  Cyclic GFR-binding peptide
  MOD_RES (6)..(7): Xaa is C or S
ASASPXXVPQDLSSLSILFFVGRTPKVLKVYPMVVK

SEQ ID NO: 60096 - protein, 26 aa, Artificial Sequence
  Cyclic GFR-binding peptide
MSSLSILFFDENKNVVLKVYPNMTVE

SEQ ID NO: 60097 - protein, 33 aa, Artificial Sequence
  Cyclic GFR-binding peptide
  MOD_RES (2)..(3): Xaa is C or S
TXXAPVKTSSLSMLFFDNGRVLLLKVYPMIVEE

SEQ ID NO: 60098 - protein, 25 aa, Artificial Sequence
  Cyclic GFR-binding peptide
HSSLSVLFFEYVRKKPKLLKVYPRL

SEQ ID NO: 60099 - protein, 27 aa, Artificial Sequence
  Cyclic GFR-binding peptide
RLSSLSILFFDAANNVVLKVYPDMVVE

SEQ ID NO: 60100 - protein, 34 aa, Artificial Sequence
  Cyclic GFR-binding peptide
  MOD_RES (5)..(5): Xaa is C or S
SSVKXQPSRVHHSSLSVLFFEYVRKKPKLLKVYP

SEQ ID NO: 60101 - protein, 36 aa, Artificial Sequence
  Cyclic GFR-binding peptide
  MOD_RES (1)..(2)..(34)..(36): Xaa is C or S
XXAPTKLSSLSVLFFDDSSNVILKVYPNMVVRSXGX

SEQ ID NO: 60102 - protein, 36 aa, Artificial Sequence
  Cyclic GFR-binding peptide
  MOD_RES (3)..(3): Xaa is C or S
VKXQPSRVHHSSLSVLFFEYVRKKPKLLKVYPRLEE

SEQ ID NO: 60103 - protein, 29 aa, Artificial Sequence
  Cyclic GFR-binding peptide
  MOD_RES (2)..(3): Xaa is C or S
PXXVPQDLSSLSILFFVGRTPKVLKVYPM

SEQ ID NO: 60104 - protein, 37 aa, Artificial Sequence
  Cyclic GFR-binding peptide
  MOD_RES (3)..(4)..(36): Xaa is C or S
KAXXAPTKLSSLSVLFFDSSNNVILKVYPNMVVKAXG

SEQ ID NO: 60105 - protein, 27 aa, Artificial Sequence
  Cyclic GFR-binding peptide
APTKLSSLSVLFFDSSNNVILKVYPNM

SEQ ID NO: 60106 - protein, 35 aa, Artificial Sequence
  Cyclic GFR-binding peptide
  MOD_RES (6)..(7): Xaa is C or S
ASAAPXXVPQALSSLSILFFVGRKPKVLKVYPMIV

SEQ ID NO: 60107 - protein, 34 aa, Artificial Sequence
  Cyclic GFR-binding peptide
  MOD_RES (31)..(33): Xaa is C or S
VPQDLSSLSILFFVGRTPKVLKVYPMVVKSXKXS

SEQ ID NO: 60108 - protein, 38 aa, Artificial Sequence
  Cyclic GFR-binding peptide
  MOD_RES (2)..(3)..(36)..(38): Xaa is C or S
AXXVPTKLSSLSVLFFDDMGVPTLKVYPEGMSVAEXGX

SEQ ID NO: 60109 - protein, 26 aa, Artificial Sequence
  Cyclic GFR-binding peptide
EESSLSMLFFRIKPHQGQHLKVYPFL

SEQ ID NO: 60110 - protein, 31 aa, Artificial Sequence
  Cyclic GFR-binding peptide
  MOD_RES (5)..(5): Xaa is C or S
TKPTXAPTKLSSLSVLFFDDSSNVILKVYPN

SEQ ID NO: 60111 - protein, 28 aa, Artificial Sequence
  Cyclic GFR-binding peptide
  MOD_RES (2)..(3): Xaa is C or S
PXXVPQALSSLSILFFVGRKPKVLKVYP

SEQ ID NO: 60112 - protein, 37 aa, Artificial Sequence
  Cyclic GFR-binding peptide
  MOD_RES (3)..(35)..(37): Xaa is C or S
PTXAPTKLSSLSVLFFDDSSNVILKVYPNMVVRSXGX

SEQ ID NO: 60113 - protein, 36 aa, Artificial Sequence
  Cyclic GFR-binding peptide
  MOD_RES (4)..(5)..(36): Xaa is C or S
AAPXXVPQALSSLSILFFVGRKPKVLKVYPMIVRSX

SEQ ID NO: 60114 - protein, 34 aa, Artificial Sequence
  Cyclic GFR-binding peptide
  MOD_RES (3)..(4): Xaa is C or S
KAXXAPTKLSSLSVLFFDSSNNVILKVYPNMVVK

SEQ ID NO: 60115 - protein, 24 aa, Artificial Sequence
  Cyclic GFR-binding peptide
ARLSSLSILFFDAANNVVLKVYPD

SEQ ID NO: 60116 - protein, 34 aa, Artificial Sequence
  Cyclic GFR-binding peptide
  MOD_RES (32)..(34): Xaa is C or S
HHSSLSVLFFEYVRKKPKLLKVYPRLEEHLEXAX

SEQ ID NO: 60117 - protein, 33 aa, Artificial Sequence
  Cyclic GFR-binding peptide
  MOD_RES (1)..(2): Xaa is C or S
XXVPTRLSSLSILFFDSANNVVLKVYPDMVVES

SEQ ID NO: 60118 - protein, 37 aa, Artificial Sequence
  Cyclic GFR-binding peptide
  MOD_RES (3)..(4)..(36): Xaa is C or S
KPXXAPTQLSSLSVLFFDDSSNVILKVYPNMVVRAXG

SEQ ID NO: 60119 - protein, 30 aa, Artificial Sequence
  Cyclic GFR-binding peptide
  MOD_RES (5)..(5): Xaa is C or S
TKPTXAPTKLSSLSVLFFDDSSNVILKVYP

SEQ ID NO: 60120 - protein, 44 aa, Artificial Sequence
  Cyclic GFR-binding peptide
  MOD_RES (5)..(42)..(44): Xaa is C or S
SSVKXQPSRVHHSSLSVLFFEYVRKKPKLLKVYPRLEEHLEXAX

SEQ ID NO: 60121 - protein, 38 aa, Artificial Sequence
  Cyclic GFR-binding peptide
  MOD_RES (2)..(3)..(35)..(37): Xaa is C or S
PXXAPTKLSSLSVLFFDDSSNVILKVYPNMVVRSXGXH

SEQ ID NO: 60122 - protein, 28 aa, Artificial Sequence
  Cyclic GFR-binding peptide
PTKLSSLSVLFFDDSSNVILKVYPNMVV

SEQ ID NO: 60123 - protein, 36 aa, Artificial Sequence
  Cyclic GFR-binding peptide
  MOD_RES (1)..(2)..(34)..(36): Xaa is C or S
XXTPTKMSSLSMLFFNDKQQIILKVYPGMVVDRXGX

SEQ ID NO: 60124 - protein, 27 aa, Artificial Sequence
  Cyclic GFR-binding peptide
TKLSSLSVLFFDDSSNVILKVYPNMVV

SEQ ID NO: 60125 - protein, 29 aa, Artificial Sequence
  Cyclic GFR-binding peptide
ESSLSMLFFRIKPHQGQHLKVYPFLQHNK

SEQ ID NO: 60126 - protein, 34 aa, Artificial Sequence
  Cyclic GFR-binding peptide
  MOD_RES (1)..(34): Xaa is C or S
XVPTKLSSLSVLFFDDMGVPTLKVYPEGMSVAEX

SEQ ID NO: 60127 - protein, 29 aa, Artificial Sequence
  Cyclic GFR-binding peptide
  MOD_RES (3)..(4): Xaa is C or S
KPXXAPTKLSSLSVLFFDDSSNVILKVYP

SEQ ID NO: 60128 - protein, 32 aa, Artificial Sequence
  Cyclic GFR-binding peptide
  MOD_RES (5)..(6): Xaa is C or S
SASPXXVSQDLSSLSILFFIGKTPKILKVYPM

SEQ ID NO: 60129 - protein, 36 aa, Artificial Sequence
  Cyclic GFR-binding peptide
  MOD_RES (4)..(5): Xaa is C or S
AGPXXTPTKMSSLSMLFFNDKQQIILKVYPGMVVDR

SEQ ID NO: 60130 - protein, 34 aa, Artificial Sequence
  Cyclic GFR-binding peptide
  MOD_RES (33)..(33): Xaa is C or S
VPTKLSSLSVLFFDDMGVPTLKVYPEGMSVAEXG

SEQ ID NO: 60131 - protein, 27 aa, Artificial Sequence
  Cyclic GFR-binding peptide
SSLSMLFFRIKPHQGQHLKVYPFLQHN

SEQ ID NO: 60132 - protein, 34 aa, Artificial Sequence
  Cyclic GFR-binding peptide
  MOD_RES (4)..(5): Xaa is C or S
AGPXXTPTKMSSLSMLFFNDKQQIILKVYPGMVV

SEQ ID NO: 60133 - protein, 40 aa, Artificial Sequence
  Cyclic GFR-binding peptide
  MOD_RES (4)..(5)..(37)..(39): Xaa is C or S
PEPXXVPEKMSSLSILFFDENKNVVLKVYPNMTVESXAXR

SEQ ID NO: 60134 - protein, 29 aa, Artificial Sequence
  Cyclic GFR-binding peptide
PTRLSSLSILFFDSANNVVLKVYPDMVVE

SEQ ID NO: 60135 - protein, 35 aa, Artificial Sequence
  Cyclic GFR-binding peptide
  MOD_RES (6)..(6): Xaa is C or S
VTKPTXAPTKLSSLSVLFFDDSSNVILKVYPNMVV

SEQ ID NO: 60136 - protein, 28 aa, Artificial Sequence
  Cyclic GFR-binding peptide
VHHSSLSVLFFEYVRKKPKLLKVYPRLE

SEQ ID NO: 60137 - protein, 29 aa, Artificial Sequence
  Cyclic GFR-binding peptide
  MOD_RES (28)..(28): Xaa is C or S
DLSSLSILFFIGKTPKILKVYPMIVKSXK

SEQ ID NO: 60138 - protein, 34 aa, Artificial Sequence
  Cyclic GFR-binding peptide
  MOD_RES (4)..(5): Xaa is C or S
AAPXXVPQALSSLSILFFVGRKPKVLKVYPMIVR

SEQ ID NO: 60139 - protein, 33 aa, Artificial Sequence
  Cyclic GFR-binding peptide
  MOD_RES (3)..(4): Xaa is C or S
PTXXVPTRLSSLSILFFDSANNVVLKVYPDMVV

SEQ ID NO: 60140 - protein, 33 aa, Artificial Sequence
  Cyclic GFR-binding peptide
  MOD_RES (3)..(4): Xaa is C or S
SPXXVPQDLSSLSILFFVGRTPKVLKVYPMVVK

SEQ ID NO: 60141 - protein, 33 aa, Artificial Sequence
  Cyclic GFR-binding peptide
  MOD_RES (5)..(6): Xaa is C or S
VPKPXXAPTQLSSLSVLFFDDSSNVILKVYPNM

SEQ ID NO: 60142 - protein, 26 aa, Artificial Sequence
  Cyclic GFR-binding peptide
TKLSSLSILFFDKGVVTYLKVYPGMA

SEQ ID NO: 60143 - protein, 23 aa, Artificial Sequence
  Cyclic GFR-binding peptide
SSLSILFFDSANNVVLKVYPDMV

SEQ ID NO: 60144 - protein, 31 aa, Artificial Sequence
  Cyclic GFR-binding peptide
TPTKMSSLSMLFFNDKQQIILKVYPGMVVDR

SEQ ID NO: 60145 - protein, 27 aa, Artificial Sequence
  Cyclic GFR-binding peptide
SQDLSSLSILFFIGKTPKILKVYPMIV

SEQ ID NO: 60146 - protein, 26 aa, Artificial Sequence
  Cyclic GFR-binding peptide
TQLSSLSVLFFDDSSNVILKVYPNMV

SEQ ID NO: 60147 - protein, 36 aa, Artificial Sequence
  Cyclic GFR-binding peptide
  MOD_RES (2)..(3)..(35): Xaa is C or S
PXXAPTKLSSLSVLFFDDSSNVILKVYPNMVVRSXG

SEQ ID NO: 60148 - protein, 28 aa, Artificial Sequence
  Cyclic GFR-binding peptide
  MOD_RES (2)..(3): Xaa is C or S
PXXVPQDLSSLSILFFVGRTPKVLKVYP

SEQ ID NO: 60149 - protein, 30 aa, Artificial Sequence
  Cyclic GFR-binding peptide
APTKLSSLSVLFFDDSSNVILKVYPNMVVR

SEQ ID NO: 60150 - protein, 23 aa, Artificial Sequence
  Cyclic GFR-binding peptide
KTSSLSMLFFDNGRVLLLKVYPM

SEQ ID NO: 60151 - protein, 33 aa, Artificial Sequence
  Cyclic GFR-binding peptide
  MOD_RES (1)..(2): Xaa is C or S
XXAPTQLSSLSVLFFDDSSNVILKVYPNMVVRA

SEQ ID NO: 60152 - protein, 30 aa, Artificial Sequence
  Cyclic GFR-binding peptide
  MOD_RES (2)..(3): Xaa is C or S
PXXTPTKMSSLSMLFFNDKQQIILKVYPGM

SEQ ID NO: 60153 - protein, 33 aa, Artificial Sequence
  Cyclic GFR-binding peptide
  MOD_RES (3)..(4): Xaa is C or S
KPXXAPTQLSSLSVLFFDDSSNVILKVYPNMVV

SEQ ID NO: 60154 - protein, 27 aa, Artificial Sequence
  Cyclic GFR-binding peptide
  MOD_RES (27)..(27): Xaa is C or S
LSSLSILFFVGRTPKVLKVYPMVVKSX

SEQ ID NO: 60155 - protein, 25 aa, Artificial Sequence
  Cyclic GFR-binding peptide
VHHSSLSVLFFEYVRKKPKLLKVYP

SEQ ID NO: 60156 - protein, 36 aa, Artificial Sequence
  Cyclic GFR-binding peptide
  MOD_RES (4)..(5): Xaa is C or S
SKAXXVPTKLSSLSILFFDKGVVTYLKVYPGMAVSE

SEQ ID NO: 60157 - protein, 28 aa, Artificial Sequence
  Cyclic GFR-binding peptide
  MOD_RES (27)..(27): Xaa is C or S
SSLSILFFDAANNVVLKVYPDMVVEAXG

SEQ ID NO: 60158 - protein, 31 aa, Artificial Sequence
  Cyclic GFR-binding peptide
  MOD_RES (1)..(1): Xaa is C or S
XAPTKLSSLSVLFFDSSNNVILKVYPNMVVK

SEQ ID NO: 60159 - protein, 31 aa, Artificial Sequence
  Cyclic GFR-binding peptide
  MOD_RES (1)..(2): Xaa is C or S
XXVPTKLSSLSVLFFDDMGVPTLKVYPEGMS

SEQ ID NO: 60160 - protein, 31 aa, Artificial Sequence
  Cyclic GFR-binding peptide
  MOD_RES (2)..(3): Xaa is C or S
PXXTPTKMSSLSMLFFNDKQQIILKVYPGMV

SEQ ID NO: 60161 - protein, 40 aa, Artificial Sequence
  Cyclic GFR-binding peptide
  MOD_RES (5)..(6)..(38)..(40): Xaa is C or S
VPKPXXAPTQLSSLSVLFFDDSSNVILKVYPNMVVRAXGX

SEQ ID NO: 60162 - protein, 36 aa, Artificial Sequence
  Cyclic GFR-binding peptide
  MOD_RES (3)..(4)..(36): Xaa is C or S
GPXXTPTKMSSLSMLFFNDKQQIILKVYPGMVVDRX

SEQ ID NO: 60163 - protein, 28 aa, Artificial Sequence
  Cyclic GFR-binding peptide
KLSSLSVLFFDDSSNVILKVYPNMVVRS

SEQ ID NO: 60164 - protein, 29 aa, Artificial Sequence
  Cyclic GFR-binding peptide
  MOD_RES (3)..(4): Xaa is C or S
EPXXVPEKMSSLSILFFDENKNVVLKVYP

SEQ ID NO: 60165 - protein, 28 aa, Artificial Sequence
  Cyclic GFR-binding peptide
  MOD_RES (1)..(2): Xaa is C or S
XXAPTKLSSLSVLFFDSSNNVILKVYPN

SEQ ID NO: 60166 - protein, 31 aa, Artificial Sequence
  Cyclic GFR-binding peptide
  MOD_RES (3)..(3): Xaa is C or S
PTXAPTKLSSLSVLFFDDSSNVILKVYPNMV

SEQ ID NO: 60167 - protein, 39 aa, Artificial Sequence
  Cyclic GFR-binding peptide
  MOD_RES (2)..(39): Xaa is C or S
KXQPSRVHHSSLSVLFFEYVRKKPKLLKVYPRLEEHLEX

SEQ ID NO: 60168 - protein, 30 aa, Artificial Sequence
  Cyclic GFR-binding peptide
  MOD_RES (1)..(2): Xaa is C or S
XXVPARLSSLSILFFDAANNVVLKVYPDMV

SEQ ID NO: 60169 - protein, 25 aa, Artificial Sequence
  Cyclic GFR-binding peptide
LSSLSILFFDSANNVVLKVYPDMVV

SEQ ID NO: 60170 - protein, 32 aa, Artificial Sequence
  Cyclic GFR-binding peptide
  MOD_RES (32)..(32): Xaa is C or S
TPTKMSSLSMLFFNDKQQIILKVYPGMVVDRX

SEQ ID NO: 60171 - protein, 34 aa, Artificial Sequence
  Cyclic GFR-binding peptide
  MOD_RES (32)..(34): Xaa is C or S
TEESSLSMLFFRIKPHQGQHLKVYPFLQHNKXEX

SEQ ID NO: 60172 - protein, 36 aa, Artificial Sequence
  Cyclic GFR-binding peptide
  MOD_RES (33)..(35): Xaa is C or S
VPTKLSSLSVLFFDDMGVPTLKVYPEGMSVAEXGXR

SEQ ID NO: 60173 - protein, 35 aa, Artificial Sequence
  Cyclic GFR-binding peptide
  MOD_RES (1)..(2)..(34): Xaa is C or S
XXVPTRLSSLSILFFDSANNVVLKVYPDMVVESXG

SEQ ID NO: 60174 - protein, 35 aa, Artificial Sequence
  Cyclic GFR-binding peptide
  MOD_RES (5)..(6): Xaa is C or S
VPSTXXAPVKTSSLSMLFFDNGRVLLLKVYPMIVE

SEQ ID NO: 60175 - protein, 40 aa, Artificial Sequence
  Cyclic GFR-binding peptide
  MOD_RES (7)..(7): Xaa is C or S
NDEGLEXVPTEESSLSMLFFRIKPHQGQHLKVYPFLQHNK

SEQ ID NO: 60176 - protein, 25 aa, Artificial Sequence
  Cyclic GFR-binding peptide
PARLSSLSILFFDAANNVVLKVYPD

SEQ ID NO: 60177 - protein, 32 aa, Artificial Sequence
  Cyclic GFR-binding peptide
  MOD_RES (1)..(1): Xaa is C or S
XVPARLSSLSILFFDAANNVVLKVYPDMVVEA

SEQ ID NO: 60178 - protein, 39 aa, Artificial Sequence
  Cyclic GFR-binding peptide
  MOD_RES (3)..(4)..(36)..(38): Xaa is C or S
EPXXVPEKMSSLSILFFDENKNVVLKVYPNMTVESXAXR

SEQ ID NO: 60179 - protein, 33 aa, Artificial Sequence
  Cyclic GFR-binding peptide
  MOD_RES (30)..(32): Xaa is C or S
KLSSLSVLFFDDMGVPTLKVYPEGMSVAEXGXR

SEQ ID NO: 60180 - protein, 43 aa, Artificial Sequence
  Cyclic GFR-binding peptide
  MOD_RES (7)..(41)..(43): Xaa is C or S
NDEGLEXVPTEESSLSMLFFRIKPHQGQHLKVYPFLQHNKXEX

SEQ ID NO: 60181 - protein, 31 aa, Artificial Sequence
  Cyclic GFR-binding peptide
  MOD_RES (28)..(30): Xaa is C or S
LSSLSVLFFDSSNNVILKVYPNMVVKAXGXH

SEQ ID NO: 60182 - protein, 28 aa, Artificial Sequence
  Cyclic GFR-binding peptide
  MOD_RES (1)..(2): Xaa is C or S
XXVPTKLSSLSVLFFDDMGVPTLKVYPE

SEQ ID NO: 60183 - protein, 36 aa, Artificial Sequence
  Cyclic GFR-binding peptide
  MOD_RES (3)..(4)..(36): Xaa is C or S
ASXXVPARLSSLSILFFDAANNVVLKVYPDMVVEAX

SEQ ID NO: 60184 - protein, 23 aa, Artificial Sequence
  Cyclic GFR-binding peptide
KMSSLSMLFFNDKQQIILKVYPG

SEQ ID NO: 60185 - protein, 32 aa, Artificial Sequence
  Cyclic GFR-binding peptide
  MOD_RES (3)..(3): Xaa is C or S
LEXVPTEESSLSMLFFRIKPHQGQHLKVYPFL

SEQ ID NO: 60186 - protein, 31 aa, Artificial Sequence
  Cyclic GFR-binding peptide
  MOD_RES (30)..(30): Xaa is C or S
SSLSVLFFEYVRKKPKLLKVYPRLEEHLEXA

SEQ ID NO: 60187 - protein, 38 aa, Artificial Sequence
  Cyclic GFR-binding peptide
  MOD_RES (1)..(35)..(37): Xaa is C or S
XVPTEESSLSMLFFRIKPHQGQHLKVYPFLQHNKXEXR

SEQ ID NO: 60188 - protein, 27 aa, Artificial Sequence
  Cyclic GFR-binding peptide
VHHSSLSVLFFEYVRKKPKLLKVYPRL

SEQ ID NO: 60189 - protein, 30 aa, Artificial Sequence
  Cyclic GFR-binding peptide
  MOD_RES (30)..(30): Xaa is C or S
TQLSSLSVLFFDDSSNVILKVYPNMVVRAX

SEQ ID NO: 60190 - protein, 26 aa, Artificial Sequence
  Cyclic GFR-binding peptide
EKMSSLSILFFDENKNVVLKVYPNMT

SEQ ID NO: 60191 - protein, 38 aa, Artificial Sequence
  Cyclic GFR-binding peptide
  MOD_RES (5)..(6)..(38): Xaa is C or S
VPKPXXAPTQLSSLSVLFFDDSSNVILKVYPNMVVRAX

SEQ ID NO: 60192 - protein, 27 aa, Artificial Sequence
  Cyclic GFR-binding peptide
KMSSLSMLFFNDKQQIILKVYPGMVVD

SEQ ID NO: 60193 - protein, 32 aa, Artificial Sequence
  Cyclic GFR-binding peptide
  MOD_RES (2)..(3): Xaa is C or S
PXXAPTKLSSLSVLFFDDSSNVILKVYPNMVV

SEQ ID NO: 60194 - protein, 31 aa, Artificial Sequence
  Cyclic GFR-binding peptide
  MOD_RES (3)..(4): Xaa is C or S
GPXXTPTKMSSLSMLFFNDKQQIILKVYPGM

SEQ ID NO: 60195 - protein, 25 aa, Artificial Sequence
  Cyclic GFR-binding peptide
PQALSSLSILFFVGRKPKVLKVYPM

SEQ ID NO: 60196 - protein, 26 aa, Artificial Sequence
  Cyclic GFR-binding peptide
PTEESSLSMLFFRIKPHQGQHLKVYP

SEQ ID NO: 60197 - protein, 31 aa, Artificial Sequence
  Cyclic GFR-binding peptide
  MOD_RES (29)..(31): Xaa is C or S
SSLSMLFFRIKPHQGQHLKVYPFLQHNKXEX

SEQ ID NO: 60198 - protein, 34 aa, Artificial Sequence
  Cyclic GFR-binding peptide
  MOD_RES (6)..(7): Xaa is C or S
RVPSTXXAPVKTSSLSMLFFDNGRVLLLKVYPMI

SEQ ID NO: 60199 - protein, 39 aa, Artificial Sequence
  Cyclic GFR-binding peptide
  MOD_RES (3)..(4)..(36)..(38): Xaa is C or S
KAXXAPTKLSSLSVLFFDSSNNVILKVYPNMVVKAXGXH

SEQ ID NO: 60200 - protein, 35 aa, Artificial Sequence
  Cyclic GFR-binding peptide
  MOD_RES (1)..(2)..(33)..(35): Xaa is C or S
XXVPQDLSSLSILFFVGRTPKVLKVYPMVVKSXKX

SEQ ID NO: 60201 - protein, 35 aa, Artificial Sequence
  Cyclic GFR-binding peptide
  MOD_RES (1)..(33)..(35): Xaa is C or S
XVPTKLSSLSILFFDKGVVTYLKVYPGMAVSEXGX

SEQ ID NO: 60202 - protein, 35 aa, Artificial Sequence
  Cyclic GFR-binding peptide
  MOD_RES (4)..(5): Xaa is C or S
PEPXXVPEKMSSLSILFFDENKNVVLKVYPNMTVE

SEQ ID NO: 60203 - protein, 23 aa, Artificial Sequence
  Cyclic GFR-binding peptide
ESSLSMLFFRIKPHQGQHLKVYP

SEQ ID NO: 60204 - protein, 23 aa, Artificial Sequence
  Cyclic GFR-binding peptide
LSSLSILFFIGKTPKILKVYPMI

SEQ ID NO: 60205 - protein, 32 aa, Artificial Sequence
  Cyclic GFR-binding peptide
  MOD_RES (29)..(31): Xaa is C or S
KLSSLSVLFFDDSSNVILKVYPNMVVRSXGXH

SEQ ID NO: 60206 - protein, 37 aa, Artificial Sequence
  Cyclic GFR-binding peptide
  MOD_RES (3)..(4)..(35)..(37): Xaa is C or S
APXXVPQALSSLSILFFVGRKPKVLKVYPMIVRSXKX

SEQ ID NO: 60207 - protein, 31 aa, Artificial Sequence
  Cyclic GFR-binding peptide
  MOD_RES (2)..(3): Xaa is C or S
SXXVPARLSSLSILFFDAANNVVLKVYPDMV

SEQ ID NO: 60208 - protein, 27 aa, Artificial Sequence
  Cyclic GFR-binding peptide
  MOD_RES (27)..(27): Xaa is C or S
SSLSILFFDAANNVVLKVYPDMVVEAX

SEQ ID NO: 60209 - protein, 32 aa, Artificial Sequence
  Cyclic GFR-binding peptide
  MOD_RES (1)..(2): Xaa is C or S
XXVPQDLSSLSILFFVGRTPKVLKVYPMVVKS

SEQ ID NO: 60210 - protein, 27 aa, Artificial Sequence
  Cyclic GFR-binding peptide
  MOD_RES (27)..(27): Xaa is C or S
SSLSMLFFNDKQQIILKVYPGMVVDRX

SEQ ID NO: 60211 - protein, 30 aa, Artificial Sequence
  Cyclic GFR-binding peptide
  MOD_RES (27)..(29): Xaa is C or S
LSSLSILFFVGRTPKVLKVYPMVVKSXKXS

SEQ ID NO: 60212 - protein, 29 aa, Artificial Sequence
  Cyclic GFR-binding peptide
  MOD_RES (26)..(28): Xaa is C or S
SSLSILFFVGRTPKVLKVYPMVVKSXKXS

SEQ ID NO: 60213 - protein, 32 aa, Artificial Sequence
  Cyclic GFR-binding peptide
  MOD_RES (29)..(31): Xaa is C or S
KMSSLSILFFDENKNVVLKVYPNMTVESXAXR

SEQ ID NO: 60214 - protein, 25 aa, Artificial Sequence
  Cyclic GFR-binding peptide
APTKLSSLSVLFFDSSNNVILKVYP

SEQ ID NO: 60215 - protein, 23 aa, Artificial Sequence
  Cyclic GFR-binding peptide
SSLSMLFFRIKPHQGQHLKVYPF

SEQ ID NO: 60216 - protein, 35 aa, Artificial Sequence
  Cyclic GFR-binding peptide
  MOD_RES (3)..(3): Xaa is C or S
VKXQPSRVHHSSLSVLFFEYVRKKPKLLKVYPRLE

SEQ ID NO: 60217 - protein, 26 aa, Artificial Sequence
  Cyclic GFR-binding peptide
PQDLSSLSILFFVGRTPKVLKVYPMV

SEQ ID NO: 60218 - protein, 35 aa, Artificial Sequence
  Cyclic GFR-binding peptide
  MOD_RES (6)..(7): Xaa is C or S
KASKAXXVPTKLSSLSILFFDKGVVTYLKVYPGMA

SEQ ID NO: 60219 - protein, 37 aa, Artificial Sequence
  Cyclic GFR-binding peptide
  MOD_RES (5)..(6): Xaa is C or S
VPKPXXAPTKLSSLSVLFFDDSSNVILKVYPNMVVRS

SEQ ID NO: 60220 - protein, 30 aa, Artificial Sequence
  Cyclic GFR-binding peptide
  MOD_RES (30)..(30): Xaa is C or S
TKLSSLSILFFDKGVVTYLKVYPGMAVSEX

SEQ ID NO: 60221 - protein, 29 aa, Artificial Sequence
  Cyclic GFR-binding peptide
VPARLSSLSILFFDAANNVVLKVYPDMVV

SEQ ID NO: 60222 - protein, 26 aa, Artificial Sequence
  Cyclic GFR-binding peptide
KMSSLSILFFDENKNVVLKVYPNMTV

SEQ ID NO: 60223 - protein, 39 aa, Artificial Sequence
  Cyclic GFR-binding peptide
  MOD_RES (5)..(5): Xaa is C or S
SSVKXQPSRVHHSSLSVLFFEYVRKKPKLLKVYPRLEEH

SEQ ID NO: 60224 - protein, 22 aa, Artificial Sequence
  Cyclic GFR-binding peptide
SSLSILFFVGRKPKVLKVYPMI

SEQ ID NO: 60225 - protein, 32 aa, Artificial Sequence
  Cyclic GFR-binding peptide
  MOD_RES (6)..(7): Xaa is C or S
TVPKPXXAPTQLSSLSVLFFDDSSNVILKVYP

SEQ ID NO: 60226 - protein, 35 aa, Artificial Sequence
  Cyclic GFR-binding peptide
  MOD_RES (6)..(7): Xaa is C or S
ASASPXXVSQDLSSLSILFFIGKTPKILKVYPMIV

SEQ ID NO: 60227 - protein, 33 aa, Artificial Sequence
  Cyclic GFR-binding peptide
  MOD_RES (6)..(7): Xaa is C or S
TVPKPXXAPTQLSSLSVLFFDDSSNVILKVYPN

SEQ ID NO: 60228 - protein, 37 aa, Artificial Sequence
  Cyclic GFR-binding peptide
  MOD_RES (5)..(6)..(37): Xaa is C or S
VPSTXXAPVKTSSLSMLFFDNGRVLLLKVYPMIVEEX

SEQ ID NO: 60229 - protein, 29 aa, Artificial Sequence
  Cyclic GFR-binding peptide
  MOD_RES (27)..(29): Xaa is C or S
SSLSVLFFDSSNNVILKVYPNMVVKAXGX

SEQ ID NO: 60230 - protein, 31 aa, Artificial Sequence
  Cyclic GFR-binding peptide
  MOD_RES (28)..(30): Xaa is C or S
ALSSLSILFFVGRKPKVLKVYPMIVRSXKXS

SEQ ID NO: 60231 - protein, 40 aa, Artificial Sequence
  Cyclic GFR-binding peptide
  MOD_RES (5)..(6)..(38)..(40): Xaa is C or S
SAGPXXTPTKMSSLSMLFFNDKQQIILKVYPGMVVDRXGX

SEQ ID NO: 60232 - protein, 25 aa, Artificial Sequence
  Cyclic GFR-binding peptide
SSLSMLFFDNGRVLLLKVYPMIVEE

SEQ ID NO: 60233 - protein, 38 aa, Artificial Sequence
  Cyclic GFR-binding peptide
  MOD_RES (6)..(7): Xaa is C or S
STPPTXXVPTRLSSLSILFFDSANNVVLKVYPDMVVES

SEQ ID NO: 60234 - protein, 32 aa, Artificial Sequence
  Cyclic GFR-binding peptide
  MOD_RES (29)..(31): Xaa is C or S
KLSSLSVLFFDSSNNVILKVYPNMVVKAXGXH

SEQ ID NO: 60235 - protein, 40 aa, Artificial Sequence
  Cyclic GFR-binding peptide
  MOD_RES (5)..(6)..(38)..(40): Xaa is C or S
IPEPXXVPEKMSSLSILFFDENKNVVLKVYPNMTVESXAX

SEQ ID NO: 60236 - protein, 29 aa, Artificial Sequence
  Cyclic GFR-binding peptide
TKLSSLSILFFDKGVVTYLKVYPGMAVSE

SEQ ID NO: 60237 - protein, 25 aa, Artificial Sequence
  Cyclic GFR-binding peptide
SSLSMLFFNDKQQIILKVYPGMVVD

SEQ ID NO: 60238 - protein, 27 aa, Artificial Sequence
  Cyclic GFR-binding peptide
VPQDLSSLSILFFVGRTPKVLKVYPMV

SEQ ID NO: 60239 - protein, 40 aa, Artificial Sequence
  Cyclic GFR-binding peptide
  MOD_RES (4)..(5)..(37)..(39): Xaa is C or S
AGPXXTPTKMSSLSMLFFNDKQQIILKVYPGMVVDRXGXS

SEQ ID NO: 60240 - protein, 35 aa, Artificial Sequence
  Cyclic GFR-binding peptide
  MOD_RES (33)..(35): Xaa is C or S
PTEESSLSMLFFRIKPHQGQHLKVYPFLQHNKXEX

SEQ ID NO: 60241 - protein, 28 aa, Artificial Sequence
  Cyclic GFR-binding peptide
  MOD_RES (1)..(1): Xaa is C or S
XVSQDLSSLSILFFIGKTPKILKVYPMI

SEQ ID NO: 60242 - protein, 31 aa, Artificial Sequence
  Cyclic GFR-binding peptide
  MOD_RES (28)..(30): Xaa is C or S
LSSLSILFFDSANNVVLKVYPDMVVESXGXR

SEQ ID NO: 60243 - protein, 29 aa, Artificial Sequence
  Cyclic GFR-binding peptide
VPEKMSSLSILFFDENKNVVLKVYPNMTV

SEQ ID NO: 60244 - protein, 38 aa, Artificial Sequence
  Cyclic GFR-binding peptide
  MOD_RES (5)..(5): Xaa is C or S
SSVKXQPSRVHHSSLSVLFFEYVRKKPKLLKVYPRLEE

SEQ ID NO: 60245 - protein, 40 aa, Artificial Sequence
  Cyclic GFR-binding peptide
  MOD_RES (5)..(5): Xaa is C or S
SSVKXQPSRVHHSSLSVLFFEYVRKKPKLLKVYPRLEEHL

SEQ ID NO: 60246 - protein, 29 aa, Artificial Sequence
  Cyclic GFR-binding peptide
  MOD_RES (27)..(29): Xaa is C or S
LSSLSILFFVGRTPKVLKVYPMVVKSXKX

SEQ ID NO: 60247 - protein, 24 aa, Artificial Sequence
  Cyclic GFR-binding peptide
TQLSSLSVLFFDDSSNVILKVYPN

SEQ ID NO: 60248 - protein, 30 aa, Artificial Sequence
  Cyclic GFR-binding peptide
  MOD_RES (1)..(2): Xaa is C or S
XXTPTKMSSLSMLFFNDKQQIILKVYPGMV

SEQ ID NO: 60249 - protein, 24 aa, Artificial Sequence
  Cyclic GFR-binding peptide
KMSSLSMLFFNDKQQIILKVYPGM

SEQ ID NO: 60250 - protein, 38 aa, Artificial Sequence
  Cyclic GFR-binding peptide
  MOD_RES (3)..(4)..(36)..(38): Xaa is C or S
GPXXTPTKMSSLSMLFFNDKQQIILKVYPGMVVDRXGX

SEQ ID NO: 60251 - protein, 25 aa, Artificial Sequence
  Cyclic GFR-binding peptide
MSSLSILFFDENKNVVLKVYPNMTV

SEQ ID NO: 60252 - protein, 29 aa, Artificial Sequence
  Cyclic GFR-binding peptide
PTKLSSLSVLFFDDMGVPTLKVYPEGMSV

SEQ ID NO: 60253 - protein, 24 aa, Artificial Sequence
  Cyclic GFR-binding peptide
SSLSILFFDAANNVVLKVYPDMVV

SEQ ID NO: 60254 - protein, 42 aa, Artificial Sequence
  Cyclic GFR-binding peptide
  MOD_RES (3)..(40)..(42): Xaa is C or S
VKXQPSRVHHSSLSVLFFEYVRKKPKLLKVYPRLEEHLEXAX

SEQ ID NO: 60255 - protein, 27 aa, Artificial Sequence
  Cyclic GFR-binding peptide
  MOD_RES (1)..(2): Xaa is C or S
XXTPTKMSSLSMLFFNDKQQIILKVYP

SEQ ID NO: 60256 - protein, 36 aa, Artificial Sequence
  Cyclic GFR-binding peptide
  MOD_RES (2)..(3)..(35): Xaa is C or S
TXXVPTRLSSLSILFFDSANNVVLKVYPDMVVESXG

SEQ ID NO: 60257 - protein, 27 aa, Artificial Sequence
  Cyclic GFR-binding peptide
RVHHSSLSVLFFEYVRKKPKLLKVYPR

SEQ ID NO: 60258 - protein, 32 aa, Artificial Sequence
  Cyclic GFR-binding peptide
  MOD_RES (6)..(7): Xaa is C or S
KVGKAXXVPTKLSSLSVLFFDDMGVPTLKVYP

SEQ ID NO: 60259 - protein, 29 aa, Artificial Sequence
  Cyclic GFR-binding peptide
  MOD_RES (27)..(29): Xaa is C or S
LSSLSILFFIGKTPKILKVYPMIVKSXKX

SEQ ID NO: 60260 - protein, 33 aa, Artificial Sequence
  Cyclic GFR-binding peptide
  MOD_RES (4)..(4): Xaa is C or S
SVKXQPSRVHHSSLSVLFFEYVRKKPKLLKVYP

SEQ ID NO: 60261 - protein, 30 aa, Artificial Sequence
  Cyclic GFR-binding peptide
  MOD_RES (1)..(1): Xaa is C or S
XAPTKLSSLSVLFFDSSNNVILKVYPNMVV

SEQ ID NO: 60262 - protein, 21 aa, Artificial Sequence
  Cyclic GFR-binding peptide
LSSLSILFFDKGVVTYLKVYP

SEQ ID NO: 60263 - protein, 28 aa, Artificial Sequence
  Cyclic GFR-binding peptide
  MOD_RES (28)..(28): Xaa is C or S
LSSLSILFFDSANNVVLKVYPDMVVESX

SEQ ID NO: 60264 - protein, 28 aa, Artificial Sequence
  Cyclic GFR-binding peptide
PTEESSLSMLFFRIKPHQGQHLKVYPFL

SEQ ID NO: 60265 - protein, 26 aa, Artificial Sequence
  Cyclic GFR-binding peptide
ESSLSMLFFRIKPHQGQHLKVYPFLQ

SEQ ID NO: 60266 - protein, 27 aa, Artificial Sequence
  Cyclic GFR-binding peptide
  MOD_RES (27)..(27): Xaa is C or S
SSLSILFFDKGVVTYLKVYPGMAVSEX

SEQ ID NO: 60267 - protein, 33 aa, Artificial Sequence
  Cyclic GFR-binding peptide
  MOD_RES (31)..(33): Xaa is C or S
VPQALSSLSILFFVGRKPKVLKVYPMIVRSXKX

SEQ ID NO: 60268 - protein, 31 aa, Artificial Sequence
  Cyclic GFR-binding peptide
  MOD_RES (30)..(30): Xaa is C or S
PQALSSLSILFFVGRKPKVLKVYPMIVRSXK

SEQ ID NO: 60269 - protein, 34 aa, Artificial Sequence
  Cyclic GFR-binding peptide
  MOD_RES (5)..(5): Xaa is C or S
EGLEXVPTEESSLSMLFFRIKPHQGQHLKVYPFL

SEQ ID NO: 60270 - protein, 43 aa, Artificial Sequence
  Cyclic GFR-binding peptide
  MOD_RES (4)..(41)..(43): Xaa is C or S
SVKXQPSRVHHSSLSVLFFEYVRKKPKLLKVYPRLEEHLEXAX

SEQ ID NO: 60271 - protein, 33 aa, Artificial Sequence
  Cyclic GFR-binding peptide
  MOD_RES (31)..(33): Xaa is C or S
VSQDLSSLSILFFIGKTPKILKVYPMIVKSXKX

SEQ ID NO: 60272 - protein, 32 aa, Artificial Sequence
  Cyclic GFR-binding peptide
  MOD_RES (4)..(5): Xaa is C or S
PKPXXAPTKLSSLSVLFFDDSSNVILKVYPNM

SEQ ID NO: 60273 - protein, 34 aa, Artificial Sequence
  Cyclic GFR-binding peptide
  MOD_RES (6)..(7): Xaa is C or S
KVGKAXXVPTKLSSLSVLFFDDMGVPTLKVYPEG

SEQ ID NO: 60274 - protein, 39 aa, Artificial Sequence
  Cyclic GFR-binding peptide
  MOD_RES (5)..(6)..(37)..(39): Xaa is C or S
SAAPXXVPQALSSLSILFFVGRKPKVLKVYPMIVRSXKX

SEQ ID NO: 60275 - protein, 36 aa, Artificial Sequence
  Cyclic GFR-binding peptide
  MOD_RES (2)..(3)..(35): Xaa is C or S
SXXVPARLSSLSILFFDAANNVVLKVYPDMVVEAXG

SEQ ID NO: 60276 - protein, 26 aa, Artificial Sequence
  Cyclic GFR-binding peptide
HHSSLSVLFFEYVRKKPKLLKVYPRL

SEQ ID NO: 60277 - protein, 26 aa, Artificial Sequence
  Cyclic GFR-binding peptide
PARLSSLSILFFDAANNVVLKVYPDM

SEQ ID NO: 60278 - protein, 29 aa, Artificial Sequence
  Cyclic GFR-binding peptide
  MOD_RES (28)..(28): Xaa is C or S
KTSSLSMLFFDNGRVLLLKVYPMIVEEXG

SEQ ID NO: 60279 - protein, 21 aa, Artificial Sequence
  Cyclic GFR-binding peptide
LSSLSVLFFDDSSNVILKVYP

SEQ ID NO: 60280 - protein, 23 aa, Artificial Sequence
  Cyclic GFR-binding peptide
QLSSLSVLFFDDSSNVILKVYPN

SEQ ID NO: 60281 - protein, 28 aa, Artificial Sequence
  Cyclic GFR-binding peptide
TKLSSLSVLFFDDSSNVILKVYPNMVVR

SEQ ID NO: 60282 - protein, 32 aa, Artificial Sequence
  Cyclic GFR-binding peptide
  MOD_RES (2)..(3): Xaa is C or S
PXXAPTQLSSLSVLFFDDSSNVILKVYPNMVV

SEQ ID NO: 60283 - protein, 29 aa, Artificial Sequence
  Cyclic GFR-binding peptide
VPQALSSLSILFFVGRKPKVLKVYPMIVR

SEQ ID NO: 60284 - protein, 30 aa, Artificial Sequence
  Cyclic GFR-binding peptide
  MOD_RES (29)..(29): Xaa is C or S
VKTSSLSMLFFDNGRVLLLKVYPMIVEEXG

SEQ ID NO: 60285 - protein, 33 aa, Artificial Sequence
  Cyclic GFR-binding peptide
  MOD_RES (30)..(32): Xaa is C or S
TKLSSLSILFFDKGVVTYLKVYPGMAVSEXGXR

SEQ ID NO: 60286 - protein, 30 aa, Artificial Sequence
  Cyclic GFR-binding peptide
  MOD_RES (28)..(30): Xaa is C or S
LSSLSVLFFDDSSNVILKVYPNMVVRAXGX

SEQ ID NO: 60287 - protein, 35 aa, Artificial Sequence
  Cyclic GFR-binding peptide
  MOD_RES (1)..(32)..(34): Xaa is C or S
XVPQDLSSLSILFFVGRTPKVLKVYPMVVKSXKXS

SEQ ID NO: 60288 - protein, 32 aa, Artificial Sequence
  Cyclic GFR-binding peptide
  MOD_RES (29)..(31): Xaa is C or S
KMSSLSMLFFNDKQQIILKVYPGMVVDRXGXS

SEQ ID NO: 60289 - protein, 30 aa, Artificial Sequence
  Cyclic GFR-binding peptide
  MOD_RES (3)..(4): Xaa is C or S
STXXAPVKTSSLSMLFFDNGRVLLLKVYPM

SEQ ID NO: 60290 - protein, 38 aa, Artificial Sequence
  Cyclic GFR-binding peptide
  MOD_RES (3)..(4)..(36)..(38): Xaa is C or S
KAXXVPTKLSSLSILFFDKGVVTYLKVYPGMAVSEXGX

SEQ ID NO: 60291 - protein, 32 aa, Artificial Sequence
  Cyclic GFR-binding peptide
  MOD_RES (29)..(31): Xaa is C or S
QLSSLSVLFFDDSSNVILKVYPNMVVRAXGXH

SEQ ID NO: 60292 - protein, 22 aa, Artificial Sequence
  Cyclic GFR-binding peptide
SSLSVLFFDDMGVPTLKVYPEG

SEQ ID NO: 60293 - protein, 41 aa, Artificial Sequence
  Cyclic GFR-binding peptide
  MOD_RES (7)..(41): Xaa is C or S
NDEGLEXVPTEESSLSMLFFRIKPHQGQHLKVYPFLQHNKX

SEQ ID NO: 60294 - protein, 27 aa, Artificial Sequence
  Cyclic GFR-binding peptide
  MOD_RES (1)..(2): Xaa is C or S
XXVPARLSSLSILFFDAANNVVLKVYP

SEQ ID NO: 60295 - protein, 38 aa, Artificial Sequence
  Cyclic GFR-binding peptide
  MOD_RES (5)..(6)..(37): Xaa is C or S
SAAPXXVPQALSSLSILFFVGRKPKVLKVYPMIVRSXK

SEQ ID NO: 60296 - protein, 36 aa, Artificial Sequence
  Cyclic GFR-binding peptide
  MOD_RES (5)..(6): Xaa is C or S
SAAPXXVPQALSSLSILFFVGRKPKVLKVYPMIVRS

SEQ ID NO: 60297 - protein, 33 aa, Artificial Sequence
  Cyclic GFR-binding peptide
  MOD_RES (1)..(2): Xaa is C or S
XXAPTKLSSLSVLFFDDSSNVILKVYPNMVVRS

SEQ ID NO: 60298 - protein, 34 aa, Artificial Sequence
  Cyclic GFR-binding peptide
  MOD_RES (3)..(4): Xaa is C or S
KPXXAPTQLSSLSVLFFDDSSNVILKVYPNMVVR

SEQ ID NO: 60299 - protein, 36 aa, Artificial Sequence
  Cyclic GFR-binding peptide
  MOD_RES (1)..(2)..(34)..(36): Xaa is C or S
XXVPEKMSSLSILFFDENKNVVLKVYPNMTVESXAX

SEQ ID NO: 60300 - protein, 33 aa, Artificial Sequence
  Cyclic GFR-binding peptide
  MOD_RES (1)..(33): Xaa is C or S
XAPTKLSSLSVLFFDDSSNVILKVYPNMVVRSX

SEQ ID NO: 60301 - protein, 40 aa, Artificial Sequence
  Cyclic GFR-binding peptide
  MOD_RES (5)..(6)..(38)..(40): Xaa is C or S
ASKAXXVPTKLSSLSILFFDKGVVTYLKVYPGMAVSEXGX

SEQ ID NO: 60302 - protein, 24 aa, Artificial Sequence
  Cyclic GFR-binding peptide
LSSLSVLFFDDMGVPTLKVYPEGM

SEQ ID NO: 60303 - protein, 31 aa, Artificial Sequence
  Cyclic GFR-binding peptide
  MOD_RES (2)..(3): Xaa is C or S
AXXVPTKLSSLSILFFDKGVVTYLKVYPGMA

SEQ ID NO: 60304 - protein, 28 aa, Artificial Sequence
  Cyclic GFR-binding peptide
  MOD_RES (2)..(3): Xaa is C or S
TXXVPTRLSSLSILFFDSANNVVLKVYP

SEQ ID NO: 60305 - protein, 36 aa, Artificial Sequence
  Cyclic GFR-binding peptide
  MOD_RES (3)..(4)..(36): Xaa is C or S
PTXXVPTRLSSLSILFFDSANNVVLKVYPDMVVESX

SEQ ID NO: 60306 - protein, 38 aa, Artificial Sequence
  Cyclic GFR-binding peptide
  MOD_RES (6)..(7): Xaa is C or S
KVGKAXXVPTKLSSLSVLFFDDMGVPTLKVYPEGMSVA

SEQ ID NO: 60307 - protein, 35 aa, Artificial Sequence
  Cyclic GFR-binding peptide
  MOD_RES (6)..(7): Xaa is C or S
GIPEPXXVPEKMSSLSILFFDENKNVVLKVYPNMT

SEQ ID NO: 60308 - protein, 33 aa, Artificial Sequence
  Cyclic GFR-binding peptide
  MOD_RES (31)..(33): Xaa is C or S
HSSLSVLFFEYVRKKPKLLKVYPRLEEHLEXAX

SEQ ID NO: 60309 - protein, 32 aa, Artificial Sequence
  Cyclic GFR-binding peptide
  MOD_RES (30)..(32): Xaa is C or S
TQLSSLSVLFFDDSSNVILKVYPNMVVRAXGX

SEQ ID NO: 60310 - protein, 28 aa, Artificial Sequence
  Cyclic GFR-binding peptide
HSSLSVLFFEYVRKKPKLLKVYPRLEEH

SEQ ID NO: 60311 - protein, 33 aa, Artificial Sequence
  Cyclic GFR-binding peptide
  MOD_RES (5)..(6): Xaa is C or S
SASPXXVPQDLSSLSILFFVGRTPKVLKVYPMV

SEQ ID NO: 60312 - protein, 39 aa, Artificial Sequence
  Cyclic GFR-binding peptide
  MOD_RES (6)..(7)..(39): Xaa is C or S
GSAGPXXTPTKMSSLSMLFFNDKQQIILKVYPGMVVDRX

SEQ ID NO: 60313 - protein, 25 aa, Artificial Sequence
  Cyclic GFR-binding peptide
SSLSILFFDKGVVTYLKVYPGMAVS

SEQ ID NO: 60314 - protein, 24 aa, Artificial Sequence
  Cyclic GFR-binding peptide
TKMSSLSMLFFNDKQQIILKVYPG

SEQ ID NO: 60315 - protein, 37 aa, Artificial Sequence
  Cyclic GFR-binding peptide
  MOD_RES (5)..(6): Xaa is C or S
SAGPXXTPTKMSSLSMLFFNDKQQIILKVYPGMVVDR

SEQ ID NO: 60316 - protein, 29 aa, Artificial Sequence
  Cyclic GFR-binding peptide
  MOD_RES (3)..(4): Xaa is C or S
APXXVPQALSSLSILFFVGRKPKVLKVYP

SEQ ID NO: 60317 - protein, 31 aa, Artificial Sequence
  Cyclic GFR-binding peptide
  MOD_RES (3)..(4): Xaa is C or S
KPXXAPTQLSSLSVLFFDDSSNVILKVYPNM

SEQ ID NO: 60318 - protein, 33 aa, Artificial Sequence
  Cyclic GFR-binding peptide
  MOD_RES (31)..(33): Xaa is C or S
PTQLSSLSVLFFDDSSNVILKVYPNMVVRAXGX

SEQ ID NO: 60319 - protein, 31 aa, Artificial Sequence
  Cyclic GFR-binding peptide
  MOD_RES (31)..(31): Xaa is C or S
PTKLSSLSVLFFDDSSNVILKVYPNMVVRSX

SEQ ID NO: 60320 - protein, 31 aa, Artificial Sequence
  Cyclic GFR-binding peptide
  MOD_RES (2)..(3): Xaa is C or S
PXXVPQALSSLSILFFVGRKPKVLKVYPMIV

SEQ ID NO: 60321 - protein, 29 aa, Artificial Sequence
  Cyclic GFR-binding peptide
  MOD_RES (27)..(29): Xaa is C or S
SSLSMLFFNDKQQIILKVYPGMVVDRXGX

SEQ ID NO: 60322 - protein, 31 aa, Artificial Sequence
  Cyclic GFR-binding peptide
  MOD_RES (30)..(30): Xaa is C or S
EKMSSLSILFFDENKNVVLKVYPNMTVESXA

SEQ ID NO: 60323 - protein, 33 aa, Artificial Sequence
  Cyclic GFR-binding peptide
  MOD_RES (1)..(2): Xaa is C or S
XXVPTKLSSLSILFFDKGVVTYLKVYPGMAVSE

SEQ ID NO: 60324 - protein, 28 aa, Artificial Sequence
  Cyclic GFR-binding peptide
QLSSLSVLFFDDSSNVILKVYPNMVVRA

SEQ ID NO: 60325 - protein, 32 aa, Artificial Sequence
  Cyclic GFR-binding peptide
  MOD_RES (7)..(7): Xaa is C or S
HVTKPTXAPTKLSSLSVLFFDDSSNVILKVYP

SEQ ID NO: 60326 - protein, 42 aa, Artificial Sequence
  Cyclic GFR-binding peptide
  MOD_RES (6)..(7)..(39)..(41): Xaa is C or S
STPPTXXVPTRLSSLSILFFDSANNVVLKVYPDMVVESXGXR

SEQ ID NO: 60327 - protein, 33 aa, Artificial Sequence
  Cyclic GFR-binding peptide
  MOD_RES (1)..(32): Xaa is C or S
XVPQALSSLSILFFVGRKPKVLKVYPMIVRSXK

SEQ ID NO: 60328 - protein, 23 aa, Artificial Sequence
  Cyclic GFR-binding peptide
TKMSSLSMLFFNDKQQIILKVYP

SEQ ID NO: 60329 - protein, 38 aa, Artificial Sequence
  Cyclic GFR-binding peptide
  MOD_RES (2)..(3)..(35)..(37): Xaa is C or S
TXXVPTRLSSLSILFFDSANNVVLKVYPDMVVESXGXR

SEQ ID NO: 60330 - protein, 36 aa, Artificial Sequence
  Cyclic GFR-binding peptide
  MOD_RES (2)..(3)..(34)..(36): Xaa is C or S
TXXAPVKTSSLSMLFFDNGRVLLLKVYPMIVEEXGX

SEQ ID NO: 60331 - protein, 28 aa, Artificial Sequence
  Cyclic GFR-binding peptide
VPARLSSLSILFFDAANNVVLKVYPDMV

SEQ ID NO: 60332 - protein, 30 aa, Artificial Sequence
  Cyclic GFR-binding peptide
RVHHSSLSVLFFEYVRKKPKLLKVYPRLEE

SEQ ID NO: 60333 - protein, 33 aa, Artificial Sequence
  Cyclic GFR-binding peptide
  MOD_RES (6)..(7): Xaa is C or S
KVGKAXXVPTKLSSLSVLFFDDMGVPTLKVYPE

SEQ ID NO: 60334 - protein, 25 aa, Artificial Sequence
  Cyclic GFR-binding peptide
VPTRLSSLSILFFDSANNVVLKVYP

SEQ ID NO: 60335 - protein, 41 aa, Artificial Sequence
  Cyclic GFR-binding peptide
  MOD_RES (5)..(6)..(38)..(40): Xaa is C or S
VPKAXXAPTKLSSLSVLFFDSSNNVILKVYPNMVVKAXGXH

SEQ ID NO: 60336 - protein, 39 aa, Artificial Sequence
  Cyclic GFR-binding peptide
  MOD_RES (6)..(7)..(39): Xaa is C or S
TVPKPXXAPTQLSSLSVLFFDDSSNVILKVYPNMVVRAX

SEQ ID NO: 60337 - protein, 36 aa, Artificial Sequence
  Cyclic GFR-binding peptide
  MOD_RES (5)..(6): Xaa is C or S
SASPXXVPQDLSSLSILFFVGRTPKVLKVYPMVVKS

SEQ ID NO: 60338 - protein, 33 aa, Artificial Sequence
  Cyclic GFR-binding peptide
  MOD_RES (5)..(6): Xaa is C or S
SASPXXVSQDLSSLSILFFIGKTPKILKVYPMI

SEQ ID NO: 60339 - protein, 30 aa, Artificial Sequence
  Cyclic GFR-binding peptide
  MOD_RES (1)..(1): Xaa is C or S
XAPVKTSSLSMLFFDNGRVLLLKVYPMIVE

SEQ ID NO: 60340 - protein, 37 aa, Artificial Sequence
  Cyclic GFR-binding peptide
  MOD_RES (6)..(7): Xaa is C or S
ASAAPXXVPQALSSLSILFFVGRKPKVLKVYPMIVRS

SEQ ID NO: 60341 - protein, 28 aa, Artificial Sequence
  Cyclic GFR-binding peptide
KLSSLSVLFFDSSNNVILKVYPNMVVKA

SEQ ID NO: 60342 - protein, 28 aa, Artificial Sequence
  Cyclic GFR-binding peptide
PVKTSSLSMLFFDNGRVLLLKVYPMIVE

SEQ ID NO: 60343 - protein, 32 aa, Artificial Sequence
  Cyclic GFR-binding peptide
  MOD_RES (1)..(1): Xaa is C or S
XAPTQLSSLSVLFFDDSSNVILKVYPNMVVRA

SEQ ID NO: 60344 - protein, 39 aa, Artificial Sequence
  Cyclic GFR-binding peptide
  MOD_RES (4)..(5)..(36)..(38): Xaa is C or S
ASPXXVPQDLSSLSILFFVGRTPKVLKVYPMVVKSXKXS

SEQ ID NO: 60345 - protein, 33 aa, Artificial Sequence
  Cyclic GFR-binding peptide
  MOD_RES (31)..(33): Xaa is C or S
PTKLSSLSVLFFDDSSNVILKVYPNMVVRSXGX

SEQ ID NO: 60346 - protein, 32 aa, Artificial Sequence
  Cyclic GFR-binding peptide
  MOD_RES (29)..(31): Xaa is C or S
SSLSMLFFRIKPHQGQHLKVYPFLQHNKXEXR

SEQ ID NO: 60347 - protein, 27 aa, Artificial Sequence
  Cyclic GFR-binding peptide
  MOD_RES (27)..(27): Xaa is C or S
LSSLSILFFIGKTPKILKVYPMIVKSX

SEQ ID NO: 60348 - protein, 26 aa, Artificial Sequence
  Cyclic GFR-binding peptide
  MOD_RES (1)..(1): Xaa is C or S
XVSQDLSSLSILFFIGKTPKILKVYP

SEQ ID NO: 60349 - protein, 27 aa, Artificial Sequence
  Cyclic GFR-binding peptide
  MOD_RES (1)..(2): Xaa is C or S
XXVPTKLSSLSILFFDKGVVTYLKVYP

SEQ ID NO: 60350 - protein, 29 aa, Artificial Sequence
  Cyclic GFR-binding peptide
  MOD_RES (29)..(29): Xaa is C or S
RLSSLSILFFDSANNVVLKVYPDMVVESX

SEQ ID NO: 60351 - protein, 39 aa, Artificial Sequence
  Cyclic GFR-binding peptide
  MOD_RES (3)..(4)..(36)..(38): Xaa is C or S
PTXXVPTRLSSLSILFFDSANNVVLKVYPDMVVESXGXR

SEQ ID NO: 60352 - protein, 35 aa, Artificial Sequence
  Cyclic GFR-binding peptide
  MOD_RES (4)..(5): Xaa is C or S
PKPXXAPTKLSSLSVLFFDDSSNVILKVYPNMVVR

SEQ ID NO: 60353 - protein, 37 aa, Artificial Sequence
  Cyclic GFR-binding peptide
  MOD_RES (2)..(3)..(35)..(37): Xaa is C or S
PXXAPTKLSSLSVLFFDDSSNVILKVYPNMVVRSXGX

SEQ ID NO: 60354 - protein, 38 aa, Artificial Sequence
  Cyclic GFR-binding peptide
  MOD_RES (4)..(5)..(37): Xaa is C or S
PKAXXAPTKLSSLSVLFFDSSNNVILKVYPNMVVKAXG

SEQ ID NO: 60355 - protein, 31 aa, Artificial Sequence
  Cyclic GFR-binding peptide
  MOD_RES (28)..(30): Xaa is C or S
LSSLSILFFDAANNVVLKVYPDMVVEAXGXR

SEQ ID NO: 60356 - protein, 23 aa, Artificial Sequence
  Cyclic GFR-binding peptide
SSLSVLFFDDMGVPTLKVYPEGM

SEQ ID NO: 60357 - protein, 26 aa, Artificial Sequence
  Cyclic GFR-binding peptide
LSSLSILFFVGRTPKVLKVYPMVVKS

SEQ ID NO: 60358 - protein, 30 aa, Artificial Sequence
  Cyclic GFR-binding peptide
  MOD_RES (1)..(2): Xaa is C or S
XXAPTQLSSLSVLFFDDSSNVILKVYPNMV

SEQ ID NO: 60359 - protein, 40 aa, Artificial Sequence
  Cyclic GFR-binding peptide
  MOD_RES (4)..(5)..(38)..(40): Xaa is C or S
GKAXXVPTKLSSLSVLFFDDMGVPTLKVYPEGMSVAEXGX

SEQ ID NO: 60360 - protein, 26 aa, Artificial Sequence
  Cyclic GFR-binding peptide
  MOD_RES (1)..(1): Xaa is C or S
XVPQALSSLSILFFVGRKPKVLKVYP

SEQ ID NO: 60361 - protein, 36 aa, Artificial Sequence
  Cyclic GFR-binding peptide
  MOD_RES (2)..(3)..(34)..(36): Xaa is C or S
PXXVSQDLSSLSILFFIGKTPKILKVYPMIVKSXKX

SEQ ID NO: 60362 - protein, 36 aa, Artificial Sequence
  Cyclic GFR-binding peptide
  MOD_RES (2)..(3)..(34)..(36): Xaa is C or S
PXXVPQALSSLSILFFVGRKPKVLKVYPMIVRSXKX

SEQ ID NO: 60363 - protein, 24 aa, Artificial Sequence
  Cyclic GFR-binding peptide
SSLSILFFVGRTPKVLKVYPMVVK

SEQ ID NO: 60364 - protein, 25 aa, Artificial Sequence
  Cyclic GFR-binding peptide
VKTSSLSMLFFDNGRVLLLKVYPMI

SEQ ID NO: 60365 - protein, 41 aa, Artificial Sequence
  Cyclic GFR-binding peptide
  MOD_RES (6)..(7)..(40): Xaa is C or S
KVGKAXXVPTKLSSLSVLFFDDMGVPTLKVYPEGMSVAEXG

SEQ ID NO: 60366 - protein, 37 aa, Artificial Sequence
  Cyclic GFR-binding peptide
  MOD_RES (1)..(2)..(34)..(36): Xaa is C or S
XXTPTKMSSLSMLFFNDKQQIILKVYPGMVVDRXGXS

SEQ ID NO: 60367 - protein, 30 aa, Artificial Sequence
  Cyclic GFR-binding peptide
  MOD_RES (29)..(29): Xaa is C or S
QDLSSLSILFFVGRTPKVLKVYPMVVKSXK

SEQ ID NO: 60368 - protein, 35 aa, Artificial Sequence
  Cyclic GFR-binding peptide
  MOD_RES (5)..(5): Xaa is C or S
SSVKXQPSRVHHSSLSVLFFEYVRKKPKLLKVYPR

SEQ ID NO: 60369 - protein, 37 aa, Artificial Sequence
  Cyclic GFR-binding peptide
  MOD_RES (4)..(5)..(37): Xaa is C or S
SKAXXVPTKLSSLSILFFDKGVVTYLKVYPGMAVSEX

SEQ ID NO: 60370 - protein, 36 aa, Artificial Sequence
  Cyclic GFR-binding peptide
  MOD_RES (6)..(7): Xaa is C or S
KVGKAXXVPTKLSSLSVLFFDDMGVPTLKVYPEGMS

SEQ ID NO: 60371 - protein, 29 aa, Artificial Sequence
  Cyclic GFR-binding peptide
  MOD_RES (1)..(1): Xaa is C or S
XVPARLSSLSILFFDAANNVVLKVYPDMV

SEQ ID NO: 60372 - protein, 40 aa, Artificial Sequence
  Cyclic GFR-binding peptide
  MOD_RES (6)..(7)..(38)..(40): Xaa is C or S
ASASPXXVPQDLSSLSILFFVGRTPKVLKVYPMVVKSXKX

SEQ ID NO: 60373 - protein, 30 aa, Artificial Sequence
  Cyclic GFR-binding peptide
  MOD_RES (1)..(2): Xaa is C or S
XXVSQDLSSLSILFFIGKTPKILKVYPMIV

SEQ ID NO: 60374 - protein, 38 aa, Artificial Sequence
  Cyclic GFR-binding peptide
  MOD_RES (5)..(6)..(38): Xaa is C or S
ASKAXXVPTKLSSLSILFFDKGVVTYLKVYPGMAVSEX

SEQ ID NO: 60375 - protein, 27 aa, Artificial Sequence
  Cyclic GFR-binding peptide
PTQLSSLSVLFFDDSSNVILKVYPNMV

SEQ ID NO: 60376 - protein, 30 aa, Artificial Sequence
  Cyclic GFR-binding peptide
PTQLSSLSVLFFDDSSNVILKVYPNMVVRA

SEQ ID NO: 60377 - protein, 34 aa, Artificial Sequence
  Cyclic GFR-binding peptide
  MOD_RES (32)..(34): Xaa is C or S
PTKLSSLSVLFFDDMGVPTLKVYPEGMSVAEXGX

SEQ ID NO: 60378 - protein, 35 aa, Artificial Sequence
  Cyclic GFR-binding peptide
  MOD_RES (1)..(2)..(35): Xaa is C or S
XXVPTKLSSLSVLFFDDMGVPTLKVYPEGMSVAEX

SEQ ID NO: 60379 - protein, 23 aa, Artificial Sequence
  Cyclic GFR-binding peptide
MSSLSMLFFNDKQQIILKVYPGM

SEQ ID NO: 60380 - protein, 26 aa, Artificial Sequence
  Cyclic GFR-binding peptide
ALSSLSILFFVGRKPKVLKVYPMIVR

SEQ ID NO: 60381 - protein, 29 aa, Artificial Sequence
  Cyclic GFR-binding peptide
  MOD_RES (29)..(29): Xaa is C or S
KLSSLSILFFDKGVVTYLKVYPGMAVSEX

SEQ ID NO: 60382 - protein, 30 aa, Artificial Sequence
  Cyclic GFR-binding peptide
  MOD_RES (27)..(29): Xaa is C or S
SSLSVLFFDDSSNVILKVYPNMVVRSXGXH

SEQ ID NO: 60383 - protein, 30 aa, Artificial Sequence
  Cyclic GFR-binding peptide
  MOD_RES (3)..(4): Xaa is C or S
APXXVPQALSSLSILFFVGRKPKVLKVYPM

SEQ ID NO: 60384 - protein, 20 aa, Artificial Sequence
  Cyclic GFR-binding peptide
SSLSILFFIGKTPKILKVYP

SEQ ID NO: 60385 - protein, 32 aa, Artificial Sequence
  Cyclic GFR-binding peptide
  MOD_RES (4)..(5): Xaa is C or S
AAPXXVPQALSSLSILFFVGRKPKVLKVYPMI

SEQ ID NO: 60386 - protein, 35 aa, Artificial Sequence
  Cyclic GFR-binding peptide
  MOD_RES (3)..(4): Xaa is C or S
KPXXAPTKLSSLSVLFFDDSSNVILKVYPNMVVRS

SEQ ID NO: 60387 - protein, 29 aa, Artificial Sequence
  Cyclic GFR-binding peptide
VHHSSLSVLFFEYVRKKPKLLKVYPRLEE

SEQ ID NO: 60388 - protein, 37 aa, Artificial Sequence
  Cyclic GFR-binding peptide
  MOD_RES (5)..(6)..(37): Xaa is C or S
SAAPXXVPQALSSLSILFFVGRKPKVLKVYPMIVRSX

SEQ ID NO: 60389 - protein, 37 aa, Artificial Sequence
  Cyclic GFR-binding peptide
  MOD_RES (2)..(3)..(34)..(36): Xaa is C or S
PXXVSQDLSSLSILFFIGKTPKILKVYPMIVKSXKXS

SEQ ID NO: 60390 - protein, 31 aa, Artificial Sequence
  Cyclic GFR-binding peptide
  MOD_RES (1)..(1): Xaa is C or S
XVSQDLSSLSILFFIGKTPKILKVYPMIVKS

SEQ ID NO: 60391 - protein, 28 aa, Artificial Sequence
  Cyclic GFR-binding peptide
  MOD_RES (2)..(3): Xaa is C or S
AXXVPTKLSSLSILFFDKGVVTYLKVYP

SEQ ID NO: 60392 - protein, 30 aa, Artificial Sequence
  Cyclic GFR-binding peptide
  MOD_RES (3)..(3): Xaa is C or S
PTXAPTKLSSLSVLFFDDSSNVILKVYPNM

SEQ ID NO: 60393 - protein, 27 aa, Artificial Sequence
  Cyclic GFR-binding peptide
TKLSSLSVLFFDDMGVPTLKVYPEGMS

SEQ ID NO: 60394 - protein, 29 aa, Artificial Sequence
  Cyclic GFR-binding peptide
  MOD_RES (1)..(2): Xaa is C or S
XXVSQDLSSLSILFFIGKTPKILKVYPMI

SEQ ID NO: 60395 - protein, 32 aa, Artificial Sequence
  Cyclic GFR-binding peptide
  MOD_RES (1)..(2): Xaa is C or S
XXAPVKTSSLSMLFFDNGRVLLLKVYPMIVEE

SEQ ID NO: 60396 - protein, 34 aa, Artificial Sequence
  Cyclic GFR-binding peptide
  MOD_RES (1)..(33): Xaa is C or S
XAPTKLSSLSVLFFDDSSNVILKVYPNMVVRSXG

SEQ ID NO: 60397 - protein, 31 aa, Artificial Sequence
  Cyclic GFR-binding peptide
  MOD_RES (1)..(1): Xaa is C or S
XVPQALSSLSILFFVGRKPKVLKVYPMIVRS

SEQ ID NO: 60398 - protein, 38 aa, Artificial Sequence
  Cyclic GFR-binding peptide
  MOD_RES (5)..(6)..(37): Xaa is C or S
VPSTXXAPVKTSSLSMLFFDNGRVLLLKVYPMIVEEXG

SEQ ID NO: 60399 - protein, 34 aa, Artificial Sequence
  Cyclic GFR-binding peptide
  MOD_RES (5)..(6): Xaa is C or S
SAAPXXVPQALSSLSILFFVGRKPKVLKVYPMIV

SEQ ID NO: 60400 - protein, 33 aa, Artificial Sequence
  Cyclic GFR-binding peptide
  MOD_RES (33)..(33): Xaa is C or S
PTEESSLSMLFFRIKPHQGQHLKVYPFLQHNKX

SEQ ID NO: 60401 - protein, 28 aa, Artificial Sequence
  Cyclic GFR-binding peptide
VPTKLSSLSVLFFDDMGVPTLKVYPEGM

SEQ ID NO: 60402 - protein, 31 aa, Artificial Sequence
  Cyclic GFR-binding peptide
  MOD_RES (1)..(1): Xaa is C or S
XAPTKLSSLSVLFFDDSSNVILKVYPNMVVR

SEQ ID NO: 60403 - protein, 29 aa, Artificial Sequence
  Cyclic GFR-binding peptide
  MOD_RES (29)..(29): Xaa is C or S
KLSSLSVLFFDSSNNVILKVYPNMVVKAX

SEQ ID NO: 60404 - protein, 33 aa, Artificial Sequence
  Cyclic GFR-binding peptide
  MOD_RES (30)..(32): Xaa is C or S
ARLSSLSILFFDAANNVVLKVYPDMVVEAXGXR

SEQ ID NO: 60405 - protein, 34 aa, Artificial Sequence
  Cyclic GFR-binding peptide
  MOD_RES (2)..(3): Xaa is C or S
AXXAPTKLSSLSVLFFDSSNNVILKVYPNMVVKA

SEQ ID NO: 60406 - protein, 34 aa, Artificial Sequence
  Cyclic GFR-binding peptide
  MOD_RES (3)..(3): Xaa is C or S
VKXQPSRVHHSSLSVLFFEYVRKKPKLLKVYPRL

SEQ ID NO: 60407 - protein, 33 aa, Artificial Sequence
  Cyclic GFR-binding peptide
  MOD_RES (4)..(5): Xaa is C or S
PASXXVPARLSSLSILFFDAANNVVLKVYPDMV

SEQ ID NO: 60408 - protein, 32 aa, Artificial Sequence
  Cyclic GFR-binding peptide
  MOD_RES (30)..(32): Xaa is C or S
TKLSSLSVLFFDSSNNVILKVYPNMVVKAXGX

SEQ ID NO: 60409 - protein, 27 aa, Artificial Sequence
  Cyclic GFR-binding peptide
  MOD_RES (27)..(27): Xaa is C or S
SSLSVLFFDDSSNVILKVYPNMVVRSX

SEQ ID NO: 60410 - protein, 41 aa, Artificial Sequence
  Cyclic GFR-binding peptide
  MOD_RES (5)..(6)..(38)..(40): Xaa is C or S
VPKPXXAPTQLSSLSVLFFDDSSNVILKVYPNMVVRAXGXH

SEQ ID NO: 60411 - protein, 28 aa, Artificial Sequence
  Cyclic GFR-binding peptide
PSRVHHSSLSVLFFEYVRKKPKLLKVYP

SEQ ID NO: 60412 - protein, 38 aa, Artificial Sequence
  Cyclic GFR-binding peptide
  MOD_RES (6)..(7): Xaa is C or S
HVPKPXXAPTKLSSLSVLFFDDSSNVILKVYPNMVVRS

SEQ ID NO: 60413 - protein, 28 aa, Artificial Sequence
  Cyclic GFR-binding peptide
SSLSVLFFEYVRKKPKLLKVYPRLEEHL

SEQ ID NO: 60414 - protein, 27 aa, Artificial Sequence
  Cyclic GFR-binding peptide
  MOD_RES (27)..(27): Xaa is C or S
LSSLSILFFVGRKPKVLKVYPMIVRSX

SEQ ID NO: 60415 - protein, 33 aa, Artificial Sequence
  Cyclic GFR-binding peptide
  MOD_RES (6)..(7): Xaa is C or S
ASAAPXXVPQALSSLSILFFVGRKPKVLKVYPM

SEQ ID NO: 60416 - protein, 30 aa, Artificial Sequence
  Cyclic GFR-binding peptide
  MOD_RES (1)..(1): Xaa is C or S
XAPTKLSSLSVLFFDDSSNVILKVYPNMVV

SEQ ID NO: 60417 - protein, 21 aa, Artificial Sequence
  Cyclic GFR-binding peptide
LSSLSVLFFDDMGVPTLKVYP

SEQ ID NO: 60418 - protein, 20 aa, Artificial Sequence
  Cyclic GFR-binding peptide
SSLSILFFDSANNVVLKVYP

SEQ ID NO: 60419 - protein, 24 aa, Artificial Sequence
  Cyclic GFR-binding peptide
SSLSILFFIGKTPKILKVYPMIVK

SEQ ID NO: 60420 - protein, 26 aa, Artificial Sequence
  Cyclic GFR-binding peptide
TKMSSLSMLFFNDKQQIILKVYPGMV

SEQ ID NO: 60421 - protein, 29 aa, Artificial Sequence
  Cyclic GFR-binding peptide
  MOD_RES (1)..(2): Xaa is C or S
XXVPQDLSSLSILFFVGRTPKVLKVYPMV

SEQ ID NO: 60422 - protein, 33 aa, Artificial Sequence
  Cyclic GFR-binding peptide
  MOD_RES (6)..(6): Xaa is C or S
DEGLEXVPTEESSLSMLFFRIKPHQGQHLKVYP

SEQ ID NO: 60423 - protein, 35 aa, Artificial Sequence
  Cyclic GFR-binding peptide
  MOD_RES (2)..(2): Xaa is C or S
EXVPTEESSLSMLFFRIKPHQGQHLKVYPFLQHNK

SEQ ID NO: 60424 - protein, 25 aa, Artificial Sequence
  Cyclic GFR-binding peptide
VPARLSSLSILFFDAANNVVLKVYP

SEQ ID NO: 60425 - protein, 23 aa, Artificial Sequence
  Cyclic GFR-binding peptide
KLSSLSILFFDKGVVTYLKVYPG

SEQ ID NO: 60426 - protein, 24 aa, Artificial Sequence
  Cyclic GFR-binding peptide
SSLSILFFDENKNVVLKVYPNMTV

SEQ ID NO: 60427 - protein, 23 aa, Artificial Sequence
  Cyclic GFR-binding peptide
SSLSILFFDKGVVTYLKVYPGMA

SEQ ID NO: 60428 - protein, 29 aa, Artificial Sequence
  Cyclic GFR-binding peptide
  MOD_RES (3)..(4): Xaa is C or S
GPXXTPTKMSSLSMLFFNDKQQIILKVYP

SEQ ID NO: 60429 - protein, 28 aa, Artificial Sequence
  Cyclic GFR-binding peptide
SQDLSSLSILFFIGKTPKILKVYPMIVK

SEQ ID NO: 60430 - protein, 38 aa, Artificial Sequence
  Cyclic GFR-binding peptide
  MOD_RES (2)..(3)..(35)..(37): Xaa is C or S
AXXVPTKLSSLSILFFDKGVVTYLKVYPGMAVSEXGXR

SEQ ID NO: 60431 - protein, 32 aa, Artificial Sequence
  Cyclic GFR-binding peptide
  MOD_RES (30)..(32): Xaa is C or S
TKLSSLSVLFFDDSSNVILKVYPNMVVRSXGX

SEQ ID NO: 60432 - protein, 34 aa, Artificial Sequence
  Cyclic GFR-binding peptide
  MOD_RES (1)..(33): Xaa is C or S
XVPTKLSSLSILFFDKGVVTYLKVYPGMAVSEXG

SEQ ID NO: 60433 - protein, 34 aa, Artificial Sequence
  Cyclic GFR-binding peptide
  MOD_RES (1)..(32)..(34): Xaa is C or S
XVPQDLSSLSILFFVGRTPKVLKVYPMVVKSXKX

SEQ ID NO: 60434 - protein, 28 aa, Artificial Sequence
  Cyclic GFR-binding peptide
TKLSSLSVLFFDDMGVPTLKVYPEGMSV

SEQ ID NO: 60435 - protein, 32 aa, Artificial Sequence
  Cyclic GFR-binding peptide
  MOD_RES (1)..(1): Xaa is C or S
XVPEKMSSLSILFFDENKNVVLKVYPNMTVES

SEQ ID NO: 60436 - protein, 35 aa, Artificial Sequence
  Cyclic GFR-binding peptide
  MOD_RES (35)..(35): Xaa is C or S
SRVHHSSLSVLFFEYVRKKPKLLKVYPRLEEHLEX

SEQ ID NO: 60437 - protein, 32 aa, Artificial Sequence
  Cyclic GFR-binding peptide
  MOD_RES (3)..(4): Xaa is C or S
APXXVPQALSSLSILFFVGRKPKVLKVYPMIV

SEQ ID NO: 60438 - protein, 30 aa, Artificial Sequence
  Cyclic GFR-binding peptide
TKLSSLSVLFFDDMGVPTLKVYPEGMSVAE

SEQ ID NO: 60439 - protein, 29 aa, Artificial Sequence
  Cyclic GFR-binding peptide
APTKLSSLSVLFFDSSNNVILKVYPNMVV

SEQ ID NO: 60440 - protein, 30 aa, Artificial Sequence
  Cyclic GFR-binding peptide
  MOD_RES (1)..(1): Xaa is C or S
XQPSRVHHSSLSVLFFEYVRKKPKLLKVYP

SEQ ID NO: 60441 - protein, 34 aa, Artificial Sequence
  Cyclic GFR-binding peptide
QPSRVHHSSLSVLFFEYVRKKPKLLKVYPRLEEH

SEQ ID NO: 60442 - protein, 30 aa, Artificial Sequence
  Cyclic GFR-binding peptide
APTKLSSLSVLFFDSSNNVILKVYPNMVVK

SEQ ID NO: 60443 - protein, 30 aa, Artificial Sequence
  Cyclic GFR-binding peptide
  MOD_RES (1)..(1): Xaa is C or S
XVPQALSSLSILFFVGRKPKVLKVYPMIVR

SEQ ID NO: 60444 - protein, 32 aa, Artificial Sequence
  Cyclic GFR-binding peptide
  MOD_RES (3)..(4): Xaa is C or S
ASXXVPARLSSLSILFFDAANNVVLKVYPDMV

SEQ ID NO: 60445 - protein, 27 aa, Artificial Sequence
  Cyclic GFR-binding peptide
ALSSLSILFFVGRKPKVLKVYPMIVRS

SEQ ID NO: 60446 - protein, 27 aa, Artificial Sequence
  Cyclic GFR-binding peptide
  MOD_RES (27)..(27): Xaa is C or S
SSLSVLFFDSSNNVILKVYPNMVVKAX

SEQ ID NO: 60447 - protein, 38 aa, Artificial Sequence
  Cyclic GFR-binding peptide
  MOD_RES (35)..(37): Xaa is C or S
SRVHHSSLSVLFFEYVRKKPKLLKVYPRLEEHLEXAXA

SEQ ID NO: 60448 - protein, 27 aa, Artificial Sequence
  Cyclic GFR-binding peptide
QALSSLSILFFVGRKPKVLKVYPMIVR

SEQ ID NO: 60449 - protein, 35 aa, Artificial Sequence
  Cyclic GFR-binding peptide
  MOD_RES (6)..(7): Xaa is C or S
STPPTXXVPTRLSSLSILFFDSANNVVLKVYPDMV

SEQ ID NO: 60450 - protein, 25 aa, Artificial Sequence
  Cyclic GFR-binding peptide
SQDLSSLSILFFIGKTPKILKVYPM

SEQ ID NO: 60451 - protein, 31 aa, Artificial Sequence
  Cyclic GFR-binding peptide
  MOD_RES (5)..(6): Xaa is C or S
TPPTXXVPTRLSSLSILFFDSANNVVLKVYP

SEQ ID NO: 60452 - protein, 36 aa, Artificial Sequence
  Cyclic GFR-binding peptide
  MOD_RES (3)..(4)..(36): Xaa is C or S
KPXXAPTKLSSLSVLFFDDSSNVILKVYPNMVVRSX

SEQ ID NO: 60453 - protein, 23 aa, Artificial Sequence
  Cyclic GFR-binding peptide
SSLSILFFIGKTPKILKVYPMIV

SEQ ID NO: 60454 - protein, 30 aa, Artificial Sequence
  Cyclic GFR-binding peptide
  MOD_RES (2)..(3): Xaa is C or S
AXXVPTKLSSLSILFFDKGVVTYLKVYPGM

SEQ ID NO: 60455 - protein, 27 aa, Artificial Sequence
  Cyclic GFR-binding peptide
  MOD_RES (26)..(26): Xaa is C or S
SSLSILFFIGKTPKILKVYPMIVKSXK

SEQ ID NO: 60456 - protein, 34 aa, Artificial Sequence
  Cyclic GFR-binding peptide
  MOD_RES (1)..(33): Xaa is C or S
XVPTRLSSLSILFFDSANNVVLKVYPDMVVESXG

SEQ ID NO: 60457 - protein, 24 aa, Artificial Sequence
  Cyclic GFR-binding peptide
TKLSSLSILFFDKGVVTYLKVYPG

SEQ ID NO: 60458 - protein, 27 aa, Artificial Sequence
  Cyclic GFR-binding peptide
  MOD_RES (1)..(2): Xaa is C or S
XXVPTKLSSLSVLFFDDMGVPTLKVYP

SEQ ID NO: 60459 - protein, 29 aa, Artificial Sequence
  Cyclic GFR-binding peptide
  MOD_RES (2)..(3): Xaa is C or S
PXXVPQALSSLSILFFVGRKPKVLKVYPM

SEQ ID NO: 60460 - protein, 33 aa, Artificial Sequence
  Cyclic GFR-binding peptide
  MOD_RES (31)..(33): Xaa is C or S
PTKLSSLSVLFFDSSNNVILKVYPNMVVKAXGX

SEQ ID NO: 60461 - protein, 30 aa, Artificial Sequence
  Cyclic GFR-binding peptide
  MOD_RES (2)..(3): Xaa is C or S
PXXVPEKMSSLSILFFDENKNVVLKVYPNM

SEQ ID NO: 60462 - protein, 26 aa, Artificial Sequence
  Cyclic GFR-binding peptide
RLSSLSILFFDAANNVVLKVYPDMVV

SEQ ID NO: 60463 - protein, 26 aa, Artificial Sequence
  Cyclic GFR-binding peptide
LSSLSVLFFDSSNNVILKVYPNMVVK

SEQ ID NO: 60464 - protein, 35 aa, Artificial Sequence
  Cyclic GFR-binding peptide
  MOD_RES (3)..(35): Xaa is C or S
PTXAPTKLSSLSVLFFDDSSNVILKVYPNMVVRSX

SEQ ID NO: 60465 - protein, 30 aa, Artificial Sequence
  Cyclic GFR-binding peptide
HSSLSVLFFEYVRKKPKLLKVYPRLEEHLE

SEQ ID NO: 60466 - protein, 26 aa, Artificial Sequence
  Cyclic GFR-binding peptide
QDLSSLSILFFIGKTPKILKVYPMIV

SEQ ID NO: 60467 - protein, 33 aa, Artificial Sequence
  Cyclic GFR-binding peptide
  MOD_RES (6)..(7): Xaa is C or S
YVPKPXXAPTKLSSLSVLFFDDSSNVILKVYPN

SEQ ID NO: 60468 - protein, 35 aa, Artificial Sequence
  Cyclic GFR-binding peptide
  MOD_RES (3)..(4)..(35): Xaa is C or S
SPXXVPQDLSSLSILFFVGRTPKVLKVYPMVVKSX

SEQ ID NO: 60469 - protein, 35 aa, Artificial Sequence
  Cyclic GFR-binding peptide
  MOD_RES (1)..(33)..(35): Xaa is C or S
XAPTKLSSLSVLFFDDSSNVILKVYPNMVVRSXGX

SEQ ID NO: 60470 - protein, 34 aa, Artificial Sequence
  Cyclic GFR-binding peptide
  MOD_RES (1)..(33): Xaa is C or S
XVPARLSSLSILFFDAANNVVLKVYPDMVVEAXG

SEQ ID NO: 60471 - protein, 35 aa, Artificial Sequence
  Cyclic GFR-binding peptide
  MOD_RES (3)..(4): Xaa is C or S
KPXXAPTQLSSLSVLFFDDSSNVILKVYPNMVVRA

SEQ ID NO: 60472 - protein, 23 aa, Artificial Sequence
  Cyclic GFR-binding peptide
SSLSMLFFNDKQQIILKVYPGMV

SEQ ID NO: 60473 - protein, 34 aa, Artificial Sequence
  Cyclic GFR-binding peptide
PSRVHHSSLSVLFFEYVRKKPKLLKVYPRLEEHL

SEQ ID NO: 60474 - protein, 33 aa, Artificial Sequence
  Cyclic GFR-binding peptide
  MOD_RES (1)..(2)..(33): Xaa is C or S
XXVSQDLSSLSILFFIGKTPKILKVYPMIVKSX

SEQ ID NO: 60475 - protein, 26 aa, Artificial Sequence
  Cyclic GFR-binding peptide
APTKLSSLSVLFFDDSSNVILKVYPN

SEQ ID NO: 60476 - protein, 28 aa, Artificial Sequence
  Cyclic GFR-binding peptide
  MOD_RES (1)..(1): Xaa is C or S
XVPQDLSSLSILFFVGRTPKVLKVYPMV

SEQ ID NO: 60477 - protein, 35 aa, Artificial Sequence
  Cyclic GFR-binding peptide
  MOD_RES (2)..(3)..(34): Xaa is C or S
PXXVSQDLSSLSILFFIGKTPKILKVYPMIVKSXK

SEQ ID NO: 60478 - protein, 24 aa, Artificial Sequence
  Cyclic GFR-binding peptide
LSSLSILFFVGRTPKVLKVYPMVV

SEQ ID NO: 60479 - protein, 26 aa, Artificial Sequence
  Cyclic GFR-binding peptide
SSLSVLFFDSSNNVILKVYPNMVVKA

SEQ ID NO: 60480 - protein, 28 aa, Artificial Sequence
  Cyclic GFR-binding peptide
  MOD_RES (1)..(1): Xaa is C or S
XVPTKLSSLSILFFDKGVVTYLKVYPGM

SEQ ID NO: 60481 - protein, 31 aa, Artificial Sequence
  Cyclic GFR-binding peptide
PTEESSLSMLFFRIKPHQGQHLKVYPFLQHN

SEQ ID NO: 60482 - protein, 27 aa, Artificial Sequence
  Cyclic GFR-binding peptide
  MOD_RES (27)..(27): Xaa is C or S
SSLSVLFFDDSSNVILKVYPNMVVRAX

SEQ ID NO: 60483 - protein, 30 aa, Artificial Sequence
  Cyclic GFR-binding peptide
  MOD_RES (4)..(5): Xaa is C or S
PKPXXAPTKLSSLSVLFFDDSSNVILKVYP

SEQ ID NO: 60484 - protein, 38 aa, Artificial Sequence
  Cyclic GFR-binding peptide
  MOD_RES (4)..(36)..(38): Xaa is C or S
KPTXAPTKLSSLSVLFFDDSSNVILKVYPNMVVRSXGX

SEQ ID NO: 60485 - protein, 28 aa, Artificial Sequence
  Cyclic GFR-binding peptide
PARLSSLSILFFDAANNVVLKVYPDMVV

SEQ ID NO: 60486 - protein, 26 aa, Artificial Sequence
  Cyclic GFR-binding peptide
KLSSLSVLFFDDSSNVILKVYPNMVV

SEQ ID NO: 60487 - protein, 29 aa, Artificial Sequence
  Cyclic GFR-binding peptide
TRLSSLSILFFDSANNVVLKVYPDMVVES

SEQ ID NO: 60488 - protein, 32 aa, Artificial Sequence
  Cyclic GFR-binding peptide
  MOD_RES (30)..(32): Xaa is C or S
PVKTSSLSMLFFDNGRVLLLKVYPMIVEEXGX

SEQ ID NO: 60489 - protein, 25 aa, Artificial Sequence
  Cyclic GFR-binding peptide
EESSLSMLFFRIKPHQGQHLKVYPF

SEQ ID NO: 60490 - protein, 24 aa, Artificial Sequence
  Cyclic GFR-binding peptide
PEKMSSLSILFFDENKNVVLKVYP

SEQ ID NO: 60491 - protein, 37 aa, Artificial Sequence
  Cyclic GFR-binding peptide
  MOD_RES (4)..(5)..(36): Xaa is C or S
ASPXXVPQDLSSLSILFFVGRTPKVLKVYPMVVKSXK

SEQ ID NO: 60492 - protein, 35 aa, Artificial Sequence
  Cyclic GFR-binding peptide
  MOD_RES (3)..(4): Xaa is C or S
KAXXVPTKLSSLSILFFDKGVVTYLKVYPGMAVSE

SEQ ID NO: 60493 - protein, 32 aa, Artificial Sequence
  Cyclic GFR-binding peptide
  MOD_RES (1)..(1): Xaa is C or S
XVPTKLSSLSILFFDKGVVTYLKVYPGMAVSE

SEQ ID NO: 60494 - protein, 41 aa, Artificial Sequence
  Cyclic GFR-binding peptide
  MOD_RES (6)..(7)..(38)..(40): Xaa is C or S
ASASPXXVPQDLSSLSILFFVGRTPKVLKVYPMVVKSXKXS

SEQ ID NO: 60495 - protein, 27 aa, Artificial Sequence
  Cyclic GFR-binding peptide
  MOD_RES (1)..(1): Xaa is C or S
XVPEKMSSLSILFFDENKNVVLKVYPN

SEQ ID NO: 60496 - protein, 27 aa, Artificial Sequence
  Cyclic GFR-binding peptide
VSQDLSSLSILFFIGKTPKILKVYPMI

SEQ ID NO: 60497 - protein, 31 aa, Artificial Sequence
  Cyclic GFR-binding peptide
  MOD_RES (1)..(2): Xaa is C or S
XXAPTKLSSLSVLFFDSSNNVILKVYPNMVV

SEQ ID NO: 60498 - protein, 36 aa, Artificial Sequence
  Cyclic GFR-binding peptide
  MOD_RES (3)..(4)..(35): Xaa is C or S
STXXAPVKTSSLSMLFFDNGRVLLLKVYPMIVEEXG

SEQ ID NO: 60499 - protein, 29 aa, Artificial Sequence
  Cyclic GFR-binding peptide
PTKMSSLSMLFFNDKQQIILKVYPGMVVD

SEQ ID NO: 60500 - protein, 25 aa, Artificial Sequence
  Cyclic GFR-binding peptide
PTKMSSLSMLFFNDKQQIILKVYPG

SEQ ID NO: 60501 - protein, 27 aa, Artificial Sequence
  Cyclic GFR-binding peptide
KLSSLSVLFFDDMGVPTLKVYPEGMSV

SEQ ID NO: 60502 - protein, 40 aa, Artificial Sequence
  Cyclic GFR-binding peptide
  MOD_RES (3)..(40): Xaa is C or S
VKXQPSRVHHSSLSVLFFEYVRKKPKLLKVYPRLEEHLEX

SEQ ID NO: 60503 - protein, 42 aa, Artificial Sequence
  Cyclic GFR-binding peptide
  MOD_RES (6)..(7)..(39)..(41): Xaa is C or S
KASKAXXVPTKLSSLSILFFDKGVVTYLKVYPGMAVSEXGXR

SEQ ID NO: 60504 - protein, 35 aa, Artificial Sequence
  Cyclic GFR-binding peptide
  MOD_RES (1)..(2)..(33)..(35): Xaa is C or S
XXAPVKTSSLSMLFFDNGRVLLLKVYPMIVEEXGX

SEQ ID NO: 60505 - protein, 31 aa, Artificial Sequence
  Cyclic GFR-binding peptide
  MOD_RES (1)..(2): Xaa is C or S
XXAPVKTSSLSMLFFDNGRVLLLKVYPMIVE

SEQ ID NO: 60506 - protein, 37 aa, Artificial Sequence
  Cyclic GFR-binding peptide
  MOD_RES (2)..(3)..(35)..(37): Xaa is C or S
PXXVPEKMSSLSILFFDENKNVVLKVYPNMTVESXAX

SEQ ID NO: 60507 - protein, 30 aa, Artificial Sequence
  Cyclic GFR-binding peptide
  MOD_RES (2)..(3): Xaa is C or S
PXXVPQALSSLSILFFVGRKPKVLKVYPMI

SEQ ID NO: 60508 - protein, 31 aa, Artificial Sequence
  Cyclic GFR-binding peptide
  MOD_RES (3)..(4): Xaa is C or S
KAXXVPTKLSSLSILFFDKGVVTYLKVYPGM

SEQ ID NO: 60509 - protein, 31 aa, Artificial Sequence
  Cyclic GFR-binding peptide
  MOD_RES (1)..(2): Xaa is C or S
XXVPQALSSLSILFFVGRKPKVLKVYPMIVR

SEQ ID NO: 60510 - protein, 31 aa, Artificial Sequence
  Cyclic GFR-binding peptide
  MOD_RES (3)..(4): Xaa is C or S
APXXVPQALSSLSILFFVGRKPKVLKVYPMI

SEQ ID NO: 60511 - protein, 25 aa, Artificial Sequence
  Cyclic GFR-binding peptide
TEESSLSMLFFRIKPHQGQHLKVYP

SEQ ID NO: 60512 - protein, 31 aa, Artificial Sequence
  Cyclic GFR-binding peptide
  MOD_RES (30)..(30): Xaa is C or S
TQLSSLSVLFFDDSSNVILKVYPNMVVRAXG

SEQ ID NO: 60513 - protein, 37 aa, Artificial Sequence
  Cyclic GFR-binding peptide
  MOD_RES (1)..(2)..(35)..(37): Xaa is C or S
XXVPTKLSSLSVLFFDDMGVPTLKVYPEGMSVAEXGX

SEQ ID NO: 60514 - protein, 27 aa, Artificial Sequence
  Cyclic GFR-binding peptide
  MOD_RES (1)..(2): Xaa is C or S
XXAPVKTSSLSMLFFDNGRVLLLKVYP

SEQ ID NO: 60515 - protein, 32 aa, Artificial Sequence
  Cyclic GFR-binding peptide
  MOD_RES (31)..(31): Xaa is C or S
PTKMSSLSMLFFNDKQQIILKVYPGMVVDRXG

SEQ ID NO: 60516 - protein, 24 aa, Artificial Sequence
  Cyclic GFR-binding peptide
SSLSILFFVGRKPKVLKVYPMIVR

SEQ ID NO: 60517 - protein, 29 aa, Artificial Sequence
  Cyclic GFR-binding peptide
  MOD_RES (26)..(28): Xaa is C or S
SSLSILFFIGKTPKILKVYPMIVKSXKXS

SEQ ID NO: 60518 - protein, 27 aa, Artificial Sequence
  Cyclic GFR-binding peptide
  MOD_RES (1)..(1): Xaa is C or S
XAPTQLSSLSVLFFDDSSNVILKVYPN

SEQ ID NO: 60519 - protein, 37 aa, Artificial Sequence
  Cyclic GFR-binding peptide
  MOD_RES (1)..(34)..(36): Xaa is C or S
XVPTKLSSLSVLFFDDMGVPTLKVYPEGMSVAEXGXR

SEQ ID NO: 60520 - protein, 33 aa, Artificial Sequence
  Cyclic GFR-binding peptide
  MOD_RES (6)..(7): Xaa is C or S
HVPKPXXAPTKLSSLSVLFFDDSSNVILKVYPN

SEQ ID NO: 60521 - protein, 30 aa, Artificial Sequence
  Cyclic GFR-binding peptide
PTKLSSLSVLFFDDMGVPTLKVYPEGMSVA

SEQ ID NO: 60522 - protein, 35 aa, Artificial Sequence
  Cyclic GFR-binding peptide
  MOD_RES (2)..(3)..(35): Xaa is C or S
PXXAPTQLSSLSVLFFDDSSNVILKVYPNMVVRAX

SEQ ID NO: 60523 - protein, 32 aa, Artificial Sequence
  Cyclic GFR-binding peptide
  MOD_RES (5)..(6): Xaa is C or S
SASPXXVPQDLSSLSILFFVGRTPKVLKVYPM

SEQ ID NO: 60524 - protein, 33 aa, Artificial Sequence
  Cyclic GFR-binding peptide
  MOD_RES (5)..(5): Xaa is C or S
TKPTXAPTKLSSLSVLFFDDSSNVILKVYPNMV

SEQ ID NO: 60525 - protein, 26 aa, Artificial Sequence
  Cyclic GFR-binding peptide
SQDLSSLSILFFIGKTPKILKVYPMI

SEQ ID NO: 60526 - protein, 25 aa, Artificial Sequence
  Cyclic GFR-binding peptide
QDLSSLSILFFVGRTPKVLKVYPMV

SEQ ID NO: 60527 - protein, 36 aa, Artificial Sequence
  Cyclic GFR-binding peptide
  MOD_RES (6)..(7): Xaa is C or S
YVPKPXXAPTKLSSLSVLFFDDSSNVILKVYPNMVV

SEQ ID NO: 60528 - protein, 28 aa, Artificial Sequence
  Cyclic GFR-binding peptide
TKLSSLSVLFFDSSNNVILKVYPNMVVK

SEQ ID NO: 60529 - protein, 35 aa, Artificial Sequence
  Cyclic GFR-binding peptide
  MOD_RES (5)..(6): Xaa is C or S
ASKAXXVPTKLSSLSILFFDKGVVTYLKVYPGMAV

SEQ ID NO: 60530 - protein, 35 aa, Artificial Sequence
  Cyclic GFR-binding peptide
  MOD_RES (3)..(4): Xaa is C or S
ASXXVPARLSSLSILFFDAANNVVLKVYPDMVVEA

SEQ ID NO: 60531 - protein, 39 aa, Artificial Sequence
  Cyclic GFR-binding peptide
  MOD_RES (5)..(39): Xaa is C or S
EGLEXVPTEESSLSMLFFRIKPHQGQHLKVYPFLQHNKX

SEQ ID NO: 60532 - protein, 25 aa, Artificial Sequence
  Cyclic GFR-binding peptide
TKLSSLSILFFDKGVVTYLKVYPGM

SEQ ID NO: 60533 - protein, 34 aa, Artificial Sequence
  Cyclic GFR-binding peptide
  MOD_RES (1)..(33): Xaa is C or S
XTPTKMSSLSMLFFNDKQQIILKVYPGMVVDRXG

SEQ ID NO: 60534 - protein, 28 aa, Artificial Sequence
  Cyclic GFR-binding peptide
KLSSLSVLFFDDMGVPTLKVYPEGMSVA

SEQ ID NO: 60535 - protein, 39 aa, Artificial Sequence
  Cyclic GFR-binding peptide
  MOD_RES (3)..(3): Xaa is C or S
VKXQPSRVHHSSLSVLFFEYVRKKPKLLKVYPRLEEHLE

SEQ ID NO: 60536 - protein, 26 aa, Artificial Sequence
  Cyclic GFR-binding peptide
PTKMSSLSMLFFNDKQQIILKVYPGM

SEQ ID NO: 60537 - protein, 26 aa, Artificial Sequence
  Cyclic GFR-binding peptide
VPTRLSSLSILFFDSANNVVLKVYPD

SEQ ID NO: 60538 - protein, 32 aa, Artificial Sequence
  Cyclic GFR-binding peptide
  MOD_RES (1)..(1): Xaa is C or S
XAPTKLSSLSVLFFDDSSNVILKVYPNMVVRS

SEQ ID NO: 60539 - protein, 27 aa, Artificial Sequence
  Cyclic GFR-binding peptide
APVKTSSLSMLFFDNGRVLLLKVYPMI

SEQ ID NO: 60540 - protein, 23 aa, Artificial Sequence
  Cyclic GFR-binding peptide
TRLSSLSILFFDSANNVVLKVYP

SEQ ID NO: 60541 - protein, 30 aa, Artificial Sequence
  Cyclic GFR-binding peptide
  MOD_RES (30)..(30): Xaa is C or S
PQDLSSLSILFFVGRTPKVLKVYPMVVKSX

SEQ ID NO: 60542 - protein, 32 aa, Artificial Sequence
  Cyclic GFR-binding peptide
  MOD_RES (31)..(31): Xaa is C or S
TKLSSLSVLFFDDMGVPTLKVYPEGMSVAEXG

SEQ ID NO: 60543 - protein, 40 aa, Artificial Sequence
  Cyclic GFR-binding peptide
  MOD_RES (6)..(7)..(38)..(40): Xaa is C or S
ASASPXXVSQDLSSLSILFFIGKTPKILKVYPMIVKSXKX

SEQ ID NO: 60544 - protein, 42 aa, Artificial Sequence
  Cyclic GFR-binding peptide
  MOD_RES (6)..(7)..(40)..(42): Xaa is C or S
KVGKAXXVPTKLSSLSVLFFDDMGVPTLKVYPEGMSVAEXGX

SEQ ID NO: 60545 - protein, 28 aa, Artificial Sequence
  Cyclic GFR-binding peptide
  MOD_RES (1)..(1): Xaa is C or S
XVPTEESSLSMLFFRIKPHQGQHLKVYP

SEQ ID NO: 60546 - protein, 22 aa, Artificial Sequence
  Cyclic GFR-binding peptide
LSSLSILFFDAANNVVLKVYPD

SEQ ID NO: 60547 - protein, 23 aa, Artificial Sequence
  Cyclic GFR-binding peptide
SSLSVLFFDDSSNVILKVYPNMV

SEQ ID NO: 60548 - protein, 34 aa, Artificial Sequence
  Cyclic GFR-binding peptide
  MOD_RES (4)..(4): Xaa is C or S
GLEXVPTEESSLSMLFFRIKPHQGQHLKVYPFLQ

SEQ ID NO: 60549 - protein, 29 aa, Artificial Sequence
  Cyclic GFR-binding peptide
  MOD_RES (3)..(4): Xaa is C or S
ASXXVPARLSSLSILFFDAANNVVLKVYP

SEQ ID NO: 60550 - protein, 42 aa, Artificial Sequence
  Cyclic GFR-binding peptide
  MOD_RES (6)..(7)..(39)..(41): Xaa is C or S
AAPASXXVPARLSSLSILFFDAANNVVLKVYPDMVVEAXGXR

SEQ ID NO: 60551 - protein, 30 aa, Artificial Sequence
  Cyclic GFR-binding peptide
  MOD_RES (2)..(2): Xaa is C or S
EXVPTEESSLSMLFFRIKPHQGQHLKVYPF

SEQ ID NO: 60552 - protein, 25 aa, Artificial Sequence
  Cyclic GFR-binding peptide
SSLSILFFDAANNVVLKVYPDMVVE

SEQ ID NO: 60553 - protein, 32 aa, Artificial Sequence
  Cyclic GFR-binding peptide
  MOD_RES (6)..(7): Xaa is C or S
ASASPXXVPQDLSSLSILFFVGRTPKVLKVYP

SEQ ID NO: 60554 - protein, 33 aa, Artificial Sequence
  Cyclic GFR-binding peptide
  MOD_RES (32)..(32): Xaa is C or S
APTKLSSLSVLFFDSSNNVILKVYPNMVVKAXG

SEQ ID NO: 60555 - protein, 41 aa, Artificial Sequence
  Cyclic GFR-binding peptide
  MOD_RES (3)..(40): Xaa is C or S
VKXQPSRVHHSSLSVLFFEYVRKKPKLLKVYPRLEEHLEXA

SEQ ID NO: 60556 - protein, 37 aa, Artificial Sequence
  Cyclic GFR-binding peptide
  MOD_RES (2)..(3)..(35)..(37): Xaa is C or S
SXXVPARLSSLSILFFDAANNVVLKVYPDMVVEAXGX

SEQ ID NO: 60557 - protein, 38 aa, Artificial Sequence
  Cyclic GFR-binding peptide
  MOD_RES (3)..(4)..(36)..(38): Xaa is C or S
EPXXVPEKMSSLSILFFDENKNVVLKVYPNMTVESXAX

SEQ ID NO: 60558 - protein, 32 aa, Artificial Sequence
  Cyclic GFR-binding peptide
  MOD_RES (6)..(7): Xaa is C or S
ASAAPXXVPQALSSLSILFFVGRKPKVLKVYP

SEQ ID NO: 60559 - protein, 36 aa, Artificial Sequence
  Cyclic GFR-binding peptide
  MOD_RES (6)..(7): Xaa is C or S
ASAAPXXVPQALSSLSILFFVGRKPKVLKVYPMIVR

SEQ ID NO: 60560 - protein, 40 aa, Artificial Sequence
  Cyclic GFR-binding peptide
  MOD_RES (6)..(7)..(39): Xaa is C or S
YVPKPXXAPTKLSSLSVLFFDDSSNVILKVYPNMVVRSXG

SEQ ID NO: 60561 - protein, 30 aa, Artificial Sequence
  Cyclic GFR-binding peptide
  MOD_RES (2)..(2): Xaa is C or S
TXAPTKLSSLSVLFFDDSSNVILKVYPNMV

SEQ ID NO: 60562 - protein, 30 aa, Artificial Sequence
  Cyclic GFR-binding peptide
  MOD_RES (28)..(30): Xaa is C or S
MSSLSMLFFNDKQQIILKVYPGMVVDRXGX

SEQ ID NO: 60563 - protein, 35 aa, Artificial Sequence
  Cyclic GFR-binding peptide
  MOD_RES (1)..(33)..(35): Xaa is C or S
XAPTQLSSLSVLFFDDSSNVILKVYPNMVVRAXGX

SEQ ID NO: 60564 - protein, 34 aa, Artificial Sequence
  Cyclic GFR-binding peptide
  MOD_RES (5)..(6): Xaa is C or S
SAGPXXTPTKMSSLSMLFFNDKQQIILKVYPGMV

SEQ ID NO: 60565 - protein, 29 aa, Artificial Sequence
  Cyclic GFR-binding peptide
  MOD_RES (28)..(28): Xaa is C or S
SSLSVLFFDDMGVPTLKVYPEGMSVAEXG

SEQ ID NO: 60566 - protein, 28 aa, Artificial Sequence
  Cyclic GFR-binding peptide
RLSSLSILFFDAANNVVLKVYPDMVVEA

SEQ ID NO: 60567 - protein, 37 aa, Artificial Sequence
  Cyclic GFR-binding peptide
  MOD_RES (2)..(3)..(35)..(37): Xaa is C or S
PXXAPTQLSSLSVLFFDDSSNVILKVYPNMVVRAXGX

SEQ ID NO: 60568 - protein, 43 aa, Artificial Sequence
  Cyclic GFR-binding peptide
  MOD_RES (3)..(40)..(42): Xaa is C or S
VKXQPSRVHHSSLSVLFFEYVRKKPKLLKVYPRLEEHLEXAXA

SEQ ID NO: 60569 - protein, 38 aa, Artificial Sequence
  Cyclic GFR-binding peptide
  MOD_RES (36)..(38): Xaa is C or S
PSRVHHSSLSVLFFEYVRKKPKLLKVYPRLEEHLEXAX

SEQ ID NO: 60570 - protein, 24 aa, Artificial Sequence
  Cyclic GFR-binding peptide
PTKLSSLSILFFDKGVVTYLKVYP

SEQ ID NO: 60571 - protein, 26 aa, Artificial Sequence
  Cyclic GFR-binding peptide
VKTSSLSMLFFDNGRVLLLKVYPMIV

SEQ ID NO: 60572 - protein, 37 aa, Artificial Sequence
  Cyclic GFR-binding peptide
  MOD_RES (1)..(1): Xaa is C or S
XQPSRVHHSSLSVLFFEYVRKKPKLLKVYPRLEEHLE

SEQ ID NO: 60573 - protein, 24 aa, Artificial Sequence
  Cyclic GFR-binding peptide
PTKLSSLSVLFFDDSSNVILKVYP

SEQ ID NO: 60574 - protein, 27 aa, Artificial Sequence
  Cyclic GFR-binding peptide
SSLSVLFFEYVRKKPKLLKVYPRLEEH

SEQ ID NO: 60575 - protein, 33 aa, Artificial Sequence
  Cyclic GFR-binding peptide
  MOD_RES (3)..(4): Xaa is C or S
KAXXAPTKLSSLSVLFFDSSNNVILKVYPNMVV

SEQ ID NO: 60576 - protein, 39 aa, Artificial Sequence
  Cyclic GFR-binding peptide
  MOD_RES (4)..(5)..(37)..(39): Xaa is C or S
PEPXXVPEKMSSLSILFFDENKNVVLKVYPNMTVESXAX

SEQ ID NO: 60577 - protein, 26 aa, Artificial Sequence
  Cyclic GFR-binding peptide
PVKTSSLSMLFFDNGRVLLLKVYPMI

SEQ ID NO: 60578 - protein, 24 aa, Artificial Sequence
  Cyclic GFR-binding peptide
PTKLSSLSVLFFDDMGVPTLKVYP

SEQ ID NO: 60579 - protein, 42 aa, Artificial Sequence
  Cyclic GFR-binding peptide
  MOD_RES (6)..(7)..(39)..(41): Xaa is C or S
AVPKAXXAPTKLSSLSVLFFDSSNNVILKVYPNMVVKAXGXH

SEQ ID NO: 60580 - protein, 22 aa, Artificial Sequence
  Cyclic GFR-binding peptide
SSLSMLFFRIKPHQGQHLKVYP

SEQ ID NO: 60581 - protein, 34 aa, Artificial Sequence
  Cyclic GFR-binding peptide
  MOD_RES (3)..(4): Xaa is C or S
KPXXAPTKLSSLSVLFFDDSSNVILKVYPNMVVR

SEQ ID NO: 60582 - protein, 31 aa, Artificial Sequence
  Cyclic GFR-binding peptide
  MOD_RES (29)..(31): Xaa is C or S
RLSSLSILFFDSANNVVLKVYPDMVVESXGX

SEQ ID NO: 60583 - protein, 31 aa, Artificial Sequence
  Cyclic GFR-binding peptide
QPSRVHHSSLSVLFFEYVRKKPKLLKVYPRL

SEQ ID NO: 60584 - protein, 34 aa, Artificial Sequence
  Cyclic GFR-binding peptide
  MOD_RES (31)..(33): Xaa is C or S
APVKTSSLSMLFFDNGRVLLLKVYPMIVEEXGXL

SEQ ID NO: 60585 - protein, 26 aa, Artificial Sequence
  Cyclic GFR-binding peptide
  MOD_RES (26)..(26): Xaa is C or S
SSLSILFFIGKTPKILKVYPMIVKSX

SEQ ID NO: 60586 - protein, 32 aa, Artificial Sequence
  Cyclic GFR-binding peptide
  MOD_RES (1)..(32): Xaa is C or S
XAPVKTSSLSMLFFDNGRVLLLKVYPMIVEEX

SEQ ID NO: 60587 - protein, 29 aa, Artificial Sequence
  Cyclic GFR-binding peptide
  MOD_RES (2)..(3): Xaa is C or S
AXXVPTKLSSLSILFFDKGVVTYLKVYPG

SEQ ID NO: 60588 - protein, 27 aa, Artificial Sequence
  Cyclic GFR-binding peptide
HSSLSVLFFEYVRKKPKLLKVYPRLEE

SEQ ID NO: 60589 - protein, 31 aa, Artificial Sequence
  Cyclic GFR-binding peptide
  MOD_RES (28)..(30): Xaa is C or S
MSSLSILFFDENKNVVLKVYPNMTVESXAXR

SEQ ID NO: 60590 - protein, 35 aa, Artificial Sequence
  Cyclic GFR-binding peptide
  MOD_RES (1)..(2)..(33)..(35): Xaa is C or S
XXVSQDLSSLSILFFIGKTPKILKVYPMIVKSXKX

SEQ ID NO: 60591 - protein, 27 aa, Artificial Sequence
  Cyclic GFR-binding peptide
SRVHHSSLSVLFFEYVRKKPKLLKVYP

SEQ ID NO: 60592 - protein, 40 aa, Artificial Sequence
  Cyclic GFR-binding peptide
  MOD_RES (1)..(38)..(40): Xaa is C or S
XQPSRVHHSSLSVLFFEYVRKKPKLLKVYPRLEEHLEXAX

SEQ ID NO: 60593 - protein, 37 aa, Artificial Sequence
  Cyclic GFR-binding peptide
  MOD_RES (3)..(4)..(36): Xaa is C or S
EPXXVPEKMSSLSILFFDENKNVVLKVYPNMTVESXA

SEQ ID NO: 60594 - protein, 22 aa, Artificial Sequence
  Cyclic GFR-binding peptide
SSLSILFFDSANNVVLKVYPDM

SEQ ID NO: 60595 - protein, 30 aa, Artificial Sequence
  Cyclic GFR-binding peptide
VPTKLSSLSVLFFDDMGVPTLKVYPEGMSV

SEQ ID NO: 60596 - protein, 29 aa, Artificial Sequence
  Cyclic GFR-binding peptide
TPTKMSSLSMLFFNDKQQIILKVYPGMVV

SEQ ID NO: 60597 - protein, 24 aa, Artificial Sequence
  Cyclic GFR-binding peptide
SSLSVLFFDDSSNVILKVYPNMVV

SEQ ID NO: 60598 - protein, 25 aa, Artificial Sequence
  Cyclic GFR-binding peptide
LSSLSVLFFDDMGVPTLKVYPEGMS

SEQ ID NO: 60599 - protein, 39 aa, Artificial Sequence
  Cyclic GFR-binding peptide
  MOD_RES (4)..(5)..(37)..(39): Xaa is C or S
SKAXXVPTKLSSLSILFFDKGVVTYLKVYPGMAVSEXGX

SEQ ID NO: 60600 - protein, 38 aa, Artificial Sequence
  Cyclic GFR-binding peptide
  MOD_RES (6)..(7): Xaa is C or S
TVPKPXXAPTQLSSLSVLFFDDSSNVILKVYPNMVVRA

SEQ ID NO: 60601 - protein, 28 aa, Artificial Sequence
  Cyclic GFR-binding peptide
  MOD_RES (1)..(2): Xaa is C or S
XXAPTQLSSLSVLFFDDSSNVILKVYPN

SEQ ID NO: 60602 - protein, 27 aa, Artificial Sequence
  Cyclic GFR-binding peptide
  MOD_RES (1)..(2): Xaa is C or S
XXVSQDLSSLSILFFIGKTPKILKVYP

SEQ ID NO: 60603 - protein, 29 aa, Artificial Sequence
  Cyclic GFR-binding peptide
  MOD_RES (3)..(4): Xaa is C or S
SPXXVPQDLSSLSILFFVGRTPKVLKVYP

SEQ ID NO: 60604 - protein, 34 aa, Artificial Sequence
  Cyclic GFR-binding peptide
  MOD_RES (6)..(7): Xaa is C or S
TVPKPXXAPTQLSSLSVLFFDDSSNVILKVYPNM

SEQ ID NO: 60605 - protein, 31 aa, Artificial Sequence
  Cyclic GFR-binding peptide
  MOD_RES (2)..(3): Xaa is C or S
TXXAPVKTSSLSMLFFDNGRVLLLKVYPMIV

SEQ ID NO: 60606 - protein, 33 aa, Artificial Sequence
  Cyclic GFR-binding peptide
  MOD_RES (6)..(6): Xaa is C or S
VTKPTXAPTKLSSLSVLFFDDSSNVILKVYPNM

SEQ ID NO: 60607 - protein, 38 aa, Artificial Sequence
  Cyclic GFR-binding peptide
  MOD_RES (2)..(3)..(35)..(37): Xaa is C or S
PXXAPTQLSSLSVLFFDDSSNVILKVYPNMVVRAXGXH

SEQ ID NO: 60608 - protein, 27 aa, Artificial Sequence
  Cyclic GFR-binding peptide
PTRLSSLSILFFDSANNVVLKVYPDMV

SEQ ID NO: 60609 - protein, 37 aa, Artificial Sequence
  Cyclic GFR-binding peptide
  MOD_RES (36)..(36): Xaa is C or S
PSRVHHSSLSVLFFEYVRKKPKLLKVYPRLEEHLEXA

SEQ ID NO: 60610 - protein, 36 aa, Artificial Sequence
  Cyclic GFR-binding peptide
  MOD_RES (4)..(5): Xaa is C or S
PPTXXVPTRLSSLSILFFDSANNVVLKVYPDMVVES

SEQ ID NO: 60611 - protein, 32 aa, Artificial Sequence
  Cyclic GFR-binding peptide
  MOD_RES (4)..(4): Xaa is C or S
GLEXVPTEESSLSMLFFRIKPHQGQHLKVYPF

SEQ ID NO: 60612 - protein, 36 aa, Artificial Sequence
  Cyclic GFR-binding peptide
  MOD_RES (1)..(33)..(35): Xaa is C or S
XVPEKMSSLSILFFDENKNVVLKVYPNMTVESXAXR

SEQ ID NO: 60613 - protein, 30 aa, Artificial Sequence
  Cyclic GFR-binding peptide
  MOD_RES (27)..(29): Xaa is C or S
LSSLSILFFVGRKPKVLKVYPMIVRSXKXS

SEQ ID NO: 60614 - protein, 32 aa, Artificial Sequence
  Cyclic GFR-binding peptide
  MOD_RES (4)..(5): Xaa is C or S
PKAXXAPTKLSSLSVLFFDSSNNVILKVYPNM

SEQ ID NO: 60615 - protein, 35 aa, Artificial Sequence
  Cyclic GFR-binding peptide
  MOD_RES (7)..(7): Xaa is C or S
NDEGLEXVPTEESSLSMLFFRIKPHQGQHLKVYPF

SEQ ID NO: 60616 - protein, 25 aa, Artificial Sequence
  Cyclic GFR-binding peptide
PTKLSSLSILFFDKGVVTYLKVYPG

SEQ ID NO: 60617 - protein, 30 aa, Artificial Sequence
  Cyclic GFR-binding peptide
  MOD_RES (27)..(29): Xaa is C or S
SSLSVLFFDDSSNVILKVYPNMVVRAXGXH

SEQ ID NO: 60618 - protein, 37 aa, Artificial Sequence
  Cyclic GFR-binding peptide
  MOD_RES (1)..(2)..(34)..(36): Xaa is C or S
XXVPTKLSSLSILFFDKGVVTYLKVYPGMAVSEXGXR

SEQ ID NO: 60619 - protein, 33 aa, Artificial Sequence
  Cyclic GFR-binding peptide
RVHHSSLSVLFFEYVRKKPKLLKVYPRLEEHLE

SEQ ID NO: 60620 - protein, 34 aa, Artificial Sequence
  Cyclic GFR-binding peptide
  MOD_RES (4)..(5): Xaa is C or S
ASPXXVSQDLSSLSILFFIGKTPKILKVYPMIVK

SEQ ID NO: 60621 - protein, 34 aa, Artificial Sequence
  Cyclic GFR-binding peptide
  MOD_RES (2)..(3)..(34): Xaa is C or S
PXXVPQALSSLSILFFVGRKPKVLKVYPMIVRSX

SEQ ID NO: 60622 - protein, 29 aa, Artificial Sequence
  Cyclic GFR-binding peptide
RVHHSSLSVLFFEYVRKKPKLLKVYPRLE

SEQ ID NO: 60623 - protein, 29 aa, Artificial Sequence
  Cyclic GFR-binding peptide
  MOD_RES (1)..(2): Xaa is C or S
XXAPVKTSSLSMLFFDNGRVLLLKVYPMI

SEQ ID NO: 60624 - protein, 21 aa, Artificial Sequence
  Cyclic GFR-binding peptide
SSLSILFFDENKNVVLKVYPN

SEQ ID NO: 60625 - protein, 35 aa, Artificial Sequence
  Cyclic GFR-binding peptide
  MOD_RES (5)..(5): Xaa is C or S
TKPTXAPTKLSSLSVLFFDDSSNVILKVYPNMVVR

SEQ ID NO: 60626 - protein, 28 aa, Artificial Sequence
  Cyclic GFR-binding peptide
TQLSSLSVLFFDDSSNVILKVYPNMVVR

SEQ ID NO: 60627 - protein, 34 aa, Artificial Sequence
  Cyclic GFR-binding peptide
  MOD_RES (32)..(34): Xaa is C or S
VPARLSSLSILFFDAANNVVLKVYPDMVVEAXGX

SEQ ID NO: 60628 - protein, 22 aa, Artificial Sequence
  Cyclic GFR-binding peptide
LSSLSVLFFDSSNNVILKVYPN

SEQ ID NO: 60629 - protein, 35 aa, Artificial Sequence
  Cyclic GFR-binding peptide
  MOD_RES (1)..(33)..(35): Xaa is C or S
XVPTRLSSLSILFFDSANNVVLKVYPDMVVESXGX

SEQ ID NO: 60630 - protein, 40 aa, Artificial Sequence
  Cyclic GFR-binding peptide
  MOD_RES (5)..(6)..(38)..(40): Xaa is C or S
TPPTXXVPTRLSSLSILFFDSANNVVLKVYPDMVVESXGX

SEQ ID NO: 60631 - protein, 28 aa, Artificial Sequence
  Cyclic GFR-binding peptide
ESSLSMLFFRIKPHQGQHLKVYPFLQHN

SEQ ID NO: 60632 - protein, 31 aa, Artificial Sequence
  Cyclic GFR-binding peptide
  MOD_RES (31)..(31): Xaa is C or S
EESSLSMLFFRIKPHQGQHLKVYPFLQHNKX

SEQ ID NO: 60633 - protein, 35 aa, Artificial Sequence
  Cyclic GFR-binding peptide
  MOD_RES (4)..(5): Xaa is C or S
PSTXXAPVKTSSLSMLFFDNGRVLLLKVYPMIVEE

SEQ ID NO: 60634 - protein, 26 aa, Artificial Sequence
  Cyclic GFR-binding peptide
TKLSSLSVLFFDSSNNVILKVYPNMV

SEQ ID NO: 60635 - protein, 36 aa, Artificial Sequence
  Cyclic GFR-binding peptide
  MOD_RES (5)..(6): Xaa is C or S
SASPXXVSQDLSSLSILFFIGKTPKILKVYPMIVKS

SEQ ID NO: 60636 - protein, 37 aa, Artificial Sequence
  Cyclic GFR-binding peptide
  MOD_RES (3)..(4)..(36): Xaa is C or S
KAXXVPTKLSSLSILFFDKGVVTYLKVYPGMAVSEXG

SEQ ID NO: 60637 - protein, 27 aa, Artificial Sequence
  Cyclic GFR-binding peptide
  MOD_RES (1)..(1): Xaa is C or S
XVPQDLSSLSILFFVGRTPKVLKVYPM

SEQ ID NO: 60638 - protein, 24 aa, Artificial Sequence
  Cyclic GFR-binding peptide
MSSLSILFFDENKNVVLKVYPNMT

SEQ ID NO: 60639 - protein, 28 aa, Artificial Sequence
  Cyclic GFR-binding peptide
  MOD_RES (1)..(2): Xaa is C or S
XXVPQDLSSLSILFFVGRTPKVLKVYPM

SEQ ID NO: 60640 - protein, 22 aa, Artificial Sequence
  Cyclic GFR-binding peptide
QLSSLSVLFFDDSSNVILKVYP

SEQ ID NO: 60641 - protein, 22 aa, Artificial Sequence
  Cyclic GFR-binding peptide
SSLSVLFFDDSSNVILKVYPNM

SEQ ID NO: 60642 - protein, 27 aa, Artificial Sequence
  Cyclic GFR-binding peptide
  MOD_RES (1)..(2): Xaa is C or S
XXAPTQLSSLSVLFFDDSSNVILKVYP

SEQ ID NO: 60643 - protein, 30 aa, Artificial Sequence
  Cyclic GFR-binding peptide
  MOD_RES (28)..(30): Xaa is C or S
DLSSLSILFFIGKTPKILKVYPMIVKSXKX

SEQ ID NO: 60644 - protein, 23 aa, Artificial Sequence
  Cyclic GFR-binding peptide
SSLSILFFVGRKPKVLKVYPMIV

SEQ ID NO: 60645 - protein, 36 aa, Artificial Sequence
  Cyclic GFR-binding peptide
  MOD_RES (7)..(7): Xaa is C or S
HVTKPTXAPTKLSSLSVLFFDDSSNVILKVYPNMVV

SEQ ID NO: 60646 - protein, 37 aa, Artificial Sequence
  Cyclic GFR-binding peptide
  MOD_RES (5)..(6): Xaa is C or S
VPKPXXAPTQLSSLSVLFFDDSSNVILKVYPNMVVRA

SEQ ID NO: 60647 - protein, 28 aa, Artificial Sequence
  Cyclic GFR-binding peptide
  MOD_RES (1)..(1): Xaa is C or S
XAPVKTSSLSMLFFDNGRVLLLKVYPMI

SEQ ID NO: 60648 - protein, 28 aa, Artificial Sequence
  Cyclic GFR-binding peptide
  MOD_RES (1)..(2): Xaa is C or S
XXVPEKMSSLSILFFDENKNVVLKVYPN

SEQ ID NO: 60649 - protein, 28 aa, Artificial Sequence
  Cyclic GFR-binding peptide
TKMSSLSMLFFNDKQQIILKVYPGMVVD

SEQ ID NO: 60650 - protein, 40 aa, Artificial Sequence
  Cyclic GFR-binding peptide
  MOD_RES (4)..(5)..(37)..(39): Xaa is C or S
PKPXXAPTKLSSLSVLFFDDSSNVILKVYPNMVVRSXGXH

SEQ ID NO: 60651 - protein, 36 aa, Artificial Sequence
  Cyclic GFR-binding peptide
  MOD_RES (6)..(7): Xaa is C or S
GIPEPXXVPEKMSSLSILFFDENKNVVLKVYPNMTV

SEQ ID NO: 60652 - protein, 33 aa, Artificial Sequence
  Cyclic GFR-binding peptide
  MOD_RES (3)..(4): Xaa is C or S
APXXVPQALSSLSILFFVGRKPKVLKVYPMIVR

SEQ ID NO: 60653 - protein, 29 aa, Artificial Sequence
  Cyclic GFR-binding peptide
  MOD_RES (27)..(29): Xaa is C or S
TSSLSMLFFDNGRVLLLKVYPMIVEEXGX

SEQ ID NO: 60654 - protein, 37 aa, Artificial Sequence
  Cyclic GFR-binding peptide
  MOD_RES (35)..(37): Xaa is C or S
SRVHHSSLSVLFFEYVRKKPKLLKVYPRLEEHLEXAX

SEQ ID NO: 60655 - protein, 36 aa, Artificial Sequence
  Cyclic GFR-binding peptide
  MOD_RES (2)..(3)..(35): Xaa is C or S
PXXTPTKMSSLSMLFFNDKQQIILKVYPGMVVDRXG

SEQ ID NO: 60656 - protein, 39 aa, Artificial Sequence
  Cyclic GFR-binding peptide
  MOD_RES (6)..(7)..(39): Xaa is C or S
STPPTXXVPTRLSSLSILFFDSANNVVLKVYPDMVVESX

SEQ ID NO: 60657 - protein, 26 aa, Artificial Sequence
  Cyclic GFR-binding peptide
  MOD_RES (1)..(1): Xaa is C or S
XAPVKTSSLSMLFFDNGRVLLLKVYP

SEQ ID NO: 60658 - protein, 37 aa, Artificial Sequence
  Cyclic GFR-binding peptide
  MOD_RES (4)..(5)..(37): Xaa is C or S
PPTXXVPTRLSSLSILFFDSANNVVLKVYPDMVVESX

SEQ ID NO: 60659 - protein, 38 aa, Artificial Sequence
  Cyclic GFR-binding peptide
  MOD_RES (4)..(5)..(36)..(38): Xaa is C or S
PSTXXAPVKTSSLSMLFFDNGRVLLLKVYPMIVEEXGX

SEQ ID NO: 60660 - protein, 30 aa, Artificial Sequence
  Cyclic GFR-binding peptide
VPEKMSSLSILFFDENKNVVLKVYPNMTVE

SEQ ID NO: 60661 - protein, 28 aa, Artificial Sequence
  Cyclic GFR-binding peptide
  MOD_RES (2)..(3): Xaa is C or S
AXXVPTKLSSLSVLFFDDMGVPTLKVYP

SEQ ID NO: 60662 - protein, 32 aa, Artificial Sequence
  Cyclic GFR-binding peptide
  MOD_RES (6)..(7): Xaa is C or S
GIPEPXXVPEKMSSLSILFFDENKNVVLKVYP

SEQ ID NO: 60663 - protein, 40 aa, Artificial Sequence
  Cyclic GFR-binding peptide
  MOD_RES (6)..(7)..(39): Xaa is C or S
GIPEPXXVPEKMSSLSILFFDENKNVVLKVYPNMTVESXA

SEQ ID NO: 60664 - protein, 29 aa, Artificial Sequence
  Cyclic GFR-binding peptide
  MOD_RES (2)..(3): Xaa is C or S
TXXVPTRLSSLSILFFDSANNVVLKVYPD

SEQ ID NO: 60665 - protein, 37 aa, Artificial Sequence
  Cyclic GFR-binding peptide
  MOD_RES (6)..(7): Xaa is C or S
ASASPXXVSQDLSSLSILFFIGKTPKILKVYPMIVKS

SEQ ID NO: 60666 - protein, 34 aa, Artificial Sequence
  Cyclic GFR-binding peptide
  MOD_RES (31)..(33): Xaa is C or S
PTKLSSLSILFFDKGVVTYLKVYPGMAVSEXGXR

SEQ ID NO: 60667 - protein, 39 aa, Artificial Sequence
  Cyclic GFR-binding peptide
  MOD_RES (36)..(38): Xaa is C or S
PSRVHHSSLSVLFFEYVRKKPKLLKVYPRLEEHLEXAXA

SEQ ID NO: 60668 - protein, 36 aa, Artificial Sequence
  Cyclic GFR-binding peptide
  MOD_RES (34)..(36): Xaa is C or S
VPTEESSLSMLFFRIKPHQGQHLKVYPFLQHNKXEX

SEQ ID NO: 60669 - protein, 33 aa, Artificial Sequence
  Cyclic GFR-binding peptide
  MOD_RES (32)..(32): Xaa is C or S
HHSSLSVLFFEYVRKKPKLLKVYPRLEEHLEXA

SEQ ID NO: 60670 - protein, 38 aa, Artificial Sequence
  Cyclic GFR-binding peptide
  MOD_RES (1)..(38): Xaa is C or S
XQPSRVHHSSLSVLFFEYVRKKPKLLKVYPRLEEHLEX

SEQ ID NO: 60671 - protein, 27 aa, Artificial Sequence
  Cyclic GFR-binding peptide
LSSLSILFFDKGVVTYLKVYPGMAVSE

SEQ ID NO: 60672 - protein, 27 aa, Artificial Sequence
  Cyclic GFR-binding peptide
ARLSSLSILFFDAANNVVLKVYPDMVV

SEQ ID NO: 60673 - protein, 33 aa, Artificial Sequence
  Cyclic GFR-binding peptide
  MOD_RES (32)..(32): Xaa is C or S
VPEKMSSLSILFFDENKNVVLKVYPNMTVESXA

SEQ ID NO: 60674 - protein, 30 aa, Artificial Sequence
  Cyclic GFR-binding peptide
  MOD_RES (30)..(30): Xaa is C or S
ARLSSLSILFFDAANNVVLKVYPDMVVEAX

SEQ ID NO: 60675 - protein, 30 aa, Artificial Sequence
  Cyclic GFR-binding peptide
  MOD_RES (1)..(2): Xaa is C or S
XXVPEKMSSLSILFFDENKNVVLKVYPNMT

SEQ ID NO: 60676 - protein, 26 aa, Artificial Sequence
  Cyclic GFR-binding peptide
LSSLSVLFFDDSSNVILKVYPNMVVR

SEQ ID NO: 60677 - protein, 25 aa, Artificial Sequence
  Cyclic GFR-binding peptide
PTQLSSLSVLFFDDSSNVILKVYPN

SEQ ID NO: 60678 - protein, 31 aa, Artificial Sequence
  Cyclic GFR-binding peptide
  MOD_RES (1)..(1): Xaa is C or S
XVPQDLSSLSILFFVGRTPKVLKVYPMVVKS

SEQ ID NO: 60679 - protein, 38 aa, Artificial Sequence
  Cyclic GFR-binding peptide
  MOD_RES (6)..(7): Xaa is C or S
AVPKAXXAPTKLSSLSVLFFDSSNNVILKVYPNMVVKA

SEQ ID NO: 60680 - protein, 29 aa, Artificial Sequence
  Cyclic GFR-binding peptide
APVKTSSLSMLFFDNGRVLLLKVYPMIVE

SEQ ID NO: 60681 - protein, 34 aa, Artificial Sequence
  Cyclic GFR-binding peptide
  MOD_RES (4)..(5): Xaa is C or S
SKAXXVPTKLSSLSILFFDKGVVTYLKVYPGMAV

SEQ ID NO: 60682 - protein, 31 aa, Artificial Sequence
  Cyclic GFR-binding peptide
  MOD_RES (3)..(4): Xaa is C or S
KPXXAPTKLSSLSVLFFDDSSNVILKVYPNM

SEQ ID NO: 60683 - protein, 36 aa, Artificial Sequence
  Cyclic GFR-binding peptide
  MOD_RES (5)..(6): Xaa is C or S
VPSTXXAPVKTSSLSMLFFDNGRVLLLKVYPMIVEE

SEQ ID NO: 60684 - protein, 29 aa, Artificial Sequence
  Cyclic GFR-binding peptide
  MOD_RES (28)..(28): Xaa is C or S
LSSLSVLFFDDSSNVILKVYPNMVVRAXG

SEQ ID NO: 60685 - protein, 30 aa, Artificial Sequence
  Cyclic GFR-binding peptide
  MOD_RES (29)..(29): Xaa is C or S
KLSSLSILFFDKGVVTYLKVYPGMAVSEXG

SEQ ID NO: 60686 - protein, 28 aa, Artificial Sequence
  Cyclic GFR-binding peptide
  MOD_RES (28)..(28): Xaa is C or S
DLSSLSILFFVGRTPKVLKVYPMVVKSX

SEQ ID NO: 60687 - protein, 33 aa, Artificial Sequence
  Cyclic GFR-binding peptide
  MOD_RES (1)..(2)..(33): Xaa is C or S
XXVPQDLSSLSILFFVGRTPKVLKVYPMVVKSX

SEQ ID NO: 60688 - protein, 28 aa, Artificial Sequence
  Cyclic GFR-binding peptide
  MOD_RES (2)..(3): Xaa is C or S
PXXAPTKLSSLSVLFFDDSSNVILKVYP

SEQ ID NO: 60689 - protein, 31 aa, Artificial Sequence
  Cyclic GFR-binding peptide
  MOD_RES (3)..(4): Xaa is C or S
PTXXVPTRLSSLSILFFDSANNVVLKVYPDM

SEQ ID NO: 60690 - protein, 27 aa, Artificial Sequence
  Cyclic GFR-binding peptide
  MOD_RES (1)..(2): Xaa is C or S
XXVPEKMSSLSILFFDENKNVVLKVYP

SEQ ID NO: 60691 - protein, 22 aa, Artificial Sequence
  Cyclic GFR-binding peptide
DLSSLSILFFIGKTPKILKVYP

SEQ ID NO: 60692 - protein, 27 aa, Artificial Sequence
  Cyclic GFR-binding peptide
QLSSLSVLFFDDSSNVILKVYPNMVVR

SEQ ID NO: 60693 - protein, 33 aa, Artificial Sequence
  Cyclic GFR-binding peptide
  MOD_RES (4)..(5): Xaa is C or S
PKPXXAPTQLSSLSVLFFDDSSNVILKVYPNMV

SEQ ID NO: 60694 - protein, 26 aa, Artificial Sequence
  Cyclic GFR-binding peptide
TPTKMSSLSMLFFNDKQQIILKVYPG

SEQ ID NO: 60695 - protein, 33 aa, Artificial Sequence
  Cyclic GFR-binding peptide
  MOD_RES (30)..(32): Xaa is C or S
TRLSSLSILFFDSANNVVLKVYPDMVVESXGXR

SEQ ID NO: 60696 - protein, 33 aa, Artificial Sequence
  Cyclic GFR-binding peptide
  MOD_RES (1)..(1): Xaa is C or S
XVPTKLSSLSVLFFDDMGVPTLKVYPEGMSVAE

SEQ ID NO: 60697 - protein, 32 aa, Artificial Sequence
  Cyclic GFR-binding peptide
  MOD_RES (4)..(5): Xaa is C or S
AGPXXTPTKMSSLSMLFFNDKQQIILKVYPGM

SEQ ID NO: 60698 - protein, 33 aa, Artificial Sequence
  Cyclic GFR-binding peptide
  MOD_RES (2)..(3): Xaa is C or S
PXXVPQDLSSLSILFFVGRTPKVLKVYPMVVKS

SEQ ID NO: 60699 - protein, 27 aa, Artificial Sequence
  Cyclic GFR-binding peptide
VPTEESSLSMLFFRIKPHQGQHLKVYP

SEQ ID NO: 60700 - protein, 29 aa, Artificial Sequence
  Cyclic GFR-binding peptide
HHSSLSVLFFEYVRKKPKLLKVYPRLEEH

SEQ ID NO: 60701 - protein, 32 aa, Artificial Sequence
  Cyclic GFR-binding peptide
  MOD_RES (3)..(4): Xaa is C or S
KPXXAPTQLSSLSVLFFDDSSNVILKVYPNMV

SEQ ID NO: 60702 - protein, 27 aa, Artificial Sequence
  Cyclic GFR-binding peptide
PQALSSLSILFFVGRKPKVLKVYPMIV

SEQ ID NO: 60703 - protein, 37 aa, Artificial Sequence
  Cyclic GFR-binding peptide
  MOD_RES (4)..(4): Xaa is C or S
GLEXVPTEESSLSMLFFRIKPHQGQHLKVYPFLQHNK

SEQ ID NO: 60704 - protein, 31 aa, Artificial Sequence
  Cyclic GFR-binding peptide
  MOD_RES (31)..(31): Xaa is C or S
APVKTSSLSMLFFDNGRVLLLKVYPMIVEEX

SEQ ID NO: 60705 - protein, 30 aa, Artificial Sequence
  Cyclic GFR-binding peptide
APTQLSSLSVLFFDDSSNVILKVYPNMVVR

SEQ ID NO: 60706 - protein, 32 aa, Artificial Sequence
  Cyclic GFR-binding peptide
  MOD_RES (31)..(31): Xaa is C or S
VPQALSSLSILFFVGRKPKVLKVYPMIVRSXK

SEQ ID NO: 60707 - protein, 31 aa, Artificial Sequence
  Cyclic GFR-binding peptide
  MOD_RES (5)..(6): Xaa is C or S
SAAPXXVPQALSSLSILFFVGRKPKVLKVYP

SEQ ID NO: 60708 - protein, 28 aa, Artificial Sequence
  Cyclic GFR-binding peptide
VPTRLSSLSILFFDSANNVVLKVYPDMV

SEQ ID NO: 60709 - protein, 31 aa, Artificial Sequence
  Cyclic GFR-binding peptide
  MOD_RES (28)..(30): Xaa is C or S
KTSSLSMLFFDNGRVLLLKVYPMIVEEXGXL

SEQ ID NO: 60710 - protein, 34 aa, Artificial Sequence
  Cyclic GFR-binding peptide
  MOD_RES (4)..(5): Xaa is C or S
PKPXXAPTKLSSLSVLFFDDSSNVILKVYPNMVV

SEQ ID NO: 60711 - protein, 36 aa, Artificial Sequence
  Cyclic GFR-binding peptide
  MOD_RES (1)..(33)..(35): Xaa is C or S
XAPTQLSSLSVLFFDDSSNVILKVYPNMVVRAXGXH

SEQ ID NO: 60712 - protein, 28 aa, Artificial Sequence
  Cyclic GFR-binding peptide
VPQALSSLSILFFVGRKPKVLKVYPMIV

SEQ ID NO: 60713 - protein, 37 aa, Artificial Sequence
  Cyclic GFR-binding peptide
  MOD_RES (3)..(3): Xaa is C or S
VKXQPSRVHHSSLSVLFFEYVRKKPKLLKVYPRLEEH

SEQ ID NO: 60714 - protein, 32 aa, Artificial Sequence
  Cyclic GFR-binding peptide
  MOD_RES (31)..(31): Xaa is C or S
PTKLSSLSVLFFDSSNNVILKVYPNMVVKAXG

SEQ ID NO: 60715 - protein, 28 aa, Artificial Sequence
  Cyclic GFR-binding peptide
PTKLSSLSVLFFDSSNNVILKVYPNMVV

SEQ ID NO: 60716 - protein, 33 aa, Artificial Sequence
  Cyclic GFR-binding peptide
  MOD_RES (4)..(5): Xaa is C or S
PKAXXAPTKLSSLSVLFFDSSNNVILKVYPNMV

SEQ ID NO: 60717 - protein, 26 aa, Artificial Sequence
  Cyclic GFR-binding peptide
TEESSLSMLFFRIKPHQGQHLKVYPF

SEQ ID NO: 60718 - protein, 24 aa, Artificial Sequence
  Cyclic GFR-binding peptide
DLSSLSILFFVGRTPKVLKVYPMV

SEQ ID NO: 60719 - protein, 32 aa, Artificial Sequence
  Cyclic GFR-binding peptide
  MOD_RES (5)..(6): Xaa is C or S
VPSTXXAPVKTSSLSMLFFDNGRVLLLKVYPM

SEQ ID NO: 60720 - protein, 27 aa, Artificial Sequence
  Cyclic GFR-binding peptide
  MOD_RES (26)..(26): Xaa is C or S
SSLSMLFFDNGRVLLLKVYPMIVEEXG

SEQ ID NO: 60721 - protein, 32 aa, Artificial Sequence
  Cyclic GFR-binding peptide
  MOD_RES (3)..(4): Xaa is C or S
KAXXAPTKLSSLSVLFFDSSNNVILKVYPNMV

SEQ ID NO: 60722 - protein, 35 aa, Artificial Sequence
  Cyclic GFR-binding peptide
  MOD_RES (4)..(5): Xaa is C or S
PPTXXVPTRLSSLSILFFDSANNVVLKVYPDMVVE

SEQ ID NO: 60723 - protein, 42 aa, Artificial Sequence
  Cyclic GFR-binding peptide
  MOD_RES (6)..(7)..(39)..(41): Xaa is C or S
YVPKPXXAPTKLSSLSVLFFDDSSNVILKVYPNMVVRSXGXH

SEQ ID NO: 60724 - protein, 32 aa, Artificial Sequence
  Cyclic GFR-binding peptide
VPTKLSSLSVLFFDDMGVPTLKVYPEGMSVAE

SEQ ID NO: 60725 - protein, 35 aa, Artificial Sequence
  Cyclic GFR-binding peptide
  MOD_RES (1)..(33)..(35): Xaa is C or S
XAPTKLSSLSVLFFDSSNNVILKVYPNMVVKAXGX

SEQ ID NO: 60726 - protein, 33 aa, Artificial Sequence
  Cyclic GFR-binding peptide
  MOD_RES (31)..(33): Xaa is C or S
EESSLSMLFFRIKPHQGQHLKVYPFLQHNKXEX

SEQ ID NO: 60727 - protein, 32 aa, Artificial Sequence
  Cyclic GFR-binding peptide
  MOD_RES (2)..(3): Xaa is C or S
PXXVPQDLSSLSILFFVGRTPKVLKVYPMVVK

SEQ ID NO: 60728 - protein, 36 aa, Artificial Sequence
  Cyclic GFR-binding peptide
  MOD_RES (7)..(7): Xaa is C or S
NDEGLEXVPTEESSLSMLFFRIKPHQGQHLKVYPFL

SEQ ID NO: 60729 - protein, 39 aa, Artificial Sequence
  Cyclic GFR-binding peptide
  MOD_RES (6)..(7)..(38): Xaa is C or S
RVPSTXXAPVKTSSLSMLFFDNGRVLLLKVYPMIVEEXG

SEQ ID NO: 60730 - protein, 24 aa, Artificial Sequence
  Cyclic GFR-binding peptide
QDLSSLSILFFIGKTPKILKVYPM

SEQ ID NO: 60731 - protein, 28 aa, Artificial Sequence
  Cyclic GFR-binding peptide
VKTSSLSMLFFDNGRVLLLKVYPMIVEE

SEQ ID NO: 60732 - protein, 33 aa, Artificial Sequence
  Cyclic GFR-binding peptide
  MOD_RES (2)..(2): Xaa is C or S
EXVPTEESSLSMLFFRIKPHQGQHLKVYPFLQH

SEQ ID NO: 60733 - protein, 33 aa, Artificial Sequence
  Cyclic GFR-binding peptide
  MOD_RES (3)..(4): Xaa is C or S
KPXXAPTKLSSLSVLFFDDSSNVILKVYPNMVV

SEQ ID NO: 60734 - protein, 40 aa, Artificial Sequence
  Cyclic GFR-binding peptide
  MOD_RES (4)..(4): Xaa is C or S
SVKXQPSRVHHSSLSVLFFEYVRKKPKLLKVYPRLEEHLE

SEQ ID NO: 60735 - protein, 30 aa, Artificial Sequence
  Cyclic GFR-binding peptide
  MOD_RES (1)..(2): Xaa is C or S
XXAPTKLSSLSVLFFDSSNNVILKVYPNMV

SEQ ID NO: 60736 - protein, 26 aa, Artificial Sequence
  Cyclic GFR-binding peptide
  MOD_RES (1)..(1): Xaa is C or S
XVPTKLSSLSVLFFDDMGVPTLKVYP

SEQ ID NO: 60737 - protein, 34 aa, Artificial Sequence
  Cyclic GFR-binding peptide
  MOD_RES (31)..(33): Xaa is C or S
EESSLSMLFFRIKPHQGQHLKVYPFLQHNKXEXR

SEQ ID NO: 60738 - protein, 32 aa, Artificial Sequence
  Cyclic GFR-binding peptide
  MOD_RES (2)..(3): Xaa is C or S
AXXVPTKLSSLSVLFFDDMGVPTLKVYPEGMS

SEQ ID NO: 60739 - protein, 36 aa, Artificial Sequence
  Cyclic GFR-binding peptide
  MOD_RES (1)..(33)..(35): Xaa is C or S
XVPTKLSSLSILFFDKGVVTYLKVYPGMAVSEXGXR

SEQ ID NO: 60740 - protein, 29 aa, Artificial Sequence
  Cyclic GFR-binding peptide
  MOD_RES (3)..(4): Xaa is C or S
KPXXAPTQLSSLSVLFFDDSSNVILKVYP

SEQ ID NO: 60741 - protein, 36 aa, Artificial Sequence
  Cyclic GFR-binding peptide
  MOD_RES (1)..(33)..(35): Xaa is C or S
XAPTKLSSLSVLFFDDSSNVILKVYPNMVVRSXGXH

SEQ ID NO: 60742 - protein, 24 aa, Artificial Sequence
  Cyclic GFR-binding peptide
TSSLSMLFFDNGRVLLLKVYPMIV

SEQ ID NO: 60743 - protein, 27 aa, Artificial Sequence
  Cyclic GFR-binding peptide
  MOD_RES (1)..(1): Xaa is C or S
XVPTRLSSLSILFFDSANNVVLKVYPD

SEQ ID NO: 60744 - protein, 32 aa, Artificial Sequence
  Cyclic GFR-binding peptide
  MOD_RES (1)..(2): Xaa is C or S
XXVPQALSSLSILFFVGRKPKVLKVYPMIVRS

SEQ ID NO: 60745 - protein, 23 aa, Artificial Sequence
  Cyclic GFR-binding peptide
SSLSILFFVGRTPKVLKVYPMVV

SEQ ID NO: 60746 - protein, 40 aa, Artificial Sequence
  Cyclic GFR-binding peptide
  MOD_RES (5)..(6)..(38)..(40): Xaa is C or S
VPKAXXAPTKLSSLSVLFFDSSNNVILKVYPNMVVKAXGX

SEQ ID NO: 60747 - protein, 27 aa, Artificial Sequence
  Cyclic GFR-binding peptide
VPTKLSSLSILFFDKGVVTYLKVYPGM

SEQ ID NO: 60748 - protein, 40 aa, Artificial Sequence
  Cyclic GFR-binding peptide
  MOD_RES (5)..(6)..(37)..(39): Xaa is C or S
SAAPXXVPQALSSLSILFFVGRKPKVLKVYPMIVRSXKXS

SEQ ID NO: 60749 - protein, 32 aa, Artificial Sequence
  Cyclic GFR-binding peptide
  MOD_RES (3)..(4): Xaa is C or S
KAXXVPTKLSSLSILFFDKGVVTYLKVYPGMA

SEQ ID NO: 60750 - protein, 28 aa, Artificial Sequence
  Cyclic GFR-binding peptide
  MOD_RES (1)..(1): Xaa is C or S
XVPTKLSSLSVLFFDDMGVPTLKVYPEG

SEQ ID NO: 60751 - protein, 41 aa, Artificial Sequence
  Cyclic GFR-binding peptide
  MOD_RES (6)..(7)..(38)..(40): Xaa is C or S
ASAAPXXVPQALSSLSILFFVGRKPKVLKVYPMIVRSXKXS

SEQ ID NO: 60752 - protein, 30 aa, Artificial Sequence
  Cyclic GFR-binding peptide
  MOD_RES (27)..(29): Xaa is C or S
SSLSILFFDSANNVVLKVYPDMVVESXGXR

SEQ ID NO: 60753 - protein, 29 aa, Artificial Sequence
  Cyclic GFR-binding peptide
  MOD_RES (1)..(2): Xaa is C or S
XXAPTQLSSLSVLFFDDSSNVILKVYPNM

SEQ ID NO: 60754 - protein, 32 aa, Artificial Sequence
  Cyclic GFR-binding peptide
  MOD_RES (2)..(3): Xaa is C or S
PXXTPTKMSSLSMLFFNDKQQIILKVYPGMVV

SEQ ID NO: 60755 - protein, 31 aa, Artificial Sequence
  Cyclic GFR-binding peptide
  MOD_RES (4)..(5): Xaa is C or S
PEPXXVPEKMSSLSILFFDENKNVVLKVYPN

SEQ ID NO: 60756 - protein, 26 aa, Artificial Sequence
  Cyclic GFR-binding peptide
PTKLSSLSILFFDKGVVTYLKVYPGM

SEQ ID NO: 60757 - protein, 36 aa, Artificial Sequence
  Cyclic GFR-binding peptide
  MOD_RES (2)..(3)..(35): Xaa is C or S
PXXAPTQLSSLSVLFFDDSSNVILKVYPNMVVRAXG

SEQ ID NO: 60758 - protein, 28 aa, Artificial Sequence
  Cyclic GFR-binding peptide
  MOD_RES (1)..(1): Xaa is C or S
XAPTKLSSLSVLFFDDSSNVILKVYPNM

SEQ ID NO: 60759 - protein, 37 aa, Artificial Sequence
  Cyclic GFR-binding peptide
  MOD_RES (7)..(7): Xaa is C or S
HVTKPTXAPTKLSSLSVLFFDDSSNVILKVYPNMVVR

SEQ ID NO: 60760 - protein, 34 aa, Artificial Sequence
  Cyclic GFR-binding peptide
  MOD_RES (3)..(4): Xaa is C or S
EPXXVPEKMSSLSILFFDENKNVVLKVYPNMTVE

SEQ ID NO: 60761 - protein, 32 aa, Artificial Sequence
  Cyclic GFR-binding peptide
  MOD_RES (6)..(7): Xaa is C or S
GSAGPXXTPTKMSSLSMLFFNDKQQIILKVYP

SEQ ID NO: 60762 - protein, 38 aa, Artificial Sequence
  Cyclic GFR-binding peptide
  MOD_RES (2)..(2): Xaa is C or S
KXQPSRVHHSSLSVLFFEYVRKKPKLLKVYPRLEEHLE

SEQ ID NO: 60763 - protein, 35 aa, Artificial Sequence
  Cyclic GFR-binding peptide
  MOD_RES (2)..(3): Xaa is C or S
AXXVPTKLSSLSVLFFDDMGVPTLKVYPEGMSVAE

SEQ ID NO: 60764 - protein, 26 aa, Artificial Sequence
  Cyclic GFR-binding peptide
HSSLSVLFFEYVRKKPKLLKVYPRLE

SEQ ID NO: 60765 - protein, 32 aa, Artificial Sequence
  Cyclic GFR-binding peptide
  MOD_RES (1)..(1): Xaa is C or S
XVPTRLSSLSILFFDSANNVVLKVYPDMVVES

SEQ ID NO: 60766 - protein, 31 aa, Artificial Sequence
  Cyclic GFR-binding peptide
  MOD_RES (4)..(5): Xaa is C or S
ASPXXVSQDLSSLSILFFIGKTPKILKVYPM

SEQ ID NO: 60767 - protein, 29 aa, Artificial Sequence
  Cyclic GFR-binding peptide
EKMSSLSILFFDENKNVVLKVYPNMTVES

SEQ ID NO: 60768 - protein, 24 aa, Artificial Sequence
  Cyclic GFR-binding peptide
PTKMSSLSMLFFNDKQQIILKVYP

SEQ ID NO: 60769 - protein, 36 aa, Artificial Sequence
  Cyclic GFR-binding peptide
  MOD_RES (4)..(5)..(36): Xaa is C or S
ASPXXVPQDLSSLSILFFVGRTPKVLKVYPMVVKSX

SEQ ID NO: 60770 - protein, 33 aa, Artificial Sequence
  Cyclic GFR-binding peptide
  MOD_RES (30)..(32): Xaa is C or S
TKLSSLSVLFFDDSSNVILKVYPNMVVRSXGXH

SEQ ID NO: 60771 - protein, 32 aa, Artificial Sequence
  Cyclic GFR-binding peptide
  MOD_RES (1)..(1): Xaa is C or S
XQPSRVHHSSLSVLFFEYVRKKPKLLKVYPRL

SEQ ID NO: 60772 - protein, 31 aa, Artificial Sequence
  Cyclic GFR-binding peptide
  MOD_RES (1)..(1): Xaa is C or S
XAPTQLSSLSVLFFDDSSNVILKVYPNMVVR

SEQ ID NO: 60773 - protein, 36 aa, Artificial Sequence
  Cyclic GFR-binding peptide
  MOD_RES (4)..(5): Xaa is C or S
PEPXXVPEKMSSLSILFFDENKNVVLKVYPNMTVES

SEQ ID NO: 60774 - protein, 21 aa, Artificial Sequence
  Cyclic GFR-binding peptide
SSLSILFFIGKTPKILKVYPM

SEQ ID NO: 60775 - protein, 27 aa, Artificial Sequence
  Cyclic GFR-binding peptide
KLSSLSVLFFDSSNNVILKVYPNMVVK

SEQ ID NO: 60776 - protein, 30 aa, Artificial Sequence
  Cyclic GFR-binding peptide
  MOD_RES (1)..(2): Xaa is C or S
XXAPTKLSSLSVLFFDDSSNVILKVYPNMV

SEQ ID NO: 60777 - protein, 40 aa, Artificial Sequence
  Cyclic GFR-binding peptide
  MOD_RES (6)..(40): Xaa is C or S
DEGLEXVPTEESSLSMLFFRIKPHQGQHLKVYPFLQHNKX

SEQ ID NO: 60778 - protein, 34 aa, Artificial Sequence
  Cyclic GFR-binding peptide
  MOD_RES (6)..(7): Xaa is C or S
STPPTXXVPTRLSSLSILFFDSANNVVLKVYPDM

SEQ ID NO: 60779 - protein, 22 aa, Artificial Sequence
  Cyclic GFR-binding peptide
LSSLSILFFVGRKPKVLKVYPM

SEQ ID NO: 60780 - protein, 29 aa, Artificial Sequence
  Cyclic GFR-binding peptide
  MOD_RES (27)..(29): Xaa is C or S
LSSLSILFFVGRKPKVLKVYPMIVRSXKX

SEQ ID NO: 60781 - protein, 40 aa, Artificial Sequence
  Cyclic GFR-binding peptide
  MOD_RES (5)..(6)..(37)..(39): Xaa is C or S
VPSTXXAPVKTSSLSMLFFDNGRVLLLKVYPMIVEEXGXL

SEQ ID NO: 60782 - protein, 25 aa, Artificial Sequence
  Cyclic GFR-binding peptide
SSLSVLFFDDSSNVILKVYPNMVVR

SEQ ID NO: 60783 - protein, 36 aa, Artificial Sequence
  Cyclic GFR-binding peptide
  MOD_RES (1)..(33)..(35): Xaa is C or S
XAPTKLSSLSVLFFDSSNNVILKVYPNMVVKAXGXH

SEQ ID NO: 60784 - protein, 35 aa, Artificial Sequence
  Cyclic GFR-binding peptide
  MOD_RES (32)..(34): Xaa is C or S
APTKLSSLSVLFFDDSSNVILKVYPNMVVRSXGXH

SEQ ID NO: 60785 - protein, 39 aa, Artificial Sequence
  Cyclic GFR-binding peptide
  MOD_RES (6)..(7): Xaa is C or S
KVGKAXXVPTKLSSLSVLFFDDMGVPTLKVYPEGMSVAE

SEQ ID NO: 60786 - protein, 41 aa, Artificial Sequence
  Cyclic GFR-binding peptide
  MOD_RES (5)..(6)..(38)..(40): Xaa is C or S
APASXXVPARLSSLSILFFDAANNVVLKVYPDMVVEAXGXR

SEQ ID NO: 60787 - protein, 25 aa, Artificial Sequence
  Cyclic GFR-binding peptide
ESSLSMLFFRIKPHQGQHLKVYPFL

SEQ ID NO: 60788 - protein, 37 aa, Artificial Sequence
  Cyclic GFR-binding peptide
  MOD_RES (3)..(4)..(36): Xaa is C or S
PTXXVPTRLSSLSILFFDSANNVVLKVYPDMVVESXG

SEQ ID NO: 60789 - protein, 30 aa, Artificial Sequence
  Cyclic GFR-binding peptide
  MOD_RES (2)..(3): Xaa is C or S
TXXVPTRLSSLSILFFDSANNVVLKVYPDM

SEQ ID NO: 60790 - protein, 39 aa, Artificial Sequence
  Cyclic GFR-binding peptide
  MOD_RES (5)..(6)..(38): Xaa is C or S
APASXXVPARLSSLSILFFDAANNVVLKVYPDMVVEAXG

SEQ ID NO: 60791 - protein, 25 aa, Artificial Sequence
  Cyclic GFR-binding peptide
TKLSSLSVLFFDSSNNVILKVYPNM

SEQ ID NO: 60792 - protein, 32 aa, Artificial Sequence
  Cyclic GFR-binding peptide
  MOD_RES (5)..(6): Xaa is C or S
SAGPXXTPTKMSSLSMLFFNDKQQIILKVYPG

SEQ ID NO: 60793 - protein, 21 aa, Artificial Sequence
  Cyclic GFR-binding peptide
SSLSVLFFDDSSNVILKVYPN

SEQ ID NO: 60794 - protein, 31 aa, Artificial Sequence
  Cyclic GFR-binding peptide
  MOD_RES (1)..(1): Xaa is C or S
XVPTEESSLSMLFFRIKPHQGQHLKVYPFLQ

SEQ ID NO: 60795 - protein, 29 aa, Artificial Sequence
  Cyclic GFR-binding peptide
  MOD_RES (3)..(4): Xaa is C or S
SPXXVSQDLSSLSILFFIGKTPKILKVYP

SEQ ID NO: 60796 - protein, 37 aa, Artificial Sequence
  Cyclic GFR-binding peptide
  MOD_RES (5)..(6)..(37): Xaa is C or S
SASPXXVSQDLSSLSILFFIGKTPKILKVYPMIVKSX

SEQ ID NO: 60797 - protein, 39 aa, Artificial Sequence
  Cyclic GFR-binding peptide
  MOD_RES (6)..(7)..(38): Xaa is C or S
ASASPXXVSQDLSSLSILFFIGKTPKILKVYPMIVKSXK

SEQ ID NO: 60798 - protein, 21 aa, Artificial Sequence
  Cyclic GFR-binding peptide
LSSLSILFFDSANNVVLKVYP

SEQ ID NO: 60799 - protein, 34 aa, Artificial Sequence
  Cyclic GFR-binding peptide
  MOD_RES (2)..(3): Xaa is C or S
AXXVPTKLSSLSVLFFDDMGVPTLKVYPEGMSVA

SEQ ID NO: 60800 - protein, 35 aa, Artificial Sequence
  Cyclic GFR-binding peptide
  MOD_RES (7)..(7): Xaa is C or S
HVTKPTXAPTKLSSLSVLFFDDSSNVILKVYPNMV

SEQ ID NO: 60801 - protein, 36 aa, Artificial Sequence
  Cyclic GFR-binding peptide
  MOD_RES (6)..(6): Xaa is C or S
DEGLEXVPTEESSLSMLFFRIKPHQGQHLKVYPFLQ

SEQ ID NO: 60802 - protein, 33 aa, Artificial Sequence
  Cyclic GFR-binding peptide
  MOD_RES (2)..(3): Xaa is C or S
PXXTPTKMSSLSMLFFNDKQQIILKVYPGMVVD

SEQ ID NO: 60803 - protein, 27 aa, Artificial Sequence
  Cyclic GFR-binding peptide
VKTSSLSMLFFDNGRVLLLKVYPMIVE

SEQ ID NO: 60804 - protein, 30 aa, Artificial Sequence
  Cyclic GFR-binding peptide
  MOD_RES (4)..(5): Xaa is C or S
ASPXXVPQDLSSLSILFFVGRTPKVLKVYP

SEQ ID NO: 60805 - protein, 35 aa, Artificial Sequence
  Cyclic GFR-binding peptide
  MOD_RES (32)..(34): Xaa is C or S
VPARLSSLSILFFDAANNVVLKVYPDMVVEAXGXR

SEQ ID NO: 60806 - protein, 27 aa, Artificial Sequence
  Cyclic GFR-binding peptide
MSSLSILFFDENKNVVLKVYPNMTVES

SEQ ID NO: 60807 - protein, 37 aa, Artificial Sequence
  Cyclic GFR-binding peptide
  MOD_RES (5)..(6): Xaa is C or S
IPEPXXVPEKMSSLSILFFDENKNVVLKVYPNMTVES

SEQ ID NO: 60808 - protein, 35 aa, Artificial Sequence
  Cyclic GFR-binding peptide
  MOD_RES (1)..(32)..(34): Xaa is C or S
XVPQALSSLSILFFVGRKPKVLKVYPMIVRSXKXS

SEQ ID NO: 60809 - protein, 32 aa, Artificial Sequence
  Cyclic GFR-binding peptide
  MOD_RES (29)..(31): Xaa is C or S
RLSSLSILFFDAANNVVLKVYPDMVVEAXGXR

SEQ ID NO: 60810 - protein, 37 aa, Artificial Sequence
  Cyclic GFR-binding peptide
  MOD_RES (6)..(7): Xaa is C or S
HVPKPXXAPTKLSSLSVLFFDDSSNVILKVYPNMVVR

SEQ ID NO: 60811 - protein, 26 aa, Artificial Sequence
  Cyclic GFR-binding peptide
VPEKMSSLSILFFDENKNVVLKVYPN

SEQ ID NO: 60812 - protein, 31 aa, Artificial Sequence
  Cyclic GFR-binding peptide
  MOD_RES (5)..(6): Xaa is C or S
SAGPXXTPTKMSSLSMLFFNDKQQIILKVYP

SEQ ID NO: 60813 - protein, 28 aa, Artificial Sequence
  Cyclic GFR-binding peptide
  MOD_RES (27)..(27): Xaa is C or S
LSSLSILFFVGRKPKVLKVYPMIVRSXK

SEQ ID NO: 60814 - protein, 28 aa, Artificial Sequence
  Cyclic GFR-binding peptide
APTKLSSLSVLFFDSSNNVILKVYPNMV

SEQ ID NO: 60815 - protein, 35 aa, Artificial Sequence
  Cyclic GFR-binding peptide
  MOD_RES (32)..(34): Xaa is C or S
APTKLSSLSVLFFDSSNNVILKVYPNMVVKAXGXH

SEQ ID NO: 60816 - protein, 37 aa, Artificial Sequence
  Cyclic GFR-binding peptide
  MOD_RES (6)..(6): Xaa is C or S
DEGLEXVPTEESSLSMLFFRIKPHQGQHLKVYPFLQH

SEQ ID NO: 60817 - protein, 29 aa, Artificial Sequence
  Cyclic GFR-binding peptide
  MOD_RES (1)..(1): Xaa is C or S
XVPTRLSSLSILFFDSANNVVLKVYPDMV

SEQ ID NO: 60818 - protein, 29 aa, Artificial Sequence
  Cyclic GFR-binding peptide
  MOD_RES (2)..(3): Xaa is C or S
SXXVPARLSSLSILFFDAANNVVLKVYPD

SEQ ID NO: 60819 - protein, 32 aa, Artificial Sequence
  Cyclic GFR-binding peptide
  MOD_RES (6)..(7): Xaa is C or S
KASKAXXVPTKLSSLSILFFDKGVVTYLKVYP

SEQ ID NO: 60820 - protein, 31 aa, Artificial Sequence
  Cyclic GFR-binding peptide
  MOD_RES (28)..(30): Xaa is C or S
DLSSLSILFFIGKTPKILKVYPMIVKSXKXS

SEQ ID NO: 60821 - protein, 28 aa, Artificial Sequence
  Cyclic GFR-binding peptide
APVKTSSLSMLFFDNGRVLLLKVYPMIV

SEQ ID NO: 60822 - protein, 24 aa, Artificial Sequence
  Cyclic GFR-binding peptide
LSSLSILFFIGKTPKILKVYPMIV

SEQ ID NO: 60823 - protein, 24 aa, Artificial Sequence
  Cyclic GFR-binding peptide
HHSSLSVLFFEYVRKKPKLLKVYP

SEQ ID NO: 60824 - protein, 33 aa, Artificial Sequence
  Cyclic GFR-binding peptide
VPTEESSLSMLFFRIKPHQGQHLKVYPFLQHNK

SEQ ID NO: 60825 - protein, 34 aa, Artificial Sequence
  Cyclic GFR-binding peptide
  MOD_RES (5)..(6): Xaa is C or S
VPKAXXAPTKLSSLSVLFFDSSNNVILKVYPNMV

SEQ ID NO: 60826 - protein, 35 aa, Artificial Sequence
  Cyclic GFR-binding peptide
  MOD_RES (2)..(3)..(35): Xaa is C or S
PXXAPTKLSSLSVLFFDDSSNVILKVYPNMVVRSX

SEQ ID NO: 60827 - protein, 35 aa, Artificial Sequence
  Cyclic GFR-binding peptide
  MOD_RES (6)..(7): Xaa is C or S
ASASPXXVPQDLSSLSILFFVGRTPKVLKVYPMVV

SEQ ID NO: 60828 - protein, 42 aa, Artificial Sequence
  Cyclic GFR-binding peptide
  MOD_RES (6)..(7)..(39)..(41): Xaa is C or S
TVPKPXXAPTQLSSLSVLFFDDSSNVILKVYPNMVVRAXGXH

SEQ ID NO: 60829 - protein, 39 aa, Artificial Sequence
  Cyclic GFR-binding peptide
  MOD_RES (6)..(7)..(38): Xaa is C or S
ASASPXXVPQDLSSLSILFFVGRTPKVLKVYPMVVKSXK

SEQ ID NO: 60830 - protein, 36 aa, Artificial Sequence
  Cyclic GFR-binding peptide
  MOD_RES (3)..(4)..(35): Xaa is C or S
SPXXVPQDLSSLSILFFVGRTPKVLKVYPMVVKSXK

SEQ ID NO: 60831 - protein, 35 aa, Artificial Sequence
  Cyclic GFR-binding peptide
  MOD_RES (4)..(4): Xaa is C or S
SVKXQPSRVHHSSLSVLFFEYVRKKPKLLKVYPRL

SEQ ID NO: 60832 - protein, 32 aa, Artificial Sequence
  Cyclic GFR-binding peptide
  MOD_RES (3)..(3): Xaa is C or S
PTXAPTKLSSLSVLFFDDSSNVILKVYPNMVV

SEQ ID NO: 60833 - protein, 36 aa, Artificial Sequence
  Cyclic GFR-binding peptide
  MOD_RES (5)..(5): Xaa is C or S
EGLEXVPTEESSLSMLFFRIKPHQGQHLKVYPFLQH

SEQ ID NO: 60834 - protein, 34 aa, Artificial Sequence
  Cyclic GFR-binding peptide
  MOD_RES (32)..(34): Xaa is C or S
APTQLSSLSVLFFDDSSNVILKVYPNMVVRAXGX

SEQ ID NO: 60835 - protein, 29 aa, Artificial Sequence
  Cyclic GFR-binding peptide
  MOD_RES (2)..(3): Xaa is C or S
PXXAPTQLSSLSVLFFDDSSNVILKVYPN

SEQ ID NO: 60836 - protein, 39 aa, Artificial Sequence
  Cyclic GFR-binding peptide
  MOD_RES (3)..(37)..(39): Xaa is C or S
LEXVPTEESSLSMLFFRIKPHQGQHLKVYPFLQHNKXEX

SEQ ID NO: 60837 - protein, 32 aa, Artificial Sequence
  Cyclic GFR-binding peptide
  MOD_RES (5)..(6): Xaa is C or S
TPPTXXVPTRLSSLSILFFDSANNVVLKVYPD

SEQ ID NO: 60838 - protein, 26 aa, Artificial Sequence
  Cyclic GFR-binding peptide
LSSLSILFFDSANNVVLKVYPDMVVE

SEQ ID NO: 60839 - protein, 20 aa, Artificial Sequence
  Cyclic GFR-binding peptide
SSLSILFFDENKNVVLKVYP

SEQ ID NO: 60840 - protein, 36 aa, Artificial Sequence
  Cyclic GFR-binding peptide
  MOD_RES (2)..(2): Xaa is C or S
KXQPSRVHHSSLSVLFFEYVRKKPKLLKVYPRLEEH

SEQ ID NO: 60841 - protein, 26 aa, Artificial Sequence
  Cyclic GFR-binding peptide
APTQLSSLSVLFFDDSSNVILKVYPN

SEQ ID NO: 60842 - protein, 29 aa, Artificial Sequence
  Cyclic GFR-binding peptide
VPTRLSSLSILFFDSANNVVLKVYPDMVV

SEQ ID NO: 60843 - protein, 34 aa, Artificial Sequence
  Cyclic GFR-binding peptide
  MOD_RES (31)..(33): Xaa is C or S
HSSLSVLFFEYVRKKPKLLKVYPRLEEHLEXAXA

SEQ ID NO: 60844 - protein, 36 aa, Artificial Sequence
  Cyclic GFR-binding peptide
  MOD_RES (2)..(3)..(34)..(36): Xaa is C or S
PXXVPQDLSSLSILFFVGRTPKVLKVYPMVVKSXKX

SEQ ID NO: 60845 - protein, 32 aa, Artificial Sequence
  Cyclic GFR-binding peptide
  MOD_RES (3)..(4): Xaa is C or S
SPXXVPQDLSSLSILFFVGRTPKVLKVYPMVV

SEQ ID NO: 60846 - protein, 24 aa, Artificial Sequence
  Cyclic GFR-binding peptide
SSLSMLFFRIKPHQGQHLKVYPFL

SEQ ID NO: 60847 - protein, 31 aa, Artificial Sequence
  Cyclic GFR-binding peptide
  MOD_RES (1)..(2): Xaa is C or S
XXTPTKMSSLSMLFFNDKQQIILKVYPGMVV

SEQ ID NO: 60848 - protein, 30 aa, Artificial Sequence
  Cyclic GFR-binding peptide
  MOD_RES (28)..(30): Xaa is C or S
KTSSLSMLFFDNGRVLLLKVYPMIVEEXGX

SEQ ID NO: 60849 - protein, 28 aa, Artificial Sequence
  Cyclic GFR-binding peptide
ARLSSLSILFFDAANNVVLKVYPDMVVE

SEQ ID NO: 60850 - protein, 40 aa, Artificial Sequence
  Cyclic GFR-binding peptide
  MOD_RES (4)..(5)..(37)..(39): Xaa is C or S
PASXXVPARLSSLSILFFDAANNVVLKVYPDMVVEAXGXR

SEQ ID NO: 60851 - protein, 40 aa, Artificial Sequence
  Cyclic GFR-binding peptide
  MOD_RES (6)..(7)..(39): Xaa is C or S
KASKAXXVPTKLSSLSILFFDKGVVTYLKVYPGMAVSEXG

SEQ ID NO: 60852 - protein, 22 aa, Artificial Sequence
  Cyclic GFR-binding peptide
RLSSLSILFFDSANNVVLKVYP

SEQ ID NO: 60853 - protein, 29 aa, Artificial Sequence
  Cyclic GFR-binding peptide
  MOD_RES (1)..(2): Xaa is C or S
XXTPTKMSSLSMLFFNDKQQIILKVYPGM

SEQ ID NO: 60854 - protein, 23 aa, Artificial Sequence
  Cyclic GFR-binding peptide
TQLSSLSVLFFDDSSNVILKVYP

SEQ ID NO: 60855 - protein, 25 aa, Artificial Sequence
  Cyclic GFR-binding peptide
SSLSILFFDSANNVVLKVYPDMVVE

SEQ ID NO: 60856 - protein, 31 aa, Artificial Sequence
  Cyclic GFR-binding peptide
  MOD_RES (5)..(6): Xaa is C or S
VPKPXXAPTKLSSLSVLFFDDSSNVILKVYP

SEQ ID NO: 60857 - protein, 25 aa, Artificial Sequence
  Cyclic GFR-binding peptide
TKLSSLSVLFFDDMGVPTLKVYPEG

SEQ ID NO: 60858 - protein, 32 aa, Artificial Sequence
  Cyclic GFR-binding peptide
  MOD_RES (31)..(31): Xaa is C or S
PEKMSSLSILFFDENKNVVLKVYPNMTVESXA

SEQ ID NO: 60859 - protein, 27 aa, Artificial Sequence
  Cyclic GFR-binding peptide
  MOD_RES (1)..(1): Xaa is C or S
XAPTKLSSLSVLFFDSSNNVILKVYPN

SEQ ID NO: 60860 - protein, 29 aa, Artificial Sequence
  Cyclic GFR-binding peptide
PTQLSSLSVLFFDDSSNVILKVYPNMVVR

SEQ ID NO: 60861 - protein, 21 aa, Artificial Sequence
  Cyclic GFR-binding peptide
SSLSVLFFDDMGVPTLKVYPE

SEQ ID NO: 60862 - protein, 36 aa, Artificial Sequence
  Cyclic GFR-binding peptide
  MOD_RES (3)..(4): Xaa is C or S
KAXXVPTKLSSLSVLFFDDMGVPTLKVYPEGMSVAE

SEQ ID NO: 60863 - protein, 30 aa, Artificial Sequence
  Cyclic GFR-binding peptide
  MOD_RES (1)..(1): Xaa is C or S
XVPQDLSSLSILFFVGRTPKVLKVYPMVVK

SEQ ID NO: 60864 - protein, 36 aa, Artificial Sequence
  Cyclic GFR-binding peptide
  MOD_RES (1)..(33)..(35): Xaa is C or S
XVPARLSSLSILFFDAANNVVLKVYPDMVVEAXGXR

SEQ ID NO: 60865 - protein, 29 aa, Artificial Sequence
  Cyclic GFR-binding peptide
  MOD_RES (1)..(1): Xaa is C or S
XVPQALSSLSILFFVGRKPKVLKVYPMIV

SEQ ID NO: 60866 - protein, 34 aa, Artificial Sequence
  Cyclic GFR-binding peptide
  MOD_RES (1)..(2)..(34): Xaa is C or S
XXAPTKLSSLSVLFFDSSNNVILKVYPNMVVKAX

SEQ ID NO: 60867 - protein, 35 aa, Artificial Sequence
  Cyclic GFR-binding peptide
  MOD_RES (6)..(7): Xaa is C or S
KVGKAXXVPTKLSSLSVLFFDDMGVPTLKVYPEGM

SEQ ID NO: 60868 - protein, 27 aa, Artificial Sequence
  Cyclic GFR-binding peptide
PEKMSSLSILFFDENKNVVLKVYPNMT

SEQ ID NO: 60869 - protein, 28 aa, Artificial Sequence
  Cyclic GFR-binding peptide
VPQDLSSLSILFFVGRTPKVLKVYPMVV

SEQ ID NO: 60870 - protein, 36 aa, Artificial Sequence
  Cyclic GFR-binding peptide
  MOD_RES (33)..(35): Xaa is C or S
VHHSSLSVLFFEYVRKKPKLLKVYPRLEEHLEXAXA

SEQ ID NO: 60871 - protein, 37 aa, Artificial Sequence
  Cyclic GFR-binding peptide
  MOD_RES (2)..(36): Xaa is C or S
EXVPTEESSLSMLFFRIKPHQGQHLKVYPFLQHNKXE

SEQ ID NO: 60872 - protein, 29 aa, Artificial Sequence
  Cyclic GFR-binding peptide
VPQDLSSLSILFFVGRTPKVLKVYPMVVK

SEQ ID NO: 60873 - protein, 22 aa, Artificial Sequence
  Cyclic GFR-binding peptide
KLSSLSVLFFDSSNNVILKVYP

SEQ ID NO: 60874 - protein, 26 aa, Artificial Sequence
  Cyclic GFR-binding peptide
  MOD_RES (1)..(1): Xaa is C or S
XAPTKLSSLSVLFFDSSNNVILKVYP

SEQ ID NO: 60875 - protein, 25 aa, Artificial Sequence
  Cyclic GFR-binding peptide
QDLSSLSILFFIGKTPKILKVYPMI

SEQ ID NO: 60876 - protein, 28 aa, Artificial Sequence
  Cyclic GFR-binding peptide
PTQLSSLSVLFFDDSSNVILKVYPNMVV

SEQ ID NO: 60877 - protein, 28 aa, Artificial Sequence
  Cyclic GFR-binding peptide
EESSLSMLFFRIKPHQGQHLKVYPFLQH

SEQ ID NO: 60878 - protein, 23 aa, Artificial Sequence
  Cyclic GFR-binding peptide
SSLSILFFDAANNVVLKVYPDMV

SEQ ID NO: 60879 - protein, 35 aa, Artificial Sequence
  Cyclic GFR-binding peptide
  MOD_RES (34)..(34): Xaa is C or S
VPTEESSLSMLFFRIKPHQGQHLKVYPFLQHNKXE

SEQ ID NO: 60880 - protein, 26 aa, Artificial Sequence
  Cyclic GFR-binding peptide
KTSSLSMLFFDNGRVLLLKVYPMIVE

SEQ ID NO: 60881 - protein, 29 aa, Artificial Sequence
  Cyclic GFR-binding peptide
  MOD_RES (2)..(3): Xaa is C or S
PXXVPEKMSSLSILFFDENKNVVLKVYPN

SEQ ID NO: 60882 - protein, 22 aa, Artificial Sequence
  Cyclic GFR-binding peptide
SSLSILFFVGRTPKVLKVYPMV

SEQ ID NO: 60883 - protein, 26 aa, Artificial Sequence
  Cyclic GFR-binding peptide
APVKTSSLSMLFFDNGRVLLLKVYPM

SEQ ID NO: 60884 - protein, 34 aa, Artificial Sequence
  Cyclic GFR-binding peptide
  MOD_RES (3)..(4): Xaa is C or S
ASXXVPARLSSLSILFFDAANNVVLKVYPDMVVE

SEQ ID NO: 60885 - protein, 21 aa, Artificial Sequence
  Cyclic GFR-binding peptide
SSLSMLFFNDKQQIILKVYPG

SEQ ID NO: 60886 - protein, 40 aa, Artificial Sequence
  Cyclic GFR-binding peptide
  MOD_RES (37)..(39): Xaa is C or S
QPSRVHHSSLSVLFFEYVRKKPKLLKVYPRLEEHLEXAXA

SEQ ID NO: 60887 - protein, 36 aa, Artificial Sequence
  Cyclic GFR-binding peptide
  MOD_RES (3)..(4)..(35): Xaa is C or S
SPXXVSQDLSSLSILFFIGKTPKILKVYPMIVKSXK

SEQ ID NO: 60888 - protein, 30 aa, Artificial Sequence
  Cyclic GFR-binding peptide
  MOD_RES (3)..(4): Xaa is C or S
KPXXAPTQLSSLSVLFFDDSSNVILKVYPN

SEQ ID NO: 60889 - protein, 26 aa, Artificial Sequence
  Cyclic GFR-binding peptide
  MOD_RES (1)..(1): Xaa is C or S
XVPTKLSSLSILFFDKGVVTYLKVYP

SEQ ID NO: 60890 - protein, 34 aa, Artificial Sequence
  Cyclic GFR-binding peptide
  MOD_RES (4)..(5): Xaa is C or S
PKAXXAPTKLSSLSVLFFDSSNNVILKVYPNMVV

SEQ ID NO: 60891 - protein, 37 aa, Artificial Sequence
  Cyclic GFR-binding peptide
  MOD_RES (5)..(5): Xaa is C or S
SSVKXQPSRVHHSSLSVLFFEYVRKKPKLLKVYPRLE

SEQ ID NO: 60892 - protein, 25 aa, Artificial Sequence
  Cyclic GFR-binding peptide
LSSLSILFFVGRTPKVLKVYPMVVK

SEQ ID NO: 60893 - protein, 30 aa, Artificial Sequence
  Cyclic GFR-binding peptide
  MOD_RES (29)..(29): Xaa is C or S
KMSSLSILFFDENKNVVLKVYPNMTVESXA

SEQ ID NO: 60894 - protein, 26 aa, Artificial Sequence
  Cyclic GFR-binding peptide
QALSSLSILFFVGRKPKVLKVYPMIV

SEQ ID NO: 60895 - protein, 30 aa, Artificial Sequence
  Cyclic GFR-binding peptide
  MOD_RES (28)..(30): Xaa is C or S
LSSLSVLFFDDSSNVILKVYPNMVVRSXGX

SEQ ID NO: 60896 - protein, 32 aa, Artificial Sequence
  Cyclic GFR-binding peptide
  MOD_RES (3)..(3): Xaa is C or S
VKXQPSRVHHSSLSVLFFEYVRKKPKLLKVYP

SEQ ID NO: 60897 - protein, 34 aa, Artificial Sequence
  Cyclic GFR-binding peptide
  MOD_RES (1)..(32)..(34): Xaa is C or S
XVSQDLSSLSILFFIGKTPKILKVYPMIVKSXKX

SEQ ID NO: 60898 - protein, 33 aa, Artificial Sequence
  Cyclic GFR-binding peptide
  MOD_RES (31)..(33): Xaa is C or S
PTRLSSLSILFFDSANNVVLKVYPDMVVESXGX

SEQ ID NO: 60899 - protein, 25 aa, Artificial Sequence
  Cyclic GFR-binding peptide
DLSSLSILFFVGRTPKVLKVYPMVV

SEQ ID NO: 60900 - protein, 37 aa, Artificial Sequence
  Cyclic GFR-binding peptide
  MOD_RES (6)..(7): Xaa is C or S
ASASPXXVPQDLSSLSILFFVGRTPKVLKVYPMVVKS

SEQ ID NO: 60901 - protein, 35 aa, Artificial Sequence
  Cyclic GFR-binding peptide
  MOD_RES (2)..(3)..(35): Xaa is C or S
AXXAPTKLSSLSVLFFDSSNNVILKVYPNMVVKAX

SEQ ID NO: 60902 - protein, 35 aa, Artificial Sequence
  Cyclic GFR-binding peptide
  MOD_RES (32)..(34): Xaa is C or S
VPEKMSSLSILFFDENKNVVLKVYPNMTVESXAXR

SEQ ID NO: 60903 - protein, 31 aa, Artificial Sequence
  Cyclic GFR-binding peptide
  MOD_RES (4)..(5): Xaa is C or S
ASPXXVPQDLSSLSILFFVGRTPKVLKVYPM

SEQ ID NO: 60904 - protein, 38 aa, Artificial Sequence
  Cyclic GFR-binding peptide
  MOD_RES (2)..(3)..(35)..(37): Xaa is C or S
PXXTPTKMSSLSMLFFNDKQQIILKVYPGMVVDRXGXS

SEQ ID NO: 60905 - protein, 31 aa, Artificial Sequence
  Cyclic GFR-binding peptide
  MOD_RES (29)..(31): Xaa is C or S
QLSSLSVLFFDDSSNVILKVYPNMVVRAXGX

SEQ ID NO: 60906 - protein, 32 aa, Artificial Sequence
  Cyclic GFR-binding peptide
  MOD_RES (1)..(1): Xaa is C or S
XTPTKMSSLSMLFFNDKQQIILKVYPGMVVDR

SEQ ID NO: 60907 - protein, 30 aa, Artificial Sequence
  Cyclic GFR-binding peptide
TPTKMSSLSMLFFNDKQQIILKVYPGMVVD

SEQ ID NO: 60908 - protein, 23 aa, Artificial Sequence
  Cyclic GFR-binding peptide
SSLSMLFFDNGRVLLLKVYPMIV

SEQ ID NO: 60909 - protein, 28 aa, Artificial Sequence
  Cyclic GFR-binding peptide
PTKLSSLSVLFFDDMGVPTLKVYPEGMS

SEQ ID NO: 60910 - protein, 30 aa, Artificial Sequence
  Cyclic GFR-binding peptide
VPQDLSSLSILFFVGRTPKVLKVYPMVVKS

SEQ ID NO: 60911 - protein, 32 aa, Artificial Sequence
  Cyclic GFR-binding peptide
  MOD_RES (32)..(32): Xaa is C or S
PTKLSSLSVLFFDDMGVPTLKVYPEGMSVAEX

SEQ ID NO: 60912 - protein, 26 aa, Artificial Sequence
  Cyclic GFR-binding peptide
  MOD_RES (1)..(1): Xaa is C or S
XAPTQLSSLSVLFFDDSSNVILKVYP

SEQ ID NO: 60913 - protein, 28 aa, Artificial Sequence
  Cyclic GFR-binding peptide
HHSSLSVLFFEYVRKKPKLLKVYPRLEE

SEQ ID NO: 60914 - protein, 33 aa, Artificial Sequence
  Cyclic GFR-binding peptide
  MOD_RES (2)..(3): Xaa is C or S
PXXVSQDLSSLSILFFIGKTPKILKVYPMIVKS

SEQ ID NO: 60915 - protein, 32 aa, Artificial Sequence
  Cyclic GFR-binding peptide
  MOD_RES (30)..(32): Xaa is C or S
EKMSSLSILFFDENKNVVLKVYPNMTVESXAX

SEQ ID NO: 60916 - protein, 29 aa, Artificial Sequence
  Cyclic GFR-binding peptide
  MOD_RES (2)..(2): Xaa is C or S
EXVPTEESSLSMLFFRIKPHQGQHLKVYP

SEQ ID NO: 60917 - protein, 27 aa, Artificial Sequence
  Cyclic GFR-binding peptide
PARLSSLSILFFDAANNVVLKVYPDMV

SEQ ID NO: 60918 - protein, 37 aa, Artificial Sequence
  Cyclic GFR-binding peptide
  MOD_RES (6)..(7): Xaa is C or S
GIPEPXXVPEKMSSLSILFFDENKNVVLKVYPNMTVE

SEQ ID NO: 60919 - protein, 30 aa, Artificial Sequence
  Cyclic GFR-binding peptide
  MOD_RES (27)..(29): Xaa is C or S
SSLSILFFDAANNVVLKVYPDMVVEAXGXR

SEQ ID NO: 60920 - protein, 35 aa, Artificial Sequence
  Cyclic GFR-binding peptide
  MOD_RES (5)..(6): Xaa is C or S
SASPXXVSQDLSSLSILFFIGKTPKILKVYPMIVK

SEQ ID NO: 60921 - protein, 40 aa, Artificial Sequence
  Cyclic GFR-binding peptide
  MOD_RES (3)..(4)..(37)..(39): Xaa is C or S
KAXXVPTKLSSLSVLFFDDMGVPTLKVYPEGMSVAEXGXR

SEQ ID NO: 60922 - protein, 36 aa, Artificial Sequence
  Cyclic GFR-binding peptide
  MOD_RES (2)..(34)..(36): Xaa is C or S
TXAPTKLSSLSVLFFDDSSNVILKVYPNMVVRSXGX

SEQ ID NO: 60923 - protein, 42 aa, Artificial Sequence
  Cyclic GFR-binding peptide
  MOD_RES (6)..(7)..(39)..(41): Xaa is C or S
GIPEPXXVPEKMSSLSILFFDENKNVVLKVYPNMTVESXAXR

SEQ ID NO: 60924 - protein, 32 aa, Artificial Sequence
  Cyclic GFR-binding peptide
  MOD_RES (30)..(32): Xaa is C or S
PQALSSLSILFFVGRKPKVLKVYPMIVRSXKX

SEQ ID NO: 60925 - protein, 29 aa, Artificial Sequence
  Cyclic GFR-binding peptide
APTKLSSLSVLFFDDSSNVILKVYPNMVV

SEQ ID NO: 60926 - protein, 28 aa, Artificial Sequence
  Cyclic GFR-binding peptide
  MOD_RES (27)..(27): Xaa is C or S
SSLSVLFFDSSNNVILKVYPNMVVKAXG

SEQ ID NO: 60927 - protein, 26 aa, Artificial Sequence
  Cyclic GFR-binding peptide
  MOD_RES (1)..(1): Xaa is C or S
XTPTKMSSLSMLFFNDKQQIILKVYP

SEQ ID NO: 60928 - protein, 37 aa, Artificial Sequence
  Cyclic GFR-binding peptide
  MOD_RES (6)..(7): Xaa is C or S
AAPASXXVPARLSSLSILFFDAANNVVLKVYPDMVVE

SEQ ID NO: 60929 - protein, 38 aa, Artificial Sequence
  Cyclic GFR-binding peptide
  MOD_RES (6)..(7)..(38): Xaa is C or S
ASASPXXVPQDLSSLSILFFVGRTPKVLKVYPMVVKSX

SEQ ID NO: 60930 - protein, 34 aa, Artificial Sequence
  Cyclic GFR-binding peptide
  MOD_RES (4)..(5): Xaa is C or S
PKPXXAPTQLSSLSVLFFDDSSNVILKVYPNMVV

SEQ ID NO: 60931 - protein, 20 aa, Artificial Sequence
  Cyclic GFR-binding peptide
SSLSVLFFDDMGVPTLKVYP

SEQ ID NO: 60932 - protein, 41 aa, Artificial Sequence
  Cyclic GFR-binding peptide
  MOD_RES (5)..(39)..(41): Xaa is C or S
EGLEXVPTEESSLSMLFFRIKPHQGQHLKVYPFLQHNKXEX

SEQ ID NO: 60933 - protein, 33 aa, Artificial Sequence
  Cyclic GFR-binding peptide
  MOD_RES (3)..(4): Xaa is C or S
EPXXVPEKMSSLSILFFDENKNVVLKVYPNMTV

SEQ ID NO: 60934 - protein, 28 aa, Artificial Sequence
  Cyclic GFR-binding peptide
PQDLSSLSILFFVGRTPKVLKVYPMVVK

SEQ ID NO: 60935 - protein, 41 aa, Artificial Sequence
  Cyclic GFR-binding peptide
  MOD_RES (6)..(38)..(40): Xaa is C or S
VTKPTXAPTKLSSLSVLFFDDSSNVILKVYPNMVVRSXGXH

SEQ ID NO: 60936 - protein, 39 aa, Artificial Sequence
  Cyclic GFR-binding peptide
  MOD_RES (5)..(6)..(38): Xaa is C or S
VPKPXXAPTKLSSLSVLFFDDSSNVILKVYPNMVVRSXG

SEQ ID NO: 60937 - protein, 33 aa, Artificial Sequence
  Cyclic GFR-binding peptide
  MOD_RES (1)..(33): Xaa is C or S
XVPARLSSLSILFFDAANNVVLKVYPDMVVEAX

SEQ ID NO: 60938 - protein, 28 aa, Artificial Sequence
  Cyclic GFR-binding peptide
APTKLSSLSVLFFDDSSNVILKVYPNMV

SEQ ID NO: 60939 - protein, 25 aa, Artificial Sequence
  Cyclic GFR-binding peptide
TKMSSLSMLFFNDKQQIILKVYPGM

SEQ ID NO: 60940 - protein, 30 aa, Artificial Sequence
  Cyclic GFR-binding peptide
  MOD_RES (1)..(1): Xaa is C or S
XVPTRLSSLSILFFDSANNVVLKVYPDMVV

SEQ ID NO: 60941 - protein, 40 aa, Artificial Sequence
  Cyclic GFR-binding peptide
  MOD_RES (5)..(6)..(37)..(39): Xaa is C or S
SASPXXVSQDLSSLSILFFIGKTPKILKVYPMIVKSXKXS

SEQ ID NO: 60942 - protein, 36 aa, Artificial Sequence
  Cyclic GFR-binding peptide
  MOD_RES (2)..(3)..(36): Xaa is C or S
AXXVPTKLSSLSVLFFDDMGVPTLKVYPEGMSVAEX

SEQ ID NO: 60943 - protein, 38 aa, Artificial Sequence
  Cyclic GFR-binding peptide
  MOD_RES (5)..(5): Xaa is C or S
EGLEXVPTEESSLSMLFFRIKPHQGQHLKVYPFLQHNK

SEQ ID NO: 60944 - protein, 35 aa, Artificial Sequence
  Cyclic GFR-binding peptide
  MOD_RES (4)..(5): Xaa is C or S
PKPXXAPTQLSSLSVLFFDDSSNVILKVYPNMVVR

SEQ ID NO: 60945 - protein, 32 aa, Artificial Sequence
  Cyclic GFR-binding peptide
  MOD_RES (1)..(2): Xaa is C or S
XXVPARLSSLSILFFDAANNVVLKVYPDMVVE

SEQ ID NO: 60946 - protein, 40 aa, Artificial Sequence
  Cyclic GFR-binding peptide
  MOD_RES (4)..(38)..(40): Xaa is C or S
GLEXVPTEESSLSMLFFRIKPHQGQHLKVYPFLQHNKXEX

SEQ ID NO: 60947 - protein, 31 aa, Artificial Sequence
  Cyclic GFR-binding peptide
  MOD_RES (6)..(6): Xaa is C or S
VTKPTXAPTKLSSLSVLFFDDSSNVILKVYP

SEQ ID NO: 60948 - protein, 27 aa, Artificial Sequence
  Cyclic GFR-binding peptide
PTEESSLSMLFFRIKPHQGQHLKVYPF

SEQ ID NO: 60949 - protein, 29 aa, Artificial Sequence
  Cyclic GFR-binding peptide
PARLSSLSILFFDAANNVVLKVYPDMVVE

SEQ ID NO: 60950 - protein, 25 aa, Artificial Sequence
  Cyclic GFR-binding peptide
LSSLSILFFDAANNVVLKVYPDMVV

SEQ ID NO: 60951 - protein, 33 aa, Artificial Sequence
  Cyclic GFR-binding peptide
  MOD_RES (4)..(5): Xaa is C or S
ASPXXVSQDLSSLSILFFIGKTPKILKVYPMIV

SEQ ID NO: 60952 - protein, 39 aa, Artificial Sequence
  Cyclic GFR-binding peptide
  MOD_RES (5)..(6)..(38): Xaa is C or S
TPPTXXVPTRLSSLSILFFDSANNVVLKVYPDMVVESXG

SEQ ID NO: 60953 - protein, 35 aa, Artificial Sequence
  Cyclic GFR-binding peptide
  MOD_RES (33)..(35): Xaa is C or S
VPTKLSSLSVLFFDDMGVPTLKVYPEGMSVAEXGX

SEQ ID NO: 60954 - protein, 31 aa, Artificial Sequence
  Cyclic GFR-binding peptide
  MOD_RES (1)..(2): Xaa is C or S
XXVPARLSSLSILFFDAANNVVLKVYPDMVV

SEQ ID NO: 60955 - protein, 35 aa, Artificial Sequence
  Cyclic GFR-binding peptide
  MOD_RES (5)..(6): Xaa is C or S
IPEPXXVPEKMSSLSILFFDENKNVVLKVYPNMTV

SEQ ID NO: 60956 - protein, 22 aa, Artificial Sequence
  Cyclic GFR-binding peptide
SSLSILFFDENKNVVLKVYPNM

SEQ ID NO: 60957 - protein, 29 aa, Artificial Sequence
  Cyclic GFR-binding peptide
  MOD_RES (2)..(3): Xaa is C or S
PXXTPTKMSSLSMLFFNDKQQIILKVYPG

SEQ ID NO: 60958 - protein, 31 aa, Artificial Sequence
  Cyclic GFR-binding peptide
  MOD_RES (4)..(4): Xaa is C or S
GLEXVPTEESSLSMLFFRIKPHQGQHLKVYP

SEQ ID NO: 60959 - protein, 31 aa, Artificial Sequence
  Cyclic GFR-binding peptide
  MOD_RES (5)..(6): Xaa is C or S
APASXXVPARLSSLSILFFDAANNVVLKVYP

SEQ ID NO: 60960 - protein, 40 aa, Artificial Sequence
  Cyclic GFR-binding peptide
  MOD_RES (2)..(39): Xaa is C or S
KXQPSRVHHSSLSVLFFEYVRKKPKLLKVYPRLEEHLEXA

SEQ ID NO: 60961 - protein, 35 aa, Artificial Sequence
  Cyclic GFR-binding peptide
  MOD_RES (1)..(35): Xaa is C or S
XVPTEESSLSMLFFRIKPHQGQHLKVYPFLQHNKX

SEQ ID NO: 60962 - protein, 37 aa, Artificial Sequence
  Cyclic GFR-binding peptide
  MOD_RES (1)..(2)..(34)..(36): Xaa is C or S
XXVPEKMSSLSILFFDENKNVVLKVYPNMTVESXAXR

SEQ ID NO: 60963 - protein, 37 aa, Artificial Sequence
  Cyclic GFR-binding peptide
  MOD_RES (1)..(2)..(34)..(36): Xaa is C or S
XXAPTKLSSLSVLFFDDSSNVILKVYPNMVVRSXGXH

SEQ ID NO: 60964 - protein, 33 aa, Artificial Sequence
  Cyclic GFR-binding peptide
  MOD_RES (5)..(6): Xaa is C or S
VPSTXXAPVKTSSLSMLFFDNGRVLLLKVYPMI

SEQ ID NO: 60965 - protein, 34 aa, Artificial Sequence
  Cyclic GFR-binding peptide
  MOD_RES (2)..(2): Xaa is C or S
KXQPSRVHHSSLSVLFFEYVRKKPKLLKVYPRLE

SEQ ID NO: 60966 - protein, 41 aa, Artificial Sequence
  Cyclic GFR-binding peptide
  MOD_RES (6)..(7)..(39)..(41): Xaa is C or S
AVPKAXXAPTKLSSLSVLFFDSSNNVILKVYPNMVVKAXGX

SEQ ID NO: 60967 - protein, 31 aa, Artificial Sequence
  Cyclic GFR-binding peptide
  MOD_RES (29)..(31): Xaa is C or S
QALSSLSILFFVGRKPKVLKVYPMIVRSXKX

SEQ ID NO: 60968 - protein, 38 aa, Artificial Sequence
  Cyclic GFR-binding peptide
  MOD_RES (6)..(7): Xaa is C or S
AAPASXXVPARLSSLSILFFDAANNVVLKVYPDMVVEA

SEQ ID NO: 60969 - protein, 31 aa, Artificial Sequence
  Cyclic GFR-binding peptide
  MOD_RES (28)..(30): Xaa is C or S
MSSLSMLFFNDKQQIILKVYPGMVVDRXGXS

SEQ ID NO: 60970 - protein, 31 aa, Artificial Sequence
  Cyclic GFR-binding peptide
  MOD_RES (29)..(31): Xaa is C or S
QDLSSLSILFFIGKTPKILKVYPMIVKSXKX

SEQ ID NO: 60971 - protein, 31 aa, Artificial Sequence
  Cyclic GFR-binding peptide
  MOD_RES (5)..(6): Xaa is C or S
VGKAXXVPTKLSSLSVLFFDDMGVPTLKVYP

SEQ ID NO: 60972 - protein, 28 aa, Artificial Sequence
  Cyclic GFR-binding peptide
  MOD_RES (1)..(1): Xaa is C or S
XTPTKMSSLSMLFFNDKQQIILKVYPGM

SEQ ID NO: 60973 - protein, 32 aa, Artificial Sequence
  Cyclic GFR-binding peptide
  MOD_RES (6)..(7): Xaa is C or S
YVPKPXXAPTKLSSLSVLFFDDSSNVILKVYP

SEQ ID NO: 60974 - protein, 31 aa, Artificial Sequence
  Cyclic GFR-binding peptide
  MOD_RES (1)..(1): Xaa is C or S
XAPVKTSSLSMLFFDNGRVLLLKVYPMIVEE

SEQ ID NO: 60975 - protein, 34 aa, Artificial Sequence
  Cyclic GFR-binding peptide
  MOD_RES (1)..(2)..(34): Xaa is C or S
XXTPTKMSSLSMLFFNDKQQIILKVYPGMVVDRX

SEQ ID NO: 60976 - protein, 31 aa, Artificial Sequence
  Cyclic GFR-binding peptide
  MOD_RES (5)..(6): Xaa is C or S
VPSTXXAPVKTSSLSMLFFDNGRVLLLKVYP

SEQ ID NO: 60977 - protein, 32 aa, Artificial Sequence
  Cyclic GFR-binding peptide
  MOD_RES (5)..(6): Xaa is C or S
ASKAXXVPTKLSSLSILFFDKGVVTYLKVYPG

SEQ ID NO: 60978 - protein, 34 aa, Artificial Sequence
  Cyclic GFR-binding peptide
  MOD_RES (3)..(3): Xaa is C or S
PTXAPTKLSSLSVLFFDDSSNVILKVYPNMVVRS

SEQ ID NO: 60979 - protein, 22 aa, Artificial Sequence
  Cyclic GFR-binding peptide
LSSLSILFFDSANNVVLKVYPD

SEQ ID NO: 60980 - protein, 31 aa, Artificial Sequence
  Cyclic GFR-binding peptide
VPTKLSSLSILFFDKGVVTYLKVYPGMAVSE

SEQ ID NO: 60981 - protein, 30 aa, Artificial Sequence
  Cyclic GFR-binding peptide
PTKLSSLSILFFDKGVVTYLKVYPGMAVSE

SEQ ID NO: 60982 - protein, 23 aa, Artificial Sequence
  Cyclic GFR-binding peptide
HSSLSVLFFEYVRKKPKLLKVYP

SEQ ID NO: 60983 - protein, 34 aa, Artificial Sequence
  Cyclic GFR-binding peptide
  MOD_RES (1)..(33): Xaa is C or S
XAPTQLSSLSVLFFDDSSNVILKVYPNMVVRAXG

SEQ ID NO: 60984 - protein, 32 aa, Artificial Sequence
  Cyclic GFR-binding peptide
  MOD_RES (1)..(2): Xaa is C or S
XXAPTKLSSLSVLFFDDSSNVILKVYPNMVVR

SEQ ID NO: 60985 - protein, 35 aa, Artificial Sequence
  Cyclic GFR-binding peptide
  MOD_RES (34)..(34): Xaa is C or S
RVHHSSLSVLFFEYVRKKPKLLKVYPRLEEHLEXA

SEQ ID NO: 60986 - protein, 30 aa, Artificial Sequence
  Cyclic GFR-binding peptide
  MOD_RES (3)..(3): Xaa is C or S
LEXVPTEESSLSMLFFRIKPHQGQHLKVYP

SEQ ID NO: 60987 - protein, 24 aa, Artificial Sequence
  Cyclic GFR-binding peptide
SQDLSSLSILFFIGKTPKILKVYP

SEQ ID NO: 60988 - protein, 23 aa, Artificial Sequence
  Cyclic GFR-binding peptide
KLSSLSVLFFDDSSNVILKVYPN

SEQ ID NO: 60989 - protein, 41 aa, Artificial Sequence
  Cyclic GFR-binding peptide
  MOD_RES (5)..(6)..(38)..(40): Xaa is C or S
SAGPXXTPTKMSSLSMLFFNDKQQIILKVYPGMVVDRXGXS

SEQ ID NO: 60990 - protein, 34 aa, Artificial Sequence
  Cyclic GFR-binding peptide
  MOD_RES (1)..(32)..(34): Xaa is C or S
XAPVKTSSLSMLFFDNGRVLLLKVYPMIVEEXGX

SEQ ID NO: 60991 - protein, 30 aa, Artificial Sequence
  Cyclic GFR-binding peptide
EESSLSMLFFRIKPHQGQHLKVYPFLQHNK

SEQ ID NO: 60992 - protein, 23 aa, Artificial Sequence
  Cyclic GFR-binding peptide
TKLSSLSVLFFDSSNNVILKVYP

SEQ ID NO: 60993 - protein, 34 aa, Artificial Sequence
  Cyclic GFR-binding peptide
  MOD_RES (2)..(3)..(34): Xaa is C or S
PXXVSQDLSSLSILFFIGKTPKILKVYPMIVKSX

SEQ ID NO: 60994 - protein, 34 aa, Artificial Sequence
  Cyclic GFR-binding peptide
  MOD_RES (1)..(33): Xaa is C or S
XAPTKLSSLSVLFFDSSNNVILKVYPNMVVKAXG

SEQ ID NO: 60995 - protein, 32 aa, Artificial Sequence
  Cyclic GFR-binding peptide
  MOD_RES (29)..(31): Xaa is C or S
RLSSLSILFFDSANNVVLKVYPDMVVESXGXR

SEQ ID NO: 60996 - protein, 38 aa, Artificial Sequence
  Cyclic GFR-binding peptide
  MOD_RES (3)..(4)..(35)..(37): Xaa is C or S
SPXXVSQDLSSLSILFFIGKTPKILKVYPMIVKSXKXS

SEQ ID NO: 60997 - protein, 24 aa, Artificial Sequence
  Cyclic GFR-binding peptide
TKLSSLSVLFFDDSSNVILKVYPN

SEQ ID NO: 60998 - protein, 41 aa, Artificial Sequence
  Cyclic GFR-binding peptide
  MOD_RES (4)..(5)..(38)..(40): Xaa is C or S
GKAXXVPTKLSSLSVLFFDDMGVPTLKVYPEGMSVAEXGXR

SEQ ID NO: 60999 - protein, 36 aa, Artificial Sequence
  Cyclic GFR-binding peptide
  MOD_RES (4)..(5): Xaa is C or S
PKAXXAPTKLSSLSVLFFDSSNNVILKVYPNMVVKA

SEQ ID NO: 61000 - protein, 34 aa, Artificial Sequence
  Cyclic GFR-binding peptide
  MOD_RES (6)..(7): Xaa is C or S
GIPEPXXVPEKMSSLSILFFDENKNVVLKVYPNM

SEQ ID NO: 61001 - protein, 28 aa, Artificial Sequence
  Cyclic GFR-binding peptide
PQALSSLSILFFVGRKPKVLKVYPMIVR

SEQ ID NO: 61002 - protein, 27 aa, Artificial Sequence
  Cyclic GFR-binding peptide
  MOD_RES (1)..(1): Xaa is C or S
XTPTKMSSLSMLFFNDKQQIILKVYPG

SEQ ID NO: 61003 - protein, 28 aa, Artificial Sequence
  Cyclic GFR-binding peptide
  MOD_RES (1)..(2): Xaa is C or S
XXVSQDLSSLSILFFIGKTPKILKVYPM

SEQ ID NO: 61004 - protein, 21 aa, Artificial Sequence
  Cyclic GFR-binding peptide
MSSLSILFFDENKNVVLKVYP

SEQ ID NO: 61005 - protein, 33 aa, Artificial Sequence
  Cyclic GFR-binding peptide
  MOD_RES (5)..(6): Xaa is C or S
SAGPXXTPTKMSSLSMLFFNDKQQIILKVYPGM

SEQ ID NO: 61006 - protein, 36 aa, Artificial Sequence
  Cyclic GFR-binding peptide
  MOD_RES (4)..(5): Xaa is C or S
PKPXXAPTQLSSLSVLFFDDSSNVILKVYPNMVVRA

SEQ ID NO: 61007 - protein, 32 aa, Artificial Sequence
  Cyclic GFR-binding peptide
  MOD_RES (30)..(32): Xaa is C or S
TKLSSLSILFFDKGVVTYLKVYPGMAVSEXGX

SEQ ID NO: 61008 - protein, 26 aa, Artificial Sequence
  Cyclic GFR-binding peptide
QLSSLSVLFFDDSSNVILKVYPNMVV

SEQ ID NO: 61009 - protein, 34 aa, Artificial Sequence
  Cyclic GFR-binding peptide
  MOD_RES (31)..(33): Xaa is C or S
PTQLSSLSVLFFDDSSNVILKVYPNMVVRAXGXH

SEQ ID NO: 61010 - protein, 42 aa, Artificial Sequence
  Cyclic GFR-binding peptide
  MOD_RES (5)..(39)..(41): Xaa is C or S
EGLEXVPTEESSLSMLFFRIKPHQGQHLKVYPFLQHNKXEXR

SEQ ID NO: 61011 - protein, 30 aa, Artificial Sequence
  Cyclic GFR-binding peptide
QPSRVHHSSLSVLFFEYVRKKPKLLKVYPR

SEQ ID NO: 61012 - protein, 37 aa, Artificial Sequence
  Cyclic GFR-binding peptide
  MOD_RES (2)..(3)..(36): Xaa is C or S
AXXVPTKLSSLSVLFFDDMGVPTLKVYPEGMSVAEXG

SEQ ID NO: 61013 - protein, 38 aa, Artificial Sequence
  Cyclic GFR-binding peptide
  MOD_RES (5)..(6)..(38): Xaa is C or S
SAGPXXTPTKMSSLSMLFFNDKQQIILKVYPGMVVDRX

SEQ ID NO: 61014 - protein, 37 aa, Artificial Sequence
  Cyclic GFR-binding peptide
  MOD_RES (4)..(5)..(36): Xaa is C or S
AAPXXVPQALSSLSILFFVGRKPKVLKVYPMIVRSXK

SEQ ID NO: 61015 - protein, 38 aa, Artificial Sequence
  Cyclic GFR-binding peptide
  MOD_RES (5)..(6)..(38): Xaa is C or S
VPKPXXAPTKLSSLSVLFFDDSSNVILKVYPNMVVRSX

SEQ ID NO: 61016 - protein, 25 aa, Artificial Sequence
  Cyclic GFR-binding peptide
TQLSSLSVLFFDDSSNVILKVYPNM

SEQ ID NO: 61017 - protein, 28 aa, Artificial Sequence
  Cyclic GFR-binding peptide
QDLSSLSILFFVGRTPKVLKVYPMVVKS

SEQ ID NO: 61018 - protein, 38 aa, Artificial Sequence
  Cyclic GFR-binding peptide
  MOD_RES (1)..(2)..(35)..(37): Xaa is C or S
XXVPTKLSSLSVLFFDDMGVPTLKVYPEGMSVAEXGXR

SEQ ID NO: 61019 - protein, 29 aa, Artificial Sequence
  Cyclic GFR-binding peptide
QPSRVHHSSLSVLFFEYVRKKPKLLKVYP

SEQ ID NO: 61020 - protein, 31 aa, Artificial Sequence
  Cyclic GFR-binding peptide
  MOD_RES (2)..(3): Xaa is C or S
TXXVPTRLSSLSILFFDSANNVVLKVYPDMV

SEQ ID NO: 61021 - protein, 30 aa, Artificial Sequence
  Cyclic GFR-binding peptide
  MOD_RES (4)..(5): Xaa is C or S
PSTXXAPVKTSSLSMLFFDNGRVLLLKVYP

SEQ ID NO: 61022 - protein, 34 aa, Artificial Sequence
  Cyclic GFR-binding peptide
  MOD_RES (1)..(2)..(33): Xaa is C or S
XXVPQALSSLSILFFVGRKPKVLKVYPMIVRSXK

SEQ ID NO: 61023 - protein, 26 aa, Artificial Sequence
  Cyclic GFR-binding peptide
RVHHSSLSVLFFEYVRKKPKLLKVYP

SEQ ID NO: 61024 - protein, 32 aa, Artificial Sequence
  Cyclic GFR-binding peptide
  MOD_RES (1)..(2): Xaa is C or S
XXAPTQLSSLSVLFFDDSSNVILKVYPNMVVR

SEQ ID NO: 61025 - protein, 25 aa, Artificial Sequence
  Cyclic GFR-binding peptide
PVKTSSLSMLFFDNGRVLLLKVYPM

SEQ ID NO: 61026 - protein, 26 aa, Artificial Sequence
  Cyclic GFR-binding peptide
SSLSVLFFDDMGVPTLKVYPEGMSVA

SEQ ID NO: 61027 - protein, 38 aa, Artificial Sequence
  Cyclic GFR-binding peptide
  MOD_RES (6)..(6): Xaa is C or S
DEGLEXVPTEESSLSMLFFRIKPHQGQHLKVYPFLQHN

SEQ ID NO: 61028 - protein, 29 aa, Artificial Sequence
  Cyclic GFR-binding peptide
  MOD_RES (29)..(29): Xaa is C or S
LSSLSVLFFDDMGVPTLKVYPEGMSVAEX

SEQ ID NO: 61029 - protein, 23 aa, Artificial Sequence
  Cyclic GFR-binding peptide
LSSLSILFFDAANNVVLKVYPDM

SEQ ID NO: 61030 - protein, 27 aa, Artificial Sequence
  Cyclic GFR-binding peptide
  MOD_RES (1)..(1): Xaa is C or S
XAPVKTSSLSMLFFDNGRVLLLKVYPM

SEQ ID NO: 61031 - protein, 32 aa, Artificial Sequence
  Cyclic GFR-binding peptide
  MOD_RES (2)..(3): Xaa is C or S
TXXVPTRLSSLSILFFDSANNVVLKVYPDMVV

SEQ ID NO: 61032 - protein, 26 aa, Artificial Sequence
  Cyclic GFR-binding peptide
  MOD_RES (1)..(1): Xaa is C or S
XVPQDLSSLSILFFVGRTPKVLKVYP

SEQ ID NO: 61033 - protein, 29 aa, Artificial Sequence
  Cyclic GFR-binding peptide
TKLSSLSVLFFDDSSNVILKVYPNMVVRS

SEQ ID NO: 61034 - protein, 34 aa, Artificial Sequence
  Cyclic GFR-binding peptide
  MOD_RES (2)..(3): Xaa is C or S
PXXAPTKLSSLSVLFFDDSSNVILKVYPNMVVRS

SEQ ID NO: 61035 - protein, 38 aa, Artificial Sequence
  Cyclic GFR-binding peptide
  MOD_RES (3)..(4)..(36)..(38): Xaa is C or S
ASXXVPARLSSLSILFFDAANNVVLKVYPDMVVEAXGX

SEQ ID NO: 61036 - protein, 32 aa, Artificial Sequence
  Cyclic GFR-binding peptide
  MOD_RES (5)..(5): Xaa is C or S
EGLEXVPTEESSLSMLFFRIKPHQGQHLKVYP

SEQ ID NO: 61037 - protein, 26 aa, Artificial Sequence
  Cyclic GFR-binding peptide
KMSSLSMLFFNDKQQIILKVYPGMVV

SEQ ID NO: 61038 - protein, 30 aa, Artificial Sequence
  Cyclic GFR-binding peptide
  MOD_RES (30)..(30): Xaa is C or S
TRLSSLSILFFDSANNVVLKVYPDMVVESX

SEQ ID NO: 61039 - protein, 27 aa, Artificial Sequence
  Cyclic GFR-binding peptide
KLSSLSVLFFDDSSNVILKVYPNMVVR

SEQ ID NO: 61040 - protein, 41 aa, Artificial Sequence
  Cyclic GFR-binding peptide
  MOD_RES (5)..(6)..(39)..(41): Xaa is C or S
VGKAXXVPTKLSSLSVLFFDDMGVPTLKVYPEGMSVAEXGX

SEQ ID NO: 61041 - protein, 24 aa, Artificial Sequence
  Cyclic GFR-binding peptide
SSLSVLFFEYVRKKPKLLKVYPRL

SEQ ID NO: 61042 - protein, 23 aa, Artificial Sequence
  Cyclic GFR-binding peptide
KLSSLSVLFFDDMGVPTLKVYPE

SEQ ID NO: 61043 - protein, 24 aa, Artificial Sequence
  Cyclic GFR-binding peptide
PQALSSLSILFFVGRKPKVLKVYP

SEQ ID NO: 61044 - protein, 30 aa, Artificial Sequence
  Cyclic GFR-binding peptide
PTKMSSLSMLFFNDKQQIILKVYPGMVVDR

SEQ ID NO: 61045 - protein, 24 aa, Artificial Sequence
  Cyclic GFR-binding peptide
HSSLSVLFFEYVRKKPKLLKVYPR

SEQ ID NO: 61046 - protein, 28 aa, Artificial Sequence
  Cyclic GFR-binding peptide
  MOD_RES (1)..(2): Xaa is C or S
XXVPQALSSLSILFFVGRKPKVLKVYPM

SEQ ID NO: 61047 - protein, 31 aa, Artificial Sequence
  Cyclic GFR-binding peptide
  MOD_RES (29)..(31): Xaa is C or S
KMSSLSILFFDENKNVVLKVYPNMTVESXAX

SEQ ID NO: 61048 - protein, 31 aa, Artificial Sequence
  Cyclic GFR-binding peptide
  MOD_RES (2)..(3): Xaa is C or S
PXXAPTQLSSLSVLFFDDSSNVILKVYPNMV

SEQ ID NO: 61049 - protein, 32 aa, Artificial Sequence
  Cyclic GFR-binding peptide
  MOD_RES (31)..(31): Xaa is C or S
APVKTSSLSMLFFDNGRVLLLKVYPMIVEEXG

SEQ ID NO: 61050 - protein, 29 aa, Artificial Sequence
  Cyclic GFR-binding peptide
  MOD_RES (1)..(2): Xaa is C or S
XXAPTKLSSLSVLFFDSSNNVILKVYPNM

SEQ ID NO: 61051 - protein, 30 aa, Artificial Sequence
  Cyclic GFR-binding peptide
  MOD_RES (28)..(30): Xaa is C or S
LSSLSILFFDAANNVVLKVYPDMVVEAXGX

SEQ ID NO: 61052 - protein, 31 aa, Artificial Sequence
  Cyclic GFR-binding peptide
  MOD_RES (31)..(31): Xaa is C or S
TKLSSLSVLFFDDMGVPTLKVYPEGMSVAEX

SEQ ID NO: 61053 - protein, 23 aa, Artificial Sequence
  Cyclic GFR-binding peptide
SSLSILFFDENKNVVLKVYPNMT

SEQ ID NO: 61054 - protein, 30 aa, Artificial Sequence
  Cyclic GFR-binding peptide
  MOD_RES (1)..(1): Xaa is C or S
XVPEKMSSLSILFFDENKNVVLKVYPNMTV

SEQ ID NO: 61055 - protein, 32 aa, Artificial Sequence
  Cyclic GFR-binding peptide
  MOD_RES (30)..(32): Xaa is C or S
ARLSSLSILFFDAANNVVLKVYPDMVVEAXGX

SEQ ID NO: 61056 - protein, 38 aa, Artificial Sequence
  Cyclic GFR-binding peptide
  MOD_RES (5)..(6)..(38): Xaa is C or S
IPEPXXVPEKMSSLSILFFDENKNVVLKVYPNMTVESX

SEQ ID NO: 61057 - protein, 33 aa, Artificial Sequence
  Cyclic GFR-binding peptide
  MOD_RES (32)..(32): Xaa is C or S
PTKLSSLSVLFFDDMGVPTLKVYPEGMSVAEXG

SEQ ID NO: 61058 - protein, 26 aa, Artificial Sequence
  Cyclic GFR-binding peptide
SSLSVLFFEYVRKKPKLLKVYPRLEE

SEQ ID NO: 61059 - protein, 38 aa, Artificial Sequence
  Cyclic GFR-binding peptide
  MOD_RES (2)..(3)..(35)..(37): Xaa is C or S
SXXVPARLSSLSILFFDAANNVVLKVYPDMVVEAXGXR

SEQ ID NO: 61060 - protein, 33 aa, Artificial Sequence
  Cyclic GFR-binding peptide
  MOD_RES (6)..(7): Xaa is C or S
RVPSTXXAPVKTSSLSMLFFDNGRVLLLKVYPM

SEQ ID NO: 61061 - protein, 21 aa, Artificial Sequence
  Cyclic GFR-binding peptide
LSSLSILFFVGRKPKVLKVYP

SEQ ID NO: 61062 - protein, 21 aa, Artificial Sequence
  Cyclic GFR-binding peptide
LSSLSVLFFDSSNNVILKVYP

SEQ ID NO: 61063 - protein, 32 aa, Artificial Sequence
  Cyclic GFR-binding peptide
  MOD_RES (1)..(2): Xaa is C or S
XXVPTKLSSLSVLFFDDMGVPTLKVYPEGMSV

SEQ ID NO: 61064 - protein, 23 aa, Artificial Sequence
  Cyclic GFR-binding peptide
VKTSSLSMLFFDNGRVLLLKVYP

SEQ ID NO: 61065 - protein, 20 aa, Artificial Sequence
  Cyclic GFR-binding peptide
SSLSVLFFDDSSNVILKVYP

SEQ ID NO: 61066 - protein, 29 aa, Artificial Sequence
  Cyclic GFR-binding peptide
  MOD_RES (3)..(4): Xaa is C or S
KAXXAPTKLSSLSVLFFDSSNNVILKVYP

SEQ ID NO: 61067 - protein, 28 aa, Artificial Sequence
  Cyclic GFR-binding peptide
RVHHSSLSVLFFEYVRKKPKLLKVYPRL

SEQ ID NO: 61068 - protein, 30 aa, Artificial Sequence
  Cyclic GFR-binding peptide
  MOD_RES (4)..(5): Xaa is C or S
PPTXXVPTRLSSLSILFFDSANNVVLKVYP

SEQ ID NO: 61069 - protein, 36 aa, Artificial Sequence
  Cyclic GFR-binding peptide
  MOD_RES (1)..(2)..(33)..(35): Xaa is C or S
XXAPVKTSSLSMLFFDNGRVLLLKVYPMIVEEXGXL

SEQ ID NO: 61070 - protein, 22 aa, Artificial Sequence
  Cyclic GFR-binding peptide
KMSSLSILFFDENKNVVLKVYP

SEQ ID NO: 61071 - protein, 33 aa, Artificial Sequence
  Cyclic GFR-binding peptide
  MOD_RES (6)..(7): Xaa is C or S
KASKAXXVPTKLSSLSILFFDKGVVTYLKVYPG

SEQ ID NO: 61072 - protein, 34 aa, Artificial Sequence
  Cyclic GFR-binding peptide
  MOD_RES (31)..(33): Xaa is C or S
PARLSSLSILFFDAANNVVLKVYPDMVVEAXGXR

SEQ ID NO: 61073 - protein, 30 aa, Artificial Sequence
  Cyclic GFR-binding peptide
  MOD_RES (27)..(29): Xaa is C or S
TSSLSMLFFDNGRVLLLKVYPMIVEEXGXL

SEQ ID NO: 61074 - protein, 34 aa, Artificial Sequence
  Cyclic GFR-binding peptide
  MOD_RES (31)..(33): Xaa is C or S
PTKMSSLSMLFFNDKQQIILKVYPGMVVDRXGXS

SEQ ID NO: 61075 - protein, 44 aa, Artificial Sequence
  Cyclic GFR-binding peptide
  MOD_RES (4)..(41)..(43): Xaa is C or S
SVKXQPSRVHHSSLSVLFFEYVRKKPKLLKVYPRLEEHLEXAXA

SEQ ID NO: 61076 - protein, 29 aa, Artificial Sequence
  Cyclic GFR-binding peptide
SRVHHSSLSVLFFEYVRKKPKLLKVYPRL

SEQ ID NO: 61077 - protein, 26 aa, Artificial Sequence
  Cyclic GFR-binding peptide
SSLSMLFFNDKQQIILKVYPGMVVDR

SEQ ID NO: 61078 - protein, 30 aa, Artificial Sequence
  Cyclic GFR-binding peptide
  MOD_RES (28)..(30): Xaa is C or S
DLSSLSILFFVGRTPKVLKVYPMVVKSXKX

SEQ ID NO: 61079 - protein, 39 aa, Artificial Sequence
  Cyclic GFR-binding peptide
  MOD_RES (5)..(6)..(38): Xaa is C or S
VPKAXXAPTKLSSLSVLFFDSSNNVILKVYPNMVVKAXG

SEQ ID NO: 61080 - protein, 25 aa, Artificial Sequence
  Cyclic GFR-binding peptide
APTQLSSLSVLFFDDSSNVILKVYP

SEQ ID NO: 61081 - protein, 30 aa, Artificial Sequence
  Cyclic GFR-binding peptide
  MOD_RES (27)..(29): Xaa is C or S
LSSLSILFFIGKTPKILKVYPMIVKSXKXS

SEQ ID NO: 61082 - protein, 38 aa, Artificial Sequence
  Cyclic GFR-binding peptide
  MOD_RES (3)..(35)..(37): Xaa is C or S
PTXAPTKLSSLSVLFFDDSSNVILKVYPNMVVRSXGXH

SEQ ID NO: 61083 - protein, 29 aa, Artificial Sequence
  Cyclic GFR-binding peptide
  MOD_RES (3)..(4): Xaa is C or S
KAXXVPTKLSSLSILFFDKGVVTYLKVYP

SEQ ID NO: 61084 - protein, 31 aa, Artificial Sequence
  Cyclic GFR-binding peptide
  MOD_RES (30)..(30): Xaa is C or S
TKMSSLSMLFFNDKQQIILKVYPGMVVDRXG

SEQ ID NO: 61085 - protein, 34 aa, Artificial Sequence
  Cyclic GFR-binding peptide
  MOD_RES (3)..(4): Xaa is C or S
PTXXVPTRLSSLSILFFDSANNVVLKVYPDMVVE

SEQ ID NO: 61086 - protein, 30 aa, Artificial Sequence
  Cyclic GFR-binding peptide
SRVHHSSLSVLFFEYVRKKPKLLKVYPRLE

SEQ ID NO: 61087 - protein, 33 aa, Artificial Sequence
  Cyclic GFR-binding peptide
  MOD_RES (31)..(33): Xaa is C or S
TKLSSLSVLFFDDMGVPTLKVYPEGMSVAEXGX

SEQ ID NO: 61088 - protein, 28 aa, Artificial Sequence
  Cyclic GFR-binding peptide
  MOD_RES (28)..(28): Xaa is C or S
MSSLSILFFDENKNVVLKVYPNMTVESX

SEQ ID NO: 61089 - protein, 35 aa, Artificial Sequence
  Cyclic GFR-binding peptide
  MOD_RES (2)..(3)..(35): Xaa is C or S
PXXVPEKMSSLSILFFDENKNVVLKVYPNMTVESX

SEQ ID NO: 61090 - protein, 28 aa, Artificial Sequence
  Cyclic GFR-binding peptide
QALSSLSILFFVGRKPKVLKVYPMIVRS

SEQ ID NO: 61091 - protein, 41 aa, Artificial Sequence
  Cyclic GFR-binding peptide
  MOD_RES (4)..(38)..(40): Xaa is C or S
GLEXVPTEESSLSMLFFRIKPHQGQHLKVYPFLQHNKXEXR

SEQ ID NO: 61092 - protein, 29 aa, Artificial Sequence
  Cyclic GFR-binding peptide
  MOD_RES (4)..(4): Xaa is C or S
KPTXAPTKLSSLSVLFFDDSSNVILKVYP

SEQ ID NO: 61093 - protein, 30 aa, Artificial Sequence
  Cyclic GFR-binding peptide
PTKLSSLSVLFFDSSNNVILKVYPNMVVKA

SEQ ID NO: 61094 - protein, 31 aa, Artificial Sequence
  Cyclic GFR-binding peptide
APTQLSSLSVLFFDDSSNVILKVYPNMVVRA

SEQ ID NO: 61095 - protein, 23 aa, Artificial Sequence
  Cyclic GFR-binding peptide
KLSSLSVLFFDSSNNVILKVYPN

SEQ ID NO: 61096 - protein, 32 aa, Artificial Sequence
  Cyclic GFR-binding peptide
PSRVHHSSLSVLFFEYVRKKPKLLKVYPRLEE

SEQ ID NO: 61097 - protein, 29 aa, Artificial Sequence
  Cyclic GFR-binding peptide
  MOD_RES (29)..(29): Xaa is C or S
QDLSSLSILFFIGKTPKILKVYPMIVKSX

SEQ ID NO: 61098 - protein, 32 aa, Artificial Sequence
  Cyclic GFR-binding peptide
  MOD_RES (31)..(31): Xaa is C or S
PTRLSSLSILFFDSANNVVLKVYPDMVVESXG

SEQ ID NO: 61099 - protein, 38 aa, Artificial Sequence
  Cyclic GFR-binding peptide
  MOD_RES (3)..(3): Xaa is C or S
VKXQPSRVHHSSLSVLFFEYVRKKPKLLKVYPRLEEHL

SEQ ID NO: 61100 - protein, 38 aa, Artificial Sequence
  Cyclic GFR-binding peptide
  MOD_RES (4)..(5)..(37): Xaa is C or S
PPTXXVPTRLSSLSILFFDSANNVVLKVYPDMVVESXG

SEQ ID NO: 61101 - protein, 27 aa, Artificial Sequence
  Cyclic GFR-binding peptide
QDLSSLSILFFVGRTPKVLKVYPMVVK

SEQ ID NO: 61102 - protein, 34 aa, Artificial Sequence
  Cyclic GFR-binding peptide
  MOD_RES (2)..(3): Xaa is C or S
PXXVPEKMSSLSILFFDENKNVVLKVYPNMTVES

SEQ ID NO: 61103 - protein, 26 aa, Artificial Sequence
  Cyclic GFR-binding peptide
ARLSSLSILFFDAANNVVLKVYPDMV

SEQ ID NO: 61104 - protein, 34 aa, Artificial Sequence
  Cyclic GFR-binding peptide
  MOD_RES (2)..(3): Xaa is C or S
PXXTPTKMSSLSMLFFNDKQQIILKVYPGMVVDR

SEQ ID NO: 61105 - protein, 37 aa, Artificial Sequence
  Cyclic GFR-binding peptide
  MOD_RES (4)..(5)..(37): Xaa is C or S
PASXXVPARLSSLSILFFDAANNVVLKVYPDMVVEAX

SEQ ID NO: 61106 - protein, 31 aa, Artificial Sequence
  Cyclic GFR-binding peptide
  MOD_RES (4)..(5): Xaa is C or S
PKPXXAPTQLSSLSVLFFDDSSNVILKVYPN

SEQ ID NO: 61107 - protein, 27 aa, Artificial Sequence
  Cyclic GFR-binding peptide
  MOD_RES (1)..(1): Xaa is C or S
XVPTKLSSLSVLFFDDMGVPTLKVYPE

SEQ ID NO: 61108 - protein, 33 aa, Artificial Sequence
  Cyclic GFR-binding peptide
  MOD_RES (4)..(5): Xaa is C or S
AAPXXVPQALSSLSILFFVGRKPKVLKVYPMIV

SEQ ID NO: 61109 - protein, 32 aa, Artificial Sequence
  Cyclic GFR-binding peptide
  MOD_RES (29)..(31): Xaa is C or S
VKTSSLSMLFFDNGRVLLLKVYPMIVEEXGXL

SEQ ID NO: 61110 - protein, 31 aa, Artificial Sequence
  Cyclic GFR-binding peptide
  MOD_RES (29)..(31): Xaa is C or S
KLSSLSILFFDKGVVTYLKVYPGMAVSEXGX

SEQ ID NO: 61111 - protein, 32 aa, Artificial Sequence
  Cyclic GFR-binding peptide
  MOD_RES (29)..(31): Xaa is C or S
LSSLSVLFFDDMGVPTLKVYPEGMSVAEXGXR

SEQ ID NO: 61112 - protein, 29 aa, Artificial Sequence
  Cyclic GFR-binding peptide
  MOD_RES (28)..(28): Xaa is C or S
MSSLSMLFFNDKQQIILKVYPGMVVDRXG

SEQ ID NO: 61113 - protein, 29 aa, Artificial Sequence
  Cyclic GFR-binding peptide
  MOD_RES (28)..(28): Xaa is C or S
LSSLSILFFDSANNVVLKVYPDMVVESXG

SEQ ID NO: 61114 - protein, 39 aa, Artificial Sequence
  Cyclic GFR-binding peptide
  MOD_RES (6)..(7)..(39): Xaa is C or S
GIPEPXXVPEKMSSLSILFFDENKNVVLKVYPNMTVESX

SEQ ID NO: 61115 - protein, 32 aa, Artificial Sequence
  Cyclic GFR-binding peptide
  MOD_RES (6)..(6): Xaa is C or S
VTKPTXAPTKLSSLSVLFFDDSSNVILKVYPN

SEQ ID NO: 61116 - protein, 32 aa, Artificial Sequence
  Cyclic GFR-binding peptide
RVHHSSLSVLFFEYVRKKPKLLKVYPRLEEHL

SEQ ID NO: 61117 - protein, 32 aa, Artificial Sequence
  Cyclic GFR-binding peptide
  MOD_RES (2)..(2): Xaa is C or S
EXVPTEESSLSMLFFRIKPHQGQHLKVYPFLQ

SEQ ID NO: 61118 - protein, 34 aa, Artificial Sequence
  Cyclic GFR-binding peptide
  MOD_RES (3)..(4): Xaa is C or S
STXXAPVKTSSLSMLFFDNGRVLLLKVYPMIVEE

SEQ ID NO: 61119 - protein, 39 aa, Artificial Sequence
  Cyclic GFR-binding peptide
  MOD_RES (4)..(5)..(37)..(39): Xaa is C or S
AGPXXTPTKMSSLSMLFFNDKQQIILKVYPGMVVDRXGX

SEQ ID NO: 61120 - protein, 31 aa, Artificial Sequence
  Cyclic GFR-binding peptide
  MOD_RES (2)..(3): Xaa is C or S
PXXAPTKLSSLSVLFFDDSSNVILKVYPNMV

SEQ ID NO: 61121 - protein, 34 aa, Artificial Sequence
  Cyclic GFR-binding peptide
  MOD_RES (2)..(2): Xaa is C or S
EXVPTEESSLSMLFFRIKPHQGQHLKVYPFLQHN

SEQ ID NO: 61122 - protein, 24 aa, Artificial Sequence
  Cyclic GFR-binding peptide
SSLSMLFFDNGRVLLLKVYPMIVE

SEQ ID NO: 61123 - protein, 45 aa, Artificial Sequence
  Cyclic GFR-binding peptide
  MOD_RES (5)..(42)..(44): Xaa is C or S
SSVKXQPSRVHHSSLSVLFFEYVRKKPKLLKVYPRLEEHLEXAXA

SEQ ID NO: 61124 - protein, 35 aa, Artificial Sequence
  Cyclic GFR-binding peptide
  MOD_RES (2)..(3)..(34): Xaa is C or S
PXXVPQDLSSLSILFFVGRTPKVLKVYPMVVKSXK

SEQ ID NO: 61125 - protein, 31 aa, Artificial Sequence
  Cyclic GFR-binding peptide
  MOD_RES (30)..(30): Xaa is C or S
TKLSSLSVLFFDSSNNVILKVYPNMVVKAXG

SEQ ID NO: 61126 - protein, 25 aa, Artificial Sequence
  Cyclic GFR-binding peptide
QALSSLSILFFVGRKPKVLKVYPMI

SEQ ID NO: 61127 - protein, 27 aa, Artificial Sequence
  Cyclic GFR-binding peptide
DLSSLSILFFVGRTPKVLKVYPMVVKS

SEQ ID NO: 61128 - protein, 24 aa, Artificial Sequence
  Cyclic GFR-binding peptide
VKTSSLSMLFFDNGRVLLLKVYPM

SEQ ID NO: 61129 - protein, 37 aa, Artificial Sequence
  Cyclic GFR-binding peptide
  MOD_RES (6)..(7): Xaa is C or S
RVPSTXXAPVKTSSLSMLFFDNGRVLLLKVYPMIVEE

SEQ ID NO: 61130 - protein, 36 aa, Artificial Sequence
  Cyclic GFR-binding peptide
  MOD_RES (6)..(7): Xaa is C or S
ASASPXXVSQDLSSLSILFFIGKTPKILKVYPMIVK

SEQ ID NO: 61131 - protein, 27 aa, Artificial Sequence
  Cyclic GFR-binding peptide
  MOD_RES (1)..(1): Xaa is C or S
XAPTKLSSLSVLFFDDSSNVILKVYPN

SEQ ID NO: 61132 - protein, 32 aa, Artificial Sequence
  Cyclic GFR-binding peptide
  MOD_RES (4)..(5): Xaa is C or S
PPTXXVPTRLSSLSILFFDSANNVVLKVYPDM

SEQ ID NO: 61133 - protein, 31 aa, Artificial Sequence
  Cyclic GFR-binding peptide
  MOD_RES (1)..(1): Xaa is C or S
XVPTKLSSLSVLFFDDMGVPTLKVYPEGMSV

SEQ ID NO: 61134 - protein, 24 aa, Artificial Sequence
  Cyclic GFR-binding peptide
TKLSSLSVLFFDSSNNVILKVYPN

SEQ ID NO: 61135 - protein, 32 aa, Artificial Sequence
  Cyclic GFR-binding peptide
  MOD_RES (1)..(2): Xaa is C or S
XXAPTKLSSLSVLFFDSSNNVILKVYPNMVVK

SEQ ID NO: 61136 - protein, 30 aa, Artificial Sequence
  Cyclic GFR-binding peptide
  MOD_RES (30)..(30): Xaa is C or S
ESSLSMLFFRIKPHQGQHLKVYPFLQHNKX

SEQ ID NO: 61137 - protein, 31 aa, Artificial Sequence
  Cyclic GFR-binding peptide
HHSSLSVLFFEYVRKKPKLLKVYPRLEEHLE

SEQ ID NO: 61138 - protein, 37 aa, Artificial Sequence
  Cyclic GFR-binding peptide
  MOD_RES (4)..(5): Xaa is C or S
GKAXXVPTKLSSLSVLFFDDMGVPTLKVYPEGMSVAE

SEQ ID NO: 61139 - protein, 39 aa, Artificial Sequence
  Cyclic GFR-binding peptide
  MOD_RES (5)..(6)..(38): Xaa is C or S
IPEPXXVPEKMSSLSILFFDENKNVVLKVYPNMTVESXA

SEQ ID NO: 61140 - protein, 38 aa, Artificial Sequence
  Cyclic GFR-binding peptide
  MOD_RES (37)..(37): Xaa is C or S
QPSRVHHSSLSVLFFEYVRKKPKLLKVYPRLEEHLEXA

SEQ ID NO: 61141 - protein, 32 aa, Artificial Sequence
  Cyclic GFR-binding peptide
  MOD_RES (32)..(32): Xaa is C or S
APTQLSSLSVLFFDDSSNVILKVYPNMVVRAX

SEQ ID NO: 61142 - protein, 37 aa, Artificial Sequence
  Cyclic GFR-binding peptide
  MOD_RES (6)..(7): Xaa is C or S
YVPKPXXAPTKLSSLSVLFFDDSSNVILKVYPNMVVR

SEQ ID NO: 61143 - protein, 29 aa, Artificial Sequence
  Cyclic GFR-binding peptide
  MOD_RES (2)..(3): Xaa is C or S
TXXAPVKTSSLSMLFFDNGRVLLLKVYPM

SEQ ID NO: 61144 - protein, 23 aa, Artificial Sequence
  Cyclic GFR-binding peptide
LSSLSILFFDKGVVTYLKVYPGM

SEQ ID NO: 61145 - protein, 34 aa, Artificial Sequence
  Cyclic GFR-binding peptide
  MOD_RES (4)..(5): Xaa is C or S
GKAXXVPTKLSSLSVLFFDDMGVPTLKVYPEGMS

SEQ ID NO: 61146 - protein, 33 aa, Artificial Sequence
  Cyclic GFR-binding peptide
  MOD_RES (6)..(7): Xaa is C or S
STPPTXXVPTRLSSLSILFFDSANNVVLKVYPD

SEQ ID NO: 61147 - protein, 26 aa, Artificial Sequence
  Cyclic GFR-binding peptide
RLSSLSILFFDSANNVVLKVYPDMVV

SEQ ID NO: 61148 - protein, 24 aa, Artificial Sequence
  Cyclic GFR-binding peptide
PQDLSSLSILFFVGRTPKVLKVYP

SEQ ID NO: 61149 - protein, 31 aa, Artificial Sequence
  Cyclic GFR-binding peptide
  MOD_RES (4)..(5): Xaa is C or S
GKAXXVPTKLSSLSVLFFDDMGVPTLKVYPE

SEQ ID NO: 61150 - protein, 39 aa, Artificial Sequence
  Cyclic GFR-binding peptide
  MOD_RES (3)..(4)..(36)..(38): Xaa is C or S
GPXXTPTKMSSLSMLFFNDKQQIILKVYPGMVVDRXGXS

SEQ ID NO: 61151 - protein, 26 aa, Artificial Sequence
  Cyclic GFR-binding peptide
SSLSILFFDAANNVVLKVYPDMVVEA

SEQ ID NO: 61152 - protein, 36 aa, Artificial Sequence
  Cyclic GFR-binding peptide
  MOD_RES (35)..(35): Xaa is C or S
SRVHHSSLSVLFFEYVRKKPKLLKVYPRLEEHLEXA

SEQ ID NO: 61153 - protein, 27 aa, Artificial Sequence
  Cyclic GFR-binding peptide
  MOD_RES (1)..(2): Xaa is C or S
XXVPQALSSLSILFFVGRKPKVLKVYP

SEQ ID NO: 61154 - protein, 29 aa, Artificial Sequence
  Cyclic GFR-binding peptide
  MOD_RES (1)..(1): Xaa is C or S
XVSQDLSSLSILFFIGKTPKILKVYPMIV

SEQ ID NO: 61155 - protein, 31 aa, Artificial Sequence
  Cyclic GFR-binding peptide
  MOD_RES (2)..(3): Xaa is C or S
PXXVPEKMSSLSILFFDENKNVVLKVYPNMT

SEQ ID NO: 61156 - protein, 24 aa, Artificial Sequence
  Cyclic GFR-binding peptide
PARLSSLSILFFDAANNVVLKVYP

SEQ ID NO: 61157 - protein, 26 aa, Artificial Sequence
  Cyclic GFR-binding peptide
PTRLSSLSILFFDSANNVVLKVYPDM

SEQ ID NO: 61158 - protein, 37 aa, Artificial Sequence
  Cyclic GFR-binding peptide
  MOD_RES (7)..(7): Xaa is C or S
NDEGLEXVPTEESSLSMLFFRIKPHQGQHLKVYPFLQ

SEQ ID NO: 61159 - protein, 23 aa, Artificial Sequence
  Cyclic GFR-binding peptide
QALSSLSILFFVGRKPKVLKVYP

SEQ ID NO: 61160 - protein, 30 aa, Artificial Sequence
  Cyclic GFR-binding peptide
  MOD_RES (27)..(29): Xaa is C or S
SSLSMLFFNDKQQIILKVYPGMVVDRXGXS

SEQ ID NO: 61161 - protein, 29 aa, Artificial Sequence
  Cyclic GFR-binding peptide
  MOD_RES (1)..(2): Xaa is C or S
XXVPQALSSLSILFFVGRKPKVLKVYPMI

SEQ ID NO: 61162 - protein, 32 aa, Artificial Sequence
  Cyclic GFR-binding peptide
  MOD_RES (5)..(6): Xaa is C or S
VPKPXXAPTKLSSLSVLFFDDSSNVILKVYPN

SEQ ID NO: 61163 - protein, 23 aa, Artificial Sequence
  Cyclic GFR-binding peptide
ALSSLSILFFVGRKPKVLKVYPM

SEQ ID NO: 61164 - protein, 36 aa, Artificial Sequence
  Cyclic GFR-binding peptide
  MOD_RES (1)..(2)..(34)..(36): Xaa is C or S
XXAPTQLSSLSVLFFDDSSNVILKVYPNMVVRAXGX

SEQ ID NO: 61165 - protein, 29 aa, Artificial Sequence
  Cyclic GFR-binding peptide
  MOD_RES (2)..(3): Xaa is C or S
AXXAPTKLSSLSVLFFDSSNNVILKVYPN

SEQ ID NO: 61166 - protein, 29 aa, Artificial Sequence
  Cyclic GFR-binding peptide
  MOD_RES (1)..(1): Xaa is C or S
XVPTKLSSLSVLFFDDMGVPTLKVYPEGM

SEQ ID NO: 61167 - protein, 28 aa, Artificial Sequence
  Cyclic GFR-binding peptide
  MOD_RES (1)..(1): Xaa is C or S
XAPTKLSSLSVLFFDSSNNVILKVYPNM

SEQ ID NO: 61168 - protein, 34 aa, Artificial Sequence
  Cyclic GFR-binding peptide
  MOD_RES (4)..(5): Xaa is C or S
PSTXXAPVKTSSLSMLFFDNGRVLLLKVYPMIVE

SEQ ID NO: 61169 - protein, 28 aa, Artificial Sequence
  Cyclic GFR-binding peptide
  MOD_RES (2)..(2): Xaa is C or S
TXAPTKLSSLSVLFFDDSSNVILKVYPN

SEQ ID NO: 61170 - protein, 29 aa, Artificial Sequence
  Cyclic GFR-binding peptide
  MOD_RES (1)..(2): Xaa is C or S
XXVPTKLSSLSVLFFDDMGVPTLKVYPEG

SEQ ID NO: 61171 - protein, 38 aa, Artificial Sequence
  Cyclic GFR-binding peptide
  MOD_RES (6)..(7): Xaa is C or S
KASKAXXVPTKLSSLSILFFDKGVVTYLKVYPGMAVSE

SEQ ID NO: 61172 - protein, 25 aa, Artificial Sequence
  Cyclic GFR-binding peptide
SSLSVLFFDSSNNVILKVYPNMVVK

SEQ ID NO: 61173 - protein, 31 aa, Artificial Sequence
  Cyclic GFR-binding peptide
  MOD_RES (2)..(2): Xaa is C or S
TXAPTKLSSLSVLFFDDSSNVILKVYPNMVV

SEQ ID NO: 61174 - protein, 40 aa, Artificial Sequence
  Cyclic GFR-binding peptide
  MOD_RES (4)..(5)..(37)..(39): Xaa is C or S
PKPXXAPTQLSSLSVLFFDDSSNVILKVYPNMVVRAXGXH

SEQ ID NO: 61175 - protein, 24 aa, Artificial Sequence
  Cyclic GFR-binding peptide
LSSLSVLFFDSSNNVILKVYPNMV

SEQ ID NO: 61176 - protein, 21 aa, Artificial Sequence
  Cyclic GFR-binding peptide
TSSLSMLFFDNGRVLLLKVYP

SEQ ID NO: 61177 - protein, 35 aa, Artificial Sequence
  Cyclic GFR-binding peptide
  MOD_RES (1)..(2)..(34): Xaa is C or S
XXAPTKLSSLSVLFFDSSNNVILKVYPNMVVKAXG

SEQ ID NO: 61178 - protein, 33 aa, Artificial Sequence
  Cyclic GFR-binding peptide
  MOD_RES (5)..(6): Xaa is C or S
IPEPXXVPEKMSSLSILFFDENKNVVLKVYPNM

SEQ ID NO: 61179 - protein, 27 aa, Artificial Sequence
  Cyclic GFR-binding peptide
LSSLSVLFFDSSNNVILKVYPNMVVKA

SEQ ID NO: 61180 - protein, 35 aa, Artificial Sequence
  Cyclic GFR-binding peptide
  MOD_RES (2)..(3)..(35): Xaa is C or S
TXXVPTRLSSLSILFFDSANNVVLKVYPDMVVESX

SEQ ID NO: 61181 - protein, 29 aa, Artificial Sequence
  Cyclic GFR-binding peptide
  MOD_RES (1)..(1): Xaa is C or S
XAPTQLSSLSVLFFDDSSNVILKVYPNMV

SEQ ID NO: 61182 - protein, 26 aa, Artificial Sequence
  Cyclic GFR-binding peptide
TKLSSLSVLFFDDSSNVILKVYPNMV

SEQ ID NO: 61183 - protein, 30 aa, Artificial Sequence
  Cyclic GFR-binding peptide
  MOD_RES (2)..(3): Xaa is C or S
SXXVPARLSSLSILFFDAANNVVLKVYPDM

SEQ ID NO: 61184 - protein, 34 aa, Artificial Sequence
  Cyclic GFR-binding peptide
  MOD_RES (6)..(7): Xaa is C or S
GSAGPXXTPTKMSSLSMLFFNDKQQIILKVYPGM

SEQ ID NO: 61185 - protein, 32 aa, Artificial Sequence
  Cyclic GFR-binding peptide
  MOD_RES (1)..(1): Xaa is C or S
XVPTEESSLSMLFFRIKPHQGQHLKVYPFLQH

SEQ ID NO: 61186 - protein, 33 aa, Artificial Sequence
  Cyclic GFR-binding peptide
  MOD_RES (4)..(4): Xaa is C or S
KPTXAPTKLSSLSVLFFDDSSNVILKVYPNMVV

SEQ ID NO: 61187 - protein, 28 aa, Artificial Sequence
  Cyclic GFR-binding peptide
  MOD_RES (1)..(1): Xaa is C or S
XVPQALSSLSILFFVGRKPKVLKVYPMI

SEQ ID NO: 61188 - protein, 36 aa, Artificial Sequence
  Cyclic GFR-binding peptide
  MOD_RES (1)..(2)..(34)..(36): Xaa is C or S
XXAPTKLSSLSVLFFDSSNNVILKVYPNMVVKAXGX

SEQ ID NO: 61189 - protein, 30 aa, Artificial Sequence
  Cyclic GFR-binding peptide
  MOD_RES (30)..(30): Xaa is C or S
EKMSSLSILFFDENKNVVLKVYPNMTVESX

SEQ ID NO: 61190 - protein, 41 aa, Artificial Sequence
  Cyclic GFR-binding peptide
  MOD_RES (6)..(7)..(38)..(40): Xaa is C or S
ASASPXXVSQDLSSLSILFFIGKTPKILKVYPMIVKSXKXS

SEQ ID NO: 61191 - protein, 30 aa, Artificial Sequence
  Cyclic GFR-binding peptide
  MOD_RES (30)..(30): Xaa is C or S
TKMSSLSMLFFNDKQQIILKVYPGMVVDRX

SEQ ID NO: 61192 - protein, 40 aa, Artificial Sequence
  Cyclic GFR-binding peptide
  MOD_RES (6)..(7)..(38)..(40): Xaa is C or S
ASAAPXXVPQALSSLSILFFVGRKPKVLKVYPMIVRSXKX

SEQ ID NO: 61193 - protein, 31 aa, Artificial Sequence
  Cyclic GFR-binding peptide
  MOD_RES (29)..(31): Xaa is C or S
VKTSSLSMLFFDNGRVLLLKVYPMIVEEXGX

SEQ ID NO: 61194 - protein, 24 aa, Artificial Sequence
  Cyclic GFR-binding peptide
ESSLSMLFFRIKPHQGQHLKVYPF

SEQ ID NO: 61195 - protein, 23 aa, Artificial Sequence
  Cyclic GFR-binding peptide
SSLSVLFFEYVRKKPKLLKVYPR

SEQ ID NO: 61196 - protein, 33 aa, Artificial Sequence
  Cyclic GFR-binding peptide
  MOD_RES (30)..(32): Xaa is C or S
EKMSSLSILFFDENKNVVLKVYPNMTVESXAXR

SEQ ID NO: 61197 - protein, 36 aa, Artificial Sequence
  Cyclic GFR-binding peptide
  MOD_RES (1)..(2)..(33)..(35): Xaa is C or S
XXVSQDLSSLSILFFIGKTPKILKVYPMIVKSXKXS

SEQ ID NO: 61198 - protein, 36 aa, Artificial Sequence
  Cyclic GFR-binding peptide
  MOD_RES (5)..(6): Xaa is C or S
VPKPXXAPTKLSSLSVLFFDDSSNVILKVYPNMVVR

SEQ ID NO: 61199 - protein, 33 aa, Artificial Sequence
  Cyclic GFR-binding peptide
  MOD_RES (32)..(32): Xaa is C or S
APTQLSSLSVLFFDDSSNVILKVYPNMVVRAXG

SEQ ID NO: 61200 - protein, 29 aa, Artificial Sequence
  Cyclic GFR-binding peptide
  MOD_RES (2)..(3): Xaa is C or S
AXXVPTKLSSLSVLFFDDMGVPTLKVYPE

SEQ ID NO: 61201 - protein, 26 aa, Artificial Sequence
  Cyclic GFR-binding peptide
TSSLSMLFFDNGRVLLLKVYPMIVEE

SEQ ID NO: 61202 - protein, 38 aa, Artificial Sequence
  Cyclic GFR-binding peptide
  MOD_RES (3)..(4)..(35)..(37): Xaa is C or S
STXXAPVKTSSLSMLFFDNGRVLLLKVYPMIVEEXGXL

SEQ ID NO: 61203 - protein, 30 aa, Artificial Sequence
  Cyclic GFR-binding peptide
  MOD_RES (29)..(29): Xaa is C or S
RLSSLSILFFDSANNVVLKVYPDMVVESXG

SEQ ID NO: 61204 - protein, 28 aa, Artificial Sequence
  Cyclic GFR-binding peptide
  MOD_RES (28)..(28): Xaa is C or S
SSLSVLFFDDMGVPTLKVYPEGMSVAEX

SEQ ID NO: 61205 - protein, 33 aa, Artificial Sequence
  Cyclic GFR-binding peptide
  MOD_RES (5)..(6): Xaa is C or S
APASXXVPARLSSLSILFFDAANNVVLKVYPDM

SEQ ID NO: 61206 - protein, 20 aa, Artificial Sequence
  Cyclic GFR-binding peptide
SSLSILFFDKGVVTYLKVYP

SEQ ID NO: 61207 - protein, 33 aa, Artificial Sequence
  Cyclic GFR-binding peptide
  MOD_RES (30)..(32): Xaa is C or S
TKLSSLSVLFFDSSNNVILKVYPNMVVKAXGXH

SEQ ID NO: 61208 - protein, 22 aa, Artificial Sequence
  Cyclic GFR-binding peptide
SSLSMLFFNDKQQIILKVYPGM

SEQ ID NO: 61209 - protein, 33 aa, Artificial Sequence
  Cyclic GFR-binding peptide
  MOD_RES (32)..(32): Xaa is C or S
VPARLSSLSILFFDAANNVVLKVYPDMVVEAXG

SEQ ID NO: 61210 - protein, 26 aa, Artificial Sequence
  Cyclic GFR-binding peptide
SSLSILFFDSANNVVLKVYPDMVVES

SEQ ID NO: 61211 - protein, 35 aa, Artificial Sequence
  Cyclic GFR-binding peptide
  MOD_RES (6)..(7): Xaa is C or S
AAPASXXVPARLSSLSILFFDAANNVVLKVYPDMV

SEQ ID NO: 61212 - protein, 30 aa, Artificial Sequence
  Cyclic GFR-binding peptide
PTKLSSLSVLFFDDSSNVILKVYPNMVVRS

SEQ ID NO: 61213 - protein, 24 aa, Artificial Sequence
  Cyclic GFR-binding peptide
TKLSSLSVLFFDDMGVPTLKVYPE

SEQ ID NO: 61214 - protein, 22 aa, Artificial Sequence
  Cyclic GFR-binding peptide
LSSLSILFFVGRTPKVLKVYPM

SEQ ID NO: 61215 - protein, 32 aa, Artificial Sequence
  Cyclic GFR-binding peptide
  MOD_RES (3)..(4): Xaa is C or S
KAXXVPTKLSSLSVLFFDDMGVPTLKVYPEGM

SEQ ID NO: 61216 - protein, 34 aa, Artificial Sequence
  Cyclic GFR-binding peptide
  MOD_RES (5)..(6): Xaa is C or S
TPPTXXVPTRLSSLSILFFDSANNVVLKVYPDMV

SEQ ID NO: 61217 - protein, 20 aa, Artificial Sequence
  Cyclic GFR-binding peptide
SSLSMLFFDNGRVLLLKVYP

SEQ ID NO: 61218 - protein, 31 aa, Artificial Sequence
  Cyclic GFR-binding peptide
  MOD_RES (4)..(5): Xaa is C or S
PKAXXAPTKLSSLSVLFFDSSNNVILKVYPN

SEQ ID NO: 61219 - protein, 33 aa, Artificial Sequence
  Cyclic GFR-binding peptide
  MOD_RES (2)..(3): Xaa is C or S
AXXVPTKLSSLSILFFDKGVVTYLKVYPGMAVS

SEQ ID NO: 61220 - protein, 27 aa, Artificial Sequence
  Cyclic GFR-binding peptide
MSSLSMLFFNDKQQIILKVYPGMVVDR

SEQ ID NO: 61221 - protein, 30 aa, Artificial Sequence
  Cyclic GFR-binding peptide
  MOD_RES (1)..(2): Xaa is C or S
XXAPVKTSSLSMLFFDNGRVLLLKVYPMIV

SEQ ID NO: 61222 - protein, 29 aa, Artificial Sequence
  Cyclic GFR-binding peptide
  MOD_RES (28)..(28): Xaa is C or S
LSSLSVLFFDSSNNVILKVYPNMVVKAXG

SEQ ID NO: 61223 - protein, 37 aa, Artificial Sequence
  Cyclic GFR-binding peptide
  MOD_RES (5)..(6): Xaa is C or S
VGKAXXVPTKLSSLSVLFFDDMGVPTLKVYPEGMSVA

SEQ ID NO: 61224 - protein, 37 aa, Artificial Sequence
  Cyclic GFR-binding peptide
  MOD_RES (1)..(2)..(34)..(36): Xaa is C or S
XXVPARLSSLSILFFDAANNVVLKVYPDMVVEAXGXR

SEQ ID NO: 61225 - protein, 41 aa, Artificial Sequence
  Cyclic GFR-binding peptide
  MOD_RES (6)..(7)..(39)..(41): Xaa is C or S
HVPKPXXAPTKLSSLSVLFFDDSSNVILKVYPNMVVRSXGX

SEQ ID NO: 61226 - protein, 33 aa, Artificial Sequence
  Cyclic GFR-binding peptide
  MOD_RES (3)..(4): Xaa is C or S
SPXXVSQDLSSLSILFFIGKTPKILKVYPMIVK

SEQ ID NO: 61227 - protein, 36 aa, Artificial Sequence
  Cyclic GFR-binding peptide
  MOD_RES (6)..(7): Xaa is C or S
AVPKAXXAPTKLSSLSVLFFDSSNNVILKVYPNMVV

SEQ ID NO: 61228 - protein, 30 aa, Artificial Sequence
  Cyclic GFR-binding peptide
  MOD_RES (3)..(4): Xaa is C or S
KAXXVPTKLSSLSILFFDKGVVTYLKVYPG

SEQ ID NO: 61229 - protein, 35 aa, Artificial Sequence
  Cyclic GFR-binding peptide
  MOD_RES (1)..(2)..(34): Xaa is C or S
XXVPEKMSSLSILFFDENKNVVLKVYPNMTVESXA

SEQ ID NO: 61230 - protein, 33 aa, Artificial Sequence
  Cyclic GFR-binding peptide
  MOD_RES (4)..(5): Xaa is C or S
SKAXXVPTKLSSLSILFFDKGVVTYLKVYPGMA

SEQ ID NO: 61231 - protein, 36 aa, Artificial Sequence
  Cyclic GFR-binding peptide
  MOD_RES (6)..(7): Xaa is C or S
STPPTXXVPTRLSSLSILFFDSANNVVLKVYPDMVV

SEQ ID NO: 61232 - protein, 27 aa, Artificial Sequence
  Cyclic GFR-binding peptide
DLSSLSILFFIGKTPKILKVYPMIVKS

SEQ ID NO: 61233 - protein, 39 aa, Artificial Sequence
  Cyclic GFR-binding peptide
  MOD_RES (5)..(37)..(39): Xaa is C or S
TKPTXAPTKLSSLSVLFFDDSSNVILKVYPNMVVRSXGX

SEQ ID NO: 61234 - protein, 33 aa, Artificial Sequence
  Cyclic GFR-binding peptide
  MOD_RES (4)..(5): Xaa is C or S
ASPXXVPQDLSSLSILFFVGRTPKVLKVYPMVV

SEQ ID NO: 61235 - protein, 29 aa, Artificial Sequence
  Cyclic GFR-binding peptide
  MOD_RES (26)..(28): Xaa is C or S
SSLSILFFVGRKPKVLKVYPMIVRSXKXS

SEQ ID NO: 61236 - protein, 41 aa, Artificial Sequence
  Cyclic GFR-binding peptide
  MOD_RES (6)..(7)..(39)..(41): Xaa is C or S
GSAGPXXTPTKMSSLSMLFFNDKQQIILKVYPGMVVDRXGX

SEQ ID NO: 61237 - protein, 24 aa, Artificial Sequence
  Cyclic GFR-binding peptide
KTSSLSMLFFDNGRVLLLKVYPMI

SEQ ID NO: 61238 - protein, 33 aa, Artificial Sequence
  Cyclic GFR-binding peptide
  MOD_RES (32)..(32): Xaa is C or S
VPTKLSSLSILFFDKGVVTYLKVYPGMAVSEXG

SEQ ID NO: 61239 - protein, 33 aa, Artificial Sequence
  Cyclic GFR-binding peptide
  MOD_RES (32)..(32): Xaa is C or S
APTKLSSLSVLFFDDSSNVILKVYPNMVVRSXG

SEQ ID NO: 61240 - protein, 36 aa, Artificial Sequence
  Cyclic GFR-binding peptide
  MOD_RES (1)..(2)..(34)..(36): Xaa is C or S
XXVPTRLSSLSILFFDSANNVVLKVYPDMVVESXGX

SEQ ID NO: 61241 - protein, 28 aa, Artificial Sequence
  Cyclic GFR-binding peptide
  MOD_RES (26)..(28): Xaa is C or S
SSLSILFFIGKTPKILKVYPMIVKSXKX

SEQ ID NO: 61242 - protein, 33 aa, Artificial Sequence
  Cyclic GFR-binding peptide
  MOD_RES (3)..(4): Xaa is C or S
KAXXVPTKLSSLSVLFFDDMGVPTLKVYPEGMS

SEQ ID NO: 61243 - protein, 40 aa, Artificial Sequence
  Cyclic GFR-binding peptide
  MOD_RES (6)..(7)..(40): Xaa is C or S
KVGKAXXVPTKLSSLSVLFFDDMGVPTLKVYPEGMSVAEX

SEQ ID NO: 61244 - protein, 29 aa, Artificial Sequence
  Cyclic GFR-binding peptide
PQDLSSLSILFFVGRTPKVLKVYPMVVKS

SEQ ID NO: 61245 - protein, 25 aa, Artificial Sequence
  Cyclic GFR-binding peptide
PTKLSSLSVLFFDSSNNVILKVYPN

SEQ ID NO: 61246 - protein, 26 aa, Artificial Sequence
  Cyclic GFR-binding peptide
  MOD_RES (1)..(1): Xaa is C or S
XVPARLSSLSILFFDAANNVVLKVYP

SEQ ID NO: 61247 - protein, 33 aa, Artificial Sequence
  Cyclic GFR-binding peptide
  MOD_RES (1)..(32): Xaa is C or S
XVSQDLSSLSILFFIGKTPKILKVYPMIVKSXK

SEQ ID NO: 61248 - protein, 30 aa, Artificial Sequence
  Cyclic GFR-binding peptide
  MOD_RES (1)..(2): Xaa is C or S
XXVPQDLSSLSILFFVGRTPKVLKVYPMVV

SEQ ID NO: 61249 - protein, 28 aa, Artificial Sequence
  Cyclic GFR-binding peptide
  MOD_RES (26)..(28): Xaa is C or S
SSLSILFFVGRKPKVLKVYPMIVRSXKX

SEQ ID NO: 61250 - protein, 30 aa, Artificial Sequence
  Cyclic GFR-binding peptide
  MOD_RES (30)..(30): Xaa is C or S
TKLSSLSVLFFDSSNNVILKVYPNMVVKAX

SEQ ID NO: 61251 - protein, 30 aa, Artificial Sequence
  Cyclic GFR-binding peptide
PEKMSSLSILFFDENKNVVLKVYPNMTVES

SEQ ID NO: 61252 - protein, 35 aa, Artificial Sequence
  Cyclic GFR-binding peptide
  MOD_RES (5)..(6): Xaa is C or S
SAAPXXVPQALSSLSILFFVGRKPKVLKVYPMIVR

SEQ ID NO: 61253 - protein, 37 aa, Artificial Sequence
  Cyclic GFR-binding peptide
  MOD_RES (1)..(35)..(37): Xaa is C or S
XVPTEESSLSMLFFRIKPHQGQHLKVYPFLQHNKXEX

SEQ ID NO: 61254 - protein, 31 aa, Artificial Sequence
  Cyclic GFR-binding peptide
  MOD_RES (30)..(30): Xaa is C or S
ARLSSLSILFFDAANNVVLKVYPDMVVEAXG

SEQ ID NO: 61255 - protein, 26 aa, Artificial Sequence
  Cyclic GFR-binding peptide
PTQLSSLSVLFFDDSSNVILKVYPNM

SEQ ID NO: 61256 - protein, 31 aa, Artificial Sequence
  Cyclic GFR-binding peptide
  MOD_RES (1)..(1): Xaa is C or S
XVPARLSSLSILFFDAANNVVLKVYPDMVVE

SEQ ID NO: 61257 - protein, 30 aa, Artificial Sequence
  Cyclic GFR-binding peptide
VPARLSSLSILFFDAANNVVLKVYPDMVVE

SEQ ID NO: 61258 - protein, 30 aa, Artificial Sequence
  Cyclic GFR-binding peptide
  MOD_RES (4)..(5): Xaa is C or S
PKAXXAPTKLSSLSVLFFDSSNNVILKVYP

SEQ ID NO: 61259 - protein, 35 aa, Artificial Sequence
  Cyclic GFR-binding peptide
  MOD_RES (4)..(5): Xaa is C or S
GKAXXVPTKLSSLSVLFFDDMGVPTLKVYPEGMSV

SEQ ID NO: 61260 - protein, 36 aa, Artificial Sequence
  Cyclic GFR-binding peptide
  MOD_RES (3)..(4)..(36): Xaa is C or S
KAXXAPTKLSSLSVLFFDSSNNVILKVYPNMVVKAX

SEQ ID NO: 61261 - protein, 31 aa, Artificial Sequence
  Cyclic GFR-binding peptide
  MOD_RES (3)..(4): Xaa is C or S
STXXAPVKTSSLSMLFFDNGRVLLLKVYPMI

SEQ ID NO: 61262 - protein, 38 aa, Artificial Sequence
  Cyclic GFR-binding peptide
  MOD_RES (2)..(36)..(38): Xaa is C or S
EXVPTEESSLSMLFFRIKPHQGQHLKVYPFLQHNKXEX

SEQ ID NO: 61263 - protein, 27 aa, Artificial Sequence
  Cyclic GFR-binding peptide
  MOD_RES (27)..(27): Xaa is C or S
SSLSILFFDENKNVVLKVYPNMTVESX

SEQ ID NO: 61264 - protein, 21 aa, Artificial Sequence
  Cyclic GFR-binding peptide
SSLSILFFVGRTPKVLKVYPM

SEQ ID NO: 61265 - protein, 28 aa, Artificial Sequence
  Cyclic GFR-binding peptide
KMSSLSILFFDENKNVVLKVYPNMTVES

SEQ ID NO: 61266 - protein, 24 aa, Artificial Sequence
  Cyclic GFR-binding peptide
TRLSSLSILFFDSANNVVLKVYPD

SEQ ID NO: 61267 - protein, 31 aa, Artificial Sequence
  Cyclic GFR-binding peptide
  MOD_RES (4)..(5): Xaa is C or S
PPTXXVPTRLSSLSILFFDSANNVVLKVYPD

SEQ ID NO: 61268 - protein, 25 aa, Artificial Sequence
  Cyclic GFR-binding peptide
VPEKMSSLSILFFDENKNVVLKVYP

SEQ ID NO: 61269 - protein, 30 aa, Artificial Sequence
  Cyclic GFR-binding peptide
  MOD_RES (4)..(5): Xaa is C or S
PEPXXVPEKMSSLSILFFDENKNVVLKVYP

SEQ ID NO: 61270 - protein, 28 aa, Artificial Sequence
  Cyclic GFR-binding peptide
  MOD_RES (28)..(28): Xaa is C or S
DLSSLSILFFIGKTPKILKVYPMIVKSX

SEQ ID NO: 61271 - protein, 31 aa, Artificial Sequence
  Cyclic GFR-binding peptide
  MOD_RES (1)..(2): Xaa is C or S
XXAPTKLSSLSVLFFDDSSNVILKVYPNMVV

SEQ ID NO: 61272 - protein, 35 aa, Artificial Sequence
  Cyclic GFR-binding peptide
  MOD_RES (6)..(6): Xaa is C or S
DEGLEXVPTEESSLSMLFFRIKPHQGQHLKVYPFL

SEQ ID NO: 61273 - protein, 38 aa, Artificial Sequence
  Cyclic GFR-binding peptide
  MOD_RES (4)..(5)..(37): Xaa is C or S
PKPXXAPTKLSSLSVLFFDDSSNVILKVYPNMVVRSXG

SEQ ID NO: 61274 - protein, 36 aa, Artificial Sequence
  Cyclic GFR-binding peptide
  MOD_RES (5)..(5): Xaa is C or S
SSVKXQPSRVHHSSLSVLFFEYVRKKPKLLKVYPRL

SEQ ID NO: 61275 - protein, 32 aa, Artificial Sequence
  Cyclic GFR-binding peptide
  MOD_RES (2)..(3): Xaa is C or S
PXXVSQDLSSLSILFFIGKTPKILKVYPMIVK

SEQ ID NO: 61276 - protein, 31 aa, Artificial Sequence
  Cyclic GFR-binding peptide
  MOD_RES (1)..(2): Xaa is C or S
XXVSQDLSSLSILFFIGKTPKILKVYPMIVK

SEQ ID NO: 61277 - protein, 31 aa, Artificial Sequence
  Cyclic GFR-binding peptide
  MOD_RES (30)..(30): Xaa is C or S
PQDLSSLSILFFVGRTPKVLKVYPMVVKSXK

SEQ ID NO: 61278 - protein, 29 aa, Artificial Sequence
  Cyclic GFR-binding peptide
VPTKLSSLSVLFFDDMGVPTLKVYPEGMS

SEQ ID NO: 61279 - protein, 27 aa, Artificial Sequence
  Cyclic GFR-binding peptide
  MOD_RES (1)..(2): Xaa is C or S
XXVPTRLSSLSILFFDSANNVVLKVYP

SEQ ID NO: 61280 - protein, 41 aa, Artificial Sequence
  Cyclic GFR-binding peptide
  MOD_RES (6)..(40): Xaa is C or S
DEGLEXVPTEESSLSMLFFRIKPHQGQHLKVYPFLQHNKXE

SEQ ID NO: 61281 - protein, 23 aa, Artificial Sequence
  Cyclic GFR-binding peptide
QDLSSLSILFFIGKTPKILKVYP

SEQ ID NO: 61282 - protein, 39 aa, Artificial Sequence
  Cyclic GFR-binding peptide
  MOD_RES (3)..(4)..(36)..(38): Xaa is C or S
ASXXVPARLSSLSILFFDAANNVVLKVYPDMVVEAXGXR

SEQ ID NO: 61283 - protein, 31 aa, Artificial Sequence
  Cyclic GFR-binding peptide
  MOD_RES (31)..(31): Xaa is C or S
VPQALSSLSILFFVGRKPKVLKVYPMIVRSX

SEQ ID NO: 61284 - protein, 30 aa, Artificial Sequence
  Cyclic GFR-binding peptide
  MOD_RES (30)..(30): Xaa is C or S
PVKTSSLSMLFFDNGRVLLLKVYPMIVEEX

SEQ ID NO: 61285 - protein, 35 aa, Artificial Sequence
  Cyclic GFR-binding peptide
  MOD_RES (3)..(4): Xaa is C or S
KAXXVPTKLSSLSVLFFDDMGVPTLKVYPEGMSVA

SEQ ID NO: 61286 - protein, 29 aa, Artificial Sequence
  Cyclic GFR-binding peptide
  MOD_RES (1)..(1): Xaa is C or S
XTPTKMSSLSMLFFNDKQQIILKVYPGMV

SEQ ID NO: 61287 - protein, 29 aa, Artificial Sequence
  Cyclic GFR-binding peptide
  MOD_RES (27)..(29): Xaa is C or S
SSLSILFFDSANNVVLKVYPDMVVESXGX

SEQ ID NO: 61288 - protein, 22 aa, Artificial Sequence
  Cyclic GFR-binding peptide
LSSLSILFFDKGVVTYLKVYPG

SEQ ID NO: 61289 - protein, 28 aa, Artificial Sequence
  Cyclic GFR-binding peptide
TPTKMSSLSMLFFNDKQQIILKVYPGMV

SEQ ID NO: 61290 - protein, 30 aa, Artificial Sequence
  Cyclic GFR-binding peptide
  MOD_RES (3)..(4): Xaa is C or S
ASXXVPARLSSLSILFFDAANNVVLKVYPD

SEQ ID NO: 61291 - protein, 29 aa, Artificial Sequence
  Cyclic GFR-binding peptide
  MOD_RES (1)..(2): Xaa is C or S
XXVPARLSSLSILFFDAANNVVLKVYPDM

SEQ ID NO: 61292 - protein, 33 aa, Artificial Sequence
  Cyclic GFR-binding peptide
QPSRVHHSSLSVLFFEYVRKKPKLLKVYPRLEE

SEQ ID NO: 61293 - protein, 30 aa, Artificial Sequence
  Cyclic GFR-binding peptide
  MOD_RES (28)..(30): Xaa is C or S
LSSLSILFFDSANNVVLKVYPDMVVESXGX

SEQ ID NO: 61294 - protein, 27 aa, Artificial Sequence
  Cyclic GFR-binding peptide
QDLSSLSILFFIGKTPKILKVYPMIVK

SEQ ID NO: 61295 - protein, 25 aa, Artificial Sequence
  Cyclic GFR-binding peptide
VPTKLSSLSILFFDKGVVTYLKVYP

SEQ ID NO: 61296 - protein, 34 aa, Artificial Sequence
  Cyclic GFR-binding peptide
  MOD_RES (33)..(33): Xaa is C or S
PTEESSLSMLFFRIKPHQGQHLKVYPFLQHNKXE

SEQ ID NO: 61297 - protein, 25 aa, Artificial Sequence
  Cyclic GFR-binding peptide
PTKLSSLSVLFFDDMGVPTLKVYPE

SEQ ID NO: 61298 - protein, 33 aa, Artificial Sequence
  Cyclic GFR-binding peptide
  MOD_RES (1)..(33): Xaa is C or S
XAPTKLSSLSVLFFDSSNNVILKVYPNMVVKAX

SEQ ID NO: 61299 - protein, 31 aa, Artificial Sequence
  Cyclic GFR-binding peptide
APTKLSSLSVLFFDSSNNVILKVYPNMVVKA

SEQ ID NO: 61300 - protein, 38 aa, Artificial Sequence
  Cyclic GFR-binding peptide
  MOD_RES (5)..(6)..(37): Xaa is C or S
SASPXXVSQDLSSLSILFFIGKTPKILKVYPMIVKSXK

SEQ ID NO: 61301 - protein, 26 aa, Artificial Sequence
  Cyclic GFR-binding peptide
KLSSLSVLFFDDMGVPTLKVYPEGMS

SEQ ID NO: 61302 - protein, 32 aa, Artificial Sequence
  Cyclic GFR-binding peptide
  MOD_RES (3)..(4): Xaa is C or S
SPXXVSQDLSSLSILFFIGKTPKILKVYPMIV

SEQ ID NO: 61303 - protein, 33 aa, Artificial Sequence
  Cyclic GFR-binding peptide
  MOD_RES (32)..(32): Xaa is C or S
TEESSLSMLFFRIKPHQGQHLKVYPFLQHNKXE

SEQ ID NO: 61304 - protein, 34 aa, Artificial Sequence
  Cyclic GFR-binding peptide
  MOD_RES (31)..(33): Xaa is C or S
PEKMSSLSILFFDENKNVVLKVYPNMTVESXAXR

SEQ ID NO: 61305 - protein, 31 aa, Artificial Sequence
  Cyclic GFR-binding peptide
  MOD_RES (1)..(2): Xaa is C or S
XXAPTQLSSLSVLFFDDSSNVILKVYPNMVV

SEQ ID NO: 61306 - protein, 25 aa, Artificial Sequence
  Cyclic GFR-binding peptide
APVKTSSLSMLFFDNGRVLLLKVYP

SEQ ID NO: 61307 - protein, 27 aa, Artificial Sequence
  Cyclic GFR-binding peptide
  MOD_RES (1)..(2): Xaa is C or S
XXVPQDLSSLSILFFVGRTPKVLKVYP

SEQ ID NO: 61308 - protein, 36 aa, Artificial Sequence
  Cyclic GFR-binding peptide
  MOD_RES (5)..(6): Xaa is C or S
SAGPXXTPTKMSSLSMLFFNDKQQIILKVYPGMVVD

SEQ ID NO: 61309 - protein, 31 aa, Artificial Sequence
  Cyclic GFR-binding peptide
VPEKMSSLSILFFDENKNVVLKVYPNMTVES

SEQ ID NO: 61310 - protein, 31 aa, Artificial Sequence
  Cyclic GFR-binding peptide
  MOD_RES (31)..(31): Xaa is C or S
PEKMSSLSILFFDENKNVVLKVYPNMTVESX

SEQ ID NO: 61311 - protein, 39 aa, Artificial Sequence
  Cyclic GFR-binding peptide
  MOD_RES (1)..(38): Xaa is C or S
XQPSRVHHSSLSVLFFEYVRKKPKLLKVYPRLEEHLEXA

SEQ ID NO: 61312 - protein, 35 aa, Artificial Sequence
  Cyclic GFR-binding peptide
  MOD_RES (5)..(6): Xaa is C or S
VGKAXXVPTKLSSLSVLFFDDMGVPTLKVYPEGMS

SEQ ID NO: 61313 - protein, 34 aa, Artificial Sequence
  Cyclic GFR-binding peptide
  MOD_RES (7)..(7): Xaa is C or S
HVTKPTXAPTKLSSLSVLFFDDSSNVILKVYPNM

SEQ ID NO: 61314 - protein, 27 aa, Artificial Sequence
  Cyclic GFR-binding peptide
  MOD_RES (27)..(27): Xaa is C or S
TSSLSMLFFDNGRVLLLKVYPMIVEEX

SEQ ID NO: 61315 - protein, 39 aa, Artificial Sequence
  Cyclic GFR-binding peptide
  MOD_RES (6)..(7)..(39): Xaa is C or S
AAPASXXVPARLSSLSILFFDAANNVVLKVYPDMVVEAX

SEQ ID NO: 61316 - protein, 32 aa, Artificial Sequence
  Cyclic GFR-binding peptide
  MOD_RES (4)..(5): Xaa is C or S
PSTXXAPVKTSSLSMLFFDNGRVLLLKVYPMI

SEQ ID NO: 61317 - protein, 30 aa, Artificial Sequence
  Cyclic GFR-binding peptide
  MOD_RES (28)..(30): Xaa is C or S
LSSLSILFFDKGVVTYLKVYPGMAVSEXGX

SEQ ID NO: 61318 - protein, 22 aa, Artificial Sequence
  Cyclic GFR-binding peptide
SSLSVLFFDSSNNVILKVYPNM

SEQ ID NO: 61319 - protein, 36 aa, Artificial Sequence
  Cyclic GFR-binding peptide
  MOD_RES (6)..(7): Xaa is C or S
RVPSTXXAPVKTSSLSMLFFDNGRVLLLKVYPMIVE

SEQ ID NO: 61320 - protein, 29 aa, Artificial Sequence
  Cyclic GFR-binding peptide
PTKLSSLSVLFFDDSSNVILKVYPNMVVR

SEQ ID NO: 61321 - protein, 34 aa, Artificial Sequence
  Cyclic GFR-binding peptide
  MOD_RES (32)..(34): Xaa is C or S
VPTRLSSLSILFFDSANNVVLKVYPDMVVESXGX

SEQ ID NO: 61322 - protein, 37 aa, Artificial Sequence
  Cyclic GFR-binding peptide
  MOD_RES (5)..(6): Xaa is C or S
VPKAXXAPTKLSSLSVLFFDSSNNVILKVYPNMVVKA

SEQ ID NO: 61323 - protein, 23 aa, Artificial Sequence
  Cyclic GFR-binding peptide
LSSLSVLFFDSSNNVILKVYPNM

SEQ ID NO: 61324 - protein, 38 aa, Artificial Sequence
  Cyclic GFR-binding peptide
  MOD_RES (2)..(3)..(35)..(37): Xaa is C or S
AXXAPTKLSSLSVLFFDSSNNVILKVYPNMVVKAXGXH

SEQ ID NO: 61325 - protein, 23 aa, Artificial Sequence
  Cyclic GFR-binding peptide
DLSSLSILFFVGRTPKVLKVYPM

SEQ ID NO: 61326 - protein, 33 aa, Artificial Sequence
  Cyclic GFR-binding peptide
  MOD_RES (30)..(32): Xaa is C or S
ESSLSMLFFRIKPHQGQHLKVYPFLQHNKXEXR

SEQ ID NO: 61327 - protein, 24 aa, Artificial Sequence
  Cyclic GFR-binding peptide
SSLSMLFFNDKQQIILKVYPGMVV

SEQ ID NO: 61328 - protein, 26 aa, Artificial Sequence
  Cyclic GFR-binding peptide
LSSLSILFFDKGVVTYLKVYPGMAVS

SEQ ID NO: 61329 - protein, 25 aa, Artificial Sequence
  Cyclic GFR-binding peptide
HHSSLSVLFFEYVRKKPKLLKVYPR

SEQ ID NO: 61330 - protein, 39 aa, Artificial Sequence
  Cyclic GFR-binding peptide
  MOD_RES (6)..(7)..(39): Xaa is C or S
YVPKPXXAPTKLSSLSVLFFDDSSNVILKVYPNMVVRSX

SEQ ID NO: 61331 - protein, 30 aa, Artificial Sequence
  Cyclic GFR-binding peptide
  MOD_RES (30)..(30): Xaa is C or S
SSLSVLFFEYVRKKPKLLKVYPRLEEHLEX

SEQ ID NO: 61332 - protein, 25 aa, Artificial Sequence
  Cyclic GFR-binding peptide
SSLSILFFVGRTPKVLKVYPMVVKS

SEQ ID NO: 61333 - protein, 35 aa, Artificial Sequence
  Cyclic GFR-binding peptide
  MOD_RES (5)..(6): Xaa is C or S
VPKPXXAPTQLSSLSVLFFDDSSNVILKVYPNMVV

SEQ ID NO: 61334 - protein, 32 aa, Artificial Sequence
  Cyclic GFR-binding peptide
  MOD_RES (1)..(2): Xaa is C or S
XXVPTRLSSLSILFFDSANNVVLKVYPDMVVE

SEQ ID NO: 61335 - protein, 32 aa, Artificial Sequence
  Cyclic GFR-binding peptide
  MOD_RES (32)..(32): Xaa is C or S
VPTKLSSLSILFFDKGVVTYLKVYPGMAVSEX

SEQ ID NO: 61336 - protein, 34 aa, Artificial Sequence
  Cyclic GFR-binding peptide
  MOD_RES (7)..(7): Xaa is C or S
NDEGLEXVPTEESSLSMLFFRIKPHQGQHLKVYP

SEQ ID NO: 61337 - protein, 33 aa, Artificial Sequence
  Cyclic GFR-binding peptide
  MOD_RES (1)..(2): Xaa is C or S
XXVPTKLSSLSVLFFDDMGVPTLKVYPEGMSVA

SEQ ID NO: 61338 - protein, 31 aa, Artificial Sequence
  Cyclic GFR-binding peptide
  MOD_RES (2)..(3): Xaa is C or S
AXXVPTKLSSLSVLFFDDMGVPTLKVYPEGM

SEQ ID NO: 61339 - protein, 30 aa, Artificial Sequence
  Cyclic GFR-binding peptide
  MOD_RES (4)..(5): Xaa is C or S
ASPXXVSQDLSSLSILFFIGKTPKILKVYP

SEQ ID NO: 61340 - protein, 37 aa, Artificial Sequence
  Cyclic GFR-binding peptide
  MOD_RES (6)..(7): Xaa is C or S
KVGKAXXVPTKLSSLSVLFFDDMGVPTLKVYPEGMSV

SEQ ID NO: 61341 - protein, 35 aa, Artificial Sequence
  Cyclic GFR-binding peptide
QPSRVHHSSLSVLFFEYVRKKPKLLKVYPRLEEHL

SEQ ID NO: 61342 - protein, 32 aa, Artificial Sequence
  Cyclic GFR-binding peptide
  MOD_RES (4)..(5): Xaa is C or S
PKPXXAPTQLSSLSVLFFDDSSNVILKVYPNM

SEQ ID NO: 61343 - protein, 43 aa, Artificial Sequence
  Cyclic GFR-binding peptide
  MOD_RES (6)..(40)..(42): Xaa is C or S
DEGLEXVPTEESSLSMLFFRIKPHQGQHLKVYPFLQHNKXEXR

SEQ ID NO: 61344 - protein, 30 aa, Artificial Sequence
  Cyclic GFR-binding peptide
  MOD_RES (27)..(29): Xaa is C or S
SSLSILFFDENKNVVLKVYPNMTVESXAXR

SEQ ID NO: 61345 - protein, 28 aa, Artificial Sequence
  Cyclic GFR-binding peptide
  MOD_RES (1)..(1): Xaa is C or S
XVPTRLSSLSILFFDSANNVVLKVYPDM

SEQ ID NO: 61346 - protein, 26 aa, Artificial Sequence
  Cyclic GFR-binding peptide
VPTKLSSLSILFFDKGVVTYLKVYPG

SEQ ID NO: 61347 - protein, 35 aa, Artificial Sequence
  Cyclic GFR-binding peptide
  MOD_RES (32)..(34): Xaa is C or S
TEESSLSMLFFRIKPHQGQHLKVYPFLQHNKXEXR

SEQ ID NO: 61348 - protein, 24 aa, Artificial Sequence
  Cyclic GFR-binding peptide
LSSLSILFFDSANNVVLKVYPDMV

SEQ ID NO: 61349 - protein, 30 aa, Artificial Sequence
  Cyclic GFR-binding peptide
  MOD_RES (28)..(30): Xaa is C or S
LSSLSVLFFDSSNNVILKVYPNMVVKAXGX

SEQ ID NO: 61350 - protein, 34 aa, Artificial Sequence
  Cyclic GFR-binding peptide
  MOD_RES (3)..(4): Xaa is C or S
GPXXTPTKMSSLSMLFFNDKQQIILKVYPGMVVD

SEQ ID NO: 61351 - protein, 27 aa, Artificial Sequence
  Cyclic GFR-binding peptide
KTSSLSMLFFDNGRVLLLKVYPMIVEE

SEQ ID NO: 61352 - protein, 29 aa, Artificial Sequence
  Cyclic GFR-binding peptide
  MOD_RES (1)..(2): Xaa is C or S
XXVPEKMSSLSILFFDENKNVVLKVYPNM

SEQ ID NO: 61353 - protein, 23 aa, Artificial Sequence
  Cyclic GFR-binding peptide
RLSSLSILFFDSANNVVLKVYPD

SEQ ID NO: 61354 - protein, 30 aa, Artificial Sequence
  Cyclic GFR-binding peptide
  MOD_RES (29)..(29): Xaa is C or S
SSLSMLFFRIKPHQGQHLKVYPFLQHNKXE

SEQ ID NO: 61355 - protein, 28 aa, Artificial Sequence
  Cyclic GFR-binding peptide
  MOD_RES (28)..(28): Xaa is C or S
LSSLSVLFFDDSSNVILKVYPNMVVRAX

SEQ ID NO: 61356 - protein, 32 aa, Artificial Sequence
  Cyclic GFR-binding peptide
  MOD_RES (1)..(1): Xaa is C or S
XVPTKLSSLSVLFFDDMGVPTLKVYPEGMSVA

SEQ ID NO: 61357 - protein, 25 aa, Artificial Sequence
  Cyclic GFR-binding peptide
TPTKMSSLSMLFFNDKQQIILKVYP

SEQ ID NO: 61358 - protein, 40 aa, Artificial Sequence
  Cyclic GFR-binding peptide
  MOD_RES (6)..(7)..(39): Xaa is C or S
HVPKPXXAPTKLSSLSVLFFDDSSNVILKVYPNMVVRSXG

SEQ ID NO: 61359 - protein, 35 aa, Artificial Sequence
  Cyclic GFR-binding peptide
  MOD_RES (1)..(2)..(34): Xaa is C or S
XXTPTKMSSLSMLFFNDKQQIILKVYPGMVVDRXG

SEQ ID NO: 61360 - protein, 37 aa, Artificial Sequence
  Cyclic GFR-binding peptide
  MOD_RES (4)..(5)..(37): Xaa is C or S
AGPXXTPTKMSSLSMLFFNDKQQIILKVYPGMVVDRX

SEQ ID NO: 61361 - protein, 39 aa, Artificial Sequence
  Cyclic GFR-binding peptide
  MOD_RES (3)..(4)..(36)..(38): Xaa is C or S
KAXXVPTKLSSLSILFFDKGVVTYLKVYPGMAVSEXGXR

SEQ ID NO: 61362 - protein, 36 aa, Artificial Sequence
  Cyclic GFR-binding peptide
  MOD_RES (5)..(6): Xaa is C or S
APASXXVPARLSSLSILFFDAANNVVLKVYPDMVVE

SEQ ID NO: 61363 - protein, 37 aa, Artificial Sequence
  Cyclic GFR-binding peptide
  MOD_RES (34)..(36): Xaa is C or S
VPTEESSLSMLFFRIKPHQGQHLKVYPFLQHNKXEXR

SEQ ID NO: 61364 - protein, 25 aa, Artificial Sequence
  Cyclic GFR-binding peptide
PQDLSSLSILFFVGRTPKVLKVYPM

SEQ ID NO: 61365 - protein, 41 aa, Artificial Sequence
  Cyclic GFR-binding peptide
  MOD_RES (5)..(6)..(38)..(40): Xaa is C or S
TPPTXXVPTRLSSLSILFFDSANNVVLKVYPDMVVESXGXR

SEQ ID NO: 61366 - protein, 30 aa, Artificial Sequence
  Cyclic GFR-binding peptide
  MOD_RES (2)..(3): Xaa is C or S
PXXVPQDLSSLSILFFVGRTPKVLKVYPMV

SEQ ID NO: 61367 - protein, 39 aa, Artificial Sequence
  Cyclic GFR-binding peptide
  MOD_RES (6)..(38): Xaa is C or S
VTKPTXAPTKLSSLSVLFFDDSSNVILKVYPNMVVRSXG

SEQ ID NO: 61368 - protein, 33 aa, Artificial Sequence
  Cyclic GFR-binding peptide
  MOD_RES (4)..(4): Xaa is C or S
GLEXVPTEESSLSMLFFRIKPHQGQHLKVYPFL

SEQ ID NO: 61369 - protein, 36 aa, Artificial Sequence
  Cyclic GFR-binding peptide
  MOD_RES (33)..(35): Xaa is C or S
PTEESSLSMLFFRIKPHQGQHLKVYPFLQHNKXEXR

SEQ ID NO: 61370 - protein, 33 aa, Artificial Sequence
  Cyclic GFR-binding peptide
  MOD_RES (1)..(33): Xaa is C or S
XVPEKMSSLSILFFDENKNVVLKVYPNMTVESX

SEQ ID NO: 61371 - protein, 21 aa, Artificial Sequence
  Cyclic GFR-binding peptide
SSLSILFFDKGVVTYLKVYPG

SEQ ID NO: 61372 - protein, 40 aa, Artificial Sequence
  Cyclic GFR-binding peptide
  MOD_RES (6)..(7)..(39): Xaa is C or S
STPPTXXVPTRLSSLSILFFDSANNVVLKVYPDMVVESXG

SEQ ID NO: 61373 - protein, 25 aa, Artificial Sequence
  Cyclic GFR-binding peptide
PTKLSSLSVLFFDDSSNVILKVYPN

SEQ ID NO: 61374 - protein, 24 aa, Artificial Sequence
  Cyclic GFR-binding peptide
LSSLSILFFDKGVVTYLKVYPGMA

SEQ ID NO: 61375 - protein, 24 aa, Artificial Sequence
  Cyclic GFR-binding peptide
KLSSLSVLFFDDMGVPTLKVYPEG

SEQ ID NO: 61376 - protein, 34 aa, Artificial Sequence
  Cyclic GFR-binding peptide
  MOD_RES (4)..(5): Xaa is C or S
PPTXXVPTRLSSLSILFFDSANNVVLKVYPDMVV

SEQ ID NO: 61377 - protein, 40 aa, Artificial Sequence
  Cyclic GFR-binding peptide
  MOD_RES (6)..(7)..(39): Xaa is C or S
TVPKPXXAPTQLSSLSVLFFDDSSNVILKVYPNMVVRAXG

SEQ ID NO: 61378 - protein, 37 aa, Artificial Sequence
  Cyclic GFR-binding peptide
  MOD_RES (5)..(6): Xaa is C or S
APASXXVPARLSSLSILFFDAANNVVLKVYPDMVVEA

SEQ ID NO: 61379 - protein, 27 aa, Artificial Sequence
  Cyclic GFR-binding peptide
  MOD_RES (26)..(26): Xaa is C or S
SSLSILFFVGRKPKVLKVYPMIVRSXK

SEQ ID NO: 61380 - protein, 26 aa, Artificial Sequence
  Cyclic GFR-binding peptide
LSSLSILFFDAANNVVLKVYPDMVVE

SEQ ID NO: 61381 - protein, 21 aa, Artificial Sequence
  Cyclic GFR-binding peptide
SSLSMLFFDNGRVLLLKVYPM

SEQ ID NO: 61382 - protein, 32 aa, Artificial Sequence
  Cyclic GFR-binding peptide
  MOD_RES (31)..(31): Xaa is C or S
PTKLSSLSILFFDKGVVTYLKVYPGMAVSEXG

SEQ ID NO: 61383 - protein, 29 aa, Artificial Sequence
  Cyclic GFR-binding peptide
  MOD_RES (3)..(4): Xaa is C or S
KAXXVPTKLSSLSVLFFDDMGVPTLKVYP

SEQ ID NO: 61384 - protein, 28 aa, Artificial Sequence
  Cyclic GFR-binding peptide
QDLSSLSILFFIGKTPKILKVYPMIVKS

SEQ ID NO: 61385 - protein, 34 aa, Artificial Sequence
  Cyclic GFR-binding peptide
  MOD_RES (3)..(3): Xaa is C or S
LEXVPTEESSLSMLFFRIKPHQGQHLKVYPFLQH

SEQ ID NO: 61386 - protein, 40 aa, Artificial Sequence
  Cyclic GFR-binding peptide
  MOD_RES (6)..(38)..(40): Xaa is C or S
VTKPTXAPTKLSSLSVLFFDDSSNVILKVYPNMVVRSXGX

SEQ ID NO: 61387 - protein, 38 aa, Artificial Sequence
  Cyclic GFR-binding peptide
  MOD_RES (4)..(5)..(37): Xaa is C or S
PASXXVPARLSSLSILFFDAANNVVLKVYPDMVVEAXG

SEQ ID NO: 61388 - protein, 38 aa, Artificial Sequence
  Cyclic GFR-binding peptide
  MOD_RES (4)..(5)..(37): Xaa is C or S
AGPXXTPTKMSSLSMLFFNDKQQIILKVYPGMVVDRXG

SEQ ID NO: 61389 - protein, 30 aa, Artificial Sequence
  Cyclic GFR-binding peptide
  MOD_RES (1)..(1): Xaa is C or S
XVPTKLSSLSILFFDKGVVTYLKVYPGMAV

SEQ ID NO: 61390 - protein, 39 aa, Artificial Sequence
  Cyclic GFR-binding peptide
  MOD_RES (4)..(38): Xaa is C or S
GLEXVPTEESSLSMLFFRIKPHQGQHLKVYPFLQHNKXE

SEQ ID NO: 61391 - protein, 27 aa, Artificial Sequence
  Cyclic GFR-binding peptide
  MOD_RES (1)..(2): Xaa is C or S
XXAPTKLSSLSVLFFDSSNNVILKVYP

SEQ ID NO: 61392 - protein, 29 aa, Artificial Sequence
  Cyclic GFR-binding peptide
KLSSLSVLFFDDMGVPTLKVYPEGMSVAE

SEQ ID NO: 61393 - protein, 25 aa, Artificial Sequence
  Cyclic GFR-binding peptide
LSSLSILFFIGKTPKILKVYPMIVK

SEQ ID NO: 61394 - protein, 31 aa, Artificial Sequence
  Cyclic GFR-binding peptide
  MOD_RES (3)..(4): Xaa is C or S
EPXXVPEKMSSLSILFFDENKNVVLKVYPNM

SEQ ID NO: 61395 - protein, 37 aa, Artificial Sequence
  Cyclic GFR-binding peptide
  MOD_RES (3)..(4)..(36): Xaa is C or S
GPXXTPTKMSSLSMLFFNDKQQIILKVYPGMVVDRXG

SEQ ID NO: 61396 - protein, 33 aa, Artificial Sequence
  Cyclic GFR-binding peptide
  MOD_RES (7)..(7): Xaa is C or S
HVTKPTXAPTKLSSLSVLFFDDSSNVILKVYPN

SEQ ID NO: 61397 - protein, 34 aa, Artificial Sequence
  Cyclic GFR-binding peptide
  MOD_RES (4)..(4): Xaa is C or S
SVKXQPSRVHHSSLSVLFFEYVRKKPKLLKVYPR

SEQ ID NO: 61398 - protein, 25 aa, Artificial Sequence
  Cyclic GFR-binding peptide
TKLSSLSVLFFDDSSNVILKVYPNM

SEQ ID NO: 61399 - protein, 27 aa, Artificial Sequence
  Cyclic GFR-binding peptide
LSSLSVLFFDDMGVPTLKVYPEGMSVA

SEQ ID NO: 61400 - protein, 33 aa, Artificial Sequence
  Cyclic GFR-binding peptide
  MOD_RES (33)..(33): Xaa is C or S
VHHSSLSVLFFEYVRKKPKLLKVYPRLEEHLEX

SEQ ID NO: 61401 - protein, 29 aa, Artificial Sequence
  Cyclic GFR-binding peptide
  MOD_RES (29)..(29): Xaa is C or S
KLSSLSVLFFDDSSNVILKVYPNMVVRSX

SEQ ID NO: 61402 - protein, 31 aa, Artificial Sequence
  Cyclic GFR-binding peptide
VHHSSLSVLFFEYVRKKPKLLKVYPRLEEHL

SEQ ID NO: 61403 - protein, 33 aa, Artificial Sequence
  Cyclic GFR-binding peptide
  MOD_RES (31)..(33): Xaa is C or S
PTKMSSLSMLFFNDKQQIILKVYPGMVVDRXGX

SEQ ID NO: 61404 - protein, 32 aa, Artificial Sequence
  Cyclic GFR-binding peptide
  MOD_RES (1)..(32): Xaa is C or S
XVPQDLSSLSILFFVGRTPKVLKVYPMVVKSX

SEQ ID NO: 61405 - protein, 33 aa, Artificial Sequence
  Cyclic GFR-binding peptide
PSRVHHSSLSVLFFEYVRKKPKLLKVYPRLEEH

SEQ ID NO: 61406 - protein, 29 aa, Artificial Sequence
  Cyclic GFR-binding peptide
EESSLSMLFFRIKPHQGQHLKVYPFLQHN

SEQ ID NO: 61407 - protein, 26 aa, Artificial Sequence
  Cyclic GFR-binding peptide
  MOD_RES (26)..(26): Xaa is C or S
SSLSMLFFDNGRVLLLKVYPMIVEEX

SEQ ID NO: 61408 - protein, 33 aa, Artificial Sequence
  Cyclic GFR-binding peptide
  MOD_RES (30)..(32): Xaa is C or S
PQALSSLSILFFVGRKPKVLKVYPMIVRSXKXS

SEQ ID NO: 61409 - protein, 34 aa, Artificial Sequence
  Cyclic GFR-binding peptide
  MOD_RES (1)..(1): Xaa is C or S
XQPSRVHHSSLSVLFFEYVRKKPKLLKVYPRLEE

SEQ ID NO: 61410 - protein, 39 aa, Artificial Sequence
  Cyclic GFR-binding peptide
  MOD_RES (3)..(4)..(37)..(39): Xaa is C or S
KAXXVPTKLSSLSVLFFDDMGVPTLKVYPEGMSVAEXGX

SEQ ID NO: 61411 - protein, 34 aa, Artificial Sequence
  Cyclic GFR-binding peptide
  MOD_RES (5)..(6): Xaa is C or S
VPKPXXAPTKLSSLSVLFFDDSSNVILKVYPNMV

SEQ ID NO: 61412 - protein, 31 aa, Artificial Sequence
  Cyclic GFR-binding peptide
  MOD_RES (28)..(30): Xaa is C or S
SSLSVLFFDDMGVPTLKVYPEGMSVAEXGXR

SEQ ID NO: 61413 - protein, 26 aa, Artificial Sequence
  Cyclic GFR-binding peptide
PEKMSSLSILFFDENKNVVLKVYPNM

SEQ ID NO: 61414 - protein, 30 aa, Artificial Sequence
  Cyclic GFR-binding peptide
  MOD_RES (2)..(3): Xaa is C or S
AXXAPTKLSSLSVLFFDSSNNVILKVYPNM

SEQ ID NO: 61415 - protein, 25 aa, Artificial Sequence
  Cyclic GFR-binding peptide
VPQDLSSLSILFFVGRTPKVLKVYP

SEQ ID NO: 61416 - protein, 28 aa, Artificial Sequence
  Cyclic GFR-binding peptide
VPTKLSSLSILFFDKGVVTYLKVYPGMA

SEQ ID NO: 61417 - protein, 39 aa, Artificial Sequence
  Cyclic GFR-binding peptide
  MOD_RES (4)..(5)..(37)..(39): Xaa is C or S
PPTXXVPTRLSSLSILFFDSANNVVLKVYPDMVVESXGX

SEQ ID NO: 61418 - protein, 37 aa, Artificial Sequence
  Cyclic GFR-binding peptide
  MOD_RES (2)..(3)..(35)..(37): Xaa is C or S
PXXTPTKMSSLSMLFFNDKQQIILKVYPGMVVDRXGX

SEQ ID NO: 61419 - protein, 32 aa, Artificial Sequence
  Cyclic GFR-binding peptide
  MOD_RES (4)..(5): Xaa is C or S
PEPXXVPEKMSSLSILFFDENKNVVLKVYPNM

SEQ ID NO: 61420 - protein, 38 aa, Artificial Sequence
  Cyclic GFR-binding peptide
  MOD_RES (3)..(4)..(36)..(38): Xaa is C or S
KPXXAPTQLSSLSVLFFDDSSNVILKVYPNMVVRAXGX

SEQ ID NO: 61421 - protein, 31 aa, Artificial Sequence
  Cyclic GFR-binding peptide
  MOD_RES (31)..(31): Xaa is C or S
VSQDLSSLSILFFIGKTPKILKVYPMIVKSX

SEQ ID NO: 61422 - protein, 30 aa, Artificial Sequence
  Cyclic GFR-binding peptide
  MOD_RES (1)..(2): Xaa is C or S
XXVPTKLSSLSVLFFDDMGVPTLKVYPEGM

SEQ ID NO: 61423 - protein, 36 aa, Artificial Sequence
  Cyclic GFR-binding peptide
  MOD_RES (2)..(3)..(35): Xaa is C or S
AXXAPTKLSSLSVLFFDSSNNVILKVYPNMVVKAXG

SEQ ID NO: 61424 - protein, 37 aa, Artificial Sequence
  Cyclic GFR-binding peptide
  MOD_RES (4)..(5)..(37): Xaa is C or S
PEPXXVPEKMSSLSILFFDENKNVVLKVYPNMTVESX

SEQ ID NO: 61425 - protein, 30 aa, Artificial Sequence
  Cyclic GFR-binding peptide
PARLSSLSILFFDAANNVVLKVYPDMVVEA

SEQ ID NO: 61426 - protein, 34 aa, Artificial Sequence
  Cyclic GFR-binding peptide
  MOD_RES (31)..(33): Xaa is C or S
VSQDLSSLSILFFIGKTPKILKVYPMIVKSXKXS

SEQ ID NO: 61427 - protein, 41 aa, Artificial Sequence
  Cyclic GFR-binding peptide
  MOD_RES (6)..(7)..(39)..(41): Xaa is C or S
GIPEPXXVPEKMSSLSILFFDENKNVVLKVYPNMTVESXAX

SEQ ID NO: 61428 - protein, 33 aa, Artificial Sequence
  Cyclic GFR-binding peptide
  MOD_RES (2)..(3): Xaa is C or S
SXXVPARLSSLSILFFDAANNVVLKVYPDMVVE

SEQ ID NO: 61429 - protein, 22 aa, Artificial Sequence
  Cyclic GFR-binding peptide
TSSLSMLFFDNGRVLLLKVYPM

SEQ ID NO: 61430 - protein, 25 aa, Artificial Sequence
  Cyclic GFR-binding peptide
LSSLSVLFFDDSSNVILKVYPNMVV

SEQ ID NO: 61431 - protein, 27 aa, Artificial Sequence
  Cyclic GFR-binding peptide
EKMSSLSILFFDENKNVVLKVYPNMTV

SEQ ID NO: 61432 - protein, 31 aa, Artificial Sequence
  Cyclic GFR-binding peptide
  MOD_RES (4)..(5): Xaa is C or S
AGPXXTPTKMSSLSMLFFNDKQQIILKVYPG

SEQ ID NO: 61433 - protein, 38 aa, Artificial Sequence
  Cyclic GFR-binding peptide
  MOD_RES (5)..(6)..(37): Xaa is C or S
SASPXXVPQDLSSLSILFFVGRTPKVLKVYPMVVKSXK

SEQ ID NO: 61434 - protein, 36 aa, Artificial Sequence
  Cyclic GFR-binding peptide
  MOD_RES (3)..(4)..(36): Xaa is C or S
KAXXVPTKLSSLSILFFDKGVVTYLKVYPGMAVSEX

SEQ ID NO: 61435 - protein, 35 aa, Artificial Sequence
  Cyclic GFR-binding peptide
  MOD_RES (32)..(34): Xaa is C or S
VPTRLSSLSILFFDSANNVVLKVYPDMVVESXGXR

SEQ ID NO: 61436 - protein, 38 aa, Artificial Sequence
  Cyclic GFR-binding peptide
  MOD_RES (4)..(5)..(36)..(38): Xaa is C or S
ASPXXVSQDLSSLSILFFIGKTPKILKVYPMIVKSXKX

SEQ ID NO: 61437 - protein, 42 aa, Artificial Sequence
  Cyclic GFR-binding peptide
  MOD_RES (7)..(41): Xaa is C or S
NDEGLEXVPTEESSLSMLFFRIKPHQGQHLKVYPFLQHNKXE

SEQ ID NO: 61438 - protein, 28 aa, Artificial Sequence
  Cyclic GFR-binding peptide
  MOD_RES (1)..(1): Xaa is C or S
XVPARLSSLSILFFDAANNVVLKVYPDM

SEQ ID NO: 61439 - protein, 30 aa, Artificial Sequence
  Cyclic GFR-binding peptide
  MOD_RES (29)..(29): Xaa is C or S
KLSSLSVLFFDDSSNVILKVYPNMVVRSXG

SEQ ID NO: 61440 - protein, 30 aa, Artificial Sequence
  Cyclic GFR-binding peptide
  MOD_RES (4)..(5): Xaa is C or S
SKAXXVPTKLSSLSILFFDKGVVTYLKVYP

SEQ ID NO: 61441 - protein, 37 aa, Artificial Sequence
  Cyclic GFR-binding peptide
  MOD_RES (3)..(4)..(37): Xaa is C or S
KAXXVPTKLSSLSVLFFDDMGVPTLKVYPEGMSVAEX

SEQ ID NO: 61442 - protein, 35 aa, Artificial Sequence
  Cyclic GFR-binding peptide
  MOD_RES (3)..(4)..(35): Xaa is C or S
APXXVPQALSSLSILFFVGRKPKVLKVYPMIVRSX

SEQ ID NO: 61443 - protein, 35 aa, Artificial Sequence
  Cyclic GFR-binding peptide
  MOD_RES (3)..(4): Xaa is C or S
PTXXVPTRLSSLSILFFDSANNVVLKVYPDMVVES

SEQ ID NO: 61444 - protein, 28 aa, Artificial Sequence
  Cyclic GFR-binding peptide
  MOD_RES (28)..(28): Xaa is C or S
KTSSLSMLFFDNGRVLLLKVYPMIVEEX

SEQ ID NO: 61445 - protein, 41 aa, Artificial Sequence
  Cyclic GFR-binding peptide
  MOD_RES (5)..(5): Xaa is C or S
SSVKXQPSRVHHSSLSVLFFEYVRKKPKLLKVYPRLEEHLE

SEQ ID NO: 61446 - protein, 32 aa, Artificial Sequence
  Cyclic GFR-binding peptide
  MOD_RES (1)..(2): Xaa is C or S
XXVPTKLSSLSILFFDKGVVTYLKVYPGMAVS

SEQ ID NO: 61447 - protein, 27 aa, Artificial Sequence
  Cyclic GFR-binding peptide
  MOD_RES (1)..(1): Xaa is C or S
XVPARLSSLSILFFDAANNVVLKVYPD

SEQ ID NO: 61448 - protein, 32 aa, Artificial Sequence
  Cyclic GFR-binding peptide
  MOD_RES (32)..(32): Xaa is C or S
TEESSLSMLFFRIKPHQGQHLKVYPFLQHNKX

SEQ ID NO: 61449 - protein, 21 aa, Artificial Sequence
  Cyclic GFR-binding peptide
SSLSVLFFDSSNNVILKVYPN

SEQ ID NO: 61450 - protein, 39 aa, Artificial Sequence
  Cyclic GFR-binding peptide
  MOD_RES (4)..(5)..(37)..(39): Xaa is C or S
PKPXXAPTQLSSLSVLFFDDSSNVILKVYPNMVVRAXGX

SEQ ID NO: 61451 - protein, 25 aa, Artificial Sequence
  Cyclic GFR-binding peptide
EKMSSLSILFFDENKNVVLKVYPNM

SEQ ID NO: 61452 - protein, 27 aa, Artificial Sequence
  Cyclic GFR-binding peptide
SSLSVLFFDDMGVPTLKVYPEGMSVAE

SEQ ID NO: 61453 - protein, 31 aa, Artificial Sequence
  Cyclic GFR-binding peptide
VPARLSSLSILFFDAANNVVLKVYPDMVVEA

SEQ ID NO: 61454 - protein, 28 aa, Artificial Sequence
  Cyclic GFR-binding peptide
VPEKMSSLSILFFDENKNVVLKVYPNMT

SEQ ID NO: 61455 - protein, 25 aa, Artificial Sequence
  Cyclic GFR-binding peptide
KTSSLSMLFFDNGRVLLLKVYPMIV

SEQ ID NO: 61456 - protein, 29 aa, Artificial Sequence
  Cyclic GFR-binding peptide
TEESSLSMLFFRIKPHQGQHLKVYPFLQH

SEQ ID NO: 61457 - protein, 34 aa, Artificial Sequence
  Cyclic GFR-binding peptide
  MOD_RES (3)..(4): Xaa is C or S
APXXVPQALSSLSILFFVGRKPKVLKVYPMIVRS

SEQ ID NO: 61458 - protein, 35 aa, Artificial Sequence
  Cyclic GFR-binding peptide
  MOD_RES (4)..(5): Xaa is C or S
PASXXVPARLSSLSILFFDAANNVVLKVYPDMVVE

SEQ ID NO: 61459 - protein, 40 aa, Artificial Sequence
  Cyclic GFR-binding peptide
  MOD_RES (5)..(6)..(38)..(40): Xaa is C or S
VPKPXXAPTKLSSLSVLFFDDSSNVILKVYPNMVVRSXGX

SEQ ID NO: 61460 - protein, 27 aa, Artificial Sequence
  Cyclic GFR-binding peptide
PQDLSSLSILFFVGRTPKVLKVYPMVV

SEQ ID NO: 61461 - protein, 30 aa, Artificial Sequence
  Cyclic GFR-binding peptide
HHSSLSVLFFEYVRKKPKLLKVYPRLEEHL

SEQ ID NO: 61462 - protein, 22 aa, Artificial Sequence
  Cyclic GFR-binding peptide
SSLSILFFDAANNVVLKVYPDM

SEQ ID NO: 61463 - protein, 29 aa, Artificial Sequence
  Cyclic GFR-binding peptide
PQALSSLSILFFVGRKPKVLKVYPMIVRS

SEQ ID NO: 61464 - protein, 33 aa, Artificial Sequence
  Cyclic GFR-binding peptide
  MOD_RES (4)..(5): Xaa is C or S
PEPXXVPEKMSSLSILFFDENKNVVLKVYPNMT

SEQ ID NO: 61465 - protein, 28 aa, Artificial Sequence
  Cyclic GFR-binding peptide
APTQLSSLSVLFFDDSSNVILKVYPNMV

SEQ ID NO: 61466 - protein, 27 aa, Artificial Sequence
  Cyclic GFR-binding peptide
RLSSLSILFFDSANNVVLKVYPDMVVE

SEQ ID NO: 61467 - protein, 33 aa, Artificial Sequence
  Cyclic GFR-binding peptide
  MOD_RES (6)..(7): Xaa is C or S
AAPASXXVPARLSSLSILFFDAANNVVLKVYPD

SEQ ID NO: 61468 - protein, 30 aa, Artificial Sequence
  Cyclic GFR-binding peptide
  MOD_RES (1)..(1): Xaa is C or S
XVPTKLSSLSVLFFDDMGVPTLKVYPEGMS

SEQ ID NO: 61469 - protein, 31 aa, Artificial Sequence
  Cyclic GFR-binding peptide
  MOD_RES (2)..(2): Xaa is C or S
KXQPSRVHHSSLSVLFFEYVRKKPKLLKVYP

SEQ ID NO: 61470 - protein, 39 aa, Artificial Sequence
  Cyclic GFR-binding peptide
  MOD_RES (7)..(7): Xaa is C or S
NDEGLEXVPTEESSLSMLFFRIKPHQGQHLKVYPFLQHN

SEQ ID NO: 61471 - protein, 30 aa, Artificial Sequence
  Cyclic GFR-binding peptide
  MOD_RES (3)..(4): Xaa is C or S
EPXXVPEKMSSLSILFFDENKNVVLKVYPN

SEQ ID NO: 61472 - protein, 37 aa, Artificial Sequence
  Cyclic GFR-binding peptide
  MOD_RES (2)..(3)..(34)..(36): Xaa is C or S
PXXVPQALSSLSILFFVGRKPKVLKVYPMIVRSXKXS

SEQ ID NO: 61473 - protein, 35 aa, Artificial Sequence
  Cyclic GFR-binding peptide
  MOD_RES (6)..(7): Xaa is C or S
TVPKPXXAPTQLSSLSVLFFDDSSNVILKVYPNMV

SEQ ID NO: 61474 - protein, 33 aa, Artificial Sequence
  Cyclic GFR-binding peptide
  MOD_RES (3)..(3): Xaa is C or S
LEXVPTEESSLSMLFFRIKPHQGQHLKVYPFLQ

SEQ ID NO: 61475 - protein, 23 aa, Artificial Sequence
  Cyclic GFR-binding peptide
RLSSLSILFFDAANNVVLKVYPD

SEQ ID NO: 61476 - protein, 24 aa, Artificial Sequence
  Cyclic GFR-binding peptide
SSLSILFFDSANNVVLKVYPDMVV

SEQ ID NO: 61477 - protein, 36 aa, Artificial Sequence
  Cyclic GFR-binding peptide
  MOD_RES (5)..(5): Xaa is C or S
TKPTXAPTKLSSLSVLFFDDSSNVILKVYPNMVVRS

SEQ ID NO: 61478 - protein, 35 aa, Artificial Sequence
  Cyclic GFR-binding peptide
  MOD_RES (4)..(5): Xaa is C or S
AGPXXTPTKMSSLSMLFFNDKQQIILKVYPGMVVD

SEQ ID NO: 61479 - protein, 36 aa, Artificial Sequence
  Cyclic GFR-binding peptide
  MOD_RES (1)..(33)..(35): Xaa is C or S
XTPTKMSSLSMLFFNDKQQIILKVYPGMVVDRXGXS

SEQ ID NO: 61480 - protein, 32 aa, Artificial Sequence
  Cyclic GFR-binding peptide
  MOD_RES (29)..(31): Xaa is C or S
QALSSLSILFFVGRKPKVLKVYPMIVRSXKXS

SEQ ID NO: 61481 - protein, 34 aa, Artificial Sequence
  Cyclic GFR-binding peptide
  MOD_RES (2)..(3): Xaa is C or S
PXXAPTQLSSLSVLFFDDSSNVILKVYPNMVVRA

SEQ ID NO: 61482 - protein, 31 aa, Artificial Sequence
  Cyclic GFR-binding peptide
  MOD_RES (1)..(1): Xaa is C or S
XVPEKMSSLSILFFDENKNVVLKVYPNMTVE

SEQ ID NO: 61483 - protein, 32 aa, Artificial Sequence
  Cyclic GFR-binding peptide
  MOD_RES (29)..(31): Xaa is C or S
QDLSSLSILFFVGRTPKVLKVYPMVVKSXKXS

SEQ ID NO: 61484 - protein, 33 aa, Artificial Sequence
  Cyclic GFR-binding peptide
  MOD_RES (4)..(5): Xaa is C or S
AGPXXTPTKMSSLSMLFFNDKQQIILKVYPGMV

SEQ ID NO: 61485 - protein, 34 aa, Artificial Sequence
  Cyclic GFR-binding peptide
  MOD_RES (5)..(6): Xaa is C or S
VGKAXXVPTKLSSLSVLFFDDMGVPTLKVYPEGM

SEQ ID NO: 61486 - protein, 34 aa, Artificial Sequence
  Cyclic GFR-binding peptide
  MOD_RES (6)..(7): Xaa is C or S
ASAAPXXVPQALSSLSILFFVGRKPKVLKVYPMI

SEQ ID NO: 61487 - protein, 25 aa, Artificial Sequence
  Cyclic GFR-binding peptide
QLSSLSVLFFDDSSNVILKVYPNMV

SEQ ID NO: 61488 - protein, 24 aa, Artificial Sequence
  Cyclic GFR-binding peptide
LSSLSVLFFDDSSNVILKVYPNMV

SEQ ID NO: 61489 - protein, 23 aa, Artificial Sequence
  Cyclic GFR-binding peptide
LSSLSILFFDSANNVVLKVYPDM

SEQ ID NO: 61490 - protein, 34 aa, Artificial Sequence
  Cyclic GFR-binding peptide
  MOD_RES (3)..(4): Xaa is C or S
KAXXVPTKLSSLSILFFDKGVVTYLKVYPGMAVS

SEQ ID NO: 61491 - protein, 30 aa, Artificial Sequence
  Cyclic GFR-binding peptide
  MOD_RES (2)..(3): Xaa is C or S
TXXAPVKTSSLSMLFFDNGRVLLLKVYPMI

SEQ ID NO: 61492 - protein, 32 aa, Artificial Sequence
  Cyclic GFR-binding peptide
  MOD_RES (30)..(32): Xaa is C or S
TKMSSLSMLFFNDKQQIILKVYPGMVVDRXGX

SEQ ID NO: 61493 - protein, 32 aa, Artificial Sequence
  Cyclic GFR-binding peptide
PTEESSLSMLFFRIKPHQGQHLKVYPFLQHNK

SEQ ID NO: 61494 - protein, 37 aa, Artificial Sequence
  Cyclic GFR-binding peptide
  MOD_RES (2)..(34)..(36): Xaa is C or S
TXAPTKLSSLSVLFFDDSSNVILKVYPNMVVRSXGXH

SEQ ID NO: 61495 - protein, 31 aa, Artificial Sequence
  Cyclic GFR-binding peptide
SRVHHSSLSVLFFEYVRKKPKLLKVYPRLEE

SEQ ID NO: 61496 - protein, 29 aa, Artificial Sequence
  Cyclic GFR-binding peptide
  MOD_RES (27)..(29): Xaa is C or S
SSLSILFFDAANNVVLKVYPDMVVEAXGX

SEQ ID NO: 61497 - protein, 27 aa, Artificial Sequence
  Cyclic GFR-binding peptide
  MOD_RES (26)..(26): Xaa is C or S
SSLSILFFVGRTPKVLKVYPMVVKSXK

SEQ ID NO: 61498 - protein, 41 aa, Artificial Sequence
  Cyclic GFR-binding peptide
  MOD_RES (5)..(6)..(38)..(40): Xaa is C or S
IPEPXXVPEKMSSLSILFFDENKNVVLKVYPNMTVESXAXR

SEQ ID NO: 61499 - protein, 33 aa, Artificial Sequence
  Cyclic GFR-binding peptide
  MOD_RES (1)..(33): Xaa is C or S
XTPTKMSSLSMLFFNDKQQIILKVYPGMVVDRX

SEQ ID NO: 61500 - protein, 35 aa, Artificial Sequence
  Cyclic GFR-binding peptide
  MOD_RES (1)..(33)..(35): Xaa is C or S
XVPARLSSLSILFFDAANNVVLKVYPDMVVEAXGX

SEQ ID NO: 61501 - protein, 35 aa, Artificial Sequence
  Cyclic GFR-binding peptide
  MOD_RES (4)..(5): Xaa is C or S
ASPXXVSQDLSSLSILFFIGKTPKILKVYPMIVKS

SEQ ID NO: 61502 - protein, 42 aa, Artificial Sequence
  Cyclic GFR-binding peptide
  MOD_RES (5)..(42): Xaa is C or S
SSVKXQPSRVHHSSLSVLFFEYVRKKPKLLKVYPRLEEHLEX

SEQ ID NO: 61503 - protein, 27 aa, Artificial Sequence
  Cyclic GFR-binding peptide
VPTRLSSLSILFFDSANNVVLKVYPDM

SEQ ID NO: 61504 - protein, 30 aa, Artificial Sequence
  Cyclic GFR-binding peptide
  MOD_RES (1)..(1): Xaa is C or S
XVPTEESSLSMLFFRIKPHQGQHLKVYPFL

SEQ ID NO: 61505 - protein, 28 aa, Artificial Sequence
  Cyclic GFR-binding peptide
  MOD_RES (2)..(3): Xaa is C or S
AXXAPTKLSSLSVLFFDSSNNVILKVYP

SEQ ID NO: 61506 - protein, 27 aa, Artificial Sequence
  Cyclic GFR-binding peptide
TQLSSLSVLFFDDSSNVILKVYPNMVV

SEQ ID NO: 61507 - protein, 29 aa, Artificial Sequence
  Cyclic GFR-binding peptide
SQDLSSLSILFFIGKTPKILKVYPMIVKS

SEQ ID NO: 61508 - protein, 31 aa, Artificial Sequence
  Cyclic GFR-binding peptide
  MOD_RES (5)..(6): Xaa is C or S
ASKAXXVPTKLSSLSILFFDKGVVTYLKVYP

SEQ ID NO: 61509 - protein, 38 aa, Artificial Sequence
  Cyclic GFR-binding peptide
  MOD_RES (3)..(4)..(36)..(38): Xaa is C or S
KAXXAPTKLSSLSVLFFDSSNNVILKVYPNMVVKAXGX

SEQ ID NO: 61510 - protein, 34 aa, Artificial Sequence
  Cyclic GFR-binding peptide
  MOD_RES (34)..(34): Xaa is C or S
VPTEESSLSMLFFRIKPHQGQHLKVYPFLQHNKX

SEQ ID NO: 61511 - protein, 22 aa, Artificial Sequence
  Cyclic GFR-binding peptide
SSLSVLFFEYVRKKPKLLKVYP

SEQ ID NO: 61512 - protein, 25 aa, Artificial Sequence
  Cyclic GFR-binding peptide
SSLSILFFDENKNVVLKVYPNMTVE

SEQ ID NO: 61513 - protein, 30 aa, Artificial Sequence
  Cyclic GFR-binding peptide
  MOD_RES (29)..(29): Xaa is C or S
KMSSLSMLFFNDKQQIILKVYPGMVVDRXG

SEQ ID NO: 61514 - protein, 38 aa, Artificial Sequence
  Cyclic GFR-binding peptide
  MOD_RES (6)..(38): Xaa is C or S
VTKPTXAPTKLSSLSVLFFDDSSNVILKVYPNMVVRSX

SEQ ID NO: 61515 - protein, 25 aa, Artificial Sequence
  Cyclic GFR-binding peptide
PTRLSSLSILFFDSANNVVLKVYPD

SEQ ID NO: 61516 - protein, 22 aa, Artificial Sequence
  Cyclic GFR-binding peptide
KTSSLSMLFFDNGRVLLLKVYP

SEQ ID NO: 61517 - protein, 32 aa, Artificial Sequence
  Cyclic GFR-binding peptide
  MOD_RES (6)..(7): Xaa is C or S
AVPKAXXAPTKLSSLSVLFFDSSNNVILKVYP

SEQ ID NO: 61518 - protein, 34 aa, Artificial Sequence
  Cyclic GFR-binding peptide
  MOD_RES (1)..(2)..(34): Xaa is C or S
XXVPARLSSLSILFFDAANNVVLKVYPDMVVEAX

SEQ ID NO: 61519 - protein, 28 aa, Artificial Sequence
  Cyclic GFR-binding peptide
VPTEESSLSMLFFRIKPHQGQHLKVYPF

SEQ ID NO: 61520 - protein, 28 aa, Artificial Sequence
  Cyclic GFR-binding peptide
SRVHHSSLSVLFFEYVRKKPKLLKVYPR

SEQ ID NO: 61521 - protein, 32 aa, Artificial Sequence
  Cyclic GFR-binding peptide
  MOD_RES (31)..(31): Xaa is C or S
VPQDLSSLSILFFVGRTPKVLKVYPMVVKSXK

SEQ ID NO: 61522 - protein, 24 aa, Artificial Sequence
  Cyclic GFR-binding peptide
LSSLSILFFVGRKPKVLKVYPMIV

SEQ ID NO: 61523 - protein, 30 aa, Artificial Sequence
  Cyclic GFR-binding peptide
  MOD_RES (3)..(4): Xaa is C or S
GPXXTPTKMSSLSMLFFNDKQQIILKVYPG

SEQ ID NO: 61524 - protein, 25 aa, Artificial Sequence
  Cyclic GFR-binding peptide
RLSSLSILFFDAANNVVLKVYPDMV

SEQ ID NO: 61525 - protein, 41 aa, Artificial Sequence
  Cyclic GFR-binding peptide
  MOD_RES (7)..(39)..(41): Xaa is C or S
HVTKPTXAPTKLSSLSVLFFDDSSNVILKVYPNMVVRSXGX

SEQ ID NO: 61526 - protein, 22 aa, Artificial Sequence
  Cyclic GFR-binding peptide
DLSSLSILFFVGRTPKVLKVYP

SEQ ID NO: 61527 - protein, 26 aa, Artificial Sequence
  Cyclic GFR-binding peptide
SSLSILFFDENKNVVLKVYPNMTVES

SEQ ID NO: 61528 - protein, 39 aa, Artificial Sequence
  Cyclic GFR-binding peptide
  MOD_RES (4)..(4): Xaa is C or S
SVKXQPSRVHHSSLSVLFFEYVRKKPKLLKVYPRLEEHL

SEQ ID NO: 61529 - protein, 30 aa, Artificial Sequence
  Cyclic GFR-binding peptide
  MOD_RES (30)..(30): Xaa is C or S
KLSSLSVLFFDDMGVPTLKVYPEGMSVAEX

SEQ ID NO: 61530 - protein, 25 aa, Artificial Sequence
  Cyclic GFR-binding peptide
KMSSLSILFFDENKNVVLKVYPNMT

SEQ ID NO: 61531 - protein, 38 aa, Artificial Sequence
  Cyclic GFR-binding peptide
  MOD_RES (3)..(4)..(36)..(38): Xaa is C or S
PTXXVPTRLSSLSILFFDSANNVVLKVYPDMVVESXGX

SEQ ID NO: 61532 - protein, 25 aa, Artificial Sequence
  Cyclic GFR-binding peptide
VPTKLSSLSVLFFDDMGVPTLKVYP

SEQ ID NO: 61533 - protein, 32 aa, Artificial Sequence
  Cyclic GFR-binding peptide
  MOD_RES (1)..(2): Xaa is C or S
XXVPEKMSSLSILFFDENKNVVLKVYPNMTVE

SEQ ID NO: 61534 - protein, 27 aa, Artificial Sequence
  Cyclic GFR-binding peptide
LSSLSVLFFDDSSNVILKVYPNMVVRS

SEQ ID NO: 61535 - protein, 26 aa, Artificial Sequence
  Cyclic GFR-binding peptide
TRLSSLSILFFDSANNVVLKVYPDMV

SEQ ID NO: 61536 - protein, 28 aa, Artificial Sequence
  Cyclic GFR-binding peptide
PTKLSSLSILFFDKGVVTYLKVYPGMAV

SEQ ID NO: 61537 - protein, 37 aa, Artificial Sequence
  Cyclic GFR-binding peptide
  MOD_RES (6)..(7): Xaa is C or S
KASKAXXVPTKLSSLSILFFDKGVVTYLKVYPGMAVS

SEQ ID NO: 61538 - protein, 37 aa, Artificial Sequence
  Cyclic GFR-binding peptide
  MOD_RES (4)..(36): Xaa is C or S
KPTXAPTKLSSLSVLFFDDSSNVILKVYPNMVVRSXG

SEQ ID NO: 61539 - protein, 27 aa, Artificial Sequence
  Cyclic GFR-binding peptide
LSSLSVLFFDDSSNVILKVYPNMVVRA

SEQ ID NO: 61540 - protein, 29 aa, Artificial Sequence
  Cyclic GFR-binding peptide
  MOD_RES (27)..(29): Xaa is C or S
SSLSILFFDKGVVTYLKVYPGMAVSEXGX

SEQ ID NO: 61541 - protein, 33 aa, Artificial Sequence
  Cyclic GFR-binding peptide
  MOD_RES (1)..(2)..(33): Xaa is C or S
XXAPVKTSSLSMLFFDNGRVLLLKVYPMIVEEX

SEQ ID NO: 61542 - protein, 27 aa, Artificial Sequence
  Cyclic GFR-binding peptide
KLSSLSILFFDKGVVTYLKVYPGMAVS

SEQ ID NO: 61543 - protein, 33 aa, Artificial Sequence
  Cyclic GFR-binding peptide
  MOD_RES (2)..(3): Xaa is C or S
PXXVPEKMSSLSILFFDENKNVVLKVYPNMTVE

SEQ ID NO: 61544 - protein, 33 aa, Artificial Sequence
  Cyclic GFR-binding peptide
  MOD_RES (1)..(2): Xaa is C or S
XXVPARLSSLSILFFDAANNVVLKVYPDMVVEA

SEQ ID NO: 61545 - protein, 25 aa, Artificial Sequence
  Cyclic GFR-binding peptide
SSLSMLFFRIKPHQGQHLKVYPFLQ

SEQ ID NO: 61546 - protein, 37 aa, Artificial Sequence
  Cyclic GFR-binding peptide
  MOD_RES (4)..(4): Xaa is C or S
SVKXQPSRVHHSSLSVLFFEYVRKKPKLLKVYPRLEE

SEQ ID NO: 61547 - protein, 28 aa, Artificial Sequence
  Cyclic GFR-binding peptide
  MOD_RES (1)..(1): Xaa is C or S
XVPEKMSSLSILFFDENKNVVLKVYPNM

SEQ ID NO: 61548 - protein, 23 aa, Artificial Sequence
  Cyclic GFR-binding peptide
KMSSLSILFFDENKNVVLKVYPN

SEQ ID NO: 61549 - protein, 33 aa, Artificial Sequence
  Cyclic GFR-binding peptide
  MOD_RES (2)..(2): Xaa is C or S
KXQPSRVHHSSLSVLFFEYVRKKPKLLKVYPRL

SEQ ID NO: 61550 - protein, 25 aa, Artificial Sequence
  Cyclic GFR-binding peptide
TRLSSLSILFFDSANNVVLKVYPDM

SEQ ID NO: 61551 - protein, 26 aa, Artificial Sequence
  Cyclic GFR-binding peptide
  MOD_RES (26)..(26): Xaa is C or S
SSLSILFFVGRTPKVLKVYPMVVKSX

SEQ ID NO: 61552 - protein, 31 aa, Artificial Sequence
  Cyclic GFR-binding peptide
  MOD_RES (4)..(4): Xaa is C or S
KPTXAPTKLSSLSVLFFDDSSNVILKVYPNM

SEQ ID NO: 61553 - protein, 32 aa, Artificial Sequence
  Cyclic GFR-binding peptide
  MOD_RES (2)..(3): Xaa is C or S
AXXVPTKLSSLSILFFDKGVVTYLKVYPGMAV

SEQ ID NO: 61554 - protein, 34 aa, Artificial Sequence
  Cyclic GFR-binding peptide
  MOD_RES (1)..(2)..(34): Xaa is C or S
XXVPTRLSSLSILFFDSANNVVLKVYPDMVVESX

SEQ ID NO: 61555 - protein, 32 aa, Artificial Sequence
  Cyclic GFR-binding peptide
  MOD_RES (32)..(32): Xaa is C or S
VPEKMSSLSILFFDENKNVVLKVYPNMTVESX

SEQ ID NO: 61556 - protein, 24 aa, Artificial Sequence
  Cyclic GFR-binding peptide
EKMSSLSILFFDENKNVVLKVYPN

SEQ ID NO: 61557 - protein, 33 aa, Artificial Sequence
  Cyclic GFR-binding peptide
  MOD_RES (3)..(4): Xaa is C or S
KAXXVPTKLSSLSILFFDKGVVTYLKVYPGMAV

SEQ ID NO: 61558 - protein, 28 aa, Artificial Sequence
  Cyclic GFR-binding peptide
  MOD_RES (2)..(3): Xaa is C or S
TXXAPVKTSSLSMLFFDNGRVLLLKVYP

SEQ ID NO: 61559 - protein, 25 aa, Artificial Sequence
  Cyclic GFR-binding peptide
KLSSLSVLFFDDMGVPTLKVYPEGM

SEQ ID NO: 61560 - protein, 34 aa, Artificial Sequence
  Cyclic GFR-binding peptide
  MOD_RES (32)..(34): Xaa is C or S
APTKLSSLSVLFFDSSNNVILKVYPNMVVKAXGX

SEQ ID NO: 61561 - protein, 33 aa, Artificial Sequence
  Cyclic GFR-binding peptide
  MOD_RES (5)..(5): Xaa is C or S
EGLEXVPTEESSLSMLFFRIKPHQGQHLKVYPF

SEQ ID NO: 61562 - protein, 37 aa, Artificial Sequence
  Cyclic GFR-binding peptide
  MOD_RES (5)..(6): Xaa is C or S
TPPTXXVPTRLSSLSILFFDSANNVVLKVYPDMVVES

SEQ ID NO: 61563 - protein, 40 aa, Artificial Sequence
  Cyclic GFR-binding peptide
  MOD_RES (6)..(7)..(38)..(40): Xaa is C or S
RVPSTXXAPVKTSSLSMLFFDNGRVLLLKVYPMIVEEXGX

SEQ ID NO: 61564 - protein, 26 aa, Artificial Sequence
  Cyclic GFR-binding peptide
VPARLSSLSILFFDAANNVVLKVYPD

SEQ ID NO: 61565 - protein, 31 aa, Artificial Sequence
  Cyclic GFR-binding peptide
  MOD_RES (30)..(30): Xaa is C or S
TRLSSLSILFFDSANNVVLKVYPDMVVESXG

SEQ ID NO: 61566 - protein, 31 aa, Artificial Sequence
  Cyclic GFR-binding peptide
  MOD_RES (31)..(31): Xaa is C or S
PTKMSSLSMLFFNDKQQIILKVYPGMVVDRX

SEQ ID NO: 61567 - protein, 33 aa, Artificial Sequence
  Cyclic GFR-binding peptide
  MOD_RES (2)..(3): Xaa is C or S
AXXAPTKLSSLSVLFFDSSNNVILKVYPNMVVK

SEQ ID NO: 61568 - protein, 32 aa, Artificial Sequence
  Cyclic GFR-binding peptide
  MOD_RES (6)..(7): Xaa is C or S
RVPSTXXAPVKTSSLSMLFFDNGRVLLLKVYP

SEQ ID NO: 61569 - protein, 25 aa, Artificial Sequence
  Cyclic GFR-binding peptide
ALSSLSILFFVGRKPKVLKVYPMIV

SEQ ID NO: 61570 - protein, 30 aa, Artificial Sequence
  Cyclic GFR-binding peptide
  MOD_RES (4)..(5): Xaa is C or S
GKAXXVPTKLSSLSVLFFDDMGVPTLKVYP

SEQ ID NO: 61571 - protein, 33 aa, Artificial Sequence
  Cyclic GFR-binding peptide
  MOD_RES (30)..(32): Xaa is C or S
PQDLSSLSILFFVGRTPKVLKVYPMVVKSXKXS

SEQ ID NO: 61572 - protein, 27 aa, Artificial Sequence
  Cyclic GFR-binding peptide
  MOD_RES (1)..(1): Xaa is C or S
XVPTKLSSLSILFFDKGVVTYLKVYPG

SEQ ID NO: 61573 - protein, 31 aa, Artificial Sequence
  Cyclic GFR-binding peptide
  MOD_RES (1)..(1): Xaa is C or S
XVPTRLSSLSILFFDSANNVVLKVYPDMVVE

SEQ ID NO: 61574 - protein, 30 aa, Artificial Sequence
  Cyclic GFR-binding peptide
  MOD_RES (30)..(30): Xaa is C or S
TKLSSLSVLFFDDSSNVILKVYPNMVVRSX

SEQ ID NO: 61575 - protein, 32 aa, Artificial Sequence
  Cyclic GFR-binding peptide
  MOD_RES (3)..(4): Xaa is C or S
KPXXAPTKLSSLSVLFFDDSSNVILKVYPNMV

SEQ ID NO: 61576 - protein, 28 aa, Artificial Sequence
  Cyclic GFR-binding peptide
  MOD_RES (26)..(28): Xaa is C or S
SSLSILFFVGRTPKVLKVYPMVVKSXKX

SEQ ID NO: 61577 - protein, 23 aa, Artificial Sequence
  Cyclic GFR-binding peptide
MSSLSILFFDENKNVVLKVYPNM

SEQ ID NO: 61578 - protein, 30 aa, Artificial Sequence
  Cyclic GFR-binding peptide
PTRLSSLSILFFDSANNVVLKVYPDMVVES

SEQ ID NO: 61579 - protein, 25 aa, Artificial Sequence
  Cyclic GFR-binding peptide
MSSLSMLFFNDKQQIILKVYPGMVV

SEQ ID NO: 61580 - protein, 39 aa, Artificial Sequence
  Cyclic GFR-binding peptide
  MOD_RES (4)..(5)..(37)..(39): Xaa is C or S
PKPXXAPTKLSSLSVLFFDDSSNVILKVYPNMVVRSXGX

SEQ ID NO: 61581 - protein, 32 aa, Artificial Sequence
  Cyclic GFR-binding peptide
  MOD_RES (6)..(7): Xaa is C or S
ASASPXXVSQDLSSLSILFFIGKTPKILKVYP

SEQ ID NO: 61582 - protein, 30 aa, Artificial Sequence
  Cyclic GFR-binding peptide
  MOD_RES (4)..(4): Xaa is C or S
KPTXAPTKLSSLSVLFFDDSSNVILKVYPN

SEQ ID NO: 61583 - protein, 24 aa, Artificial Sequence
  Cyclic GFR-binding peptide
QLSSLSVLFFDDSSNVILKVYPNM

SEQ ID NO: 61584 - protein, 33 aa, Artificial Sequence
  Cyclic GFR-binding peptide
  MOD_RES (32)..(32): Xaa is C or S
TPTKMSSLSMLFFNDKQQIILKVYPGMVVDRXG

SEQ ID NO: 61585 - protein, 29 aa, Artificial Sequence
  Cyclic GFR-binding peptide
  MOD_RES (28)..(28): Xaa is C or S
DLSSLSILFFVGRTPKVLKVYPMVVKSXK

SEQ ID NO: 61586 - protein, 35 aa, Artificial Sequence
  Cyclic GFR-binding peptide
  MOD_RES (1)..(2)..(34): Xaa is C or S
XXAPTKLSSLSVLFFDDSSNVILKVYPNMVVRSXG

SEQ ID NO: 61587 - protein, 20 aa, Artificial Sequence
  Cyclic GFR-binding peptide
SSLSILFFVGRTPKVLKVYP

SEQ ID NO: 61588 - protein, 32 aa, Artificial Sequence
  Cyclic GFR-binding peptide
  MOD_RES (4)..(4): Xaa is C or S
KPTXAPTKLSSLSVLFFDDSSNVILKVYPNMV

SEQ ID NO: 61589 - protein, 31 aa, Artificial Sequence
  Cyclic GFR-binding peptide
  MOD_RES (29)..(31): Xaa is C or S
KLSSLSVLFFDSSNNVILKVYPNMVVKAXGX

SEQ ID NO: 61590 - protein, 27 aa, Artificial Sequence
  Cyclic GFR-binding peptide
APTKLSSLSVLFFDDSSNVILKVYPNM

SEQ ID NO: 61591 - protein, 27 aa, Artificial Sequence
  Cyclic GFR-binding peptide
TRLSSLSILFFDSANNVVLKVYPDMVV

SEQ ID NO: 61592 - protein, 28 aa, Artificial Sequence
  Cyclic GFR-binding peptide
  MOD_RES (28)..(28): Xaa is C or S
LSSLSILFFDKGVVTYLKVYPGMAVSEX

SEQ ID NO: 61593 - protein, 36 aa, Artificial Sequence
  Cyclic GFR-binding peptide
  MOD_RES (6)..(6): Xaa is C or S
VTKPTXAPTKLSSLSVLFFDDSSNVILKVYPNMVVR

SEQ ID NO: 61594 - protein, 28 aa, Artificial Sequence
  Cyclic GFR-binding peptide
PTRLSSLSILFFDSANNVVLKVYPDMVV

SEQ ID NO: 61595 - protein, 35 aa, Artificial Sequence
  Cyclic GFR-binding peptide
  MOD_RES (6)..(7): Xaa is C or S
HVPKPXXAPTKLSSLSVLFFDDSSNVILKVYPNMV

SEQ ID NO: 61596 - protein, 34 aa, Artificial Sequence
  Cyclic GFR-binding peptide
  MOD_RES (6)..(7): Xaa is C or S
HVPKPXXAPTKLSSLSVLFFDDSSNVILKVYPNM

SEQ ID NO: 61597 - protein, 31 aa, Artificial Sequence
  Cyclic GFR-binding peptide
  MOD_RES (5)..(6): Xaa is C or S
IPEPXXVPEKMSSLSILFFDENKNVVLKVYP

SEQ ID NO: 61598 - protein, 27 aa, Artificial Sequence
  Cyclic GFR-binding peptide
PTKMSSLSMLFFNDKQQIILKVYPGMV

SEQ ID NO: 61599 - protein, 38 aa, Artificial Sequence
  Cyclic GFR-binding peptide
  MOD_RES (3)..(4)..(36)..(38): Xaa is C or S
KPXXAPTKLSSLSVLFFDDSSNVILKVYPNMVVRSXGX

SEQ ID NO: 61600 - protein, 35 aa, Artificial Sequence
  Cyclic GFR-binding peptide
  MOD_RES (5)..(6): Xaa is C or S
VPKAXXAPTKLSSLSVLFFDSSNNVILKVYPNMVV

SEQ ID NO: 61601 - protein, 28 aa, Artificial Sequence
  Cyclic GFR-binding peptide
  MOD_RES (27)..(27): Xaa is C or S
SSLSILFFDSANNVVLKVYPDMVVESXG

SEQ ID NO: 61602 - protein, 33 aa, Artificial Sequence
  Cyclic GFR-binding peptide
  MOD_RES (4)..(5): Xaa is C or S
PSTXXAPVKTSSLSMLFFDNGRVLLLKVYPMIV

SEQ ID NO: 61603 - protein, 37 aa, Artificial Sequence
  Cyclic GFR-binding peptide
  MOD_RES (5)..(6)..(37): Xaa is C or S
SASPXXVPQDLSSLSILFFVGRTPKVLKVYPMVVKSX

SEQ ID NO: 61604 - protein, 29 aa, Artificial Sequence
  Cyclic GFR-binding peptide
  MOD_RES (2)..(3): Xaa is C or S
PXXVSQDLSSLSILFFIGKTPKILKVYPM

SEQ ID NO: 61605 - protein, 32 aa, Artificial Sequence
  Cyclic GFR-binding peptide
  MOD_RES (3)..(4): Xaa is C or S
STXXAPVKTSSLSMLFFDNGRVLLLKVYPMIV

SEQ ID NO: 61606 - protein, 42 aa, Artificial Sequence
  Cyclic GFR-binding peptide
  MOD_RES (6)..(7)..(39)..(41): Xaa is C or S
HVPKPXXAPTKLSSLSVLFFDDSSNVILKVYPNMVVRSXGXH

SEQ ID NO: 61607 - protein, 30 aa, Artificial Sequence
  Cyclic GFR-binding peptide
  MOD_RES (2)..(3): Xaa is C or S
AXXVPTKLSSLSVLFFDDMGVPTLKVYPEG

SEQ ID NO: 61608 - protein, 32 aa, Artificial Sequence
  Cyclic GFR-binding peptide
  MOD_RES (3)..(4): Xaa is C or S
EPXXVPEKMSSLSILFFDENKNVVLKVYPNMT

SEQ ID NO: 61609 - protein, 31 aa, Artificial Sequence
  Cyclic GFR-binding peptide
  MOD_RES (31)..(31): Xaa is C or S
HSSLSVLFFEYVRKKPKLLKVYPRLEEHLEX

SEQ ID NO: 61610 - protein, 36 aa, Artificial Sequence
  Cyclic GFR-binding peptide
  MOD_RES (2)..(3)..(35): Xaa is C or S
AXXVPTKLSSLSILFFDKGVVTYLKVYPGMAVSEXG

SEQ ID NO: 61611 - protein, 23 aa, Artificial Sequence
  Cyclic GFR-binding peptide
LSSLSVLFFDDSSNVILKVYPNM

SEQ ID NO: 61612 - protein, 33 aa, Artificial Sequence
  Cyclic GFR-binding peptide
  MOD_RES (30)..(32): Xaa is C or S
SQDLSSLSILFFIGKTPKILKVYPMIVKSXKXS

SEQ ID NO: 61613 - protein, 32 aa, Artificial Sequence
  Cyclic GFR-binding peptide
  MOD_RES (32)..(32): Xaa is C or S
APTKLSSLSVLFFDSSNNVILKVYPNMVVKAX

SEQ ID NO: 61614 - protein, 30 aa, Artificial Sequence
  Cyclic GFR-binding peptide
  MOD_RES (1)..(1): Xaa is C or S
XVSQDLSSLSILFFIGKTPKILKVYPMIVK

SEQ ID NO: 61615 - protein, 39 aa, Artificial Sequence
  Cyclic GFR-binding peptide
  MOD_RES (37)..(39): Xaa is C or S
QPSRVHHSSLSVLFFEYVRKKPKLLKVYPRLEEHLEXAX

SEQ ID NO: 61616 - protein, 37 aa, Artificial Sequence
  Cyclic GFR-binding peptide
  MOD_RES (34)..(36): Xaa is C or S
RVHHSSLSVLFFEYVRKKPKLLKVYPRLEEHLEXAXA

SEQ ID NO: 61617 - protein, 43 aa, Artificial Sequence
  Cyclic GFR-binding peptide
  MOD_RES (6)..(7)..(40)..(42): Xaa is C or S
KVGKAXXVPTKLSSLSVLFFDDMGVPTLKVYPEGMSVAEXGXR

SEQ ID NO: 61618 - protein, 30 aa, Artificial Sequence
  Cyclic GFR-binding peptide
  MOD_RES (28)..(30): Xaa is C or S
SSLSVLFFDDMGVPTLKVYPEGMSVAEXGX

SEQ ID NO: 61619 - protein, 31 aa, Artificial Sequence
  Cyclic GFR-binding peptide
  MOD_RES (28)..(30): Xaa is C or S
LSSLSILFFDKGVVTYLKVYPGMAVSEXGXR

SEQ ID NO: 61620 - protein, 29 aa, Artificial Sequence
  Cyclic GFR-binding peptide
PTEESSLSMLFFRIKPHQGQHLKVYPFLQ

SEQ ID NO: 61621 - protein, 21 aa, Artificial Sequence
  Cyclic GFR-binding peptide
MSSLSMLFFNDKQQIILKVYP

SEQ ID NO: 61622 - protein, 41 aa, Artificial Sequence
  Cyclic GFR-binding peptide
  MOD_RES (2)..(39)..(41): Xaa is C or S
KXQPSRVHHSSLSVLFFEYVRKKPKLLKVYPRLEEHLEXAX

SEQ ID NO: 61623 - protein, 26 aa, Artificial Sequence
  Cyclic GFR-binding peptide
PTKLSSLSVLFFDDMGVPTLKVYPEG

SEQ ID NO: 61624 - protein, 27 aa, Artificial Sequence
  Cyclic GFR-binding peptide
PVKTSSLSMLFFDNGRVLLLKVYPMIV

SEQ ID NO: 61625 - protein, 32 aa, Artificial Sequence
  Cyclic GFR-binding peptide
  MOD_RES (2)..(3): Xaa is C or S
TXXAPVKTSSLSMLFFDNGRVLLLKVYPMIVE

SEQ ID NO: 61626 - protein, 39 aa, Artificial Sequence
  Cyclic GFR-binding peptide
  MOD_RES (5)..(6)..(39): Xaa is C or S
VGKAXXVPTKLSSLSVLFFDDMGVPTLKVYPEGMSVAEX

SEQ ID NO: 61627 - protein, 28 aa, Artificial Sequence
  Cyclic GFR-binding peptide
  MOD_RES (1)..(1): Xaa is C or S
XAPTQLSSLSVLFFDDSSNVILKVYPNM

SEQ ID NO: 61628 - protein, 31 aa, Artificial Sequence
  Cyclic GFR-binding peptide
RVHHSSLSVLFFEYVRKKPKLLKVYPRLEEH

SEQ ID NO: 61629 - protein, 22 aa, Artificial Sequence
  Cyclic GFR-binding peptide
SSLSILFFDKGVVTYLKVYPGM

SEQ ID NO: 61630 - protein, 40 aa, Artificial Sequence
  Cyclic GFR-binding peptide
  MOD_RES (6)..(7)..(39): Xaa is C or S
AAPASXXVPARLSSLSILFFDAANNVVLKVYPDMVVEAXG

SEQ ID NO: 61631 - protein, 27 aa, Artificial Sequence
  Cyclic GFR-binding peptide
  MOD_RES (2)..(2): Xaa is C or S
TXAPTKLSSLSVLFFDDSSNVILKVYP

SEQ ID NO: 61632 - protein, 34 aa, Artificial Sequence
  Cyclic GFR-binding peptide
  MOD_RES (4)..(5): Xaa is C or S
PEPXXVPEKMSSLSILFFDENKNVVLKVYPNMTV

SEQ ID NO: 61633 - protein, 33 aa, Artificial Sequence
  Cyclic GFR-binding peptide
  MOD_RES (4)..(5): Xaa is C or S
PKPXXAPTKLSSLSVLFFDDSSNVILKVYPNMV

SEQ ID NO: 61634 - protein, 34 aa, Artificial Sequence
  Cyclic GFR-binding peptide
  MOD_RES (33)..(33): Xaa is C or S
VHHSSLSVLFFEYVRKKPKLLKVYPRLEEHLEXA

SEQ ID NO: 61635 - protein, 24 aa, Artificial Sequence
  Cyclic GFR-binding peptide
PVKTSSLSMLFFDNGRVLLLKVYP

SEQ ID NO: 61636 - protein, 37 aa, Artificial Sequence
  Cyclic GFR-binding peptide
  MOD_RES (3)..(4)..(35)..(37): Xaa is C or S
STXXAPVKTSSLSMLFFDNGRVLLLKVYPMIVEEXGX

SEQ ID NO: 61637 - protein, 32 aa, Artificial Sequence
  Cyclic GFR-binding peptide
  MOD_RES (4)..(5): Xaa is C or S
PASXXVPARLSSLSILFFDAANNVVLKVYPDM

SEQ ID NO: 61638 - protein, 32 aa, Artificial Sequence
  Cyclic GFR-binding peptide
  MOD_RES (4)..(5): Xaa is C or S
ASPXXVPQDLSSLSILFFVGRTPKVLKVYPMV

SEQ ID NO: 61639 - protein, 37 aa, Artificial Sequence
  Cyclic GFR-binding peptide
  MOD_RES (6)..(7): Xaa is C or S
STPPTXXVPTRLSSLSILFFDSANNVVLKVYPDMVVE

SEQ ID NO: 61640 - protein, 24 aa, Artificial Sequence
  Cyclic GFR-binding peptide
PTQLSSLSVLFFDDSSNVILKVYP

SEQ ID NO: 61641 - protein, 28 aa, Artificial Sequence
  Cyclic GFR-binding peptide
LSSLSVLFFDDMGVPTLKVYPEGMSVAE

SEQ ID NO: 61642 - protein, 27 aa, Artificial Sequence
  Cyclic GFR-binding peptide
TKMSSLSMLFFNDKQQIILKVYPGMVV

SEQ ID NO: 61643 - protein, 31 aa, Artificial Sequence
  Cyclic GFR-binding peptide
  MOD_RES (1)..(1): Xaa is C or S
XVPTKLSSLSILFFDKGVVTYLKVYPGMAVS

SEQ ID NO: 61644 - protein, 30 aa, Artificial Sequence
  Cyclic GFR-binding peptide
  MOD_RES (29)..(29): Xaa is C or S
KLSSLSVLFFDSSNNVILKVYPNMVVKAXG

SEQ ID NO: 61645 - protein, 36 aa, Artificial Sequence
  Cyclic GFR-binding peptide
  MOD_RES (6)..(7): Xaa is C or S
TVPKPXXAPTQLSSLSVLFFDDSSNVILKVYPNMVV

SEQ ID NO: 61646 - protein, 35 aa, Artificial Sequence
  Cyclic GFR-binding peptide
  MOD_RES (3)..(4)..(35): Xaa is C or S
STXXAPVKTSSLSMLFFDNGRVLLLKVYPMIVEEX

SEQ ID NO: 61647 - protein, 30 aa, Artificial Sequence
  Cyclic GFR-binding peptide
  MOD_RES (2)..(3): Xaa is C or S
PXXVSQDLSSLSILFFIGKTPKILKVYPMI

SEQ ID NO: 61648 - protein, 34 aa, Artificial Sequence
  Cyclic GFR-binding peptide
  MOD_RES (34)..(34): Xaa is C or S
RVHHSSLSVLFFEYVRKKPKLLKVYPRLEEHLEX

SEQ ID NO: 61649 - protein, 33 aa, Artificial Sequence
  Cyclic GFR-binding peptide
  MOD_RES (1)..(1): Xaa is C or S
XQPSRVHHSSLSVLFFEYVRKKPKLLKVYPRLE

SEQ ID NO: 61650 - protein, 32 aa, Artificial Sequence
  Cyclic GFR-binding peptide
  MOD_RES (1)..(32): Xaa is C or S
XVSQDLSSLSILFFIGKTPKILKVYPMIVKSX

SEQ ID NO: 61651 - protein, 35 aa, Artificial Sequence
  Cyclic GFR-binding peptide
  MOD_RES (2)..(34): Xaa is C or S
TXAPTKLSSLSVLFFDDSSNVILKVYPNMVVRSXG

SEQ ID NO: 61652 - protein, 26 aa, Artificial Sequence
  Cyclic GFR-binding peptide
KLSSLSILFFDKGVVTYLKVYPGMAV

SEQ ID NO: 61653 - protein, 26 aa, Artificial Sequence
  Cyclic GFR-binding peptide
VPTKLSSLSVLFFDDMGVPTLKVYPE

SEQ ID NO: 61654 - protein, 33 aa, Artificial Sequence
  Cyclic GFR-binding peptide
  MOD_RES (1)..(33): Xaa is C or S
XVPTRLSSLSILFFDSANNVVLKVYPDMVVESX

SEQ ID NO: 61655 - protein, 35 aa, Artificial Sequence
  Cyclic GFR-binding peptide
  MOD_RES (4)..(4): Xaa is C or S
GLEXVPTEESSLSMLFFRIKPHQGQHLKVYPFLQH

SEQ ID NO: 61656 - protein, 36 aa, Artificial Sequence
  Cyclic GFR-binding peptide
  MOD_RES (4)..(5): Xaa is C or S
PKPXXAPTKLSSLSVLFFDDSSNVILKVYPNMVVRS

SEQ ID NO: 61657 - protein, 26 aa, Artificial Sequence
  Cyclic GFR-binding peptide
  MOD_RES (1)..(1): Xaa is C or S
XVPTRLSSLSILFFDSANNVVLKVYP

SEQ ID NO: 61658 - protein, 23 aa, Artificial Sequence
  Cyclic GFR-binding peptide
LSSLSVLFFDDMGVPTLKVYPEG

SEQ ID NO: 61659 - protein, 31 aa, Artificial Sequence
  Cyclic GFR-binding peptide
  MOD_RES (29)..(31): Xaa is C or S
KLSSLSVLFFDDSSNVILKVYPNMVVRSXGX

SEQ ID NO: 61660 - protein, 38 aa, Artificial Sequence
  Cyclic GFR-binding peptide
  MOD_RES (4)..(5)..(37): Xaa is C or S
SKAXXVPTKLSSLSILFFDKGVVTYLKVYPGMAVSEXG

SEQ ID NO: 61661 - protein, 35 aa, Artificial Sequence
  Cyclic GFR-binding peptide
  MOD_RES (3)..(4): Xaa is C or S
KAXXAPTKLSSLSVLFFDSSNNVILKVYPNMVVKA

SEQ ID NO: 61662 - protein, 41 aa, Artificial Sequence
  Cyclic GFR-binding peptide
  MOD_RES (5)..(6)..(38)..(40): Xaa is C or S
VPKPXXAPTKLSSLSVLFFDDSSNVILKVYPNMVVRSXGXH

SEQ ID NO: 61663 - protein, 28 aa, Artificial Sequence
  Cyclic GFR-binding peptide
  MOD_RES (2)..(3): Xaa is C or S
PXXAPTQLSSLSVLFFDDSSNVILKVYP

SEQ ID NO: 61664 - protein, 30 aa, Artificial Sequence
  Cyclic GFR-binding peptide
  MOD_RES (4)..(5): Xaa is C or S
PKPXXAPTQLSSLSVLFFDDSSNVILKVYP

SEQ ID NO: 61665 - protein, 28 aa, Artificial Sequence
  Cyclic GFR-binding peptide
  MOD_RES (2)..(3): Xaa is C or S
PXXVSQDLSSLSILFFIGKTPKILKVYP

SEQ ID NO: 61666 - protein, 36 aa, Artificial Sequence
  Cyclic GFR-binding peptide
  MOD_RES (6)..(7): Xaa is C or S
KASKAXXVPTKLSSLSILFFDKGVVTYLKVYPGMAV

SEQ ID NO: 61667 - protein, 35 aa, Artificial Sequence
  Cyclic GFR-binding peptide
  MOD_RES (2)..(3)..(34): Xaa is C or S
TXXAPVKTSSLSMLFFDNGRVLLLKVYPMIVEEXG

SEQ ID NO: 61668 - protein, 24 aa, Artificial Sequence
  Cyclic GFR-binding peptide
PTRLSSLSILFFDSANNVVLKVYP

SEQ ID NO: 61669 - protein, 35 aa, Artificial Sequence
  Cyclic GFR-binding peptide
PSRVHHSSLSVLFFEYVRKKPKLLKVYPRLEEHLE

SEQ ID NO: 61670 - protein, 37 aa, Artificial Sequence
  Cyclic GFR-binding peptide
  MOD_RES (1)..(2)..(34)..(36): Xaa is C or S
XXAPTQLSSLSVLFFDDSSNVILKVYPNMVVRAXGXH

SEQ ID NO: 61671 - protein, 24 aa, Artificial Sequence
  Cyclic GFR-binding peptide
MSSLSMLFFNDKQQIILKVYPGMV

SEQ ID NO: 61672 - protein, 32 aa, Artificial Sequence
  Cyclic GFR-binding peptide
  MOD_RES (2)..(3): Xaa is C or S
SXXVPARLSSLSILFFDAANNVVLKVYPDMVV

SEQ ID NO: 61673 - protein, 32 aa, Artificial Sequence
  Cyclic GFR-binding peptide
  MOD_RES (32)..(32): Xaa is C or S
VPTRLSSLSILFFDSANNVVLKVYPDMVVESX

SEQ ID NO: 61674 - protein, 35 aa, Artificial Sequence
  Cyclic GFR-binding peptide
  MOD_RES (1)..(32)..(34): Xaa is C or S
XAPVKTSSLSMLFFDNGRVLLLKVYPMIVEEXGXL

SEQ ID NO: 61675 - protein, 26 aa, Artificial Sequence
  Cyclic GFR-binding peptide
APTKLSSLSVLFFDSSNNVILKVYPN

SEQ ID NO: 61676 - protein, 28 aa, Artificial Sequence
  Cyclic GFR-binding peptide
RLSSLSILFFDSANNVVLKVYPDMVVES

SEQ ID NO: 61677 - protein, 35 aa, Artificial Sequence
  Cyclic GFR-binding peptide
  MOD_RES (5)..(6): Xaa is C or S
APASXXVPARLSSLSILFFDAANNVVLKVYPDMVV

SEQ ID NO: 61678 - protein, 31 aa, Artificial Sequence
  Cyclic GFR-binding peptide
  MOD_RES (5)..(6): Xaa is C or S
VPKAXXAPTKLSSLSVLFFDSSNNVILKVYP

SEQ ID NO: 61679 - protein, 34 aa, Artificial Sequence
  Cyclic GFR-binding peptide
SRVHHSSLSVLFFEYVRKKPKLLKVYPRLEEHLE

SEQ ID NO: 61680 - protein, 24 aa, Artificial Sequence
  Cyclic GFR-binding peptide
KMSSLSILFFDENKNVVLKVYPNM

SEQ ID NO: 61681 - protein, 39 aa, Artificial Sequence
  Cyclic GFR-binding peptide
  MOD_RES (5)..(6)..(37)..(39): Xaa is C or S
VPSTXXAPVKTSSLSMLFFDNGRVLLLKVYPMIVEEXGX

SEQ ID NO: 61682 - protein, 27 aa, Artificial Sequence
  Cyclic GFR-binding peptide
VPEKMSSLSILFFDENKNVVLKVYPNM

SEQ ID NO: 61683 - protein, 29 aa, Artificial Sequence
  Cyclic GFR-binding peptide
  MOD_RES (29)..(29): Xaa is C or S
SSLSMLFFRIKPHQGQHLKVYPFLQHNKX

SEQ ID NO: 61684 - protein, 39 aa, Artificial Sequence
  Cyclic GFR-binding peptide
  MOD_RES (4)..(5)..(37)..(39): Xaa is C or S
PKAXXAPTKLSSLSVLFFDSSNNVILKVYPNMVVKAXGX

SEQ ID NO: 61685 - protein, 27 aa, Artificial Sequence
  Cyclic GFR-binding peptide
TKLSSLSILFFDKGVVTYLKVYPGMAV

SEQ ID NO: 61686 - protein, 30 aa, Artificial Sequence
  Cyclic GFR-binding peptide
VSQDLSSLSILFFIGKTPKILKVYPMIVKS

SEQ ID NO: 61687 - protein, 21 aa, Artificial Sequence
  Cyclic GFR-binding peptide
LSSLSILFFDAANNVVLKVYP

SEQ ID NO: 61688 - protein, 27 aa, Artificial Sequence
  Cyclic GFR-binding peptide
  MOD_RES (27)..(27): Xaa is C or S
SSLSILFFDSANNVVLKVYPDMVVESX

SEQ ID NO: 61689 - protein, 35 aa, Artificial Sequence
  Cyclic GFR-binding peptide
  MOD_RES (4)..(5): Xaa is C or S
PKAXXAPTKLSSLSVLFFDSSNNVILKVYPNMVVK

SEQ ID NO: 61690 - protein, 38 aa, Artificial Sequence
  Cyclic GFR-binding peptide
  MOD_RES (5)..(6)..(38): Xaa is C or S
VPKAXXAPTKLSSLSVLFFDSSNNVILKVYPNMVVKAX

SEQ ID NO: 61691 - protein, 26 aa, Artificial Sequence
  Cyclic GFR-binding peptide
SSLSVLFFDDSSNVILKVYPNMVVRS

SEQ ID NO: 61692 - protein, 34 aa, Artificial Sequence
  Cyclic GFR-binding peptide
  MOD_RES (3)..(4): Xaa is C or S
SPXXVPQDLSSLSILFFVGRTPKVLKVYPMVVKS

SEQ ID NO: 61693 - protein, 31 aa, Artificial Sequence
  Cyclic GFR-binding peptide
  MOD_RES (5)..(6): Xaa is C or S
SASPXXVSQDLSSLSILFFIGKTPKILKVYP

SEQ ID NO: 61694 - protein, 21 aa, Artificial Sequence
  Cyclic GFR-binding peptide
LSSLSILFFVGRTPKVLKVYP

SEQ ID NO: 61695 - protein, 35 aa, Artificial Sequence
  Cyclic GFR-binding peptide
  MOD_RES (4)..(5): Xaa is C or S
SKAXXVPTKLSSLSILFFDKGVVTYLKVYPGMAVS

SEQ ID NO: 61696 - protein, 32 aa, Artificial Sequence
  Cyclic GFR-binding peptide
  MOD_RES (5)..(6): Xaa is C or S
IPEPXXVPEKMSSLSILFFDENKNVVLKVYPN

SEQ ID NO: 61697 - protein, 30 aa, Artificial Sequence
  Cyclic GFR-binding peptide
APVKTSSLSMLFFDNGRVLLLKVYPMIVEE

SEQ ID NO: 61698 - protein, 36 aa, Artificial Sequence
  Cyclic GFR-binding peptide
  MOD_RES (2)..(36): Xaa is C or S
EXVPTEESSLSMLFFRIKPHQGQHLKVYPFLQHNKX

SEQ ID NO: 61699 - protein, 34 aa, Artificial Sequence
  Cyclic GFR-binding peptide
  MOD_RES (1)..(2)..(33): Xaa is C or S
XXVPQDLSSLSILFFVGRTPKVLKVYPMVVKSXK

SEQ ID NO: 61700 - protein, 36 aa, Artificial Sequence
  Cyclic GFR-binding peptide
  MOD_RES (1)..(2)..(33)..(35): Xaa is C or S
XXVPQALSSLSILFFVGRKPKVLKVYPMIVRSXKXS

SEQ ID NO: 61701 - protein, 40 aa, Artificial Sequence
  Cyclic GFR-binding peptide
  MOD_RES (5)..(37)..(39): Xaa is C or S
TKPTXAPTKLSSLSVLFFDDSSNVILKVYPNMVVRSXGXH

SEQ ID NO: 61702 - protein, 36 aa, Artificial Sequence
  Cyclic GFR-binding peptide
  MOD_RES (5)..(6): Xaa is C or S
VPKPXXAPTQLSSLSVLFFDDSSNVILKVYPNMVVR

SEQ ID NO: 61703 - protein, 41 aa, Artificial Sequence
  Cyclic GFR-binding peptide
  MOD_RES (6)..(7)..(39)..(41): Xaa is C or S
KASKAXXVPTKLSSLSILFFDKGVVTYLKVYPGMAVSEXGX

SEQ ID NO: 61704 - protein, 34 aa, Artificial Sequence
  Cyclic GFR-binding peptide
  MOD_RES (6)..(7): Xaa is C or S
KASKAXXVPTKLSSLSILFFDKGVVTYLKVYPGM

SEQ ID NO: 61705 - protein, 36 aa, Artificial Sequence
  Cyclic GFR-binding peptide
  MOD_RES (5)..(6): Xaa is C or S
IPEPXXVPEKMSSLSILFFDENKNVVLKVYPNMTVE

SEQ ID NO: 61706 - protein, 26 aa, Artificial Sequence
  Cyclic GFR-binding peptide
PQALSSLSILFFVGRKPKVLKVYPMI

SEQ ID NO: 61707 - protein, 31 aa, Artificial Sequence
  Cyclic GFR-binding peptide
  MOD_RES (31)..(31): Xaa is C or S
PTKLSSLSVLFFDSSNNVILKVYPNMVVKAX

SEQ ID NO: 61708 - protein, 28 aa, Artificial Sequence
  Cyclic GFR-binding peptide
  MOD_RES (27)..(27): Xaa is C or S
SSLSILFFDENKNVVLKVYPNMTVESXA

SEQ ID NO: 61709 - protein, 35 aa, Artificial Sequence
  Cyclic GFR-binding peptide
  MOD_RES (4)..(5): Xaa is C or S
AAPXXVPQALSSLSILFFVGRKPKVLKVYPMIVRS

SEQ ID NO: 61710 - protein, 37 aa, Artificial Sequence
  Cyclic GFR-binding peptide
  MOD_RES (6)..(7): Xaa is C or S
AVPKAXXAPTKLSSLSVLFFDSSNNVILKVYPNMVVK

SEQ ID NO: 61711 - protein, 39 aa, Artificial Sequence
  Cyclic GFR-binding peptide
  MOD_RES (2)..(3)..(36)..(38): Xaa is C or S
AXXVPTKLSSLSVLFFDDMGVPTLKVYPEGMSVAEXGXR

SEQ ID NO: 61712 - protein, 39 aa, Artificial Sequence
  Cyclic GFR-binding peptide
  MOD_RES (6)..(7)..(39): Xaa is C or S
KASKAXXVPTKLSSLSILFFDKGVVTYLKVYPGMAVSEX

SEQ ID NO: 61713 - protein, 33 aa, Artificial Sequence
  Cyclic GFR-binding peptide
  MOD_RES (1)..(33): Xaa is C or S
XVPTKLSSLSILFFDKGVVTYLKVYPGMAVSEX

SEQ ID NO: 61714 - protein, 22 aa, Artificial Sequence
  Cyclic GFR-binding peptide
KLSSLSVLFFDDSSNVILKVYP

SEQ ID NO: 61715 - protein, 36 aa, Artificial Sequence
  Cyclic GFR-binding peptide
  MOD_RES (1)..(2)..(34)..(36): Xaa is C or S
XXVPTKLSSLSILFFDKGVVTYLKVYPGMAVSEXGX

SEQ ID NO: 61716 - protein, 28 aa, Artificial Sequence
  Cyclic GFR-binding peptide
  MOD_RES (3)..(3): Xaa is C or S
PTXAPTKLSSLSVLFFDDSSNVILKVYP

SEQ ID NO: 61717 - protein, 29 aa, Artificial Sequence
  Cyclic GFR-binding peptide
TKLSSLSVLFFDDMGVPTLKVYPEGMSVA

SEQ ID NO: 61718 - protein, 22 aa, Artificial Sequence
  Cyclic GFR-binding peptide
MSSLSILFFDENKNVVLKVYPN

SEQ ID NO: 61719 - protein, 22 aa, Artificial Sequence
  Cyclic GFR-binding peptide
KLSSLSVLFFDDMGVPTLKVYP

SEQ ID NO: 61720 - protein, 28 aa, Artificial Sequence
  Cyclic GFR-binding peptide
PTKMSSLSMLFFNDKQQIILKVYPGMVV

SEQ ID NO: 61721 - protein, 34 aa, Artificial Sequence
  Cyclic GFR-binding peptide
  MOD_RES (4)..(5): Xaa is C or S
PASXXVPARLSSLSILFFDAANNVVLKVYPDMVV

SEQ ID NO: 61722 - protein, 34 aa, Artificial Sequence
  Cyclic GFR-binding peptide
  MOD_RES (6)..(7): Xaa is C or S
AAPASXXVPARLSSLSILFFDAANNVVLKVYPDM

SEQ ID NO: 61723 - protein, 25 aa, Artificial Sequence
  Cyclic GFR-binding peptide
SSLSVLFFEYVRKKPKLLKVYPRLE

SEQ ID NO: 61724 - protein, 26 aa, Artificial Sequence
  Cyclic GFR-binding peptide
  MOD_RES (1)..(1): Xaa is C or S
XAPTKLSSLSVLFFDDSSNVILKVYP

SEQ ID NO: 61725 - protein, 30 aa, Artificial Sequence
  Cyclic GFR-binding peptide
  MOD_RES (27)..(29): Xaa is C or S
SSLSVLFFDSSNNVILKVYPNMVVKAXGXH

SEQ ID NO: 61726 - protein, 29 aa, Artificial Sequence
  Cyclic GFR-binding peptide
PSRVHHSSLSVLFFEYVRKKPKLLKVYPR

SEQ ID NO: 61727 - protein, 29 aa, Artificial Sequence
  Cyclic GFR-binding peptide
  MOD_RES (1)..(1): Xaa is C or S
XVPTKLSSLSILFFDKGVVTYLKVYPGMA

SEQ ID NO: 61728 - protein, 35 aa, Artificial Sequence
  Cyclic GFR-binding peptide
  MOD_RES (5)..(6): Xaa is C or S
VPKPXXAPTKLSSLSVLFFDDSSNVILKVYPNMVV

SEQ ID NO: 61729 - protein, 27 aa, Artificial Sequence
  Cyclic GFR-binding peptide
  MOD_RES (1)..(2): Xaa is C or S
XXAPTKLSSLSVLFFDDSSNVILKVYP

SEQ ID NO: 61730 - protein, 42 aa, Artificial Sequence
  Cyclic GFR-binding peptide
  MOD_RES (5)..(6)..(39)..(41): Xaa is C or S
VGKAXXVPTKLSSLSVLFFDDMGVPTLKVYPEGMSVAEXGXR

SEQ ID NO: 61731 - protein, 29 aa, Artificial Sequence
  Cyclic GFR-binding peptide
  MOD_RES (29)..(29): Xaa is C or S
KMSSLSILFFDENKNVVLKVYPNMTVESX

SEQ ID NO: 61732 - protein, 37 aa, Artificial Sequence
  Cyclic GFR-binding peptide
  MOD_RES (1)..(2)..(34)..(36): Xaa is C or S
XXAPTKLSSLSVLFFDSSNNVILKVYPNMVVKAXGXH

SEQ ID NO: 61733 - protein, 29 aa, Artificial Sequence
  Cyclic GFR-binding peptide
  MOD_RES (26)..(28): Xaa is C or S
SSLSMLFFDNGRVLLLKVYPMIVEEXGXL

SEQ ID NO: 61734 - protein, 25 aa, Artificial Sequence
  Cyclic GFR-binding peptide
RLSSLSILFFDSANNVVLKVYPDMV

SEQ ID NO: 61735 - protein, 24 aa, Artificial Sequence
  Cyclic GFR-binding peptide
RLSSLSILFFDAANNVVLKVYPDM

SEQ ID NO: 61736 - protein, 29 aa, Artificial Sequence
  Cyclic GFR-binding peptide
PVKTSSLSMLFFDNGRVLLLKVYPMIVEE

SEQ ID NO: 61737 - protein, 40 aa, Artificial Sequence
  Cyclic GFR-binding peptide
  MOD_RES (4)..(5)..(37)..(39): Xaa is C or S
SKAXXVPTKLSSLSILFFDKGVVTYLKVYPGMAVSEXGXR

SEQ ID NO: 61738 - protein, 26 aa, Artificial Sequence
  Cyclic GFR-binding peptide
SSLSVLFFDDSSNVILKVYPNMVVRA

SEQ ID NO: 61739 - protein, 38 aa, Artificial Sequence
  Cyclic GFR-binding peptide
  MOD_RES (6)..(7): Xaa is C or S
GIPEPXXVPEKMSSLSILFFDENKNVVLKVYPNMTVES

SEQ ID NO: 61740 - protein, 36 aa, Artificial Sequence
  Cyclic GFR-binding peptide
  MOD_RES (5)..(6): Xaa is C or S
VPKAXXAPTKLSSLSVLFFDSSNNVILKVYPNMVVK

SEQ ID NO: 61741 - protein, 28 aa, Artificial Sequence
  Cyclic GFR-binding peptide
TEESSLSMLFFRIKPHQGQHLKVYPFLQ

SEQ ID NO: 61742 - protein, 23 aa, Artificial Sequence
  Cyclic GFR-binding peptide
LSSLSILFFVGRKPKVLKVYPMI

SEQ ID NO: 61743 - protein, 31 aa, Artificial Sequence
  Cyclic GFR-binding peptide
  MOD_RES (4)..(5): Xaa is C or S
PASXXVPARLSSLSILFFDAANNVVLKVYPD

SEQ ID NO: 61744 - protein, 32 aa, Artificial Sequence
  Cyclic GFR-binding peptide
  MOD_RES (30)..(32): Xaa is C or S
ESSLSMLFFRIKPHQGQHLKVYPFLQHNKXEX

SEQ ID NO: 61745 - protein, 28 aa, Artificial Sequence
  Cyclic GFR-binding peptide
  MOD_RES (27)..(27): Xaa is C or S
TSSLSMLFFDNGRVLLLKVYPMIVEEXG

SEQ ID NO: 61746 - protein, 39 aa, Artificial Sequence
  Cyclic GFR-binding peptide
  MOD_RES (4)..(36)..(38): Xaa is C or S
KPTXAPTKLSSLSVLFFDDSSNVILKVYPNMVVRSXGXH

SEQ ID NO: 61747 - protein, 23 aa, Artificial Sequence
  Cyclic GFR-binding peptide
EKMSSLSILFFDENKNVVLKVYP

SEQ ID NO: 61748 - protein, 31 aa, Artificial Sequence
  Cyclic GFR-binding peptide
  MOD_RES (1)..(2): Xaa is C or S
XXVPTKLSSLSILFFDKGVVTYLKVYPGMAV

SEQ ID NO: 61749 - protein, 31 aa, Artificial Sequence
  Cyclic GFR-binding peptide
  MOD_RES (3)..(4): Xaa is C or S
SPXXVSQDLSSLSILFFIGKTPKILKVYPMI

SEQ ID NO: 61750 - protein, 34 aa, Artificial Sequence
  Cyclic GFR-binding peptide
  MOD_RES (2)..(3): Xaa is C or S
TXXVPTRLSSLSILFFDSANNVVLKVYPDMVVES

SEQ ID NO: 61751 - protein, 29 aa, Artificial Sequence
  Cyclic GFR-binding peptide
  MOD_RES (1)..(2): Xaa is C or S
XXVPTRLSSLSILFFDSANNVVLKVYPDM

SEQ ID NO: 61752 - protein, 35 aa, Artificial Sequence
  Cyclic GFR-binding peptide
  MOD_RES (4)..(5): Xaa is C or S
ASPXXVPQDLSSLSILFFVGRTPKVLKVYPMVVKS

SEQ ID NO: 61753 - protein, 29 aa, Artificial Sequence
  Cyclic GFR-binding peptide
  MOD_RES (1)..(2): Xaa is C or S
XXAPTKLSSLSVLFFDDSSNVILKVYPNM

SEQ ID NO: 61754 - protein, 28 aa, Artificial Sequence
  Cyclic GFR-binding peptide
  MOD_RES (27)..(27): Xaa is C or S
SSLSMLFFNDKQQIILKVYPGMVVDRXG

SEQ ID NO: 61755 - protein, 28 aa, Artificial Sequence
  Cyclic GFR-binding peptide
  MOD_RES (2)..(3): Xaa is C or S
PXXVPEKMSSLSILFFDENKNVVLKVYP

SEQ ID NO: 61756 - protein, 33 aa, Artificial Sequence
  Cyclic GFR-binding peptide
  MOD_RES (2)..(3): Xaa is C or S
AXXVPTKLSSLSVLFFDDMGVPTLKVYPEGMSV

SEQ ID NO: 61757 - protein, 27 aa, Artificial Sequence
  Cyclic GFR-binding peptide
KMSSLSILFFDENKNVVLKVYPNMTVE

SEQ ID NO: 61758 - protein, 22 aa, Artificial Sequence
  Cyclic GFR-binding peptide
SSLSILFFIGKTPKILKVYPMI

SEQ ID NO: 61759 - protein, 26 aa, Artificial Sequence
  Cyclic GFR-binding peptide
VPQALSSLSILFFVGRKPKVLKVYPM

SEQ ID NO: 61760 - protein, 32 aa, Artificial Sequence
  Cyclic GFR-binding peptide
  MOD_RES (5)..(6): Xaa is C or S
VPKPXXAPTQLSSLSVLFFDDSSNVILKVYPN

SEQ ID NO: 61761 - protein, 28 aa, Artificial Sequence
  Cyclic GFR-binding peptide
  MOD_RES (28)..(28): Xaa is C or S
MSSLSMLFFNDKQQIILKVYPGMVVDRX

SEQ ID NO: 61762 - protein, 28 aa, Artificial Sequence
  Cyclic GFR-binding peptide
  MOD_RES (28)..(28): Xaa is C or S
LSSLSVLFFDSSNNVILKVYPNMVVKAX

SEQ ID NO: 61763 - protein, 31 aa, Artificial Sequence
  Cyclic GFR-binding peptide
  MOD_RES (4)..(5): Xaa is C or S
PKPXXAPTKLSSLSVLFFDDSSNVILKVYPN

SEQ ID NO: 61764 - protein, 38 aa, Artificial Sequence
  Cyclic GFR-binding peptide
  MOD_RES (3)..(4)..(35)..(37): Xaa is C or S
APXXVPQALSSLSILFFVGRKPKVLKVYPMIVRSXKXS

SEQ ID NO: 61765 - protein, 30 aa, Artificial Sequence
  Cyclic GFR-binding peptide
VPQALSSLSILFFVGRKPKVLKVYPMIVRS

SEQ ID NO: 61766 - protein, 25 aa, Artificial Sequence
  Cyclic GFR-binding peptide
TSSLSMLFFDNGRVLLLKVYPMIVE

SEQ ID NO: 61767 - protein, 29 aa, Artificial Sequence
  Cyclic GFR-binding peptide
  MOD_RES (29)..(29): Xaa is C or S
QALSSLSILFFVGRKPKVLKVYPMIVRSX

SEQ ID NO: 61768 - protein, 27 aa, Artificial Sequence
  Cyclic GFR-binding peptide
EESSLSMLFFRIKPHQGQHLKVYPFLQ

SEQ ID NO: 61769 - protein, 34 aa, Artificial Sequence
  Cyclic GFR-binding peptide
  MOD_RES (32)..(34): Xaa is C or S
VPEKMSSLSILFFDENKNVVLKVYPNMTVESXAX

SEQ ID NO: 61770 - protein, 37 aa, Artificial Sequence
  Cyclic GFR-binding peptide
  MOD_RES (3)..(4)..(35)..(37): Xaa is C or S
SPXXVSQDLSSLSILFFIGKTPKILKVYPMIVKSXKX

SEQ ID NO: 61771 - protein, 29 aa, Artificial Sequence
  Cyclic GFR-binding peptide
  MOD_RES (2)..(3): Xaa is C or S
PXXAPTKLSSLSVLFFDDSSNVILKVYPN

SEQ ID NO: 61772 - protein, 37 aa, Artificial Sequence
  Cyclic GFR-binding peptide
  MOD_RES (4)..(5)..(37): Xaa is C or S
PKAXXAPTKLSSLSVLFFDSSNNVILKVYPNMVVKAX

SEQ ID NO: 61773 - protein, 37 aa, Artificial Sequence
  Cyclic GFR-binding peptide
  MOD_RES (2)..(3)..(35)..(37): Xaa is C or S
AXXVPTKLSSLSILFFDKGVVTYLKVYPGMAVSEXGX

SEQ ID NO: 61774 - protein, 28 aa, Artificial Sequence
  Cyclic GFR-binding peptide
  MOD_RES (28)..(28): Xaa is C or S
LSSLSILFFDAANNVVLKVYPDMVVEAX

SEQ ID NO: 61775 - protein, 33 aa, Artificial Sequence
  Cyclic GFR-binding peptide
  MOD_RES (32)..(32): Xaa is C or S
VPTRLSSLSILFFDSANNVVLKVYPDMVVESXG

SEQ ID NO: 61776 - protein, 28 aa, Artificial Sequence
  Cyclic GFR-binding peptide
  MOD_RES (1)..(2): Xaa is C or S
XXVPTKLSSLSILFFDKGVVTYLKVYPG

SEQ ID NO: 61777 - protein, 34 aa, Artificial Sequence
  Cyclic GFR-binding peptide
  MOD_RES (5)..(6): Xaa is C or S
ASKAXXVPTKLSSLSILFFDKGVVTYLKVYPGMA

SEQ ID NO: 61778 - protein, 31 aa, Artificial Sequence
  Cyclic GFR-binding peptide
  MOD_RES (3)..(4): Xaa is C or S
SPXXVPQDLSSLSILFFVGRTPKVLKVYPMV

SEQ ID NO: 61779 - protein, 29 aa, Artificial Sequence
  Cyclic GFR-binding peptide
  MOD_RES (27)..(29): Xaa is C or S
SSLSVLFFDDSSNVILKVYPNMVVRAXGX

SEQ ID NO: 61780 - protein, 30 aa, Artificial Sequence
  Cyclic GFR-binding peptide
  MOD_RES (28)..(30): Xaa is C or S
ALSSLSILFFVGRKPKVLKVYPMIVRSXKX

SEQ ID NO: 61781 - protein, 36 aa, Artificial Sequence
  Cyclic GFR-binding peptide
  MOD_RES (4)..(4): Xaa is C or S
GLEXVPTEESSLSMLFFRIKPHQGQHLKVYPFLQHN

SEQ ID NO: 61782 - protein, 31 aa, Artificial Sequence
  Cyclic GFR-binding peptide
  MOD_RES (2)..(3): Xaa is C or S
PXXVPQDLSSLSILFFVGRTPKVLKVYPMVV

SEQ ID NO: 61783 - protein, 35 aa, Artificial Sequence
  Cyclic GFR-binding peptide
  MOD_RES (1)..(2)..(34): Xaa is C or S
XXVPTKLSSLSILFFDKGVVTYLKVYPGMAVSEXG

SEQ ID NO: 61784 - protein, 32 aa, Artificial Sequence
  Cyclic GFR-binding peptide
VHHSSLSVLFFEYVRKKPKLLKVYPRLEEHLE

SEQ ID NO: 61785 - protein, 24 aa, Artificial Sequence
  Cyclic GFR-binding peptide
QDLSSLSILFFVGRTPKVLKVYPM

SEQ ID NO: 61786 - protein, 32 aa, Artificial Sequence
  Cyclic GFR-binding peptide
  MOD_RES (3)..(4): Xaa is C or S
PTXXVPTRLSSLSILFFDSANNVVLKVYPDMV

SEQ ID NO: 61787 - protein, 40 aa, Artificial Sequence
  Cyclic GFR-binding peptide
  MOD_RES (6)..(7)..(39): Xaa is C or S
AVPKAXXAPTKLSSLSVLFFDSSNNVILKVYPNMVVKAXG

SEQ ID NO: 61788 - protein, 36 aa, Artificial Sequence
  Cyclic GFR-binding peptide
  MOD_RES (1)..(34)..(36): Xaa is C or S
XVPTKLSSLSVLFFDDMGVPTLKVYPEGMSVAEXGX

SEQ ID NO: 61789 - protein, 34 aa, Artificial Sequence
  Cyclic GFR-binding peptide
  MOD_RES (31)..(33): Xaa is C or S
PTKLSSLSVLFFDDSSNVILKVYPNMVVRSXGXH

SEQ ID NO: 61790 - protein, 21 aa, Artificial Sequence
  Cyclic GFR-binding peptide
SSLSILFFDAANNVVLKVYPD

SEQ ID NO: 61791 - protein, 30 aa, Artificial Sequence
  Cyclic GFR-binding peptide
  MOD_RES (3)..(4): Xaa is C or S
KAXXVPTKLSSLSVLFFDDMGVPTLKVYPE

SEQ ID NO: 61792 - protein, 35 aa, Artificial Sequence
  Cyclic GFR-binding peptide
  MOD_RES (1)..(2)..(34): Xaa is C or S
XXAPTQLSSLSVLFFDDSSNVILKVYPNMVVRAXG

SEQ ID NO: 61793 - protein, 31 aa, Artificial Sequence
  Cyclic GFR-binding peptide
  MOD_RES (31)..(31): Xaa is C or S
PTRLSSLSILFFDSANNVVLKVYPDMVVESX

SEQ ID NO: 61794 - protein, 39 aa, Artificial Sequence
  Cyclic GFR-binding peptide
  MOD_RES (3)..(4)..(36)..(38): Xaa is C or S
KPXXAPTKLSSLSVLFFDDSSNVILKVYPNMVVRSXGXH

SEQ ID NO: 61795 - protein, 35 aa, Artificial Sequence
  Cyclic GFR-binding peptide
  MOD_RES (1)..(33)..(35): Xaa is C or S
XTPTKMSSLSMLFFNDKQQIILKVYPGMVVDRXGX

SEQ ID NO: 61796 - protein, 28 aa, Artificial Sequence
  Cyclic GFR-binding peptide
PEKMSSLSILFFDENKNVVLKVYPNMTV

SEQ ID NO: 61797 - protein, 26 aa, Artificial Sequence
  Cyclic GFR-binding peptide
PTKLSSLSVLFFDDSSNVILKVYPNM

SEQ ID NO: 61798 - protein, 26 aa, Artificial Sequence
  Cyclic GFR-binding peptide
TKLSSLSVLFFDDMGVPTLKVYPEGM

SEQ ID NO: 61799 - protein, 32 aa, Artificial Sequence
  Cyclic GFR-binding peptide
  MOD_RES (4)..(5): Xaa is C or S
SKAXXVPTKLSSLSILFFDKGVVTYLKVYPGM

SEQ ID NO: 61800 - protein, 33 aa, Artificial Sequence
  Cyclic GFR-binding peptide
  MOD_RES (4)..(5): Xaa is C or S
PPTXXVPTRLSSLSILFFDSANNVVLKVYPDMV

SEQ ID NO: 61801 - protein, 32 aa, Artificial Sequence
  Cyclic GFR-binding peptide
  MOD_RES (1)..(1): Xaa is C or S
XAPTKLSSLSVLFFDSSNNVILKVYPNMVVKA

SEQ ID NO: 61802 - protein, 38 aa, Artificial Sequence
  Cyclic GFR-binding peptide
  MOD_RES (6)..(7): Xaa is C or S
GSAGPXXTPTKMSSLSMLFFNDKQQIILKVYPGMVVDR

SEQ ID NO: 61803 - protein, 32 aa, Artificial Sequence
  Cyclic GFR-binding peptide
  MOD_RES (2)..(2): Xaa is C or S
KXQPSRVHHSSLSVLFFEYVRKKPKLLKVYPR

SEQ ID NO: 61804 - protein, 30 aa, Artificial Sequence
  Cyclic GFR-binding peptide
  MOD_RES (3)..(4): Xaa is C or S
KAXXAPTKLSSLSVLFFDSSNNVILKVYPN

SEQ ID NO: 61805 - protein, 27 aa, Artificial Sequence
  Cyclic GFR-binding peptide
APTQLSSLSVLFFDDSSNVILKVYPNM

SEQ ID NO: 61806 - protein, 35 aa, Artificial Sequence
  Cyclic GFR-binding peptide
  MOD_RES (1)..(2)..(34): Xaa is C or S
XXVPARLSSLSILFFDAANNVVLKVYPDMVVEAXG

SEQ ID NO: 61807 - protein, 35 aa, Artificial Sequence
  Cyclic GFR-binding peptide
  MOD_RES (1)..(1): Xaa is C or S
XQPSRVHHSSLSVLFFEYVRKKPKLLKVYPRLEEH

SEQ ID NO: 61808 - protein, 37 aa, Artificial Sequence
  Cyclic GFR-binding peptide
  MOD_RES (3)..(4)..(35)..(37): Xaa is C or S
SPXXVPQDLSSLSILFFVGRTPKVLKVYPMVVKSXKX

SEQ ID NO: 61809 - protein, 35 aa, Artificial Sequence
  Cyclic GFR-binding peptide
  MOD_RES (32)..(34): Xaa is C or S
VPTKLSSLSILFFDKGVVTYLKVYPGMAVSEXGXR

SEQ ID NO: 61810 - protein, 24 aa, Artificial Sequence
  Cyclic GFR-binding peptide
LSSLSILFFDAANNVVLKVYPDMV

SEQ ID NO: 61811 - protein, 34 aa, Artificial Sequence
  Cyclic GFR-binding peptide
  MOD_RES (31)..(33): Xaa is C or S
TKLSSLSVLFFDDMGVPTLKVYPEGMSVAEXGXR

SEQ ID NO: 61812 - protein, 25 aa, Artificial Sequence
  Cyclic GFR-binding peptide
PEKMSSLSILFFDENKNVVLKVYPN

SEQ ID NO: 61813 - protein, 31 aa, Artificial Sequence
  Cyclic GFR-binding peptide
  MOD_RES (31)..(31): Xaa is C or S
PTKLSSLSILFFDKGVVTYLKVYPGMAVSEX

SEQ ID NO: 61814 - protein, 22 aa, Artificial Sequence
  Cyclic GFR-binding peptide
LSSLSVLFFDDMGVPTLKVYPE

SEQ ID NO: 61815 - protein, 28 aa, Artificial Sequence
  Cyclic GFR-binding peptide
  MOD_RES (27)..(27): Xaa is C or S
LSSLSILFFIGKTPKILKVYPMIVKSXK

SEQ ID NO: 61816 - protein, 20 aa, Artificial Sequence
  Cyclic GFR-binding peptide
SSLSILFFDAANNVVLKVYP

SEQ ID NO: 61817 - protein, 34 aa, Artificial Sequence
  Cyclic GFR-binding peptide
  MOD_RES (4)..(5): Xaa is C or S
ASPXXVPQDLSSLSILFFVGRTPKVLKVYPMVVK

SEQ ID NO: 61818 - protein, 33 aa, Artificial Sequence
  Cyclic GFR-binding peptide
  MOD_RES (1)..(32): Xaa is C or S
XVPQDLSSLSILFFVGRTPKVLKVYPMVVKSXK

SEQ ID NO: 61819 - protein, 41 aa, Artificial Sequence
  Cyclic GFR-binding peptide
  MOD_RES (2)..(39): Xaa is C or S
AXELHEELRNSLQELKPKKRVYEYYLVTLPEHHVRSPQXKV

SEQ ID NO: 61820 - protein, 32 aa, Artificial Sequence
  Cyclic GFR-binding peptide
ELHEELRNSLQELKPKKRVYEYYVVPLPEHHV

SEQ ID NO: 61821 - protein, 34 aa, Artificial Sequence
  Cyclic GFR-binding peptide
  MOD_RES (1)..(3): Xaa is C or S
XAXELHEELRNSLQELKPKKRVYEYYLVTLPEHH

SEQ ID NO: 61822 - protein, 27 aa, Artificial Sequence
  Cyclic GFR-binding peptide
  MOD_RES (26)..(27): Xaa is C or S
VTAKKVKPKRGVIKRIQVPRLAQPVXX

SEQ ID NO: 61823 - protein, 23 aa, Artificial Sequence
  Cyclic GFR-binding peptide
TNSLQEFIPKKRVIEYYLVTLPE

SEQ ID NO: 61824 - protein, 34 aa, Artificial Sequence; identical to SEQ ID NO: 11338
  Cyclic GFR-binding peptide
  MOD_RES (2)..(34): Xaa is C or S

SEQ ID NO: 61825 - protein, 35 aa, Artificial Sequence
  Cyclic GFR-binding peptide
  MOD_RES (2)..(4): Xaa is C or S
AXAXELHEELRNSLQELKPKKRVYEYYLVTLPEHH

SEQ ID NO: 61826 - protein, 31 aa, Artificial Sequence
  Cyclic GFR-binding peptide
  MOD_RES (2)..(4): Xaa is C or S
SXKXSRVIMVTAKKVKPKRGVIKRIQVPRLA

SEQ ID NO: 61827 - protein, 27 aa, Artificial Sequence
  Cyclic GFR-binding peptide
  MOD_RES (26)..(26): Xaa is C or S
NSLQEIVNSSDDYYLVTLPELKTPAXT

SEQ ID NO: 61828 - protein, 28 aa, Artificial Sequence
  Cyclic GFR-binding peptide
  MOD_RES (1)..(1): Xaa is C or S
XGEVVMDSMEGIVVKENEDMIQMTINSL

SEQ ID NO: 61829 - protein, 28 aa, Artificial Sequence
  Cyclic GFR-binding peptide
NSLQELKPKKRVYEYYVVPLPEHHVRSP

SEQ ID NO: 61830 - protein, 34 aa, Artificial Sequence; identical to SEQ ID NO: 11350
  Cyclic GFR-binding peptide
  MOD_RES (28)..(29): Xaa is C or S

SEQ ID NO: 61831 - protein, 40 aa, Artificial Sequence
  Cyclic GFR-binding peptide
  MOD_RES (2)..(34)..(35): Xaa is C or S
GXGEVVMEVTAKKVVKDYEDIKRMQVPRLETPVXXAKPIS

SEQ ID NO: 61832 - protein, 32 aa, Artificial Sequence
  Cyclic GFR-binding peptide
  MOD_RES (2)..(4): Xaa is C or S
HXGXSRVVMNVQVEKIVNSSDDVKAVKVSRLK

SEQ ID NO: 61833 - protein, 28 aa, Artificial Sequence
  Cyclic GFR-binding peptide
VMNSMEGIIVNSSDDMIQVTINSLKTPA

SEQ ID NO: 61834 - protein, 42 aa, Artificial Sequence; identical to SEQ ID NO: 21385
  Cyclic GFR-binding peptide
  MOD_RES (1)..(38): Xaa is C or S

SEQ ID NO: 61835 - protein, 30 aa, Artificial Sequence
  Cyclic GFR-binding peptide
HDELTNSLQEFIPKKRVIEYYLVTLPELQV

SEQ ID NO: 61836 - protein, 27 aa, Artificial Sequence
  Cyclic GFR-binding peptide
  MOD_RES (27)..(27): Xaa is C or S
DSMEGIVVKENEDMIQMTINSLETPVX

SEQ ID NO: 61837 - protein, 26 aa, Artificial Sequence
  Cyclic GFR-binding peptide
ELRSMEGILKPKKRVYEMIQVTINSH

SEQ ID NO: 61838 - protein, 31 aa, Artificial Sequence; identical to SEQ ID NO: 21389
  Cyclic GFR-binding peptide
  MOD_RES (2)..(2): Xaa is C or S

SEQ ID NO: 61839 - protein, 35 aa, Artificial Sequence
  Cyclic GFR-binding peptide
  MOD_RES (2)..(4): Xaa is C or S
RXGXGEVVMDVQVEKVVKENEDVKAMKVSRLETPV

SEQ ID NO: 61840 - protein, 31 aa, Artificial Sequence; identical to SEQ ID NO: 21392
  Cyclic GFR-binding peptide
  MOD_RES (30)..(30): Xaa is C or S

SEQ ID NO: 61841 - protein, 27 aa, Artificial Sequence
  Cyclic GFR-binding peptide
VVMNVQVEKIVNSSDDVKAVKVSRLKT

SEQ ID NO: 61842 - protein, 39 aa, Artificial Sequence; identical to SEQ ID NO: 46328
  Cyclic GFR-binding peptide
  MOD_RES (1)..(3)..(34)..(35): Xaa is C or S

SEQ ID NO: 61843 - protein, 30 aa, Artificial Sequence
  Cyclic GFR-binding peptide
SKVVMVTAKKVKPTRGVIKRIQVPRLDQPV

SEQ ID NO: 61844 - protein, 30 aa, Artificial Sequence; identical to SEQ ID NO: 11368
  Cyclic GFR-binding peptide
  MOD_RES (27)..(28): Xaa is C or S

SEQ ID NO: 61845 - protein, 40 aa, Artificial Sequence
  Cyclic GFR-binding peptide
  MOD_RES (1)..(3)..(35): Xaa is C or S
XGXSRVVMNVTAKKIVNSSDDIKRVQVPRLKTPAXTPKTV

SEQ ID NO: 61846 - protein, 22 aa, Artificial Sequence
  Cyclic GFR-binding peptide
NNSLQEIVNSSDDYYVVPLPEL

SEQ ID NO: 61847 - protein, 25 aa, Artificial Sequence
  Cyclic GFR-binding peptide
VMNVQVEKIVNSSDDVKAVKVSRLQ

SEQ ID NO: 61848 - protein, 26 aa, Artificial Sequence
  Cyclic GFR-binding peptide
VIMVQVEKIKPTKGIVKAIKVSRLDQ

SEQ ID NO: 61849 - protein, 22 aa, Artificial Sequence
  Cyclic GFR-binding peptide
ESMEGIVVKDYEDMIQMTINSL

SEQ ID NO: 61850 - protein, 25 aa, Artificial Sequence
  Cyclic GFR-binding peptide
DNSLQEVVKENEDYYVMPLPELETP

SEQ ID NO: 61851 - protein, 34 aa, Artificial Sequence; identical to SEQ ID NO: 21401
  Cyclic GFR-binding peptide
  MOD_RES (2)..(4): Xaa is C or S

SEQ ID NO: 61852 - protein, 32 aa, Artificial Sequence
  Cyclic GFR-binding peptide
  MOD_RES (29)..(30): Xaa is C or S
VVMSMEGIVKPTRGVMIQITINSLDQPVXXPS

SEQ ID NO: 61853 - protein, 30 aa, Artificial Sequence
  Cyclic GFR-binding peptide
  MOD_RES (2)..(4): Xaa is C or S
RXGXGEVVMDVQVEKVVKENEDVKAMKVSR

SEQ ID NO: 61854 - protein, 30 aa, Artificial Sequence
  Cyclic GFR-binding peptide
  MOD_RES (30)..(30): Xaa is C or S
VVMNVTAKKIVNSSDDIKRVQVPRLKTPAX

SEQ ID NO: 61855 - protein, 24 aa, Artificial Sequence
  Cyclic GFR-binding peptide
NSLQEIVNSSDDYYLVTLPELKTP

SEQ ID NO: 61856 - protein, 30 aa, Artificial Sequence; identical to SEQ ID NO: 11386
  Cyclic GFR-binding peptide
  MOD_RES (1)..(1): Xaa is C or S

SEQ ID NO: 61857 - protein, 31 aa, Artificial Sequence; identical to SEQ ID NO: 21405
  Cyclic GFR-binding peptide
  MOD_RES (1)..(1): Xaa is C or S

SEQ ID NO: 61858 - protein, 29 aa, Artificial Sequence
  Cyclic GFR-binding peptide
EELRSMEGILKPKKRVYEMIQVTINSHHV

SEQ ID NO: 61859 - protein, 36 aa, Artificial Sequence
  Cyclic GFR-binding peptide
  MOD_RES (2)..(34)..(35): Xaa is C or S
GXARVVMNVTAKKIVNSSDDIKRVQVPRLQTPAXXP

SEQ ID NO: 61860 - protein, 32 aa, Artificial Sequence
  Cyclic GFR-binding peptide
  MOD_RES (1)..(1): Xaa is C or S
XGEVVMDVQVEKVVKENEDVKAMKVSRLETPV

SEQ ID NO: 61861 - protein, 29 aa, Artificial Sequence
  Cyclic GFR-binding peptide
  MOD_RES (26)..(27): Xaa is C or S
VQVEKVKPTRGVVKAIKVSRLDQPVXXPS

SEQ ID NO: 61862 - protein, 35 aa, Artificial Sequence; identical to SEQ ID NO: 21409
  Cyclic GFR-binding peptide
  MOD_RES (35)..(35): Xaa is C or S

SEQ ID NO: 61863 - protein, 33 aa, Artificial Sequence
  Cyclic GFR-binding peptide
  MOD_RES (2)..(2): Xaa is C or S
GXGEVVMESMEGIVVKDYEDMIQMTINSLETPV

SEQ ID NO: 61864 - protein, 34 aa, Artificial Sequence; identical to SEQ ID NO: 21412
  Cyclic GFR-binding peptide
  MOD_RES (34)..(34): Xaa is C or S

SEQ ID NO: 61865 - protein, 35 aa, Artificial Sequence
  Cyclic GFR-binding peptide
  MOD_RES (1)..(3): Xaa is C or S
XKXALHDELTNSLQEFIPKKRVIEYYLVTLPELQV

SEQ ID NO: 61866 - protein, 41 aa, Artificial Sequence
  Cyclic GFR-binding peptide
  MOD_RES (37)..(37): Xaa is C or S
ELHEELRNSLQELKPKKRVYEYYVVPLPEHHVRSPQXKVSS

SEQ ID NO: 61867 - protein, 40 aa, Artificial Sequence; identical to SEQ ID NO: 11405
  Cyclic GFR-binding peptide
  MOD_RES (1)..(3)..(34)..(35): Xaa is C or S

SEQ ID NO: 61868 - protein, 25 aa, Artificial Sequence
  Cyclic GFR-binding peptide
VMNNSLQEIVNSSDDYYLVTLPELK

SEQ ID NO: 61869 - protein, 30 aa, Artificial Sequence
  Cyclic GFR-binding peptide
QLFNSLQEHQGQHPKIRYYVMPLPEEETPV

SEQ ID NO: 61870 - protein, 28 aa, Artificial Sequence
  Cyclic GFR-binding peptide
KVIMSMEGIIKPTKGIMIQITINSLDQS

SEQ ID NO: 61871 - protein, 25 aa, Artificial Sequence
  Cyclic GFR-binding peptide
MVQVEKVKPTRGVVKAIKVSRLDQP

SEQ ID NO: 61872 - protein, 31 aa, Artificial Sequence; identical to SEQ ID NO: 11410
  Cyclic GFR-binding peptide

SEQ ID NO: 61873 - protein, 38 aa, Artificial Sequence
  Cyclic GFR-binding peptide
  MOD_RES (1)..(3)..(34)..(35): Xaa is C or S
XKXSKVIMSMEGIIKPTKGIMIQITINSLDQSVXXPSA

SEQ ID NO: 61874 - protein, 28 aa, Artificial Sequence
  Cyclic GFR-binding peptide
LRVTAKKLKPKKRVYEIKRVQVPRHHVR

SEQ ID NO: 61875 - protein, 32 aa, Artificial Sequence; identical to SEQ ID NO: 11413
  Cyclic GFR-binding peptide
  MOD_RES (1)..(1): Xaa is C or S

SEQ ID NO: 61876 - protein, 24 aa, Artificial Sequence
  Cyclic GFR-binding peptide
MDNSLQEVVKENEDYYVMPLPELE

SEQ ID NO: 61877 - protein, 37 aa, Artificial Sequence
  Cyclic GFR-binding peptide
  MOD_RES (32)..(32): Xaa is C or S
SRVVMNVTAKKIVNSSDDIKRVQVPRLKTPAXTPKTV

SEQ ID NO: 61878 - protein, 34 aa, Artificial Sequence
  Cyclic GFR-binding peptide
  MOD_RES (30)..(30): Xaa is C or S
LFNSLQEHQGQHPKIRYYLMTLPEEETPVXELGE

SEQ ID NO: 61879 - protein, 35 aa, Artificial Sequence; identical to SEQ ID NO: 11419
  Cyclic GFR-binding peptide
  MOD_RES (31)..(32): Xaa is C or S

SEQ ID NO: 61880 - protein, 42 aa, Artificial Sequence; identical to SEQ ID NO: 21426
  Cyclic GFR-binding peptide
  MOD_RES (1)..(3)..(37): Xaa is C or S

SEQ ID NO: 61881 - protein, 28 aa, Artificial Sequence
  Cyclic GFR-binding peptide
  MOD_RES (26)..(26): Xaa is C or S
NSLQEIVNSSDDYYLVTLPELKTPAXTP

SEQ ID NO: 61882 - protein, 23 aa, Artificial Sequence
  Cyclic GFR-binding peptide
VQVEKVKPKRGVVKAIKVSRLAQ

SEQ ID NO: 61883 - protein, 35 aa, Artificial Sequence
  Cyclic GFR-binding peptide
  MOD_RES (30)..(30): Xaa is C or S
VVMNVQVEKIVNSSDDVKAVKVSRLKTPAXTPKTV

SEQ ID NO: 61884 - protein, 35 aa, Artificial Sequence
  Cyclic GFR-binding peptide
  MOD_RES (30)..(31): Xaa is C or S
VVMNVTAKKIVNSSDDIKRVQVPRLKTPAXXPKPV

SEQ ID NO: 61885 - protein, 30 aa, Artificial Sequence; identical to SEQ ID NO: 21432
  Cyclic GFR-binding peptide
  MOD_RES (29)..(29): Xaa is C or S

SEQ ID NO: 61886 - protein, 27 aa, Artificial Sequence
  Cyclic GFR-binding peptide
SKVIMNSLQEIKPTKGIYYVIPLPELD

SEQ ID NO: 61887 - protein, 21 aa, Artificial Sequence
  Cyclic GFR-binding peptide
NSLQEVKPTRGVYYVIPLPEL

SEQ ID NO: 61888 - protein, 39 aa, Artificial Sequence
  Cyclic GFR-binding peptide
  MOD_RES (1)..(3)..(35)..(36): Xaa is C or S
XGXGEVVMDVTAKKVVKENEDIKRMQVPRLETPVXXAKP

SEQ ID NO: 61889 - protein, 36 aa, Artificial Sequence; identical to SEQ ID NO: 21436
  Cyclic GFR-binding peptide
  MOD_RES (34)..(34): Xaa is C or S

SEQ ID NO: 61890 - protein, 24 aa, Artificial Sequence
  Cyclic GFR-binding peptide
LRNSLQELKPKKRVYEYYVVPLPE

SEQ ID NO: 61891 - protein, 24 aa, Artificial Sequence
  Cyclic GFR-binding peptide
ESMEGIVVKDYEDMIQMTINSLET

SEQ ID NO: 61892 - protein, 35 aa, Artificial Sequence; identical to SEQ ID NO: 21438
  Cyclic GFR-binding peptide
  MOD_RES (33)..(33): Xaa is C or S

SEQ ID NO: 61893 - protein, 29 aa, Artificial Sequence
  Cyclic GFR-binding peptide
RVVMNVQVEKIVNSSDDVKAVKVSRLKTP

SEQ ID NO: 61894 - protein, 32 aa, Artificial Sequence; identical to SEQ ID NO: 11445
  Cyclic GFR-binding peptide
  MOD_RES (30)..(30): Xaa is C or S

SEQ ID NO: 61895 - protein, 24 aa, Artificial Sequence
  Cyclic GFR-binding peptide
KVVMSMEGIVKPTRGVMIQITINS

SEQ ID NO: 61896 - protein, 31 aa, Artificial Sequence; identical to SEQ ID NO: 21450
  Cyclic GFR-binding peptide
  MOD_RES (30)..(30): Xaa is C or S

SEQ ID NO: 61897 - protein, 28 aa, Artificial Sequence
  Cyclic GFR-binding peptide
  MOD_RES (27)..(28): Xaa is C or S
MVTAKKVKPKRGVIKRIQVPRLAQPVXX

SEQ ID NO: 61898 - protein, 29 aa, Artificial Sequence
  Cyclic GFR-binding peptide
  MOD_RES (29)..(29): Xaa is C or S
FNSLQEHQGQHPKIRYYVMPLPEEETPVX

SEQ ID NO: 61899 - protein, 34 aa, Artificial Sequence
  Cyclic GFR-binding peptide
  MOD_RES (31)..(31): Xaa is C or S
RVVMNSMEGIIVNSSDDMIQVTINSLKTPAXTPK

SEQ ID NO: 61900 - protein, 30 aa, Artificial Sequence
  Cyclic GFR-binding peptide
  MOD_RES (26)..(27): Xaa is C or S
VQVEKIVNSSDDVKAVKVSRLKTPAXXPKP

SEQ ID NO: 61901 - protein, 32 aa, Artificial Sequence; identical to SEQ ID NO: 11462
  Cyclic GFR-binding peptide
  MOD_RES (32)..(32): Xaa is C or S

SEQ ID NO: 61902 - protein, 39 aa, Artificial Sequence; identical to SEQ ID NO: 11463
  Cyclic GFR-binding peptide
  MOD_RES (1)..(3)..(35)..(36): Xaa is C or S

SEQ ID NO: 61903 - protein, 40 aa, Artificial Sequence
  Cyclic GFR-binding peptide
  MOD_RES (1)..(3)..(34)..(35): Xaa is C or S
XKXSKVVMVTAKKVKPTRGVIKRIQVPRLDQPVXXPSASA

SEQ ID NO: 61904 - protein, 38 aa, Artificial Sequence; identical to SEQ ID NO: 21458
  Cyclic GFR-binding peptide
  MOD_RES (34)..(34): Xaa is C or S

SEQ ID NO: 61905 - protein, 26 aa, Artificial Sequence
  Cyclic GFR-binding peptide
  MOD_RES (26)..(26): Xaa is C or S
NSLQEIVNSSDDYYVVPLPELQTPAX

SEQ ID NO: 61906 - protein, 32 aa, Artificial Sequence; identical to SEQ ID NO: 11466
  Cyclic GFR-binding peptide
  MOD_RES (26)..(27): Xaa is C or S

SEQ ID NO: 61907 - protein, 25 aa, Artificial Sequence
  Cyclic GFR-binding peptide
MNNSLQEIVNSSDDYYLVTLPELKT

SEQ ID NO: 61908 - protein, 32 aa, Artificial Sequence; identical to SEQ ID NO: 21463
  Cyclic GFR-binding peptide
  MOD_RES (1)..(3): Xaa is C or S

SEQ ID NO: 61909 - protein, 30 aa, Artificial Sequence
  Cyclic GFR-binding peptide
KNHQLFNSLQEHQGQHPKIRYYLMTLPEEE

SEQ ID NO: 61910 - protein, 27 aa, Artificial Sequence
  Cyclic GFR-binding peptide
SMEGIFIPKKRVIEMIQVTINSLQVQT

SEQ ID NO: 61911 - protein, 39 aa, Artificial Sequence
  Cyclic GFR-binding peptide
  MOD_RES (2)..(4)..(35)..(36): Xaa is C or S
SXKXSKVVMVTAKKVKPTRGVIKRIQVPRLDQPVXXPSA

SEQ ID NO: 61912 - protein, 35 aa, Artificial Sequence
  Cyclic GFR-binding peptide
  MOD_RES (31)..(32): Xaa is C or S
EVVMDSMEGIVVKENEDMIQMTINSLETPVXXAKP

SEQ ID NO: 61913 - protein, 36 aa, Artificial Sequence; identical to SEQ ID NO: 21467
  Cyclic GFR-binding peptide
  MOD_RES (32)..(32): Xaa is C or S

SEQ ID NO: 61914 - protein, 31 aa, Artificial Sequence
  Cyclic GFR-binding peptide
ELRNSLQELKPKKRVYEYYVVPLPEHHVRSP

SEQ ID NO: 61915 - protein, 25 aa, Artificial Sequence
  Cyclic GFR-binding peptide
VVMNVQVEKIVNSSDDVKAVKVSRL

SEQ ID NO: 61916 - protein, 23 aa, Artificial Sequence
  Cyclic GFR-binding peptide
MSMEGIVKPTRGVMIQITINSLD

SEQ ID NO: 61917 - protein, 23 aa, Artificial Sequence
  Cyclic GFR-binding peptide
NVQVEKIVNSSDDVKAVKVSRLQ

SEQ ID NO: 61918 - protein, 33 aa, Artificial Sequence
  Cyclic GFR-binding peptide
  MOD_RES (29)..(29): Xaa is C or S
FNSLQEHQGQHPKIRYYVMPLPEEETPVXELGE

SEQ ID NO: 61919 - protein, 34 aa, Artificial Sequence; identical to SEQ ID NO: 11484
  Cyclic GFR-binding peptide
  MOD_RES (31)..(31): Xaa is C or S

SEQ ID NO: 61920 - protein, 36 aa, Artificial Sequence
  Cyclic GFR-binding peptide
  MOD_RES (2)..(2): Xaa is C or S
KXALHDELTNSLQEFIPKKRVIEYYLVTLPELQVQT

SEQ ID NO: 61921 - protein, 31 aa, Artificial Sequence
  Cyclic GFR-binding peptide
  MOD_RES (26)..(27): Xaa is C or S
VTAKKVKPKRGVIKRIQVPRLAQPVXXPAAS

SEQ ID NO: 61922 - protein, 35 aa, Artificial Sequence
  Cyclic GFR-binding peptide
  MOD_RES (1)..(33)..(34): Xaa is C or S
XSRVVMNVTAKKIVNSSDDIKRVQVPRLKTPAXXP

SEQ ID NO: 61923 - protein, 35 aa, Artificial Sequence
  Cyclic GFR-binding peptide
  MOD_RES (32)..(32): Xaa is C or S
LTNSLQEFIPKKRVIEYYLVTLPELQVQTPRXQVN

SEQ ID NO: 61924 - protein, 27 aa, Artificial Sequence
  Cyclic GFR-binding peptide
NHQLFVTAKKHQGQHPKIRIKRMQVPR

SEQ ID NO: 61925 - protein, 32 aa, Artificial Sequence; identical to SEQ ID NO: 21482
  Cyclic GFR-binding peptide

SEQ ID NO: 61926 - protein, 27 aa, Artificial Sequence
  Cyclic GFR-binding peptide
ELTNSLQEFIPKKRVIEYYVVPLPELQ

SEQ ID NO: 61927 - protein, 29 aa, Artificial Sequence
  Cyclic GFR-binding peptide
  MOD_RES (1)..(1): Xaa is C or S
XSRVIMSMEGIVKPKRGVMIQITINSLAQ

SEQ ID NO: 61928 - protein, 28 aa, Artificial Sequence
  Cyclic GFR-binding peptide
  MOD_RES (2)..(2): Xaa is C or S
GXSRVVMNNSLQEIVNSSDDYYVVPLPE

SEQ ID NO: 61929 - protein, 25 aa, Artificial Sequence
  Cyclic GFR-binding peptide
RVVMNVTAKKIVNSSDDIKRVQVPR

SEQ ID NO: 61930 - protein, 28 aa, Artificial Sequence
  Cyclic GFR-binding peptide
RVVMNVQVEKIVNSSDDVKAVKVSRLKT

SEQ ID NO: 61931 - protein, 41 aa, Artificial Sequence; identical to SEQ ID NO: 21488
  Cyclic GFR-binding peptide
  MOD_RES (1)..(38): Xaa is C or S

SEQ ID NO: 61932 - protein, 32 aa, Artificial Sequence; identical to SEQ ID NO: 21490
  Cyclic GFR-binding peptide
  MOD_RES (31)..(31): Xaa is C or S

SEQ ID NO: 61933 - protein, 34 aa, Artificial Sequence
  Cyclic GFR-binding peptide
  MOD_RES (1)..(3)..(34): Xaa is C or S
XKXSKVIMSMEGIIKPTKGIMIQITINSLDQSVX

SEQ ID NO: 61934 - protein, 36 aa, Artificial Sequence; identical to SEQ ID NO: 21492
  Cyclic GFR-binding peptide
  MOD_RES (1)..(35): Xaa is C or S

SEQ ID NO: 61935 - protein, 28 aa, Artificial Sequence
  Cyclic GFR-binding peptide
GEVVMENSLQEVVKDYEDYYVMPLPELE

SEQ ID NO: 61936 - protein, 34 aa, Artificial Sequence
  Cyclic GFR-binding peptide
  MOD_RES (30)..(31): Xaa is C or S
VVMNVQVEKIVNSSDDVKAVKVSRLKTPAXXPKP

SEQ ID NO: 61937 - protein, 31 aa, Artificial Sequence
  Cyclic GFR-binding peptide
HDELTNSLQEFIPKKRVIEYYLVTLPELQVQ

SEQ ID NO: 61938 - protein, 30 aa, Artificial Sequence; identical to SEQ ID NO: 11504
  Cyclic GFR-binding peptide
  MOD_RES (29)..(30): Xaa is C or S

SEQ ID NO: 61939 - protein, 34 aa, Artificial Sequence
  Cyclic GFR-binding peptide
  MOD_RES (28)..(28): Xaa is C or S
NSLQEHQGQHPKIRYYVMPLPEEETPVXELGEDN

SEQ ID NO: 61940 - protein, 34 aa, Artificial Sequence; identical to SEQ ID NO: 11507
  Cyclic GFR-binding peptide
  MOD_RES (32)..(33): Xaa is C or S

SEQ ID NO: 61941 - protein, 31 aa, Artificial Sequence
  Cyclic GFR-binding peptide
  MOD_RES (26)..(27): Xaa is C or S
VTAKKIVNSSDDIKRVQVPRLKTPAXXPKPV

SEQ ID NO: 61942 - protein, 32 aa, Artificial Sequence
  Cyclic GFR-binding peptide
  MOD_RES (29)..(30): Xaa is C or S
VMNVQVEKIVNSSDDVKAVKVSRLQTPAXXPK

SEQ ID NO: 61943 - protein, 32 aa, Artificial Sequence; identical to SEQ ID NO: 11509
  Cyclic GFR-binding peptide
  MOD_RES (28)..(29): Xaa is C or S

SEQ ID NO: 61944 - protein, 33 aa, Artificial Sequence; identical to SEQ ID NO: 11510
  Cyclic GFR-binding peptide
  MOD_RES (30)..(31): Xaa is C or S

SEQ ID NO: 61945 - protein, 35 aa, Artificial Sequence; identical to SEQ ID NO: 21499
  Cyclic GFR-binding peptide
  MOD_RES (34)..(34): Xaa is C or S

SEQ ID NO: 61946 - protein, 29 aa, Artificial Sequence
  Cyclic GFR-binding peptide
GEVVMEVQVEKVVKDYEDVKAMKVSRLET

SEQ ID NO: 61947 - protein, 40 aa, Artificial Sequence
  Cyclic GFR-binding peptide
  MOD_RES (1)..(3)..(34)..(35): Xaa is C or S
XKXSKVIMVQVEKIKPTKGIVKAIKVSRLDQSVXXPSASA

SEQ ID NO: 61948 - protein, 30 aa, Artificial Sequence; identical to SEQ ID NO: 11520
  Cyclic GFR-binding peptide

SEQ ID NO: 61949 - protein, 31 aa, Artificial Sequence
  Cyclic GFR-binding peptide
  MOD_RES (2)..(2): Xaa is C or S
GXARVVMNSMEGIIVNSSDDMIQVTINSLQT

SEQ ID NO: 61950 - protein, 24 aa, Artificial Sequence
  Cyclic GFR-binding peptide
DNSLQEVVKENEDYYVMPLPELET

SEQ ID NO: 61951 - protein, 31 aa, Artificial Sequence
  Cyclic GFR-binding peptide
  MOD_RES (2)..(4): Xaa is C or S
SXKXSKVVMSMEGIVKPTRGVMIQITINSLD

SEQ ID NO: 61952 - protein, 38 aa, Artificial Sequence; identical to SEQ ID NO: 11526
  Cyclic GFR-binding peptide
  MOD_RES (2)..(4)..(36)..(37): Xaa is C or S

SEQ ID NO: 61953 - protein, 32 aa, Artificial Sequence; identical to SEQ ID NO: 11527
  Cyclic GFR-binding peptide
  MOD_RES (1)..(3): Xaa is C or S

SEQ ID NO: 61954 - protein, 32 aa, Artificial Sequence
  Cyclic GFR-binding peptide
KNHQLFNSLQEHQGQHPKIRYYLMTLPEEETP

SEQ ID NO: 61955 - protein, 31 aa, Artificial Sequence
  Cyclic GFR-binding peptide
  MOD_RES (1)..(1): Xaa is C or S
XALHDELTNSLQEFIPKKRVIEYYVVPLPEL

SEQ ID NO: 61956 - protein, 35 aa, Artificial Sequence
  Cyclic GFR-binding peptide
  MOD_RES (1)..(32)..(33): Xaa is C or S
XSRVIMVQVEKVKPKRGVVKAIKVSRLAQPVXXPA

SEQ ID NO: 61957 - protein, 32 aa, Artificial Sequence
  Cyclic GFR-binding peptide
  MOD_RES (27)..(27): Xaa is C or S
NVQVEKIVNSSDDVKAVKVSRLKTPAXTPKTV

SEQ ID NO: 61958 - protein, 22 aa, Artificial Sequence
  Cyclic GFR-binding peptide
DNSLQEVVKENEDYYVMPLPEL

SEQ ID NO: 61959 - protein, 28 aa, Artificial Sequence
  Cyclic GFR-binding peptide
  MOD_RES (2)..(2): Xaa is C or S
GXSRVVMNVQVEKIVNSSDDVKAVKVSR

SEQ ID NO: 61960 - protein, 30 aa, Artificial Sequence
  Cyclic GFR-binding peptide
  MOD_RES (29)..(30): Xaa is C or S
VVMVTAKKVKPTRGVIKRIQVPRLDQPVXX

SEQ ID NO: 61961 - protein, 38 aa, Artificial Sequence
  Cyclic GFR-binding peptide
  MOD_RES (1)..(38): Xaa is C or S
XELHEELRNSLQELKPKKRVYEYYVVPLPEHHVRSPQX

SEQ ID NO: 61962 - protein, 28 aa, Artificial Sequence
  Cyclic GFR-binding peptide
  MOD_RES (26)..(27): Xaa is C or S
VQVEKVVKENEDVKAMKVSRLETPVXXA

SEQ ID NO: 61963 - protein, 31 aa, Artificial Sequence
  Cyclic GFR-binding peptide
  MOD_RES (29)..(30): Xaa is C or S
VMNVQVEKIVNSSDDVKAVKVSRLKTPAXXP

SEQ ID NO: 61964 - protein, 39 aa, Artificial Sequence
  Cyclic GFR-binding peptide
  MOD_RES (1)..(3)..(34)..(35): Xaa is C or S
XKXSKVVMVQVEKVKPTRGVVKAIKVSRLDQPVXXPSAS

SEQ ID NO: 61965 - protein, 33 aa, Artificial Sequence; identical to SEQ ID NO: 11540
  Cyclic GFR-binding peptide
  MOD_RES (28)..(29): Xaa is C or S

SEQ ID NO: 61966 - protein, 33 aa, Artificial Sequence
  Cyclic GFR-binding peptide
  MOD_RES (28)..(29): Xaa is C or S
IMVQVEKIKPTKGIVKAIKVSRLDQSVXXPSAS

SEQ ID NO: 61967 - protein, 34 aa, Artificial Sequence
  Cyclic GFR-binding peptide
  MOD_RES (31)..(31): Xaa is C or S
RVVMNVQVEKIVNSSDDVKAVKVSRLKTPAXTPK

SEQ ID NO: 61968 - protein, 25 aa, Artificial Sequence
  Cyclic GFR-binding peptide
ESMEGIVVKDYEDMIQMTINSLETP

SEQ ID NO: 61969 - protein, 38 aa, Artificial Sequence
  Cyclic GFR-binding peptide
  MOD_RES (1)..(3)..(35)..(36): Xaa is C or S
XGXARVVMNVQVEKIVNSSDDVKAVKVSRLQTPAXXPK

SEQ ID NO: 61970 - protein, 34 aa, Artificial Sequence
  Cyclic GFR-binding peptide
  MOD_RES (2)..(2): Xaa is C or S
KXALHDELTNSLQEFIPKKRVIEYYLVTLPELQV

SEQ ID NO: 61971 - protein, 33 aa, Artificial Sequence; identical to SEQ ID NO: 11551
  Cyclic GFR-binding peptide
  MOD_RES (29)..(30): Xaa is C or S

SEQ ID NO: 61972 - protein, 26 aa, Artificial Sequence
  Cyclic GFR-binding peptide
NSLQEHQGQHPKIRYYVMPLPEEETP

SEQ ID NO: 61973 - protein, 33 aa, Artificial Sequence
  Cyclic GFR-binding peptide
LHEELRNSLQELKPKKRVYEYYVVPLPEHHVRS

SEQ ID NO: 61974 - protein, 28 aa, Artificial Sequence
  Cyclic GFR-binding peptide
SRVIMVTAKKVKPKRGVIKRIQVPRLAQ

SEQ ID NO: 61975 - protein, 27 aa, Artificial Sequence
  Cyclic GFR-binding peptide
VVMEVTAKKVVKDYEDIKRMQVPRLET

SEQ ID NO: 61976 - protein, 30 aa, Artificial Sequence; identical to SEQ ID NO: 11564
  Cyclic GFR-binding peptide
  MOD_RES (27)..(28): Xaa is C or S

SEQ ID NO: 61977 - protein, 22 aa, Artificial Sequence
  Cyclic GFR-binding peptide
MSMEGIVKPTRGVMIQITINSL

SEQ ID NO: 61978 - protein, 28 aa, Artificial Sequence
  Cyclic GFR-binding peptide
RVVMNSMEGIIVNSSDDMIQVTINSLKT

SEQ ID NO: 61979 - protein, 35 aa, Artificial Sequence
  Cyclic GFR-binding peptide
  MOD_RES (31)..(32): Xaa is C or S
SKVIMVTAKKIKPTKGIIKRIQVPRLDQSVXXPSA

SEQ ID NO: 61980 - protein, 26 aa, Artificial Sequence
  Cyclic GFR-binding peptide
VVMEVQVEKVVKDYEDVKAMKVSRLE

SEQ ID NO: 61981 - protein, 27 aa, Artificial Sequence
  Cyclic GFR-binding peptide
MNVTAKKIVNSSDDIKRVQVPRLKTPA

SEQ ID NO: 61982 - protein, 43 aa, Artificial Sequence; identical to SEQ ID NO: 21554
  Cyclic GFR-binding peptide
  MOD_RES (2)..(39): Xaa is C or S

SEQ ID NO: 61983 - protein, 22 aa, Artificial Sequence
  Cyclic GFR-binding peptide
VTAKKLKPKKRVYEIKRVQVPR

SEQ ID NO: 61984 - protein, 34 aa, Artificial Sequence
  Cyclic GFR-binding peptide
  MOD_RES (1)..(3): Xaa is C or S
XGXSRVVMNSMEGIIVNSSDDMIQVTINSLKTPA

SEQ ID NO: 61985 - protein, 28 aa, Artificial Sequence
  Cyclic GFR-binding peptide
DELTNSLQEFIPKKRVIEYYVVPLPELQ

SEQ ID NO: 61986 - protein, 33 aa, Artificial Sequence; identical to SEQ ID NO: 11595
  Cyclic GFR-binding peptide
  MOD_RES (1)..(3): Xaa is C or S

SEQ ID NO: 61987 - protein, 27 aa, Artificial Sequence
  Cyclic GFR-binding peptide
  MOD_RES (26)..(26): Xaa is C or S
VTAKKIVNSSDDIKRVQVPRLKTPAXT

SEQ ID NO: 61988 - protein, 32 aa, Artificial Sequence
  Cyclic GFR-binding peptide
  MOD_RES (29)..(30): Xaa is C or S
VMDSMEGIVVKENEDMIQMTINSLETPVXXAK

SEQ ID NO: 61989 - protein, 32 aa, Artificial Sequence; identical to SEQ ID NO: 21564
  Cyclic GFR-binding peptide
  MOD_RES (32)..(32): Xaa is C or S

SEQ ID NO: 61990 - protein, 31 aa, Artificial Sequence
  Cyclic GFR-binding peptide
  MOD_RES (1)..(1): Xaa is C or S
XSRVIMVQVEKVKPKRGVVKAIKVSRLAQPV

SEQ ID NO: 61991 - protein, 37 aa, Artificial Sequence
  Cyclic GFR-binding peptide
  MOD_RES (2)..(4)..(36)..(37): Xaa is C or S
RXGXGEVVMEVTAKKVVKDYEDIKRMQVPRLETPVXX

SEQ ID NO: 61992 - protein, 20 aa, Artificial Sequence
  Cyclic GFR-binding peptide
VTAKKIVNSSDDIKRVQVPR

SEQ ID NO: 61993 - protein, 29 aa, Artificial Sequence
  Cyclic GFR-binding peptide
RNSLQELKPKKRVYEYYVVPLPEHHVRSP

SEQ ID NO: 61994 - protein, 34 aa, Artificial Sequence
  Cyclic GFR-binding peptide
  MOD_RES (31)..(32): Xaa is C or S
SKVVMVQVEKVKPTRGVVKAIKVSRLDQPVXXPS

SEQ ID NO: 61995 - protein, 39 aa, Artificial Sequence; identical to SEQ ID NO: 46508
  Cyclic GFR-binding peptide
  MOD_RES (2)..(4)..(35)..(36): Xaa is C or S

SEQ ID NO: 61996 - protein, 34 aa, Artificial Sequence; identical to SEQ ID NO: 11612
  Cyclic GFR-binding peptide
  MOD_RES (32)..(32): Xaa is C or S

SEQ ID NO: 61997 - protein, 25 aa, Artificial Sequence
  Cyclic GFR-binding peptide
MEVTAKKVVKDYEDIKRMQVPRLET

SEQ ID NO: 61998 - protein, 29 aa, Artificial Sequence
  Cyclic GFR-binding peptide
  MOD_RES (26)..(27): Xaa is C or S
VTAKKIKPTKGIIKRIQVPRLDQSVXXPS

SEQ ID NO: 61999 - protein, 30 aa, Artificial Sequence; identical to SEQ ID NO: 21582
  Cyclic GFR-binding peptide

SEQ ID NO: 62000 - protein, 38 aa, Artificial Sequence
  Cyclic GFR-binding peptide
  MOD_RES (1)..(33)..(34): Xaa is C or S
XGEVVMEVTAKKVVKDYEDIKRMQVPRLETPVXXAKPI

SEQ ID NO: 62001 - protein, 40 aa, Artificial Sequence
  Cyclic GFR-binding peptide
  MOD_RES (1)..(3)..(35)..(36): Xaa is C or S
XGXARVVMNVTAKKIVNSSDDIKRVQVPRLQTPAXXPKPV

SEQ ID NO: 62002 - protein, 32 aa, Artificial Sequence
  Cyclic GFR-binding peptide
  MOD_RES (28)..(29): Xaa is C or S
MNVQVEKIVNSSDDVKAVKVSRLQTPAXXPKP

SEQ ID NO: 62003 - protein, 30 aa, Artificial Sequence; identical to SEQ ID NO: 11618
  Cyclic GFR-binding peptide
  MOD_RES (2)..(4): Xaa is C or S

SEQ ID NO: 62004 - protein, 32 aa, Artificial Sequence; identical to SEQ ID NO: 11619
  Cyclic GFR-binding peptide
  MOD_RES (2)..(4): Xaa is C or S

SEQ ID NO: 62005 - protein, 33 aa, Artificial Sequence
  Cyclic GFR-binding peptide
  MOD_RES (31)..(32): Xaa is C or S
RVVMNSMEGIIVNSSDDMIQVTINSLQTPAXXP

SEQ ID NO: 62006 - protein, 33 aa, Artificial Sequence; identical to SEQ ID NO: 11623
  Cyclic GFR-binding peptide
  MOD_RES (27)..(28): Xaa is C or S

SEQ ID NO: 62007 - protein, 38 aa, Artificial Sequence; identical to SEQ ID NO: 21591
  Cyclic GFR-binding peptide
  MOD_RES (37)..(37): Xaa is C or S

SEQ ID NO: 62008 - protein, 35 aa, Artificial Sequence
  Cyclic GFR-binding peptide
  MOD_RES (32)..(33): Xaa is C or S
GEVVMDSMEGIVVKENEDMIQMTINSLETPVXXAK

SEQ ID NO: 62009 - protein, 30 aa, Artificial Sequence; identical to SEQ ID NO: 11626
  Cyclic GFR-binding peptide
  MOD_RES (1)..(3): Xaa is C or S

SEQ ID NO: 62010 - protein, 29 aa, Artificial Sequence
  Cyclic GFR-binding peptide
RVVMNNSLQEIVNSSDDYYLVTLPELKTP

SEQ ID NO: 62011 - protein, 33 aa, Artificial Sequence
  Cyclic GFR-binding peptide
  MOD_RES (28)..(29): Xaa is C or S
IMVTAKKVKPKRGVIKRIQVPRLAQPVXXPAAS

SEQ ID NO: 62012 - protein, 30 aa, Artificial Sequence; identical to SEQ ID NO: 11631
  Cyclic GFR-binding peptide

SEQ ID NO: 62013 - protein, 27 aa, Artificial Sequence
  Cyclic GFR-binding peptide
  MOD_RES (26)..(27): Xaa is C or S
SMEGIIVNSSDDMIQVTINSLKTPAXX

SEQ ID NO: 62014 - protein, 35 aa, Artificial Sequence
  Cyclic GFR-binding peptide
  MOD_RES (2)..(33)..(34): Xaa is C or S
KXSKVVMVQVEKVKPTRGVVKAIKVSRLDQPVXXP

SEQ ID NO: 62015 - protein, 30 aa, Artificial Sequence
  Cyclic GFR-binding peptide
  MOD_RES (29)..(30): Xaa is C or S
VMNVTAKKIVNSSDDIKRVQVPRLKTPAXX

SEQ ID NO: 62016 - protein, 24 aa, Artificial Sequence
  Cyclic GFR-binding peptide
MNVTAKKIVNSSDDIKRVQVPRLK

SEQ ID NO: 62017 - protein, 41 aa, Artificial Sequence; identical to SEQ ID NO: 21603
  Cyclic GFR-binding peptide
  MOD_RES (2)..(39): Xaa is C or S

SEQ ID NO: 62018 - protein, 30 aa, Artificial Sequence
  Cyclic GFR-binding peptide
SKVIMVQVEKIKPTKGIVKAIKVSRLDQSV

SEQ ID NO: 62019 - protein, 36 aa, Artificial Sequence; identical to SEQ ID NO: 11635
  Cyclic GFR-binding peptide
  MOD_RES (30)..(31): Xaa is C or S

SEQ ID NO: 62020 - protein, 30 aa, Artificial Sequence
  Cyclic GFR-binding peptide
  MOD_RES (1)..(3): Xaa is C or S
XGXGEVVMESMEGIVVKDYEDMIQMTINSL

SEQ ID NO: 62021 - protein, 26 aa, Artificial Sequence
  Cyclic GFR-binding peptide
NNSLQEIVNSSDDYYVVPLPELKTPA

SEQ ID NO: 62022 - protein, 34 aa, Artificial Sequence
  Cyclic GFR-binding peptide
  MOD_RES (2)..(4): Xaa is C or S
RXGXGEVVMEVQVEKVVKDYEDVKAMKVSRLETP

SEQ ID NO: 62023 - protein, 32 aa, Artificial Sequence
  Cyclic GFR-binding peptide
  MOD_RES (27)..(28): Xaa is C or S
MSMEGIIKPTKGIMIQITINSLDQSVXXPSAS

SEQ ID NO: 62024 - protein, 26 aa, Artificial Sequence
  Cyclic GFR-binding peptide
EVVMENSLQEVVKDYEDYYVMPLPEL

SEQ ID NO: 62025 - protein, 27 aa, Artificial Sequence
  Cyclic GFR-binding peptide
HEELRNSLQELKPKKRVYEYYLVTLPE

SEQ ID NO: 62026 - protein, 35 aa, Artificial Sequence
  Cyclic GFR-binding peptide
  MOD_RES (30)..(31): Xaa is C or S
VVMNSMEGIIVNSSDDMIQVTINSLQTPAXXPKPV

SEQ ID NO: 62027 - protein, 25 aa, Artificial Sequence
  Cyclic GFR-binding peptide
VVMESMEGIVVKDYEDMIQMTINSL

SEQ ID NO: 62028 - protein, 36 aa, Artificial Sequence; identical to SEQ ID NO: 11647
  Cyclic GFR-binding peptide
  MOD_RES (2)..(34)..(35): Xaa is C or S

SEQ ID NO: 62029 - protein, 34 aa, Artificial Sequence
  Cyclic GFR-binding peptide
  MOD_RES (1)..(3)..(34): Xaa is C or S
XKXSKVVMSMEGIVKPTRGVMIQITINSLDQPVX

SEQ ID NO: 62030 - protein, 24 aa, Artificial Sequence
  Cyclic GFR-binding peptide
NSLQEVKPTRGVYYVIPLPELDQP

SEQ ID NO: 62031 - protein, 24 aa, Artificial Sequence
  Cyclic GFR-binding peptide
MVQVEKVKPTRGVVKAIKVSRLDQ

SEQ ID NO: 62032 - protein, 28 aa, Artificial Sequence
  Cyclic GFR-binding peptide
FVTAKKHQGQHPKIRIKRMQVPREETPV

SEQ ID NO: 62033 - protein, 28 aa, Artificial Sequence
  Cyclic GFR-binding peptide
VVMNNSLQEIVNSSDDYYLVTLPELKTP

SEQ ID NO: 62034 - protein, 39 aa, Artificial Sequence; identical to SEQ ID NO: 11657
  Cyclic GFR-binding peptide
  MOD_RES (1)..(3)..(35)..(36): Xaa is C or S

SEQ ID NO: 62035 - protein, 37 aa, Artificial Sequence; identical to SEQ ID NO: 21622
  Cyclic GFR-binding peptide
  MOD_RES (34)..(34): Xaa is C or S

SEQ ID NO: 62036 - protein, 32 aa, Artificial Sequence
  Cyclic GFR-binding peptide
  MOD_RES (29)..(30): Xaa is C or S
VMNSMEGIIVNSSDDMIQVTINSLQTPAXXPK

SEQ ID NO: 62037 - protein, 32 aa, Artificial Sequence; identical to SEQ ID NO: 11669
  Cyclic GFR-binding peptide
  MOD_RES (1)..(1): Xaa is C or S

SEQ ID NO: 62038 - protein, 27 aa, Artificial Sequence
  Cyclic GFR-binding peptide
  MOD_RES (26)..(27): Xaa is C or S
VTAKKIVNSSDDIKRVQVPRLKTPAXX

SEQ ID NO: 62039 - protein, 31 aa, Artificial Sequence
  Cyclic GFR-binding peptide
LHEELRNSLQELKPKKRVYEYYVVPLPEHHV

SEQ ID NO: 62040 - protein, 37 aa, Artificial Sequence
  Cyclic GFR-binding peptide
  MOD_RES (2)..(33)..(34): Xaa is C or S
KXSKVVMSMEGIVKPTRGVMIQITINSLDQPVXXPSA

SEQ ID NO: 62041 - protein, 32 aa, Artificial Sequence
  Cyclic GFR-binding peptide
  MOD_RES (29)..(29): Xaa is C or S
VMNVTAKKIVNSSDDIKRVQVPRLKTPAXTPK

SEQ ID NO: 62042 - protein, 30 aa, Artificial Sequence; identical to SEQ ID NO: 21628
  Cyclic GFR-binding peptide

SEQ ID NO: 62043 - protein, 35 aa, Artificial Sequence
  Cyclic GFR-binding peptide
  MOD_RES (1)..(1): Xaa is C or S
XALHDELTNSLQEFIPKKRVIEYYVVPLPELQVQT

SEQ ID NO: 62044 - protein, 37 aa, Artificial Sequence; identical to SEQ ID NO: 21629
  Cyclic GFR-binding peptide
  MOD_RES (2)..(4): Xaa is C or S

SEQ ID NO: 62045 - protein, 39 aa, Artificial Sequence
  Cyclic GFR-binding peptide
  MOD_RES (2)..(34)..(35): Xaa is C or S
GXGEVVMDSMEGIVVKENEDMIQMTINSLETPVXXAKPI

SEQ ID NO: 62046 - protein, 24 aa, Artificial Sequence
  Cyclic GFR-binding peptide
VTAKKIVNSSDDIKRVQVPRLKTP

SEQ ID NO: 62047 - protein, 30 aa, Artificial Sequence; identical to SEQ ID NO: 21632
  Cyclic GFR-binding peptide

SEQ ID NO: 62048 - protein, 30 aa, Artificial Sequence
  Cyclic GFR-binding peptide
  MOD_RES (26)..(27): Xaa is C or S
SMEGIVKPTRGVMIQITINSLDQPVXXPSA

SEQ ID NO: 62049 - protein, 40 aa, Artificial Sequence
  Cyclic GFR-binding peptide
  MOD_RES (2)..(4): Xaa is C or S
EXKXALHDELTNSLQEFIPKKRVIEYYVVPLPELQVQTPR

SEQ ID NO: 62050 - protein, 33 aa, Artificial Sequence
  Cyclic GFR-binding peptide
  MOD_RES (32)..(33): Xaa is C or S
GEVVMDSMEGIVVKENEDMIQMTINSLETPVXX

SEQ ID NO: 62051 - protein, 34 aa, Artificial Sequence
  Cyclic GFR-binding peptide
  MOD_RES (1)..(32)..(33): Xaa is C or S
XSKVVMVQVEKVKPTRGVVKAIKVSRLDQPVXXP

SEQ ID NO: 62052 - protein, 41 aa, Artificial Sequence; identical to SEQ ID NO: 11690
  Cyclic GFR-binding peptide
  MOD_RES (2)..(4)..(36): Xaa is C or S

SEQ ID NO: 62053 - protein, 29 aa, Artificial Sequence
  Cyclic GFR-binding peptide
  MOD_RES (1)..(3): Xaa is C or S
XGXGEVVMDVQVEKVVKENEDVKAMKVSR

SEQ ID NO: 62054 - protein, 29 aa, Artificial Sequence
  Cyclic GFR-binding peptide
  MOD_RES (1)..(3): Xaa is C or S
XKXSKVVMSMEGIVKPTRGVMIQITINSL

SEQ ID NO: 62055 - protein, 26 aa, Artificial Sequence
  Cyclic GFR-binding peptide
  MOD_RES (26)..(26): Xaa is C or S
SMEGIIKPTKGIMIQITINSLDQSVX

SEQ ID NO: 62056 - protein, 26 aa, Artificial Sequence
  Cyclic GFR-binding peptide
IMNSLQEIKPTKGIYYVIPLPELDQS

SEQ ID NO: 62057 - protein, 31 aa, Artificial Sequence
  Cyclic GFR-binding peptide
  MOD_RES (26)..(26): Xaa is C or S
VQVEKIVNSSDDVKAVKVSRLKTPAXTPKTV

SEQ ID NO: 62058 - protein, 23 aa, Artificial Sequence
  Cyclic GFR-binding peptide
VMDVTAKKVVKENEDIKRMQVPR

SEQ ID NO: 62059 - protein, 29 aa, Artificial Sequence
  Cyclic GFR-binding peptide
  MOD_RES (28)..(29): Xaa is C or S
VMVTAKKVKPTRGVIKRIQVPRLDQPVXX

SEQ ID NO: 62060 - protein, 29 aa, Artificial Sequence
  Cyclic GFR-binding peptide
RVVMNNSLQEIVNSSDDYYVVPLPELKTP

SEQ ID NO: 62061 - protein, 28 aa, Artificial Sequence
  Cyclic GFR-binding peptide
TNSLQEFIPKKRVIEYYLVTLPELQVQT

SEQ ID NO: 62062 - protein, 30 aa, Artificial Sequence
  Cyclic GFR-binding peptide
  MOD_RES (28)..(29): Xaa is C or S
MDVQVEKVVKENEDVKAMKVSRLETPVXXA

SEQ ID NO: 62063 - protein, 27 aa, Artificial Sequence
  Cyclic GFR-binding peptide
  MOD_RES (2)..(2): Xaa is C or S
KXSKVIMNSLQEIKPTKGIYYVIPLPE

SEQ ID NO: 62064 - protein, 25 aa, Artificial Sequence
  Cyclic GFR-binding peptide
VMNSLQEVKPTRGVYYVIPLPELDQ

SEQ ID NO: 62065 - protein, 28 aa, Artificial Sequence
  Cyclic GFR-binding peptide
  MOD_RES (26)..(26): Xaa is C or S
VTAKKIVNSSDDIKRVQVPRLKTPAXTP

SEQ ID NO: 62066 - protein, 30 aa, Artificial Sequence
  Cyclic GFR-binding peptide
  MOD_RES (27)..(28): Xaa is C or S
NSMEGIIVNSSDDMIQVTINSLQTPAXXPK

SEQ ID NO: 62067 - protein, 34 aa, Artificial Sequence
  Cyclic GFR-binding peptide
  MOD_RES (30)..(31): Xaa is C or S
KVVMSMEGIVKPTRGVMIQITINSLDQPVXXPSA

SEQ ID NO: 62068 - protein, 35 aa, Artificial Sequence
  Cyclic GFR-binding peptide
  MOD_RES (30)..(30): Xaa is C or S
LFNSLQEHQGQHPKIRYYVMPLPEEETPVXELGED

SEQ ID NO: 62069 - protein, 42 aa, Artificial Sequence
  Cyclic GFR-binding peptide
  MOD_RES (2)..(4)..(36): Xaa is C or S
HXGXSRVVMNVQVEKIVNSSDDVKAVKVSRLKTPAXTPKTVH

SEQ ID NO: 62070 - protein, 33 aa, Artificial Sequence
  Cyclic GFR-binding peptide
  MOD_RES (28)..(29): Xaa is C or S
MDSMEGIVVKENEDMIQMTINSLETPVXXAKPI

SEQ ID NO: 62071 - protein, 33 aa, Artificial Sequence
  Cyclic GFR-binding peptide
  MOD_RES (28)..(29): Xaa is C or S
MDVQVEKVVKENEDVKAMKVSRLETPVXXAKPI

SEQ ID NO: 62072 - protein, 28 aa, Artificial Sequence
  Cyclic GFR-binding peptide
  MOD_RES (27)..(28): Xaa is C or S
DNSLQEVVKENEDYYLMTLPELETPVXX

SEQ ID NO: 62073 - protein, 39 aa, Artificial Sequence; identical to SEQ ID NO: 21657
  Cyclic GFR-binding peptide
  MOD_RES (1)..(38): Xaa is C or S

SEQ ID NO: 62074 - protein, 35 aa, Artificial Sequence; identical to SEQ ID NO: 46599
  Cyclic GFR-binding peptide
  MOD_RES (2)..(33)..(34): Xaa is C or S

SEQ ID NO: 62075 - protein, 40 aa, Artificial Sequence; identical to SEQ ID NO: 11720
  Cyclic GFR-binding peptide
  MOD_RES (1)..(3)..(35): Xaa is C or S

SEQ ID NO: 62076 - protein, 42 aa, Artificial Sequence; identical to SEQ ID NO: 11723
  Cyclic GFR-binding peptide
  MOD_RES (2)..(4)..(36)..(37): Xaa is C or S

SEQ ID NO: 62077 - protein, 30 aa, Artificial Sequence; identical to SEQ ID NO: 11725
  Cyclic GFR-binding peptide
  MOD_RES (30)..(30): Xaa is C or S

SEQ ID NO: 62078 - protein, 28 aa, Artificial Sequence
  Cyclic GFR-binding peptide
VVMNVTAKKIVNSSDDIKRVQVPRLQTP

SEQ ID NO: 62079 - protein, 36 aa, Artificial Sequence; identical to SEQ ID NO: 11727
  Cyclic GFR-binding peptide
  MOD_RES (2)..(4)..(35)..(36): Xaa is C or S

SEQ ID NO: 62080 - protein, 34 aa, Artificial Sequence
  Cyclic GFR-binding peptide
  MOD_RES (30)..(31): Xaa is C or S
KVIMVTAKKIKPTKGIIKRIQVPRLDQSVXXPSA

SEQ ID NO: 62081 - protein, 42 aa, Artificial Sequence; identical to SEQ ID NO: 21663
  Cyclic GFR-binding peptide
  MOD_RES (2)..(39): Xaa is C or S

SEQ ID NO: 62082 - protein, 43 aa, Artificial Sequence; identical to SEQ ID NO: 21665
  Cyclic GFR-binding peptide
  MOD_RES (1)..(3)..(37): Xaa is C or S

SEQ ID NO: 62083 - protein, 40 aa, Artificial Sequence
  Cyclic GFR-binding peptide
  MOD_RES (37)..(37): Xaa is C or S
ALHDELTNSLQEFIPKKRVIEYYVVPLPELQVQTPRXQVN

SEQ ID NO: 62084 - protein, 33 aa, Artificial Sequence
  Cyclic GFR-binding peptide
  MOD_RES (27)..(28): Xaa is C or S
EVQVEKVVKDYEDVKAMKVSRLETPVXXAKPIS

SEQ ID NO: 62085 - protein, 34 aa, Artificial Sequence; identical to SEQ ID NO: 21669
  Cyclic GFR-binding peptide

SEQ ID NO: 62086 - protein, 33 aa, Artificial Sequence
  Cyclic GFR-binding peptide
  MOD_RES (1)..(32)..(33): Xaa is C or S
XSRVIMVQVEKVKPKRGVVKAIKVSRLAQPVXX

SEQ ID NO: 62087 - protein, 27 aa, Artificial Sequence
  Cyclic GFR-binding peptide
SKVIMVQVEKIKPTKGIVKAIKVSRLD

SEQ ID NO: 62088 - protein, 38 aa, Artificial Sequence
  Cyclic GFR-binding peptide
  MOD_RES (2)..(4)..(35)..(36): Xaa is C or S
SXKXSKVVMSMEGIVKPTRGVMIQITINSLDQPVXXPS

SEQ ID NO: 62089 - protein, 26 aa, Artificial Sequence
  Cyclic GFR-binding peptide
KVVMNSLQEVKPTRGVYYLITLPELD

SEQ ID NO: 62090 - protein, 29 aa, Artificial Sequence
  Cyclic GFR-binding peptide
SRVIMVTAKKVKPKRGVIKRIQVPRLAQP

SEQ ID NO: 62091 - protein, 28 aa, Artificial Sequence
  Cyclic GFR-binding peptide
  MOD_RES (28)..(28): Xaa is C or S
IMVTAKKIKPTKGIIKRIQVPRLDQSVX

SEQ ID NO: 62092 - protein, 39 aa, Artificial Sequence
  Cyclic GFR-binding peptide
  MOD_RES (1)..(3)..(37): Xaa is C or S
XEXKNHQLFNSLQEHQGQHPKIRYYLMTLPEEETPVXEL

SEQ ID NO: 62093 - protein, 32 aa, Artificial Sequence
  Cyclic GFR-binding peptide
  MOD_RES (29)..(30): Xaa is C or S
VVMVQVEKVKPTRGVVKAIKVSRLDQPVXXPS

SEQ ID NO: 62094 - protein, 22 aa, Artificial Sequence
  Cyclic GFR-binding peptide
NSLQEIKPTKGIYYVIPLPELD

SEQ ID NO: 62095 - protein, 33 aa, Artificial Sequence
  Cyclic GFR-binding peptide
  MOD_RES (32)..(32): Xaa is C or S
HQLFNSLQEHQGQHPKIRYYLMTLPEEETPVXE

SEQ ID NO: 62096 - protein, 32 aa, Artificial Sequence
  Cyclic GFR-binding peptide
  MOD_RES (2)..(2): Xaa is C or S
AXELHEELRNSLQELKPKKRVYEYYVVPLPEH

SEQ ID NO: 62097 - protein, 33 aa, Artificial Sequence; identical to SEQ ID NO: 11758
  Cyclic GFR-binding peptide
  MOD_RES (2)..(4): Xaa is C or S

SEQ ID NO: 62098 - protein, 27 aa, Artificial Sequence
  Cyclic GFR-binding peptide
NSLQELKPKKRVYEYYLVTLPEHHVRS

SEQ ID NO: 62099 - protein, 27 aa, Artificial Sequence
  Cyclic GFR-binding peptide
HQLFVQVEKHQGQHPKIRVKAMKVSRE

SEQ ID NO: 62100 - protein, 31 aa, Artificial Sequence
  Cyclic GFR-binding peptide
  MOD_RES (28)..(29): Xaa is C or S
MDVTAKKVVKENEDIKRMQVPRLETPVXXAK

SEQ ID NO: 62101 - protein, 29 aa, Artificial Sequence
  Cyclic GFR-binding peptide
TNSLQEFIPKKRVIEYYLVTLPELQVQTP

SEQ ID NO: 62102 - protein, 26 aa, Artificial Sequence
  Cyclic GFR-binding peptide
EVVMENSLQEVVKDYEDYYLMTLPEL

SEQ ID NO: 62103 - protein, 30 aa, Artificial Sequence; identical to SEQ ID NO: 11763
  Cyclic GFR-binding peptide

SEQ ID NO: 62104 - protein, 30 aa, Artificial Sequence
  Cyclic GFR-binding peptide
  MOD_RES (2)..(2): Xaa is C or S
KXSKVVMSMEGIVKPTRGVMIQITINSLDQ

SEQ ID NO: 62105 - protein, 37 aa, Artificial Sequence
  Cyclic GFR-binding peptide
  MOD_RES (34)..(34): Xaa is C or S
KNHQLFNSLQEHQGQHPKIRYYVMPLPEEETPVXELG

SEQ ID NO: 62106 - protein, 35 aa, Artificial Sequence; identical to SEQ ID NO: 11765
  Cyclic GFR-binding peptide
  MOD_RES (30)..(31): Xaa is C or S

SEQ ID NO: 62107 - protein, 31 aa, Artificial Sequence
  Cyclic GFR-binding peptide
  MOD_RES (30)..(31): Xaa is C or S
VVMDVTAKKVVKENEDIKRMQVPRLETPVXX

SEQ ID NO: 62108 - protein, 31 aa, Artificial Sequence; identical to SEQ ID NO: 11766
  Cyclic GFR-binding peptide
  MOD_RES (26)..(27): Xaa is C or S

SEQ ID NO: 62109 - protein, 26 aa, Artificial Sequence
  Cyclic GFR-binding peptide
DSMEGIVVKENEDMIQMTINSLETPV

SEQ ID NO: 62110 - protein, 37 aa, Artificial Sequence; identical to SEQ ID NO: 11768
  Cyclic GFR-binding peptide
  MOD_RES (2)..(4)..(36)..(37): Xaa is C or S

SEQ ID NO: 62111 - protein, 32 aa, Artificial Sequence
  Cyclic GFR-binding peptide
  MOD_RES (1)..(1): Xaa is C or S
XARVVMNVQVEKIVNSSDDVKAVKVSRLQTPA

SEQ ID NO: 62112 - protein, 38 aa, Artificial Sequence
  Cyclic GFR-binding peptide
  MOD_RES (32)..(33): Xaa is C or S
GEVVMDVQVEKVVKENEDVKAMKVSRLETPVXXAKPIK

SEQ ID NO: 62113 - protein, 33 aa, Artificial Sequence; identical to SEQ ID NO: 11772
  Cyclic GFR-binding peptide
  MOD_RES (31)..(32): Xaa is C or S

SEQ ID NO: 62114 - protein, 21 aa, Artificial Sequence
  Cyclic GFR-binding peptide
NSMEGIIVNSSDDMIQVTINS

SEQ ID NO: 62115 - protein, 40 aa, Artificial Sequence
  Cyclic GFR-binding peptide
  MOD_RES (2)..(34): Xaa is C or S
GXSRVVMNVQVEKIVNSSDDVKAVKVSRLKTPAXTPKTVH

SEQ ID NO: 62116 - protein, 28 aa, Artificial Sequence
  Cyclic GFR-binding peptide
VMDNSLQEVVKENEDYYVMPLPELETPV

SEQ ID NO: 62117 - protein, 36 aa, Artificial Sequence
  Cyclic GFR-binding peptide
  MOD_RES (1)..(3)..(35)..(36): Xaa is C or S
XGXGEVVMEVQVEKVVKDYEDVKAMKVSRLETPVXX

SEQ ID NO: 62118 - protein, 31 aa, Artificial Sequence
  Cyclic GFR-binding peptide
  MOD_RES (1)..(3): Xaa is C or S
XGXGEVVMESMEGIVVKDYEDMIQMTINSLE

SEQ ID NO: 62119 - protein, 34 aa, Artificial Sequence
  Cyclic GFR-binding peptide
  MOD_RES (1)..(3): Xaa is C or S
XAXELHEELRNSLQELKPKKRVYEYYVVPLPEHH

SEQ ID NO: 62120 - protein, 38 aa, Artificial Sequence; identical to SEQ ID NO: 11777
  Cyclic GFR-binding peptide
  MOD_RES (1)..(3)..(34)..(35): Xaa is C or S

SEQ ID NO: 62121 - protein, 38 aa, Artificial Sequence
  Cyclic GFR-binding peptide
  MOD_RES (32)..(33): Xaa is C or S
SRVVMNVTAKKIVNSSDDIKRVQVPRLKTPAXXPKPVY

SEQ ID NO: 62122 - protein, 28 aa, Artificial Sequence
  Cyclic GFR-binding peptide
  MOD_RES (2)..(2): Xaa is C or S
KXSRVIMVQVEKVKPKRGVVKAIKVSRL

SEQ ID NO: 62123 - protein, 33 aa, Artificial Sequence; identical to SEQ ID NO: 11781
  Cyclic GFR-binding peptide
  MOD_RES (28)..(29): Xaa is C or S

SEQ ID NO: 62124 - protein, 36 aa, Artificial Sequence
  Cyclic GFR-binding peptide
  MOD_RES (2)..(34)..(35): Xaa is C or S
GXSRVVMNVQVEKIVNSSDDVKAVKVSRLKTPAXXP

SEQ ID NO: 62125 - protein, 26 aa, Artificial Sequence
  Cyclic GFR-binding peptide
MNVTAKKIVNSSDDIKRVQVPRLQTP

SEQ ID NO: 62126 - protein, 35 aa, Artificial Sequence; identical to SEQ ID NO: 11792
  Cyclic GFR-binding peptide
  MOD_RES (29)..(30): Xaa is C or S

SEQ ID NO: 62127 - protein, 40 aa, Artificial Sequence; identical to SEQ ID NO: 11793
  Cyclic GFR-binding peptide
  MOD_RES (1)..(3)..(35)..(36): Xaa is C or S

SEQ ID NO: 62128 - protein, 30 aa, Artificial Sequence
  Cyclic GFR-binding peptide
  MOD_RES (28)..(29): Xaa is C or S
IMVTAKKIKPTKGIIKRIQVPRLDQSVXXP

SEQ ID NO: 62129 - protein, 27 aa, Artificial Sequence
  Cyclic GFR-binding peptide
LTVQVEKFIPKKRVIEVKAVKVSRLQV

SEQ ID NO: 62130 - protein, 40 aa, Artificial Sequence; identical to SEQ ID NO: 11798
  Cyclic GFR-binding peptide
  MOD_RES (2)..(4)..(36)..(37): Xaa is C or S

SEQ ID NO: 62131 - protein, 30 aa, Artificial Sequence; identical to SEQ ID NO: 11799
  Cyclic GFR-binding peptide
  MOD_RES (28)..(29): Xaa is C or S

SEQ ID NO: 62132 - protein, 24 aa, Artificial Sequence
  Cyclic GFR-binding peptide
RSMEGILKPKKRVYEMIQVTINSH

SEQ ID NO: 62133 - protein, 31 aa, Artificial Sequence; identical to SEQ ID NO: 11800
  Cyclic GFR-binding peptide
  MOD_RES (1)..(3): Xaa is C or S

SEQ ID NO: 62134 - protein, 24 aa, Artificial Sequence
  Cyclic GFR-binding peptide
LFNSLQEHQGQHPKIRYYVMPLPE

SEQ ID NO: 62135 - protein, 33 aa, Artificial Sequence; identical to SEQ ID NO: 21717
  Cyclic GFR-binding peptide
  MOD_RES (2)..(2): Xaa is C or S

SEQ ID NO: 62136 - protein, 30 aa, Artificial Sequence
  Cyclic GFR-binding peptide
  MOD_RES (2)..(4): Xaa is C or S
HXGXSRVVMNVQVEKIVNSSDDVKAVKVSR

SEQ ID NO: 62137 - protein, 34 aa, Artificial Sequence
  Cyclic GFR-binding peptide
  MOD_RES (2)..(2): Xaa is C or S
EXKNHQLFNSLQEHQGQHPKIRYYVMPLPEEETP

SEQ ID NO: 62138 - protein, 36 aa, Artificial Sequence
  Cyclic GFR-binding peptide
  MOD_RES (1)..(32)..(33): Xaa is C or S
XSRVIMSMEGIVKPKRGVMIQITINSLAQPVXXPAA

SEQ ID NO: 62139 - protein, 40 aa, Artificial Sequence; identical to SEQ ID NO: 46662
  Cyclic GFR-binding peptide
  MOD_RES (1)..(3)..(34)..(35): Xaa is C or S

SEQ ID NO: 62140 - protein, 35 aa, Artificial Sequence; identical to SEQ ID NO: 11813
  Cyclic GFR-binding peptide
  MOD_RES (1)..(3)..(35): Xaa is C or S

SEQ ID NO: 62141 - protein, 29 aa, Artificial Sequence
  Cyclic GFR-binding peptide
  MOD_RES (29)..(29): Xaa is C or S
VMNVTAKKIVNSSDDIKRVQVPRLQTPAX

SEQ ID NO: 62142 - protein, 33 aa, Artificial Sequence
  Cyclic GFR-binding peptide
  MOD_RES (1)..(32)..(33): Xaa is C or S
XSRVIMSMEGIVKPKRGVMIQITINSLAQPVXX

SEQ ID NO: 62143 - protein, 27 aa, Artificial Sequence
  Cyclic GFR-binding peptide
KVIMNSLQEIKPTKGIYYLITLPELDQ

SEQ ID NO: 62144 - protein, 33 aa, Artificial Sequence
  Cyclic GFR-binding peptide
  MOD_RES (29)..(30): Xaa is C or S
VIMSMEGIIKPTKGIMIQITINSLDQSVXXPSA

SEQ ID NO: 62145 - protein, 29 aa, Artificial Sequence
  Cyclic GFR-binding peptide
  MOD_RES (2)..(2): Xaa is C or S
KXSKVVMSMEGIVKPTRGVMIQITINSLD

SEQ ID NO: 62146 - protein, 33 aa, Artificial Sequence
  Cyclic GFR-binding peptide
  MOD_RES (31)..(32): Xaa is C or S
EVVMDVTAKKVVKENEDIKRMQVPRLETPVXXA

SEQ ID NO: 62147 - protein, 32 aa, Artificial Sequence; identical to SEQ ID NO: 11825
  Cyclic GFR-binding peptide
  MOD_RES (2)..(2): Xaa is C or S

SEQ ID NO: 62148 - protein, 33 aa, Artificial Sequence; identical to SEQ ID NO: 46674
  Cyclic GFR-binding peptide
  MOD_RES (28)..(29): Xaa is C or S

SEQ ID NO: 62149 - protein, 31 aa, Artificial Sequence; identical to SEQ ID NO: 46675
  Cyclic GFR-binding peptide
  MOD_RES (30)..(31): Xaa is C or S

SEQ ID NO: 62150 - protein, 41 aa, Artificial Sequence
  Cyclic GFR-binding peptide
  MOD_RES (1)..(3)..(35)..(36): Xaa is C or S
XGXARVVMNSMEGIIVNSSDDMIQVTINSLQTPAXXPKPVT

SEQ ID NO: 62151 - protein, 36 aa, Artificial Sequence
  Cyclic GFR-binding peptide
  MOD_RES (1)..(32)..(33): Xaa is C or S
XSRVIMVQVEKVKPKRGVVKAIKVSRLAQPVXXPAA

SEQ ID NO: 62152 - protein, 32 aa, Artificial Sequence
  Cyclic GFR-binding peptide
  MOD_RES (27)..(28): Xaa is C or S
MSMEGIVKPTRGVMIQITINSLDQPVXXPSAS

SEQ ID NO: 62153 - protein, 33 aa, Artificial Sequence; identical to SEQ ID NO: 21750
  Cyclic GFR-binding peptide
  MOD_RES (30)..(30): Xaa is C or S

SEQ ID NO: 62154 - protein, 33 aa, Artificial Sequence
  Cyclic GFR-binding peptide
  MOD_RES (2)..(2): Xaa is C or S
GXSRVVMNVQVEKIVNSSDDVKAVKVSRLKTPA

SEQ ID NO: 62155 - protein, 32 aa, Artificial Sequence; identical to SEQ ID NO: 11833
  Cyclic GFR-binding peptide
  MOD_RES (2)..(4): Xaa is C or S

SEQ ID NO: 62156 - protein, 29 aa, Artificial Sequence
  Cyclic GFR-binding peptide
  MOD_RES (2)..(2): Xaa is C or S
GXGEVVMDSMEGIVVKENEDMIQMTINSL

SEQ ID NO: 62157 - protein, 27 aa, Artificial Sequence
  Cyclic GFR-binding peptide
  MOD_RES (1)..(1): Xaa is C or S
XSKVVMVQVEKVKPTRGVVKAIKVSRL

SEQ ID NO: 62158 - protein, 28 aa, Artificial Sequence
  Cyclic GFR-binding peptide
RNSLQELKPKKRVYEYYVVPLPEHHVRS

SEQ ID NO: 62159 - protein, 26 aa, Artificial Sequence
  Cyclic GFR-binding peptide
EVVMDVTAKKVVKENEDIKRMQVPRL

SEQ ID NO: 62160 - protein, 40 aa, Artificial Sequence
  Cyclic GFR-binding peptide
  MOD_RES (1)..(35): Xaa is C or S
XKNHQLFNSLQEHQGQHPKIRYYVMPLPEEETPVXELGED

SEQ ID NO: 62161 - protein, 35 aa, Artificial Sequence; identical to SEQ ID NO: 11844
  Cyclic GFR-binding peptide
  MOD_RES (2)..(4)..(35): Xaa is C or S

SEQ ID NO: 62162 - protein, 34 aa, Artificial Sequence
  Cyclic GFR-binding peptide
  MOD_RES (28)..(29): Xaa is C or S
MEVQVEKVVKDYEDVKAMKVSRLETPVXXAKPIS

SEQ ID NO: 62163 - protein, 21 aa, Artificial Sequence
  Cyclic GFR-binding peptide
VQVEKVKPKRGVVKAIKVSRL

SEQ ID NO: 62164 - protein, 34 aa, Artificial Sequence; identical to SEQ ID NO: 11851
  Cyclic GFR-binding peptide
  MOD_RES (30)..(31): Xaa is C or S

SEQ ID NO: 62165 - protein, 41 aa, Artificial Sequence
  Cyclic GFR-binding peptide
  MOD_RES (2)..(4)..(36)..(37): Xaa is C or S
HXGXARVVMNSMEGIIVNSSDDMIQVTINSLQTPAXXPKPV

SEQ ID NO: 62166 - protein, 27 aa, Artificial Sequence
  Cyclic GFR-binding peptide
GEVVMESMEGIVVKDYEDMIQMTINSL

SEQ ID NO: 62167 - protein, 36 aa, Artificial Sequence; identical to SEQ ID NO: 21764
  Cyclic GFR-binding peptide

SEQ ID NO: 62168 - protein, 33 aa, Artificial Sequence; identical to SEQ ID NO: 11857
  Cyclic GFR-binding peptide
  MOD_RES (31)..(32): Xaa is C or S

SEQ ID NO: 62169 - protein, 31 aa, Artificial Sequence
  Cyclic GFR-binding peptide
  MOD_RES (1)..(1): Xaa is C or S
XSRVIMSMEGIVKPKRGVMIQITINSLAQPV

SEQ ID NO: 62170 - protein, 32 aa, Artificial Sequence; identical to SEQ ID NO: 21765
  Cyclic GFR-binding peptide

SEQ ID NO: 62171 - protein, 36 aa, Artificial Sequence
  Cyclic GFR-binding peptide
  MOD_RES (2)..(33)..(34): Xaa is C or S
KXSKVVMVQVEKVKPTRGVVKAIKVSRLDQPVXXPS

SEQ ID NO: 62172 - protein, 35 aa, Artificial Sequence; identical to SEQ ID NO: 21768
  Cyclic GFR-binding peptide
  MOD_RES (1)..(1): Xaa is C or S

SEQ ID NO: 62173 - protein, 30 aa, Artificial Sequence
  Cyclic GFR-binding peptide
  MOD_RES (29)..(30): Xaa is C or S
VIMVQVEKIKPTKGIVKAIKVSRLDQSVXX

SEQ ID NO: 62174 - protein, 24 aa, Artificial Sequence
  Cyclic GFR-binding peptide
MNNSLQEIVNSSDDYYVVPLPELQ

SEQ ID NO: 62175 - protein, 28 aa, Artificial Sequence
  Cyclic GFR-binding peptide
  MOD_RES (2)..(2): Xaa is C or S
KXSRVIMNSLQEVKPKRGVYYLITLPEL

SEQ ID NO: 62176 - protein, 32 aa, Artificial Sequence; identical to SEQ ID NO: 11870
  Cyclic GFR-binding peptide
  MOD_RES (26)..(27): Xaa is C or S

SEQ ID NO: 62177 - protein, 27 aa, Artificial Sequence
  Cyclic GFR-binding peptide
MNNSLQEIVNSSDDYYVVPLPELQTPA

SEQ ID NO: 62178 - protein, 34 aa, Artificial Sequence
  Cyclic GFR-binding peptide
  MOD_RES (32)..(32): Xaa is C or S
LRNSLQELKPKKRVYEYYVVPLPEHHVRSPQXKV

SEQ ID NO: 62179 - protein, 31 aa, Artificial Sequence; identical to SEQ ID NO: 11880
  Cyclic GFR-binding peptide
  MOD_RES (2)..(2): Xaa is C or S

SEQ ID NO: 62180 - protein, 31 aa, Artificial Sequence; identical to SEQ ID NO: 11882
  Cyclic GFR-binding peptide
  MOD_RES (31)..(31): Xaa is C or S

SEQ ID NO: 62181 - protein, 34 aa, Artificial Sequence
  Cyclic GFR-binding peptide
  MOD_RES (32)..(33): Xaa is C or S
GEVVMDVTAKKVVKENEDIKRMQVPRLETPVXXA

SEQ ID NO: 62182 - protein, 21 aa, Artificial Sequence
  Cyclic GFR-binding peptide
MVTAKKVKPTRGVIKRIQVPR

SEQ ID NO: 62183 - protein, 28 aa, Artificial Sequence
  Cyclic GFR-binding peptide
  MOD_RES (28)..(28): Xaa is C or S
VQVEKHQGQHPKIRVKAMKVSREETPVX

SEQ ID NO: 62184 - protein, 31 aa, Artificial Sequence
  Cyclic GFR-binding peptide
  MOD_RES (2)..(4): Xaa is C or S
HXGXARVVMNVQVEKIVNSSDDVKAVKVSRL

SEQ ID NO: 62185 - protein, 31 aa, Artificial Sequence
  Cyclic GFR-binding peptide
  MOD_RES (26)..(27): Xaa is C or S
SMEGIIVNSSDDMIQVTINSLKTPAXXPKPV

SEQ ID NO: 62186 - protein, 29 aa, Artificial Sequence
  Cyclic GFR-binding peptide
  MOD_RES (2)..(4): Xaa is C or S
SXKXSKVIMVQVEKIKPTKGIVKAIKVSR

SEQ ID NO: 62187 - protein, 32 aa, Artificial Sequence
  Cyclic GFR-binding peptide
  MOD_RES (1)..(3): Xaa is C or S
XGXARVVMNSMEGIIVNSSDDMIQVTINSLQT

SEQ ID NO: 62188 - protein, 34 aa, Artificial Sequence
  Cyclic GFR-binding peptide
  MOD_RES (1)..(1): Xaa is C or S
XELHEELRNSLQELKPKKRVYEYYVVPLPEHHVR

SEQ ID NO: 62189 - protein, 29 aa, Artificial Sequence
  Cyclic GFR-binding peptide
VQVEKFIPKKRVIEVKAVKVSRLQVQTPR

SEQ ID NO: 62190 - protein, 28 aa, Artificial Sequence
  Cyclic GFR-binding peptide
VMNVQVEKIVNSSDDVKAVKVSRLKTPA

SEQ ID NO: 62191 - protein, 32 aa, Artificial Sequence
  Cyclic GFR-binding peptide
EELRNSLQELKPKKRVYEYYLVTLPEHHVRSP

SEQ ID NO: 62192 - protein, 30 aa, Artificial Sequence
  Cyclic GFR-binding peptide
  MOD_RES (28)..(29): Xaa is C or S
IMVQVEKIKPTKGIVKAIKVSRLDQSVXXP

SEQ ID NO: 62193 - protein, 28 aa, Artificial Sequence
  Cyclic GFR-binding peptide
  MOD_RES (1)..(1): Xaa is C or S
XSRVIMNSLQEVKPKRGVYYLITLPELA

SEQ ID NO: 62194 - protein, 32 aa, Artificial Sequence
  Cyclic GFR-binding peptide
  MOD_RES (30)..(31): Xaa is C or S
RVIMVQVEKVKPKRGVVKAIKVSRLAQPVXXP

SEQ ID NO: 62195 - protein, 30 aa, Artificial Sequence
  Cyclic GFR-binding peptide
  MOD_RES (30)..(30): Xaa is C or S
VVMEVQVEKVVKDYEDVKAMKVSRLETPVX

SEQ ID NO: 62196 - protein, 30 aa, Artificial Sequence
  Cyclic GFR-binding peptide
  MOD_RES (1)..(3): Xaa is C or S
XKXSRVIMSMEGIVKPKRGVMIQITINSLA

SEQ ID NO: 62197 - protein, 34 aa, Artificial Sequence
  Cyclic GFR-binding peptide
  MOD_RES (2)..(34): Xaa is C or S
GXGEVVMEVTAKKVVKDYEDIKRMQVPRLETPVX

SEQ ID NO: 62198 - protein, 27 aa, Artificial Sequence
  Cyclic GFR-binding peptide
FVQVEKHQGQHPKIRVKAMKVSREETP

SEQ ID NO: 62199 - protein, 23 aa, Artificial Sequence
  Cyclic GFR-binding peptide
MEVQVEKVVKDYEDVKAMKVSRL

SEQ ID NO: 62200 - protein, 40 aa, Artificial Sequence
  Cyclic GFR-binding peptide
  MOD_RES (36)..(36): Xaa is C or S
LHDELTNSLQEFIPKKRVIEYYVVPLPELQVQTPRXQVNR

SEQ ID NO: 62201 - protein, 28 aa, Artificial Sequence
  Cyclic GFR-binding peptide
RVVMNNSLQEIVNSSDDYYLVTLPELKT

SEQ ID NO: 62202 - protein, 41 aa, Artificial Sequence; identical to SEQ ID NO: 11915
  Cyclic GFR-binding peptide
  MOD_RES (2)..(4)..(35)..(36): Xaa is C or S

SEQ ID NO: 62203 - protein, 37 aa, Artificial Sequence
  Cyclic GFR-binding peptide
  MOD_RES (34)..(34): Xaa is C or S
DELTNSLQEFIPKKRVIEYYLVTLPELQVQTPRXQVN

SEQ ID NO: 62204 - protein, 35 aa, Artificial Sequence
  Cyclic GFR-binding peptide
  MOD_RES (1)..(3)..(34)..(35): Xaa is C or S
XKXSKVIMSMEGIIKPTKGIMIQITINSLDQSVXX

SEQ ID NO: 62205 - protein, 34 aa, Artificial Sequence; identical to SEQ ID NO: 11921
  Cyclic GFR-binding peptide
  MOD_RES (31)..(31): Xaa is C or S

SEQ ID NO: 62206 - protein, 31 aa, Artificial Sequence; identical to SEQ ID NO: 11923
  Cyclic GFR-binding peptide
  MOD_RES (26)..(27): Xaa is C or S

SEQ ID NO: 62207 - protein, 37 aa, Artificial Sequence; identical to SEQ ID NO: 11926
  Cyclic GFR-binding peptide
  MOD_RES (31)..(31): Xaa is C or S

SEQ ID NO: 62208 - protein, 33 aa, Artificial Sequence
  Cyclic GFR-binding peptide
  MOD_RES (1)..(3): Xaa is C or S
XEXKNHQLFNSLQEHQGQHPKIRYYVMPLPEEE

SEQ ID NO: 62209 - protein, 30 aa, Artificial Sequence; identical to SEQ ID NO: 11933
  Cyclic GFR-binding peptide
  MOD_RES (2)..(4): Xaa is C or S

SEQ ID NO: 62210 - protein, 32 aa, Artificial Sequence
  Cyclic GFR-binding peptide
  MOD_RES (1)..(1): Xaa is C or S
XGEVVMEVQVEKVVKDYEDVKAMKVSRLETPV

SEQ ID NO: 62211 - protein, 36 aa, Artificial Sequence
  Cyclic GFR-binding peptide
  MOD_RES (1)..(33)..(34): Xaa is C or S
XGEVVMDVQVEKVVKENEDVKAMKVSRLETPVXXAK

SEQ ID NO: 62212 - protein, 28 aa, Artificial Sequence
  Cyclic GFR-binding peptide
SRVVMNNSLQEIVNSSDDYYLVTLPELK

SEQ ID NO: 62213 - protein, 33 aa, Artificial Sequence
  Cyclic GFR-binding peptide
  MOD_RES (29)..(30): Xaa is C or S
VIMVQVEKIKPTKGIVKAIKVSRLDQSVXXPSA

SEQ ID NO: 62214 - protein, 35 aa, Artificial Sequence
  Cyclic GFR-binding peptide
  MOD_RES (1)..(3)..(34)..(35): Xaa is C or S
XKXSKVVMSMEGIVKPTRGVMIQITINSLDQPVXX

SEQ ID NO: 62215 - protein, 25 aa, Artificial Sequence
  Cyclic GFR-binding peptide
FVQVEKHQGQHPKIRVKAMKVSREE

SEQ ID NO: 62216 - protein, 27 aa, Artificial Sequence
  Cyclic GFR-binding peptide
VVMNNSLQEIVNSSDDYYVVPLPELQT

SEQ ID NO: 62217 - protein, 37 aa, Artificial Sequence
  Cyclic GFR-binding peptide
  MOD_RES (1)..(33)..(34): Xaa is C or S
XGEVVMESMEGIVVKDYEDMIQMTINSLETPVXXAKP

SEQ ID NO: 62218 - protein, 34 aa, Artificial Sequence; identical to SEQ ID NO: 11943
  Cyclic GFR-binding peptide
  MOD_RES (1)..(33): Xaa is C or S

SEQ ID NO: 62219 - protein, 35 aa, Artificial Sequence
  Cyclic GFR-binding peptide
  MOD_RES (1)..(32)..(33): Xaa is C or S
XSRVIMSMEGIVKPKRGVMIQITINSLAQPVXXPA

SEQ ID NO: 62220 - protein, 36 aa, Artificial Sequence; identical to SEQ ID NO: 11946
  Cyclic GFR-binding peptide
  MOD_RES (1)..(33)..(34): Xaa is C or S

SEQ ID NO: 62221 - protein, 36 aa, Artificial Sequence
  Cyclic GFR-binding peptide
  MOD_RES (2)..(4)..(36): Xaa is C or S
RXGXGEVVMDVQVEKVVKENEDVKAMKVSRLETPVX

SEQ ID NO: 62222 - protein, 29 aa, Artificial Sequence
  Cyclic GFR-binding peptide
RVVMNSMEGIIVNSSDDMIQVTINSLKTP

SEQ ID NO: 62223 - protein, 23 aa, Artificial Sequence
  Cyclic GFR-binding peptide
IMSMEGIIKPTKGIMIQITINSL

SEQ ID NO: 62224 - protein, 32 aa, Artificial Sequence
  Cyclic GFR-binding peptide
  MOD_RES (2)..(2): Xaa is C or S
GXARVVMNVQVEKIVNSSDDVKAVKVSRLQTP

SEQ ID NO: 62225 - protein, 25 aa, Artificial Sequence
  Cyclic GFR-binding peptide
VIMNSLQEIKPTKGIYYLITLPELD

SEQ ID NO: 62226 - protein, 34 aa, Artificial Sequence
  Cyclic GFR-binding peptide
  MOD_RES (28)..(29): Xaa is C or S
MNVTAKKIVNSSDDIKRVQVPRLQTPAXXPKPVT

SEQ ID NO: 62227 - protein, 35 aa, Artificial Sequence
  Cyclic GFR-binding peptide
  MOD_RES (32)..(33): Xaa is C or S
SRVVMNVQVEKIVNSSDDVKAVKVSRLKTPAXXPK

SEQ ID NO: 62228 - protein, 25 aa, Artificial Sequence
  Cyclic GFR-binding peptide
MVQVEKIKPTKGIVKAIKVSRLDQS

SEQ ID NO: 62229 - protein, 33 aa, Artificial Sequence
  Cyclic GFR-binding peptide
  MOD_RES (30)..(31): Xaa is C or S
VVMESMEGIVVKDYEDMIQMTINSLETPVXXAK

SEQ ID NO: 62230 - protein, 23 aa, Artificial Sequence
  Cyclic GFR-binding peptide
NSLQEIVNSSDDYYVVPLPELQT

SEQ ID NO: 62231 - protein, 37 aa, Artificial Sequence; identical to SEQ ID NO: 21835
  Cyclic GFR-binding peptide
  MOD_RES (2)..(2): Xaa is C or S

SEQ ID NO: 62232 - protein, 40 aa, Artificial Sequence; identical to SEQ ID NO: 11969
  Cyclic GFR-binding peptide
  MOD_RES (2)..(34): Xaa is C or S

SEQ ID NO: 62233 - protein, 35 aa, Artificial Sequence
  Cyclic GFR-binding peptide
  MOD_RES (31)..(32): Xaa is C or S
SRVIMVTAKKVKPKRGVIKRIQVPRLAQPVXXPAA

SEQ ID NO: 62234 - protein, 30 aa, Artificial Sequence; identical to SEQ ID NO: 21838
  Cyclic GFR-binding peptide

SEQ ID NO: 62235 - protein, 37 aa, Artificial Sequence
  Cyclic GFR-binding peptide
  MOD_RES (1)..(33)..(34): Xaa is C or S
XGEVVMDSMEGIVVKENEDMIQMTINSLETPVXXAKP

SEQ ID NO: 62236 - protein, 33 aa, Artificial Sequence
  Cyclic GFR-binding peptide
  MOD_RES (2)..(4): Xaa is C or S
SXKXSRVIMVTAKKVKPKRGVIKRIQVPRLAQP

SEQ ID NO: 62237 - protein, 38 aa, Artificial Sequence
  Cyclic GFR-binding peptide
  MOD_RES (2)..(4)..(36)..(37): Xaa is C or S
HXGXSRVVMNVTAKKIVNSSDDIKRVQVPRLKTPAXXP

SEQ ID NO: 62238 - protein, 33 aa, Artificial Sequence
  Cyclic GFR-binding peptide
  MOD_RES (1)..(3): Xaa is C or S
XKXALHDELTNSLQEFIPKKRVIEYYVVPLPEL

SEQ ID NO: 62239 - protein, 25 aa, Artificial Sequence
  Cyclic GFR-binding peptide
VTAKKLKPKKRVYEIKRVQVPRHHV

SEQ ID NO: 62240 - protein, 30 aa, Artificial Sequence
  Cyclic GFR-binding peptide
  MOD_RES (28)..(28): Xaa is C or S
MNSMEGIIVNSSDDMIQVTINSLKTPAXTP

SEQ ID NO: 62241 - protein, 31 aa, Artificial Sequence
  Cyclic GFR-binding peptide
  MOD_RES (27)..(28): Xaa is C or S
MSMEGIVKPTRGVMIQITINSLDQPVXXPSA

SEQ ID NO: 62242 - protein, 25 aa, Artificial Sequence
  Cyclic GFR-binding peptide
VVMDNSLQEVVKENEDYYLMTLPEL

SEQ ID NO: 62243 - protein, 40 aa, Artificial Sequence; identical to SEQ ID NO: 21847
  Cyclic GFR-binding peptide
  MOD_RES (1)..(38): Xaa is C or S

SEQ ID NO: 62244 - protein, 36 aa, Artificial Sequence; identical to SEQ ID NO: 11979
  Cyclic GFR-binding peptide
  MOD_RES (1)..(3)..(35)..(36): Xaa is C or S

SEQ ID NO: 62245 - protein, 30 aa, Artificial Sequence
  Cyclic GFR-binding peptide
  MOD_RES (30)..(30): Xaa is C or S
KVIMSMEGIIKPTKGIMIQITINSLDQSVX

SEQ ID NO: 62246 - protein, 28 aa, Artificial Sequence
  Cyclic GFR-binding peptide
  MOD_RES (27)..(28): Xaa is C or S
MNSLQEVKPTRGVYYLITLPELDQPVXX

SEQ ID NO: 62247 - protein, 35 aa, Artificial Sequence; identical to SEQ ID NO: 21851
  Cyclic GFR-binding peptide
  MOD_RES (2)..(4): Xaa is C or S

SEQ ID NO: 62248 - protein, 22 aa, Artificial Sequence
  Cyclic GFR-binding peptide
MNVTAKKIVNSSDDIKRVQVPR

SEQ ID NO: 62249 - protein, 31 aa, Artificial Sequence
  Cyclic GFR-binding peptide
  MOD_RES (2)..(2): Xaa is C or S
KXSRVIMSMEGIVKPKRGVMIQITINSLAQP

SEQ ID NO: 62250 - protein, 27 aa, Artificial Sequence
  Cyclic GFR-binding peptide
  MOD_RES (27)..(27): Xaa is C or S
EVTAKKVVKDYEDIKRMQVPRLETPVX

SEQ ID NO: 62251 - protein, 41 aa, Artificial Sequence
  Cyclic GFR-binding peptide
  MOD_RES (2)..(39): Xaa is C or S
AXELHEELRNSLQELKPKKRVYEYYVVPLPEHHVRSPQXKV

SEQ ID NO: 62252 - protein, 35 aa, Artificial Sequence
  Cyclic GFR-binding peptide
  MOD_RES (31)..(31): Xaa is C or S
RVVMNVTAKKIVNSSDDIKRVQVPRLKTPAXTPKT

SEQ ID NO: 62253 - protein, 29 aa, Artificial Sequence
  Cyclic GFR-binding peptide
  MOD_RES (28)..(28): Xaa is C or S
MNVTAKKIVNSSDDIKRVQVPRLKTPAXT

SEQ ID NO: 62254 - protein, 27 aa, Artificial Sequence
  Cyclic GFR-binding peptide
VMNSLQEVKPTRGVYYVIPLPELDQPV

SEQ ID NO: 62255 - protein, 32 aa, Artificial Sequence
  Cyclic GFR-binding peptide
  MOD_RES (26)..(27): Xaa is C or S
SMEGIIVNSSDDMIQVTINSLQTPAXXPKPVT

SEQ ID NO: 62256 - protein, 28 aa, Artificial Sequence
  Cyclic GFR-binding peptide
  MOD_RES (1)..(1): Xaa is C or S
XGEVVMDNSLQEVVKENEDYYVMPLPEL

SEQ ID NO: 62257 - protein, 38 aa, Artificial Sequence
  Cyclic GFR-binding peptide
  MOD_RES (32)..(32): Xaa is C or S
SRVVMNVTAKKIVNSSDDIKRVQVPRLKTPAXTPKTVH

SEQ ID NO: 62258 - protein, 28 aa, Artificial Sequence
  Cyclic GFR-binding peptide
RVVMNNSLQEIVNSSDDYYVVPLPELKT

SEQ ID NO: 62259 - protein, 32 aa, Artificial Sequence
  Cyclic GFR-binding peptide
  MOD_RES (2)..(2): Xaa is C or S
GXSRVVMNVQVEKIVNSSDDVKAVKVSRLKTP

SEQ ID NO: 62260 - protein, 29 aa, Artificial Sequence
  Cyclic GFR-binding peptide
LHDELTSMEGIFIPKKRVIEMIQVTINSL

SEQ ID NO: 62261 - protein, 29 aa, Artificial Sequence
  Cyclic GFR-binding peptide
LFNSLQEHQGQHPKIRYYLMTLPEEETPV

SEQ ID NO: 62262 - protein, 36 aa, Artificial Sequence; identical to SEQ ID NO: 12001
  Cyclic GFR-binding peptide
  MOD_RES (32)..(32): Xaa is C or S

SEQ ID NO: 62263 - protein, 30 aa, Artificial Sequence; identical to SEQ ID NO: 21880
  Cyclic GFR-binding peptide

SEQ ID NO: 62264 - protein, 27 aa, Artificial Sequence
  Cyclic GFR-binding peptide
MEVTAKKVVKDYEDIKRMQVPRLETPV

SEQ ID NO: 62265 - protein, 23 aa, Artificial Sequence
  Cyclic GFR-binding peptide
NSLQEVVKENEDYYVMPLPELET

SEQ ID NO: 62266 - protein, 38 aa, Artificial Sequence
  Cyclic GFR-binding peptide
  MOD_RES (36)..(36): Xaa is C or S
LHDELTNSLQEFIPKKRVIEYYLVTLPELQVQTPRXQV

SEQ ID NO: 62267 - protein, 36 aa, Artificial Sequence
  Cyclic GFR-binding peptide
  MOD_RES (31)..(31): Xaa is C or S
QLFNSLQEHQGQHPKIRYYLMTLPEEETPVXELGED

SEQ ID NO: 62268 - protein, 33 aa, Artificial Sequence
  Cyclic GFR-binding peptide
  MOD_RES (28)..(29): Xaa is C or S
IMVQVEKVKPKRGVVKAIKVSRLAQPVXXPAAS

SEQ ID NO: 62269 - protein, 36 aa, Artificial Sequence; identical to SEQ ID NO: 21888
  Cyclic GFR-binding peptide
  MOD_RES (2)..(4): Xaa is C or S

SEQ ID NO: 62270 - protein, 28 aa, Artificial Sequence
  Cyclic GFR-binding peptide
  MOD_RES (1)..(1): Xaa is C or S
XSKVIMNSLQEIKPTKGIYYVIPLPELD

SEQ ID NO: 62271 - protein, 31 aa, Artificial Sequence
  Cyclic GFR-binding peptide
  MOD_RES (26)..(27): Xaa is C or S
SMEGIVKPKRGVMIQITINSLAQPVXXPAAS

SEQ ID NO: 62272 - protein, 40 aa, Artificial Sequence
  Cyclic GFR-binding peptide
  MOD_RES (1)..(3)..(34)..(35): Xaa is C or S
XKXSKVVMVQVEKVKPTRGVVKAIKVSRLDQPVXXPSASA

SEQ ID NO: 62273 - protein, 27 aa, Artificial Sequence
  Cyclic GFR-binding peptide
SKVIMSMEGIIKPTKGIMIQITINSLD

SEQ ID NO: 62274 - protein, 23 aa, Artificial Sequence
  Cyclic GFR-binding peptide
NNSLQEIVNSSDDYYVVPLPELQ

SEQ ID NO: 62275 - protein, 26 aa, Artificial Sequence
  Cyclic GFR-binding peptide
HQLFVTAKKHQGQHPKIRIKRMQVPR

SEQ ID NO: 62276 - protein, 31 aa, Artificial Sequence; identical to SEQ ID NO: 12017
  Cyclic GFR-binding peptide
  MOD_RES (29)..(29): Xaa is C or S

SEQ ID NO: 62277 - protein, 35 aa, Artificial Sequence
  Cyclic GFR-binding peptide
  MOD_RES (2)..(4)..(35): Xaa is C or S
SXKXSKVVMSMEGIVKPTRGVMIQITINSLDQPVX

SEQ ID NO: 62278 - protein, 30 aa, Artificial Sequence
  Cyclic GFR-binding peptide
  MOD_RES (27)..(28): Xaa is C or S
MVQVEKVKPTRGVVKAIKVSRLDQPVXXPS

SEQ ID NO: 62279 - protein, 23 aa, Artificial Sequence
  Cyclic GFR-binding peptide
SMEGILKPKKRVYEMIQVTINSH

SEQ ID NO: 62280 - protein, 34 aa, Artificial Sequence
  Cyclic GFR-binding peptide
  MOD_RES (28)..(29): Xaa is C or S
IMSMEGIVKPKRGVMIQITINSLAQPVXXPAASA

SEQ ID NO: 62281 - protein, 34 aa, Artificial Sequence; identical to SEQ ID NO: 12026
  Cyclic GFR-binding peptide
  MOD_RES (29)..(30): Xaa is C or S

SEQ ID NO: 62282 - protein, 27 aa, Artificial Sequence
  Cyclic GFR-binding peptide
  MOD_RES (26)..(27): Xaa is C or S
NSLQEIVNSSDDYYLVTLPELQTPAXX

SEQ ID NO: 62283 - protein, 32 aa, Artificial Sequence; identical to SEQ ID NO: 12029
  Cyclic GFR-binding peptide
  MOD_RES (2)..(2): Xaa is C or S

SEQ ID NO: 62284 - protein, 25 aa, Artificial Sequence
  Cyclic GFR-binding peptide
VMEVQVEKVVKDYEDVKAMKVSRLE

SEQ ID NO: 62285 - protein, 37 aa, Artificial Sequence
  Cyclic GFR-binding peptide
  MOD_RES (37)..(37): Xaa is C or S
ALHDELTNSLQEFIPKKRVIEYYLVTLPELQVQTPRX

SEQ ID NO: 62286 - protein, 32 aa, Artificial Sequence
  Cyclic GFR-binding peptide
ELTNSLQEFIPKKRVIEYYLVTLPELQVQTPR

SEQ ID NO: 62287 - protein, 27 aa, Artificial Sequence
  Cyclic GFR-binding peptide
VIMNSLQEVKPKRGVYYLITLPELAQP

SEQ ID NO: 62288 - protein, 33 aa, Artificial Sequence; identical to SEQ ID NO: 46825
  Cyclic GFR-binding peptide
  MOD_RES (27)..(28): Xaa is C or S

SEQ ID NO: 62289 - protein, 35 aa, Artificial Sequence
  Cyclic GFR-binding peptide
  MOD_RES (31)..(32): Xaa is C or S
RVVMNVTAKKIVNSSDDIKRVQVPRLKTPAXXPKP

SEQ ID NO: 62290 - protein, 26 aa, Artificial Sequence
  Cyclic GFR-binding peptide
QLFVQVEKHQGQHPKIRVKAMKVSRE

SEQ ID NO: 62291 - protein, 31 aa, Artificial Sequence; identical to SEQ ID NO: 21910
  Cyclic GFR-binding peptide
  MOD_RES (28)..(28): Xaa is C or S

SEQ ID NO: 62292 - protein, 27 aa, Artificial Sequence
  Cyclic GFR-binding peptide
  MOD_RES (27)..(27): Xaa is C or S
MSMEGIIKPTKGIMIQITINSLDQSVX

SEQ ID NO: 62293 - protein, 37 aa, Artificial Sequence; identical to SEQ ID NO: 12046
  Cyclic GFR-binding peptide
  MOD_RES (1)..(33): Xaa is C or S

SEQ ID NO: 62294 - protein, 28 aa, Artificial Sequence
  Cyclic GFR-binding peptide
  MOD_RES (1)..(1): Xaa is C or S
XSRVIMVTAKKVKPKRGVIKRIQVPRLA

SEQ ID NO: 62295 - protein, 20 aa, Artificial Sequence
  Cyclic GFR-binding peptide
SMEGIIVNSSDDMIQVTINS

SEQ ID NO: 62296 - protein, 24 aa, Artificial Sequence
  Cyclic GFR-binding peptide
MNVQVEKIVNSSDDVKAVKVSRLK

SEQ ID NO: 62297 - protein, 29 aa, Artificial Sequence
  Cyclic GFR-binding peptide
  MOD_RES (27)..(27): Xaa is C or S
NVTAKKIVNSSDDIKRVQVPRLKTPAXTP

SEQ ID NO: 62298 - protein, 32 aa, Artificial Sequence; identical to SEQ ID NO: 12056
  Cyclic GFR-binding peptide
  MOD_RES (31)..(31): Xaa is C or S

SEQ ID NO: 62299 - protein, 28 aa, Artificial Sequence
  Cyclic GFR-binding peptide
  MOD_RES (1)..(3): Xaa is C or S
XKXSKVVMSMEGIVKPTRGVMIQITINS

SEQ ID NO: 62300 - protein, 24 aa, Artificial Sequence
  Cyclic GFR-binding peptide
MNSLQEIKPTKGIYYLITLPELDQ

SEQ ID NO: 62301 - protein, 28 aa, Artificial Sequence
  Cyclic GFR-binding peptide
  MOD_RES (27)..(28): Xaa is C or S
NVTAKKIVNSSDDIKRVQVPRLKTPAXX

SEQ ID NO: 62302 - protein, 27 aa, Artificial Sequence
  Cyclic GFR-binding peptide
ARVVMNNSLQEIVNSSDDYYVVPLPEL

SEQ ID NO: 62303 - protein, 34 aa, Artificial Sequence; identical to SEQ ID NO: 12064
  Cyclic GFR-binding peptide
  MOD_RES (2)..(4): Xaa is C or S

SEQ ID NO: 62304 - protein, 29 aa, Artificial Sequence
  Cyclic GFR-binding peptide
  MOD_RES (2)..(4): Xaa is C or S
SXKXSRVIMNSLQEVKPKRGVYYVIPLPE

SEQ ID NO: 62305 - protein, 37 aa, Artificial Sequence
  Cyclic GFR-binding peptide
  MOD_RES (2)..(4): Xaa is C or S
AXAXELHEELRNSLQELKPKKRVYEYYLVTLPEHHVR

SEQ ID NO: 62306 - protein, 32 aa, Artificial Sequence; identical to SEQ ID NO: 12067
  Cyclic GFR-binding peptide
  MOD_RES (2)..(2): Xaa is C or S

SEQ ID NO: 62307 - protein, 21 aa, Artificial Sequence
  Cyclic GFR-binding peptide
VQVEKVVKDYEDVKAMKVSRL

SEQ ID NO: 62308 - protein, 25 aa, Artificial Sequence
  Cyclic GFR-binding peptide
KVVMVTAKKVKPTRGVIKRIQVPRL

SEQ ID NO: 62309 - protein, 27 aa, Artificial Sequence
  Cyclic GFR-binding peptide
SRVVMNNSLQEIVNSSDDYYVVPLPEL

SEQ ID NO: 62310 - protein, 37 aa, Artificial Sequence; identical to SEQ ID NO: 12071
  Cyclic GFR-binding peptide
  MOD_RES (1)..(33)..(34): Xaa is C or S

SEQ ID NO: 62311 - protein, 29 aa, Artificial Sequence
  Cyclic GFR-binding peptide
ALHDELTSMEGIFIPKKRVIEMIQVTINS

SEQ ID NO: 62312 - protein, 37 aa, Artificial Sequence; identical to SEQ ID NO: 12072
  Cyclic GFR-binding peptide
  MOD_RES (1)..(3)..(35)..(36): Xaa is C or S

SEQ ID NO: 62313 - protein, 32 aa, Artificial Sequence; identical to SEQ ID NO: 12074
  Cyclic GFR-binding peptide
  MOD_RES (30)..(31): Xaa is C or S

SEQ ID NO: 62314 - protein, 27 aa, Artificial Sequence
  Cyclic GFR-binding peptide
  MOD_RES (2)..(2): Xaa is C or S
KXSRVIMVTAKKVKPKRGVIKRIQVPR

SEQ ID NO: 62315 - protein, 39 aa, Artificial Sequence; identical to SEQ ID NO: 21937
  Cyclic GFR-binding peptide
  MOD_RES (2)..(36): Xaa is C or S

SEQ ID NO: 62316 - protein, 25 aa, Artificial Sequence
  Cyclic GFR-binding peptide
NVTAKKIVNSSDDIKRVQVPRLKTP

SEQ ID NO: 62317 - protein, 29 aa, Artificial Sequence
  Cyclic GFR-binding peptide
VVMNVQVEKIVNSSDDVKAVKVSRLQTPA

SEQ ID NO: 62318 - protein, 38 aa, Artificial Sequence
  Cyclic GFR-binding peptide
  MOD_RES (1)..(3): Xaa is C or S
XAXELHEELRNSLQELKPKKRVYEYYLVTLPEHHVRSP

SEQ ID NO: 62319 - protein, 27 aa, Artificial Sequence
  Cyclic GFR-binding peptide
SKVIMNSLQEIKPTKGIYYLITLPELD

SEQ ID NO: 62320 - protein, 33 aa, Artificial Sequence; identical to SEQ ID NO: 12085
  Cyclic GFR-binding peptide
  MOD_RES (31)..(32): Xaa is C or S

SEQ ID NO: 62321 - protein, 30 aa, Artificial Sequence
  Cyclic GFR-binding peptide
  MOD_RES (2)..(2): Xaa is C or S
GXGEVVMEVTAKKVVKDYEDIKRMQVPRLE

SEQ ID NO: 62322 - protein, 33 aa, Artificial Sequence; identical to SEQ ID NO: 12090
  Cyclic GFR-binding peptide
  MOD_RES (2)..(2): Xaa is C or S

SEQ ID NO: 62323 - protein, 38 aa, Artificial Sequence; identical to SEQ ID NO: 12091
  Cyclic GFR-binding peptide
  MOD_RES (2)..(4)..(35)..(36): Xaa is C or S

SEQ ID NO: 62324 - protein, 35 aa, Artificial Sequence; identical to SEQ ID NO: 12095
  Cyclic GFR-binding peptide
  MOD_RES (31)..(32): Xaa is C or S

SEQ ID NO: 62325 - protein, 31 aa, Artificial Sequence
  Cyclic GFR-binding peptide
  MOD_RES (27)..(28): Xaa is C or S
MVQVEKIKPTKGIVKAIKVSRLDQSVXXPSA

SEQ ID NO: 62326 - protein, 36 aa, Artificial Sequence
  Cyclic GFR-binding peptide
  MOD_RES (2)..(4): Xaa is C or S
EXKXALHDELTNSLQEFIPKKRVIEYYVVPLPELQV

SEQ ID NO: 62327 - protein, 27 aa, Artificial Sequence
  Cyclic GFR-binding peptide
  MOD_RES (26)..(27): Xaa is C or S
NSLQEIVNSSDDYYLVTLPELKTPAXX

SEQ ID NO: 62328 - protein, 39 aa, Artificial Sequence
  Cyclic GFR-binding peptide
  MOD_RES (37)..(37): Xaa is C or S
ALHDELTNSLQEFIPKKRVIEYYVVPLPELQVQTPRXQV

SEQ ID NO: 62329 - protein, 31 aa, Artificial Sequence
  Cyclic GFR-binding peptide
  MOD_RES (29)..(30): Xaa is C or S
VMNSMEGIIVNSSDDMIQVTINSLKTPAXXP

SEQ ID NO: 62330 - protein, 43 aa, Artificial Sequence; identical to SEQ ID NO: 21961
  Cyclic GFR-binding peptide
  MOD_RES (1)..(3)..(40): Xaa is C or S

SEQ ID NO: 62331 - protein, 27 aa, Artificial Sequence
  Cyclic GFR-binding peptide
  MOD_RES (1)..(1): Xaa is C or S
XSRVIMVTAKKVKPKRGVIKRIQVPRL

SEQ ID NO: 62332 - protein, 35 aa, Artificial Sequence; identical to SEQ ID NO: 12104
  Cyclic GFR-binding peptide
  MOD_RES (29)..(30): Xaa is C or S

SEQ ID NO: 62333 - protein, 35 aa, Artificial Sequence
  Cyclic GFR-binding peptide
  MOD_RES (32)..(33): Xaa is C or S
ARVVMNVTAKKIVNSSDDIKRVQVPRLQTPAXXPK

SEQ ID NO: 62334 - protein, 32 aa, Artificial Sequence
  Cyclic GFR-binding peptide
  MOD_RES (29)..(30): Xaa is C or S
VMDVQVEKVVKENEDVKAMKVSRLETPVXXAK

SEQ ID NO: 62335 - protein, 36 aa, Artificial Sequence
  Cyclic GFR-binding peptide
ELHEELRNSLQELKPKKRVYEYYVVPLPEHHVRSPQ

SEQ ID NO: 62336 - protein, 38 aa, Artificial Sequence; identical to SEQ ID NO: 12107
  Cyclic GFR-binding peptide
  MOD_RES (1)..(33)..(34): Xaa is C or S

SEQ ID NO: 62337 - protein, 29 aa, Artificial Sequence
  Cyclic GFR-binding peptide
  MOD_RES (2)..(2): Xaa is C or S
KXSKVIMSMEGIIKPTKGIMIQITINSLD

SEQ ID NO: 62338 - protein, 33 aa, Artificial Sequence
  Cyclic GFR-binding peptide
DELTNSLQEFIPKKRVIEYYLVTLPELQVQTPR

SEQ ID NO: 62339 - protein, 30 aa, Artificial Sequence; identical to SEQ ID NO: 12115
  Cyclic GFR-binding peptide
  MOD_RES (29)..(30): Xaa is C or S

SEQ ID NO: 62340 - protein, 35 aa, Artificial Sequence; identical to SEQ ID NO: 21968
  Cyclic GFR-binding peptide
  MOD_RES (1)..(35): Xaa is C or S

SEQ ID NO: 62341 - protein, 30 aa, Artificial Sequence
  Cyclic GFR-binding peptide
  MOD_RES (2)..(2): Xaa is C or S
GXSRVVMNVTAKKIVNSSDDIKRVQVPRLK

SEQ ID NO: 62342 - protein, 34 aa, Artificial Sequence; identical to SEQ ID NO: 21969
  Cyclic GFR-binding peptide
  MOD_RES (1)..(3): Xaa is C or S

SEQ ID NO: 62343 - protein, 38 aa, Artificial Sequence
  Cyclic GFR-binding peptide
  MOD_RES (1)..(3)..(34)..(35): Xaa is C or S
XKXSRVIMVTAKKVKPKRGVIKRIQVPRLAQPVXXPAA

SEQ ID NO: 62344 - protein, 39 aa, Artificial Sequence
  Cyclic GFR-binding peptide
  MOD_RES (2)..(4)..(36)..(37): Xaa is C or S
RXGXGEVVMDVQVEKVVKENEDVKAMKVSRLETPVXXAK

SEQ ID NO: 62345 - protein, 20 aa, Artificial Sequence
  Cyclic GFR-binding peptide
NSLQEVKPKRGVYYLITLPE

SEQ ID NO: 62346 - protein, 27 aa, Artificial Sequence
  Cyclic GFR-binding peptide
  MOD_RES (26)..(27): Xaa is C or S
SMEGIVKPKRGVMIQITINSLAQPVXX

SEQ ID NO: 62347 - protein, 30 aa, Artificial Sequence; identical to SEQ ID NO: 46889
  Cyclic GFR-binding peptide
  MOD_RES (26)..(27): Xaa is C or S

SEQ ID NO: 62348 - protein, 31 aa, Artificial Sequence
  Cyclic GFR-binding peptide
  MOD_RES (1)..(1): Xaa is C or S
XSRVVMNVQVEKIVNSSDDVKAVKVSRLKTP

SEQ ID NO: 62349 - protein, 42 aa, Artificial Sequence
  Cyclic GFR-binding peptide
  MOD_RES (2)..(4)..(41): Xaa is C or S
AXAXELHEELRNSLQELKPKKRVYEYYLVTLPEHHVRSPQXK

SEQ ID NO: 62350 - protein, 34 aa, Artificial Sequence
  Cyclic GFR-binding peptide
  MOD_RES (28)..(29): Xaa is C or S
MDVTAKKVVKENEDIKRMQVPRLETPVXXAKPIK

SEQ ID NO: 62351 - protein, 37 aa, Artificial Sequence
  Cyclic GFR-binding peptide
  MOD_RES (32)..(32): Xaa is C or S
SRVVMNVQVEKIVNSSDDVKAVKVSRLKTPAXTPKTV

SEQ ID NO: 62352 - protein, 31 aa, Artificial Sequence; identical to SEQ ID NO: 12125
  Cyclic GFR-binding peptide
  MOD_RES (28)..(29): Xaa is C or S

SEQ ID NO: 62353 - protein, 38 aa, Artificial Sequence; identical to SEQ ID NO: 12126
  Cyclic GFR-binding peptide
  MOD_RES (2)..(4)..(36)..(37): Xaa is C or S

SEQ ID NO: 62354 - protein, 30 aa, Artificial Sequence
  Cyclic GFR-binding peptide
TNSLQEFIPKKRVIEYYLVTLPELQVQTPR

SEQ ID NO: 62355 - protein, 27 aa, Artificial Sequence
  Cyclic GFR-binding peptide
  MOD_RES (27)..(27): Xaa is C or S
MSMEGIVKPTRGVMIQITINSLDQPVX

SEQ ID NO: 62356 - protein, 32 aa, Artificial Sequence; identical to SEQ ID NO: 12127
  Cyclic GFR-binding peptide
  MOD_RES (28)..(29): Xaa is C or S

SEQ ID NO: 62357 - protein, 33 aa, Artificial Sequence
  Cyclic GFR-binding peptide
  MOD_RES (30)..(31): Xaa is C or S
VVMNSMEGIIVNSSDDMIQVTINSLQTPAXXPK

SEQ ID NO: 62358 - protein, 39 aa, Artificial Sequence
  Cyclic GFR-binding peptide
  MOD_RES (1)..(33)..(34): Xaa is C or S
XARVVMNVQVEKIVNSSDDVKAVKVSRLQTPAXXPKPVT

SEQ ID NO: 62359 - protein, 26 aa, Artificial Sequence
  Cyclic GFR-binding peptide
MDVTAKKVVKENEDIKRMQVPRLETP

SEQ ID NO: 62360 - protein, 32 aa, Artificial Sequence
  Cyclic GFR-binding peptide
  MOD_RES (1)..(1): Xaa is C or S
XSRVVMNVQVEKIVNSSDDVKAVKVSRLKTPA

SEQ ID NO: 62361 - protein, 30 aa, Artificial Sequence
  Cyclic GFR-binding peptide
  MOD_RES (27)..(28): Xaa is C or S
ESMEGIVVKDYEDMIQMTINSLETPVXXAK

SEQ ID NO: 62362 - protein, 39 aa, Artificial Sequence
  Cyclic GFR-binding peptide
  MOD_RES (1)..(33)..(34): Xaa is C or S
XGEVVMEVQVEKVVKDYEDVKAMKVSRLETPVXXAKPIS

SEQ ID NO: 62363 - protein, 39 aa, Artificial Sequence
  Cyclic GFR-binding peptide
  MOD_RES (33)..(33): Xaa is C or S
NHQLFNSLQEHQGQHPKIRYYLMTLPEEETPVXELGEDN

SEQ ID NO: 62364 - protein, 33 aa, Artificial Sequence
  Cyclic GFR-binding peptide
  MOD_RES (28)..(29): Xaa is C or S
IMVTAKKIKPTKGIIKRIQVPRLDQSVXXPSAS

SEQ ID NO: 62365 - protein, 34 aa, Artificial Sequence
  Cyclic GFR-binding peptide
  MOD_RES (28)..(29): Xaa is C or S
MESMEGIVVKDYEDMIQMTINSLETPVXXAKPIS

SEQ ID NO: 62366 - protein, 39 aa, Artificial Sequence; identical to SEQ ID NO: 21988
  Cyclic GFR-binding peptide
  MOD_RES (37)..(37): Xaa is C or S

SEQ ID NO: 62367 - protein, 36 aa, Artificial Sequence
  Cyclic GFR-binding peptide
  MOD_RES (2)..(34)..(35): Xaa is C or S
GXGEVVMDVQVEKVVKENEDVKAMKVSRLETPVXXA

SEQ ID NO: 62368 - protein, 29 aa, Artificial Sequence
  Cyclic GFR-binding peptide
  MOD_RES (29)..(29): Xaa is C or S
VMNNSLQEIVNSSDDYYLVTLPELQTPAX

SEQ ID NO: 62369 - protein, 35 aa, Artificial Sequence
  Cyclic GFR-binding peptide
  MOD_RES (29)..(30): Xaa is C or S
VIMVTAKKIKPTKGIIKRIQVPRLDQSVXXPSASA

SEQ ID NO: 62370 - protein, 23 aa, Artificial Sequence
  Cyclic GFR-binding peptide
VMNSLQEVKPTRGVYYLITLPEL

SEQ ID NO: 62371 - protein, 37 aa, Artificial Sequence; identical to SEQ ID NO: 12141
  Cyclic GFR-binding peptide
  MOD_RES (2)..(4)..(35)..(36): Xaa is C or S

SEQ ID NO: 62372 - protein, 33 aa, Artificial Sequence
  Cyclic GFR-binding peptide
  MOD_RES (2)..(4): Xaa is C or S
RXGXGEVVMDVQVEKVVKENEDVKAMKVSRLET

SEQ ID NO: 62373 - protein, 40 aa, Artificial Sequence
  Cyclic GFR-binding peptide
  MOD_RES (2)..(4)..(35)..(36): Xaa is C or S
SXKXSKVIMVQVEKIKPTKGIVKAIKVSRLDQSVXXPSAS

SEQ ID NO: 62374 - protein, 22 aa, Artificial Sequence
  Cyclic GFR-binding peptide
VMNSLQEVKPTRGVYYLITLPE

SEQ ID NO: 62375 - protein, 34 aa, Artificial Sequence
  Cyclic GFR-binding peptide
  MOD_RES (2)..(2): Xaa is C or S
KXALHDELTNSLQEFIPKKRVIEYYVVPLPELQV

SEQ ID NO: 62376 - protein, 36 aa, Artificial Sequence
  Cyclic GFR-binding peptide
  MOD_RES (31)..(32): Xaa is C or S
RVVMNVTAKKIVNSSDDIKRVQVPRLQTPAXXPKPV

SEQ ID NO: 62377 - protein, 33 aa, Artificial Sequence; identical to SEQ ID NO: 12147
  Cyclic GFR-binding peptide
  MOD_RES (28)..(29): Xaa is C or S

SEQ ID NO: 62378 - protein, 31 aa, Artificial Sequence; identical to SEQ ID NO: 21994
  Cyclic GFR-binding peptide

SEQ ID NO: 62379 - protein, 32 aa, Artificial Sequence
  Cyclic GFR-binding peptide
  MOD_RES (31)..(32): Xaa is C or S
EVVMDSMEGIVVKENEDMIQMTINSLETPVXX

SEQ ID NO: 62380 - protein, 37 aa, Artificial Sequence; identical to SEQ ID NO: 21996
  Cyclic GFR-binding peptide
  MOD_RES (1)..(3)..(37): Xaa is C or S

SEQ ID NO: 62381 - protein, 28 aa, Artificial Sequence
  Cyclic GFR-binding peptide
  MOD_RES (1)..(1): Xaa is C or S
XGEVVMESMEGIVVKDYEDMIQMTINSL

SEQ ID NO: 62382 - protein, 32 aa, Artificial Sequence; identical to SEQ ID NO: 12152
  Cyclic GFR-binding peptide
  MOD_RES (31)..(32): Xaa is C or S

SEQ ID NO: 62383 - protein, 25 aa, Artificial Sequence
  Cyclic GFR-binding peptide
EVVMDVQVEKVVKENEDVKAMKVSR

SEQ ID NO: 62384 - protein, 36 aa, Artificial Sequence
  Cyclic GFR-binding peptide
  MOD_RES (32)..(33): Xaa is C or S
SRVVMNVTAKKIVNSSDDIKRVQVPRLKTPAXXPKP

SEQ ID NO: 62385 - protein, 29 aa, Artificial Sequence
  Cyclic GFR-binding peptide
VVMNSMEGIIVNSSDDMIQVTINSLKTPA

SEQ ID NO: 62386 - protein, 23 aa, Artificial Sequence
  Cyclic GFR-binding peptide
NNSLQEIVNSSDDYYLVTLPELK

SEQ ID NO: 62387 - protein, 32 aa, Artificial Sequence
  Cyclic GFR-binding peptide
  MOD_RES (26)..(27): Xaa is C or S
SMEGIVKPKRGVMIQITINSLAQPVXXPAASA

SEQ ID NO: 62388 - protein, 26 aa, Artificial Sequence
  Cyclic GFR-binding peptide
VVMNNSLQEIVNSSDDYYLVTLPELK

SEQ ID NO: 62389 - protein, 42 aa, Artificial Sequence
  Cyclic GFR-binding peptide
  MOD_RES (1)..(38): Xaa is C or S
XELHEELRNSLQELKPKKRVYEYYLVTLPEHHVRSPQXKVSS

SEQ ID NO: 62390 - protein, 31 aa, Artificial Sequence
  Cyclic GFR-binding peptide
  MOD_RES (26)..(27): Xaa is C or S
SMEGIVVKENEDMIQMTINSLETPVXXAKPI

SEQ ID NO: 62391 - protein, 31 aa, Artificial Sequence; identical to SEQ ID NO: 22008
  Cyclic GFR-binding peptide

SEQ ID NO: 62392 - protein, 27 aa, Artificial Sequence
  Cyclic GFR-binding peptide
HQLFNSLQEHQGQHPKIRYYVMPLPEE

SEQ ID NO: 62393 - protein, 43 aa, Artificial Sequence; identical to SEQ ID NO: 22010
  Cyclic GFR-binding peptide
  MOD_RES (2)..(39): Xaa is C or S

SEQ ID NO: 62394 - protein, 37 aa, Artificial Sequence
  Cyclic GFR-binding peptide
  MOD_RES (32)..(32): Xaa is C or S
HQLFNSLQEHQGQHPKIRYYLMTLPEEETPVXELGED

SEQ ID NO: 62395 - protein, 32 aa, Artificial Sequence; identical to SEQ ID NO: 12172
  Cyclic GFR-binding peptide
  MOD_RES (1)..(32): Xaa is C or S

SEQ ID NO: 62396 - protein, 30 aa, Artificial Sequence
  Cyclic GFR-binding peptide
  MOD_RES (27)..(28): Xaa is C or S
MVQVEKIKPTKGIVKAIKVSRLDQSVXXPS

SEQ ID NO: 62397 - protein, 36 aa, Artificial Sequence
  Cyclic GFR-binding peptide
  MOD_RES (30)..(30): Xaa is C or S
VVMNVTAKKIVNSSDDIKRVQVPRLKTPAXTPKTVH

SEQ ID NO: 62398 - protein, 24 aa, Artificial Sequence
  Cyclic GFR-binding peptide
NSLQEVVKDYEDYYLMTLPELETP

SEQ ID NO: 62399 - protein, 32 aa, Artificial Sequence
  Cyclic GFR-binding peptide
  MOD_RES (30)..(31): Xaa is C or S
KVVMVQVEKVKPTRGVVKAIKVSRLDQPVXXP

SEQ ID NO: 62400 - protein, 35 aa, Artificial Sequence
  Cyclic GFR-binding peptide
  MOD_RES (32)..(33): Xaa is C or S
SRVVMNVTAKKIVNSSDDIKRVQVPRLKTPAXXPK

SEQ ID NO: 62401 - protein, 33 aa, Artificial Sequence; identical to SEQ ID NO: 12181
  Cyclic GFR-binding peptide
  MOD_RES (27)..(28): Xaa is C or S

SEQ ID NO: 62402 - protein, 35 aa, Artificial Sequence
  Cyclic GFR-binding peptide
  MOD_RES (1)..(1): Xaa is C or S
XELHEELRNSLQELKPKKRVYEYYLVTLPEHHVRS

SEQ ID NO: 62403 - protein, 33 aa, Artificial Sequence; identical to SEQ ID NO: 22024
  Cyclic GFR-binding peptide
  MOD_RES (33)..(33): Xaa is C or S

SEQ ID NO: 62404 - protein, 24 aa, Artificial Sequence
  Cyclic GFR-binding peptide
VVMNNSLQEIVNSSDDYYVVPLPE

SEQ ID NO: 62405 - protein, 38 aa, Artificial Sequence; identical to SEQ ID NO: 12193
  Cyclic GFR-binding peptide
  MOD_RES (1)..(3)..(35)..(36): Xaa is C or S

SEQ ID NO: 62406 - protein, 37 aa, Artificial Sequence; identical to SEQ ID NO: 22030
  Cyclic GFR-binding peptide
  MOD_RES (1)..(1): Xaa is C or S

SEQ ID NO: 62407 - protein, 31 aa, Artificial Sequence
  Cyclic GFR-binding peptide
  MOD_RES (31)..(31): Xaa is C or S
RVVMNVTAKKIVNSSDDIKRVQVPRLKTPAX

SEQ ID NO: 62408 - protein, 22 aa, Artificial Sequence
  Cyclic GFR-binding peptide
MNVQVEKIVNSSDDVKAVKVSR

SEQ ID NO: 62409 - protein, 25 aa, Artificial Sequence
  Cyclic GFR-binding peptide
NSLQEVKPKRGVYYLITLPELAQPV

SEQ ID NO: 62410 - protein, 39 aa, Artificial Sequence
  Cyclic GFR-binding peptide
  MOD_RES (2)..(4)..(36)..(37): Xaa is C or S
HXGXARVVMNVTAKKIVNSSDDIKRVQVPRLQTPAXXPK

SEQ ID NO: 62411 - protein, 30 aa, Artificial Sequence; identical to SEQ ID NO: 12208
  Cyclic GFR-binding peptide
  MOD_RES (1)..(1): Xaa is C or S

SEQ ID NO: 62412 - protein, 28 aa, Artificial Sequence
  Cyclic GFR-binding peptide
VMEVTAKKVVKDYEDIKRMQVPRLETPV

SEQ ID NO: 62413 - protein, 31 aa, Artificial Sequence
  Cyclic GFR-binding peptide
  MOD_RES (27)..(28): Xaa is C or S
NVTAKKIVNSSDDIKRVQVPRLKTPAXXPKP

SEQ ID NO: 62414 - protein, 36 aa, Artificial Sequence
  Cyclic GFR-binding peptide
  MOD_RES (32)..(32): Xaa is C or S
HQLFNSLQEHQGQHPKIRYYLMTLPEEETPVXELGE

SEQ ID NO: 62415 - protein, 38 aa, Artificial Sequence
  Cyclic GFR-binding peptide
  MOD_RES (1)..(33): Xaa is C or S
XSRVVMNVTAKKIVNSSDDIKRVQVPRLKTPAXTPKTV

SEQ ID NO: 62416 - protein, 41 aa, Artificial Sequence
  Cyclic GFR-binding peptide
  MOD_RES (2)..(4)..(35)..(36): Xaa is C or S
SXKXSKVIMVTAKKIKPTKGIIKRIQVPRLDQSVXXPSASA

SEQ ID NO: 62417 - protein, 37 aa, Artificial Sequence
  Cyclic GFR-binding peptide
  MOD_RES (1)..(3)..(35)..(36): Xaa is C or S
XGXSRVVMNVQVEKIVNSSDDVKAVKVSRLKTPAXXP

SEQ ID NO: 62418 - protein, 33 aa, Artificial Sequence
  Cyclic GFR-binding peptide
  MOD_RES (1)..(3): Xaa is C or S
XKXSKVVMSMEGIVKPTRGVMIQITINSLDQPV

SEQ ID NO: 62419 - protein, 35 aa, Artificial Sequence
  Cyclic GFR-binding peptide
  MOD_RES (35)..(35): Xaa is C or S
HEELRNSLQELKPKKRVYEYYLVTLPEHHVRSPQX

SEQ ID NO: 62420 - protein, 33 aa, Artificial Sequence; identical to SEQ ID NO: 12212
  Cyclic GFR-binding peptide
  MOD_RES (2)..(2): Xaa is C or S

SEQ ID NO: 62421 - protein, 39 aa, Artificial Sequence; identical to SEQ ID NO: 12213
  Cyclic GFR-binding peptide
  MOD_RES (1)..(3)..(34)..(35): Xaa is C or S

SEQ ID NO: 62422 - protein, 34 aa, Artificial Sequence
  Cyclic GFR-binding peptide
  MOD_RES (2)..(4): Xaa is C or S
RXGXGEVVMDVTAKKVVKENEDIKRMQVPRLETP

SEQ ID NO: 62423 - protein, 33 aa, Artificial Sequence
  Cyclic GFR-binding peptide
  MOD_RES (1)..(1): Xaa is C or S
XKNHQLFNSLQEHQGQHPKIRYYLMTLPEEETP

SEQ ID NO: 62424 - protein, 27 aa, Artificial Sequence
  Cyclic GFR-binding peptide
  MOD_RES (1)..(1): Xaa is C or S
XSKVVMSMEGIVKPTRGVMIQITINSL

SEQ ID NO: 62425 - protein, 31 aa, Artificial Sequence
  Cyclic GFR-binding peptide
  MOD_RES (31)..(31): Xaa is C or S
SRVIMSMEGIVKPKRGVMIQITINSLAQPVX

SEQ ID NO: 62426 - protein, 26 aa, Artificial Sequence
  Cyclic GFR-binding peptide
MENSLQEVVKDYEDYYLMTLPELETP

SEQ ID NO: 62427 - protein, 28 aa, Artificial Sequence
  Cyclic GFR-binding peptide
RVIMNSLQEVKPKRGVYYLITLPELAQP

SEQ ID NO: 62428 - protein, 34 aa, Artificial Sequence; identical to SEQ ID NO: 12222
  Cyclic GFR-binding peptide
  MOD_RES (2)..(34): Xaa is C or S

SEQ ID NO: 62429 - protein, 25 aa, Artificial Sequence
  Cyclic GFR-binding peptide
RVIMVTAKKVKPKRGVIKRIQVPRL

SEQ ID NO: 62430 - protein, 32 aa, Artificial Sequence; identical to SEQ ID NO: 22056
  Cyclic GFR-binding peptide
  MOD_RES (29)..(29): Xaa is C or S

SEQ ID NO: 62431 - protein, 39 aa, Artificial Sequence; identical to SEQ ID NO: 22060
  Cyclic GFR-binding peptide
  MOD_RES (1)..(38): Xaa is C or S

SEQ ID NO: 62432 - protein, 30 aa, Artificial Sequence; identical to SEQ ID NO: 46980
  Cyclic GFR-binding peptide
  MOD_RES (28)..(29): Xaa is C or S

SEQ ID NO: 62433 - protein, 30 aa, Artificial Sequence
  Cyclic GFR-binding peptide
  MOD_RES (2)..(4): Xaa is C or S
RXGXGEVVMDSMEGIVVKENEDMIQMTINS

SEQ ID NO: 62434 - protein, 40 aa, Artificial Sequence
  Cyclic GFR-binding peptide
  MOD_RES (2)..(34)..(35): Xaa is C or S
GXARVVMNVTAKKIVNSSDDIKRVQVPRLQTPAXXPKPVT

SEQ ID NO: 62435 - protein, 22 aa, Artificial Sequence
  Cyclic GFR-binding peptide
NVQVEKIVNSSDDVKAVKVSRL

SEQ ID NO: 62436 - protein, 38 aa, Artificial Sequence; identical to SEQ ID NO: 22066
  Cyclic GFR-binding peptide
  MOD_RES (35)..(35): Xaa is C or S

SEQ ID NO: 62437 - protein, 27 aa, Artificial Sequence
  Cyclic GFR-binding peptide
VIMNSLQEIKPTKGIYYVIPLPELDQS

SEQ ID NO: 62438 - protein, 37 aa, Artificial Sequence
  Cyclic GFR-binding peptide
  MOD_RES (1)..(33): Xaa is C or S
XSRVVMNSMEGIIVNSSDDMIQVTINSLKTPAXTPKT

SEQ ID NO: 62439 - protein, 22 aa, Artificial Sequence
  Cyclic GFR-binding peptide
VQVEKVKPKRGVVKAIKVSRLA

SEQ ID NO: 62440 - protein, 29 aa, Artificial Sequence
  Cyclic GFR-binding peptide
  MOD_RES (28)..(28): Xaa is C or S
MNVQVEKIVNSSDDVKAVKVSRLKTPAXT

SEQ ID NO: 62441 - protein, 29 aa, Artificial Sequence
  Cyclic GFR-binding peptide
  MOD_RES (1)..(1): Xaa is C or S
XKNHQLFVTAKKHQGQHPKIRIKRMQVPR

SEQ ID NO: 62442 - protein, 26 aa, Artificial Sequence
  Cyclic GFR-binding peptide
VVMNSLQEVKPTRGVYYVIPLPELDQ

SEQ ID NO: 62443 - protein, 39 aa, Artificial Sequence; identical to SEQ ID NO: 12252
  Cyclic GFR-binding peptide
  MOD_RES (1)..(33)..(34): Xaa is C or S

SEQ ID NO: 62444 - protein, 36 aa, Artificial Sequence; identical to SEQ ID NO: 12253
  Cyclic GFR-binding peptide
  MOD_RES (32)..(33): Xaa is C or S

SEQ ID NO: 62445 - protein, 27 aa, Artificial Sequence
  Cyclic GFR-binding peptide
RNSLQELKPKKRVYEYYLVTLPEHHVR

SEQ ID NO: 62446 - protein, 32 aa, Artificial Sequence
  Cyclic GFR-binding peptide
  MOD_RES (27)..(27): Xaa is C or S
NSMEGIIVNSSDDMIQVTINSLKTPAXTPKTV

SEQ ID NO: 62447 - protein, 32 aa, Artificial Sequence; identical to SEQ ID NO: 22077
  Cyclic GFR-binding peptide

SEQ ID NO: 62448 - protein, 25 aa, Artificial Sequence
  Cyclic GFR-binding peptide
IMNSLQEVKPKRGVYYLITLPELAQ

SEQ ID NO: 62449 - protein, 20 aa, Artificial Sequence
  Cyclic GFR-binding peptide
VTAKKVKPKRGVIKRIQVPR

SEQ ID NO: 62450 - protein, 40 aa, Artificial Sequence
  Cyclic GFR-binding peptide
  MOD_RES (1)..(3)..(40): Xaa is C or S
XKXALHDELTNSLQEFIPKKRVIEYYLVTLPELQVQTPRX

SEQ ID NO: 62451 - protein, 23 aa, Artificial Sequence
  Cyclic GFR-binding peptide
MESMEGIVVKDYEDMIQMTINSL

SEQ ID NO: 62452 - protein, 40 aa, Artificial Sequence; identical to SEQ ID NO: 12258
  Cyclic GFR-binding peptide
  MOD_RES (2)..(4)..(36)..(37): Xaa is C or S

SEQ ID NO: 62453 - protein, 37 aa, Artificial Sequence
  Cyclic GFR-binding peptide
  MOD_RES (31)..(32): Xaa is C or S
RVVMNSMEGIIVNSSDDMIQVTINSLQTPAXXPKPVT

SEQ ID NO: 62454 - protein, 33 aa, Artificial Sequence
  Cyclic GFR-binding peptide
  MOD_RES (30)..(31): Xaa is C or S
VVMNVTAKKIVNSSDDIKRVQVPRLKTPAXXPK

SEQ ID NO: 62455 - protein, 26 aa, Artificial Sequence
  Cyclic GFR-binding peptide
SKVIMVQVEKIKPTKGIVKAIKVSRL

SEQ ID NO: 62456 - protein, 28 aa, Artificial Sequence
  Cyclic GFR-binding peptide
  MOD_RES (28)..(28): Xaa is C or S
MNNSLQEIVNSSDDYYLVTLPELKTPAX

SEQ ID NO: 62457 - protein, 26 aa, Artificial Sequence
  Cyclic GFR-binding peptide
VVMDVTAKKVVKENEDIKRMQVPRLE

SEQ ID NO: 62458 - protein, 29 aa, Artificial Sequence
  Cyclic GFR-binding peptide
  MOD_RES (29)..(29): Xaa is C or S
VIMNSLQEIKPTKGIYYLITLPELDQSVX

SEQ ID NO: 62459 - protein, 30 aa, Artificial Sequence; identical to SEQ ID NO: 22090
  Cyclic GFR-binding peptide

SEQ ID NO: 62460 - protein, 29 aa, Artificial Sequence
  Cyclic GFR-binding peptide
NSLQELKPKKRVYEYYVVPLPEHHVRSPQ

SEQ ID NO: 62461 - protein, 32 aa, Artificial Sequence; identical to SEQ ID NO: 22094
  Cyclic GFR-binding peptide
  MOD_RES (28)..(28): Xaa is C or S

SEQ ID NO: 62462 - protein, 34 aa, Artificial Sequence
  Cyclic GFR-binding peptide
  MOD_RES (31)..(31): Xaa is C or S
TNSLQEFIPKKRVIEYYVVPLPELQVQTPRXQVN

SEQ ID NO: 62463 - protein, 27 aa, Artificial Sequence
  Cyclic GFR-binding peptide
  MOD_RES (26)..(27): Xaa is C or S
VTAKKIVNSSDDIKRVQVPRLQTPAXX

SEQ ID NO: 62464 - protein, 28 aa, Artificial Sequence
  Cyclic GFR-binding peptide
VMENSLQEVVKDYEDYYLMTLPELETPV

SEQ ID NO: 62465 - protein, 37 aa, Artificial Sequence; identical to SEQ ID NO: 22098
  Cyclic GFR-binding peptide
  MOD_RES (1)..(3): Xaa is C or S

SEQ ID NO: 62466 - protein, 32 aa, Artificial Sequence
  Cyclic GFR-binding peptide
  MOD_RES (28)..(28): Xaa is C or S
MNVQVEKIVNSSDDVKAVKVSRLKTPAXTPKT

SEQ ID NO: 62467 - protein, 31 aa, Artificial Sequence
  Cyclic GFR-binding peptide
  MOD_RES (29)..(30): Xaa is C or S
VVMVQVEKVKPTRGVVKAIKVSRLDQPVXXP

SEQ ID NO: 62468 - protein, 27 aa, Artificial Sequence
  Cyclic GFR-binding peptide
KVVMVTAKKVKPTRGVIKRIQVPRLDQ

SEQ ID NO: 62469 - protein, 38 aa, Artificial Sequence
  Cyclic GFR-binding peptide
  MOD_RES (2)..(36): Xaa is C or S
EXKNHQLFNSLQEHQGQHPKIRYYLMTLPEEETPVXEL

SEQ ID NO: 62470 - protein, 26 aa, Artificial Sequence
  Cyclic GFR-binding peptide
MVQVEKVKPKRGVVKAIKVSRLAQPV

SEQ ID NO: 62471 - protein, 35 aa, Artificial Sequence
  Cyclic GFR-binding peptide
  MOD_RES (1)..(3): Xaa is C or S
XKXALHDELTNSLQEFIPKKRVIEYYVVPLPELQV

SEQ ID NO: 62472 - protein, 25 aa, Artificial Sequence
  Cyclic GFR-binding peptide
NSLQEIVNSSDDYYLVTLPELKTPA

SEQ ID NO: 62473 - protein, 23 aa, Artificial Sequence
  Cyclic GFR-binding peptide
VTAKKLKPKKRVYEIKRVQVPRH

SEQ ID NO: 62474 - protein, 39 aa, Artificial Sequence
  Cyclic GFR-binding peptide
  MOD_RES (1)..(3)..(34)..(35): Xaa is C or S
XKXSKVIMVQVEKIKPTKGIVKAIKVSRLDQSVXXPSAS

SEQ ID NO: 62475 - protein, 24 aa, Artificial Sequence
  Cyclic GFR-binding peptide
SMEGIIVNSSDDMIQVTINSLKTP

SEQ ID NO: 62476 - protein, 41 aa, Artificial Sequence
  Cyclic GFR-binding peptide
  MOD_RES (1)..(3)..(37): Xaa is C or S
XEXKNHQLFNSLQEHQGQHPKIRYYLMTLPEEETPVXELGE

SEQ ID NO: 62477 - protein, 35 aa, Artificial Sequence
  Cyclic GFR-binding peptide
  MOD_RES (32)..(33): Xaa is C or S
GEVVMDVQVEKVVKENEDVKAMKVSRLETPVXXAK

SEQ ID NO: 62478 - protein, 35 aa, Artificial Sequence; identical to SEQ ID NO: 12295
  Cyclic GFR-binding peptide
  MOD_RES (29)..(30): Xaa is C or S

SEQ ID NO: 62479 - protein, 36 aa, Artificial Sequence
  Cyclic GFR-binding peptide
  MOD_RES (2)..(36): Xaa is C or S
EXKNHQLFNSLQEHQGQHPKIRYYVMPLPEEETPVX

SEQ ID NO: 62480 - protein, 25 aa, Artificial Sequence
  Cyclic GFR-binding peptide
VIMVQVEKVKPKRGVVKAIKVSRLA

SEQ ID NO: 62481 - protein, 36 aa, Artificial Sequence; identical to SEQ ID NO: 22114
  Cyclic GFR-binding peptide
  MOD_RES (1)..(3): Xaa is C or S

SEQ ID NO: 62482 - protein, 27 aa, Artificial Sequence
  Cyclic GFR-binding peptide
  MOD_RES (1)..(1): Xaa is C or S
XARVVMNNSLQEIVNSSDDYYVVPLPE

SEQ ID NO: 62483 - protein, 34 aa, Artificial Sequence; identical to SEQ ID NO: 22118
  Cyclic GFR-binding peptide
  MOD_RES (30)..(30): Xaa is C or S

SEQ ID NO: 62484 - protein, 36 aa, Artificial Sequence
  Cyclic GFR-binding peptide
  MOD_RES (2)..(4): Xaa is C or S
AXAXELHEELRNSLQELKPKKRVYEYYVVPLPEHHV

SEQ ID NO: 62485 - protein, 21 aa, Artificial Sequence
  Cyclic GFR-binding peptide
DSMEGIVVKENEDMIQMTINS

SEQ ID NO: 62486 - protein, 37 aa, Artificial Sequence
  Cyclic GFR-binding peptide
  MOD_RES (2)..(2): Xaa is C or S
KXALHDELTNSLQEFIPKKRVIEYYVVPLPELQVQTP

SEQ ID NO: 62487 - protein, 42 aa, Artificial Sequence; identical to SEQ ID NO: 12320
  Cyclic GFR-binding peptide
  MOD_RES (2)..(4)..(36)..(37): Xaa is C or S

SEQ ID NO: 62488 - protein, 24 aa, Artificial Sequence
  Cyclic GFR-binding peptide
NVTAKKIVNSSDDIKRVQVPRLKT

SEQ ID NO: 62489 - protein, 29 aa, Artificial Sequence
  Cyclic GFR-binding peptide
  MOD_RES (28)..(29): Xaa is C or S
MESMEGIVVKDYEDMIQMTINSLETPVXX

SEQ ID NO: 62490 - protein, 32 aa, Artificial Sequence; identical to SEQ ID NO: 22131
  Cyclic GFR-binding peptide

SEQ ID NO: 62491 - protein, 28 aa, Artificial Sequence
  Cyclic GFR-binding peptide
SKVIMVTAKKIKPTKGIIKRIQVPRLDQ

SEQ ID NO: 62492 - protein, 38 aa, Artificial Sequence
  Cyclic GFR-binding peptide
  MOD_RES (1)..(3)..(35): Xaa is C or S
XGXSRVVMNSMEGIIVNSSDDMIQVTINSLKTPAXTPK

SEQ ID NO: 62493 - protein, 26 aa, Artificial Sequence
  Cyclic GFR-binding peptide
RVVMNNSLQEIVNSSDDYYVVPLPEL

SEQ ID NO: 62494 - protein, 27 aa, Artificial Sequence
  Cyclic GFR-binding peptide
  MOD_RES (1)..(1): Xaa is C or S
XARVVMNSMEGIIVNSSDDMIQVTINS

SEQ ID NO: 62495 - protein, 24 aa, Artificial Sequence
  Cyclic GFR-binding peptide
EVQVEKVVKDYEDVKAMKVSRLET

SEQ ID NO: 62496 - protein, 41 aa, Artificial Sequence; identical to SEQ ID NO: 22133
  Cyclic GFR-binding peptide
  MOD_RES (2)..(4)..(41): Xaa is C or S

SEQ ID NO: 62497 - protein, 37 aa, Artificial Sequence; identical to SEQ ID NO: 12334
  Cyclic GFR-binding peptide
  MOD_RES (31)..(32): Xaa is C or S

SEQ ID NO: 62498 - protein, 31 aa, Artificial Sequence; identical to SEQ ID NO: 12335
  Cyclic GFR-binding peptide
  MOD_RES (1)..(1): Xaa is C or S

SEQ ID NO: 62499 - protein, 26 aa, Artificial Sequence
  Cyclic GFR-binding peptide
KVIMSMEGIIKPTKGIMIQITINSLD

SEQ ID NO: 62500 - protein, 32 aa, Artificial Sequence
  Cyclic GFR-binding peptide
HDELTNSLQEFIPKKRVIEYYVVPLPELQVQT

SEQ ID NO: 62501 - protein, 30 aa, Artificial Sequence; identical to SEQ ID NO: 12339
  Cyclic GFR-binding peptide
  MOD_RES (2)..(2): Xaa is C or S

SEQ ID NO: 62502 - protein, 31 aa, Artificial Sequence
  Cyclic GFR-binding peptide
  MOD_RES (28)..(29): Xaa is C or S
VMSMEGIVKPTRGVMIQITINSLDQPVXXPS

SEQ ID NO: 62503 - protein, 42 aa, Artificial Sequence; identical to SEQ ID NO: 22136
  Cyclic GFR-binding peptide
  MOD_RES (2)..(4)..(41): Xaa is C or S

SEQ ID NO: 62504 - protein, 32 aa, Artificial Sequence
  Cyclic GFR-binding peptide
  MOD_RES (31)..(32): Xaa is C or S
RVVMNVQVEKIVNSSDDVKAVKVSRLQTPAXX

SEQ ID NO: 62505 - protein, 41 aa, Artificial Sequence
  Cyclic GFR-binding peptide
  MOD_RES (1)..(38): Xaa is C or S
XELHEELRNSLQELKPKKRVYEYYLVTLPEHHVRSPQXKVS

SEQ ID NO: 62506 - protein, 33 aa, Artificial Sequence
  Cyclic GFR-binding peptide
  MOD_RES (32)..(33): Xaa is C or S
SRVVMNVQVEKIVNSSDDVKAVKVSRLKTPAXX

SEQ ID NO: 62507 - protein, 24 aa, Artificial Sequence
  Cyclic GFR-binding peptide
VVMVTAKKVKPTRGVIKRIQVPRL

SEQ ID NO: 62508 - protein, 29 aa, Artificial Sequence
  Cyclic GFR-binding peptide
HQLFVQVEKHQGQHPKIRVKAMKVSREET

SEQ ID NO: 62509 - protein, 31 aa, Artificial Sequence
  Cyclic GFR-binding peptide
ELRNSLQELKPKKRVYEYYLVTLPEHHVRSP

SEQ ID NO: 62510 - protein, 31 aa, Artificial Sequence; identical to SEQ ID NO: 22141
  Cyclic GFR-binding peptide
  MOD_RES (31)..(31): Xaa is C or S

SEQ ID NO: 62511 - protein, 26 aa, Artificial Sequence
  Cyclic GFR-binding peptide
FNSLQEHQGQHPKIRYYVMPLPEEET

SEQ ID NO: 62512 - protein, 38 aa, Artificial Sequence
  Cyclic GFR-binding peptide
  MOD_RES (1)..(32)..(33): Xaa is C or S
XSKVVMVQVEKVKPTRGVVKAIKVSRLDQPVXXPSASA

SEQ ID NO: 62513 - protein, 23 aa, Artificial Sequence
  Cyclic GFR-binding peptide
VMEVQVEKVVKDYEDVKAMKVSR

SEQ ID NO: 62514 - protein, 29 aa, Artificial Sequence
  Cyclic GFR-binding peptide
  MOD_RES (26)..(27): Xaa is C or S
NSLQEIVNSSDDYYLVTLPELKTPAXXPK

SEQ ID NO: 62515 - protein, 35 aa, Artificial Sequence
  Cyclic GFR-binding peptide
  MOD_RES (2)..(34)..(35): Xaa is C or S
GXGEVVMDVQVEKVVKENEDVKAMKVSRLETPVXX

SEQ ID NO: 62516 - protein, 27 aa, Artificial Sequence
  Cyclic GFR-binding peptide
MESMEGIVVKDYEDMIQMTINSLETPV

SEQ ID NO: 62517 - protein, 26 aa, Artificial Sequence
  Cyclic GFR-binding peptide
RVIMNSLQEVKPKRGVYYLITLPELA

SEQ ID NO: 62518 - protein, 37 aa, Artificial Sequence; identical to SEQ ID NO: 12355
  Cyclic GFR-binding peptide
  MOD_RES (2)..(34): Xaa is C or S

SEQ ID NO: 62519 - protein, 40 aa, Artificial Sequence; identical to SEQ ID NO: 22148
  Cyclic GFR-binding peptide
  MOD_RES (2)..(39): Xaa is C or S

SEQ ID NO: 62520 - protein, 33 aa, Artificial Sequence; identical to SEQ ID NO: 22150
  Cyclic GFR-binding peptide
  MOD_RES (1)..(1): Xaa is C or S

SEQ ID NO: 62521 - protein, 26 aa, Artificial Sequence
  Cyclic GFR-binding peptide
SRVIMSMEGIVKPKRGVMIQITINSL

SEQ ID NO: 62522 - protein, 27 aa, Artificial Sequence
  Cyclic GFR-binding peptide
EELRSMEGILKPKKRVYEMIQVTINSH

SEQ ID NO: 62523 - protein, 32 aa, Artificial Sequence
  Cyclic GFR-binding peptide
  MOD_RES (2)..(4): Xaa is C or S
HXGXARVVMNSMEGIIVNSSDDMIQVTINSLQ

SEQ ID NO: 62524 - protein, 33 aa, Artificial Sequence
  Cyclic GFR-binding peptide
  MOD_RES (32)..(33): Xaa is C or S
GEVVMDVQVEKVVKENEDVKAMKVSRLETPVXX

SEQ ID NO: 62525 - protein, 37 aa, Artificial Sequence; identical to SEQ ID NO: 12359
  Cyclic GFR-binding peptide
  MOD_RES (32)..(33): Xaa is C or S

SEQ ID NO: 62526 - protein, 33 aa, Artificial Sequence
  Cyclic GFR-binding peptide
  MOD_RES (1)..(3): Xaa is C or S
XKXSKVIMSMEGIIKPTKGIMIQITINSLDQSV

SEQ ID NO: 62527 - protein, 40 aa, Artificial Sequence
  Cyclic GFR-binding peptide
  MOD_RES (1)..(3)..(34)..(35): Xaa is C or S
XKXSKVIMVTAKKIKPTKGIIKRIQVPRLDQSVXXPSASA

SEQ ID NO: 62528 - protein, 26 aa, Artificial Sequence
  Cyclic GFR-binding peptide
MNSMEGIIVNSSDDMIQVTINSLKTP

SEQ ID NO: 62529 - protein, 41 aa, Artificial Sequence
  Cyclic GFR-binding peptide
  MOD_RES (2)..(4)..(36)..(37): Xaa is C or S
HXGXARVVMNVQVEKIVNSSDDVKAVKVSRLQTPAXXPKPV

SEQ ID NO: 62530 - protein, 39 aa, Artificial Sequence
  Cyclic GFR-binding peptide
  MOD_RES (1)..(3): Xaa is C or S
XKXALHDELTNSLQEFIPKKRVIEYYVVPLPELQVQTPR

SEQ ID NO: 62531 - protein, 28 aa, Artificial Sequence
  Cyclic GFR-binding peptide
  MOD_RES (26)..(27): Xaa is C or S
NSLQEVKPTRGVYYLITLPELDQPVXXP

SEQ ID NO: 62532 - protein, 33 aa, Artificial Sequence; identical to SEQ ID NO: 22158
  Cyclic GFR-binding peptide
  MOD_RES (1)..(1): Xaa is C or S

SEQ ID NO: 62533 - protein, 35 aa, Artificial Sequence
  Cyclic GFR-binding peptide
  MOD_RES (35)..(35): Xaa is C or S
HEELRNSLQELKPKKRVYEYYVVPLPEHHVRSPQX

SEQ ID NO: 62534 - protein, 34 aa, Artificial Sequence; identical to SEQ ID NO: 47091
  Cyclic GFR-binding peptide
  MOD_RES (31)..(32): Xaa is C or S

SEQ ID NO: 62535 - protein, 38 aa, Artificial Sequence
  Cyclic GFR-binding peptide
  MOD_RES (2)..(4)..(36)..(37): Xaa is C or S
RXGXGEVVMDSMEGIVVKENEDMIQMTINSLETPVXXA

SEQ ID NO: 62536 - protein, 27 aa, Artificial Sequence
  Cyclic GFR-binding peptide
  MOD_RES (1)..(1): Xaa is C or S
XSRVVMNNSLQEIVNSSDDYYVVPLPE

SEQ ID NO: 62537 - protein, 28 aa, Artificial Sequence
  Cyclic GFR-binding peptide
  MOD_RES (1)..(3): Xaa is C or S
XKXSRVIMVTAKKVKPKRGVIKRIQVPR

SEQ ID NO: 62538 - protein, 39 aa, Artificial Sequence; identical to SEQ ID NO: 12378
  Cyclic GFR-binding peptide
  MOD_RES (1)..(3)..(34)..(35): Xaa is C or S

SEQ ID NO: 62539 - protein, 30 aa, Artificial Sequence
  Cyclic GFR-binding peptide
HDELTNSLQEFIPKKRVIEYYVVPLPELQV

SEQ ID NO: 62540 - protein, 22 aa, Artificial Sequence
  Cyclic GFR-binding peptide
EVQVEKVVKDYEDVKAMKVSRL

SEQ ID NO: 62541 - protein, 35 aa, Artificial Sequence; identical to SEQ ID NO: 22164
  Cyclic GFR-binding peptide
  MOD_RES (2)..(4): Xaa is C or S

SEQ ID NO: 62542 - protein, 30 aa, Artificial Sequence
  Cyclic GFR-binding peptide
  MOD_RES (26)..(27): Xaa is C or S
VTAKKVKPTRGVIKRIQVPRLDQPVXXPSA

SEQ ID NO: 62543 - protein, 30 aa, Artificial Sequence
  Cyclic GFR-binding peptide
  MOD_RES (1)..(3): Xaa is C or S
XGXARVVMNVQVEKIVNSSDDVKAVKVSRL

SEQ ID NO: 62544 - protein, 23 aa, Artificial Sequence
  Cyclic GFR-binding peptide
VIMVTAKKIKPTKGIIKRIQVPR

SEQ ID NO: 62545 - protein, 35 aa, Artificial Sequence; identical to SEQ ID NO: 22174
  Cyclic GFR-binding peptide
  MOD_RES (33)..(33): Xaa is C or S

SEQ ID NO: 62546 - protein, 24 aa, Artificial Sequence
  Cyclic GFR-binding peptide
DVQVEKVVKENEDVKAMKVSRLET

SEQ ID NO: 62547 - protein, 33 aa, Artificial Sequence; identical to SEQ ID NO: 22178
  Cyclic GFR-binding peptide
  MOD_RES (2)..(4): Xaa is C or S

SEQ ID NO: 62548 - protein, 30 aa, Artificial Sequence; identical to SEQ ID NO: 12390
  Cyclic GFR-binding peptide

SEQ ID NO: 62549 - protein, 27 aa, Artificial Sequence
  Cyclic GFR-binding peptide
VMNSMEGIIVNSSDDMIQVTINSLKTP

SEQ ID NO: 62550 - protein, 22 aa, Artificial Sequence
  Cyclic GFR-binding peptide
MEVQVEKVVKDYEDVKAMKVSR

SEQ ID NO: 62551 - protein, 38 aa, Artificial Sequence
  Cyclic GFR-binding peptide
  MOD_RES (2)..(33)..(34): Xaa is C or S
KXSRVIMVQVEKVKPKRGVVKAIKVSRLAQPVXXPAAS

SEQ ID NO: 62552 - protein, 32 aa, Artificial Sequence; identical to SEQ ID NO: 12397
  Cyclic GFR-binding peptide
  MOD_RES (27)..(27): Xaa is C or S

SEQ ID NO: 62553 - protein, 22 aa, Artificial Sequence
  Cyclic GFR-binding peptide
DVQVEKVVKENEDVKAMKVSRL

SEQ ID NO: 62554 - protein, 31 aa, Artificial Sequence
  Cyclic GFR-binding peptide
  MOD_RES (31)..(31): Xaa is C or S
EVVMEVTAKKVVKDYEDIKRMQVPRLETPVX

SEQ ID NO: 62555 - protein, 32 aa, Artificial Sequence; identical to SEQ ID NO: 12404
  Cyclic GFR-binding peptide
  MOD_RES (1)..(32): Xaa is C or S

SEQ ID NO: 62556 - protein, 42 aa, Artificial Sequence
  Cyclic GFR-binding peptide
  MOD_RES (2)..(36): Xaa is C or S
EXKNHQLFNSLQEHQGQHPKIRYYLMTLPEEETPVXELGEDN

SEQ ID NO: 62557 - protein, 29 aa, Artificial Sequence
  Cyclic GFR-binding peptide
  MOD_RES (28)..(29): Xaa is C or S
MNSMEGIIVNSSDDMIQVTINSLKTPAXX

SEQ ID NO: 62558 - protein, 29 aa, Artificial Sequence
  Cyclic GFR-binding peptide
  MOD_RES (1)..(3): Xaa is C or S
XGXGEVVMESMEGIVVKDYEDMIQMTINS

SEQ ID NO: 62559 - protein, 32 aa, Artificial Sequence; identical to SEQ ID NO: 12415
  Cyclic GFR-binding peptide
  MOD_RES (1)..(1): Xaa is C or S

SEQ ID NO: 62560 - protein, 30 aa, Artificial Sequence
  Cyclic GFR-binding peptide
  MOD_RES (2)..(4): Xaa is C or S
HXGXSRVVMNSMEGIIVNSSDDMIQVTINS

SEQ ID NO: 62561 - protein, 41 aa, Artificial Sequence
  Cyclic GFR-binding peptide
  MOD_RES (2)..(4)..(35)..(36): Xaa is C or S
SXKXSKVVMSMEGIVKPTRGVMIQITINSLDQPVXXPSASA

SEQ ID NO: 62562 - protein, 38 aa, Artificial Sequence
  Cyclic GFR-binding peptide
  MOD_RES (2)..(4)..(36)..(37): Xaa is C or S
HXGXARVVMNVTAKKIVNSSDDIKRVQVPRLQTPAXXP

SEQ ID NO: 62563 - protein, 30 aa, Artificial Sequence
  Cyclic GFR-binding peptide
LHEELRNSLQELKPKKRVYEYYVVPLPEHH

SEQ ID NO: 62564 - protein, 27 aa, Artificial Sequence
  Cyclic GFR-binding peptide
RVIMVQVEKVKPKRGVVKAIKVSRLAQ

SEQ ID NO: 62565 - protein, 40 aa, Artificial Sequence
  Cyclic GFR-binding peptide
  MOD_RES (2)..(36): Xaa is C or S
EXKNHQLFNSLQEHQGQHPKIRYYLMTLPEEETPVXELGE

SEQ ID NO: 62566 - protein, 30 aa, Artificial Sequence
  Cyclic GFR-binding peptide
  MOD_RES (30)..(30): Xaa is C or S
VVMNSMEGIIVNSSDDMIQVTINSLQTPAX

SEQ ID NO: 62567 - protein, 27 aa, Artificial Sequence
  Cyclic GFR-binding peptide
  MOD_RES (2)..(2): Xaa is C or S
KXSKVIMSMEGIIKPTKGIMIQITINS

SEQ ID NO: 62568 - protein, 32 aa, Artificial Sequence
  Cyclic GFR-binding peptide
  MOD_RES (26)..(27): Xaa is C or S
VTAKKIVNSSDDIKRVQVPRLQTPAXXPKPVT

SEQ ID NO: 62569 - protein, 30 aa, Artificial Sequence; identical to SEQ ID NO: 22193
  Cyclic GFR-binding peptide
  MOD_RES (1)..(1): Xaa is C or S

SEQ ID NO: 62570 - protein, 24 aa, Artificial Sequence
  Cyclic GFR-binding peptide
IMNSLQEVKPKRGVYYLITLPELA

SEQ ID NO: 62571 - protein, 30 aa, Artificial Sequence; identical to SEQ ID NO: 12433
  Cyclic GFR-binding peptide
  MOD_RES (26)..(27): Xaa is C or S

SEQ ID NO: 62572 - protein, 38 aa, Artificial Sequence
  Cyclic GFR-binding peptide
  MOD_RES (32)..(33): Xaa is C or S
GEVVMDSMEGIVVKENEDMIQMTINSLETPVXXAKPIK

SEQ ID NO: 62573 - protein, 28 aa, Artificial Sequence
  Cyclic GFR-binding peptide
  MOD_RES (27)..(28): Xaa is C or S
MNSLQEIKPTKGIYYLITLPELDQSVXX

SEQ ID NO: 62574 - protein, 34 aa, Artificial Sequence
  Cyclic GFR-binding peptide
  MOD_RES (32)..(32): Xaa is C or S
LTNSLQEFIPKKRVIEYYLVTLPELQVQTPRXQV

SEQ ID NO: 62575 - protein, 31 aa, Artificial Sequence; identical to SEQ ID NO: 12438
  Cyclic GFR-binding peptide
  MOD_RES (2)..(4): Xaa is C or S

SEQ ID NO: 62576 - protein, 30 aa, Artificial Sequence; identical to SEQ ID NO: 47146
  Cyclic GFR-binding peptide
  MOD_RES (30)..(30): Xaa is C or S

SEQ ID NO: 62577 - protein, 31 aa, Artificial Sequence; identical to SEQ ID NO: 22197
  Cyclic GFR-binding peptide

SEQ ID NO: 62578 - protein, 39 aa, Artificial Sequence
  Cyclic GFR-binding peptide
  MOD_RES (33)..(33): Xaa is C or S
NHQLFNSLQEHQGQHPKIRYYVMPLPEEETPVXELGEDN

SEQ ID NO: 62579 - protein, 37 aa, Artificial Sequence
  Cyclic GFR-binding peptide
  MOD_RES (1)..(3)..(37): Xaa is C or S
XEXKNHQLFNSLQEHQGQHPKIRYYLMTLPEEETPVX

SEQ ID NO: 62580 - protein, 31 aa, Artificial Sequence
  Cyclic GFR-binding peptide
  MOD_RES (30)..(31): Xaa is C or S
VVMNVTAKKIVNSSDDIKRVQVPRLKTPAXX

SEQ ID NO: 62581 - protein, 29 aa, Artificial Sequence
  Cyclic GFR-binding peptide
  MOD_RES (27)..(28): Xaa is C or S
NNSLQEIVNSSDDYYVVPLPELQTPAXXP

SEQ ID NO: 62582 - protein, 30 aa, Artificial Sequence; identical to SEQ ID NO: 12450
  Cyclic GFR-binding peptide

SEQ ID NO: 62583 - protein, 28 aa, Artificial Sequence
  Cyclic GFR-binding peptide
GEVVMDSMEGIVVKENEDMIQMTINSLE

SEQ ID NO: 62584 - protein, 33 aa, Artificial Sequence
  Cyclic GFR-binding peptide
  MOD_RES (2)..(4): Xaa is C or S
RXGXGEVVMDSMEGIVVKENEDMIQMTINSLET

SEQ ID NO: 62585 - protein, 36 aa, Artificial Sequence; identical to SEQ ID NO: 22201
  Cyclic GFR-binding peptide
  MOD_RES (2)..(36): Xaa is C or S

SEQ ID NO: 62586 - protein, 29 aa, Artificial Sequence
  Cyclic GFR-binding peptide
  MOD_RES (1)..(1): Xaa is C or S
XARVVMNVQVEKIVNSSDDVKAVKVSRLQ

SEQ ID NO: 62587 - protein, 35 aa, Artificial Sequence; identical to SEQ ID NO: 22202
  Cyclic GFR-binding peptide

SEQ ID NO: 62588 - protein, 31 aa, Artificial Sequence; identical to SEQ ID NO: 12453
  Cyclic GFR-binding peptide
  MOD_RES (27)..(27): Xaa is C or S

SEQ ID NO: 62589 - protein, 40 aa, Artificial Sequence
  Cyclic GFR-binding peptide
  MOD_RES (2)..(4)..(35)..(36): Xaa is C or S
SXKXSKVIMSMEGIIKPTKGIMIQITINSLDQSVXXPSAS

SEQ ID NO: 62590 - protein, 33 aa, Artificial Sequence
  Cyclic GFR-binding peptide
  MOD_RES (31)..(32): Xaa is C or S
RVVMNVQVEKIVNSSDDVKAVKVSRLQTPAXXP

SEQ ID NO: 62591 - protein, 33 aa, Artificial Sequence; identical to SEQ ID NO: 12457
  Cyclic GFR-binding peptide
  MOD_RES (2)..(4): Xaa is C or S

SEQ ID NO: 62592 - protein, 32 aa, Artificial Sequence; identical to SEQ ID NO: 22208
  Cyclic GFR-binding peptide
  MOD_RES (30)..(30): Xaa is C or S

SEQ ID NO: 62593 - protein, 33 aa, Artificial Sequence; identical to SEQ ID NO: 22209
  Cyclic GFR-binding peptide
  MOD_RES (30)..(30): Xaa is C or S

SEQ ID NO: 62594 - protein, 26 aa, Artificial Sequence
  Cyclic GFR-binding peptide
IMSMEGIVKPKRGVMIQITINSLAQP

SEQ ID NO: 62595 - protein, 28 aa, Artificial Sequence
  Cyclic GFR-binding peptide
  MOD_RES (1)..(1): Xaa is C or S
XSKVIMNSLQEIKPTKGIYYLITLPELD

SEQ ID NO: 62596 - protein, 34 aa, Artificial Sequence; identical to SEQ ID NO: 22211
  Cyclic GFR-binding peptide

SEQ ID NO: 62597 - protein, 28 aa, Artificial Sequence
  Cyclic GFR-binding peptide
LTNSLQEFIPKKRVIEYYVVPLPELQVQ

SEQ ID NO: 62598 - protein, 26 aa, Artificial Sequence
  Cyclic GFR-binding peptide
  MOD_RES (26)..(26): Xaa is C or S
VTAKKIKPTKGIIKRIQVPRLDQSVX

SEQ ID NO: 62599 - protein, 23 aa, Artificial Sequence
  Cyclic GFR-binding peptide
NSMEGIIVNSSDDMIQVTINSLQ

SEQ ID NO: 62600 - protein, 43 aa, Artificial Sequence
  Cyclic GFR-binding peptide
  MOD_RES (2)..(4)..(38): Xaa is C or S
RXEXKNHQLFNSLQEHQGQHPKIRYYVMPLPEEETPVXELGED

SEQ ID NO: 62601 - protein, 42 aa, Artificial Sequence; identical to SEQ ID NO: 22221
  Cyclic GFR-binding peptide
  MOD_RES (1)..(3)..(40): Xaa is C or S

SEQ ID NO: 62602 - protein, 28 aa, Artificial Sequence
  Cyclic GFR-binding peptide
VVMVQVEKVKPTRGVVKAIKVSRLDQPV

SEQ ID NO: 62603 - protein, 36 aa, Artificial Sequence
  Cyclic GFR-binding peptide
  MOD_RES (2)..(34)..(35): Xaa is C or S
GXGEVVMDVTAKKVVKENEDIKRMQVPRLETPVXXA

SEQ ID NO: 62604 - protein, 41 aa, Artificial Sequence; identical to SEQ ID NO: 22225
  Cyclic GFR-binding peptide
  MOD_RES (37)..(37): Xaa is C or S

SEQ ID NO: 62605 - protein, 24 aa, Artificial Sequence
  Cyclic GFR-binding peptide
RVIMNSLQEVKPKRGVYYLITLPE

SEQ ID NO: 62606 - protein, 38 aa, Artificial Sequence
  Cyclic GFR-binding peptide
  MOD_RES (2)..(4)..(36)..(37): Xaa is C or S
RXGXGEVVMDVQVEKVVKENEDVKAMKVSRLETPVXXA

SEQ ID NO: 62607 - protein, 36 aa, Artificial Sequence
  Cyclic GFR-binding peptide
  MOD_RES (2)..(34)..(35): Xaa is C or S
GXSRVVMNVTAKKIVNSSDDIKRVQVPRLKTPAXXP

SEQ ID NO: 62608 - protein, 33 aa, Artificial Sequence
  Cyclic GFR-binding peptide
  MOD_RES (31)..(32): Xaa is C or S
EVVMEVQVEKVVKDYEDVKAMKVSRLETPVXXA

SEQ ID NO: 62609 - protein, 32 aa, Artificial Sequence
  Cyclic GFR-binding peptide
  MOD_RES (31)..(32): Xaa is C or S
SKVIMSMEGIIKPTKGIMIQITINSLDQSVXX

SEQ ID NO: 62610 - protein, 42 aa, Artificial Sequence; identical to SEQ ID NO: 12492
  Cyclic GFR-binding peptide
  MOD_RES (2)..(4)..(36)..(37): Xaa is C or S

SEQ ID NO: 62611 - protein, 25 aa, Artificial Sequence
  Cyclic GFR-binding peptide
VTAKKIVNSSDDIKRVQVPRLKTPA

SEQ ID NO: 62612 - protein, 39 aa, Artificial Sequence
  Cyclic GFR-binding peptide
  MOD_RES (2)..(36): Xaa is C or S
EXKNHQLFNSLQEHQGQHPKIRYYVMPLPEEETPVXELG

SEQ ID NO: 62613 - protein, 36 aa, Artificial Sequence; identical to SEQ ID NO: 12498
  Cyclic GFR-binding peptide
  MOD_RES (30)..(31): Xaa is C or S

SEQ ID NO: 62614 - protein, 33 aa, Artificial Sequence
  Cyclic GFR-binding peptide
  MOD_RES (1)..(1): Xaa is C or S
XELHEELRNSLQELKPKKRVYEYYVVPLPEHHV

SEQ ID NO: 62615 - protein, 23 aa, Artificial Sequence
  Cyclic GFR-binding peptide
VMESMEGIVVKDYEDMIQMTINS

SEQ ID NO: 62616 - protein, 28 aa, Artificial Sequence
  Cyclic GFR-binding peptide
EVVMENSLQEVVKDYEDYYVMPLPELET

SEQ ID NO: 62617 - protein, 30 aa, Artificial Sequence; identical to SEQ ID NO: 12512
  Cyclic GFR-binding peptide
  MOD_RES (2)..(4): Xaa is C or S

SEQ ID NO: 62618 - protein, 29 aa, Artificial Sequence
  Cyclic GFR-binding peptide
KVVMNSLQEVKPTRGVYYVIPLPELDQPV

SEQ ID NO: 62619 - protein, 35 aa, Artificial Sequence; identical to SEQ ID NO: 12518
  Cyclic GFR-binding peptide
  MOD_RES (1)..(3)..(35): Xaa is C or S

SEQ ID NO: 62620 - protein, 38 aa, Artificial Sequence
  Cyclic GFR-binding peptide
  MOD_RES (1)..(33)..(34): Xaa is C or S
XSRVVMNVQVEKIVNSSDDVKAVKVSRLKTPAXXPKPV

SEQ ID NO: 62621 - protein, 32 aa, Artificial Sequence
  Cyclic GFR-binding peptide
  MOD_RES (1)..(1): Xaa is C or S
XSRVVMNSMEGIIVNSSDDMIQVTINSLKTPA

SEQ ID NO: 62622 - protein, 40 aa, Artificial Sequence; identical to SEQ ID NO: 12522
  Cyclic GFR-binding peptide
  MOD_RES (2)..(34)..(35): Xaa is C or S

SEQ ID NO: 62623 - protein, 31 aa, Artificial Sequence
  Cyclic GFR-binding peptide
  MOD_RES (1)..(3): Xaa is C or S
XGXGEVVMDVQVEKVVKENEDVKAMKVSRLE

SEQ ID NO: 62624 - protein, 32 aa, Artificial Sequence
  Cyclic GFR-binding peptide
ALHDELTNSLQEFIPKKRVIEYYVVPLPELQV

SEQ ID NO: 62625 - protein, 37 aa, Artificial Sequence; identical to SEQ ID NO: 12525
  Cyclic GFR-binding peptide
  MOD_RES (1)..(33)..(34): Xaa is C or S

SEQ ID NO: 62626 - protein, 27 aa, Artificial Sequence
  Cyclic GFR-binding peptide
VMDNSLQEVVKENEDYYLMTLPELETP

SEQ ID NO: 62627 - protein, 29 aa, Artificial Sequence
  Cyclic GFR-binding peptide
  MOD_RES (26)..(27): Xaa is C or S
NSLQEIKPTKGIYYLITLPELDQSVXXPS

SEQ ID NO: 62628 - protein, 31 aa, Artificial Sequence
  Cyclic GFR-binding peptide
  MOD_RES (27)..(28): Xaa is C or S
MSMEGIVKPKRGVMIQITINSLAQPVXXPAA

SEQ ID NO: 62629 - protein, 30 aa, Artificial Sequence
  Cyclic GFR-binding peptide
  MOD_RES (30)..(30): Xaa is C or S
VVMDVTAKKVVKENEDIKRMQVPRLETPVX

SEQ ID NO: 62630 - protein, 40 aa, Artificial Sequence; identical to SEQ ID NO: 12531
  Cyclic GFR-binding peptide
  MOD_RES (1)..(3)..(34)..(35): Xaa is C or S

SEQ ID NO: 62631 - protein, 27 aa, Artificial Sequence
  Cyclic GFR-binding peptide
VQVEKFIPKKRVIEVKAVKVSRLQVQT

SEQ ID NO: 62632 - protein, 30 aa, Artificial Sequence
  Cyclic GFR-binding peptide
  MOD_RES (27)..(28): Xaa is C or S
MSMEGIVKPKRGVMIQITINSLAQPVXXPA

SEQ ID NO: 62633 - protein, 34 aa, Artificial Sequence; identical to SEQ ID NO: 22255
  Cyclic GFR-binding peptide
  MOD_RES (1)..(1): Xaa is C or S

SEQ ID NO: 62634 - protein, 32 aa, Artificial Sequence; identical to SEQ ID NO: 22257
  Cyclic GFR-binding peptide
  MOD_RES (31)..(31): Xaa is C or S

SEQ ID NO: 62635 - protein, 37 aa, Artificial Sequence; identical to SEQ ID NO: 22258
  Cyclic GFR-binding peptide
  MOD_RES (36)..(36): Xaa is C or S

SEQ ID NO: 62636 - protein, 29 aa, Artificial Sequence
  Cyclic GFR-binding peptide
  MOD_RES (2)..(2): Xaa is C or S
GXGEVVMENSLQEVVKDYEDYYLMTLPEL

SEQ ID NO: 62637 - protein, 39 aa, Artificial Sequence
  Cyclic GFR-binding peptide
  MOD_RES (1)..(33)..(34): Xaa is C or S
XGEVVMESMEGIVVKDYEDMIQMTINSLETPVXXAKPIS

SEQ ID NO: 62638 - protein, 33 aa, Artificial Sequence
  Cyclic GFR-binding peptide
  MOD_RES (2)..(2): Xaa is C or S
AXELHEELRNSLQELKPKKRVYEYYLVTLPEHH

SEQ ID NO: 62639 - protein, 29 aa, Artificial Sequence
  Cyclic GFR-binding peptide
  MOD_RES (1)..(1): Xaa is C or S
XSRVIMVQVEKVKPKRGVVKAIKVSRLAQ

SEQ ID NO: 62640 - protein, 38 aa, Artificial Sequence; identical to SEQ ID NO: 12545
  Cyclic GFR-binding peptide
  MOD_RES (2)..(33)..(34): Xaa is C or S

SEQ ID NO: 62641 - protein, 31 aa, Artificial Sequence; identical to SEQ ID NO: 12547
  Cyclic GFR-binding peptide
  MOD_RES (28)..(29): Xaa is C or S

SEQ ID NO: 62642 - protein, 26 aa, Artificial Sequence
  Cyclic GFR-binding peptide
SKVIMNSLQEIKPTKGIYYLITLPEL

SEQ ID NO: 62643 - protein, 27 aa, Artificial Sequence
  Cyclic GFR-binding peptide
GEVVMEVQVEKVVKDYEDVKAMKVSRL

SEQ ID NO: 62644 - protein, 21 aa, Artificial Sequence
  Cyclic GFR-binding peptide
MNSLQEIKPTKGIYYVIPLPE

SEQ ID NO: 62645 - protein, 39 aa, Artificial Sequence
  Cyclic GFR-binding peptide
  MOD_RES (1)..(3)..(34)..(35): Xaa is C or S
XKXSKVIMVTAKKIKPTKGIIKRIQVPRLDQSVXXPSAS

SEQ ID NO: 62646 - protein, 41 aa, Artificial Sequence
  Cyclic GFR-binding peptide
  MOD_RES (1)..(3)..(35)..(36): Xaa is C or S
XGXARVVMNVQVEKIVNSSDDVKAVKVSRLQTPAXXPKPVT

SEQ ID NO: 62647 - protein, 24 aa, Artificial Sequence
  Cyclic GFR-binding peptide
VIMVQVEKVKPKRGVVKAIKVSRL

SEQ ID NO: 62648 - protein, 26 aa, Artificial Sequence
  Cyclic GFR-binding peptide
  MOD_RES (26)..(26): Xaa is C or S
NSLQEVVKDYEDYYVMPLPELETPVX

SEQ ID NO: 62649 - protein, 24 aa, Artificial Sequence
  Cyclic GFR-binding peptide
KVIMNSLQEIKPTKGIYYVIPLPE

SEQ ID NO: 62650 - protein, 26 aa, Artificial Sequence
  Cyclic GFR-binding peptide
RVVMNSMEGIIVNSSDDMIQVTINSL

SEQ ID NO: 62651 - protein, 35 aa, Artificial Sequence
  Cyclic GFR-binding peptide
  MOD_RES (32)..(32): Xaa is C or S
HQLFNSLQEHQGQHPKIRYYLMTLPEEETPVXELG

SEQ ID NO: 62652 - protein, 27 aa, Artificial Sequence
  Cyclic GFR-binding peptide
ELRNSLQELKPKKRVYEYYVVPLPEHH

SEQ ID NO: 62653 - protein, 36 aa, Artificial Sequence; identical to SEQ ID NO: 22278
  Cyclic GFR-binding peptide
  MOD_RES (2)..(4): Xaa is C or S

SEQ ID NO: 62654 - protein, 28 aa, Artificial Sequence
  Cyclic GFR-binding peptide
  MOD_RES (26)..(27): Xaa is C or S
VQVEKIKPTKGIVKAIKVSRLDQSVXXP

SEQ ID NO: 62655 - protein, 24 aa, Artificial Sequence
  Cyclic GFR-binding peptide
VIMSMEGIVKPKRGVMIQITINSL

SEQ ID NO: 62656 - protein, 33 aa, Artificial Sequence; identical to SEQ ID NO: 12573
  Cyclic GFR-binding peptide
  MOD_RES (30)..(31): Xaa is C or S

SEQ ID NO: 62657 - protein, 35 aa, Artificial Sequence
  Cyclic GFR-binding peptide
  MOD_RES (1)..(3)..(35): Xaa is C or S
XGXARVVMNVTAKKIVNSSDDIKRVQVPRLQTPAX

SEQ ID NO: 62658 - protein, 25 aa, Artificial Sequence
  Cyclic GFR-binding peptide
VMNSMEGIIVNSSDDMIQVTINSLQ

SEQ ID NO: 62659 - protein, 29 aa, Artificial Sequence
  Cyclic GFR-binding peptide
  MOD_RES (28)..(29): Xaa is C or S
IMVTAKKVKPKRGVIKRIQVPRLAQPVXX

SEQ ID NO: 62660 - protein, 24 aa, Artificial Sequence
  Cyclic GFR-binding peptide
VTAKKVVKDYEDIKRMQVPRLETP

SEQ ID NO: 62661 - protein, 26 aa, Artificial Sequence
  Cyclic GFR-binding peptide
  MOD_RES (26)..(26): Xaa is C or S
VQVEKIVNSSDDVKAVKVSRLKTPAX

SEQ ID NO: 62662 - protein, 37 aa, Artificial Sequence; identical to SEQ ID NO: 12578
  Cyclic GFR-binding peptide
  MOD_RES (2)..(33)..(34): Xaa is C or S

SEQ ID NO: 62663 - protein, 26 aa, Artificial Sequence
  Cyclic GFR-binding peptide
MSMEGIIKPTKGIMIQITINSLDQSV

SEQ ID NO: 62664 - protein, 26 aa, Artificial Sequence
  Cyclic GFR-binding peptide
VVMNVTAKKIVNSSDDIKRVQVPRLQ

SEQ ID NO: 62665 - protein, 30 aa, Artificial Sequence
  Cyclic GFR-binding peptide
QLFNSLQEHQGQHPKIRYYLMTLPEEETPV

SEQ ID NO: 62666 - protein, 31 aa, Artificial Sequence; identical to SEQ ID NO: 12582
  Cyclic GFR-binding peptide
  MOD_RES (30)..(31): Xaa is C or S

SEQ ID NO: 62667 - protein, 24 aa, Artificial Sequence
  Cyclic GFR-binding peptide
VMENSLQEVVKDYEDYYVMPLPEL

SEQ ID NO: 62668 - protein, 36 aa, Artificial Sequence
  Cyclic GFR-binding peptide
  MOD_RES (1)..(3)..(35)..(36): Xaa is C or S
XGXSRVVMNVQVEKIVNSSDDVKAVKVSRLKTPAXX

SEQ ID NO: 62669 - protein, 34 aa, Artificial Sequence; identical to SEQ ID NO: 12586
  Cyclic GFR-binding peptide
  MOD_RES (30)..(31): Xaa is C or S

SEQ ID NO: 62670 - protein, 39 aa, Artificial Sequence
  Cyclic GFR-binding peptide
  MOD_RES (1)..(38): Xaa is C or S
XALHDELTNSLQEFIPKKRVIEYYVVPLPELQVQTPRXQ

SEQ ID NO: 62671 - protein, 31 aa, Artificial Sequence; identical to SEQ ID NO: 12590
  Cyclic GFR-binding peptide
  MOD_RES (26)..(27): Xaa is C or S

SEQ ID NO: 62672 - protein, 27 aa, Artificial Sequence
  Cyclic GFR-binding peptide
  MOD_RES (27)..(27): Xaa is C or S
NNSLQEIVNSSDDYYVVPLPELKTPAX

SEQ ID NO: 62673 - protein, 25 aa, Artificial Sequence
  Cyclic GFR-binding peptide
LTSMEGIFIPKKRVIEMIQVTINSL

SEQ ID NO: 62674 - protein, 36 aa, Artificial Sequence; identical to SEQ ID NO: 12593
  Cyclic GFR-binding peptide
  MOD_RES (1)..(33)..(34): Xaa is C or S

SEQ ID NO: 62675 - protein, 44 aa, Artificial Sequence
  Cyclic GFR-binding peptide
  MOD_RES (2)..(4)..(41): Xaa is C or S
EXKXALHDELTNSLQEFIPKKRVIEYYVVPLPELQVQTPRXQVN

SEQ ID NO: 62676 - protein, 25 aa, Artificial Sequence
  Cyclic GFR-binding peptide
DVQVEKVVKENEDVKAMKVSRLETP

SEQ ID NO: 62677 - protein, 39 aa, Artificial Sequence; identical to SEQ ID NO: 12595
  Cyclic GFR-binding peptide
  MOD_RES (1)..(33)..(34): Xaa is C or S

SEQ ID NO: 62678 - protein, 29 aa, Artificial Sequence
  Cyclic GFR-binding peptide
  MOD_RES (2)..(2): Xaa is C or S
GXSRVVMNNSLQEIVNSSDDYYLVTLPEL

SEQ ID NO: 62679 - protein, 25 aa, Artificial Sequence
  Cyclic GFR-binding peptide
EVVMDNSLQEVVKENEDYYLMTLPE

SEQ ID NO: 62680 - protein, 32 aa, Artificial Sequence
  Cyclic GFR-binding peptide
  MOD_RES (31)..(31): Xaa is C or S
RVVMNVQVEKIVNSSDDVKAVKVSRLKTPAXT

SEQ ID NO: 62681 - protein, 39 aa, Artificial Sequence
  Cyclic GFR-binding peptide
  MOD_RES (1)..(3)..(34)..(35): Xaa is C or S
XKXSKVVMVTAKKVKPTRGVIKRIQVPRLDQPVXXPSAS

SEQ ID NO: 62682 - protein, 24 aa, Artificial Sequence
  Cyclic GFR-binding peptide
VVMNSLQEVKPTRGVYYLITLPEL

SEQ ID NO: 62683 - protein, 27 aa, Artificial Sequence
  Cyclic GFR-binding peptide
VMDVTAKKVVKENEDIKRMQVPRLETP

SEQ ID NO: 62684 - protein, 31 aa, Artificial Sequence
  Cyclic GFR-binding peptide
  MOD_RES (2)..(2): Xaa is C or S
KXSKVVMVTAKKVKPTRGVIKRIQVPRLDQP

SEQ ID NO: 62685 - protein, 32 aa, Artificial Sequence; identical to SEQ ID NO: 22298
  Cyclic GFR-binding peptide

SEQ ID NO: 62686 - protein, 35 aa, Artificial Sequence; identical to SEQ ID NO: 12603
  Cyclic GFR-binding peptide
  MOD_RES (29)..(30): Xaa is C or S

SEQ ID NO: 62687 - protein, 39 aa, Artificial Sequence; identical to SEQ ID NO: 12608
  Cyclic GFR-binding peptide
  MOD_RES (2)..(34)..(35): Xaa is C or S

SEQ ID NO: 62688 - protein, 27 aa, Artificial Sequence
  Cyclic GFR-binding peptide
  MOD_RES (27)..(27): Xaa is C or S
MVQVEKVKPKRGVVKAIKVSRLAQPVX

SEQ ID NO: 62689 - protein, 28 aa, Artificial Sequence
  Cyclic GFR-binding peptide
  MOD_RES (28)..(28): Xaa is C or S
MDVQVEKVVKENEDVKAMKVSRLETPVX

SEQ ID NO: 62690 - protein, 30 aa, Artificial Sequence
  Cyclic GFR-binding peptide
  MOD_RES (26)..(27): Xaa is C or S
VQVEKIVNSSDDVKAVKVSRLQTPAXXPKP

SEQ ID NO: 62691 - protein, 37 aa, Artificial Sequence
  Cyclic GFR-binding peptide
  MOD_RES (33)..(33): Xaa is C or S
ELRNSLQELKPKKRVYEYYLVTLPEHHVRSPQXKVSS

SEQ ID NO: 62692 - protein, 38 aa, Artificial Sequence; identical to SEQ ID NO: 22305
  Cyclic GFR-binding peptide
  MOD_RES (2)..(4)..(38): Xaa is C or S

SEQ ID NO: 62693 - protein, 34 aa, Artificial Sequence; identical to SEQ ID NO: 22306
  Cyclic GFR-binding peptide
  MOD_RES (33)..(33): Xaa is C or S

SEQ ID NO: 62694 - protein, 43 aa, Artificial Sequence; identical to SEQ ID NO: 22307
  Cyclic GFR-binding peptide
  MOD_RES (2)..(4)..(41): Xaa is C or S

SEQ ID NO: 62695 - protein, 33 aa, Artificial Sequence
  Cyclic GFR-binding peptide
  MOD_RES (1)..(3): Xaa is C or S
XGXSRVVMNVTAKKIVNSSDDIKRVQVPRLKTP

SEQ ID NO: 62696 - protein, 37 aa, Artificial Sequence
  Cyclic GFR-binding peptide
  MOD_RES (1)..(33)..(34): Xaa is C or S
XSRVVMNSMEGIIVNSSDDMIQVTINSLKTPAXXPKP

SEQ ID NO: 62697 - protein, 35 aa, Artificial Sequence
  Cyclic GFR-binding peptide
  MOD_RES (2)..(34)..(35): Xaa is C or S
GXGEVVMDVTAKKVVKENEDIKRMQVPRLETPVXX

SEQ ID NO: 62698 - protein, 22 aa, Artificial Sequence
  Cyclic GFR-binding peptide
VTAKKHQGQHPKIRIKRMQVPR

SEQ ID NO: 62699 - protein, 37 aa, Artificial Sequence; identical to SEQ ID NO: 12618
  Cyclic GFR-binding peptide
  MOD_RES (2)..(4)..(36)..(37): Xaa is C or S

SEQ ID NO: 62700 - protein, 39 aa, Artificial Sequence; identical to SEQ ID NO: 22317
  Cyclic GFR-binding peptide
  MOD_RES (2)..(39): Xaa is C or S

SEQ ID NO: 62701 - protein, 30 aa, Artificial Sequence; identical to SEQ ID NO: 12623
  Cyclic GFR-binding peptide
  MOD_RES (2)..(4): Xaa is C or S

SEQ ID NO: 62702 - protein, 32 aa, Artificial Sequence
  Cyclic GFR-binding peptide
  MOD_RES (1)..(3): Xaa is C or S
XGXSRVVMNVTAKKIVNSSDDIKRVQVPRLKT

SEQ ID NO: 62703 - protein, 36 aa, Artificial Sequence
  Cyclic GFR-binding peptide
  MOD_RES (32)..(33): Xaa is C or S
GEVVMDVTAKKVVKENEDIKRMQVPRLETPVXXAKP

SEQ ID NO: 62704 - protein, 34 aa, Artificial Sequence; identical to SEQ ID NO: 12627
  Cyclic GFR-binding peptide
  MOD_RES (2)..(4): Xaa is C or S

SEQ ID NO: 62705 - protein, 38 aa, Artificial Sequence
  Cyclic GFR-binding peptide
  MOD_RES (1)..(3): Xaa is C or S
XKXALHDELTNSLQEFIPKKRVIEYYVVPLPELQVQTP

SEQ ID NO: 62706 - protein, 24 aa, Artificial Sequence
  Cyclic GFR-binding peptide
SMEGIVKPKRGVMIQITINSLAQP

SEQ ID NO: 62707 - protein, 30 aa, Artificial Sequence
  Cyclic GFR-binding peptide
  MOD_RES (26)..(27): Xaa is C or S
VQVEKIKPTKGIVKAIKVSRLDQSVXXPSA

SEQ ID NO: 62708 - protein, 30 aa, Artificial Sequence
  Cyclic GFR-binding peptide
  MOD_RES (30)..(30): Xaa is C or S
KVVMVQVEKVKPTRGVVKAIKVSRLDQPVX

SEQ ID NO: 62709 - protein, 31 aa, Artificial Sequence; identical to SEQ ID NO: 12633
  Cyclic GFR-binding peptide
  MOD_RES (2)..(4): Xaa is C or S

SEQ ID NO: 62710 - protein, 30 aa, Artificial Sequence
  Cyclic GFR-binding peptide
  MOD_RES (2)..(4): Xaa is C or S
HXGXARVVMNVTAKKIVNSSDDIKRVQVPR

SEQ ID NO: 62711 - protein, 36 aa, Artificial Sequence
  Cyclic GFR-binding peptide
  MOD_RES (30)..(31): Xaa is C or S
KVIMVTAKKIKPTKGIIKRIQVPRLDQSVXXPSASA

SEQ ID NO: 62712 - protein, 22 aa, Artificial Sequence
  Cyclic GFR-binding peptide
MDNSLQEVVKENEDYYLMTLPE

SEQ ID NO: 62713 - protein, 36 aa, Artificial Sequence
  Cyclic GFR-binding peptide
  MOD_RES (1)..(33)..(34): Xaa is C or S
XSRVVMNVQVEKIVNSSDDVKAVKVSRLKTPAXXPK

SEQ ID NO: 62714 - protein, 37 aa, Artificial Sequence; identical to SEQ ID NO: 22328
  Cyclic GFR-binding peptide
  MOD_RES (1)..(1): Xaa is C or S

SEQ ID NO: 62715 - protein, 40 aa, Artificial Sequence; identical to SEQ ID NO: 12647
  Cyclic GFR-binding peptide
  MOD_RES (1)..(3)..(34)..(35): Xaa is C or S

SEQ ID NO: 62716 - protein, 36 aa, Artificial Sequence; identical to SEQ ID NO: 22329
  Cyclic GFR-binding peptide
  MOD_RES (32)..(32): Xaa is C or S

SEQ ID NO: 62717 - protein, 34 aa, Artificial Sequence
  Cyclic GFR-binding peptide
  MOD_RES (34)..(34): Xaa is C or S
KNHQLFNSLQEHQGQHPKIRYYVMPLPEEETPVX

SEQ ID NO: 62718 - protein, 32 aa, Artificial Sequence
  Cyclic GFR-binding peptide
HDELTNSLQEFIPKKRVIEYYLVTLPELQVQT

SEQ ID NO: 62719 - protein, 30 aa, Artificial Sequence
  Cyclic GFR-binding peptide
EVVMDVQVEKVVKENEDVKAMKVSRLETPV

SEQ ID NO: 62720 - protein, 28 aa, Artificial Sequence
  Cyclic GFR-binding peptide
VVMSMEGIVKPTRGVMIQITINSLDQPV

SEQ ID NO: 62721 - protein, 22 aa, Artificial Sequence
  Cyclic GFR-binding peptide
MNSLQEVKPKRGVYYLITLPEL

SEQ ID NO: 62722 - protein, 33 aa, Artificial Sequence
  Cyclic GFR-binding peptide
  MOD_RES (31)..(31): Xaa is C or S
TNSLQEFIPKKRVIEYYLVTLPELQVQTPRXQV

SEQ ID NO: 62723 - protein, 38 aa, Artificial Sequence
  Cyclic GFR-binding peptide
  MOD_RES (1)..(3)..(34)..(35): Xaa is C or S
XKXSRVIMVQVEKVKPKRGVVKAIKVSRLAQPVXXPAA

SEQ ID NO: 62724 - protein, 29 aa, Artificial Sequence
  Cyclic GFR-binding peptide
  MOD_RES (2)..(2): Xaa is C or S
GXSRVVMNVQVEKIVNSSDDVKAVKVSRL

SEQ ID NO: 62725 - protein, 26 aa, Artificial Sequence
  Cyclic GFR-binding peptide
EVVMEVQVEKVVKDYEDVKAMKVSRL

SEQ ID NO: 62726 - protein, 27 aa, Artificial Sequence
  Cyclic GFR-binding peptide
DELTNSLQEFIPKKRVIEYYLVTLPEL

SEQ ID NO: 62727 - protein, 31 aa, Artificial Sequence
  Cyclic GFR-binding peptide
  MOD_RES (30)..(31): Xaa is C or S
VVMNSMEGIIVNSSDDMIQVTINSLQTPAXX

SEQ ID NO: 62728 - protein, 32 aa, Artificial Sequence
  Cyclic GFR-binding peptide
  MOD_RES (27)..(28): Xaa is C or S
MSMEGIVKPKRGVMIQITINSLAQPVXXPAAS

SEQ ID NO: 62729 - protein, 31 aa, Artificial Sequence
  Cyclic GFR-binding peptide
  MOD_RES (1)..(3): Xaa is C or S
XGXGEVVMEVQVEKVVKDYEDVKAMKVSRLE

SEQ ID NO: 62730 - protein, 24 aa, Artificial Sequence
  Cyclic GFR-binding peptide
MNSMEGIIVNSSDDMIQVTINSLK

SEQ ID NO: 62731 - protein, 24 aa, Artificial Sequence
  Cyclic GFR-binding peptide
KVIMVTAKKIKPTKGIIKRIQVPR

SEQ ID NO: 62732 - protein, 30 aa, Artificial Sequence
  Cyclic GFR-binding peptide
  MOD_RES (30)..(30): Xaa is C or S
LFNSLQEHQGQHPKIRYYVMPLPEEETPVX

SEQ ID NO: 62733 - protein, 31 aa, Artificial Sequence; identical to SEQ ID NO: 22343
  Cyclic GFR-binding peptide

SEQ ID NO: 62734 - protein, 28 aa, Artificial Sequence
  Cyclic GFR-binding peptide
VMNNSLQEIVNSSDDYYLVTLPELKTPA

SEQ ID NO: 62735 - protein, 37 aa, Artificial Sequence
  Cyclic GFR-binding peptide
  MOD_RES (2)..(2): Xaa is C or S
KXALHDELTNSLQEFIPKKRVIEYYLVTLPELQVQTP

SEQ ID NO: 62736 - protein, 34 aa, Artificial Sequence
  Cyclic GFR-binding peptide
  MOD_RES (1)..(33)..(34): Xaa is C or S
XSRVVMNVTAKKIVNSSDDIKRVQVPRLKTPAXX

SEQ ID NO: 62737 - protein, 31 aa, Artificial Sequence
  Cyclic GFR-binding peptide
  MOD_RES (30)..(30): Xaa is C or S
VVMNVQVEKIVNSSDDVKAVKVSRLKTPAXT

SEQ ID NO: 62738 - protein, 34 aa, Artificial Sequence; identical to SEQ ID NO: 22347
  Cyclic GFR-binding peptide
  MOD_RES (28)..(28): Xaa is C or S

SEQ ID NO: 62739 - protein, 31 aa, Artificial Sequence
  Cyclic GFR-binding peptide
LHDELTNSLQEFIPKKRVIEYYVVPLPELQV

SEQ ID NO: 62740 - protein, 30 aa, Artificial Sequence; identical to SEQ ID NO: 12688
  Cyclic GFR-binding peptide
  MOD_RES (27)..(28): Xaa is C or S

SEQ ID NO: 62741 - protein, 25 aa, Artificial Sequence
  Cyclic GFR-binding peptide
LFVQVEKHQGQHPKIRVKAMKVSRE

SEQ ID NO: 62742 - protein, 36 aa, Artificial Sequence
  Cyclic GFR-binding peptide
  MOD_RES (30)..(31): Xaa is C or S
VVMESMEGIVVKDYEDMIQMTINSLETPVXXAKPIS

SEQ ID NO: 62743 - protein, 30 aa, Artificial Sequence
  Cyclic GFR-binding peptide
SRVVMNVTAKKIVNSSDDIKRVQVPRLKTP

SEQ ID NO: 62744 - protein, 38 aa, Artificial Sequence
  Cyclic GFR-binding peptide
  MOD_RES (2)..(2): Xaa is C or S
AXELHEELRNSLQELKPKKRVYEYYVVPLPEHHVRSPQ

SEQ ID NO: 62745 - protein, 26 aa, Artificial Sequence
  Cyclic GFR-binding peptide
  MOD_RES (26)..(26): Xaa is C or S
NSLQEIVNSSDDYYVVPLPELKTPAX

SEQ ID NO: 62746 - protein, 31 aa, Artificial Sequence; identical to SEQ ID NO: 12699
  Cyclic GFR-binding peptide
  MOD_RES (1)..(1): Xaa is C or S

SEQ ID NO: 62747 - protein, 27 aa, Artificial Sequence
  Cyclic GFR-binding peptide
TNSLQEFIPKKRVIEYYVVPLPELQVQ

SEQ ID NO: 62748 - protein, 35 aa, Artificial Sequence
  Cyclic GFR-binding peptide
  MOD_RES (30)..(31): Xaa is C or S
RVIMSMEGIVKPKRGVMIQITINSLAQPVXXPAAS

SEQ ID NO: 62749 - protein, 40 aa, Artificial Sequence
  Cyclic GFR-binding peptide
  MOD_RES (2)..(34): Xaa is C or S
GXSRVVMNVTAKKIVNSSDDIKRVQVPRLKTPAXTPKTVH

SEQ ID NO: 62750 - protein, 32 aa, Artificial Sequence
  Cyclic GFR-binding peptide
  MOD_RES (31)..(32): Xaa is C or S
RVVMNSMEGIIVNSSDDMIQVTINSLQTPAXX

SEQ ID NO: 62751 - protein, 39 aa, Artificial Sequence
  Cyclic GFR-binding peptide
  MOD_RES (2)..(39): Xaa is C or S
KXALHDELTNSLQEFIPKKRVIEYYLVTLPELQVQTPRX

SEQ ID NO: 62752 - protein, 28 aa, Artificial Sequence
  Cyclic GFR-binding peptide
  MOD_RES (1)..(1): Xaa is C or S
XSKVVMNSLQEVKPTRGVYYVIPLPELD

SEQ ID NO: 62753 - protein, 31 aa, Artificial Sequence; identical to SEQ ID NO: 12717
  Cyclic GFR-binding peptide
  MOD_RES (27)..(28): Xaa is C or S

SEQ ID NO: 62754 - protein, 40 aa, Artificial Sequence; identical to SEQ ID NO: 22373
  Cyclic GFR-binding peptide
  MOD_RES (36)..(36): Xaa is C or S

SEQ ID NO: 62755 - protein, 27 aa, Artificial Sequence
  Cyclic GFR-binding peptide
RVTAKKLKPKKRVYEIKRVQVPRHHVR

SEQ ID NO: 62756 - protein, 37 aa, Artificial Sequence; identical to SEQ ID NO: 12721
  Cyclic GFR-binding peptide
  MOD_RES (1)..(33)..(34): Xaa is C or S

SEQ ID NO: 62757 - protein, 35 aa, Artificial Sequence; identical to SEQ ID NO: 22377
  Cyclic GFR-binding peptide

SEQ ID NO: 62758 - protein, 31 aa, Artificial Sequence
  Cyclic GFR-binding peptide
  MOD_RES (29)..(29): Xaa is C or S
VMNVTAKKIVNSSDDIKRVQVPRLKTPAXTP

SEQ ID NO: 62759 - protein, 38 aa, Artificial Sequence
  Cyclic GFR-binding peptide
  MOD_RES (2)..(4)..(35)..(36): Xaa is C or S
SXKXSRVIMSMEGIVKPKRGVMIQITINSLAQPVXXPA

SEQ ID NO: 62760 - protein, 29 aa, Artificial Sequence
  Cyclic GFR-binding peptide
  MOD_RES (27)..(28): Xaa is C or S
ENSLQEVVKDYEDYYVMPLPELETPVXXA

SEQ ID NO: 62761 - protein, 32 aa, Artificial Sequence; identical to SEQ ID NO: 12725
  Cyclic GFR-binding peptide
  MOD_RES (26)..(27): Xaa is C or S

SEQ ID NO: 62762 - protein, 26 aa, Artificial Sequence
  Cyclic GFR-binding peptide
VQVEKHQGQHPKIRVKAMKVSREETP

SEQ ID NO: 62763 - protein, 33 aa, Artificial Sequence
  Cyclic GFR-binding peptide
  MOD_RES (28)..(29): Xaa is C or S
IMSMEGIVKPKRGVMIQITINSLAQPVXXPAAS

SEQ ID NO: 62764 - protein, 28 aa, Artificial Sequence
  Cyclic GFR-binding peptide
EVVMEVQVEKVVKDYEDVKAMKVSRLET

SEQ ID NO: 62765 - protein, 30 aa, Artificial Sequence
  Cyclic GFR-binding peptide
  MOD_RES (30)..(30): Xaa is C or S
RVIMVQVEKVKPKRGVVKAIKVSRLAQPVX

SEQ ID NO: 62766 - protein, 28 aa, Artificial Sequence
  Cyclic GFR-binding peptide
  MOD_RES (27)..(28): Xaa is C or S
NSMEGIIVNSSDDMIQVTINSLKTPAXX

SEQ ID NO: 62767 - protein, 33 aa, Artificial Sequence; identical to SEQ ID NO: 22386
  Cyclic GFR-binding peptide

SEQ ID NO: 62768 - protein, 30 aa, Artificial Sequence
  Cyclic GFR-binding peptide
DELTNSLQEFIPKKRVIEYYVVPLPELQVQ

SEQ ID NO: 62769 - protein, 33 aa, Artificial Sequence
  Cyclic GFR-binding peptide
  MOD_RES (2)..(4): Xaa is C or S
RXGXGEVVMESMEGIVVKDYEDMIQMTINSLET

SEQ ID NO: 62770 - protein, 31 aa, Artificial Sequence; identical to SEQ ID NO: 12730
  Cyclic GFR-binding peptide
  MOD_RES (1)..(3): Xaa is C or S

SEQ ID NO: 62771 - protein, 38 aa, Artificial Sequence
  Cyclic GFR-binding peptide
  MOD_RES (2)..(34)..(35): Xaa is C or S
GXGEVVMDVTAKKVVKENEDIKRMQVPRLETPVXXAKP

SEQ ID NO: 62772 - protein, 28 aa, Artificial Sequence
  Cyclic GFR-binding peptide
KNHQLFNSLQEHQGQHPKIRYYLMTLPE

SEQ ID NO: 62773 - protein, 29 aa, Artificial Sequence
  Cyclic GFR-binding peptide
  MOD_RES (27)..(27): Xaa is C or S
NSMEGIIVNSSDDMIQVTINSLKTPAXTP

SEQ ID NO: 62774 - protein, 22 aa, Artificial Sequence
  Cyclic GFR-binding peptide
SMEGILKPKKRVYEMIQVTINS

SEQ ID NO: 62775 - protein, 29 aa, Artificial Sequence
  Cyclic GFR-binding peptide
  MOD_RES (1)..(3): Xaa is C or S
XGXGEVVMDSMEGIVVKENEDMIQMTINS

SEQ ID NO: 62776 - protein, 26 aa, Artificial Sequence
  Cyclic GFR-binding peptide
VVMVTAKKVKPTRGVIKRIQVPRLDQ

SEQ ID NO: 62777 - protein, 37 aa, Artificial Sequence; identical to SEQ ID NO: 22399
  Cyclic GFR-binding peptide
  MOD_RES (37)..(37): Xaa is C or S

SEQ ID NO: 62778 - protein, 35 aa, Artificial Sequence
  Cyclic GFR-binding peptide
  MOD_RES (31)..(31): Xaa is C or S
RNSLQELKPKKRVYEYYVVPLPEHHVRSPQXKVSS

SEQ ID NO: 62779 - protein, 29 aa, Artificial Sequence
  Cyclic GFR-binding peptide
  MOD_RES (27)..(28): Xaa is C or S
NVTAKKIVNSSDDIKRVQVPRLKTPAXXP

SEQ ID NO: 62780 - protein, 42 aa, Artificial Sequence
  Cyclic GFR-binding peptide
  MOD_RES (2)..(4)..(36)..(37): Xaa is C or S
HXGXSRVVMNVQVEKIVNSSDDVKAVKVSRLKTPAXXPKPVY

SEQ ID NO: 62781 - protein, 24 aa, Artificial Sequence
  Cyclic GFR-binding peptide
NSLQEIVNSSDDYYLVTLPELQTP

SEQ ID NO: 62782 - protein, 43 aa, Artificial Sequence
  Cyclic GFR-binding peptide
  MOD_RES (2)..(4)..(41): Xaa is C or S
AXAXELHEELRNSLQELKPKKRVYEYYLVTLPEHHVRSPQXKV

SEQ ID NO: 62783 - protein, 34 aa, Artificial Sequence
  Cyclic GFR-binding peptide
  MOD_RES (31)..(32): Xaa is C or S
RVVMNVQVEKIVNSSDDVKAVKVSRLQTPAXXPK

SEQ ID NO: 62784 - protein, 33 aa, Artificial Sequence
  Cyclic GFR-binding peptide
  MOD_RES (27)..(28): Xaa is C or S
NVQVEKIVNSSDDVKAVKVSRLQTPAXXPKPVT

SEQ ID NO: 62785 - protein, 33 aa, Artificial Sequence
  Cyclic GFR-binding peptide
  MOD_RES (27)..(27): Xaa is C or S
NVQVEKIVNSSDDVKAVKVSRLKTPAXTPKTVH

SEQ ID NO: 62786 - protein, 32 aa, Artificial Sequence
  Cyclic GFR-binding peptide
  MOD_RES (2)..(4): Xaa is C or S
HXGXARVVMNVQVEKIVNSSDDVKAVKVSRLQ

SEQ ID NO: 62787 - protein, 28 aa, Artificial Sequence
  Cyclic GFR-binding peptide
  MOD_RES (1)..(1): Xaa is C or S
XSRVVMNVTAKKIVNSSDDIKRVQVPRL

SEQ ID NO: 62788 - protein, 29 aa, Artificial Sequence
  Cyclic GFR-binding peptide
  MOD_RES (28)..(29): Xaa is C or S
MNNSLQEIVNSSDDYYVVPLPELQTPAXX

SEQ ID NO: 62789 - protein, 33 aa, Artificial Sequence
  Cyclic GFR-binding peptide
  MOD_RES (28)..(29): Xaa is C or S
MDVTAKKVVKENEDIKRMQVPRLETPVXXAKPI

SEQ ID NO: 62790 - protein, 37 aa, Artificial Sequence
  Cyclic GFR-binding peptide
  MOD_RES (1)..(33)..(34): Xaa is C or S
XGEVVMEVQVEKVVKDYEDVKAMKVSRLETPVXXAKP

SEQ ID NO: 62791 - protein, 34 aa, Artificial Sequence
  Cyclic GFR-binding peptide
  MOD_RES (32)..(33): Xaa is C or S
SRVVMNVTAKKIVNSSDDIKRVQVPRLKTPAXXP

SEQ ID NO: 62792 - protein, 31 aa, Artificial Sequence
  Cyclic GFR-binding peptide
  MOD_RES (1)..(3): Xaa is C or S
XGXARVVMNSMEGIIVNSSDDMIQVTINSLQ

SEQ ID NO: 62793 - protein, 26 aa, Artificial Sequence
  Cyclic GFR-binding peptide
  MOD_RES (26)..(26): Xaa is C or S
NSLQEIKPTKGIYYLITLPELDQSVX

SEQ ID NO: 62794 - protein, 32 aa, Artificial Sequence
  Cyclic GFR-binding peptide
ELHEELRNSLQELKPKKRVYEYYLVTLPEHHV

SEQ ID NO: 62795 - protein, 29 aa, Artificial Sequence
  Cyclic GFR-binding peptide
  MOD_RES (1)..(1): Xaa is C or S
XKNHQLFNSLQEHQGQHPKIRYYVMPLPE

SEQ ID NO: 62796 - protein, 33 aa, Artificial Sequence
  Cyclic GFR-binding peptide
  MOD_RES (33)..(33): Xaa is C or S
NHQLFNSLQEHQGQHPKIRYYVMPLPEEETPVX

SEQ ID NO: 62797 - protein, 32 aa, Artificial Sequence
  Cyclic GFR-binding peptide
  MOD_RES (31)..(31): Xaa is C or S
QLFNSLQEHQGQHPKIRYYVMPLPEEETPVXE

SEQ ID NO: 62798 - protein, 26 aa, Artificial Sequence
  Cyclic GFR-binding peptide
MSMEGIVKPTRGVMIQITINSLDQPV

SEQ ID NO: 62799 - protein, 33 aa, Artificial Sequence
  Cyclic GFR-binding peptide
LHDELTNSLQEFIPKKRVIEYYLVTLPELQVQT

SEQ ID NO: 62800 - protein, 26 aa, Artificial Sequence
  Cyclic GFR-binding peptide
  MOD_RES (26)..(26): Xaa is C or S
VQVEKVKPKRGVVKAIKVSRLAQPVX

SEQ ID NO: 62801 - protein, 29 aa, Artificial Sequence
  Cyclic GFR-binding peptide
  MOD_RES (1)..(1): Xaa is C or S
XSKVIMVQVEKIKPTKGIVKAIKVSRLDQ

SEQ ID NO: 62802 - protein, 27 aa, Artificial Sequence
  Cyclic GFR-binding peptide
  MOD_RES (2)..(2): Xaa is C or S
KXSKVVMSMEGIVKPTRGVMIQITINS

SEQ ID NO: 62803 - protein, 40 aa, Artificial Sequence; identical to SEQ ID NO: 22418
  Cyclic GFR-binding peptide
  MOD_RES (2)..(36): Xaa is C or S

SEQ ID NO: 62804 - protein, 39 aa, Artificial Sequence
  Cyclic GFR-binding peptide
  MOD_RES (1)..(3)..(35)..(36): Xaa is C or S
XGXARVVMNVQVEKIVNSSDDVKAVKVSRLQTPAXXPKP

SEQ ID NO: 62805 - protein, 38 aa, Artificial Sequence; identical to SEQ ID NO: 12776
  Cyclic GFR-binding peptide
  MOD_RES (32)..(33): Xaa is C or S

SEQ ID NO: 62806 - protein, 34 aa, Artificial Sequence
  Cyclic GFR-binding peptide
  MOD_RES (2)..(33)..(34): Xaa is C or S
KXSKVVMVTAKKVKPTRGVIKRIQVPRLDQPVXX

SEQ ID NO: 62807 - protein, 30 aa, Artificial Sequence
  Cyclic GFR-binding peptide
  MOD_RES (1)..(1): Xaa is C or S
XSKVIMVTAKKIKPTKGIIKRIQVPRLDQS

SEQ ID NO: 62808 - protein, 31 aa, Artificial Sequence
  Cyclic GFR-binding peptide
  MOD_RES (30)..(31): Xaa is C or S
KVIMSMEGIIKPTKGIMIQITINSLDQSVXX

SEQ ID NO: 62809 - protein, 35 aa, Artificial Sequence
  Cyclic GFR-binding peptide
  MOD_RES (1)..(32)..(33): Xaa is C or S
XSKVVMSMEGIVKPTRGVMIQITINSLDQPVXXPS

SEQ ID NO: 62810 - protein, 37 aa, Artificial Sequence
  Cyclic GFR-binding peptide
  MOD_RES (1)..(33)..(34): Xaa is C or S
XSRVVMNVQVEKIVNSSDDVKAVKVSRLKTPAXXPKP

SEQ ID NO: 62811 - protein, 28 aa, Artificial Sequence
  Cyclic GFR-binding peptide
  MOD_RES (28)..(28): Xaa is C or S
MNNSLQEIVNSSDDYYVVPLPELKTPAX

SEQ ID NO: 62812 - protein, 21 aa, Artificial Sequence
  Cyclic GFR-binding peptide
ESMEGIVVKDYEDMIQMTINS

SEQ ID NO: 62813 - protein, 36 aa, Artificial Sequence
  Cyclic GFR-binding peptide
  MOD_RES (32)..(33): Xaa is C or S
SRVVMNVQVEKIVNSSDDVKAVKVSRLKTPAXXPKP

SEQ ID NO: 62814 - protein, 39 aa, Artificial Sequence; identical to SEQ ID NO: 22431
  Cyclic GFR-binding peptide
  MOD_RES (1)..(3)..(37): Xaa is C or S

SEQ ID NO: 62815 - protein, 32 aa, Artificial Sequence
  Cyclic GFR-binding peptide
  MOD_RES (30)..(31): Xaa is C or S
KVVMVTAKKVKPTRGVIKRIQVPRLDQPVXXP

SEQ ID NO: 62816 - protein, 31 aa, Artificial Sequence; identical to SEQ ID NO: 12792
  Cyclic GFR-binding peptide

SEQ ID NO: 62817 - protein, 44 aa, Artificial Sequence
  Cyclic GFR-binding peptide
  MOD_RES (2)..(4)..(41): Xaa is C or S
EXKXALHDELTNSLQEFIPKKRVIEYYLVTLPELQVQTPRXQVN

SEQ ID NO: 62818 - protein, 26 aa, Artificial Sequence
  Cyclic GFR-binding peptide
  MOD_RES (26)..(26): Xaa is C or S
SMEGIVVKENEDMIQMTINSLETPVX

SEQ ID NO: 62819 - protein, 30 aa, Artificial Sequence
  Cyclic GFR-binding peptide
  MOD_RES (29)..(30): Xaa is C or S
VMNVQVEKIVNSSDDVKAVKVSRLQTPAXX

SEQ ID NO: 62820 - protein, 27 aa, Artificial Sequence
  Cyclic GFR-binding peptide
  MOD_RES (27)..(27): Xaa is C or S
MVTAKKVKPTRGVIKRIQVPRLDQPVX

SEQ ID NO: 62821 - protein, 32 aa, Artificial Sequence
  Cyclic GFR-binding peptide
ELTNSLQEFIPKKRVIEYYVVPLPELQVQTPR

SEQ ID NO: 62822 - protein, 33 aa, Artificial Sequence
  Cyclic GFR-binding peptide
  MOD_RES (30)..(31): Xaa is C or S
RVIMSMEGIVKPKRGVMIQITINSLAQPVXXPA

SEQ ID NO: 62823 - protein, 39 aa, Artificial Sequence
  Cyclic GFR-binding peptide
  MOD_RES (36)..(36): Xaa is C or S
LHDELTNSLQEFIPKKRVIEYYVVPLPELQVQTPRXQVN

SEQ ID NO: 62824 - protein, 36 aa, Artificial Sequence
  Cyclic GFR-binding peptide
  MOD_RES (2)..(34)..(35): Xaa is C or S
GXGEVVMESMEGIVVKDYEDMIQMTINSLETPVXXA

SEQ ID NO: 62825 - protein, 25 aa, Artificial Sequence
  Cyclic GFR-binding peptide
TVQVEKFIPKKRVIEVKAVKVSRLQ

SEQ ID NO: 62826 - protein, 34 aa, Artificial Sequence
  Cyclic GFR-binding peptide
  MOD_RES (31)..(32): Xaa is C or S
SKVIMVTAKKIKPTKGIIKRIQVPRLDQSVXXPS

SEQ ID NO: 62827 - protein, 27 aa, Artificial Sequence
  Cyclic GFR-binding peptide
  MOD_RES (1)..(1): Xaa is C or S
XSKVIMSMEGIIKPTKGIMIQITINSL

SEQ ID NO: 62828 - protein, 27 aa, Artificial Sequence
  Cyclic GFR-binding peptide
VMDSMEGIVVKENEDMIQMTINSLETP

SEQ ID NO: 62829 - protein, 32 aa, Artificial Sequence; identical to SEQ ID NO: 12830
  Cyclic GFR-binding peptide
  MOD_RES (28)..(29): Xaa is C or S

SEQ ID NO: 62830 - protein, 32 aa, Artificial Sequence
  Cyclic GFR-binding peptide
  MOD_RES (30)..(31): Xaa is C or S
KVIMSMEGIIKPTKGIMIQITINSLDQSVXXP

SEQ ID NO: 62831 - protein, 28 aa, Artificial Sequence
  Cyclic GFR-binding peptide
  MOD_RES (26)..(27): Xaa is C or S
VTAKKVKPTRGVIKRIQVPRLDQPVXXP

SEQ ID NO: 62832 - protein, 42 aa, Artificial Sequence
  Cyclic GFR-binding peptide
  MOD_RES (2)..(39): Xaa is C or S
AXELHEELRNSLQELKPKKRVYEYYLVTLPEHHVRSPQXKVS

SEQ ID NO: 62833 - protein, 28 aa, Artificial Sequence
  Cyclic GFR-binding peptide
EVVMDVTAKKVVKENEDIKRMQVPRLET

SEQ ID NO: 62834 - protein, 35 aa, Artificial Sequence; identical to SEQ ID NO: 12840
  Cyclic GFR-binding peptide
  MOD_RES (2)..(4)..(35): Xaa is C or S

SEQ ID NO: 62835 - protein, 30 aa, Artificial Sequence; identical to SEQ ID NO: 22464
  Cyclic GFR-binding peptide
  MOD_RES (1)..(1): Xaa is C or S

SEQ ID NO: 62836 - protein, 34 aa, Artificial Sequence
  Cyclic GFR-binding peptide
  MOD_RES (2)..(34): Xaa is C or S
GXARVVMNVQVEKIVNSSDDVKAVKVSRLQTPAX

SEQ ID NO: 62837 - protein, 33 aa, Artificial Sequence; identical to SEQ ID NO: 12843
  Cyclic GFR-binding peptide
  MOD_RES (2)..(4): Xaa is C or S

SEQ ID NO: 62838 - protein, 26 aa, Artificial Sequence
  Cyclic GFR-binding peptide
RVIMSMEGIVKPKRGVMIQITINSLA

SEQ ID NO: 62839 - protein, 32 aa, Artificial Sequence; identical to SEQ ID NO: 12851
  Cyclic GFR-binding peptide
  MOD_RES (1)..(3): Xaa is C or S

SEQ ID NO: 62840 - protein, 36 aa, Artificial Sequence
  Cyclic GFR-binding peptide
  MOD_RES (31)..(31): Xaa is C or S
QLFNSLQEHQGQHPKIRYYVMPLPEEETPVXELGED

SEQ ID NO: 62841 - protein, 35 aa, Artificial Sequence; identical to SEQ ID NO: 22471
  Cyclic GFR-binding peptide
  MOD_RES (29)..(29): Xaa is C or S

SEQ ID NO: 62842 - protein, 34 aa, Artificial Sequence
  Cyclic GFR-binding peptide
  MOD_RES (1)..(3)..(34): Xaa is C or S
XKXSRVIMSMEGIVKPKRGVMIQITINSLAQPVX

SEQ ID NO: 62843 - protein, 29 aa, Artificial Sequence
  Cyclic GFR-binding peptide
SKVIMVTAKKIKPTKGIIKRIQVPRLDQS

SEQ ID NO: 62844 - protein, 30 aa, Artificial Sequence; identical to SEQ ID NO: 22480
  Cyclic GFR-binding peptide

SEQ ID NO: 62845 - protein, 37 aa, Artificial Sequence; identical to SEQ ID NO: 12864
  Cyclic GFR-binding peptide
  MOD_RES (1)..(33)..(34): Xaa is C or S

SEQ ID NO: 62846 - protein, 30 aa, Artificial Sequence; identical to SEQ ID NO: 12865
  Cyclic GFR-binding peptide
  MOD_RES (1)..(3): Xaa is C or S

SEQ ID NO: 62847 - protein, 30 aa, Artificial Sequence
  Cyclic GFR-binding peptide
  MOD_RES (28)..(28): Xaa is C or S
MNVQVEKIVNSSDDVKAVKVSRLKTPAXTP

SEQ ID NO: 62848 - protein, 40 aa, Artificial Sequence
  Cyclic GFR-binding peptide
  MOD_RES (1)..(3)..(35)..(36): Xaa is C or S
XGXGEVVMEVQVEKVVKDYEDVKAMKVSRLETPVXXAKPI

SEQ ID NO: 62849 - protein, 30 aa, Artificial Sequence
  Cyclic GFR-binding peptide
  MOD_RES (28)..(29): Xaa is C or S
IMSMEGIIKPTKGIMIQITINSLDQSVXXP

SEQ ID NO: 62850 - protein, 22 aa, Artificial Sequence
  Cyclic GFR-binding peptide
VQVEKVVKDYEDVKAMKVSRLE

SEQ ID NO: 62851 - protein, 26 aa, Artificial Sequence
  Cyclic GFR-binding peptide
MSMEGIVKPKRGVMIQITINSLAQPV

SEQ ID NO: 62852 - protein, 37 aa, Artificial Sequence; identical to SEQ ID NO: 12870
  Cyclic GFR-binding peptide
  MOD_RES (1)..(33): Xaa is C or S

SEQ ID NO: 62853 - protein, 41 aa, Artificial Sequence; identical to SEQ ID NO: 22489
  Cyclic GFR-binding peptide
  MOD_RES (1)..(3)..(37): Xaa is C or S

SEQ ID NO: 62854 - protein, 34 aa, Artificial Sequence
  Cyclic GFR-binding peptide
  MOD_RES (34)..(34): Xaa is C or S
DELTNSLQEFIPKKRVIEYYVVPLPELQVQTPRX

SEQ ID NO: 62855 - protein, 24 aa, Artificial Sequence
  Cyclic GFR-binding peptide
NSLQEFIPKKRVIEYYLVTLPELQ

SEQ ID NO: 62856 - protein, 35 aa, Artificial Sequence
  Cyclic GFR-binding peptide
  MOD_RES (1)..(3)..(35): Xaa is C or S
XGXGEVVMDVTAKKVVKENEDIKRMQVPRLETPVX

SEQ ID NO: 62857 - protein, 35 aa, Artificial Sequence; identical to SEQ ID NO: 12879
  Cyclic GFR-binding peptide
  MOD_RES (31)..(32): Xaa is C or S

SEQ ID NO: 62858 - protein, 32 aa, Artificial Sequence; identical to SEQ ID NO: 12880
  Cyclic GFR-binding peptide
  MOD_RES (26)..(27): Xaa is C or S

SEQ ID NO: 62859 - protein, 28 aa, Artificial Sequence
  Cyclic GFR-binding peptide
KVVMNSLQEVKPTRGVYYLITLPELDQP

SEQ ID NO: 62860 - protein, 27 aa, Artificial Sequence
  Cyclic GFR-binding peptide
IMNSLQEVKPKRGVYYLITLPELAQPV

SEQ ID NO: 62861 - protein, 26 aa, Artificial Sequence
  Cyclic GFR-binding peptide
VMDVQVEKVVKENEDVKAMKVSRLET

SEQ ID NO: 62862 - protein, 24 aa, Artificial Sequence
  Cyclic GFR-binding peptide
FNSLQEHQGQHPKIRYYVMPLPEE

SEQ ID NO: 62863 - protein, 35 aa, Artificial Sequence
  Cyclic GFR-binding peptide
  MOD_RES (2)..(34)..(35): Xaa is C or S
GXSRVVMNSMEGIIVNSSDDMIQVTINSLKTPAXX

SEQ ID NO: 62864 - protein, 31 aa, Artificial Sequence
  Cyclic GFR-binding peptide
  MOD_RES (2)..(4): Xaa is C or S
RXGXGEVVMDSMEGIVVKENEDMIQMTINSL

SEQ ID NO: 62865 - protein, 31 aa, Artificial Sequence; identical to SEQ ID NO: 12894
  Cyclic GFR-binding peptide
  MOD_RES (27)..(28): Xaa is C or S

SEQ ID NO: 62866 - protein, 32 aa, Artificial Sequence
  Cyclic GFR-binding peptide
  MOD_RES (26)..(27): Xaa is C or S
VQVEKVVKENEDVKAMKVSRLETPVXXAKPIK

SEQ ID NO: 62867 - protein, 35 aa, Artificial Sequence
  Cyclic GFR-binding peptide
  MOD_RES (1)..(33): Xaa is C or S
XSRVVMNVQVEKIVNSSDDVKAVKVSRLKTPAXTP

SEQ ID NO: 62868 - protein, 33 aa, Artificial Sequence; identical to SEQ ID NO: 12900
  Cyclic GFR-binding peptide
  MOD_RES (2)..(4): Xaa is C or S

SEQ ID NO: 62869 - protein, 25 aa, Artificial Sequence
  Cyclic GFR-binding peptide
VMNVTAKKIVNSSDDIKRVQVPRLK

SEQ ID NO: 62870 - protein, 37 aa, Artificial Sequence; identical to SEQ ID NO: 12901
  Cyclic GFR-binding peptide
  MOD_RES (2)..(4)..(36)..(37): Xaa is C or S

SEQ ID NO: 62871 - protein, 24 aa, Artificial Sequence
  Cyclic GFR-binding peptide
VVMSMEGIVKPTRGVMIQITINSL

SEQ ID NO: 62872 - protein, 25 aa, Artificial Sequence
  Cyclic GFR-binding peptide
SKVIMVTAKKIKPTKGIIKRIQVPR

SEQ ID NO: 62873 - protein, 30 aa, Artificial Sequence
  Cyclic GFR-binding peptide
  MOD_RES (2)..(2): Xaa is C or S
GXARVVMNVTAKKIVNSSDDIKRVQVPRLQ

SEQ ID NO: 62874 - protein, 22 aa, Artificial Sequence
  Cyclic GFR-binding peptide
MVQVEKVKPTRGVVKAIKVSRL

SEQ ID NO: 62875 - protein, 36 aa, Artificial Sequence
  Cyclic GFR-binding peptide
  MOD_RES (30)..(31): Xaa is C or S
RVIMSMEGIVKPKRGVMIQITINSLAQPVXXPAASA

SEQ ID NO: 62876 - protein, 33 aa, Artificial Sequence
  Cyclic GFR-binding peptide
  MOD_RES (29)..(30): Xaa is C or S
VMNVTAKKIVNSSDDIKRVQVPRLQTPAXXPKP

SEQ ID NO: 62877 - protein, 33 aa, Artificial Sequence
  Cyclic GFR-binding peptide
  MOD_RES (1)..(33): Xaa is C or S
XARVVMNVTAKKIVNSSDDIKRVQVPRLQTPAX

SEQ ID NO: 62878 - protein, 38 aa, Artificial Sequence; identical to SEQ ID NO: 12915
  Cyclic GFR-binding peptide
  MOD_RES (2)..(4)..(36)..(37): Xaa is C or S

SEQ ID NO: 62879 - protein, 33 aa, Artificial Sequence; identical to SEQ ID NO: 12916
  Cyclic GFR-binding peptide
  MOD_RES (31)..(31): Xaa is C or S

SEQ ID NO: 62880 - protein, 34 aa, Artificial Sequence; identical to SEQ ID NO: 22532
  Cyclic GFR-binding peptide
  MOD_RES (32)..(32): Xaa is C or S

SEQ ID NO: 62881 - protein, 36 aa, Artificial Sequence
  Cyclic GFR-binding peptide
  MOD_RES (2)..(34)..(35): Xaa is C or S
GXARVVMNVQVEKIVNSSDDVKAVKVSRLQTPAXXP

SEQ ID NO: 62882 - protein, 34 aa, Artificial Sequence; identical to SEQ ID NO: 47506
  Cyclic GFR-binding peptide
  MOD_RES (2)..(33)..(34): Xaa is C or S

SEQ ID NO: 62883 - protein, 28 aa, Artificial Sequence
  Cyclic GFR-binding peptide
TSMEGIFIPKKRVIEMIQVTINSLQVQT

SEQ ID NO: 62884 - protein, 29 aa, Artificial Sequence
  Cyclic GFR-binding peptide
  MOD_RES (1)..(1): Xaa is C or S
XARVVMNNSLQEIVNSSDDYYLVTLPELQ

SEQ ID NO: 62885 - protein, 22 aa, Artificial Sequence
  Cyclic GFR-binding peptide
VQVEKVKPTRGVVKAIKVSRLD

SEQ ID NO: 62886 - protein, 26 aa, Artificial Sequence
  Cyclic GFR-binding peptide
TSMEGIFIPKKRVIEMIQVTINSLQV

SEQ ID NO: 62887 - protein, 33 aa, Artificial Sequence
  Cyclic GFR-binding peptide
  MOD_RES (29)..(30): Xaa is C or S
VMNVQVEKIVNSSDDVKAVKVSRLQTPAXXPKP

SEQ ID NO: 62888 - protein, 30 aa, Artificial Sequence; identical to SEQ ID NO: 22543
  Cyclic GFR-binding peptide

SEQ ID NO: 62889 - protein, 29 aa, Artificial Sequence
  Cyclic GFR-binding peptide
  MOD_RES (26)..(27): Xaa is C or S
VTAKKIVNSSDDIKRVQVPRLKTPAXXPK

SEQ ID NO: 62890 - protein, 40 aa, Artificial Sequence; identical to SEQ ID NO: 22545
  Cyclic GFR-binding peptide
  MOD_RES (2)..(4): Xaa is C or S

SEQ ID NO: 62891 - protein, 33 aa, Artificial Sequence
  Cyclic GFR-binding peptide
  MOD_RES (32)..(32): Xaa is C or S
LRNSLQELKPKKRVYEYYLVTLPEHHVRSPQXK

SEQ ID NO: 62892 - protein, 34 aa, Artificial Sequence
  Cyclic GFR-binding peptide
  MOD_RES (28)..(29): Xaa is C or S
MEVTAKKVVKDYEDIKRMQVPRLETPVXXAKPIS

SEQ ID NO: 62893 - protein, 37 aa, Artificial Sequence
  Cyclic GFR-binding peptide
  MOD_RES (2)..(34)..(35): Xaa is C or S
GXSRVVMNVTAKKIVNSSDDIKRVQVPRLKTPAXXPK

SEQ ID NO: 62894 - protein, 31 aa, Artificial Sequence; identical to SEQ ID NO: 12936
  Cyclic GFR-binding peptide
  MOD_RES (29)..(30): Xaa is C or S

SEQ ID NO: 62895 - protein, 39 aa, Artificial Sequence; identical to SEQ ID NO: 12937
  Cyclic GFR-binding peptide
  MOD_RES (2)..(4)..(35)..(36): Xaa is C or S

SEQ ID NO: 62896 - protein, 34 aa, Artificial Sequence; identical to SEQ ID NO: 12938
  Cyclic GFR-binding peptide
  MOD_RES (31)..(32): Xaa is C or S

SEQ ID NO: 62897 - protein, 31 aa, Artificial Sequence
  Cyclic GFR-binding peptide
  MOD_RES (1)..(3): Xaa is C or S
XKXSKVVMSMEGIVKPTRGVMIQITINSLDQ

SEQ ID NO: 62898 - protein, 27 aa, Artificial Sequence
  Cyclic GFR-binding peptide
  MOD_RES (26)..(27): Xaa is C or S
VTAKKVVKDYEDIKRMQVPRLETPVXX

SEQ ID NO: 62899 - protein, 29 aa, Artificial Sequence
  Cyclic GFR-binding peptide
  MOD_RES (1)..(3): Xaa is C or S
XGXSRVVMNNSLQEIVNSSDDYYLVTLPE

SEQ ID NO: 62900 - protein, 34 aa, Artificial Sequence; identical to SEQ ID NO: 12942
  Cyclic GFR-binding peptide
  MOD_RES (31)..(32): Xaa is C or S

SEQ ID NO: 62901 - protein, 34 aa, Artificial Sequence; identical to SEQ ID NO: 22559
  Cyclic GFR-binding peptide
  MOD_RES (1)..(1): Xaa is C or S

SEQ ID NO: 62902 - protein, 33 aa, Artificial Sequence; identical to SEQ ID NO: 12943
  Cyclic GFR-binding peptide
  MOD_RES (30)..(31): Xaa is C or S

SEQ ID NO: 62903 - protein, 31 aa, Artificial Sequence
  Cyclic GFR-binding peptide
  MOD_RES (26)..(27): Xaa is C or S
SMEGIVVKDYEDMIQMTINSLETPVXXAKPI

SEQ ID NO: 62904 - protein, 41 aa, Artificial Sequence
  Cyclic GFR-binding peptide
  MOD_RES (2)..(4)..(36)..(37): Xaa is C or S
HXGXSRVVMNVQVEKIVNSSDDVKAVKVSRLKTPAXXPKPV

SEQ ID NO: 62905 - protein, 29 aa, Artificial Sequence
  Cyclic GFR-binding peptide
  MOD_RES (2)..(2): Xaa is C or S
KXSKVIMVQVEKIKPTKGIVKAIKVSRLD

SEQ ID NO: 62906 - protein, 27 aa, Artificial Sequence
  Cyclic GFR-binding peptide
  MOD_RES (27)..(27): Xaa is C or S
MVTAKKIKPTKGIIKRIQVPRLDQSVX

SEQ ID NO: 62907 - protein, 34 aa, Artificial Sequence
  Cyclic GFR-binding peptide
  MOD_RES (30)..(31): Xaa is C or S
VVMESMEGIVVKDYEDMIQMTINSLETPVXXAKP

SEQ ID NO: 62908 - protein, 34 aa, Artificial Sequence
  Cyclic GFR-binding peptide
  MOD_RES (33)..(33): Xaa is C or S
ELTNSLQEFIPKKRVIEYYVVPLPELQVQTPRXQ

SEQ ID NO: 62909 - protein, 36 aa, Artificial Sequence; identical to SEQ ID NO: 12955
  Cyclic GFR-binding peptide
  MOD_RES (1)..(33)..(34): Xaa is C or S

SEQ ID NO: 62910 - protein, 36 aa, Artificial Sequence; identical to SEQ ID NO: 12965
  Cyclic GFR-binding peptide
  MOD_RES (2)..(34)..(35): Xaa is C or S

SEQ ID NO: 62911 - protein, 32 aa, Artificial Sequence; identical to SEQ ID NO: 22576
  Cyclic GFR-binding peptide

SEQ ID NO: 62912 - protein, 30 aa, Artificial Sequence; identical to SEQ ID NO: 22580
  Cyclic GFR-binding peptide
  MOD_RES (30)..(30): Xaa is C or S

SEQ ID NO: 62913 - protein, 25 aa, Artificial Sequence
  Cyclic GFR-binding peptide
ELRNSLQELKPKKRVYEYYLVTLPE

SEQ ID NO: 62914 - protein, 33 aa, Artificial Sequence; identical to SEQ ID NO: 12970
  Cyclic GFR-binding peptide
  MOD_RES (2)..(2): Xaa is C or S

SEQ ID NO: 62915 - protein, 23 aa, Artificial Sequence
  Cyclic GFR-binding peptide
VMENSLQEVVKDYEDYYLMTLPE

SEQ ID NO: 62916 - protein, 40 aa, Artificial Sequence; identical to SEQ ID NO: 12979
  Cyclic GFR-binding peptide
  MOD_RES (2)..(34)..(35): Xaa is C or S

SEQ ID NO: 62917 - protein, 30 aa, Artificial Sequence; identical to SEQ ID NO: 12983
  Cyclic GFR-binding peptide
  MOD_RES (29)..(30): Xaa is C or S

SEQ ID NO: 62918 - protein, 32 aa, Artificial Sequence
  Cyclic GFR-binding peptide
  MOD_RES (30)..(31): Xaa is C or S
VVMDVTAKKVVKENEDIKRMQVPRLETPVXXA

SEQ ID NO: 62919 - protein, 31 aa, Artificial Sequence
  Cyclic GFR-binding peptide
  MOD_RES (26)..(27): Xaa is C or S
SMEGIIKPTKGIMIQITINSLDQSVXXPSAS

SEQ ID NO: 62920 - protein, 34 aa, Artificial Sequence; identical to SEQ ID NO: 22590
  Cyclic GFR-binding peptide
  MOD_RES (1)..(3): Xaa is C or S

SEQ ID NO: 62921 - protein, 32 aa, Artificial Sequence
  Cyclic GFR-binding peptide
  MOD_RES (1)..(1): Xaa is C or S
XARVVMNSMEGIIVNSSDDMIQVTINSLQTPA

SEQ ID NO: 62922 - protein, 25 aa, Artificial Sequence
  Cyclic GFR-binding peptide
NSLQEVKPTRGVYYLITLPELDQPV

SEQ ID NO: 62923 - protein, 32 aa, Artificial Sequence; identical to SEQ ID NO: 12985
  Cyclic GFR-binding peptide
  MOD_RES (31)..(31): Xaa is C or S

SEQ ID NO: 62924 - protein, 27 aa, Artificial Sequence
  Cyclic GFR-binding peptide
VMEVQVEKVVKDYEDVKAMKVSRLETP

SEQ ID NO: 62925 - protein, 31 aa, Artificial Sequence
  Cyclic GFR-binding peptide
  MOD_RES (2)..(2): Xaa is C or S
GXSRVVMNSMEGIIVNSSDDMIQVTINSLKT

SEQ ID NO: 62926 - protein, 31 aa, Artificial Sequence
  Cyclic GFR-binding peptide
  MOD_RES (2)..(2): Xaa is C or S
KXSKVIMSMEGIIKPTKGIMIQITINSLDQS

SEQ ID NO: 62927 - protein, 34 aa, Artificial Sequence
  Cyclic GFR-binding peptide
ALHDELTNSLQEFIPKKRVIEYYLVTLPELQVQT

SEQ ID NO: 62928 - protein, 24 aa, Artificial Sequence
  Cyclic GFR-binding peptide
VVMEVTAKKVVKDYEDIKRMQVPR

SEQ ID NO: 62929 - protein, 30 aa, Artificial Sequence
  Cyclic GFR-binding peptide
  MOD_RES (1)..(3): Xaa is C or S
XGXGEVVMEVQVEKVVKDYEDVKAMKVSRL

SEQ ID NO: 62930 - protein, 32 aa, Artificial Sequence
  Cyclic GFR-binding peptide
  MOD_RES (2)..(4): Xaa is C or S
RXGXGEVVMEVTAKKVVKDYEDIKRMQVPRLE

SEQ ID NO: 62931 - protein, 29 aa, Artificial Sequence
  Cyclic GFR-binding peptide
EVVMENSLQEVVKDYEDYYVMPLPELETP

SEQ ID NO: 62932 - protein, 32 aa, Artificial Sequence
  Cyclic GFR-binding peptide
  MOD_RES (29)..(30): Xaa is C or S
VMNSMEGIIVNSSDDMIQVTINSLKTPAXXPK

SEQ ID NO: 62933 - protein, 37 aa, Artificial Sequence; identical to SEQ ID NO: 47581
  Cyclic GFR-binding peptide
  MOD_RES (2)..(33)..(34): Xaa is C or S

SEQ ID NO: 62934 - protein, 29 aa, Artificial Sequence
  Cyclic GFR-binding peptide
  MOD_RES (2)..(2): Xaa is C or S
GXSRVVMNVTAKKIVNSSDDIKRVQVPRL

SEQ ID NO: 62935 - protein, 29 aa, Artificial Sequence
  Cyclic GFR-binding peptide
VVMESMEGIVVKDYEDMIQMTINSLETPV

SEQ ID NO: 62936 - protein, 30 aa, Artificial Sequence; identical to SEQ ID NO: 22609
  Cyclic GFR-binding peptide
  MOD_RES (28)..(28): Xaa is C or S

SEQ ID NO: 62937 - protein, 30 aa, Artificial Sequence
  Cyclic GFR-binding peptide
  MOD_RES (2)..(2): Xaa is C or S
GXSRVVMNVQVEKIVNSSDDVKAVKVSRLK

SEQ ID NO: 62938 - protein, 39 aa, Artificial Sequence; identical to SEQ ID NO: 13013
  Cyclic GFR-binding peptide
  MOD_RES (2)..(4)..(36)..(37): Xaa is C or S

SEQ ID NO: 62939 - protein, 32 aa, Artificial Sequence
  Cyclic GFR-binding peptide
  MOD_RES (1)..(3): Xaa is C or S
XKXSKVIMVTAKKIKPTKGIIKRIQVPRLDQS

SEQ ID NO: 62940 - protein, 33 aa, Artificial Sequence
  Cyclic GFR-binding peptide
  MOD_RES (32)..(33): Xaa is C or S
SRVVMNSMEGIIVNSSDDMIQVTINSLKTPAXX

SEQ ID NO: 62941 - protein, 33 aa, Artificial Sequence; identical to SEQ ID NO: 22612
  Cyclic GFR-binding peptide
  MOD_RES (2)..(4): Xaa is C or S

SEQ ID NO: 62942 - protein, 28 aa, Artificial Sequence
  Cyclic GFR-binding peptide
  MOD_RES (1)..(1): Xaa is C or S
XGEVVMENSLQEVVKDYEDYYLMTLPEL

SEQ ID NO: 62943 - protein, 20 aa, Artificial Sequence
  Cyclic GFR-binding peptide
NSLQEIKPTKGIYYVIPLPE

SEQ ID NO: 62944 - protein, 41 aa, Artificial Sequence; identical to SEQ ID NO: 22615
  Cyclic GFR-binding peptide
  MOD_RES (1)..(38): Xaa is C or S

SEQ ID NO: 62945 - protein, 33 aa, Artificial Sequence
  Cyclic GFR-binding peptide
  MOD_RES (33)..(33): Xaa is C or S
NHQLFNSLQEHQGQHPKIRYYLMTLPEEETPVX

SEQ ID NO: 62946 - protein, 31 aa, Artificial Sequence
  Cyclic GFR-binding peptide
  MOD_RES (30)..(30): Xaa is C or S
LFNSLQEHQGQHPKIRYYVMPLPEEETPVXE

SEQ ID NO: 62947 - protein, 21 aa, Artificial Sequence
  Cyclic GFR-binding peptide
VQVEKIVNSSDDVKAVKVSRL

SEQ ID NO: 62948 - protein, 34 aa, Artificial Sequence
  Cyclic GFR-binding peptide
  MOD_RES (31)..(32): Xaa is C or S
RVVMNSMEGIIVNSSDDMIQVTINSLQTPAXXPK

SEQ ID NO: 62949 - protein, 36 aa, Artificial Sequence
  Cyclic GFR-binding peptide
  MOD_RES (1)..(32)..(33): Xaa is C or S
XSKVVMVQVEKVKPTRGVVKAIKVSRLDQPVXXPSA

SEQ ID NO: 62950 - protein, 40 aa, Artificial Sequence
  Cyclic GFR-binding peptide
  MOD_RES (36)..(36): Xaa is C or S
LHEELRNSLQELKPKKRVYEYYLVTLPEHHVRSPQXKVSS

SEQ ID NO: 62951 - protein, 23 aa, Artificial Sequence
  Cyclic GFR-binding peptide
VIMNSLQEIKPTKGIYYVIPLPE

SEQ ID NO: 62952 - protein, 30 aa, Artificial Sequence
  Cyclic GFR-binding peptide
  MOD_RES (1)..(1): Xaa is C or S
XSRVVMNSMEGIIVNSSDDMIQVTINSLKT

SEQ ID NO: 62953 - protein, 32 aa, Artificial Sequence; identical to SEQ ID NO: 13034
  Cyclic GFR-binding peptide
  MOD_RES (1)..(3): Xaa is C or S

SEQ ID NO: 62954 - protein, 38 aa, Artificial Sequence
  Cyclic GFR-binding peptide
  MOD_RES (32)..(33): Xaa is C or S
SRVVMNVQVEKIVNSSDDVKAVKVSRLKTPAXXPKPVY

SEQ ID NO: 62955 - protein, 27 aa, Artificial Sequence
  Cyclic GFR-binding peptide
  MOD_RES (27)..(27): Xaa is C or S
MVQVEKIKPTKGIVKAIKVSRLDQSVX

SEQ ID NO: 62956 - protein, 30 aa, Artificial Sequence
  Cyclic GFR-binding peptide
  MOD_RES (29)..(30): Xaa is C or S
VIMSMEGIIKPTKGIMIQITINSLDQSVXX

SEQ ID NO: 62957 - protein, 33 aa, Artificial Sequence
  Cyclic GFR-binding peptide
  MOD_RES (27)..(28): Xaa is C or S
MVTAKKVKPTRGVIKRIQVPRLDQPVXXPSASA

SEQ ID NO: 62958 - protein, 34 aa, Artificial Sequence
  Cyclic GFR-binding peptide
  MOD_RES (29)..(29): Xaa is C or S
VMNVQVEKIVNSSDDVKAVKVSRLKTPAXTPKTV

SEQ ID NO: 62959 - protein, 34 aa, Artificial Sequence
  Cyclic GFR-binding peptide
  MOD_RES (1)..(33)..(34): Xaa is C or S
XARVVMNVTAKKIVNSSDDIKRVQVPRLQTPAXX

SEQ ID NO: 62960 - protein, 36 aa, Artificial Sequence; identical to SEQ ID NO: 13052
  Cyclic GFR-binding peptide
  MOD_RES (2)..(4)..(36): Xaa is C or S

SEQ ID NO: 62961 - protein, 35 aa, Artificial Sequence
  Cyclic GFR-binding peptide
  MOD_RES (2)..(4): Xaa is C or S
EXKXALHDELTNSLQEFIPKKRVIEYYLVTLPELQ

SEQ ID NO: 62962 - protein, 27 aa, Artificial Sequence
  Cyclic GFR-binding peptide
MNVQVEKIVNSSDDVKAVKVSRLKTPA

SEQ ID NO: 62963 - protein, 36 aa, Artificial Sequence
  Cyclic GFR-binding peptide
  MOD_RES (30)..(31): Xaa is C or S
VVMNSMEGIIVNSSDDMIQVTINSLQTPAXXPKPVT

SEQ ID NO: 62964 - protein, 36 aa, Artificial Sequence; identical to SEQ ID NO: 22637
  Cyclic GFR-binding peptide

SEQ ID NO: 62965 - protein, 33 aa, Artificial Sequence
  Cyclic GFR-binding peptide
  MOD_RES (1)..(3): Xaa is C or S
XKXSRVIMSMEGIVKPKRGVMIQITINSLAQPV

SEQ ID NO: 62966 - protein, 36 aa, Artificial Sequence; identical to SEQ ID NO: 22638
  Cyclic GFR-binding peptide
  MOD_RES (1)..(1): Xaa is C or S

SEQ ID NO: 62967 - protein, 30 aa, Artificial Sequence; identical to SEQ ID NO: 47621
  Cyclic GFR-binding peptide
  MOD_RES (29)..(30): Xaa is C or S

SEQ ID NO: 62968 - protein, 32 aa, Artificial Sequence; identical to SEQ ID NO: 13059
  Cyclic GFR-binding peptide
  MOD_RES (30)..(31): Xaa is C or S

SEQ ID NO: 62969 - protein, 31 aa, Artificial Sequence
  Cyclic GFR-binding peptide
  MOD_RES (28)..(29): Xaa is C or S
VMVQVEKVKPTRGVVKAIKVSRLDQPVXXPS

SEQ ID NO: 62970 - protein, 32 aa, Artificial Sequence; identical to SEQ ID NO: 13062
  Cyclic GFR-binding peptide
  MOD_RES (1)..(1): Xaa is C or S

SEQ ID NO: 62971 - protein, 34 aa, Artificial Sequence; identical to SEQ ID NO: 13070
  Cyclic GFR-binding peptide
  MOD_RES (30)..(31): Xaa is C or S

SEQ ID NO: 62972 - protein, 38 aa, Artificial Sequence
  Cyclic GFR-binding peptide
  MOD_RES (32)..(32): Xaa is C or S
SRVVMNVQVEKIVNSSDDVKAVKVSRLKTPAXTPKTVH

SEQ ID NO: 62973 - protein, 31 aa, Artificial Sequence; identical to SEQ ID NO: 13078
  Cyclic GFR-binding peptide
  MOD_RES (31)..(31): Xaa is C or S

SEQ ID NO: 62974 - protein, 34 aa, Artificial Sequence; identical to SEQ ID NO: 22646
  Cyclic GFR-binding peptide
  MOD_RES (34)..(34): Xaa is C or S

SEQ ID NO: 62975 - protein, 28 aa, Artificial Sequence
  Cyclic GFR-binding peptide
ARVVMNNSLQEIVNSSDDYYLVTLPELQ

SEQ ID NO: 62976 - protein, 44 aa, Artificial Sequence; identical to SEQ ID NO: 22648
  Cyclic GFR-binding peptide
  MOD_RES (2)..(4)..(41): Xaa is C or S

SEQ ID NO: 62977 - protein, 32 aa, Artificial Sequence
  Cyclic GFR-binding peptide
  MOD_RES (2)..(4): Xaa is C or S
SXKXSKVVMVTAKKVKPTRGVIKRIQVPRLDQ

SEQ ID NO: 62978 - protein, 36 aa, Artificial Sequence
  Cyclic GFR-binding peptide
  MOD_RES (1)..(3): Xaa is C or S
XEXKNHQLFNSLQEHQGQHPKIRYYLMTLPEEETPV

SEQ ID NO: 62979 - protein, 33 aa, Artificial Sequence
  Cyclic GFR-binding peptide
ALHDELTNSLQEFIPKKRVIEYYLVTLPELQVQ

SEQ ID NO: 62980 - protein, 41 aa, Artificial Sequence; identical to SEQ ID NO: 13086
  Cyclic GFR-binding peptide
  MOD_RES (1)..(3)..(35)..(36): Xaa is C or S

SEQ ID NO: 62981 - protein, 31 aa, Artificial Sequence
  Cyclic GFR-binding peptide
  MOD_RES (26)..(27): Xaa is C or S
SMEGIIVNSSDDMIQVTINSLQTPAXXPKPV

SEQ ID NO: 62982 - protein, 34 aa, Artificial Sequence
  Cyclic GFR-binding peptide
  MOD_RES (33)..(33): Xaa is C or S
ELRNSLQELKPKKRVYEYYLVTLPEHHVRSPQXK

SEQ ID NO: 62983 - protein, 40 aa, Artificial Sequence; identical to SEQ ID NO: 22656
  Cyclic GFR-binding peptide
  MOD_RES (37)..(37): Xaa is C or S

SEQ ID NO: 62984 - protein, 32 aa, Artificial Sequence
  Cyclic GFR-binding peptide
  MOD_RES (1)..(32): Xaa is C or S
XSKVIMVTAKKIKPTKGIIKRIQVPRLDQSVX

SEQ ID NO: 62985 - protein, 34 aa, Artificial Sequence
  Cyclic GFR-binding peptide
  MOD_RES (1)..(33): Xaa is C or S
XSRVVMNSMEGIIVNSSDDMIQVTINSLKTPAXT

SEQ ID NO: 62986 - protein, 34 aa, Artificial Sequence
  Cyclic GFR-binding peptide
  MOD_RES (29)..(30): Xaa is C or S
VIMVTAKKIKPTKGIIKRIQVPRLDQSVXXPSAS

SEQ ID NO: 62987 - protein, 36 aa, Artificial Sequence; identical to SEQ ID NO: 13097
  Cyclic GFR-binding peptide
  MOD_RES (2)..(34): Xaa is C or S

SEQ ID NO: 62988 - protein, 29 aa, Artificial Sequence
  Cyclic GFR-binding peptide
  MOD_RES (27)..(28): Xaa is C or S
NNSLQEIVNSSDDYYLVTLPELKTPAXXP

SEQ ID NO: 62989 - protein, 32 aa, Artificial Sequence; identical to SEQ ID NO: 13103
  Cyclic GFR-binding peptide
  MOD_RES (2)..(4): Xaa is C or S

SEQ ID NO: 62990 - protein, 28 aa, Artificial Sequence
  Cyclic GFR-binding peptide
LRNSLQELKPKKRVYEYYLVTLPEHHVR

SEQ ID NO: 62991 - protein, 23 aa, Artificial Sequence
  Cyclic GFR-binding peptide
VQVEKIVNSSDDVKAVKVSRLKT

SEQ ID NO: 62992 - protein, 24 aa, Artificial Sequence
  Cyclic GFR-binding peptide
VMEVTAKKVVKDYEDIKRMQVPRL

SEQ ID NO: 62993 - protein, 32 aa, Artificial Sequence; identical to SEQ ID NO: 13105
  Cyclic GFR-binding peptide
  MOD_RES (1)..(3): Xaa is C or S

SEQ ID NO: 62994 - protein, 35 aa, Artificial Sequence; identical to SEQ ID NO: 13106
  Cyclic GFR-binding peptide
  MOD_RES (1)..(3)..(35): Xaa is C or S

SEQ ID NO: 62995 - protein, 30 aa, Artificial Sequence; identical to SEQ ID NO: 22664
  Cyclic GFR-binding peptide

SEQ ID NO: 62996 - protein, 36 aa, Artificial Sequence; identical to SEQ ID NO: 13110
  Cyclic GFR-binding peptide
  MOD_RES (2)..(34)..(35): Xaa is C or S

SEQ ID NO: 62997 - protein, 26 aa, Artificial Sequence
  Cyclic GFR-binding peptide
  MOD_RES (1)..(1): Xaa is C or S
XSRVIMNSLQEVKPKRGVYYLITLPE

SEQ ID NO: 62998 - protein, 26 aa, Artificial Sequence
  Cyclic GFR-binding peptide
VVMNSMEGIIVNSSDDMIQVTINSLK

SEQ ID NO: 62999 - protein, 27 aa, Artificial Sequence
  Cyclic GFR-binding peptide
VVMDNSLQEVVKENEDYYVMPLPELET

SEQ ID NO: 63000 - protein, 30 aa, Artificial Sequence; identical to SEQ ID NO: 13113
  Cyclic GFR-binding peptide
  MOD_RES (2)..(4): Xaa is C or S

SEQ ID NO: 63001 - protein, 40 aa, Artificial Sequence; identical to SEQ ID NO: 13116
  Cyclic GFR-binding peptide
  MOD_RES (2)..(34)..(35): Xaa is C or S

SEQ ID NO: 63002 - protein, 29 aa, Artificial Sequence
  Cyclic GFR-binding peptide
  MOD_RES (28)..(29): Xaa is C or S
MNVTAKKIVNSSDDIKRVQVPRLQTPAXX

SEQ ID NO: 63003 - protein, 40 aa, Artificial Sequence
  Cyclic GFR-binding peptide
  MOD_RES (2)..(34)..(35): Xaa is C or S
GXGEVVMEVQVEKVVKDYEDVKAMKVSRLETPVXXAKPIS

SEQ ID NO: 63004 - protein, 31 aa, Artificial Sequence
  Cyclic GFR-binding peptide
  MOD_RES (31)..(31): Xaa is C or S
EVVMDSMEGIVVKENEDMIQMTINSLETPVX

SEQ ID NO: 63005 - protein, 32 aa, Artificial Sequence; identical to SEQ ID NO: 13119
  Cyclic GFR-binding peptide
  MOD_RES (2)..(2): Xaa is C or S

SEQ ID NO: 63006 - protein, 28 aa, Artificial Sequence
  Cyclic GFR-binding peptide
VMESMEGIVVKDYEDMIQMTINSLETPV

SEQ ID NO: 63007 - protein, 33 aa, Artificial Sequence; identical to SEQ ID NO: 22667
  Cyclic GFR-binding peptide
  MOD_RES (31)..(31): Xaa is C or S

SEQ ID NO: 63008 - protein, 28 aa, Artificial Sequence
  Cyclic GFR-binding peptide
  MOD_RES (2)..(2): Xaa is C or S
KXSKVVMVTAKKVKPTRGVIKRIQVPRL

SEQ ID NO: 63009 - protein, 34 aa, Artificial Sequence; identical to SEQ ID NO: 22668
  Cyclic GFR-binding peptide
  MOD_RES (31)..(31): Xaa is C or S

SEQ ID NO: 63010 - protein, 37 aa, Artificial Sequence; identical to SEQ ID NO: 13123
  Cyclic GFR-binding peptide
  MOD_RES (31)..(31): Xaa is C or S

SEQ ID NO: 63011 - protein, 33 aa, Artificial Sequence
  Cyclic GFR-binding peptide
  MOD_RES (1)..(3): Xaa is C or S
XGXGEVVMDVTAKKVVKENEDIKRMQVPRLETP

SEQ ID NO: 63012 - protein, 33 aa, Artificial Sequence
  Cyclic GFR-binding peptide
  MOD_RES (29)..(30): Xaa is C or S
VMNSMEGIIVNSSDDMIQVTINSLQTPAXXPKP

SEQ ID NO: 63013 - protein, 36 aa, Artificial Sequence
  Cyclic GFR-binding peptide
  MOD_RES (30)..(31): Xaa is C or S
VVMNSMEGIIVNSSDDMIQVTINSLKTPAXXPKPVY

SEQ ID NO: 63014 - protein, 37 aa, Artificial Sequence; identical to SEQ ID NO: 22672
  Cyclic GFR-binding peptide
  MOD_RES (1)..(3): Xaa is C or S

SEQ ID NO: 63015 - protein, 27 aa, Artificial Sequence
  Cyclic GFR-binding peptide
VVMNNSLQEIVNSSDDYYLVTLPELKT

SEQ ID NO: 63016 - protein, 27 aa, Artificial Sequence
  Cyclic GFR-binding peptide
  MOD_RES (1)..(1): Xaa is C or S
XGEVVMEVTAKKVVKDYEDIKRMQVPR

SEQ ID NO: 63017 - protein, 28 aa, Artificial Sequence
  Cyclic GFR-binding peptide
VVMDVTAKKVVKENEDIKRMQVPRLETP

SEQ ID NO: 63018 - protein, 37 aa, Artificial Sequence
  Cyclic GFR-binding peptide
  MOD_RES (2)..(4)..(36)..(37): Xaa is C or S
HXGXARVVMNSMEGIIVNSSDDMIQVTINSLQTPAXX

SEQ ID NO: 63019 - protein, 30 aa, Artificial Sequence
  Cyclic GFR-binding peptide
  MOD_RES (1)..(1): Xaa is C or S
XELHEELRNSLQELKPKKRVYEYYVVPLPE

SEQ ID NO: 63020 - protein, 31 aa, Artificial Sequence; identical to SEQ ID NO: 13140
  Cyclic GFR-binding peptide
  MOD_RES (31)..(31): Xaa is C or S

SEQ ID NO: 63021 - protein, 27 aa, Artificial Sequence
  Cyclic GFR-binding peptide
ELRVTAKKLKPKKRVYEIKRVQVPRHH

SEQ ID NO: 63022 - protein, 27 aa, Artificial Sequence
  Cyclic GFR-binding peptide
  MOD_RES (26)..(27): Xaa is C or S
SMEGIIVNSSDDMIQVTINSLQTPAXX

SEQ ID NO: 63023 - protein, 28 aa, Artificial Sequence
  Cyclic GFR-binding peptide
  MOD_RES (2)..(2): Xaa is C or S
GXARVVMNVTAKKIVNSSDDIKRVQVPR

SEQ ID NO: 63024 - protein, 41 aa, Artificial Sequence
  Cyclic GFR-binding peptide
  MOD_RES (2)..(4)..(36)..(37): Xaa is C or S
RXGXGEVVMEVTAKKVVKDYEDIKRMQVPRLETPVXXAKPI

SEQ ID NO: 63025 - protein, 24 aa, Artificial Sequence
  Cyclic GFR-binding peptide
SMEGIVVKENEDMIQMTINSLETP

SEQ ID NO: 63026 - protein, 34 aa, Artificial Sequence
  Cyclic GFR-binding peptide
  MOD_RES (1)..(33): Xaa is C or S
XSRVVMNVQVEKIVNSSDDVKAVKVSRLKTPAXT

SEQ ID NO: 63027 - protein, 40 aa, Artificial Sequence; identical to SEQ ID NO: 13156
  Cyclic GFR-binding peptide
  MOD_RES (2)..(34): Xaa is C or S

SEQ ID NO: 63028 - protein, 25 aa, Artificial Sequence
  Cyclic GFR-binding peptide
VQVEKIKPTKGIVKAIKVSRLDQSV

SEQ ID NO: 63029 - protein, 33 aa, Artificial Sequence
  Cyclic GFR-binding peptide
  MOD_RES (32)..(32): Xaa is C or S
LTNSLQEFIPKKRVIEYYVVPLPELQVQTPRXQ

SEQ ID NO: 63030 - protein, 25 aa, Artificial Sequence
  Cyclic GFR-binding peptide
VIMSMEGIIKPTKGIMIQITINSLD

SEQ ID NO: 63031 - protein, 21 aa, Artificial Sequence
  Cyclic GFR-binding peptide
VTAKKIKPTKGIIKRIQVPRL

SEQ ID NO: 63032 - protein, 39 aa, Artificial Sequence
  Cyclic GFR-binding peptide
  MOD_RES (35)..(35): Xaa is C or S
HEELRNSLQELKPKKRVYEYYLVTLPEHHVRSPQXKVSS

SEQ ID NO: 63033 - protein, 31 aa, Artificial Sequence
  Cyclic GFR-binding peptide
  MOD_RES (29)..(30): Xaa is C or S
VVMSMEGIVKPTRGVMIQITINSLDQPVXXP

SEQ ID NO: 63034 - protein, 31 aa, Artificial Sequence; identical to SEQ ID NO: 13169
  Cyclic GFR-binding peptide
  MOD_RES (2)..(2): Xaa is C or S

SEQ ID NO: 63035 - protein, 27 aa, Artificial Sequence
  Cyclic GFR-binding peptide
VMESMEGIVVKDYEDMIQMTINSLETP

SEQ ID NO: 63036 - protein, 37 aa, Artificial Sequence; identical to SEQ ID NO: 13171
  Cyclic GFR-binding peptide
  MOD_RES (2)..(4)..(36)..(37): Xaa is C or S

SEQ ID NO: 63037 - protein, 27 aa, Artificial Sequence
  Cyclic GFR-binding peptide
  MOD_RES (27)..(27): Xaa is C or S
NSMEGIIVNSSDDMIQVTINSLQTPAX

SEQ ID NO: 63038 - protein, 29 aa, Artificial Sequence
  Cyclic GFR-binding peptide
  MOD_RES (1)..(1): Xaa is C or S
XARVVMNVTAKKIVNSSDDIKRVQVPRLQ

SEQ ID NO: 63039 - protein, 33 aa, Artificial Sequence
  Cyclic GFR-binding peptide
  MOD_RES (2)..(2): Xaa is C or S
EXKNHQLFNSLQEHQGQHPKIRYYVMPLPEEET

SEQ ID NO: 63040 - protein, 26 aa, Artificial Sequence
  Cyclic GFR-binding peptide
SKVVMVTAKKVKPTRGVIKRIQVPRL

SEQ ID NO: 63041 - protein, 31 aa, Artificial Sequence
  Cyclic GFR-binding peptide
  MOD_RES (30)..(31): Xaa is C or S
VVMNVQVEKIVNSSDDVKAVKVSRLKTPAXX

SEQ ID NO: 63042 - protein, 39 aa, Artificial Sequence; identical to SEQ ID NO: 13183
  Cyclic GFR-binding peptide
  MOD_RES (2)..(4)..(36)..(37): Xaa is C or S

SEQ ID NO: 63043 - protein, 34 aa, Artificial Sequence
  Cyclic GFR-binding peptide
  MOD_RES (2)..(33)..(34): Xaa is C or S
KXSRVIMSMEGIVKPKRGVMIQITINSLAQPVXX

SEQ ID NO: 63044 - protein, 27 aa, Artificial Sequence
  Cyclic GFR-binding peptide
MNSMEGIIVNSSDDMIQVTINSLKTPA

SEQ ID NO: 63045 - protein, 29 aa, Artificial Sequence
  Cyclic GFR-binding peptide
  MOD_RES (2)..(2): Xaa is C or S
GXARVVMNSMEGIIVNSSDDMIQVTINSL

SEQ ID NO: 63046 - protein, 32 aa, Artificial Sequence
  Cyclic GFR-binding peptide
  MOD_RES (1)..(3): Xaa is C or S
XEXKNHQLFNSLQEHQGQHPKIRYYVMPLPEE

SEQ ID NO: 63047 - protein, 25 aa, Artificial Sequence
  Cyclic GFR-binding peptide
VIMSMEGIVKPKRGVMIQITINSLA

SEQ ID NO: 63048 - protein, 27 aa, Artificial Sequence
  Cyclic GFR-binding peptide
  MOD_RES (1)..(1): Xaa is C or S
XSRVVMNSMEGIIVNSSDDMIQVTINS

SEQ ID NO: 63049 - protein, 29 aa, Artificial Sequence
  Cyclic GFR-binding peptide
  MOD_RES (1)..(3): Xaa is C or S
XKXSRVIMVQVEKVKPKRGVVKAIKVSRL

SEQ ID NO: 63050 - protein, 37 aa, Artificial Sequence
  Cyclic GFR-binding peptide
  MOD_RES (31)..(32): Xaa is C or S
SKVIMVTAKKIKPTKGIIKRIQVPRLDQSVXXPSASA

SEQ ID NO: 63051 - protein, 27 aa, Artificial Sequence
  Cyclic GFR-binding peptide
LRVTAKKLKPKKRVYEIKRVQVPRHHV

SEQ ID NO: 63052 - protein, 28 aa, Artificial Sequence
  Cyclic GFR-binding peptide
DELTVQVEKFIPKKRVIEVKAVKVSRLQ

SEQ ID NO: 63053 - protein, 34 aa, Artificial Sequence; identical to SEQ ID NO: 13197
  Cyclic GFR-binding peptide
  MOD_RES (2)..(33)..(34): Xaa is C or S

SEQ ID NO: 63054 - protein, 34 aa, Artificial Sequence
  Cyclic GFR-binding peptide
  MOD_RES (30)..(30): Xaa is C or S
VVMNSMEGIIVNSSDDMIQVTINSLKTPAXTPKT

SEQ ID NO: 63055 - protein, 38 aa, Artificial Sequence; identical to SEQ ID NO: 13199
  Cyclic GFR-binding peptide
  MOD_RES (2)..(33)..(34): Xaa is C or S

SEQ ID NO: 63056 - protein, 40 aa, Artificial Sequence
  Cyclic GFR-binding peptide
  MOD_RES (2)..(4)..(36)..(37): Xaa is C or S
RXGXGEVVMEVQVEKVVKDYEDVKAMKVSRLETPVXXAKP

SEQ ID NO: 63057 - protein, 34 aa, Artificial Sequence
  Cyclic GFR-binding peptide
  MOD_RES (29)..(29): Xaa is C or S
VMNSMEGIIVNSSDDMIQVTINSLKTPAXTPKTV

SEQ ID NO: 63058 - protein, 37 aa, Artificial Sequence
  Cyclic GFR-binding peptide
  MOD_RES (1)..(3)..(35)..(36): Xaa is C or S
XGXGEVVMEVQVEKVVKDYEDVKAMKVSRLETPVXXA

SEQ ID NO: 63059 - protein, 32 aa, Artificial Sequence; identical to SEQ ID NO: 13203
  Cyclic GFR-binding peptide
  MOD_RES (2)..(4): Xaa is C or S

SEQ ID NO: 63060 - protein, 38 aa, Artificial Sequence; identical to SEQ ID NO: 22710
  Cyclic GFR-binding peptide
  MOD_RES (35)..(35): Xaa is C or S

SEQ ID NO: 63061 - protein, 25 aa, Artificial Sequence
  Cyclic GFR-binding peptide
VVMDVQVEKVVKENEDVKAMKVSRL

SEQ ID NO: 63062 - protein, 37 aa, Artificial Sequence; identical to SEQ ID NO: 13206
  Cyclic GFR-binding peptide
  MOD_RES (1)..(33)..(34): Xaa is C or S

SEQ ID NO: 63063 - protein, 23 aa, Artificial Sequence
  Cyclic GFR-binding peptide
NSLQEIVNSSDDYYVVPLPELKT

SEQ ID NO: 63064 - protein, 42 aa, Artificial Sequence; identical to SEQ ID NO: 13212
  Cyclic GFR-binding peptide
  MOD_RES (2)..(4)..(36): Xaa is C or S

SEQ ID NO: 63065 - protein, 34 aa, Artificial Sequence
  Cyclic GFR-binding peptide
  MOD_RES (30)..(30): Xaa is C or S
NSLQEFIPKKRVIEYYVVPLPELQVQTPRXQVNR

SEQ ID NO: 63066 - protein, 30 aa, Artificial Sequence; identical to SEQ ID NO: 22719
  Cyclic GFR-binding peptide

SEQ ID NO: 63067 - protein, 38 aa, Artificial Sequence
  Cyclic GFR-binding peptide
  MOD_RES (32)..(33): Xaa is C or S
ARVVMNVTAKKIVNSSDDIKRVQVPRLQTPAXXPKPVT

SEQ ID NO: 63068 - protein, 33 aa, Artificial Sequence
  Cyclic GFR-binding peptide
  MOD_RES (31)..(31): Xaa is C or S
RVVMNVQVEKIVNSSDDVKAVKVSRLKTPAXTP

SEQ ID NO: 63069 - protein, 33 aa, Artificial Sequence; identical to SEQ ID NO: 13216
  Cyclic GFR-binding peptide
  MOD_RES (32)..(33): Xaa is C or S

SEQ ID NO: 63070 - protein, 24 aa, Artificial Sequence
  Cyclic GFR-binding peptide
VVMNSMEGIIVNSSDDMIQVTINS

SEQ ID NO: 63071 - protein, 40 aa, Artificial Sequence; identical to SEQ ID NO: 13219
  Cyclic GFR-binding peptide
  MOD_RES (1)..(3)..(35)..(36): Xaa is C or S

SEQ ID NO: 63072 - protein, 31 aa, Artificial Sequence
  Cyclic GFR-binding peptide
  MOD_RES (27)..(28): Xaa is C or S
MVTAKKVKPKRGVIKRIQVPRLAQPVXXPAA

SEQ ID NO: 63073 - protein, 33 aa, Artificial Sequence
  Cyclic GFR-binding peptide
  MOD_RES (2)..(33): Xaa is C or S
KXSRVIMSMEGIVKPKRGVMIQITINSLAQPVX

SEQ ID NO: 63074 - protein, 40 aa, Artificial Sequence
  Cyclic GFR-binding peptide
  MOD_RES (2)..(4)..(36)..(37): Xaa is C or S
RXGXGEVVMDVTAKKVVKENEDIKRMQVPRLETPVXXAKP

SEQ ID NO: 63075 - protein, 25 aa, Artificial Sequence
  Cyclic GFR-binding peptide
VIMVTAKKIKPTKGIIKRIQVPRLD

SEQ ID NO: 63076 - protein, 39 aa, Artificial Sequence
  Cyclic GFR-binding peptide
  MOD_RES (2)..(4)..(35)..(36): Xaa is C or S
SXKXSRVIMVTAKKVKPKRGVIKRIQVPRLAQPVXXPAA

SEQ ID NO: 63077 - protein, 39 aa, Artificial Sequence
  Cyclic GFR-binding peptide
  MOD_RES (1)..(3): Xaa is C or S
XKXALHDELTNSLQEFIPKKRVIEYYLVTLPELQVQTPR

SEQ ID NO: 63078 - protein, 30 aa, Artificial Sequence; identical to SEQ ID NO: 13234
  Cyclic GFR-binding peptide

SEQ ID NO: 63079 - protein, 27 aa, Artificial Sequence
  Cyclic GFR-binding peptide
  MOD_RES (1)..(1): Xaa is C or S
XGEVVMEVQVEKVVKDYEDVKAMKVSR

SEQ ID NO: 63080 - protein, 43 aa, Artificial Sequence
  Cyclic GFR-binding peptide
  MOD_RES (2)..(4)..(38): Xaa is C or S
RXEXKNHQLFNSLQEHQGQHPKIRYYLMTLPEEETPVXELGED

SEQ ID NO: 63081 - protein, 40 aa, Artificial Sequence; identical to SEQ ID NO: 13241
  Cyclic GFR-binding peptide
  MOD_RES (2)..(4)..(35)..(36): Xaa is C or S

SEQ ID NO: 63082 - protein, 34 aa, Artificial Sequence; identical to SEQ ID NO: 13244
  Cyclic GFR-binding peptide
  MOD_RES (28)..(29): Xaa is C or S

SEQ ID NO: 63083 - protein, 33 aa, Artificial Sequence; identical to SEQ ID NO: 13245
  Cyclic GFR-binding peptide
  MOD_RES (1)..(3): Xaa is C or S

SEQ ID NO: 63084 - protein, 25 aa, Artificial Sequence
  Cyclic GFR-binding peptide
SMEGIIVNSSDDMIQVTINSLKTPA

SEQ ID NO: 63085 - protein, 34 aa, Artificial Sequence
  Cyclic GFR-binding peptide
  MOD_RES (2)..(4): Xaa is C or S
AXAXELHEELRNSLQELKPKKRVYEYYLVTLPEH

SEQ ID NO: 63086 - protein, 31 aa, Artificial Sequence; identical to SEQ ID NO: 13251
  Cyclic GFR-binding peptide
  MOD_RES (2)..(4): Xaa is C or S

SEQ ID NO: 63087 - protein, 27 aa, Artificial Sequence
  Cyclic GFR-binding peptide
SRVIMVQVEKVKPKRGVVKAIKVSRLA

SEQ ID NO: 63088 - protein, 32 aa, Artificial Sequence; identical to SEQ ID NO: 13256
  Cyclic GFR-binding peptide
  MOD_RES (1)..(1): Xaa is C or S

SEQ ID NO: 63089 - protein, 38 aa, Artificial Sequence
  Cyclic GFR-binding peptide
  MOD_RES (37)..(37): Xaa is C or S
ELHEELRNSLQELKPKKRVYEYYLVTLPEHHVRSPQXK

SEQ ID NO: 63090 - protein, 33 aa, Artificial Sequence
  Cyclic GFR-binding peptide
  MOD_RES (1)..(33): Xaa is C or S
XGEVVMDVTAKKVVKENEDIKRMQVPRLETPVX

SEQ ID NO: 63091 - protein, 30 aa, Artificial Sequence
  Cyclic GFR-binding peptide
  MOD_RES (27)..(28): Xaa is C or S
NVQVEKIVNSSDDVKAVKVSRLQTPAXXPK

SEQ ID NO: 63092 - protein, 32 aa, Artificial Sequence; identical to SEQ ID NO: 13260
  Cyclic GFR-binding peptide
  MOD_RES (31)..(32): Xaa is C or S

SEQ ID NO: 63093 - protein, 35 aa, Artificial Sequence; identical to SEQ ID NO: 13263
  Cyclic GFR-binding peptide
  MOD_RES (29)..(29): Xaa is C or S

SEQ ID NO: 63094 - protein, 29 aa, Artificial Sequence
  Cyclic GFR-binding peptide
RVIMVTAKKVKPKRGVIKRIQVPRLAQPV

SEQ ID NO: 63095 - protein, 32 aa, Artificial Sequence
  Cyclic GFR-binding peptide
  MOD_RES (28)..(28): Xaa is C or S
MNSMEGIIVNSSDDMIQVTINSLKTPAXTPKT

SEQ ID NO: 63096 - protein, 26 aa, Artificial Sequence
  Cyclic GFR-binding peptide
  MOD_RES (26)..(26): Xaa is C or S
VQVEKVKPTRGVVKAIKVSRLDQPVX

SEQ ID NO: 63097 - protein, 35 aa, Artificial Sequence; identical to SEQ ID NO: 22771
  Cyclic GFR-binding peptide
  MOD_RES (1)..(3): Xaa is C or S

SEQ ID NO: 63098 - protein, 33 aa, Artificial Sequence
  Cyclic GFR-binding peptide
  MOD_RES (28)..(29): Xaa is C or S
IMSMEGIIKPTKGIMIQITINSLDQSVXXPSAS

SEQ ID NO: 63099 - protein, 31 aa, Artificial Sequence
  Cyclic GFR-binding peptide
  MOD_RES (29)..(30): Xaa is C or S
VIMVTAKKVKPKRGVIKRIQVPRLAQPVXXP

SEQ ID NO: 63100 - protein, 32 aa, Artificial Sequence; identical to SEQ ID NO: 13281
  Cyclic GFR-binding peptide
  MOD_RES (1)..(3): Xaa is C or S

SEQ ID NO: 63101 - protein, 28 aa, Artificial Sequence
  Cyclic GFR-binding peptide
SMEGILKPKKRVYEMIQVTINSHHVRSP

SEQ ID NO: 63102 - protein, 32 aa, Artificial Sequence; identical to SEQ ID NO: 13291
  Cyclic GFR-binding peptide
  MOD_RES (2)..(2): Xaa is C or S

SEQ ID NO: 63103 - protein, 26 aa, Artificial Sequence
  Cyclic GFR-binding peptide
ENSLQEVVKDYEDYYLMTLPELETPV

SEQ ID NO: 63104 - protein, 28 aa, Artificial Sequence
  Cyclic GFR-binding peptide
  MOD_RES (1)..(1): Xaa is C or S
XGEVVMENSLQEVVKDYEDYYVMPLPEL

SEQ ID NO: 63105 - protein, 25 aa, Artificial Sequence
  Cyclic GFR-binding peptide
VVMNSLQEVKPTRGVYYVIPLPELD

SEQ ID NO: 63106 - protein, 35 aa, Artificial Sequence
  Cyclic GFR-binding peptide
  MOD_RES (32)..(33): Xaa is C or S
GEVVMDVTAKKVVKENEDIKRMQVPRLETPVXXAK

SEQ ID NO: 63107 - protein, 41 aa, Artificial Sequence
  Cyclic GFR-binding peptide
  MOD_RES (1)..(38): Xaa is C or S
XALHDELTNSLQEFIPKKRVIEYYLVTLPELQVQTPRXQVN

SEQ ID NO: 63108 - protein, 38 aa, Artificial Sequence
  Cyclic GFR-binding peptide
  MOD_RES (1)..(33)..(34): Xaa is C or S
XARVVMNVTAKKIVNSSDDIKRVQVPRLQTPAXXPKPV

SEQ ID NO: 63109 - protein, 26 aa, Artificial Sequence
  Cyclic GFR-binding peptide
GEVVMENSLQEVVKDYEDYYVMPLPE

SEQ ID NO: 63110 - protein, 36 aa, Artificial Sequence
  Cyclic GFR-binding peptide
  MOD_RES (1)..(3): Xaa is C or S
XEXKNHQLFNSLQEHQGQHPKIRYYVMPLPEEETPV

SEQ ID NO: 63111 - protein, 39 aa, Artificial Sequence; identical to SEQ ID NO: 13312
  Cyclic GFR-binding peptide
  MOD_RES (2)..(4)..(35)..(36): Xaa is C or S

SEQ ID NO: 63112 - protein, 32 aa, Artificial Sequence
  Cyclic GFR-binding peptide
  MOD_RES (32)..(32): Xaa is C or S
HQLFNSLQEHQGQHPKIRYYVMPLPEEETPVX

SEQ ID NO: 63113 - protein, 26 aa, Artificial Sequence
  Cyclic GFR-binding peptide
MVTAKKIKPTKGIIKRIQVPRLDQSV

SEQ ID NO: 63114 - protein, 27 aa, Artificial Sequence
  Cyclic GFR-binding peptide
  MOD_RES (1)..(1): Xaa is C or S
XGEVVMDNSLQEVVKENEDYYLMTLPE

SEQ ID NO: 63115 - protein, 28 aa, Artificial Sequence
  Cyclic GFR-binding peptide
VMNVQVEKIVNSSDDVKAVKVSRLQTPA

SEQ ID NO: 63116 - protein, 32 aa, Artificial Sequence; identical to SEQ ID NO: 13316
  Cyclic GFR-binding peptide
  MOD_RES (31)..(32): Xaa is C or S

SEQ ID NO: 63117 - protein, 29 aa, Artificial Sequence
  Cyclic GFR-binding peptide
  MOD_RES (29)..(29): Xaa is C or S
VMNVTAKKIVNSSDDIKRVQVPRLKTPAX

SEQ ID NO: 63118 - protein, 34 aa, Artificial Sequence; identical to SEQ ID NO: 13319
  Cyclic GFR-binding peptide
  MOD_RES (32)..(33): Xaa is C or S

SEQ ID NO: 63119 - protein, 23 aa, Artificial Sequence
  Cyclic GFR-binding peptide
VMDNSLQEVVKENEDYYLMTLPE

SEQ ID NO: 63120 - protein, 32 aa, Artificial Sequence; identical to SEQ ID NO: 13323
  Cyclic GFR-binding peptide
  MOD_RES (28)..(29): Xaa is C or S

SEQ ID NO: 63121 - protein, 27 aa, Artificial Sequence
  Cyclic GFR-binding peptide
HDELTSMEGIFIPKKRVIEMIQVTINS

SEQ ID NO: 63122 - protein, 40 aa, Artificial Sequence
  Cyclic GFR-binding peptide
  MOD_RES (2)..(34)..(35): Xaa is C or S
GXARVVMNVQVEKIVNSSDDVKAVKVSRLQTPAXXPKPVT

SEQ ID NO: 63123 - protein, 24 aa, Artificial Sequence
  Cyclic GFR-binding peptide
VVMDVTAKKVVKENEDIKRMQVPR

SEQ ID NO: 63124 - protein, 31 aa, Artificial Sequence; identical to SEQ ID NO: 13330
  Cyclic GFR-binding peptide
  MOD_RES (28)..(29): Xaa is C or S

SEQ ID NO: 63125 - protein, 29 aa, Artificial Sequence
  Cyclic GFR-binding peptide
  MOD_RES (28)..(29): Xaa is C or S
MNVTAKKIVNSSDDIKRVQVPRLKTPAXX

SEQ ID NO: 63126 - protein, 34 aa, Artificial Sequence; identical to SEQ ID NO: 13332
  Cyclic GFR-binding peptide
  MOD_RES (2)..(4): Xaa is C or S

SEQ ID NO: 63127 - protein, 28 aa, Artificial Sequence
  Cyclic GFR-binding peptide
  MOD_RES (1)..(3): Xaa is C or S
XKXSRVIMVQVEKVKPKRGVVKAIKVSR

SEQ ID NO: 63128 - protein, 29 aa, Artificial Sequence
  Cyclic GFR-binding peptide
ELHEELRNSLQELKPKKRVYEYYVVPLPE

SEQ ID NO: 63129 - protein, 25 aa, Artificial Sequence
  Cyclic GFR-binding peptide
EVVMEVTAKKVVKDYEDIKRMQVPR

SEQ ID NO: 63130 - protein, 28 aa, Artificial Sequence
  Cyclic GFR-binding peptide
  MOD_RES (27)..(28): Xaa is C or S
NNSLQEIVNSSDDYYLVTLPELQTPAXX

SEQ ID NO: 63131 - protein, 35 aa, Artificial Sequence; identical to SEQ ID NO: 22809
  Cyclic GFR-binding peptide
  MOD_RES (29)..(29): Xaa is C or S

SEQ ID NO: 63132 - protein, 36 aa, Artificial Sequence; identical to SEQ ID NO: 13339
  Cyclic GFR-binding peptide
  MOD_RES (1)..(3)..(35)..(36): Xaa is C or S

SEQ ID NO: 63133 - protein, 39 aa, Artificial Sequence; identical to SEQ ID NO: 13342
  Cyclic GFR-binding peptide
  MOD_RES (1)..(33)..(34): Xaa is C or S

SEQ ID NO: 63134 - protein, 32 aa, Artificial Sequence; identical to SEQ ID NO: 13343
  Cyclic GFR-binding peptide
  MOD_RES (2)..(2): Xaa is C or S

SEQ ID NO: 63135 - protein, 32 aa, Artificial Sequence
  Cyclic GFR-binding peptide
  MOD_RES (30)..(31): Xaa is C or S
VVMDVQVEKVVKENEDVKAMKVSRLETPVXXA

SEQ ID NO: 63136 - protein, 29 aa, Artificial Sequence
  Cyclic GFR-binding peptide
SRVVMNNSLQEIVNSSDDYYVVPLPELKT

SEQ ID NO: 63137 - protein, 27 aa, Artificial Sequence
  Cyclic GFR-binding peptide
VMVTAKKVKPTRGVIKRIQVPRLDQPV

SEQ ID NO: 63138 - protein, 29 aa, Artificial Sequence
  Cyclic GFR-binding peptide
VVMDNSLQEVVKENEDYYLMTLPELETPV

SEQ ID NO: 63139 - protein, 36 aa, Artificial Sequence
  Cyclic GFR-binding peptide
  MOD_RES (34)..(34): Xaa is C or S
DELTNSLQEFIPKKRVIEYYVVPLPELQVQTPRXQV

SEQ ID NO: 63140 - protein, 39 aa, Artificial Sequence; identical to SEQ ID NO: 13351
  Cyclic GFR-binding peptide
  MOD_RES (1)..(3)..(35)..(36): Xaa is C or S

SEQ ID NO: 63141 - protein, 31 aa, Artificial Sequence
  Cyclic GFR-binding peptide
  MOD_RES (2)..(2): Xaa is C or S
GXGEVVMEVTAKKVVKDYEDIKRMQVPRLET

SEQ ID NO: 63142 - protein, 30 aa, Artificial Sequence
  Cyclic GFR-binding peptide
  MOD_RES (29)..(30): Xaa is C or S
VMNSMEGIIVNSSDDMIQVTINSLQTPAXX

SEQ ID NO: 63143 - protein, 32 aa, Artificial Sequence
  Cyclic GFR-binding peptide
  MOD_RES (31)..(32): Xaa is C or S
SKVVMVTAKKVKPTRGVIKRIQVPRLDQPVXX

SEQ ID NO: 63144 - protein, 40 aa, Artificial Sequence; identical to SEQ ID NO: 22826
  Cyclic GFR-binding peptide
  MOD_RES (34)..(34): Xaa is C or S

SEQ ID NO: 63145 - protein, 27 aa, Artificial Sequence
  Cyclic GFR-binding peptide
LFNSLQEHQGQHPKIRYYVMPLPEEET

SEQ ID NO: 63146 - protein, 31 aa, Artificial Sequence
  Cyclic GFR-binding peptide
  MOD_RES (31)..(31): Xaa is C or S
SKVVMVTAKKVKPTRGVIKRIQVPRLDQPVX

SEQ ID NO: 63147 - protein, 36 aa, Artificial Sequence
  Cyclic GFR-binding peptide
  MOD_RES (1)..(33)..(34): Xaa is C or S
XGEVVMEVQVEKVVKDYEDVKAMKVSRLETPVXXAK

SEQ ID NO: 63148 - protein, 30 aa, Artificial Sequence; identical to SEQ ID NO: 13363
  Cyclic GFR-binding peptide
  MOD_RES (2)..(2): Xaa is C or S

SEQ ID NO: 63149 - protein, 25 aa, Artificial Sequence
  Cyclic GFR-binding peptide
VIMVQVEKIKPTKGIVKAIKVSRLD

SEQ ID NO: 63150 - protein, 31 aa, Artificial Sequence; identical to SEQ ID NO: 13367
  Cyclic GFR-binding peptide
  MOD_RES (29)..(30): Xaa is C or S

SEQ ID NO: 63151 - protein, 38 aa, Artificial Sequence; identical to SEQ ID NO: 22832
  Cyclic GFR-binding peptide
  MOD_RES (1)..(35): Xaa is C or S

SEQ ID NO: 63152 - protein, 28 aa, Artificial Sequence
  Cyclic GFR-binding peptide
FNSLQEHQGQHPKIRYYLMTLPEEETPV

SEQ ID NO: 63153 - protein, 24 aa, Artificial Sequence
  Cyclic GFR-binding peptide
DSMEGIVVKENEDMIQMTINSLET

SEQ ID NO: 63154 - protein, 33 aa, Artificial Sequence; identical to SEQ ID NO: 13371
  Cyclic GFR-binding peptide
  MOD_RES (1)..(3): Xaa is C or S

SEQ ID NO: 63155 - protein, 26 aa, Artificial Sequence
  Cyclic GFR-binding peptide
  MOD_RES (26)..(26): Xaa is C or S
VTAKKVVKENEDIKRMQVPRLETPVX

SEQ ID NO: 63156 - protein, 23 aa, Artificial Sequence
  Cyclic GFR-binding peptide
MNSLQEVKPTRGVYYVIPLPELD

SEQ ID NO: 63157 - protein, 37 aa, Artificial Sequence
  Cyclic GFR-binding peptide
  MOD_RES (2)..(34)..(35): Xaa is C or S
GXARVVMNVTAKKIVNSSDDIKRVQVPRLQTPAXXPK

SEQ ID NO: 63158 - protein, 34 aa, Artificial Sequence; identical to SEQ ID NO: 22840
  Cyclic GFR-binding peptide
  MOD_RES (30)..(30): Xaa is C or S

SEQ ID NO: 63159 - protein, 32 aa, Artificial Sequence; identical to SEQ ID NO: 13380
  Cyclic GFR-binding peptide
  MOD_RES (2)..(4): Xaa is C or S

SEQ ID NO: 63160 - protein, 32 aa, Artificial Sequence
  Cyclic GFR-binding peptide
  MOD_RES (27)..(28): Xaa is C or S
MVTAKKVKPKRGVIKRIQVPRLAQPVXXPAAS

SEQ ID NO: 63161 - protein, 31 aa, Artificial Sequence
  Cyclic GFR-binding peptide
  MOD_RES (26)..(27): Xaa is C or S
VTAKKIKPTKGIIKRIQVPRLDQSVXXPSAS

SEQ ID NO: 63162 - protein, 28 aa, Artificial Sequence
  Cyclic GFR-binding peptide
  MOD_RES (26)..(27): Xaa is C or S
NSLQEIKPTKGIYYVIPLPELDQSVXXP

SEQ ID NO: 63163 - protein, 34 aa, Artificial Sequence; identical to SEQ ID NO: 22843
  Cyclic GFR-binding peptide
  MOD_RES (29)..(29): Xaa is C or S

SEQ ID NO: 63164 - protein, 38 aa, Artificial Sequence; identical to SEQ ID NO: 13382
  Cyclic GFR-binding peptide
  MOD_RES (1)..(3)..(35)..(36): Xaa is C or S

SEQ ID NO: 63165 - protein, 33 aa, Artificial Sequence; identical to SEQ ID NO: 47870
  Cyclic GFR-binding peptide
  MOD_RES (30)..(31): Xaa is C or S

SEQ ID NO: 63166 - protein, 41 aa, Artificial Sequence
  Cyclic GFR-binding peptide
  MOD_RES (1)..(3)..(35): Xaa is C or S
XGXSRVVMNSMEGIIVNSSDDMIQVTINSLKTPAXTPKTVH

SEQ ID NO: 63167 - protein, 33 aa, Artificial Sequence
  Cyclic GFR-binding peptide
  MOD_RES (2)..(4): Xaa is C or S
SXKXSKVVMVQVEKVKPTRGVVKAIKVSRLDQP

SEQ ID NO: 63168 - protein, 37 aa, Artificial Sequence
  Cyclic GFR-binding peptide
  MOD_RES (1)..(3)..(35)..(36): Xaa is C or S
XGXGEVVMDVQVEKVVKENEDVKAMKVSRLETPVXXA

SEQ ID NO: 63169 - protein, 36 aa, Artificial Sequence
  Cyclic GFR-binding peptide
  MOD_RES (2)..(33)..(34): Xaa is C or S
KXSKVVMSMEGIVKPTRGVMIQITINSLDQPVXXPS

SEQ ID NO: 63170 - protein, 31 aa, Artificial Sequence
  Cyclic GFR-binding peptide
  MOD_RES (28)..(29): Xaa is C or S
VMVTAKKVKPTRGVIKRIQVPRLDQPVXXPS

SEQ ID NO: 63171 - protein, 41 aa, Artificial Sequence; identical to SEQ ID NO: 22849
  Cyclic GFR-binding peptide
  MOD_RES (37)..(37): Xaa is C or S

SEQ ID NO: 63172 - protein, 27 aa, Artificial Sequence
  Cyclic GFR-binding peptide
  MOD_RES (27)..(27): Xaa is C or S
MSMEGIVKPKRGVMIQITINSLAQPVX

SEQ ID NO: 63173 - protein, 36 aa, Artificial Sequence; identical to SEQ ID NO: 22851
  Cyclic GFR-binding peptide
  MOD_RES (36)..(36): Xaa is C or S

SEQ ID NO: 63174 - protein, 27 aa, Artificial Sequence
  Cyclic GFR-binding peptide
RVVMNVTAKKIVNSSDDIKRVQVPRLQ

SEQ ID NO: 63175 - protein, 35 aa, Artificial Sequence; identical to SEQ ID NO: 22852
  Cyclic GFR-binding peptide
  MOD_RES (2)..(4): Xaa is C or S

SEQ ID NO: 63176 - protein, 26 aa, Artificial Sequence
  Cyclic GFR-binding peptide
NNSLQEIVNSSDDYYLVTLPELQTPA

SEQ ID NO: 63177 - protein, 32 aa, Artificial Sequence; identical to SEQ ID NO: 13395
  Cyclic GFR-binding peptide
  MOD_RES (1)..(3): Xaa is C or S

SEQ ID NO: 63178 - protein, 28 aa, Artificial Sequence
  Cyclic GFR-binding peptide
  MOD_RES (27)..(28): Xaa is C or S
MSMEGIVKPKRGVMIQITINSLAQPVXX

SEQ ID NO: 63179 - protein, 35 aa, Artificial Sequence; identical to SEQ ID NO: 22855
  Cyclic GFR-binding peptide
  MOD_RES (32)..(32): Xaa is C or S

SEQ ID NO: 63180 - protein, 29 aa, Artificial Sequence
  Cyclic GFR-binding peptide
  MOD_RES (1)..(3): Xaa is C or S
XKXSRVIMVTAKKVKPKRGVIKRIQVPRL

SEQ ID NO: 63181 - protein, 36 aa, Artificial Sequence; identical to SEQ ID NO: 13403
  Cyclic GFR-binding peptide
  MOD_RES (2)..(34)..(35): Xaa is C or S

SEQ ID NO: 63182 - protein, 27 aa, Artificial Sequence
  Cyclic GFR-binding peptide
VVMENSLQEVVKDYEDYYVMPLPELET

SEQ ID NO: 63183 - protein, 35 aa, Artificial Sequence
  Cyclic GFR-binding peptide
  MOD_RES (32)..(33): Xaa is C or S
ARVVMNSMEGIIVNSSDDMIQVTINSLQTPAXXPK

SEQ ID NO: 63184 - protein, 35 aa, Artificial Sequence; identical to SEQ ID NO: 13409
  Cyclic GFR-binding peptide
  MOD_RES (2)..(4): Xaa is C or S

SEQ ID NO: 63185 - protein, 40 aa, Artificial Sequence; identical to SEQ ID NO: 13410
  Cyclic GFR-binding peptide
  MOD_RES (1)..(3)..(35)..(36): Xaa is C or S

SEQ ID NO: 63186 - protein, 31 aa, Artificial Sequence; identical to SEQ ID NO: 13412
  Cyclic GFR-binding peptide
  MOD_RES (29)..(30): Xaa is C or S

SEQ ID NO: 63187 - protein, 26 aa, Artificial Sequence
  Cyclic GFR-binding peptide
EELRNSLQELKPKKRVYEYYVVPLPE

SEQ ID NO: 63188 - protein, 31 aa, Artificial Sequence; identical to SEQ ID NO: 13413
  Cyclic GFR-binding peptide
  MOD_RES (28)..(29): Xaa is C or S

SEQ ID NO: 63189 - protein, 31 aa, Artificial Sequence; identical to SEQ ID NO: 13415
  Cyclic GFR-binding peptide
  MOD_RES (26)..(27): Xaa is C or S

SEQ ID NO: 63190 - protein, 28 aa, Artificial Sequence
  Cyclic GFR-binding peptide
KVIMNSLQEIKPTKGIYYVIPLPELDQS

SEQ ID NO: 63191 - protein, 33 aa, Artificial Sequence; identical to SEQ ID NO: 13419
  Cyclic GFR-binding peptide
  MOD_RES (27)..(28): Xaa is C or S

SEQ ID NO: 63192 - protein, 37 aa, Artificial Sequence
  Cyclic GFR-binding peptide
  MOD_RES (31)..(32): Xaa is C or S
RVVMNVTAKKIVNSSDDIKRVQVPRLKTPAXXPKPVY

SEQ ID NO: 63193 - protein, 26 aa, Artificial Sequence
  Cyclic GFR-binding peptide
VMSMEGIVKPTRGVMIQITINSLDQP

SEQ ID NO: 63194 - protein, 31 aa, Artificial Sequence
  Cyclic GFR-binding peptide
  MOD_RES (28)..(29): Xaa is C or S
MNSMEGIIVNSSDDMIQVTINSLQTPAXXPK

SEQ ID NO: 63195 - protein, 37 aa, Artificial Sequence
  Cyclic GFR-binding peptide
  MOD_RES (33)..(33): Xaa is C or S
ELTNSLQEFIPKKRVIEYYVVPLPELQVQTPRXQVNR

SEQ ID NO: 63196 - protein, 40 aa, Artificial Sequence
  Cyclic GFR-binding peptide
  MOD_RES (2)..(4): Xaa is C or S
AXAXELHEELRNSLQELKPKKRVYEYYLVTLPEHHVRSPQ

SEQ ID NO: 63197 - protein, 26 aa, Artificial Sequence
  Cyclic GFR-binding peptide
  MOD_RES (26)..(26): Xaa is C or S
NSLQEVVKENEDYYVMPLPELETPVX

SEQ ID NO: 63198 - protein, 35 aa, Artificial Sequence; identical to SEQ ID NO: 47901
  Cyclic GFR-binding peptide
  MOD_RES (1)..(32)..(33): Xaa is C or S

SEQ ID NO: 63199 - protein, 36 aa, Artificial Sequence; identical to SEQ ID NO: 22872
  Cyclic GFR-binding peptide
  MOD_RES (35)..(35): Xaa is C or S

SEQ ID NO: 63200 - protein, 33 aa, Artificial Sequence
  Cyclic GFR-binding peptide
  MOD_RES (31)..(31): Xaa is C or S
QLFNSLQEHQGQHPKIRYYVMPLPEEETPVXEL

SEQ ID NO: 63201 - protein, 28 aa, Artificial Sequence
  Cyclic GFR-binding peptide
  MOD_RES (28)..(28): Xaa is C or S
MENSLQEVVKDYEDYYVMPLPELETPVX

SEQ ID NO: 63202 - protein, 40 aa, Artificial Sequence
  Cyclic GFR-binding peptide
  MOD_RES (2)..(4)..(38): Xaa is C or S
RXEXKNHQLFNSLQEHQGQHPKIRYYLMTLPEEETPVXEL

SEQ ID NO: 63203 - protein, 26 aa, Artificial Sequence
  Cyclic GFR-binding peptide
EELRVTAKKLKPKKRVYEIKRVQVPR

SEQ ID NO: 63204 - protein, 24 aa, Artificial Sequence
  Cyclic GFR-binding peptide
VVMVQVEKVKPTRGVVKAIKVSRL

SEQ ID NO: 63205 - protein, 29 aa, Artificial Sequence
  Cyclic GFR-binding peptide
  MOD_RES (28)..(29): Xaa is C or S
VMSMEGIVKPTRGVMIQITINSLDQPVXX

SEQ ID NO: 63206 - protein, 31 aa, Artificial Sequence
  Cyclic GFR-binding peptide
  MOD_RES (1)..(1): Xaa is C or S
XSKVIMVTAKKIKPTKGIIKRIQVPRLDQSV

SEQ ID NO: 63207 - protein, 29 aa, Artificial Sequence
  Cyclic GFR-binding peptide
  MOD_RES (1)..(3): Xaa is C or S
XKXSKVIMNSLQEIKPTKGIYYVIPLPEL

SEQ ID NO: 63208 - protein, 35 aa, Artificial Sequence; identical to SEQ ID NO: 13444
  Cyclic GFR-binding peptide
  MOD_RES (30)..(31): Xaa is C or S

SEQ ID NO: 63209 - protein, 30 aa, Artificial Sequence; identical to SEQ ID NO: 13448
  Cyclic GFR-binding peptide
  MOD_RES (30)..(30): Xaa is C or S

SEQ ID NO: 63210 - protein, 30 aa, Artificial Sequence
  Cyclic GFR-binding peptide
RVVMNVQVEKIVNSSDDVKAVKVSRLQTPA

SEQ ID NO: 63211 - protein, 26 aa, Artificial Sequence
  Cyclic GFR-binding peptide
MVTAKKVKPTRGVIKRIQVPRLDQPV

SEQ ID NO: 63212 - protein, 30 aa, Artificial Sequence
  Cyclic GFR-binding peptide
  MOD_RES (2)..(2): Xaa is C or S
KXSKVIMSMEGIIKPTKGIMIQITINSLDQ

SEQ ID NO: 63213 - protein, 43 aa, Artificial Sequence; identical to SEQ ID NO: 22886
  Cyclic GFR-binding peptide
  MOD_RES (2)..(4)..(41): Xaa is C or S

SEQ ID NO: 63214 - protein, 28 aa, Artificial Sequence
  Cyclic GFR-binding peptide
  MOD_RES (28)..(28): Xaa is C or S
MDSMEGIVVKENEDMIQMTINSLETPVX

SEQ ID NO: 63215 - protein, 32 aa, Artificial Sequence; identical to SEQ ID NO: 13453
  Cyclic GFR-binding peptide
  MOD_RES (31)..(32): Xaa is C or S

SEQ ID NO: 63216 - protein, 39 aa, Artificial Sequence
  Cyclic GFR-binding peptide
  MOD_RES (1)..(33)..(34): Xaa is C or S
XARVVMNVTAKKIVNSSDDIKRVQVPRLQTPAXXPKPVT

SEQ ID NO: 63217 - protein, 35 aa, Artificial Sequence; identical to SEQ ID NO: 47922
  Cyclic GFR-binding peptide
  MOD_RES (30)..(31): Xaa is C or S

SEQ ID NO: 63218 - protein, 36 aa, Artificial Sequence
  Cyclic GFR-binding peptide
  MOD_RES (30)..(31): Xaa is C or S
KVVMSMEGIVKPTRGVMIQITINSLDQPVXXPSASA

SEQ ID NO: 63219 - protein, 33 aa, Artificial Sequence; identical to SEQ ID NO: 22892
  Cyclic GFR-binding peptide
  MOD_RES (30)..(30): Xaa is C or S

SEQ ID NO: 63220 - protein, 37 aa, Artificial Sequence
  Cyclic GFR-binding peptide
  MOD_RES (31)..(32): Xaa is C or S
RVVMNVQVEKIVNSSDDVKAVKVSRLQTPAXXPKPVT

SEQ ID NO: 63221 - protein, 28 aa, Artificial Sequence
  Cyclic GFR-binding peptide
KVVMVQVEKVKPTRGVVKAIKVSRLDQP

SEQ ID NO: 63222 - protein, 29 aa, Artificial Sequence
  Cyclic GFR-binding peptide
  MOD_RES (27)..(28): Xaa is C or S
NVQVEKIVNSSDDVKAVKVSRLQTPAXXP

SEQ ID NO: 63223 - protein, 34 aa, Artificial Sequence
  Cyclic GFR-binding peptide
  MOD_RES (28)..(29): Xaa is C or S
MNSMEGIIVNSSDDMIQVTINSLQTPAXXPKPVT

SEQ ID NO: 63224 - protein, 44 aa, Artificial Sequence; identical to SEQ ID NO: 22896
  Cyclic GFR-binding peptide
  MOD_RES (2)..(4)..(38): Xaa is C or S

SEQ ID NO: 63225 - protein, 33 aa, Artificial Sequence; identical to SEQ ID NO: 13465
  Cyclic GFR-binding peptide
  MOD_RES (30)..(30): Xaa is C or S

SEQ ID NO: 63226 - protein, 30 aa, Artificial Sequence
  Cyclic GFR-binding peptide
  MOD_RES (2)..(2): Xaa is C or S
KXSKVVMVQVEKVKPTRGVVKAIKVSRLDQ

SEQ ID NO: 63227 - protein, 28 aa, Artificial Sequence
  Cyclic GFR-binding peptide
HQLFNSLQEHQGQHPKIRYYLMTLPEEE

SEQ ID NO: 63228 - protein, 40 aa, Artificial Sequence; identical to SEQ ID NO: 13477
  Cyclic GFR-binding peptide
  MOD_RES (2)..(34)..(35): Xaa is C or S

SEQ ID NO: 63229 - protein, 36 aa, Artificial Sequence
  Cyclic GFR-binding peptide
  MOD_RES (31)..(31): Xaa is C or S
RVVMNSMEGIIVNSSDDMIQVTINSLKTPAXTPKTV

SEQ ID NO: 63230 - protein, 25 aa, Artificial Sequence
  Cyclic GFR-binding peptide
LFNSLQEHQGQHPKIRYYLMTLPEE

SEQ ID NO: 63231 - protein, 24 aa, Artificial Sequence
  Cyclic GFR-binding peptide
NSLQEVKPKRGVYYLITLPELAQP

SEQ ID NO: 63232 - protein, 33 aa, Artificial Sequence
  Cyclic GFR-binding peptide
  MOD_RES (29)..(30): Xaa is C or S
VVMVTAKKVKPTRGVIKRIQVPRLDQPVXXPSA

SEQ ID NO: 63233 - protein, 30 aa, Artificial Sequence
  Cyclic GFR-binding peptide
  MOD_RES (1)..(1): Xaa is C or S
XGEVVMEVTAKKVVKDYEDIKRMQVPRLET

SEQ ID NO: 63234 - protein, 32 aa, Artificial Sequence; identical to SEQ ID NO: 13490
  Cyclic GFR-binding peptide
  MOD_RES (31)..(32): Xaa is C or S

SEQ ID NO: 63235 - protein, 36 aa, Artificial Sequence
  Cyclic GFR-binding peptide
  MOD_RES (1)..(32)..(33): Xaa is C or S
XSKVIMVQVEKIKPTKGIVKAIKVSRLDQSVXXPSA

SEQ ID NO: 63236 - protein, 34 aa, Artificial Sequence
  Cyclic GFR-binding peptide
  MOD_RES (1)..(3): Xaa is C or S
XKXALHDELTNSLQEFIPKKRVIEYYLVTLPELQ

SEQ ID NO: 63237 - protein, 36 aa, Artificial Sequence
  Cyclic GFR-binding peptide
  MOD_RES (2)..(4)..(35)..(36): Xaa is C or S
SXKXSKVVMVTAKKVKPTRGVIKRIQVPRLDQPVXX

SEQ ID NO: 63238 - protein, 27 aa, Artificial Sequence
  Cyclic GFR-binding peptide
GEVVMEVTAKKVVKDYEDIKRMQVPRL

SEQ ID NO: 63239 - protein, 29 aa, Artificial Sequence
  Cyclic GFR-binding peptide
LRNSLQELKPKKRVYEYYLVTLPEHHVRS

SEQ ID NO: 63240 - protein, 25 aa, Artificial Sequence
  Cyclic GFR-binding peptide
VMDVTAKKVVKENEDIKRMQVPRLE

SEQ ID NO: 63241 - protein, 35 aa, Artificial Sequence
  Cyclic GFR-binding peptide
  MOD_RES (2)..(4)..(35): Xaa is C or S
SXKXSRVIMVTAKKVKPKRGVIKRIQVPRLAQPVX

SEQ ID NO: 63242 - protein, 21 aa, Artificial Sequence
  Cyclic GFR-binding peptide
EVTAKKVVKDYEDIKRMQVPR

SEQ ID NO: 63243 - protein, 39 aa, Artificial Sequence; identical to SEQ ID NO: 47969
  Cyclic GFR-binding peptide
  MOD_RES (2)..(33)..(34): Xaa is C or S

SEQ ID NO: 63244 - protein, 28 aa, Artificial Sequence
  Cyclic GFR-binding peptide
VMNSMEGIIVNSSDDMIQVTINSLQTPA

SEQ ID NO: 63245 - protein, 33 aa, Artificial Sequence
  Cyclic GFR-binding peptide
LHDELTNSLQEFIPKKRVIEYYVVPLPELQVQT

SEQ ID NO: 63246 - protein, 31 aa, Artificial Sequence
  Cyclic GFR-binding peptide
LRNSLQELKPKKRVYEYYVVPLPEHHVRSPQ

SEQ ID NO: 63247 - protein, 29 aa, Artificial Sequence
  Cyclic GFR-binding peptide
  MOD_RES (28)..(29): Xaa is C or S
MNVQVEKIVNSSDDVKAVKVSRLQTPAXX

SEQ ID NO: 63248 - protein, 25 aa, Artificial Sequence
  Cyclic GFR-binding peptide
VMDNSLQEVVKENEDYYLMTLPELE

SEQ ID NO: 63249 - protein, 42 aa, Artificial Sequence; identical to SEQ ID NO: 13523
  Cyclic GFR-binding peptide
  MOD_RES (2)..(4)..(36)..(37): Xaa is C or S

SEQ ID NO: 63250 - protein, 32 aa, Artificial Sequence; identical to SEQ ID NO: 13528
  Cyclic GFR-binding peptide
  MOD_RES (27)..(28): Xaa is C or S

SEQ ID NO: 63251 - protein, 22 aa, Artificial Sequence
  Cyclic GFR-binding peptide
MEVTAKKVVKDYEDIKRMQVPR

SEQ ID NO: 63252 - protein, 30 aa, Artificial Sequence
  Cyclic GFR-binding peptide
  MOD_RES (27)..(28): Xaa is C or S
EVQVEKVVKDYEDVKAMKVSRLETPVXXAK

SEQ ID NO: 63253 - protein, 42 aa, Artificial Sequence
  Cyclic GFR-binding peptide
  MOD_RES (2)..(4)..(36)..(37): Xaa is C or S
RXGXGEVVMDVTAKKVVKENEDIKRMQVPRLETPVXXAKPIK

SEQ ID NO: 63254 - protein, 22 aa, Artificial Sequence
  Cyclic GFR-binding peptide
DSMEGIVVKENEDMIQMTINSL

SEQ ID NO: 63255 - protein, 40 aa, Artificial Sequence; identical to SEQ ID NO: 22940
  Cyclic GFR-binding peptide
  MOD_RES (1)..(38): Xaa is C or S

SEQ ID NO: 63256 - protein, 23 aa, Artificial Sequence
  Cyclic GFR-binding peptide
MEVTAKKVVKDYEDIKRMQVPRL

SEQ ID NO: 63257 - protein, 32 aa, Artificial Sequence
  Cyclic GFR-binding peptide
  MOD_RES (1)..(1): Xaa is C or S
XGEVVMDSMEGIVVKENEDMIQMTINSLETPV

SEQ ID NO: 63258 - protein, 36 aa, Artificial Sequence; identical to SEQ ID NO: 13544
  Cyclic GFR-binding peptide
  MOD_RES (30)..(31): Xaa is C or S

SEQ ID NO: 63259 - protein, 29 aa, Artificial Sequence
  Cyclic GFR-binding peptide
  MOD_RES (26)..(27): Xaa is C or S
SMEGIIVNSSDDMIQVTINSLKTPAXXPK

SEQ ID NO: 63260 - protein, 27 aa, Artificial Sequence
  Cyclic GFR-binding peptide
ELRNSLQELKPKKRVYEYYLVTLPEHH

SEQ ID NO: 63261 - protein, 32 aa, Artificial Sequence
  Cyclic GFR-binding peptide
  MOD_RES (28)..(29): Xaa is C or S
MNSMEGIIVNSSDDMIQVTINSLQTPAXXPKP

SEQ ID NO: 63262 - protein, 37 aa, Artificial Sequence; identical to SEQ ID NO: 47995
  Cyclic GFR-binding peptide
  MOD_RES (2)..(4)..(35)..(36): Xaa is C or S

SEQ ID NO: 63263 - protein, 28 aa, Artificial Sequence
  Cyclic GFR-binding peptide
  MOD_RES (2)..(2): Xaa is C or S
GXGEVVMDSMEGIVVKENEDMIQMTINS

SEQ ID NO: 63264 - protein, 38 aa, Artificial Sequence
  Cyclic GFR-binding peptide
  MOD_RES (32)..(33): Xaa is C or S
GEVVMDVTAKKVVKENEDIKRMQVPRLETPVXXAKPIK

SEQ ID NO: 63265 - protein, 31 aa, Artificial Sequence
  Cyclic GFR-binding peptide
  MOD_RES (2)..(2): Xaa is C or S
KXSKVVMVQVEKVKPTRGVVKAIKVSRLDQP

SEQ ID NO: 63266 - protein, 36 aa, Artificial Sequence
  Cyclic GFR-binding peptide
ELHEELRNSLQELKPKKRVYEYYLVTLPEHHVRSPQ

SEQ ID NO: 63267 - protein, 30 aa, Artificial Sequence
  Cyclic GFR-binding peptide
GEVVMDVQVEKVVKENEDVKAMKVSRLETP

SEQ ID NO: 63268 - protein, 29 aa, Artificial Sequence
  Cyclic GFR-binding peptide
  MOD_RES (29)..(29): Xaa is C or S
VIMVQVEKIKPTKGIVKAIKVSRLDQSVX

SEQ ID NO: 63269 - protein, 33 aa, Artificial Sequence; identical to SEQ ID NO: 22957
  Cyclic GFR-binding peptide
  MOD_RES (1)..(1): Xaa is C or S

SEQ ID NO: 63270 - protein, 39 aa, Artificial Sequence
  Cyclic GFR-binding peptide
  MOD_RES (1)..(3)..(35)..(36): Xaa is C or S
XGXARVVMNSMEGIIVNSSDDMIQVTINSLQTPAXXPKP

SEQ ID NO: 63271 - protein, 38 aa, Artificial Sequence
  Cyclic GFR-binding peptide
  MOD_RES (36)..(36): Xaa is C or S
LHEELRNSLQELKPKKRVYEYYLVTLPEHHVRSPQXKV

SEQ ID NO: 63272 - protein, 38 aa, Artificial Sequence
  Cyclic GFR-binding peptide
  MOD_RES (1)..(3)..(35)..(36): Xaa is C or S
XGXARVVMNSMEGIIVNSSDDMIQVTINSLQTPAXXPK

SEQ ID NO: 63273 - protein, 27 aa, Artificial Sequence
  Cyclic GFR-binding peptide
QLFVQVEKHQGQHPKIRVKAMKVSREE

SEQ ID NO: 63274 - protein, 29 aa, Artificial Sequence
  Cyclic GFR-binding peptide
  MOD_RES (28)..(29): Xaa is C or S
MDNSLQEVVKENEDYYLMTLPELETPVXX

SEQ ID NO: 63275 - protein, 30 aa, Artificial Sequence
  Cyclic GFR-binding peptide
  MOD_RES (1)..(3): Xaa is C or S
XGXSRVVMNVTAKKIVNSSDDIKRVQVPRL

SEQ ID NO: 63276 - protein, 23 aa, Artificial Sequence
  Cyclic GFR-binding peptide
VQVEKIVNSSDDVKAVKVSRLQT

SEQ ID NO: 63277 - protein, 36 aa, Artificial Sequence; identical to SEQ ID NO: 13563
  Cyclic GFR-binding peptide
  MOD_RES (1)..(3)..(34)..(35): Xaa is C or S

SEQ ID NO: 63278 - protein, 35 aa, Artificial Sequence
  Cyclic GFR-binding peptide
  MOD_RES (29)..(30): Xaa is C or S
VIMVQVEKVKPKRGVVKAIKVSRLAQPVXXPAASA

SEQ ID NO: 63279 - protein, 31 aa, Artificial Sequence
  Cyclic GFR-binding peptide
  MOD_RES (27)..(28): Xaa is C or S
MSMEGIIKPTKGIMIQITINSLDQSVXXPSA

SEQ ID NO: 63280 - protein, 32 aa, Artificial Sequence
  Cyclic GFR-binding peptide
  MOD_RES (28)..(29): Xaa is C or S
MNSMEGIIVNSSDDMIQVTINSLKTPAXXPKP

SEQ ID NO: 63281 - protein, 27 aa, Artificial Sequence
  Cyclic GFR-binding peptide
  MOD_RES (27)..(27): Xaa is C or S
MVQVEKVKPTRGVVKAIKVSRLDQPVX

SEQ ID NO: 63282 - protein, 30 aa, Artificial Sequence
  Cyclic GFR-binding peptide
  MOD_RES (26)..(27): Xaa is C or S
VQVEKVVKDYEDVKAMKVSRLETPVXXAKP

SEQ ID NO: 63283 - protein, 33 aa, Artificial Sequence; identical to SEQ ID NO: 22971
  Cyclic GFR-binding peptide
  MOD_RES (1)..(1): Xaa is C or S

SEQ ID NO: 63284 - protein, 38 aa, Artificial Sequence
  Cyclic GFR-binding peptide
  MOD_RES (2)..(34)..(35): Xaa is C or S
GXSRVVMNVQVEKIVNSSDDVKAVKVSRLKTPAXXPKP

SEQ ID NO: 63285 - protein, 34 aa, Artificial Sequence; identical to SEQ ID NO: 22972
  Cyclic GFR-binding peptide
  MOD_RES (34)..(34): Xaa is C or S

SEQ ID NO: 63286 - protein, 32 aa, Artificial Sequence
  Cyclic GFR-binding peptide
  MOD_RES (31)..(31): Xaa is C or S
RNSLQELKPKKRVYEYYVVPLPEHHVRSPQXK

SEQ ID NO: 63287 - protein, 33 aa, Artificial Sequence
  Cyclic GFR-binding peptide
  MOD_RES (31)..(32): Xaa is C or S
EVVMESMEGIVVKDYEDMIQMTINSLETPVXXA

SEQ ID NO: 63288 - protein, 22 aa, Artificial Sequence
  Cyclic GFR-binding peptide
NSMEGIIVNSSDDMIQVTINSL

SEQ ID NO: 63289 - protein, 28 aa, Artificial Sequence
  Cyclic GFR-binding peptide
  MOD_RES (26)..(27): Xaa is C or S
SMEGIVKPTRGVMIQITINSLDQPVXXP

SEQ ID NO: 63290 - protein, 37 aa, Artificial Sequence
  Cyclic GFR-binding peptide
  MOD_RES (2)..(4)..(36): Xaa is C or S
HXGXSRVVMNVTAKKIVNSSDDIKRVQVPRLKTPAXT

SEQ ID NO: 63291 - protein, 26 aa, Artificial Sequence
  Cyclic GFR-binding peptide
IMNSLQEIKPTKGIYYLITLPELDQS

SEQ ID NO: 63292 - protein, 28 aa, Artificial Sequence
  Cyclic GFR-binding peptide
GEVVMDVQVEKVVKENEDVKAMKVSRLE

SEQ ID NO: 63293 - protein, 38 aa, Artificial Sequence
  Cyclic GFR-binding peptide
  MOD_RES (1)..(33)..(34): Xaa is C or S
XARVVMNVQVEKIVNSSDDVKAVKVSRLQTPAXXPKPV

SEQ ID NO: 63294 - protein, 39 aa, Artificial Sequence
  Cyclic GFR-binding peptide
  MOD_RES (2)..(4)..(35)..(36): Xaa is C or S
SXKXSKVIMVQVEKIKPTKGIVKAIKVSRLDQSVXXPSA

SEQ ID NO: 63295 - protein, 39 aa, Artificial Sequence
  Cyclic GFR-binding peptide
  MOD_RES (1)..(3)..(37): Xaa is C or S
XEXKNHQLFNSLQEHQGQHPKIRYYVMPLPEEETPVXEL

SEQ ID NO: 63296 - protein, 33 aa, Artificial Sequence; identical to SEQ ID NO: 13593
  Cyclic GFR-binding peptide
  MOD_RES (30)..(31): Xaa is C or S

SEQ ID NO: 63297 - protein, 35 aa, Artificial Sequence; identical to SEQ ID NO: 13595
  Cyclic GFR-binding peptide
  MOD_RES (30)..(31): Xaa is C or S

SEQ ID NO: 63298 - protein, 31 aa, Artificial Sequence
  Cyclic GFR-binding peptide
  MOD_RES (28)..(28): Xaa is C or S
NSLQEHQGQHPKIRYYVMPLPEEETPVXELG

SEQ ID NO: 63299 - protein, 35 aa, Artificial Sequence
  Cyclic GFR-binding peptide
  MOD_RES (2)..(34)..(35): Xaa is C or S
GXARVVMNSMEGIIVNSSDDMIQVTINSLQTPAXX

SEQ ID NO: 63300 - protein, 38 aa, Artificial Sequence; identical to SEQ ID NO: 22987
  Cyclic GFR-binding peptide
  MOD_RES (36)..(36): Xaa is C or S

SEQ ID NO: 63301 - protein, 32 aa, Artificial Sequence
  Cyclic GFR-binding peptide
  MOD_RES (1)..(3): Xaa is C or S
XKXSRVIMVQVEKVKPKRGVVKAIKVSRLAQP

SEQ ID NO: 63302 - protein, 21 aa, Artificial Sequence
  Cyclic GFR-binding peptide
NSLQEVVKDYEDYYVMPLPEL

SEQ ID NO: 63303 - protein, 31 aa, Artificial Sequence; identical to SEQ ID NO: 22992
  Cyclic GFR-binding peptide

SEQ ID NO: 63304 - protein, 37 aa, Artificial Sequence
  Cyclic GFR-binding peptide
  MOD_RES (2)..(4)..(35)..(36): Xaa is C or S
SXKXSKVVMVTAKKVKPTRGVIKRIQVPRLDQPVXXP

SEQ ID NO: 63305 - protein, 32 aa, Artificial Sequence
  Cyclic GFR-binding peptide
  MOD_RES (1)..(3): Xaa is C or S
XKXSKVIMVQVEKIKPTKGIVKAIKVSRLDQS

SEQ ID NO: 63306 - protein, 27 aa, Artificial Sequence
  Cyclic GFR-binding peptide
  MOD_RES (1)..(1): Xaa is C or S
XSKVIMNSLQEIKPTKGIYYVIPLPEL

SEQ ID NO: 63307 - protein, 27 aa, Artificial Sequence
  Cyclic GFR-binding peptide
VMNSMEGIIVNSSDDMIQVTINSLQTP

SEQ ID NO: 63308 - protein, 29 aa, Artificial Sequence
  Cyclic GFR-binding peptide
  MOD_RES (26)..(27): Xaa is C or S
NSLQEIVNSSDDYYLVTLPELQTPAXXPK

SEQ ID NO: 63309 - protein, 31 aa, Artificial Sequence
  Cyclic GFR-binding peptide
  MOD_RES (26)..(27): Xaa is C or S
VQVEKVKPTRGVVKAIKVSRLDQPVXXPSAS

SEQ ID NO: 63310 - protein, 29 aa, Artificial Sequence
  Cyclic GFR-binding peptide
  MOD_RES (28)..(29): Xaa is C or S
MNVQVEKIVNSSDDVKAVKVSRLKTPAXX

SEQ ID NO: 63311 - protein, 23 aa, Artificial Sequence
  Cyclic GFR-binding peptide
EVTAKKVVKDYEDIKRMQVPRLE

SEQ ID NO: 63312 - protein, 31 aa, Artificial Sequence
  Cyclic GFR-binding peptide
LHDELTNSLQEFIPKKRVIEYYLVTLPELQV

SEQ ID NO: 63313 - protein, 33 aa, Artificial Sequence; identical to SEQ ID NO: 48047
  Cyclic GFR-binding peptide
  MOD_RES (29)..(30): Xaa is C or S

SEQ ID NO: 63314 - protein, 37 aa, Artificial Sequence
  Cyclic GFR-binding peptide
  MOD_RES (35)..(35): Xaa is C or S
HDELTNSLQEFIPKKRVIEYYVVPLPELQVQTPRXQV

SEQ ID NO: 63315 - protein, 29 aa, Artificial Sequence
  Cyclic GFR-binding peptide
QLFVQVEKHQGQHPKIRVKAMKVSREETP

SEQ ID NO: 63316 - protein, 30 aa, Artificial Sequence; identical to SEQ ID NO: 13618
  Cyclic GFR-binding peptide
  MOD_RES (1)..(1): Xaa is C or S

SEQ ID NO: 63317 - protein, 30 aa, Artificial Sequence; identical to SEQ ID NO: 13622
  Cyclic GFR-binding peptide

SEQ ID NO: 63318 - protein, 27 aa, Artificial Sequence
  Cyclic GFR-binding peptide
ELTNSLQEFIPKKRVIEYYLVTLPELQ

SEQ ID NO: 63319 - protein, 27 aa, Artificial Sequence
  Cyclic GFR-binding peptide
  MOD_RES (1)..(1): Xaa is C or S
XSKVIMNSLQEIKPTKGIYYLITLPEL

SEQ ID NO: 63320 - protein, 30 aa, Artificial Sequence
  Cyclic GFR-binding peptide
SRVVMNVQVEKIVNSSDDVKAVKVSRLKTP

SEQ ID NO: 63321 - protein, 35 aa, Artificial Sequence; identical to SEQ ID NO: 23011
  Cyclic GFR-binding peptide
  MOD_RES (2)..(2): Xaa is C or S

SEQ ID NO: 63322 - protein, 29 aa, Artificial Sequence
  Cyclic GFR-binding peptide
  MOD_RES (26)..(26): Xaa is C or S
NSLQEIVNSSDDYYVVPLPELKTPAXTPK

SEQ ID NO: 63323 - protein, 28 aa, Artificial Sequence
  Cyclic GFR-binding peptide
VVMENSLQEVVKDYEDYYLMTLPELETP

SEQ ID NO: 63324 - protein, 29 aa, Artificial Sequence
  Cyclic GFR-binding peptide
  MOD_RES (2)..(2): Xaa is C or S
KXSKVVMVQVEKVKPTRGVVKAIKVSRLD

SEQ ID NO: 63325 - protein, 36 aa, Artificial Sequence; identical to SEQ ID NO: 23019
  Cyclic GFR-binding peptide
  MOD_RES (31)..(31): Xaa is C or S

SEQ ID NO: 63326 - protein, 33 aa, Artificial Sequence; identical to SEQ ID NO: 23020
  Cyclic GFR-binding peptide
  MOD_RES (32)..(32): Xaa is C or S

SEQ ID NO: 63327 - protein, 31 aa, Artificial Sequence
  Cyclic GFR-binding peptide
  MOD_RES (31)..(31): Xaa is C or S
QLFNSLQEHQGQHPKIRYYLMTLPEEETPVX

SEQ ID NO: 63328 - protein, 37 aa, Artificial Sequence; identical to SEQ ID NO: 13635
  Cyclic GFR-binding peptide
  MOD_RES (32)..(33): Xaa is C or S

SEQ ID NO: 63329 - protein, 33 aa, Artificial Sequence
  Cyclic GFR-binding peptide
  MOD_RES (1)..(1): Xaa is C or S
XALHDELTNSLQEFIPKKRVIEYYLVTLPELQV

SEQ ID NO: 63330 - protein, 23 aa, Artificial Sequence
  Cyclic GFR-binding peptide
NSLQEIKPTKGIYYVIPLPELDQ

SEQ ID NO: 63331 - protein, 38 aa, Artificial Sequence
  Cyclic GFR-binding peptide
  MOD_RES (1)..(33)..(34): Xaa is C or S
XSRVVMNVTAKKIVNSSDDIKRVQVPRLKTPAXXPKPV

SEQ ID NO: 63332 - protein, 26 aa, Artificial Sequence
  Cyclic GFR-binding peptide
VIMSMEGIIKPTKGIMIQITINSLDQ

SEQ ID NO: 63333 - protein, 31 aa, Artificial Sequence; identical to SEQ ID NO: 23031
  Cyclic GFR-binding peptide
  MOD_RES (28)..(28): Xaa is C or S

SEQ ID NO: 63334 - protein, 21 aa, Artificial Sequence
  Cyclic GFR-binding peptide
SMEGIVKPTRGVMIQITINSL

SEQ ID NO: 63335 - protein, 34 aa, Artificial Sequence; identical to SEQ ID NO: 13645
  Cyclic GFR-binding peptide
  MOD_RES (2)..(4): Xaa is C or S

SEQ ID NO: 63336 - protein, 32 aa, Artificial Sequence
  Cyclic GFR-binding peptide
  MOD_RES (2)..(2): Xaa is C or S
GXARVVMNVTAKKIVNSSDDIKRVQVPRLQTP

SEQ ID NO: 63337 - protein, 26 aa, Artificial Sequence
  Cyclic GFR-binding peptide
SKVIMSMEGIIKPTKGIMIQITINSL

SEQ ID NO: 63338 - protein, 37 aa, Artificial Sequence
  Cyclic GFR-binding peptide
  MOD_RES (1)..(1): Xaa is C or S
XELHEELRNSLQELKPKKRVYEYYVVPLPEHHVRSPQ

SEQ ID NO: 63339 - protein, 38 aa, Artificial Sequence
  Cyclic GFR-binding peptide
  MOD_RES (2)..(4): Xaa is C or S
EXKXALHDELTNSLQEFIPKKRVIEYYLVTLPELQVQT

SEQ ID NO: 63340 - protein, 34 aa, Artificial Sequence
  Cyclic GFR-binding peptide
  MOD_RES (31)..(31): Xaa is C or S
RNSLQELKPKKRVYEYYLVTLPEHHVRSPQXKVS

SEQ ID NO: 63341 - protein, 29 aa, Artificial Sequence
  Cyclic GFR-binding peptide
  MOD_RES (29)..(29): Xaa is C or S
VMNSMEGIIVNSSDDMIQVTINSLQTPAX

SEQ ID NO: 63342 - protein, 31 aa, Artificial Sequence; identical to SEQ ID NO: 13658
  Cyclic GFR-binding peptide
  MOD_RES (27)..(28): Xaa is C or S

SEQ ID NO: 63343 - protein, 31 aa, Artificial Sequence; identical to SEQ ID NO: 23041
  Cyclic GFR-binding peptide
  MOD_RES (31)..(31): Xaa is C or S

SEQ ID NO: 63344 - protein, 28 aa, Artificial Sequence
  Cyclic GFR-binding peptide
SRVVMNVQVEKIVNSSDDVKAVKVSRLK

SEQ ID NO: 63345 - protein, 37 aa, Artificial Sequence
  Cyclic GFR-binding peptide
  MOD_RES (1)..(3): Xaa is C or S
XAXELHEELRNSLQELKPKKRVYEYYVVPLPEHHVRS

SEQ ID NO: 63346 - protein, 29 aa, Artificial Sequence
  Cyclic GFR-binding peptide
RVVMNNSLQEIVNSSDDYYLVTLPELQTP

SEQ ID NO: 63347 - protein, 36 aa, Artificial Sequence
  Cyclic GFR-binding peptide
  MOD_RES (1)..(33)..(34): Xaa is C or S
XGEVVMEVTAKKVVKDYEDIKRMQVPRLETPVXXAK

SEQ ID NO: 63348 - protein, 29 aa, Artificial Sequence
  Cyclic GFR-binding peptide
HEELRNSLQELKPKKRVYEYYLVTLPEHH

SEQ ID NO: 63349 - protein, 23 aa, Artificial Sequence
  Cyclic GFR-binding peptide
VQVEKVKPTRGVVKAIKVSRLDQ

SEQ ID NO: 63350 - protein, 29 aa, Artificial Sequence
  Cyclic GFR-binding peptide
  MOD_RES (29)..(29): Xaa is C or S
VMDSMEGIVVKENEDMIQMTINSLETPVX

SEQ ID NO: 63351 - protein, 40 aa, Artificial Sequence
  Cyclic GFR-binding peptide
  MOD_RES (2)..(4)..(36)..(37): Xaa is C or S
RXGXGEVVMESMEGIVVKDYEDMIQMTINSLETPVXXAKP

SEQ ID NO: 63352 - protein, 34 aa, Artificial Sequence; identical to SEQ ID NO: 23055
  Cyclic GFR-binding peptide
  MOD_RES (2)..(2): Xaa is C or S

SEQ ID NO: 63353 - protein, 29 aa, Artificial Sequence
  Cyclic GFR-binding peptide
GEVVMESMEGIVVKDYEDMIQMTINSLET

SEQ ID NO: 63354 - protein, 32 aa, Artificial Sequence
  Cyclic GFR-binding peptide
  MOD_RES (30)..(31): Xaa is C or S
VVMEVQVEKVVKDYEDVKAMKVSRLETPVXXA

SEQ ID NO: 63355 - protein, 36 aa, Artificial Sequence
  Cyclic GFR-binding peptide
  MOD_RES (33)..(33): Xaa is C or S
ELTNSLQEFIPKKRVIEYYLVTLPELQVQTPRXQVN

SEQ ID NO: 63356 - protein, 32 aa, Artificial Sequence
  Cyclic GFR-binding peptide
  MOD_RES (1)..(3): Xaa is C or S
XGXGEVVMEVQVEKVVKDYEDVKAMKVSRLET

SEQ ID NO: 63357 - protein, 28 aa, Artificial Sequence
  Cyclic GFR-binding peptide
  MOD_RES (28)..(28): Xaa is C or S
MDVTAKKVVKENEDIKRMQVPRLETPVX

SEQ ID NO: 63358 - protein, 26 aa, Artificial Sequence
  Cyclic GFR-binding peptide
EVTAKKVVKDYEDIKRMQVPRLETPV

SEQ ID NO: 63359 - protein, 41 aa, Artificial Sequence
  Cyclic GFR-binding peptide
  MOD_RES (2)..(4)..(36): Xaa is C or S
HXGXSRVVMNVQVEKIVNSSDDVKAVKVSRLKTPAXTPKTV

SEQ ID NO: 63360 - protein, 36 aa, Artificial Sequence; identical to SEQ ID NO: 48103
  Cyclic GFR-binding peptide
  MOD_RES (1)..(3)..(34)..(35): Xaa is C or S

SEQ ID NO: 63361 - protein, 36 aa, Artificial Sequence
  Cyclic GFR-binding peptide
  MOD_RES (1)..(3): Xaa is C or S
XKXALHDELTNSLQEFIPKKRVIEYYLVTLPELQVQ

SEQ ID NO: 63362 - protein, 23 aa, Artificial Sequence
  Cyclic GFR-binding peptide
MDNSLQEVVKENEDYYLMTLPEL

SEQ ID NO: 63363 - protein, 33 aa, Artificial Sequence; identical to SEQ ID NO: 13689
  Cyclic GFR-binding peptide
  MOD_RES (32)..(33): Xaa is C or S

SEQ ID NO: 63364 - protein, 25 aa, Artificial Sequence
  Cyclic GFR-binding peptide
MNNSLQEIVNSSDDYYVVPLPELKT

SEQ ID NO: 63365 - protein, 34 aa, Artificial Sequence; identical to SEQ ID NO: 13693
  Cyclic GFR-binding peptide
  MOD_RES (30)..(31): Xaa is C or S

SEQ ID NO: 63366 - protein, 29 aa, Artificial Sequence
  Cyclic GFR-binding peptide
  MOD_RES (27)..(28): Xaa is C or S
MNSLQEVKPKRGVYYLITLPELAQPVXXP

SEQ ID NO: 63367 - protein, 33 aa, Artificial Sequence; identical to SEQ ID NO: 13705
  Cyclic GFR-binding peptide
  MOD_RES (31)..(31): Xaa is C or S

SEQ ID NO: 63368 - protein, 20 aa, Artificial Sequence
  Cyclic GFR-binding peptide
VTAKKVVKDYEDIKRMQVPR

SEQ ID NO: 63369 - protein, 37 aa, Artificial Sequence
  Cyclic GFR-binding peptide
  MOD_RES (31)..(31): Xaa is C or S
RVVMNVQVEKIVNSSDDVKAVKVSRLKTPAXTPKTVH

SEQ ID NO: 63370 - protein, 37 aa, Artificial Sequence
  Cyclic GFR-binding peptide
  MOD_RES (1)..(1): Xaa is C or S
XALHDELTNSLQEFIPKKRVIEYYVVPLPELQVQTPR

SEQ ID NO: 63371 - protein, 32 aa, Artificial Sequence
  Cyclic GFR-binding peptide
  MOD_RES (2)..(2): Xaa is C or S
GXSRVVMNVTAKKIVNSSDDIKRVQVPRLKTP

SEQ ID NO: 63372 - protein, 28 aa, Artificial Sequence
  Cyclic GFR-binding peptide
VMEVQVEKVVKDYEDVKAMKVSRLETPV

SEQ ID NO: 63373 - protein, 32 aa, Artificial Sequence; identical to SEQ ID NO: 13714
  Cyclic GFR-binding peptide
  MOD_RES (2)..(4): Xaa is C or S

SEQ ID NO: 63374 - protein, 26 aa, Artificial Sequence
  Cyclic GFR-binding peptide
EVVMESMEGIVVKDYEDMIQMTINSL

SEQ ID NO: 63375 - protein, 32 aa, Artificial Sequence
  Cyclic GFR-binding peptide
  MOD_RES (1)..(3): Xaa is C or S
XKXSRVIMVTAKKVKPKRGVIKRIQVPRLAQP

SEQ ID NO: 63376 - protein, 31 aa, Artificial Sequence; identical to SEQ ID NO: 13724
  Cyclic GFR-binding peptide
  MOD_RES (28)..(29): Xaa is C or S

SEQ ID NO: 63377 - protein, 27 aa, Artificial Sequence
  Cyclic GFR-binding peptide
  MOD_RES (26)..(27): Xaa is C or S
VTAKKVVKENEDIKRMQVPRLETPVXX

SEQ ID NO: 63378 - protein, 34 aa, Artificial Sequence
  Cyclic GFR-binding peptide
  MOD_RES (1)..(32)..(33): Xaa is C or S
XSRVIMSMEGIVKPKRGVMIQITINSLAQPVXXP

SEQ ID NO: 63379 - protein, 35 aa, Artificial Sequence
  Cyclic GFR-binding peptide
  MOD_RES (29)..(30): Xaa is C or S
VIMSMEGIVKPKRGVMIQITINSLAQPVXXPAASA

SEQ ID NO: 63380 - protein, 30 aa, Artificial Sequence; identical to SEQ ID NO: 13728
  Cyclic GFR-binding peptide

SEQ ID NO: 63381 - protein, 29 aa, Artificial Sequence
  Cyclic GFR-binding peptide
  MOD_RES (26)..(27): Xaa is C or S
VQVEKVVKENEDVKAMKVSRLETPVXXAK

SEQ ID NO: 63382 - protein, 29 aa, Artificial Sequence
  Cyclic GFR-binding peptide
LFVTAKKHQGQHPKIRIKRMQVPREETPV

SEQ ID NO: 63383 - protein, 28 aa, Artificial Sequence
  Cyclic GFR-binding peptide
  MOD_RES (26)..(26): Xaa is C or S
SMEGIIVNSSDDMIQVTINSLKTPAXTP

SEQ ID NO: 63384 - protein, 29 aa, Artificial Sequence
  Cyclic GFR-binding peptide
  MOD_RES (29)..(29): Xaa is C or S
VIMSMEGIIKPTKGIMIQITINSLDQSVX

SEQ ID NO: 63385 - protein, 27 aa, Artificial Sequence
  Cyclic GFR-binding peptide
VMNNSLQEIVNSSDDYYLVTLPELKTP

SEQ ID NO: 63386 - protein, 28 aa, Artificial Sequence
  Cyclic GFR-binding peptide
  MOD_RES (27)..(28): Xaa is C or S
MNSLQEVKPKRGVYYLITLPELAQPVXX

SEQ ID NO: 63387 - protein, 32 aa, Artificial Sequence; identical to SEQ ID NO: 13737
  Cyclic GFR-binding peptide
  MOD_RES (30)..(31): Xaa is C or S

SEQ ID NO: 63388 - protein, 29 aa, Artificial Sequence
  Cyclic GFR-binding peptide
HEELRNSLQELKPKKRVYEYYVVPLPEHH

SEQ ID NO: 63389 - protein, 28 aa, Artificial Sequence
  Cyclic GFR-binding peptide
EVVMENSLQEVVKDYEDYYLMTLPELET

SEQ ID NO: 63390 - protein, 31 aa, Artificial Sequence; identical to SEQ ID NO: 23100
  Cyclic GFR-binding peptide
  MOD_RES (29)..(29): Xaa is C or S

SEQ ID NO: 63391 - protein, 32 aa, Artificial Sequence
  Cyclic GFR-binding peptide
  MOD_RES (28)..(29): Xaa is C or S
MNVTAKKIVNSSDDIKRVQVPRLQTPAXXPKP

SEQ ID NO: 63392 - protein, 33 aa, Artificial Sequence
  Cyclic GFR-binding peptide
  MOD_RES (32)..(33): Xaa is C or S
ARVVMNVTAKKIVNSSDDIKRVQVPRLQTPAXX

SEQ ID NO: 63393 - protein, 33 aa, Artificial Sequence; identical to SEQ ID NO: 23102
  Cyclic GFR-binding peptide
  MOD_RES (31)..(31): Xaa is C or S

SEQ ID NO: 63394 - protein, 35 aa, Artificial Sequence
  Cyclic GFR-binding peptide
  MOD_RES (1)..(33)..(34): Xaa is C or S
XARVVMNVTAKKIVNSSDDIKRVQVPRLQTPAXXP

SEQ ID NO: 63395 - protein, 33 aa, Artificial Sequence
  Cyclic GFR-binding peptide
  MOD_RES (27)..(27): Xaa is C or S
NSMEGIIVNSSDDMIQVTINSLKTPAXTPKTVH

SEQ ID NO: 63396 - protein, 23 aa, Artificial Sequence
  Cyclic GFR-binding peptide
VMNNSLQEIVNSSDDYYVVPLPE

SEQ ID NO: 63397 - protein, 33 aa, Artificial Sequence; identical to SEQ ID NO: 13758
  Cyclic GFR-binding peptide
  MOD_RES (29)..(30): Xaa is C or S

SEQ ID NO: 63398 - protein, 36 aa, Artificial Sequence; identical to SEQ ID NO: 23107
  Cyclic GFR-binding peptide
  MOD_RES (2)..(4): Xaa is C or S

SEQ ID NO: 63399 - protein, 22 aa, Artificial Sequence
  Cyclic GFR-binding peptide
MESMEGIVVKDYEDMIQMTINS

SEQ ID NO: 63400 - protein, 29 aa, Artificial Sequence
  Cyclic GFR-binding peptide
  MOD_RES (1)..(3): Xaa is C or S
XKXSRVIMNSLQEVKPKRGVYYLITLPEL

SEQ ID NO: 63401 - protein, 35 aa, Artificial Sequence
  Cyclic GFR-binding peptide
  MOD_RES (1)..(33)..(34): Xaa is C or S
XGEVVMDVTAKKVVKENEDIKRMQVPRLETPVXXA

SEQ ID NO: 63402 - protein, 27 aa, Artificial Sequence
  Cyclic GFR-binding peptide
DELTSMEGIFIPKKRVIEMIQVTINSL

SEQ ID NO: 63403 - protein, 28 aa, Artificial Sequence
  Cyclic GFR-binding peptide
HEELRVTAKKLKPKKRVYEIKRVQVPRH

SEQ ID NO: 63404 - protein, 33 aa, Artificial Sequence; identical to SEQ ID NO: 48165
  Cyclic GFR-binding peptide
  MOD_RES (2)..(33): Xaa is C or S

SEQ ID NO: 63405 - protein, 30 aa, Artificial Sequence
  Cyclic GFR-binding peptide
  MOD_RES (1)..(3): Xaa is C or S
XGXGEVVMDVQVEKVVKENEDVKAMKVSRL

SEQ ID NO: 63406 - protein, 32 aa, Artificial Sequence; identical to SEQ ID NO: 13777
  Cyclic GFR-binding peptide
  MOD_RES (27)..(28): Xaa is C or S

SEQ ID NO: 63407 - protein, 28 aa, Artificial Sequence
  Cyclic GFR-binding peptide
  MOD_RES (26)..(27): Xaa is C or S
NSLQEVVKENEDYYVMPLPELETPVXXA

SEQ ID NO: 63408 - protein, 33 aa, Artificial Sequence
  Cyclic GFR-binding peptide
  MOD_RES (2)..(4): Xaa is C or S
SXKXSKVVMSMEGIVKPTRGVMIQITINSLDQP

SEQ ID NO: 63409 - protein, 24 aa, Artificial Sequence
  Cyclic GFR-binding peptide
RVTAKKLKPKKRVYEIKRVQVPRH

SEQ ID NO: 63410 - protein, 26 aa, Artificial Sequence
  Cyclic GFR-binding peptide
GEVVMEVTAKKVVKDYEDIKRMQVPR

SEQ ID NO: 63411 - protein, 37 aa, Artificial Sequence
  Cyclic GFR-binding peptide
  MOD_RES (35)..(35): Xaa is C or S
HDELTNSLQEFIPKKRVIEYYLVTLPELQVQTPRXQV

SEQ ID NO: 63412 - protein, 35 aa, Artificial Sequence; identical to SEQ ID NO: 23130
  Cyclic GFR-binding peptide
  MOD_RES (34)..(34): Xaa is C or S

SEQ ID NO: 63413 - protein, 35 aa, Artificial Sequence; identical to SEQ ID NO: 23133
  Cyclic GFR-binding peptide
  MOD_RES (1)..(1): Xaa is C or S

SEQ ID NO: 63414 - protein, 40 aa, Artificial Sequence
  Cyclic GFR-binding peptide
  MOD_RES (37)..(37): Xaa is C or S
ALHDELTNSLQEFIPKKRVIEYYLVTLPELQVQTPRXQVN

SEQ ID NO: 63415 - protein, 33 aa, Artificial Sequence
  Cyclic GFR-binding peptide
  MOD_RES (30)..(31): Xaa is C or S
KVVMSMEGIVKPTRGVMIQITINSLDQPVXXPS

SEQ ID NO: 63416 - protein, 34 aa, Artificial Sequence; identical to SEQ ID NO: 23142
  Cyclic GFR-binding peptide
  MOD_RES (30)..(30): Xaa is C or S

SEQ ID NO: 63417 - protein, 28 aa, Artificial Sequence
  Cyclic GFR-binding peptide
VVMEVQVEKVVKDYEDVKAMKVSRLETP

SEQ ID NO: 63418 - protein, 26 aa, Artificial Sequence
  Cyclic GFR-binding peptide
VVMENSLQEVVKDYEDYYLMTLPELE

SEQ ID NO: 63419 - protein, 26 aa, Artificial Sequence
  Cyclic GFR-binding peptide
RSMEGILKPKKRVYEMIQVTINSHHV

SEQ ID NO: 63420 - protein, 33 aa, Artificial Sequence
  Cyclic GFR-binding peptide
  MOD_RES (1)..(32)..(33): Xaa is C or S
XSKVVMVQVEKVKPTRGVVKAIKVSRLDQPVXX

SEQ ID NO: 63421 - protein, 35 aa, Artificial Sequence; identical to SEQ ID NO: 13804
  Cyclic GFR-binding peptide
  MOD_RES (1)..(32)..(33): Xaa is C or S

SEQ ID NO: 63422 - protein, 38 aa, Artificial Sequence
  Cyclic GFR-binding peptide
  MOD_RES (2)..(34)..(35): Xaa is C or S
GXGEVVMDVQVEKVVKENEDVKAMKVSRLETPVXXAKP

SEQ ID NO: 63423 - protein, 34 aa, Artificial Sequence; identical to SEQ ID NO: 13811
  Cyclic GFR-binding peptide
  MOD_RES (2)..(34): Xaa is C or S

SEQ ID NO: 63424 - protein, 32 aa, Artificial Sequence
  Cyclic GFR-binding peptide
  MOD_RES (2)..(2): Xaa is C or S
KXSRVIMVTAKKVKPKRGVIKRIQVPRLAQPV

SEQ ID NO: 63425 - protein, 33 aa, Artificial Sequence
  Cyclic GFR-binding peptide
  MOD_RES (31)..(31): Xaa is C or S
RNSLQELKPKKRVYEYYLVTLPEHHVRSPQXKV

SEQ ID NO: 63426 - protein, 36 aa, Artificial Sequence; identical to SEQ ID NO: 13813
  Cyclic GFR-binding peptide
  MOD_RES (1)..(3)..(35)..(36): Xaa is C or S

SEQ ID NO: 63427 - protein, 33 aa, Artificial Sequence
  Cyclic GFR-binding peptide
  MOD_RES (31)..(32): Xaa is C or S
SRVIMVTAKKVKPKRGVIKRIQVPRLAQPVXXP

SEQ ID NO: 63428 - protein, 24 aa, Artificial Sequence
  Cyclic GFR-binding peptide
RNSLQELKPKKRVYEYYLVTLPEH

SEQ ID NO: 63429 - protein, 27 aa, Artificial Sequence
  Cyclic GFR-binding peptide
VMNVTAKKIVNSSDDIKRVQVPRLKTP

SEQ ID NO: 63430 - protein, 30 aa, Artificial Sequence
  Cyclic GFR-binding peptide
EVVMDSMEGIVVKENEDMIQMTINSLETPV

SEQ ID NO: 63431 - protein, 33 aa, Artificial Sequence
  Cyclic GFR-binding peptide
EELRNSLQELKPKKRVYEYYVVPLPEHHVRSPQ

SEQ ID NO: 63432 - protein, 33 aa, Artificial Sequence
  Cyclic GFR-binding peptide
  MOD_RES (29)..(30): Xaa is C or S
VMNVTAKKIVNSSDDIKRVQVPRLKTPAXXPKP

SEQ ID NO: 63433 - protein, 26 aa, Artificial Sequence
  Cyclic GFR-binding peptide
NVTAKKIVNSSDDIKRVQVPRLQTPA

SEQ ID NO: 63434 - protein, 30 aa, Artificial Sequence; identical to SEQ ID NO: 13822
  Cyclic GFR-binding peptide
  MOD_RES (30)..(30): Xaa is C or S

SEQ ID NO: 63435 - protein, 26 aa, Artificial Sequence
  Cyclic GFR-binding peptide
ARVVMNNSLQEIVNSSDDYYLVTLPE

SEQ ID NO: 63436 - protein, 36 aa, Artificial Sequence; identical to SEQ ID NO: 13824
  Cyclic GFR-binding peptide
  MOD_RES (30)..(31): Xaa is C or S

SEQ ID NO: 63437 - protein, 32 aa, Artificial Sequence; identical to SEQ ID NO: 13825
  Cyclic GFR-binding peptide
  MOD_RES (30)..(31): Xaa is C or S

SEQ ID NO: 63438 - protein, 28 aa, Artificial Sequence
  Cyclic GFR-binding peptide
LHDELTSMEGIFIPKKRVIEMIQVTINS

SEQ ID NO: 63439 - protein, 42 aa, Artificial Sequence
  Cyclic GFR-binding peptide
  MOD_RES (1)..(3)..(40): Xaa is C or S
XAXELHEELRNSLQELKPKKRVYEYYLVTLPEHHVRSPQXKV

SEQ ID NO: 63440 - protein, 36 aa, Artificial Sequence
  Cyclic GFR-binding peptide
  MOD_RES (32)..(33): Xaa is C or S
GEVVMDVQVEKVVKENEDVKAMKVSRLETPVXXAKP

SEQ ID NO: 63441 - protein, 26 aa, Artificial Sequence
  Cyclic GFR-binding peptide
RVTAKKLKPKKRVYEIKRVQVPRHHV

SEQ ID NO: 63442 - protein, 27 aa, Artificial Sequence
  Cyclic GFR-binding peptide
  MOD_RES (26)..(27): Xaa is C or S
NSLQEVKPTRGVYYLITLPELDQPVXX

SEQ ID NO: 63443 - protein, 31 aa, Artificial Sequence
  Cyclic GFR-binding peptide
  MOD_RES (30)..(30): Xaa is C or S
VVMNVTAKKIVNSSDDIKRVQVPRLKTPAXT

SEQ ID NO: 63444 - protein, 40 aa, Artificial Sequence
  Cyclic GFR-binding peptide
  MOD_RES (34)..(34): Xaa is C or S
KNHQLFNSLQEHQGQHPKIRYYVMPLPEEETPVXELGEDN

SEQ ID NO: 63445 - protein, 40 aa, Artificial Sequence; identical to SEQ ID NO: 23160
  Cyclic GFR-binding peptide
  MOD_RES (2)..(4): Xaa is C or S

SEQ ID NO: 63446 - protein, 33 aa, Artificial Sequence
  Cyclic GFR-binding peptide
  MOD_RES (2)..(2): Xaa is C or S
GXARVVMNSMEGIIVNSSDDMIQVTINSLQTPA

SEQ ID NO: 63447 - protein, 35 aa, Artificial Sequence; identical to SEQ ID NO: 23162
  Cyclic GFR-binding peptide
  MOD_RES (33)..(33): Xaa is C or S

SEQ ID NO: 63448 - protein, 33 aa, Artificial Sequence; identical to SEQ ID NO: 23164
  Cyclic GFR-binding peptide

SEQ ID NO: 63449 - protein, 27 aa, Artificial Sequence
  Cyclic GFR-binding peptide
SRVIMNSLQEVKPKRGVYYLITLPELA

SEQ ID NO: 63450 - protein, 21 aa, Artificial Sequence
  Cyclic GFR-binding peptide
EVQVEKVVKDYEDVKAMKVSR

SEQ ID NO: 63451 - protein, 33 aa, Artificial Sequence
  Cyclic GFR-binding peptide
  MOD_RES (1)..(3): Xaa is C or S
XKXALHDELTNSLQEFIPKKRVIEYYLVTLPEL

SEQ ID NO: 63452 - protein, 32 aa, Artificial Sequence
  Cyclic GFR-binding peptide
  MOD_RES (28)..(28): Xaa is C or S
MNVTAKKIVNSSDDIKRVQVPRLKTPAXTPKT

SEQ ID NO: 63453 - protein, 31 aa, Artificial Sequence; identical to SEQ ID NO: 23176
  Cyclic GFR-binding peptide
  MOD_RES (1)..(1): Xaa is C or S

SEQ ID NO: 63454 - protein, 32 aa, Artificial Sequence
  Cyclic GFR-binding peptide
  MOD_RES (26)..(26): Xaa is C or S
VQVEKIVNSSDDVKAVKVSRLKTPAXTPKTVH

SEQ ID NO: 63455 - protein, 28 aa, Artificial Sequence
  Cyclic GFR-binding peptide
VVMNSLQEVKPTRGVYYLITLPELDQPV

SEQ ID NO: 63456 - protein, 31 aa, Artificial Sequence
  Cyclic GFR-binding peptide
  MOD_RES (26)..(27): Xaa is C or S
VTAKKIVNSSDDIKRVQVPRLQTPAXXPKPV

SEQ ID NO: 63457 - protein, 35 aa, Artificial Sequence
  Cyclic GFR-binding peptide
  MOD_RES (2)..(2): Xaa is C or S
EXKNHQLFNSLQEHQGQHPKIRYYLMTLPEEETPV

SEQ ID NO: 63458 - protein, 38 aa, Artificial Sequence; identical to SEQ ID NO: 13842
  Cyclic GFR-binding peptide
  MOD_RES (2)..(33)..(34): Xaa is C or S

SEQ ID NO: 63459 - protein, 26 aa, Artificial Sequence
  Cyclic GFR-binding peptide
  MOD_RES (1)..(1): Xaa is C or S
XSKVIMVQVEKIKPTKGIVKAIKVSR

SEQ ID NO: 63460 - protein, 24 aa, Artificial Sequence
  Cyclic GFR-binding peptide
LTNSLQEFIPKKRVIEYYLVTLPE

SEQ ID NO: 63461 - protein, 24 aa, Artificial Sequence
  Cyclic GFR-binding peptide
VMNSLQEVKPTRGVYYLITLPELD

SEQ ID NO: 63462 - protein, 21 aa, Artificial Sequence
  Cyclic GFR-binding peptide
VQVEKVVKENEDVKAMKVSRL

SEQ ID NO: 63463 - protein, 28 aa, Artificial Sequence
  Cyclic GFR-binding peptide
ARVVMNSMEGIIVNSSDDMIQVTINSLQ

SEQ ID NO: 63464 - protein, 30 aa, Artificial Sequence; identical to SEQ ID NO: 13849
  Cyclic GFR-binding peptide
  MOD_RES (27)..(28): Xaa is C or S

SEQ ID NO: 63465 - protein, 28 aa, Artificial Sequence
  Cyclic GFR-binding peptide
  MOD_RES (1)..(1): Xaa is C or S
XSKVVMSMEGIVKPTRGVMIQITINSLD

SEQ ID NO: 63466 - protein, 31 aa, Artificial Sequence
  Cyclic GFR-binding peptide
  MOD_RES (2)..(2): Xaa is C or S
KXALHDELTNSLQEFIPKKRVIEYYLVTLPE

SEQ ID NO: 63467 - protein, 33 aa, Artificial Sequence; identical to SEQ ID NO: 13851
  Cyclic GFR-binding peptide
  MOD_RES (29)..(30): Xaa is C or S

SEQ ID NO: 63468 - protein, 29 aa, Artificial Sequence
  Cyclic GFR-binding peptide
  MOD_RES (28)..(29): Xaa is C or S
IMNSLQEIKPTKGIYYLITLPELDQSVXX

SEQ ID NO: 63469 - protein, 29 aa, Artificial Sequence
  Cyclic GFR-binding peptide
GEVVMDNSLQEVVKENEDYYVMPLPELET

SEQ ID NO: 63470 - protein, 33 aa, Artificial Sequence
  Cyclic GFR-binding peptide
  MOD_RES (29)..(30): Xaa is C or S
VMDVTAKKVVKENEDIKRMQVPRLETPVXXAKP

SEQ ID NO: 63471 - protein, 38 aa, Artificial Sequence
  Cyclic GFR-binding peptide
  MOD_RES (2)..(34)..(35): Xaa is C or S
GXARVVMNVTAKKIVNSSDDIKRVQVPRLQTPAXXPKP

SEQ ID NO: 63472 - protein, 34 aa, Artificial Sequence
  Cyclic GFR-binding peptide
ALHDELTNSLQEFIPKKRVIEYYVVPLPELQVQT

SEQ ID NO: 63473 - protein, 37 aa, Artificial Sequence
  Cyclic GFR-binding peptide
  MOD_RES (2)..(4): Xaa is C or S
AXAXELHEELRNSLQELKPKKRVYEYYVVPLPEHHVR

SEQ ID NO: 63474 - protein, 38 aa, Artificial Sequence
  Cyclic GFR-binding peptide
  MOD_RES (34)..(34): Xaa is C or S
EELRNSLQELKPKKRVYEYYLVTLPEHHVRSPQXKVSS

SEQ ID NO: 63475 - protein, 28 aa, Artificial Sequence
  Cyclic GFR-binding peptide
EELRNSLQELKPKKRVYEYYLVTLPEHH

SEQ ID NO: 63476 - protein, 41 aa, Artificial Sequence; identical to SEQ ID NO: 13868
  Cyclic GFR-binding peptide
  MOD_RES (2)..(4)..(36)..(37): Xaa is C or S

SEQ ID NO: 63477 - protein, 35 aa, Artificial Sequence; identical to SEQ ID NO: 13871
  Cyclic GFR-binding peptide
  MOD_RES (30)..(31): Xaa is C or S

SEQ ID NO: 63478 - protein, 27 aa, Artificial Sequence
  Cyclic GFR-binding peptide
  MOD_RES (27)..(27): Xaa is C or S
NVTAKKIVNSSDDIKRVQVPRLQTPAX

SEQ ID NO: 63479 - protein, 39 aa, Artificial Sequence; identical to SEQ ID NO: 13873
  Cyclic GFR-binding peptide
  MOD_RES (2)..(34)..(35): Xaa is C or S

SEQ ID NO: 63480 - protein, 26 aa, Artificial Sequence
  Cyclic GFR-binding peptide
SRVVMNNSLQEIVNSSDDYYLVTLPE

SEQ ID NO: 63481 - protein, 27 aa, Artificial Sequence
  Cyclic GFR-binding peptide
IMSMEGIIKPTKGIMIQITINSLDQSV

SEQ ID NO: 63482 - protein, 34 aa, Artificial Sequence; identical to SEQ ID NO: 13878
  Cyclic GFR-binding peptide
  MOD_RES (29)..(30): Xaa is C or S

SEQ ID NO: 63483 - protein, 39 aa, Artificial Sequence; identical to SEQ ID NO: 23190
  Cyclic GFR-binding peptide
  MOD_RES (2)..(39): Xaa is C or S

SEQ ID NO: 63484 - protein, 27 aa, Artificial Sequence
  Cyclic GFR-binding peptide
MEVQVEKVVKDYEDVKAMKVSRLETPV

SEQ ID NO: 63485 - protein, 25 aa, Artificial Sequence
  Cyclic GFR-binding peptide
VTAKKVVKDYEDIKRMQVPRLETPV

SEQ ID NO: 63486 - protein, 26 aa, Artificial Sequence
  Cyclic GFR-binding peptide
  MOD_RES (26)..(26): Xaa is C or S
VQVEKIVNSSDDVKAVKVSRLQTPAX

SEQ ID NO: 63487 - protein, 26 aa, Artificial Sequence
  Cyclic GFR-binding peptide
LRNSLQELKPKKRVYEYYLVTLPEHH

SEQ ID NO: 63488 - protein, 29 aa, Artificial Sequence
  Cyclic GFR-binding peptide
SMEGIFIPKKRVIEMIQVTINSLQVQTPR

SEQ ID NO: 63489 - protein, 31 aa, Artificial Sequence; identical to SEQ ID NO: 13886
  Cyclic GFR-binding peptide
  MOD_RES (26)..(27): Xaa is C or S

SEQ ID NO: 63490 - protein, 38 aa, Artificial Sequence
  Cyclic GFR-binding peptide
  MOD_RES (1)..(3)..(35)..(36): Xaa is C or S
XGXSRVVMNSMEGIIVNSSDDMIQVTINSLKTPAXXPK

SEQ ID NO: 63491 - protein, 25 aa, Artificial Sequence
  Cyclic GFR-binding peptide
NSLQEIVNSSDDYYLVTLPELQTPA

SEQ ID NO: 63492 - protein, 25 aa, Artificial Sequence
  Cyclic GFR-binding peptide
VMENSLQEVVKDYEDYYLMTLPELE

SEQ ID NO: 63493 - protein, 31 aa, Artificial Sequence
  Cyclic GFR-binding peptide
  MOD_RES (29)..(29): Xaa is C or S
FNSLQEHQGQHPKIRYYLMTLPEEETPVXEL

SEQ ID NO: 63494 - protein, 33 aa, Artificial Sequence; identical to SEQ ID NO: 13891
  Cyclic GFR-binding peptide
  MOD_RES (27)..(27): Xaa is C or S

SEQ ID NO: 63495 - protein, 27 aa, Artificial Sequence
  Cyclic GFR-binding peptide
VMNSLQEVKPTRGVYYLITLPELDQPV

SEQ ID NO: 63496 - protein, 29 aa, Artificial Sequence
  Cyclic GFR-binding peptide
RVVMNVQVEKIVNSSDDVKAVKVSRLQTP

SEQ ID NO: 63497 - protein, 37 aa, Artificial Sequence
  Cyclic GFR-binding peptide
  MOD_RES (34)..(34): Xaa is C or S
KNHQLFNSLQEHQGQHPKIRYYLMTLPEEETPVXELG

SEQ ID NO: 63498 - protein, 27 aa, Artificial Sequence
  Cyclic GFR-binding peptide
HQLFVTAKKHQGQHPKIRIKRMQVPRE

SEQ ID NO: 63499 - protein, 36 aa, Artificial Sequence; identical to SEQ ID NO: 23207
  Cyclic GFR-binding peptide
  MOD_RES (30)..(30): Xaa is C or S

SEQ ID NO: 63500 - protein, 42 aa, Artificial Sequence; identical to SEQ ID NO: 23211
  Cyclic GFR-binding peptide
  MOD_RES (1)..(3)..(40): Xaa is C or S

SEQ ID NO: 63501 - protein, 24 aa, Artificial Sequence
  Cyclic GFR-binding peptide
VTAKKVVKENEDIKRMQVPRLETP

SEQ ID NO: 63502 - protein, 33 aa, Artificial Sequence
  Cyclic GFR-binding peptide
  MOD_RES (2)..(4): Xaa is C or S
RXGXGEVVMEVQVEKVVKDYEDVKAMKVSRLET

SEQ ID NO: 63503 - protein, 30 aa, Artificial Sequence; identical to SEQ ID NO: 13908
  Cyclic GFR-binding peptide
  MOD_RES (28)..(29): Xaa is C or S

SEQ ID NO: 63504 - protein, 37 aa, Artificial Sequence; identical to SEQ ID NO: 23216
  Cyclic GFR-binding peptide
  MOD_RES (2)..(4): Xaa is C or S

SEQ ID NO: 63505 - protein, 30 aa, Artificial Sequence
  Cyclic GFR-binding peptide
SRVIMSMEGIVKPKRGVMIQITINSLAQPV

SEQ ID NO: 63506 - protein, 25 aa, Artificial Sequence
  Cyclic GFR-binding peptide
VMNNSLQEIVNSSDDYYLVTLPELQ

SEQ ID NO: 63507 - protein, 37 aa, Artificial Sequence
  Cyclic GFR-binding peptide
  MOD_RES (32)..(33): Xaa is C or S
GEVVMDSMEGIVVKENEDMIQMTINSLETPVXXAKPI

SEQ ID NO: 63508 - protein, 30 aa, Artificial Sequence
  Cyclic GFR-binding peptide
KNHQLFNSLQEHQGQHPKIRYYVMPLPEEE

SEQ ID NO: 63509 - protein, 29 aa, Artificial Sequence
  Cyclic GFR-binding peptide
  MOD_RES (29)..(29): Xaa is C or S
VMDVQVEKVVKENEDVKAMKVSRLETPVX

SEQ ID NO: 63510 - protein, 29 aa, Artificial Sequence
  Cyclic GFR-binding peptide
  MOD_RES (28)..(29): Xaa is C or S
MEVQVEKVVKDYEDVKAMKVSRLETPVXX

SEQ ID NO: 63511 - protein, 38 aa, Artificial Sequence
  Cyclic GFR-binding peptide
  MOD_RES (1)..(35): Xaa is C or S
XKNHQLFNSLQEHQGQHPKIRYYLMTLPEEETPVXELG

SEQ ID NO: 63512 - protein, 32 aa, Artificial Sequence
  Cyclic GFR-binding peptide
  MOD_RES (31)..(32): Xaa is C or S
SKVIMVQVEKIKPTKGIVKAIKVSRLDQSVXX

SEQ ID NO: 63513 - protein, 34 aa, Artificial Sequence; identical to SEQ ID NO: 23225
  Cyclic GFR-binding peptide
  MOD_RES (31)..(31): Xaa is C or S

SEQ ID NO: 63514 - protein, 34 aa, Artificial Sequence; identical to SEQ ID NO: 13928
  Cyclic GFR-binding peptide
  MOD_RES (1)..(32)..(33): Xaa is C or S

SEQ ID NO: 63515 - protein, 38 aa, Artificial Sequence
  Cyclic GFR-binding peptide
  MOD_RES (1)..(3): Xaa is C or S
XAXELHEELRNSLQELKPKKRVYEYYVVPLPEHHVRSP

SEQ ID NO: 63516 - protein, 37 aa, Artificial Sequence; identical to SEQ ID NO: 13933
  Cyclic GFR-binding peptide
  MOD_RES (31)..(32): Xaa is C or S

SEQ ID NO: 63517 - protein, 37 aa, Artificial Sequence; identical to SEQ ID NO: 13937
  Cyclic GFR-binding peptide
  MOD_RES (32)..(33): Xaa is C or S

SEQ ID NO: 63518 - protein, 33 aa, Artificial Sequence
  Cyclic GFR-binding peptide
  MOD_RES (1)..(33): Xaa is C or S
XSRVVMNVTAKKIVNSSDDIKRVQVPRLKTPAX

SEQ ID NO: 63519 - protein, 44 aa, Artificial Sequence; identical to SEQ ID NO: 23231
  Cyclic GFR-binding peptide
  MOD_RES (1)..(3)..(40): Xaa is C or S

SEQ ID NO: 63520 - protein, 22 aa, Artificial Sequence
  Cyclic GFR-binding peptide
NSLQEFIPKKRVIEYYVVPLPE

SEQ ID NO: 63521 - protein, 29 aa, Artificial Sequence
  Cyclic GFR-binding peptide
ELTNSLQEFIPKKRVIEYYLVTLPELQVQ

SEQ ID NO: 63522 - protein, 35 aa, Artificial Sequence
  Cyclic GFR-binding peptide
ELHEELRNSLQELKPKKRVYEYYLVTLPEHHVRSP

SEQ ID NO: 63523 - protein, 36 aa, Artificial Sequence; identical to SEQ ID NO: 48311
  Cyclic GFR-binding peptide
  MOD_RES (2)..(4)..(35)..(36): Xaa is C or S

SEQ ID NO: 63524 - protein, 29 aa, Artificial Sequence
  Cyclic GFR-binding peptide
  MOD_RES (26)..(27): Xaa is C or S
NSLQEVKPKRGVYYLITLPELAQPVXXPA

SEQ ID NO: 63525 - protein, 28 aa, Artificial Sequence
  Cyclic GFR-binding peptide
VVMEVTAKKVVKDYEDIKRMQVPRLETP

SEQ ID NO: 63526 - protein, 29 aa, Artificial Sequence
  Cyclic GFR-binding peptide
  MOD_RES (29)..(29): Xaa is C or S
VVMVTAKKVKPTRGVIKRIQVPRLDQPVX

SEQ ID NO: 63527 - protein, 37 aa, Artificial Sequence; identical to SEQ ID NO: 23240
  Cyclic GFR-binding peptide
  MOD_RES (35)..(35): Xaa is C or S

SEQ ID NO: 63528 - protein, 38 aa, Artificial Sequence
  Cyclic GFR-binding peptide
  MOD_RES (2)..(34)..(35): Xaa is C or S
GXSRVVMNVTAKKIVNSSDDIKRVQVPRLKTPAXXPKP

SEQ ID NO: 63529 - protein, 38 aa, Artificial Sequence
  Cyclic GFR-binding peptide
  MOD_RES (2)..(33)..(34): Xaa is C or S
KXSRVIMVTAKKVKPKRGVIKRIQVPRLAQPVXXPAAS

SEQ ID NO: 63530 - protein, 37 aa, Artificial Sequence; identical to SEQ ID NO: 13951
  Cyclic GFR-binding peptide
  MOD_RES (1)..(3)..(35)..(36): Xaa is C or S

SEQ ID NO: 63531 - protein, 26 aa, Artificial Sequence
  Cyclic GFR-binding peptide
MVQVEKIKPTKGIVKAIKVSRLDQSV

SEQ ID NO: 63532 - protein, 36 aa, Artificial Sequence
  Cyclic GFR-binding peptide
  MOD_RES (35)..(35): Xaa is C or S
HEELRNSLQELKPKKRVYEYYLVTLPEHHVRSPQXK

SEQ ID NO: 63533 - protein, 31 aa, Artificial Sequence
  Cyclic GFR-binding peptide
  MOD_RES (31)..(31): Xaa is C or S
TNSLQEFIPKKRVIEYYLVTLPELQVQTPRX

SEQ ID NO: 63534 - protein, 21 aa, Artificial Sequence
  Cyclic GFR-binding peptide
MSMEGIVKPTRGVMIQITINS

SEQ ID NO: 63535 - protein, 20 aa, Artificial Sequence
  Cyclic GFR-binding peptide
NSLQEIVNSSDDYYLVTLPE

SEQ ID NO: 63536 - protein, 23 aa, Artificial Sequence
  Cyclic GFR-binding peptide
ENSLQEVVKDYEDYYLMTLPELE

SEQ ID NO: 63537 - protein, 36 aa, Artificial Sequence
  Cyclic GFR-binding peptide
  MOD_RES (1)..(3)..(35)..(36): Xaa is C or S
XGXGEVVMESMEGIVVKDYEDMIQMTINSLETPVXX

SEQ ID NO: 63538 - protein, 20 aa, Artificial Sequence
  Cyclic GFR-binding peptide
SMEGIVKPKRGVMIQITINS

SEQ ID NO: 63539 - protein, 37 aa, Artificial Sequence
  Cyclic GFR-binding peptide
  MOD_RES (2)..(4)..(36)..(37): Xaa is C or S
HXGXARVVMNVQVEKIVNSSDDVKAVKVSRLQTPAXX

SEQ ID NO: 63540 - protein, 25 aa, Artificial Sequence
  Cyclic GFR-binding peptide
ELTNSLQEFIPKKRVIEYYVVPLPE

SEQ ID NO: 63541 - protein, 30 aa, Artificial Sequence
  Cyclic GFR-binding peptide
  MOD_RES (29)..(30): Xaa is C or S
VMEVTAKKVVKDYEDIKRMQVPRLETPVXX

SEQ ID NO: 63542 - protein, 28 aa, Artificial Sequence
  Cyclic GFR-binding peptide
  MOD_RES (1)..(1): Xaa is C or S
XSKVVMNSLQEVKPTRGVYYLITLPELD

SEQ ID NO: 63543 - protein, 22 aa, Artificial Sequence
  Cyclic GFR-binding peptide
VQVEKIKPTKGIVKAIKVSRLD

SEQ ID NO: 63544 - protein, 35 aa, Artificial Sequence
  Cyclic GFR-binding peptide
  MOD_RES (1)..(3): Xaa is C or S
XAXELHEELRNSLQELKPKKRVYEYYLVTLPEHHV

SEQ ID NO: 63545 - protein, 41 aa, Artificial Sequence
  Cyclic GFR-binding peptide
  MOD_RES (2)..(4)..(36)..(37): Xaa is C or S
HXGXSRVVMNSMEGIIVNSSDDMIQVTINSLKTPAXXPKPV

SEQ ID NO: 63546 - protein, 38 aa, Artificial Sequence; identical to SEQ ID NO: 23261
  Cyclic GFR-binding peptide
  MOD_RES (2)..(36): Xaa is C or S

SEQ ID NO: 63547 - protein, 35 aa, Artificial Sequence
  Cyclic GFR-binding peptide
  MOD_RES (1)..(33): Xaa is C or S
XSRVVMNVTAKKIVNSSDDIKRVQVPRLKTPAXTP

SEQ ID NO: 63548 - protein, 37 aa, Artificial Sequence
  Cyclic GFR-binding peptide
  MOD_RES (36)..(36): Xaa is C or S
LHDELTNSLQEFIPKKRVIEYYLVTLPELQVQTPRXQ

SEQ ID NO: 63549 - protein, 30 aa, Artificial Sequence
  Cyclic GFR-binding peptide
  MOD_RES (2)..(2): Xaa is C or S
KXSKVIMVQVEKIKPTKGIVKAIKVSRLDQ

SEQ ID NO: 63550 - protein, 39 aa, Artificial Sequence; identical to SEQ ID NO: 13981
  Cyclic GFR-binding peptide
  MOD_RES (2)..(4)..(36): Xaa is C or S

SEQ ID NO: 63551 - protein, 37 aa, Artificial Sequence
  Cyclic GFR-binding peptide
  MOD_RES (1)..(3)..(35)..(36): Xaa is C or S
XGXGEVVMESMEGIVVKDYEDMIQMTINSLETPVXXA

SEQ ID NO: 63552 - protein, 27 aa, Artificial Sequence
  Cyclic GFR-binding peptide
VMNVQVEKIVNSSDDVKAVKVSRLQTP

SEQ ID NO: 63553 - protein, 33 aa, Artificial Sequence
  Cyclic GFR-binding peptide
  MOD_RES (1)..(3): Xaa is C or S
XGXARVVMNVQVEKIVNSSDDVKAVKVSRLQTP

SEQ ID NO: 63554 - protein, 41 aa, Artificial Sequence; identical to SEQ ID NO: 13989
  Cyclic GFR-binding peptide
  MOD_RES (2)..(4)..(36): Xaa is C or S

SEQ ID NO: 63555 - protein, 39 aa, Artificial Sequence
  Cyclic GFR-binding peptide
  MOD_RES (2)..(4)..(36): Xaa is C or S
HXGXSRVVMNVTAKKIVNSSDDIKRVQVPRLKTPAXTPK

SEQ ID NO: 63556 - protein, 32 aa, Artificial Sequence
  Cyclic GFR-binding peptide
  MOD_RES (31)..(31): Xaa is C or S
RVVMNSMEGIIVNSSDDMIQVTINSLKTPAXT

SEQ ID NO: 63557 - protein, 22 aa, Artificial Sequence
  Cyclic GFR-binding peptide
MNSLQEIKPTKGIYYLITLPEL

SEQ ID NO: 63558 - protein, 43 aa, Artificial Sequence
  Cyclic GFR-binding peptide
  MOD_RES (1)..(3)..(37): Xaa is C or S
XEXKNHQLFNSLQEHQGQHPKIRYYLMTLPEEETPVXELGEDN

SEQ ID NO: 63559 - protein, 37 aa, Artificial Sequence; identical to SEQ ID NO: 23274
  Cyclic GFR-binding peptide
  MOD_RES (2)..(2): Xaa is C or S

SEQ ID NO: 63560 - protein, 24 aa, Artificial Sequence
  Cyclic GFR-binding peptide
NSLQEHQGQHPKIRYYLMTLPEEE

SEQ ID NO: 63561 - protein, 24 aa, Artificial Sequence
  Cyclic GFR-binding peptide
IMSMEGIIKPTKGIMIQITINSLD

SEQ ID NO: 63562 - protein, 39 aa, Artificial Sequence
  Cyclic GFR-binding peptide
  MOD_RES (2)..(4): Xaa is C or S
EXKXALHDELTNSLQEFIPKKRVIEYYLVTLPELQVQTP

SEQ ID NO: 63563 - protein, 31 aa, Artificial Sequence
  Cyclic GFR-binding peptide
  MOD_RES (28)..(29): Xaa is C or S
MDSMEGIVVKENEDMIQMTINSLETPVXXAK

SEQ ID NO: 63564 - protein, 37 aa, Artificial Sequence
  Cyclic GFR-binding peptide
  MOD_RES (1)..(3)..(35)..(36): Xaa is C or S
XGXGEVVMDSMEGIVVKENEDMIQMTINSLETPVXXA

SEQ ID NO: 63565 - protein, 41 aa, Artificial Sequence; identical to SEQ ID NO: 23285
  Cyclic GFR-binding peptide
  MOD_RES (1)..(38): Xaa is C or S

SEQ ID NO: 63566 - protein, 31 aa, Artificial Sequence
  Cyclic GFR-binding peptide
  MOD_RES (27)..(28): Xaa is C or S
MVQVEKVKPKRGVVKAIKVSRLAQPVXXPAA

SEQ ID NO: 63567 - protein, 33 aa, Artificial Sequence; identical to SEQ ID NO: 14006
  Cyclic GFR-binding peptide
  MOD_RES (29)..(29): Xaa is C or S

SEQ ID NO: 63568 - protein, 35 aa, Artificial Sequence
  Cyclic GFR-binding peptide
  MOD_RES (31)..(32): Xaa is C or S
SKVVMSMEGIVKPTRGVMIQITINSLDQPVXXPSA

SEQ ID NO: 63569 - protein, 27 aa, Artificial Sequence
  Cyclic GFR-binding peptide
MDNSLQEVVKENEDYYLMTLPELETPV

SEQ ID NO: 63570 - protein, 27 aa, Artificial Sequence
  Cyclic GFR-binding peptide
RVVMNVTAKKIVNSSDDIKRVQVPRLK

SEQ ID NO: 63571 - protein, 36 aa, Artificial Sequence; identical to SEQ ID NO: 14013
  Cyclic GFR-binding peptide
  MOD_RES (1)..(3)..(35)..(36): Xaa is C or S

SEQ ID NO: 63572 - protein, 34 aa, Artificial Sequence; identical to SEQ ID NO: 14014
  Cyclic GFR-binding peptide
  MOD_RES (2)..(34): Xaa is C or S

SEQ ID NO: 63573 - protein, 31 aa, Artificial Sequence
  Cyclic GFR-binding peptide
  MOD_RES (31)..(31): Xaa is C or S
SKVIMVQVEKIKPTKGIVKAIKVSRLDQSVX

SEQ ID NO: 63574 - protein, 29 aa, Artificial Sequence
  Cyclic GFR-binding peptide
  MOD_RES (29)..(29): Xaa is C or S
VVMNSLQEVKPTRGVYYLITLPELDQPVX

SEQ ID NO: 63575 - protein, 25 aa, Artificial Sequence
  Cyclic GFR-binding peptide
DSMEGIVVKENEDMIQMTINSLETP

SEQ ID NO: 63576 - protein, 27 aa, Artificial Sequence
  Cyclic GFR-binding peptide
LTNSLQEFIPKKRVIEYYLVTLPELQV

SEQ ID NO: 63577 - protein, 26 aa, Artificial Sequence
  Cyclic GFR-binding peptide
SKVIMNSLQEIKPTKGIYYVIPLPEL

SEQ ID NO: 63578 - protein, 24 aa, Artificial Sequence
  Cyclic GFR-binding peptide
VVMEVQVEKVVKDYEDVKAMKVSR

SEQ ID NO: 63579 - protein, 29 aa, Artificial Sequence
  Cyclic GFR-binding peptide
  MOD_RES (27)..(28): Xaa is C or S
MVTAKKVKPKRGVIKRIQVPRLAQPVXXP

SEQ ID NO: 63580 - protein, 38 aa, Artificial Sequence; identical to SEQ ID NO: 23301
  Cyclic GFR-binding peptide
  MOD_RES (32)..(32): Xaa is C or S

SEQ ID NO: 63581 - protein, 38 aa, Artificial Sequence
  Cyclic GFR-binding peptide
  MOD_RES (36)..(36): Xaa is C or S
LHEELRNSLQELKPKKRVYEYYVVPLPEHHVRSPQXKV

SEQ ID NO: 63582 - protein, 31 aa, Artificial Sequence
  Cyclic GFR-binding peptide
GEVVMDVTAKKVVKENEDIKRMQVPRLETPV

SEQ ID NO: 63583 - protein, 30 aa, Artificial Sequence; identical to SEQ ID NO: 14030
  Cyclic GFR-binding peptide
  MOD_RES (28)..(29): Xaa is C or S

SEQ ID NO: 63584 - protein, 27 aa, Artificial Sequence
  Cyclic GFR-binding peptide
  MOD_RES (26)..(27): Xaa is C or S
NSLQEVKPKRGVYYLITLPELAQPVXX

SEQ ID NO: 63585 - protein, 37 aa, Artificial Sequence
  Cyclic GFR-binding peptide
  MOD_RES (2)..(34)..(35): Xaa is C or S
GXGEVVMDVTAKKVVKENEDIKRMQVPRLETPVXXAK

SEQ ID NO: 63586 - protein, 41 aa, Artificial Sequence
  Cyclic GFR-binding peptide
  MOD_RES (2)..(4)..(36): Xaa is C or S
HXGXSRVVMNSMEGIIVNSSDDMIQVTINSLKTPAXTPKTV

SEQ ID NO: 63587 - protein, 33 aa, Artificial Sequence
  Cyclic GFR-binding peptide
  MOD_RES (2)..(4): Xaa is C or S
SXKXSKVIMVTAKKIKPTKGIIKRIQVPRLDQS

SEQ ID NO: 63588 - protein, 35 aa, Artificial Sequence
  Cyclic GFR-binding peptide
  MOD_RES (2)..(4): Xaa is C or S
RXGXGEVVMDSMEGIVVKENEDMIQMTINSLETPV

SEQ ID NO: 63589 - protein, 29 aa, Artificial Sequence
  Cyclic GFR-binding peptide
  MOD_RES (1)..(1): Xaa is C or S
XSRVVMNNSLQEIVNSSDDYYLVTLPELK

SEQ ID NO: 63590 - protein, 26 aa, Artificial Sequence
  Cyclic GFR-binding peptide
RNSLQELKPKKRVYEYYLVTLPEHHV

SEQ ID NO: 63591 - protein, 30 aa, Artificial Sequence
  Cyclic GFR-binding peptide
RVVMNVTAKKIVNSSDDIKRVQVPRLKTPA

SEQ ID NO: 63592 - protein, 36 aa, Artificial Sequence
  Cyclic GFR-binding peptide
  MOD_RES (1)..(33): Xaa is C or S
XSRVVMNSMEGIIVNSSDDMIQVTINSLKTPAXTPK

SEQ ID NO: 63593 - protein, 28 aa, Artificial Sequence
  Cyclic GFR-binding peptide
EELRVTAKKLKPKKRVYEIKRVQVPRHH

SEQ ID NO: 63594 - protein, 22 aa, Artificial Sequence
  Cyclic GFR-binding peptide
VQVEKIVNSSDDVKAVKVSRLQ

SEQ ID NO: 63595 - protein, 27 aa, Artificial Sequence
  Cyclic GFR-binding peptide
VMDVQVEKVVKENEDVKAMKVSRLETP

SEQ ID NO: 63596 - protein, 28 aa, Artificial Sequence
  Cyclic GFR-binding peptide
  MOD_RES (28)..(28): Xaa is C or S
IMSMEGIIKPTKGIMIQITINSLDQSVX

SEQ ID NO: 63597 - protein, 28 aa, Artificial Sequence
  Cyclic GFR-binding peptide
  MOD_RES (28)..(28): Xaa is C or S
VMNSLQEVKPTRGVYYLITLPELDQPVX

SEQ ID NO: 63598 - protein, 31 aa, Artificial Sequence
  Cyclic GFR-binding peptide
  MOD_RES (27)..(28): Xaa is C or S
EVQVEKVVKDYEDVKAMKVSRLETPVXXAKP

SEQ ID NO: 63599 - protein, 24 aa, Artificial Sequence
  Cyclic GFR-binding peptide
NNSLQEIVNSSDDYYLVTLPELQT

SEQ ID NO: 63600 - protein, 37 aa, Artificial Sequence
  Cyclic GFR-binding peptide
  MOD_RES (31)..(32): Xaa is C or S
SKVIMSMEGIIKPTKGIMIQITINSLDQSVXXPSASA

SEQ ID NO: 63601 - protein, 28 aa, Artificial Sequence
  Cyclic GFR-binding peptide
SRVVMNVTAKKIVNSSDDIKRVQVPRLK

SEQ ID NO: 63602 - protein, 23 aa, Artificial Sequence
  Cyclic GFR-binding peptide
RVTAKKLKPKKRVYEIKRVQVPR

SEQ ID NO: 63603 - protein, 26 aa, Artificial Sequence
  Cyclic GFR-binding peptide
  MOD_RES (26)..(26): Xaa is C or S
VQVEKVVKDYEDVKAMKVSRLETPVX

SEQ ID NO: 63604 - protein, 37 aa, Artificial Sequence
  Cyclic GFR-binding peptide
  MOD_RES (1)..(3)..(37): Xaa is C or S
XEXKNHQLFNSLQEHQGQHPKIRYYVMPLPEEETPVX

SEQ ID NO: 63605 - protein, 29 aa, Artificial Sequence
  Cyclic GFR-binding peptide
  MOD_RES (1)..(1): Xaa is C or S
XGEVVMDNSLQEVVKENEDYYVMPLPELE

SEQ ID NO: 63606 - protein, 27 aa, Artificial Sequence
  Cyclic GFR-binding peptide
GEVVMDNSLQEVVKENEDYYLMTLPEL

SEQ ID NO: 63607 - protein, 26 aa, Artificial Sequence
  Cyclic GFR-binding peptide
LFVQVEKHQGQHPKIRVKAMKVSREE

SEQ ID NO: 63608 - protein, 41 aa, Artificial Sequence
  Cyclic GFR-binding peptide
  MOD_RES (1)..(3)..(35): Xaa is C or S
XGXSRVVMNVTAKKIVNSSDDIKRVQVPRLKTPAXTPKTVH

SEQ ID NO: 63609 - protein, 36 aa, Artificial Sequence
  Cyclic GFR-binding peptide
  MOD_RES (31)..(32): Xaa is C or S
RVVMNVTAKKIVNSSDDIKRVQVPRLKTPAXXPKPV

SEQ ID NO: 63610 - protein, 26 aa, Artificial Sequence
  Cyclic GFR-binding peptide
VMVQVEKVKPTRGVVKAIKVSRLDQP

SEQ ID NO: 63611 - protein, 28 aa, Artificial Sequence
  Cyclic GFR-binding peptide
ELRNSLQELKPKKRVYEYYLVTLPEHHV

SEQ ID NO: 63612 - protein, 40 aa, Artificial Sequence
  Cyclic GFR-binding peptide
  MOD_RES (36)..(36): Xaa is C or S
LHDELTNSLQEFIPKKRVIEYYLVTLPELQVQTPRXQVNR

SEQ ID NO: 63613 - protein, 23 aa, Artificial Sequence
  Cyclic GFR-binding peptide
SMEGIVVKENEDMIQMTINSLET

SEQ ID NO: 63614 - protein, 35 aa, Artificial Sequence; identical to SEQ ID NO: 14075
  Cyclic GFR-binding peptide
  MOD_RES (29)..(30): Xaa is C or S

SEQ ID NO: 63615 - protein, 34 aa, Artificial Sequence; identical to SEQ ID NO: 48416
  Cyclic GFR-binding peptide
  MOD_RES (30)..(31): Xaa is C or S

SEQ ID NO: 63616 - protein, 33 aa, Artificial Sequence
  Cyclic GFR-binding peptide
  MOD_RES (30)..(30): Xaa is C or S
NSLQELKPKKRVYEYYVVPLPEHHVRSPQXKVS

SEQ ID NO: 63617 - protein, 37 aa, Artificial Sequence
  Cyclic GFR-binding peptide
  MOD_RES (1)..(3): Xaa is C or S
XAXELHEELRNSLQELKPKKRVYEYYLVTLPEHHVRS

SEQ ID NO: 63618 - protein, 34 aa, Artificial Sequence; identical to SEQ ID NO: 14084
  Cyclic GFR-binding peptide
  MOD_RES (1)..(32)..(33): Xaa is C or S

SEQ ID NO: 63619 - protein, 34 aa, Artificial Sequence
  Cyclic GFR-binding peptide
  MOD_RES (32)..(33): Xaa is C or S
SRVVMNSMEGIIVNSSDDMIQVTINSLKTPAXXP

SEQ ID NO: 63620 - protein, 32 aa, Artificial Sequence
  Cyclic GFR-binding peptide
  MOD_RES (32)..(32): Xaa is C or S
GEVVMDVTAKKVVKENEDIKRMQVPRLETPVX

SEQ ID NO: 63621 - protein, 34 aa, Artificial Sequence
  Cyclic GFR-binding peptide
  MOD_RES (32)..(33): Xaa is C or S
ARVVMNVTAKKIVNSSDDIKRVQVPRLQTPAXXP

SEQ ID NO: 63622 - protein, 28 aa, Artificial Sequence
  Cyclic GFR-binding peptide
LRNSLQELKPKKRVYEYYVVPLPEHHVR

SEQ ID NO: 63623 - protein, 27 aa, Artificial Sequence
  Cyclic GFR-binding peptide
IMVTAKKVKPKRGVIKRIQVPRLAQPV

SEQ ID NO: 63624 - protein, 24 aa, Artificial Sequence
  Cyclic GFR-binding peptide
MESMEGIVVKDYEDMIQMTINSLE

SEQ ID NO: 63625 - protein, 35 aa, Artificial Sequence
  Cyclic GFR-binding peptide
  MOD_RES (2)..(4)..(35): Xaa is C or S
SXKXSKVVMVTAKKVKPTRGVIKRIQVPRLDQPVX

SEQ ID NO: 63626 - protein, 25 aa, Artificial Sequence
  Cyclic GFR-binding peptide
QLFNSLQEHQGQHPKIRYYLMTLPE

SEQ ID NO: 63627 - protein, 36 aa, Artificial Sequence; identical to SEQ ID NO: 21399
  Cyclic GFR-binding peptide
  MOD_RES (1)..(3): Xaa is C or S

SEQ ID NO: 63628 - protein, 32 aa, Artificial Sequence
  Cyclic GFR-binding peptide
  MOD_RES (26)..(27): Xaa is C or S
VTAKKVKPTRGVIKRIQVPRLDQPVXXPSASA

SEQ ID NO: 63629 - protein, 35 aa, Artificial Sequence
  Cyclic GFR-binding peptide
  MOD_RES (29)..(30): Xaa is C or S
VVMVTAKKVKPTRGVIKRIQVPRLDQPVXXPSASA

SEQ ID NO: 63630 - protein, 37 aa, Artificial Sequence; identical to SEQ ID NO: 14106
  Cyclic GFR-binding peptide
  MOD_RES (32)..(32): Xaa is C or S

SEQ ID NO: 63631 - protein, 29 aa, Artificial Sequence
  Cyclic GFR-binding peptide
  MOD_RES (1)..(3): Xaa is C or S
XGXGEVVMENSLQEVVKDYEDYYLMTLPE

SEQ ID NO: 63632 - protein, 36 aa, Artificial Sequence; identical to SEQ ID NO: 21403
  Cyclic GFR-binding peptide
  MOD_RES (36)..(36): Xaa is C or S

SEQ ID NO: 63633 - protein, 36 aa, Artificial Sequence
  Cyclic GFR-binding peptide
  MOD_RES (1)..(33)..(34): Xaa is C or S
XGEVVMESMEGIVVKDYEDMIQMTINSLETPVXXAK

SEQ ID NO: 63634 - protein, 22 aa, Artificial Sequence
  Cyclic GFR-binding peptide
MNSLQEIKPTKGIYYVIPLPEL

SEQ ID NO: 63635 - protein, 39 aa, Artificial Sequence
  Cyclic GFR-binding peptide
  MOD_RES (2)..(4)..(35)..(36): Xaa is C or S
SXKXSKVIMSMEGIIKPTKGIMIQITINSLDQSVXXPSA

SEQ ID NO: 63636 - protein, 40 aa, Artificial Sequence; identical to SEQ ID NO: 14122
  Cyclic GFR-binding peptide
  MOD_RES (2)..(4)..(36)..(37): Xaa is C or S

SEQ ID NO: 63637 - protein, 26 aa, Artificial Sequence
  Cyclic GFR-binding peptide
VVMNSLQEVKPTRGVYYLITLPELDQ

SEQ ID NO: 63638 - protein, 29 aa, Artificial Sequence
  Cyclic GFR-binding peptide
  MOD_RES (1)..(1): Xaa is C or S
XGEVVMESMEGIVVKDYEDMIQMTINSLE

SEQ ID NO: 63639 - protein, 30 aa, Artificial Sequence; identical to SEQ ID NO: 14132
  Cyclic GFR-binding peptide
  MOD_RES (30)..(30): Xaa is C or S

SEQ ID NO: 63640 - protein, 44 aa, Artificial Sequence; identical to SEQ ID NO: 21414
  Cyclic GFR-binding peptide
  MOD_RES (2)..(4)..(41): Xaa is C or S

SEQ ID NO: 63641 - protein, 27 aa, Artificial Sequence
  Cyclic GFR-binding peptide
EVVMENSLQEVVKDYEDYYLMTLPELE

SEQ ID NO: 63642 - protein, 39 aa, Artificial Sequence; identical to SEQ ID NO: 14137
  Cyclic GFR-binding peptide
  MOD_RES (2)..(33)..(34): Xaa is C or S

SEQ ID NO: 63643 - protein, 34 aa, Artificial Sequence; identical to SEQ ID NO: 21415
  Cyclic GFR-binding peptide
  MOD_RES (1)..(3): Xaa is C or S

SEQ ID NO: 63644 - protein, 36 aa, Artificial Sequence
  Cyclic GFR-binding peptide
  MOD_RES (2)..(33)..(34): Xaa is C or S
KXSKVIMVTAKKIKPTKGIIKRIQVPRLDQSVXXPS

SEQ ID NO: 63645 - protein, 25 aa, Artificial Sequence
  Cyclic GFR-binding peptide
MNSLQEVKPKRGVYYLITLPELAQP

SEQ ID NO: 63646 - protein, 35 aa, Artificial Sequence
  Cyclic GFR-binding peptide
  MOD_RES (1)..(3)..(35): Xaa is C or S
XGXSRVVMNVQVEKIVNSSDDVKAVKVSRLKTPAX

SEQ ID NO: 63647 - protein, 36 aa, Artificial Sequence; identical to SEQ ID NO: 14145
  Cyclic GFR-binding peptide
  MOD_RES (1)..(33)..(34): Xaa is C or S

SEQ ID NO: 63648 - protein, 38 aa, Artificial Sequence
  Cyclic GFR-binding peptide
  MOD_RES (2)..(34)..(35): Xaa is C or S
GXARVVMNVQVEKIVNSSDDVKAVKVSRLQTPAXXPKP

SEQ ID NO: 63649 - protein, 37 aa, Artificial Sequence
  Cyclic GFR-binding peptide
  MOD_RES (32)..(33): Xaa is C or S
GEVVMDVTAKKVVKENEDIKRMQVPRLETPVXXAKPI

SEQ ID NO: 63650 - protein, 31 aa, Artificial Sequence; identical to SEQ ID NO: 14154
  Cyclic GFR-binding peptide
  MOD_RES (1)..(1): Xaa is C or S

SEQ ID NO: 63651 - protein, 39 aa, Artificial Sequence
  Cyclic GFR-binding peptide
  MOD_RES (1)..(3)..(35): Xaa is C or S
XGXSRVVMNVQVEKIVNSSDDVKAVKVSRLKTPAXTPKT

SEQ ID NO: 63652 - protein, 27 aa, Artificial Sequence
  Cyclic GFR-binding peptide
KVIMSMEGIIKPTKGIMIQITINSLDQ

SEQ ID NO: 63653 - protein, 35 aa, Artificial Sequence
  Cyclic GFR-binding peptide
  MOD_RES (1)..(33)..(34): Xaa is C or S
XSRVVMNVQVEKIVNSSDDVKAVKVSRLKTPAXXP

SEQ ID NO: 63654 - protein, 33 aa, Artificial Sequence; identical to SEQ ID NO: 21425
  Cyclic GFR-binding peptide
  MOD_RES (32)..(32): Xaa is C or S

SEQ ID NO: 63655 - protein, 35 aa, Artificial Sequence
  Cyclic GFR-binding peptide
  MOD_RES (1)..(1): Xaa is C or S
XALHDELTNSLQEFIPKKRVIEYYLVTLPELQVQT

SEQ ID NO: 63656 - protein, 29 aa, Artificial Sequence
  Cyclic GFR-binding peptide
  MOD_RES (2)..(2): Xaa is C or S
GXARVVMNVQVEKIVNSSDDVKAVKVSRL

SEQ ID NO: 63657 - protein, 41 aa, Artificial Sequence; identical to SEQ ID NO: 21427
  Cyclic GFR-binding peptide
  MOD_RES (1)..(38): Xaa is C or S

SEQ ID NO: 63658 - protein, 28 aa, Artificial Sequence
  Cyclic GFR-binding peptide
VMNVTAKKIVNSSDDIKRVQVPRLKTPA

SEQ ID NO: 63659 - protein, 29 aa, Artificial Sequence
  Cyclic GFR-binding peptide
  MOD_RES (2)..(4): Xaa is C or S
SXKXSRVIMVTAKKVKPKRGVIKRIQVPR

SEQ ID NO: 63660 - protein, 34 aa, Artificial Sequence
  Cyclic GFR-binding peptide
  MOD_RES (30)..(31): Xaa is C or S
VVMDVQVEKVVKENEDVKAMKVSRLETPVXXAKP

SEQ ID NO: 63661 - protein, 35 aa, Artificial Sequence; identical to SEQ ID NO: 14158
  Cyclic GFR-binding peptide
  MOD_RES (1)..(3)..(35): Xaa is C or S

SEQ ID NO: 63662 - protein, 37 aa, Artificial Sequence
  Cyclic GFR-binding peptide
  MOD_RES (1)..(32)..(33): Xaa is C or S
XSKVVMVQVEKVKPTRGVVKAIKVSRLDQPVXXPSAS

SEQ ID NO: 63663 - protein, 38 aa, Artificial Sequence; identical to SEQ ID NO: 21428
  Cyclic GFR-binding peptide
  MOD_RES (35)..(35): Xaa is C or S

SEQ ID NO: 63664 - protein, 37 aa, Artificial Sequence; identical to SEQ ID NO: 21429
  Cyclic GFR-binding peptide
  MOD_RES (33)..(33): Xaa is C or S

SEQ ID NO: 63665 - protein, 25 aa, Artificial Sequence
  Cyclic GFR-binding peptide
NSMEGIIVNSSDDMIQVTINSLKTP

SEQ ID NO: 63666 - protein, 32 aa, Artificial Sequence
  Cyclic GFR-binding peptide
  MOD_RES (1)..(32): Xaa is C or S
XSKVIMVQVEKIKPTKGIVKAIKVSRLDQSVX

SEQ ID NO: 63667 - protein, 37 aa, Artificial Sequence
  Cyclic GFR-binding peptide
  MOD_RES (2)..(4): Xaa is C or S
RXEXKNHQLFNSLQEHQGQHPKIRYYLMTLPEEETPV

SEQ ID NO: 63668 - protein, 37 aa, Artificial Sequence
  Cyclic GFR-binding peptide
  MOD_RES (2)..(4)..(36)..(37): Xaa is C or S
HXGXARVVMNVTAKKIVNSSDDIKRVQVPRLQTPAXX

SEQ ID NO: 63669 - protein, 32 aa, Artificial Sequence; identical to SEQ ID NO: 14172
  Cyclic GFR-binding peptide
  MOD_RES (28)..(28): Xaa is C or S

SEQ ID NO: 63670 - protein, 30 aa, Artificial Sequence
  Cyclic GFR-binding peptide
  MOD_RES (2)..(2): Xaa is C or S
GXGEVVMDVQVEKVVKENEDVKAMKVSRLE

SEQ ID NO: 63671 - protein, 42 aa, Artificial Sequence
  Cyclic GFR-binding peptide
  MOD_RES (1)..(38): Xaa is C or S
XELHEELRNSLQELKPKKRVYEYYVVPLPEHHVRSPQXKVSS

SEQ ID NO: 63672 - protein, 34 aa, Artificial Sequence; identical to SEQ ID NO: 21445
  Cyclic GFR-binding peptide
  MOD_RES (1)..(1): Xaa is C or S

SEQ ID NO: 63673 - protein, 26 aa, Artificial Sequence
  Cyclic GFR-binding peptide
  MOD_RES (1)..(1): Xaa is C or S
XSRVIMSMEGIVKPKRGVMIQITINS

SEQ ID NO: 63674 - protein, 29 aa, Artificial Sequence
  Cyclic GFR-binding peptide
  MOD_RES (29)..(29): Xaa is C or S
VMNVQVEKIVNSSDDVKAVKVSRLQTPAX

SEQ ID NO: 63675 - protein, 28 aa, Artificial Sequence
  Cyclic GFR-binding peptide
QLFNSLQEHQGQHPKIRYYLMTLPEEET

SEQ ID NO: 63676 - protein, 28 aa, Artificial Sequence
  Cyclic GFR-binding peptide
  MOD_RES (26)..(27): Xaa is C or S
NSLQEVVKDYEDYYVMPLPELETPVXXA

SEQ ID NO: 63677 - protein, 32 aa, Artificial Sequence; identical to SEQ ID NO: 14183
  Cyclic GFR-binding peptide
  MOD_RES (30)..(31): Xaa is C or S

SEQ ID NO: 63678 - protein, 42 aa, Artificial Sequence; identical to SEQ ID NO: 21456
  Cyclic GFR-binding peptide
  MOD_RES (1)..(38): Xaa is C or S

SEQ ID NO: 63679 - protein, 33 aa, Artificial Sequence
  Cyclic GFR-binding peptide
  MOD_RES (2)..(4): Xaa is C or S
RXGXGEVVMDVTAKKVVKENEDIKRMQVPRLET

SEQ ID NO: 63680 - protein, 24 aa, Artificial Sequence
  Cyclic GFR-binding peptide
IMVTAKKIKPTKGIIKRIQVPRLD

SEQ ID NO: 63681 - protein, 36 aa, Artificial Sequence; identical to SEQ ID NO: 14188
  Cyclic GFR-binding peptide
  MOD_RES (1)..(3)..(35)..(36): Xaa is C or S

SEQ ID NO: 63682 - protein, 33 aa, Artificial Sequence
  Cyclic GFR-binding peptide
  MOD_RES (2)..(4): Xaa is C or S
RXEXKNHQLFNSLQEHQGQHPKIRYYVMPLPEE

SEQ ID NO: 63683 - protein, 29 aa, Artificial Sequence
  Cyclic GFR-binding peptide
HDELTNSLQEFIPKKRVIEYYVVPLPELQ

SEQ ID NO: 63684 - protein, 33 aa, Artificial Sequence; identical to SEQ ID NO: 14191
  Cyclic GFR-binding peptide
  MOD_RES (29)..(30): Xaa is C or S

SEQ ID NO: 63685 - protein, 28 aa, Artificial Sequence
  Cyclic GFR-binding peptide
VMENSLQEVVKDYEDYYVMPLPELETPV

SEQ ID NO: 63686 - protein, 29 aa, Artificial Sequence
  Cyclic GFR-binding peptide
SKVIMNSLQEIKPTKGIYYLITLPELDQS

SEQ ID NO: 63687 - protein, 29 aa, Artificial Sequence
  Cyclic GFR-binding peptide
EELRNSLQELKPKKRVYEYYLVTLPEHHV

SEQ ID NO: 63688 - protein, 34 aa, Artificial Sequence
  Cyclic GFR-binding peptide
  MOD_RES (29)..(29): Xaa is C or S
FNSLQEHQGQHPKIRYYLMTLPEEETPVXELGED

SEQ ID NO: 63689 - protein, 37 aa, Artificial Sequence
  Cyclic GFR-binding peptide
  MOD_RES (2)..(4)..(35)..(36): Xaa is C or S
SXKXSRVIMVTAKKVKPKRGVIKRIQVPRLAQPVXXP

SEQ ID NO: 63690 - protein, 35 aa, Artificial Sequence; identical to SEQ ID NO: 21470
  Cyclic GFR-binding peptide

SEQ ID NO: 63691 - protein, 21 aa, Artificial Sequence
  Cyclic GFR-binding peptide
VTAKKVKPTRGVIKRIQVPRL

SEQ ID NO: 63692 - protein, 33 aa, Artificial Sequence
  Cyclic GFR-binding peptide
  MOD_RES (30)..(30): Xaa is C or S
LFNSLQEHQGQHPKIRYYVMPLPEEETPVXELG

SEQ ID NO: 63693 - protein, 34 aa, Artificial Sequence; identical to SEQ ID NO: 14203
  Cyclic GFR-binding peptide
  MOD_RES (29)..(29): Xaa is C or S

SEQ ID NO: 63694 - protein, 30 aa, Artificial Sequence
  Cyclic GFR-binding peptide
  MOD_RES (28)..(29): Xaa is C or S
MEVTAKKVVKDYEDIKRMQVPRLETPVXXA

SEQ ID NO: 63695 - protein, 32 aa, Artificial Sequence
  Cyclic GFR-binding peptide
  MOD_RES (26)..(27): Xaa is C or S
SMEGIIKPTKGIMIQITINSLDQSVXXPSASA

SEQ ID NO: 63696 - protein, 33 aa, Artificial Sequence; identical to SEQ ID NO: 14208
  Cyclic GFR-binding peptide
  MOD_RES (2)..(2): Xaa is C or S

SEQ ID NO: 63697 - protein, 24 aa, Artificial Sequence
  Cyclic GFR-binding peptide
VVMENSLQEVVKDYEDYYLMTLPE

SEQ ID NO: 63698 - protein, 31 aa, Artificial Sequence
  Cyclic GFR-binding peptide
  MOD_RES (31)..(31): Xaa is C or S
SKVVMSMEGIVKPTRGVMIQITINSLDQPVX

SEQ ID NO: 63699 - protein, 28 aa, Artificial Sequence
  Cyclic GFR-binding peptide
  MOD_RES (27)..(27): Xaa is C or S
NVTAKKIVNSSDDIKRVQVPRLKTPAXT

SEQ ID NO: 63700 - protein, 37 aa, Artificial Sequence
  Cyclic GFR-binding peptide
  MOD_RES (1)..(32)..(33): Xaa is C or S
XSKVVMSMEGIVKPTRGVMIQITINSLDQPVXXPSAS

SEQ ID NO: 63701 - protein, 30 aa, Artificial Sequence; identical to SEQ ID NO: 14215
  Cyclic GFR-binding peptide
  MOD_RES (26)..(27): Xaa is C or S

SEQ ID NO: 63702 - protein, 32 aa, Artificial Sequence
  Cyclic GFR-binding peptide
  MOD_RES (26)..(27): Xaa is C or S
VTAKKVVKDYEDIKRMQVPRLETPVXXAKPIS

SEQ ID NO: 63703 - protein, 31 aa, Artificial Sequence; identical to SEQ ID NO: 14218
  Cyclic GFR-binding peptide
  MOD_RES (2)..(2): Xaa is C or S

SEQ ID NO: 63704 - protein, 29 aa, Artificial Sequence
  Cyclic GFR-binding peptide
  MOD_RES (1)..(3): Xaa is C or S
XGXGEVVMEVQVEKVVKDYEDVKAMKVSR

SEQ ID NO: 63705 - protein, 32 aa, Artificial Sequence
  Cyclic GFR-binding peptide
  MOD_RES (28)..(29): Xaa is C or S
IMVTAKKIKPTKGIIKRIQVPRLDQSVXXPSA

SEQ ID NO: 63706 - protein, 36 aa, Artificial Sequence
  Cyclic GFR-binding peptide
  MOD_RES (33)..(33): Xaa is C or S
ELRNSLQELKPKKRVYEYYVVPLPEHHVRSPQXKVS

SEQ ID NO: 63707 - protein, 27 aa, Artificial Sequence
  Cyclic GFR-binding peptide
VIMNSLQEIKPTKGIYYLITLPELDQS

SEQ ID NO: 63708 - protein, 44 aa, Artificial Sequence
  Cyclic GFR-binding peptide
  MOD_RES (1)..(3)..(40): Xaa is C or S
XKXALHDELTNSLQEFIPKKRVIEYYLVTLPELQVQTPRXQVNR

SEQ ID NO: 63709 - protein, 29 aa, Artificial Sequence
  Cyclic GFR-binding peptide
  MOD_RES (26)..(27): Xaa is C or S
VTAKKIVNSSDDIKRVQVPRLQTPAXXPK

SEQ ID NO: 63710 - protein, 30 aa, Artificial Sequence
  Cyclic GFR-binding peptide
  MOD_RES (29)..(30): Xaa is C or S
VMDVQVEKVVKENEDVKAMKVSRLETPVXX

SEQ ID NO: 63711 - protein, 39 aa, Artificial Sequence
  Cyclic GFR-binding peptide
  MOD_RES (2)..(4)..(36)..(37): Xaa is C or S
RXGXGEVVMDVTAKKVVKENEDIKRMQVPRLETPVXXAK

SEQ ID NO: 63712 - protein, 28 aa, Artificial Sequence
  Cyclic GFR-binding peptide
LHDELTNSLQEFIPKKRVIEYYVVPLPE

SEQ ID NO: 63713 - protein, 30 aa, Artificial Sequence
  Cyclic GFR-binding peptide
  MOD_RES (29)..(30): Xaa is C or S
VVMVQVEKVKPTRGVVKAIKVSRLDQPVXX

SEQ ID NO: 63714 - protein, 40 aa, Artificial Sequence; identical to SEQ ID NO: 21498
  Cyclic GFR-binding peptide
  MOD_RES (2)..(39): Xaa is C or S

SEQ ID NO: 63715 - protein, 23 aa, Artificial Sequence
  Cyclic GFR-binding peptide
IMNSLQEVKPKRGVYYLITLPEL

SEQ ID NO: 63716 - protein, 32 aa, Artificial Sequence; identical to SEQ ID NO: 48536
  Cyclic GFR-binding peptide
  MOD_RES (1)..(3): Xaa is C or S

SEQ ID NO: 63717 - protein, 28 aa, Artificial Sequence
  Cyclic GFR-binding peptide
KVVMVTAKKVKPTRGVIKRIQVPRLDQP

SEQ ID NO: 63718 - protein, 34 aa, Artificial Sequence; identical to SEQ ID NO: 21502
  Cyclic GFR-binding peptide
  MOD_RES (28)..(28): Xaa is C or S

SEQ ID NO: 63719 - protein, 34 aa, Artificial Sequence; identical to SEQ ID NO: 14238
  Cyclic GFR-binding peptide
  MOD_RES (1)..(3): Xaa is C or S

SEQ ID NO: 63720 - protein, 37 aa, Artificial Sequence; identical to SEQ ID NO: 14240
  Cyclic GFR-binding peptide
  MOD_RES (31)..(32): Xaa is C or S

SEQ ID NO: 63721 - protein, 32 aa, Artificial Sequence
  Cyclic GFR-binding peptide
  MOD_RES (1)..(32): Xaa is C or S
XSRVIMVQVEKVKPKRGVVKAIKVSRLAQPVX

SEQ ID NO: 63722 - protein, 40 aa, Artificial Sequence
  Cyclic GFR-binding peptide
  MOD_RES (2)..(39): Xaa is C or S
AXELHEELRNSLQELKPKKRVYEYYLVTLPEHHVRSPQXK

SEQ ID NO: 63723 - protein, 25 aa, Artificial Sequence
  Cyclic GFR-binding peptide
VTAKKVVKENEDIKRMQVPRLETPV

SEQ ID NO: 63724 - protein, 31 aa, Artificial Sequence
  Cyclic GFR-binding peptide
HQLFNSLQEHQGQHPKIRYYVMPLPEEETPV

SEQ ID NO: 63725 - protein, 30 aa, Artificial Sequence
  Cyclic GFR-binding peptide
LHEELRNSLQELKPKKRVYEYYLVTLPEHH

SEQ ID NO: 63726 - protein, 30 aa, Artificial Sequence
  Cyclic GFR-binding peptide
HQLFNSLQEHQGQHPKIRYYVMPLPEEETP

SEQ ID NO: 63727 - protein, 29 aa, Artificial Sequence
  Cyclic GFR-binding peptide
ELRVTAKKLKPKKRVYEIKRVQVPRHHVR

SEQ ID NO: 63728 - protein, 38 aa, Artificial Sequence; identical to SEQ ID NO: 14247
  Cyclic GFR-binding peptide
  MOD_RES (2)..(4)..(35)..(36): Xaa is C or S

SEQ ID NO: 63729 - protein, 38 aa, Artificial Sequence
  Cyclic GFR-binding peptide
  MOD_RES (1)..(32)..(33): Xaa is C or S
XSRVIMVQVEKVKPKRGVVKAIKVSRLAQPVXXPAASA

SEQ ID NO: 63730 - protein, 24 aa, Artificial Sequence
  Cyclic GFR-binding peptide
LRVTAKKLKPKKRVYEIKRVQVPR

SEQ ID NO: 63731 - protein, 33 aa, Artificial Sequence; identical to SEQ ID NO: 21514
  Cyclic GFR-binding peptide
  MOD_RES (1)..(3): Xaa is C or S

SEQ ID NO: 63732 - protein, 31 aa, Artificial Sequence
  Cyclic GFR-binding peptide
  MOD_RES (1)..(1): Xaa is C or S
XALHDELTNSLQEFIPKKRVIEYYLVTLPEL

SEQ ID NO: 63733 - protein, 43 aa, Artificial Sequence; identical to SEQ ID NO: 21518
  Cyclic GFR-binding peptide
  MOD_RES (2)..(39): Xaa is C or S

SEQ ID NO: 63734 - protein, 31 aa, Artificial Sequence
  Cyclic GFR-binding peptide
LHEELRNSLQELKPKKRVYEYYLVTLPEHHV

SEQ ID NO: 63735 - protein, 32 aa, Artificial Sequence
  Cyclic GFR-binding peptide
  MOD_RES (29)..(30): Xaa is C or S
VMNVTAKKIVNSSDDIKRVQVPRLQTPAXXPK

SEQ ID NO: 63736 - protein, 36 aa, Artificial Sequence; identical to SEQ ID NO: 14260
  Cyclic GFR-binding peptide
  MOD_RES (31)..(32): Xaa is C or S

SEQ ID NO: 63737 - protein, 37 aa, Artificial Sequence
  Cyclic GFR-binding peptide
  MOD_RES (34)..(34): Xaa is C or S
EELRNSLQELKPKKRVYEYYVVPLPEHHVRSPQXKVS

SEQ ID NO: 63738 - protein, 36 aa, Artificial Sequence
  Cyclic GFR-binding peptide
  MOD_RES (2)..(33)..(34): Xaa is C or S
KXSKVVMVTAKKVKPTRGVIKRIQVPRLDQPVXXPS

SEQ ID NO: 63739 - protein, 29 aa, Artificial Sequence
  Cyclic GFR-binding peptide
  MOD_RES (1)..(1): Xaa is C or S
XGEVVMDVTAKKVVKENEDIKRMQVPRLE

SEQ ID NO: 63740 - protein, 31 aa, Artificial Sequence; identical to SEQ ID NO: 21524
  Cyclic GFR-binding peptide

SEQ ID NO: 63741 - protein, 29 aa, Artificial Sequence
  Cyclic GFR-binding peptide
LTVQVEKFIPKKRVIEVKAVKVSRLQVQT

SEQ ID NO: 63742 - protein, 31 aa, Artificial Sequence
  Cyclic GFR-binding peptide
  MOD_RES (27)..(28): Xaa is C or S
NSMEGIIVNSSDDMIQVTINSLKTPAXXPKP

SEQ ID NO: 63743 - protein, 30 aa, Artificial Sequence
  Cyclic GFR-binding peptide
SRVVMNSMEGIIVNSSDDMIQVTINSLKTP

SEQ ID NO: 63744 - protein, 33 aa, Artificial Sequence; identical to SEQ ID NO: 14270
  Cyclic GFR-binding peptide
  MOD_RES (29)..(29): Xaa is C or S

SEQ ID NO: 63745 - protein, 32 aa, Artificial Sequence; identical to SEQ ID NO: 21533
  Cyclic GFR-binding peptide
  MOD_RES (32)..(32): Xaa is C or S

SEQ ID NO: 63746 - protein, 31 aa, Artificial Sequence
  Cyclic GFR-binding peptide
GEVVMESMEGIVVKDYEDMIQMTINSLETPV

SEQ ID NO: 63747 - protein, 30 aa, Artificial Sequence
  Cyclic GFR-binding peptide
  MOD_RES (26)..(27): Xaa is C or S
VQVEKVVKENEDVKAMKVSRLETPVXXAKP

SEQ ID NO: 63748 - protein, 34 aa, Artificial Sequence; identical to SEQ ID NO: 21542
  Cyclic GFR-binding peptide

SEQ ID NO: 63749 - protein, 28 aa, Artificial Sequence
  Cyclic GFR-binding peptide
  MOD_RES (1)..(1): Xaa is C or S
XSKVIMSMEGIIKPTKGIMIQITINSLD

SEQ ID NO: 63750 - protein, 32 aa, Artificial Sequence
  Cyclic GFR-binding peptide
  MOD_RES (30)..(31): Xaa is C or S
VVMNVQVEKIVNSSDDVKAVKVSRLQTPAXXP

SEQ ID NO: 63751 - protein, 28 aa, Artificial Sequence
  Cyclic GFR-binding peptide
TNSLQEFIPKKRVIEYYVVPLPELQVQT

SEQ ID NO: 63752 - protein, 32 aa, Artificial Sequence
  Cyclic GFR-binding peptide
  MOD_RES (26)..(27): Xaa is C or S
VQVEKIVNSSDDVKAVKVSRLKTPAXXPKPVY

SEQ ID NO: 63753 - protein, 39 aa, Artificial Sequence; identical to SEQ ID NO: 14278
  Cyclic GFR-binding peptide
  MOD_RES (2)..(33)..(34): Xaa is C or S

SEQ ID NO: 63754 - protein, 37 aa, Artificial Sequence
  Cyclic GFR-binding peptide
  MOD_RES (2)..(4)..(36)..(37): Xaa is C or S
RXGXGEVVMEVQVEKVVKDYEDVKAMKVSRLETPVXX

SEQ ID NO: 63755 - protein, 28 aa, Artificial Sequence
  Cyclic GFR-binding peptide
VIMNSLQEVKPKRGVYYLITLPELAQPV

SEQ ID NO: 63756 - protein, 40 aa, Artificial Sequence
  Cyclic GFR-binding peptide
  MOD_RES (2)..(39): Xaa is C or S
KXALHDELTNSLQEFIPKKRVIEYYLVTLPELQVQTPRXQ

SEQ ID NO: 63757 - protein, 24 aa, Artificial Sequence
  Cyclic GFR-binding peptide
VVMNVTAKKIVNSSDDIKRVQVPR

SEQ ID NO: 63758 - protein, 40 aa, Artificial Sequence
  Cyclic GFR-binding peptide
  MOD_RES (2)..(34)..(35): Xaa is C or S
GXSRVVMNVTAKKIVNSSDDIKRVQVPRLKTPAXXPKPVY

SEQ ID NO: 63759 - protein, 38 aa, Artificial Sequence
  Cyclic GFR-binding peptide
  MOD_RES (2)..(4)..(36)..(37): Xaa is C or S
RXGXGEVVMESMEGIVVKDYEDMIQMTINSLETPVXXA

SEQ ID NO: 63760 - protein, 28 aa, Artificial Sequence
  Cyclic GFR-binding peptide
  MOD_RES (27)..(28): Xaa is C or S
MVTAKKVKPTRGVIKRIQVPRLDQPVXX

SEQ ID NO: 63761 - protein, 26 aa, Artificial Sequence
  Cyclic GFR-binding peptide
SKVVMSMEGIVKPTRGVMIQITINSL

SEQ ID NO: 63762 - protein, 36 aa, Artificial Sequence; identical to SEQ ID NO: 14294
  Cyclic GFR-binding peptide
  MOD_RES (30)..(30): Xaa is C or S

SEQ ID NO: 63763 - protein, 32 aa, Artificial Sequence
  Cyclic GFR-binding peptide
  MOD_RES (28)..(28): Xaa is C or S
NSLQEHQGQHPKIRYYVMPLPEEETPVXELGE

SEQ ID NO: 63764 - protein, 35 aa, Artificial Sequence
  Cyclic GFR-binding peptide
  MOD_RES (2)..(4)..(35): Xaa is C or S
SXKXSKVVMVQVEKVKPTRGVVKAIKVSRLDQPVX

SEQ ID NO: 63765 - protein, 35 aa, Artificial Sequence
  Cyclic GFR-binding peptide
  MOD_RES (29)..(29): Xaa is C or S
VMNVTAKKIVNSSDDIKRVQVPRLKTPAXTPKTVH

SEQ ID NO: 63766 - protein, 25 aa, Artificial Sequence
  Cyclic GFR-binding peptide
KVIMSMEGIIKPTKGIMIQITINSL

SEQ ID NO: 63767 - protein, 31 aa, Artificial Sequence
  Cyclic GFR-binding peptide
  MOD_RES (28)..(29): Xaa is C or S
MNVQVEKIVNSSDDVKAVKVSRLQTPAXXPK

SEQ ID NO: 63768 - protein, 32 aa, Artificial Sequence
  Cyclic GFR-binding peptide
  MOD_RES (29)..(30): Xaa is C or S
VVMVTAKKVKPTRGVIKRIQVPRLDQPVXXPS

SEQ ID NO: 63769 - protein, 22 aa, Artificial Sequence
  Cyclic GFR-binding peptide
NSLQEIVNSSDDYYVVPLPELQ

SEQ ID NO: 63770 - protein, 32 aa, Artificial Sequence; identical to SEQ ID NO: 14311
  Cyclic GFR-binding peptide
  MOD_RES (1)..(1): Xaa is C or S

SEQ ID NO: 63771 - protein, 32 aa, Artificial Sequence; identical to SEQ ID NO: 21571
  Cyclic GFR-binding peptide

SEQ ID NO: 63772 - protein, 21 aa, Artificial Sequence
  Cyclic GFR-binding peptide
MNSLQEVKPTRGVYYLITLPE

SEQ ID NO: 63773 - protein, 37 aa, Artificial Sequence
  Cyclic GFR-binding peptide
  MOD_RES (2)..(33)..(34): Xaa is C or S
KXSRVIMVTAKKVKPKRGVIKRIQVPRLAQPVXXPAA

SEQ ID NO: 63774 - protein, 29 aa, Artificial Sequence
  Cyclic GFR-binding peptide
RVVMNNSLQEIVNSSDDYYVVPLPELQTP

SEQ ID NO: 63775 - protein, 39 aa, Artificial Sequence; identical to SEQ ID NO: 14317
  Cyclic GFR-binding peptide
  MOD_RES (2)..(4)..(36)..(37): Xaa is C or S

SEQ ID NO: 63776 - protein, 27 aa, Artificial Sequence
  Cyclic GFR-binding peptide
TVQVEKFIPKKRVIEVKAVKVSRLQVQ

SEQ ID NO: 63777 - protein, 33 aa, Artificial Sequence
  Cyclic GFR-binding peptide
  MOD_RES (30)..(30): Xaa is C or S
VVMNVQVEKIVNSSDDVKAVKVSRLKTPAXTPK

SEQ ID NO: 63778 - protein, 31 aa, Artificial Sequence
  Cyclic GFR-binding peptide
  MOD_RES (2)..(2): Xaa is C or S
GXGEVVMDVTAKKVVKENEDIKRMQVPRLET

SEQ ID NO: 63779 - protein, 45 aa, Artificial Sequence; identical to SEQ ID NO: 21588
  Cyclic GFR-binding peptide
  MOD_RES (2)..(4)..(41): Xaa is C or S

SEQ ID NO: 63780 - protein, 43 aa, Artificial Sequence
  Cyclic GFR-binding peptide
  MOD_RES (1)..(3)..(40): Xaa is C or S
XKXALHDELTNSLQEFIPKKRVIEYYVVPLPELQVQTPRXQVN

SEQ ID NO: 63781 - protein, 23 aa, Artificial Sequence
  Cyclic GFR-binding peptide
VMEVTAKKVVKDYEDIKRMQVPR

SEQ ID NO: 63782 - protein, 36 aa, Artificial Sequence; identical to SEQ ID NO: 14335
  Cyclic GFR-binding peptide
  MOD_RES (1)..(3)..(34)..(35): Xaa is C or S

SEQ ID NO: 63783 - protein, 42 aa, Artificial Sequence; identical to SEQ ID NO: 14337
  Cyclic GFR-binding peptide
  MOD_RES (2)..(4)..(36)..(37): Xaa is C or S

SEQ ID NO: 63784 - protein, 31 aa, Artificial Sequence
  Cyclic GFR-binding peptide
ELTNSLQEFIPKKRVIEYYVVPLPELQVQTP

SEQ ID NO: 63785 - protein, 38 aa, Artificial Sequence
  Cyclic GFR-binding peptide
  MOD_RES (1)..(33)..(34): Xaa is C or S
XARVVMNSMEGIIVNSSDDMIQVTINSLQTPAXXPKPV

SEQ ID NO: 63786 - protein, 34 aa, Artificial Sequence; identical to SEQ ID NO: 21594
  Cyclic GFR-binding peptide
  MOD_RES (1)..(3): Xaa is C or S

SEQ ID NO: 63787 - protein, 35 aa, Artificial Sequence; identical to SEQ ID NO: 21595
  Cyclic GFR-binding peptide
  MOD_RES (32)..(32): Xaa is C or S

SEQ ID NO: 63788 - protein, 20 aa, Artificial Sequence
  Cyclic GFR-binding peptide
NSLQEIVNSSDDYYVVPLPE

SEQ ID NO: 63789 - protein, 39 aa, Artificial Sequence
  Cyclic GFR-binding peptide
  MOD_RES (1)..(3)..(35)..(36): Xaa is C or S
XGXGEVVMEVTAKKVVKDYEDIKRMQVPRLETPVXXAKP

SEQ ID NO: 63790 - protein, 38 aa, Artificial Sequence; identical to SEQ ID NO: 14345
  Cyclic GFR-binding peptide
  MOD_RES (2)..(4)..(36)..(37): Xaa is C or S

SEQ ID NO: 63791 - protein, 29 aa, Artificial Sequence
  Cyclic GFR-binding peptide
  MOD_RES (29)..(29): Xaa is C or S
VMNNSLQEIVNSSDDYYVVPLPELQTPAX

SEQ ID NO: 63792 - protein, 31 aa, Artificial Sequence
  Cyclic GFR-binding peptide
  MOD_RES (1)..(1): Xaa is C or S
XARVVMNSMEGIIVNSSDDMIQVTINSLQTP

SEQ ID NO: 63793 - protein, 27 aa, Artificial Sequence
  Cyclic GFR-binding peptide
  MOD_RES (26)..(26): Xaa is C or S
NSLQEIVNSSDDYYVVPLPELKTPAXT

SEQ ID NO: 63794 - protein, 30 aa, Artificial Sequence; identical to SEQ ID NO: 21599
  Cyclic GFR-binding peptide
  MOD_RES (1)..(1): Xaa is C or S

SEQ ID NO: 63795 - protein, 30 aa, Artificial Sequence
  Cyclic GFR-binding peptide
  MOD_RES (2)..(4): Xaa is C or S
HXGXARVVMNSMEGIIVNSSDDMIQVTINS

SEQ ID NO: 63796 - protein, 26 aa, Artificial Sequence
  Cyclic GFR-binding peptide
MDSMEGIVVKENEDMIQMTINSLETP

SEQ ID NO: 63797 - protein, 31 aa, Artificial Sequence
  Cyclic GFR-binding peptide
  MOD_RES (1)..(1): Xaa is C or S
XGEVVMESMEGIVVKDYEDMIQMTINSLETP

SEQ ID NO: 63798 - protein, 34 aa, Artificial Sequence; identical to SEQ ID NO: 21602
  Cyclic GFR-binding peptide
  MOD_RES (2)..(4): Xaa is C or S

SEQ ID NO: 63799 - protein, 29 aa, Artificial Sequence
  Cyclic GFR-binding peptide
  MOD_RES (1)..(3): Xaa is C or S
XKXSKVIMVTAKKIKPTKGIIKRIQVPRL

SEQ ID NO: 63800 - protein, 37 aa, Artificial Sequence; identical to SEQ ID NO: 21604
  Cyclic GFR-binding peptide
  MOD_RES (2)..(4): Xaa is C or S

SEQ ID NO: 63801 - protein, 32 aa, Artificial Sequence
  Cyclic GFR-binding peptide
  MOD_RES (1)..(3): Xaa is C or S
XGXGEVVMESMEGIVVKDYEDMIQMTINSLET

SEQ ID NO: 63802 - protein, 37 aa, Artificial Sequence
  Cyclic GFR-binding peptide
  MOD_RES (2)..(34)..(35): Xaa is C or S
GXGEVVMDVQVEKVVKENEDVKAMKVSRLETPVXXAK

SEQ ID NO: 63803 - protein, 39 aa, Artificial Sequence
  Cyclic GFR-binding peptide
  MOD_RES (1)..(3)..(34)..(35): Xaa is C or S
XKXSRVIMVTAKKVKPKRGVIKRIQVPRLAQPVXXPAAS

SEQ ID NO: 63804 - protein, 32 aa, Artificial Sequence
  Cyclic GFR-binding peptide
  MOD_RES (1)..(3): Xaa is C or S
XKXSKVVMVQVEKVKPTRGVVKAIKVSRLDQP

SEQ ID NO: 63805 - protein, 21 aa, Artificial Sequence
  Cyclic GFR-binding peptide
DVTAKKVVKENEDIKRMQVPR

SEQ ID NO: 63806 - protein, 32 aa, Artificial Sequence
  Cyclic GFR-binding peptide
  MOD_RES (28)..(29): Xaa is C or S
IMVTAKKVKPKRGVIKRIQVPRLAQPVXXPAA

SEQ ID NO: 63807 - protein, 30 aa, Artificial Sequence
  Cyclic GFR-binding peptide
ARVVMNVTAKKIVNSSDDIKRVQVPRLQTP

SEQ ID NO: 63808 - protein, 36 aa, Artificial Sequence
  Cyclic GFR-binding peptide
  MOD_RES (30)..(31): Xaa is C or S
VVMNVQVEKIVNSSDDVKAVKVSRLQTPAXXPKPVT

SEQ ID NO: 63809 - protein, 38 aa, Artificial Sequence
  Cyclic GFR-binding peptide
  MOD_RES (32)..(32): Xaa is C or S
HQLFNSLQEHQGQHPKIRYYVMPLPEEETPVXELGEDN

SEQ ID NO: 63810 - protein, 36 aa, Artificial Sequence; identical to SEQ ID NO: 14361
  Cyclic GFR-binding peptide
  MOD_RES (1)..(3)..(35): Xaa is C or S

SEQ ID NO: 63811 - protein, 23 aa, Artificial Sequence
  Cyclic GFR-binding peptide
VTAKKHQGQHPKIRIKRMQVPRE

SEQ ID NO: 63812 - protein, 24 aa, Artificial Sequence
  Cyclic GFR-binding peptide
RVIMVQVEKVKPKRGVVKAIKVSR

SEQ ID NO: 63813 - protein, 24 aa, Artificial Sequence
  Cyclic GFR-binding peptide
MNNSLQEIVNSSDDYYVVPLPELK

SEQ ID NO: 63814 - protein, 31 aa, Artificial Sequence; identical to SEQ ID NO: 21612
  Cyclic GFR-binding peptide

SEQ ID NO: 63815 - protein, 33 aa, Artificial Sequence; identical to SEQ ID NO: 14364
  Cyclic GFR-binding peptide
  MOD_RES (29)..(30): Xaa is C or S

SEQ ID NO: 63816 - protein, 36 aa, Artificial Sequence
  Cyclic GFR-binding peptide
  MOD_RES (31)..(31): Xaa is C or S
RVVMNVQVEKIVNSSDDVKAVKVSRLKTPAXTPKTV

SEQ ID NO: 63817 - protein, 24 aa, Artificial Sequence
  Cyclic GFR-binding peptide
VIMSMEGIIKPTKGIMIQITINSL

SEQ ID NO: 63818 - protein, 33 aa, Artificial Sequence
  Cyclic GFR-binding peptide
  MOD_RES (27)..(28): Xaa is C or S
DVQVEKVVKENEDVKAMKVSRLETPVXXAKPIK

SEQ ID NO: 63819 - protein, 23 aa, Artificial Sequence
  Cyclic GFR-binding peptide
MNSLQEIKPTKGIYYVIPLPELD

SEQ ID NO: 63820 - protein, 23 aa, Artificial Sequence
  Cyclic GFR-binding peptide
MSMEGIVKPKRGVMIQITINSLA

SEQ ID NO: 63821 - protein, 31 aa, Artificial Sequence
  Cyclic GFR-binding peptide
  MOD_RES (2)..(2): Xaa is C or S
GXGEVVMEVQVEKVVKDYEDVKAMKVSRLET

SEQ ID NO: 63822 - protein, 36 aa, Artificial Sequence
  Cyclic GFR-binding peptide
  MOD_RES (31)..(32): Xaa is C or S
EVVMDVTAKKVVKENEDIKRMQVPRLETPVXXAKPI

SEQ ID NO: 63823 - protein, 28 aa, Artificial Sequence
  Cyclic GFR-binding peptide
EVVMDSMEGIVVKENEDMIQMTINSLET

SEQ ID NO: 63824 - protein, 25 aa, Artificial Sequence
  Cyclic GFR-binding peptide
NVQVEKIVNSSDDVKAVKVSRLQTP

SEQ ID NO: 63825 - protein, 35 aa, Artificial Sequence
  Cyclic GFR-binding peptide
  MOD_RES (1)..(35): Xaa is C or S
XKNHQLFNSLQEHQGQHPKIRYYVMPLPEEETPVX

SEQ ID NO: 63826 - protein, 35 aa, Artificial Sequence
  Cyclic GFR-binding peptide
  MOD_RES (29)..(30): Xaa is C or S
VIMVQVEKIKPTKGIVKAIKVSRLDQSVXXPSASA

SEQ ID NO: 63827 - protein, 37 aa, Artificial Sequence; identical to SEQ ID NO: 14381
  Cyclic GFR-binding peptide
  MOD_RES (2)..(34)..(35): Xaa is C or S

SEQ ID NO: 63828 - protein, 35 aa, Artificial Sequence
  Cyclic GFR-binding peptide
  MOD_RES (29)..(29): Xaa is C or S
FNSLQEHQGQHPKIRYYLMTLPEEETPVXELGEDN

SEQ ID NO: 63829 - protein, 37 aa, Artificial Sequence; identical to SEQ ID NO: 14388
  Cyclic GFR-binding peptide
  MOD_RES (2)..(34)..(35): Xaa is C or S

SEQ ID NO: 63830 - protein, 40 aa, Artificial Sequence
  Cyclic GFR-binding peptide
  MOD_RES (2)..(4)..(35)..(36): Xaa is C or S
SXKXSRVIMVQVEKVKPKRGVVKAIKVSRLAQPVXXPAAS

SEQ ID NO: 63831 - protein, 38 aa, Artificial Sequence; identical to SEQ ID NO: 14390
  Cyclic GFR-binding peptide
  MOD_RES (1)..(32)..(33): Xaa is C or S

SEQ ID NO: 63832 - protein, 34 aa, Artificial Sequence; identical to SEQ ID NO: 21627
  Cyclic GFR-binding peptide

SEQ ID NO: 63833 - protein, 27 aa, Artificial Sequence
  Cyclic GFR-binding peptide
  MOD_RES (1)..(1): Xaa is C or S
XSKVIMVTAKKIKPTKGIIKRIQVPRL

SEQ ID NO: 63834 - protein, 42 aa, Artificial Sequence
  Cyclic GFR-binding peptide
  MOD_RES (2)..(4)..(41): Xaa is C or S
AXAXELHEELRNSLQELKPKKRVYEYYVVPLPEHHVRSPQXK

SEQ ID NO: 63835 - protein, 27 aa, Artificial Sequence
  Cyclic GFR-binding peptide
EVVMDVTAKKVVKENEDIKRMQVPRLE

SEQ ID NO: 63836 - protein, 33 aa, Artificial Sequence
  Cyclic GFR-binding peptide
  MOD_RES (1)..(3): Xaa is C or S
XKXSKVVMVQVEKVKPTRGVVKAIKVSRLDQPV

SEQ ID NO: 63837 - protein, 26 aa, Artificial Sequence
  Cyclic GFR-binding peptide
MVQVEKVKPTRGVVKAIKVSRLDQPV

SEQ ID NO: 63838 - protein, 35 aa, Artificial Sequence; identical to SEQ ID NO: 14411
  Cyclic GFR-binding peptide
  MOD_RES (30)..(31): Xaa is C or S

SEQ ID NO: 63839 - protein, 35 aa, Artificial Sequence
  Cyclic GFR-binding peptide
  MOD_RES (1)..(33): Xaa is C or S
XSRVVMNSMEGIIVNSSDDMIQVTINSLKTPAXTP

SEQ ID NO: 63840 - protein, 34 aa, Artificial Sequence
  Cyclic GFR-binding peptide
  MOD_RES (33)..(33): Xaa is C or S
NHQLFNSLQEHQGQHPKIRYYVMPLPEEETPVXE

SEQ ID NO: 63841 - protein, 29 aa, Artificial Sequence
  Cyclic GFR-binding peptide
QLFNSLQEHQGQHPKIRYYVMPLPEEETP

SEQ ID NO: 63842 - protein, 33 aa, Artificial Sequence; identical to SEQ ID NO: 14419
  Cyclic GFR-binding peptide
  MOD_RES (30)..(31): Xaa is C or S

SEQ ID NO: 63843 - protein, 21 aa, Artificial Sequence
  Cyclic GFR-binding peptide
NSLQEVKPTRGVYYLITLPEL

SEQ ID NO: 63844 - protein, 34 aa, Artificial Sequence
  Cyclic GFR-binding peptide
  MOD_RES (31)..(31): Xaa is C or S
QLFNSLQEHQGQHPKIRYYLMTLPEEETPVXELG

SEQ ID NO: 63845 - protein, 35 aa, Artificial Sequence; identical to SEQ ID NO: 14424
  Cyclic GFR-binding peptide
  MOD_RES (1)..(33)..(34): Xaa is C or S

SEQ ID NO: 63846 - protein, 33 aa, Artificial Sequence
  Cyclic GFR-binding peptide
  MOD_RES (2)..(4): Xaa is C or S
SXKXSKVVMVTAKKVKPTRGVIKRIQVPRLDQP

SEQ ID NO: 63847 - protein, 26 aa, Artificial Sequence
  Cyclic GFR-binding peptide
IMVQVEKIKPTKGIVKAIKVSRLDQS

SEQ ID NO: 63848 - protein, 29 aa, Artificial Sequence
  Cyclic GFR-binding peptide
LHDELTNSLQEFIPKKRVIEYYLVTLPEL

SEQ ID NO: 63849 - protein, 20 aa, Artificial Sequence
  Cyclic GFR-binding peptide
SMEGIVVKDYEDMIQMTINS

SEQ ID NO: 63850 - protein, 30 aa, Artificial Sequence
  Cyclic GFR-binding peptide
ELRNSLQELKPKKRVYEYYLVTLPEHHVRS

SEQ ID NO: 63851 - protein, 33 aa, Artificial Sequence
  Cyclic GFR-binding peptide
  MOD_RES (2)..(4): Xaa is C or S
RXEXKNHQLFNSLQEHQGQHPKIRYYLMTLPEE

SEQ ID NO: 63852 - protein, 35 aa, Artificial Sequence; identical to SEQ ID NO: 21653
  Cyclic GFR-binding peptide
  MOD_RES (2)..(2): Xaa is C or S

SEQ ID NO: 63853 - protein, 32 aa, Artificial Sequence
  Cyclic GFR-binding peptide
  MOD_RES (32)..(32): Xaa is C or S
GEVVMEVTAKKVVKDYEDIKRMQVPRLETPVX

SEQ ID NO: 63854 - protein, 32 aa, Artificial Sequence
  Cyclic GFR-binding peptide
  MOD_RES (29)..(30): Xaa is C or S
VMEVQVEKVVKDYEDVKAMKVSRLETPVXXAK

SEQ ID NO: 63855 - protein, 31 aa, Artificial Sequence
  Cyclic GFR-binding peptide
ALHDELTNSLQEFIPKKRVIEYYVVPLPELQ

SEQ ID NO: 63856 - protein, 33 aa, Artificial Sequence; identical to SEQ ID NO: 14431
  Cyclic GFR-binding peptide
  MOD_RES (32)..(33): Xaa is C or S

SEQ ID NO: 63857 - protein, 32 aa, Artificial Sequence
  Cyclic GFR-binding peptide
  MOD_RES (2)..(4): Xaa is C or S
HXGXSRVVMNVTAKKIVNSSDDIKRVQVPRLK

SEQ ID NO: 63858 - protein, 29 aa, Artificial Sequence
  Cyclic GFR-binding peptide
  MOD_RES (27)..(28): Xaa is C or S
MNSLQEIKPTKGIYYVIPLPELDQSVXXP

SEQ ID NO: 63859 - protein, 27 aa, Artificial Sequence
  Cyclic GFR-binding peptide
GEVVMENSLQEVVKDYEDYYLMTLPEL

SEQ ID NO: 63860 - protein, 31 aa, Artificial Sequence
  Cyclic GFR-binding peptide
  MOD_RES (2)..(4): Xaa is C or S
HXGXARVVMNVTAKKIVNSSDDIKRVQVPRL

SEQ ID NO: 63861 - protein, 37 aa, Artificial Sequence
  Cyclic GFR-binding peptide
  MOD_RES (34)..(34): Xaa is C or S
EELRNSLQELKPKKRVYEYYLVTLPEHHVRSPQXKVS

SEQ ID NO: 63862 - protein, 30 aa, Artificial Sequence
  Cyclic GFR-binding peptide
ARVVMNVQVEKIVNSSDDVKAVKVSRLQTP

SEQ ID NO: 63863 - protein, 35 aa, Artificial Sequence
  Cyclic GFR-binding peptide
  MOD_RES (30)..(31): Xaa is C or S
KVVMVQVEKVKPTRGVVKAIKVSRLDQPVXXPSAS

SEQ ID NO: 63864 - protein, 31 aa, Artificial Sequence
  Cyclic GFR-binding peptide
  MOD_RES (2)..(2): Xaa is C or S
GXARVVMNVTAKKIVNSSDDIKRVQVPRLQT

SEQ ID NO: 63865 - protein, 34 aa, Artificial Sequence; identical to SEQ ID NO: 14450
  Cyclic GFR-binding peptide
  MOD_RES (1)..(33)..(34): Xaa is C or S

SEQ ID NO: 63866 - protein, 29 aa, Artificial Sequence
  Cyclic GFR-binding peptide
SKVVMVQVEKVKPTRGVVKAIKVSRLDQP

SEQ ID NO: 63867 - protein, 33 aa, Artificial Sequence; identical to SEQ ID NO: 14457
  Cyclic GFR-binding peptide
  MOD_RES (1)..(3): Xaa is C or S

SEQ ID NO: 63868 - protein, 34 aa, Artificial Sequence; identical to SEQ ID NO: 21674
  Cyclic GFR-binding peptide

SEQ ID NO: 63869 - protein, 32 aa, Artificial Sequence
  Cyclic GFR-binding peptide
  MOD_RES (31)..(32): Xaa is C or S
RVVMNVQVEKIVNSSDDVKAVKVSRLKTPAXX

SEQ ID NO: 63870 - protein, 39 aa, Artificial Sequence
  Cyclic GFR-binding peptide
  MOD_RES (2)..(34)..(35): Xaa is C or S
GXSRVVMNSMEGIIVNSSDDMIQVTINSLKTPAXXPKPV

SEQ ID NO: 63871 - protein, 33 aa, Artificial Sequence; identical to SEQ ID NO: 21678
  Cyclic GFR-binding peptide

SEQ ID NO: 63872 - protein, 23 aa, Artificial Sequence
  Cyclic GFR-binding peptide
SMEGIIKPTKGIMIQITINSLDQ

SEQ ID NO: 63873 - protein, 29 aa, Artificial Sequence
  Cyclic GFR-binding peptide
SRVVMNNSLQEIVNSSDDYYLVTLPELKT

SEQ ID NO: 63874 - protein, 29 aa, Artificial Sequence
  Cyclic GFR-binding peptide
VVMDVQVEKVVKENEDVKAMKVSRLETPV

SEQ ID NO: 63875 - protein, 38 aa, Artificial Sequence; identical to SEQ ID NO: 14467
  Cyclic GFR-binding peptide
  MOD_RES (32)..(33): Xaa is C or S

SEQ ID NO: 63876 - protein, 24 aa, Artificial Sequence
  Cyclic GFR-binding peptide
MNVQVEKIVNSSDDVKAVKVSRLQ

SEQ ID NO: 63877 - protein, 32 aa, Artificial Sequence; identical to SEQ ID NO: 14469
  Cyclic GFR-binding peptide
  MOD_RES (32)..(32): Xaa is C or S

SEQ ID NO: 63878 - protein, 26 aa, Artificial Sequence
  Cyclic GFR-binding peptide
EELRSMEGILKPKKRVYEMIQVTINS

SEQ ID NO: 63879 - protein, 26 aa, Artificial Sequence
  Cyclic GFR-binding peptide
MENSLQEVVKDYEDYYVMPLPELETP

SEQ ID NO: 63880 - protein, 27 aa, Artificial Sequence
  Cyclic GFR-binding peptide
VMDNSLQEVVKENEDYYVMPLPELETP

SEQ ID NO: 63881 - protein, 37 aa, Artificial Sequence
  Cyclic GFR-binding peptide
  MOD_RES (31)..(32): Xaa is C or S
SKVVMVTAKKVKPTRGVIKRIQVPRLDQPVXXPSASA

SEQ ID NO: 63882 - protein, 21 aa, Artificial Sequence
  Cyclic GFR-binding peptide
ENSLQEVVKDYEDYYLMTLPE

SEQ ID NO: 63883 - protein, 35 aa, Artificial Sequence
  Cyclic GFR-binding peptide
  MOD_RES (31)..(31): Xaa is C or S
QLFNSLQEHQGQHPKIRYYLMTLPEEETPVXELGE

SEQ ID NO: 63884 - protein, 32 aa, Artificial Sequence
  Cyclic GFR-binding peptide
  MOD_RES (26)..(27): Xaa is C or S
VQVEKVVKDYEDVKAMKVSRLETPVXXAKPIS

SEQ ID NO: 63885 - protein, 34 aa, Artificial Sequence
  Cyclic GFR-binding peptide
  MOD_RES (2)..(4): Xaa is C or S
HXGXARVVMNVQVEKIVNSSDDVKAVKVSRLQTP

SEQ ID NO: 63886 - protein, 32 aa, Artificial Sequence
  Cyclic GFR-binding peptide
  MOD_RES (28)..(29): Xaa is C or S
VMVTAKKVKPTRGVIKRIQVPRLDQPVXXPSA

SEQ ID NO: 63887 - protein, 37 aa, Artificial Sequence
  Cyclic GFR-binding peptide
  MOD_RES (31)..(32): Xaa is C or S
SKVVMVQVEKVKPTRGVVKAIKVSRLDQPVXXPSASA

SEQ ID NO: 63888 - protein, 32 aa, Artificial Sequence
  Cyclic GFR-binding peptide
  MOD_RES (1)..(1): Xaa is C or S
XGEVVMESMEGIVVKDYEDMIQMTINSLETPV

SEQ ID NO: 63889 - protein, 30 aa, Artificial Sequence; identical to SEQ ID NO: 21700
  Cyclic GFR-binding peptide
  MOD_RES (29)..(29): Xaa is C or S

SEQ ID NO: 63890 - protein, 30 aa, Artificial Sequence; identical to SEQ ID NO: 14489
  Cyclic GFR-binding peptide
  MOD_RES (2)..(4): Xaa is C or S

SEQ ID NO: 63891 - protein, 32 aa, Artificial Sequence
  Cyclic GFR-binding peptide
  MOD_RES (1)..(32): Xaa is C or S
XSRVIMSMEGIVKPKRGVMIQITINSLAQPVX

SEQ ID NO: 63892 - protein, 38 aa, Artificial Sequence; identical to SEQ ID NO: 14498
  Cyclic GFR-binding peptide
  MOD_RES (1)..(3)..(35)..(36): Xaa is C or S

SEQ ID NO: 63893 - protein, 29 aa, Artificial Sequence
  Cyclic GFR-binding peptide
  MOD_RES (26)..(27): Xaa is C or S
VQVEKIVNSSDDVKAVKVSRLQTPAXXPK

SEQ ID NO: 63894 - protein, 42 aa, Artificial Sequence
  Cyclic GFR-binding peptide
  MOD_RES (1)..(3)..(40): Xaa is C or S
XKXALHDELTNSLQEFIPKKRVIEYYVVPLPELQVQTPRXQV

SEQ ID NO: 63895 - protein, 24 aa, Artificial Sequence
  Cyclic GFR-binding peptide
NSLQEIVNSSDDYYVVPLPELKTP

SEQ ID NO: 63896 - protein, 24 aa, Artificial Sequence
  Cyclic GFR-binding peptide
VIMVQVEKIKPTKGIVKAIKVSRL

SEQ ID NO: 63897 - protein, 34 aa, Artificial Sequence; identical to SEQ ID NO: 21711
  Cyclic GFR-binding peptide
  MOD_RES (33)..(33): Xaa is C or S

SEQ ID NO: 63898 - protein, 31 aa, Artificial Sequence; identical to SEQ ID NO: 14510
  Cyclic GFR-binding peptide
  MOD_RES (26)..(27): Xaa is C or S

SEQ ID NO: 63899 - protein, 35 aa, Artificial Sequence; identical to SEQ ID NO: 14513
  Cyclic GFR-binding peptide
  MOD_RES (2)..(33)..(34): Xaa is C or S

SEQ ID NO: 63900 - protein, 22 aa, Artificial Sequence
  Cyclic GFR-binding peptide
MDNSLQEVVKENEDYYVMPLPE

SEQ ID NO: 63901 - protein, 30 aa, Artificial Sequence; identical to SEQ ID NO: 14515
  Cyclic GFR-binding peptide
  MOD_RES (2)..(2): Xaa is C or S

SEQ ID NO: 63902 - protein, 36 aa, Artificial Sequence
  Cyclic GFR-binding peptide
  MOD_RES (31)..(32): Xaa is C or S
SKVVMSMEGIVKPTRGVMIQITINSLDQPVXXPSAS

SEQ ID NO: 63903 - protein, 33 aa, Artificial Sequence; identical to SEQ ID NO: 21716
  Cyclic GFR-binding peptide
  MOD_RES (33)..(33): Xaa is C or S

SEQ ID NO: 63904 - protein, 35 aa, Artificial Sequence
  Cyclic GFR-binding peptide
  MOD_RES (1)..(33)..(34): Xaa is C or S
XARVVMNVQVEKIVNSSDDVKAVKVSRLQTPAXXP

SEQ ID NO: 63905 - protein, 40 aa, Artificial Sequence; identical to SEQ ID NO: 21721
  Cyclic GFR-binding peptide
  MOD_RES (2)..(4): Xaa is C or S

SEQ ID NO: 63906 - protein, 37 aa, Artificial Sequence; identical to SEQ ID NO: 21722
  Cyclic GFR-binding peptide
  MOD_RES (2)..(2): Xaa is C or S

SEQ ID NO: 63907 - protein, 32 aa, Artificial Sequence; identical to SEQ ID NO: 21734
  Cyclic GFR-binding peptide

SEQ ID NO: 63908 - protein, 30 aa, Artificial Sequence
  Cyclic GFR-binding peptide
  MOD_RES (1)..(1): Xaa is C or S
XSKVIMSMEGIIKPTKGIMIQITINSLDQS

SEQ ID NO: 63909 - protein, 34 aa, Artificial Sequence
  Cyclic GFR-binding peptide
  MOD_RES (31)..(32): Xaa is C or S
EVVMEVQVEKVVKDYEDVKAMKVSRLETPVXXAK

SEQ ID NO: 63910 - protein, 28 aa, Artificial Sequence
  Cyclic GFR-binding peptide
  MOD_RES (2)..(2): Xaa is C or S
GXGEVVMENSLQEVVKDYEDYYVMPLPE

SEQ ID NO: 63911 - protein, 23 aa, Artificial Sequence
  Cyclic GFR-binding peptide
VMDSMEGIVVKENEDMIQMTINS

SEQ ID NO: 63912 - protein, 29 aa, Artificial Sequence
  Cyclic GFR-binding peptide
HQLFVTAKKHQGQHPKIRIKRMQVPREET

SEQ ID NO: 63913 - protein, 33 aa, Artificial Sequence
  Cyclic GFR-binding peptide
  MOD_RES (2)..(4): Xaa is C or S
HXGXSRVVMNSMEGIIVNSSDDMIQVTINSLKT

SEQ ID NO: 63914 - protein, 22 aa, Artificial Sequence
  Cyclic GFR-binding peptide
SMEGIFIPKKRVIEMIQVTINS

SEQ ID NO: 63915 - protein, 29 aa, Artificial Sequence
  Cyclic GFR-binding peptide
SMEGILKPKKRVYEMIQVTINSHHVRSPQ

SEQ ID NO: 63916 - protein, 27 aa, Artificial Sequence
  Cyclic GFR-binding peptide
KVVMNSLQEVKPTRGVYYVIPLPELDQ

SEQ ID NO: 63917 - protein, 36 aa, Artificial Sequence
  Cyclic GFR-binding peptide
  MOD_RES (31)..(32): Xaa is C or S
SRVIMVQVEKVKPKRGVVKAIKVSRLAQPVXXPAAS

SEQ ID NO: 63918 - protein, 40 aa, Artificial Sequence; identical to SEQ ID NO: 14538
  Cyclic GFR-binding peptide
  MOD_RES (2)..(34)..(35): Xaa is C or S

SEQ ID NO: 63919 - protein, 28 aa, Artificial Sequence
  Cyclic GFR-binding peptide
FVQVEKHQGQHPKIRVKAMKVSREETPV

SEQ ID NO: 63920 - protein, 33 aa, Artificial Sequence; identical to SEQ ID NO: 14541
  Cyclic GFR-binding peptide
  MOD_RES (32)..(33): Xaa is C or S

SEQ ID NO: 63921 - protein, 31 aa, Artificial Sequence; identical to SEQ ID NO: 14542
  Cyclic GFR-binding peptide
  MOD_RES (28)..(29): Xaa is C or S

SEQ ID NO: 63922 - protein, 39 aa, Artificial Sequence; identical to SEQ ID NO: 21749
  Cyclic GFR-binding peptide
  MOD_RES (1)..(3): Xaa is C or S

SEQ ID NO: 63923 - protein, 33 aa, Artificial Sequence
  Cyclic GFR-binding peptide
  MOD_RES (2)..(33): Xaa is C or S
KXSKVIMVTAKKIKPTKGIIKRIQVPRLDQSVX

SEQ ID NO: 63924 - protein, 31 aa, Artificial Sequence
  Cyclic GFR-binding peptide
  MOD_RES (31)..(31): Xaa is C or S
RNSLQELKPKKRVYEYYVVPLPEHHVRSPQX

SEQ ID NO: 63925 - protein, 32 aa, Artificial Sequence; identical to SEQ ID NO: 21754
  Cyclic GFR-binding peptide
  MOD_RES (2)..(4): Xaa is C or S

SEQ ID NO: 63926 - protein, 35 aa, Artificial Sequence
  Cyclic GFR-binding peptide
  MOD_RES (1)..(32)..(33): Xaa is C or S
XSKVIMSMEGIIKPTKGIMIQITINSLDQSVXXPS

SEQ ID NO: 63927 - protein, 34 aa, Artificial Sequence
  Cyclic GFR-binding peptide
  MOD_RES (1)..(32)..(33): Xaa is C or S
XSKVIMVTAKKIKPTKGIIKRIQVPRLDQSVXXP

SEQ ID NO: 63928 - protein, 28 aa, Artificial Sequence
  Cyclic GFR-binding peptide
VVMNNSLQEIVNSSDDYYVVPLPELQTP

SEQ ID NO: 63929 - protein, 34 aa, Artificial Sequence
  Cyclic GFR-binding peptide
  MOD_RES (32)..(33): Xaa is C or S
ARVVMNVQVEKIVNSSDDVKAVKVSRLQTPAXXP

SEQ ID NO: 63930 - protein, 36 aa, Artificial Sequence
  Cyclic GFR-binding peptide
  MOD_RES (1)..(3)..(35)..(36): Xaa is C or S
XGXSRVVMNSMEGIIVNSSDDMIQVTINSLKTPAXX

SEQ ID NO: 63931 - protein, 39 aa, Artificial Sequence
  Cyclic GFR-binding peptide
  MOD_RES (37)..(37): Xaa is C or S
ELHEELRNSLQELKPKKRVYEYYVVPLPEHHVRSPQXKV

SEQ ID NO: 63932 - protein, 27 aa, Artificial Sequence
  Cyclic GFR-binding peptide
LRNSLQELKPKKRVYEYYLVTLPEHHV

SEQ ID NO: 63933 - protein, 25 aa, Artificial Sequence
  Cyclic GFR-binding peptide
KVVMNSLQEVKPTRGVYYVIPLPEL

SEQ ID NO: 63934 - protein, 40 aa, Artificial Sequence
  Cyclic GFR-binding peptide
  MOD_RES (2)..(39): Xaa is C or S
KXALHDELTNSLQEFIPKKRVIEYYVVPLPELQVQTPRXQ

SEQ ID NO: 63935 - protein, 23 aa, Artificial Sequence
  Cyclic GFR-binding peptide
MNSMEGIIVNSSDDMIQVTINSL

SEQ ID NO: 63936 - protein, 32 aa, Artificial Sequence
  Cyclic GFR-binding peptide
  MOD_RES (26)..(27): Xaa is C or S
VTAKKIKPTKGIIKRIQVPRLDQSVXXPSASA

SEQ ID NO: 63937 - protein, 25 aa, Artificial Sequence
  Cyclic GFR-binding peptide
SKVVMSMEGIVKPTRGVMIQITINS

SEQ ID NO: 63938 - protein, 26 aa, Artificial Sequence
  Cyclic GFR-binding peptide
VVMDVQVEKVVKENEDVKAMKVSRLE

SEQ ID NO: 63939 - protein, 26 aa, Artificial Sequence
  Cyclic GFR-binding peptide
  MOD_RES (1)..(1): Xaa is C or S
XSRVIMVQVEKVKPKRGVVKAIKVSR

SEQ ID NO: 63940 - protein, 29 aa, Artificial Sequence
  Cyclic GFR-binding peptide
SKVVMNSLQEVKPTRGVYYVIPLPELDQP

SEQ ID NO: 63941 - protein, 25 aa, Artificial Sequence
  Cyclic GFR-binding peptide
SKVVMVQVEKVKPTRGVVKAIKVSR

SEQ ID NO: 63942 - protein, 24 aa, Artificial Sequence
  Cyclic GFR-binding peptide
SMEGIIVNSSDDMIQVTINSLQTP

SEQ ID NO: 63943 - protein, 27 aa, Artificial Sequence
  Cyclic GFR-binding peptide
VVMDVTAKKVVKENEDIKRMQVPRLET

SEQ ID NO: 63944 - protein, 37 aa, Artificial Sequence
  Cyclic GFR-binding peptide
  MOD_RES (32)..(33): Xaa is C or S
GEVVMDVQVEKVVKENEDVKAMKVSRLETPVXXAKPI

SEQ ID NO: 63945 - protein, 28 aa, Artificial Sequence
  Cyclic GFR-binding peptide
  MOD_RES (2)..(2): Xaa is C or S
GXGEVVMEVTAKKVVKDYEDIKRMQVPR

SEQ ID NO: 63946 - protein, 32 aa, Artificial Sequence; identical to SEQ ID NO: 14566
  Cyclic GFR-binding peptide
  MOD_RES (28)..(29): Xaa is C or S

SEQ ID NO: 63947 - protein, 35 aa, Artificial Sequence; identical to SEQ ID NO: 14569
  Cyclic GFR-binding peptide
  MOD_RES (32)..(32): Xaa is C or S

SEQ ID NO: 63948 - protein, 30 aa, Artificial Sequence; identical to SEQ ID NO: 14571
  Cyclic GFR-binding peptide
  MOD_RES (2)..(2): Xaa is C or S

SEQ ID NO: 63949 - protein, 38 aa, Artificial Sequence
  Cyclic GFR-binding peptide
  MOD_RES (1)..(38): Xaa is C or S
XELHEELRNSLQELKPKKRVYEYYLVTLPEHHVRSPQX

SEQ ID NO: 63950 - protein, 26 aa, Artificial Sequence
  Cyclic GFR-binding peptide
KVVMVQVEKVKPTRGVVKAIKVSRLD

SEQ ID NO: 63951 - protein, 25 aa, Artificial Sequence
  Cyclic GFR-binding peptide
VQVEKVVKDYEDVKAMKVSRLETPV

SEQ ID NO: 63952 - protein, 34 aa, Artificial Sequence
  Cyclic GFR-binding peptide
  MOD_RES (34)..(34): Xaa is C or S
EELRNSLQELKPKKRVYEYYVVPLPEHHVRSPQX

SEQ ID NO: 63953 - protein, 34 aa, Artificial Sequence; identical to SEQ ID NO: 14578
  Cyclic GFR-binding peptide
  MOD_RES (30)..(31): Xaa is C or S

SEQ ID NO: 63954 - protein, 37 aa, Artificial Sequence
  Cyclic GFR-binding peptide
  MOD_RES (31)..(32): Xaa is C or S
EVVMEVTAKKVVKDYEDIKRMQVPRLETPVXXAKPIS

SEQ ID NO: 63955 - protein, 37 aa, Artificial Sequence
  Cyclic GFR-binding peptide
  MOD_RES (2)..(4)..(35)..(36): Xaa is C or S
SXKXSKVVMSMEGIVKPTRGVMIQITINSLDQPVXXP

SEQ ID NO: 63956 - protein, 34 aa, Artificial Sequence
  Cyclic GFR-binding peptide
  MOD_RES (1)..(1): Xaa is C or S
XELHEELRNSLQELKPKKRVYEYYLVTLPEHHVR

SEQ ID NO: 63957 - protein, 38 aa, Artificial Sequence
  Cyclic GFR-binding peptide
  MOD_RES (2)..(4)..(38): Xaa is C or S
RXEXKNHQLFNSLQEHQGQHPKIRYYVMPLPEEETPVX

SEQ ID NO: 63958 - protein, 25 aa, Artificial Sequence
  Cyclic GFR-binding peptide
VMNNSLQEIVNSSDDYYVVPLPELK

SEQ ID NO: 63959 - protein, 36 aa, Artificial Sequence; identical to SEQ ID NO: 14589
  Cyclic GFR-binding peptide
  MOD_RES (2)..(34): Xaa is C or S

SEQ ID NO: 63960 - protein, 33 aa, Artificial Sequence
  Cyclic GFR-binding peptide
HDELTNSLQEFIPKKRVIEYYLVTLPELQVQTP

SEQ ID NO: 63961 - protein, 37 aa, Artificial Sequence; identical to SEQ ID NO: 48805
  Cyclic GFR-binding peptide
  MOD_RES (1)..(3)..(34)..(35): Xaa is C or S

SEQ ID NO: 63962 - protein, 39 aa, Artificial Sequence; identical to SEQ ID NO: 14592
  Cyclic GFR-binding peptide
  MOD_RES (1)..(3)..(35): Xaa is C or S

SEQ ID NO: 63963 - protein, 34 aa, Artificial Sequence; identical to SEQ ID NO: 14593
  Cyclic GFR-binding peptide
  MOD_RES (31)..(32): Xaa is C or S

SEQ ID NO: 63964 - protein, 20 aa, Artificial Sequence
  Cyclic GFR-binding peptide
SMEGIVVKENEDMIQMTINS

SEQ ID NO: 63965 - protein, 24 aa, Artificial Sequence
  Cyclic GFR-binding peptide
MENSLQEVVKDYEDYYLMTLPELE

SEQ ID NO: 63966 - protein, 29 aa, Artificial Sequence
  Cyclic GFR-binding peptide
  MOD_RES (2)..(2): Xaa is C or S
GXGEVVMDVTAKKVVKENEDIKRMQVPRL

SEQ ID NO: 63967 - protein, 34 aa, Artificial Sequence
  Cyclic GFR-binding peptide
  MOD_RES (1)..(3): Xaa is C or S
XGXSRVVMNVTAKKIVNSSDDIKRVQVPRLKTPA

SEQ ID NO: 63968 - protein, 30 aa, Artificial Sequence
  Cyclic GFR-binding peptide
  MOD_RES (2)..(2): Xaa is C or S
GXARVVMNVQVEKIVNSSDDVKAVKVSRLQ

SEQ ID NO: 63969 - protein, 34 aa, Artificial Sequence; identical to SEQ ID NO: 21799
  Cyclic GFR-binding peptide
  MOD_RES (33)..(33): Xaa is C or S

SEQ ID NO: 63970 - protein, 31 aa, Artificial Sequence
  Cyclic GFR-binding peptide
  MOD_RES (1)..(3): Xaa is C or S
XGXGEVVMDSMEGIVVKENEDMIQMTINSLE

SEQ ID NO: 63971 - protein, 36 aa, Artificial Sequence
  Cyclic GFR-binding peptide
  MOD_RES (31)..(32): Xaa is C or S
SKVVMVQVEKVKPTRGVVKAIKVSRLDQPVXXPSAS

SEQ ID NO: 63972 - protein, 43 aa, Artificial Sequence; identical to SEQ ID NO: 21800
  Cyclic GFR-binding peptide
  MOD_RES (2)..(4)..(38): Xaa is C or S

SEQ ID NO: 63973 - protein, 29 aa, Artificial Sequence
  Cyclic GFR-binding peptide
  MOD_RES (1)..(1): Xaa is C or S
XSKVVMVQVEKVKPTRGVVKAIKVSRLDQ

SEQ ID NO: 63974 - protein, 28 aa, Artificial Sequence
  Cyclic GFR-binding peptide
  MOD_RES (26)..(27): Xaa is C or S
NSLQEIVNSSDDYYLVTLPELKTPAXXP

SEQ ID NO: 63975 - protein, 36 aa, Artificial Sequence; identical to SEQ ID NO: 14624
  Cyclic GFR-binding peptide
  MOD_RES (32)..(33): Xaa is C or S

SEQ ID NO: 63976 - protein, 31 aa, Artificial Sequence; identical to SEQ ID NO: 14625
  Cyclic GFR-binding peptide
  MOD_RES (30)..(30): Xaa is C or S

SEQ ID NO: 63977 - protein, 34 aa, Artificial Sequence
  Cyclic GFR-binding peptide
  MOD_RES (1)..(3): Xaa is C or S
XGXARVVMNVQVEKIVNSSDDVKAVKVSRLQTPA

SEQ ID NO: 63978 - protein, 38 aa, Artificial Sequence
  Cyclic GFR-binding peptide
  MOD_RES (1)..(33): Xaa is C or S
XSRVVMNVQVEKIVNSSDDVKAVKVSRLKTPAXTPKTV

SEQ ID NO: 63979 - protein, 41 aa, Artificial Sequence; identical to SEQ ID NO: 14632
  Cyclic GFR-binding peptide
  MOD_RES (2)..(4)..(35)..(36): Xaa is C or S

SEQ ID NO: 63980 - protein, 34 aa, Artificial Sequence; identical to SEQ ID NO: 14633
  Cyclic GFR-binding peptide
  MOD_RES (28)..(29): Xaa is C or S

SEQ ID NO: 63981 - protein, 36 aa, Artificial Sequence
  Cyclic GFR-binding peptide
  MOD_RES (31)..(31): Xaa is C or S
RVVMNVTAKKIVNSSDDIKRVQVPRLKTPAXTPKTV

SEQ ID NO: 63982 - protein, 31 aa, Artificial Sequence; identical to SEQ ID NO: 21819
  Cyclic GFR-binding peptide

SEQ ID NO: 63983 - protein, 32 aa, Artificial Sequence; identical to SEQ ID NO: 14655
  Cyclic GFR-binding peptide
  MOD_RES (1)..(3): Xaa is C or S

SEQ ID NO: 63984 - protein, 34 aa, Artificial Sequence
  Cyclic GFR-binding peptide
  MOD_RES (31)..(32): Xaa is C or S
EVVMESMEGIVVKDYEDMIQMTINSLETPVXXAK

SEQ ID NO: 63985 - protein, 36 aa, Artificial Sequence; identical to SEQ ID NO: 14658
  Cyclic GFR-binding peptide
  MOD_RES (31)..(32): Xaa is C or S

SEQ ID NO: 63986 - protein, 29 aa, Artificial Sequence
  Cyclic GFR-binding peptide
DELTSMEGIFIPKKRVIEMIQVTINSLQV

SEQ ID NO: 63987 - protein, 30 aa, Artificial Sequence
  Cyclic GFR-binding peptide
  MOD_RES (27)..(28): Xaa is C or S
MVTAKKVKPKRGVIKRIQVPRLAQPVXXPA

SEQ ID NO: 63988 - protein, 28 aa, Artificial Sequence
  Cyclic GFR-binding peptide
GEVVMEVTAKKVVKDYEDIKRMQVPRLE

SEQ ID NO: 63989 - protein, 40 aa, Artificial Sequence
  Cyclic GFR-binding peptide
  MOD_RES (1)..(3)..(35)..(36): Xaa is C or S
XGXARVVMNSMEGIIVNSSDDMIQVTINSLQTPAXXPKPV

SEQ ID NO: 63990 - protein, 39 aa, Artificial Sequence; identical to SEQ ID NO: 21826
  Cyclic GFR-binding peptide
  MOD_RES (33)..(33): Xaa is C or S

SEQ ID NO: 63991 - protein, 39 aa, Artificial Sequence; identical to SEQ ID NO: 21828
  Cyclic GFR-binding peptide
  MOD_RES (1)..(3): Xaa is C or S

SEQ ID NO: 63992 - protein, 31 aa, Artificial Sequence; identical to SEQ ID NO: 14662
  Cyclic GFR-binding peptide
  MOD_RES (1)..(1): Xaa is C or S

SEQ ID NO: 63993 - protein, 36 aa, Artificial Sequence
  Cyclic GFR-binding peptide
  MOD_RES (1)..(3)..(34)..(35): Xaa is C or S
XKXSKVIMVTAKKIKPTKGIIKRIQVPRLDQSVXXP

SEQ ID NO: 63994 - protein, 32 aa, Artificial Sequence
  Cyclic GFR-binding peptide
  MOD_RES (29)..(30): Xaa is C or S
VMESMEGIVVKDYEDMIQMTINSLETPVXXAK

SEQ ID NO: 63995 - protein, 33 aa, Artificial Sequence
  Cyclic GFR-binding peptide
  MOD_RES (2)..(4): Xaa is C or S
HXGXARVVMNVTAKKIVNSSDDIKRVQVPRLQT

SEQ ID NO: 63996 - protein, 32 aa, Artificial Sequence; identical to SEQ ID NO: 14668
  Cyclic GFR-binding peptide
  MOD_RES (27)..(28): Xaa is C or S

SEQ ID NO: 63997 - protein, 27 aa, Artificial Sequence
  Cyclic GFR-binding peptide
  MOD_RES (2)..(2): Xaa is C or S
KXSKVVMNSLQEVKPTRGVYYLITLPE

SEQ ID NO: 63998 - protein, 25 aa, Artificial Sequence
  Cyclic GFR-binding peptide
VMVTAKKVKPTRGVIKRIQVPRLDQ

SEQ ID NO: 63999 - protein, 27 aa, Artificial Sequence
  Cyclic GFR-binding peptide
  MOD_RES (1)..(1): Xaa is C or S
XSRVVMNNSLQEIVNSSDDYYLVTLPE

SEQ ID NO: 64000 - protein, 38 aa, Artificial Sequence
  Cyclic GFR-binding peptide
  MOD_RES (1)..(32)..(33): Xaa is C or S
XSRVIMSMEGIVKPKRGVMIQITINSLAQPVXXPAASA

SEQ ID NO: 64001 - protein, 30 aa, Artificial Sequence; identical to SEQ ID NO: 21846
  Cyclic GFR-binding peptide
  MOD_RES (30)..(30): Xaa is C or S

SEQ ID NO: 64002 - protein, 30 aa, Artificial Sequence; identical to SEQ ID NO: 21848
  Cyclic GFR-binding peptide

SEQ ID NO: 64003 - protein, 39 aa, Artificial Sequence; identical to SEQ ID NO: 14683
  Cyclic GFR-binding peptide
  MOD_RES (2)..(34)..(35): Xaa is C or S

SEQ ID NO: 64004 - protein, 36 aa, Artificial Sequence
  Cyclic GFR-binding peptide
  MOD_RES (1)..(3)..(35)..(36): Xaa is C or S
XGXGEVVMDVQVEKVVKENEDVKAMKVSRLETPVXX

SEQ ID NO: 64005 - protein, 28 aa, Artificial Sequence
  Cyclic GFR-binding peptide
VVMDSMEGIVVKENEDMIQMTINSLETP

SEQ ID NO: 64006 - protein, 32 aa, Artificial Sequence
  Cyclic GFR-binding peptide
  MOD_RES (28)..(29): Xaa is C or S
MESMEGIVVKDYEDMIQMTINSLETPVXXAKP

SEQ ID NO: 64007 - protein, 33 aa, Artificial Sequence
  Cyclic GFR-binding peptide
  MOD_RES (31)..(32): Xaa is C or S
SKVVMVTAKKVKPTRGVIKRIQVPRLDQPVXXP

SEQ ID NO: 64008 - protein, 33 aa, Artificial Sequence; identical to SEQ ID NO: 21856
  Cyclic GFR-binding peptide
  MOD_RES (32)..(32): Xaa is C or S

SEQ ID NO: 64009 - protein, 34 aa, Artificial Sequence
  Cyclic GFR-binding peptide
  MOD_RES (32)..(32): Xaa is C or S
SRVVMNSMEGIIVNSSDDMIQVTINSLKTPAXTP

SEQ ID NO: 64010 - protein, 28 aa, Artificial Sequence
  Cyclic GFR-binding peptide
SKVVMNSLQEVKPTRGVYYLITLPELDQ

SEQ ID NO: 64011 - protein, 23 aa, Artificial Sequence
  Cyclic GFR-binding peptide
VMDVQVEKVVKENEDVKAMKVSR

SEQ ID NO: 64012 - protein, 35 aa, Artificial Sequence; identical to SEQ ID NO: 21860
  Cyclic GFR-binding peptide
  MOD_RES (2)..(4): Xaa is C or S

SEQ ID NO: 64013 - protein, 35 aa, Artificial Sequence; identical to SEQ ID NO: 14699
  Cyclic GFR-binding peptide
  MOD_RES (30)..(31): Xaa is C or S

SEQ ID NO: 64014 - protein, 31 aa, Artificial Sequence; identical to SEQ ID NO: 14700
  Cyclic GFR-binding peptide
  MOD_RES (30)..(31): Xaa is C or S

SEQ ID NO: 64015 - protein, 29 aa, Artificial Sequence
  Cyclic GFR-binding peptide
  MOD_RES (1)..(1): Xaa is C or S
XGEVVMENSLQEVVKDYEDYYVMPLPELE

SEQ ID NO: 64016 - protein, 27 aa, Artificial Sequence
  Cyclic GFR-binding peptide
  MOD_RES (1)..(1): Xaa is C or S
XSKVVMNSLQEVKPTRGVYYVIPLPEL

SEQ ID NO: 64017 - protein, 33 aa, Artificial Sequence
  Cyclic GFR-binding peptide
  MOD_RES (33)..(33): Xaa is C or S
ELRNSLQELKPKKRVYEYYVVPLPEHHVRSPQX

SEQ ID NO: 64018 - protein, 39 aa, Artificial Sequence; identical to SEQ ID NO: 21865
  Cyclic GFR-binding peptide
  MOD_RES (1)..(35): Xaa is C or S

SEQ ID NO: 64019 - protein, 25 aa, Artificial Sequence
  Cyclic GFR-binding peptide
VMDNSLQEVVKENEDYYVMPLPELE

SEQ ID NO: 64020 - protein, 28 aa, Artificial Sequence
  Cyclic GFR-binding peptide
  MOD_RES (26)..(27): Xaa is C or S
VQVEKVKPKRGVVKAIKVSRLAQPVXXP

SEQ ID NO: 64021 - protein, 33 aa, Artificial Sequence
  Cyclic GFR-binding peptide
  MOD_RES (31)..(31): Xaa is C or S
RVVMNSMEGIIVNSSDDMIQVTINSLKTPAXTP

SEQ ID NO: 64022 - protein, 27 aa, Artificial Sequence
  Cyclic GFR-binding peptide
VVMNSLQEVKPTRGVYYVIPLPELDQP

SEQ ID NO: 64023 - protein, 38 aa, Artificial Sequence; identical to SEQ ID NO: 21875
  Cyclic GFR-binding peptide
  MOD_RES (1)..(3): Xaa is C or S

SEQ ID NO: 64024 - protein, 38 aa, Artificial Sequence; identical to SEQ ID NO: 14719
  Cyclic GFR-binding peptide
  MOD_RES (2)..(4)..(36): Xaa is C or S

SEQ ID NO: 64025 - protein, 35 aa, Artificial Sequence; identical to SEQ ID NO: 14720
  Cyclic GFR-binding peptide
  MOD_RES (32)..(32): Xaa is C or S

SEQ ID NO: 64026 - protein, 35 aa, Artificial Sequence; identical to SEQ ID NO: 21877
  Cyclic GFR-binding peptide
  MOD_RES (32)..(32): Xaa is C or S

SEQ ID NO: 64027 - protein, 24 aa, Artificial Sequence
  Cyclic GFR-binding peptide
MNNSLQEIVNSSDDYYLVTLPELQ

SEQ ID NO: 64028 - protein, 35 aa, Artificial Sequence; identical to SEQ ID NO: 14722
  Cyclic GFR-binding peptide
  MOD_RES (1)..(3)..(35): Xaa is C or S

SEQ ID NO: 64029 - protein, 32 aa, Artificial Sequence
  Cyclic GFR-binding peptide
  MOD_RES (2)..(2): Xaa is C or S
GXGEVVMDSMEGIVVKENEDMIQMTINSLETP

SEQ ID NO: 64030 - protein, 30 aa, Artificial Sequence
  Cyclic GFR-binding peptide
  MOD_RES (2)..(2): Xaa is C or S
GXSRVVMNSMEGIIVNSSDDMIQVTINSLK

SEQ ID NO: 64031 - protein, 40 aa, Artificial Sequence; identical to SEQ ID NO: 21882
  Cyclic GFR-binding peptide
  MOD_RES (1)..(35): Xaa is C or S

SEQ ID NO: 64032 - protein, 28 aa, Artificial Sequence
  Cyclic GFR-binding peptide
  MOD_RES (1)..(1): Xaa is C or S
XARVVMNVTAKKIVNSSDDIKRVQVPRL

SEQ ID NO: 64033 - protein, 28 aa, Artificial Sequence
  Cyclic GFR-binding peptide
HEELRNSLQELKPKKRVYEYYVVPLPEH

SEQ ID NO: 64034 - protein, 32 aa, Artificial Sequence
  Cyclic GFR-binding peptide
  MOD_RES (26)..(27): Xaa is C or S
SMEGIVKPTRGVMIQITINSLDQPVXXPSASA

SEQ ID NO: 64035 - protein, 34 aa, Artificial Sequence
  Cyclic GFR-binding peptide
  MOD_RES (28)..(28): Xaa is C or S
NSLQEHQGQHPKIRYYLMTLPEEETPVXELGEDN

SEQ ID NO: 64036 - protein, 23 aa, Artificial Sequence
  Cyclic GFR-binding peptide
MNNSLQEIVNSSDDYYLVTLPEL

SEQ ID NO: 64037 - protein, 30 aa, Artificial Sequence
  Cyclic GFR-binding peptide
SRVIMVTAKKVKPKRGVIKRIQVPRLAQPV

SEQ ID NO: 64038 - protein, 30 aa, Artificial Sequence; identical to SEQ ID NO: 14731
  Cyclic GFR-binding peptide
  MOD_RES (2)..(4): Xaa is C or S

SEQ ID NO: 64039 - protein, 24 aa, Artificial Sequence
  Cyclic GFR-binding peptide
NSLQEFIPKKRVIEYYVVPLPELQ

SEQ ID NO: 64040 - protein, 30 aa, Artificial Sequence
  Cyclic GFR-binding peptide
  MOD_RES (2)..(2): Xaa is C or S
GXGEVVMESMEGIVVKDYEDMIQMTINSLE

SEQ ID NO: 64041 - protein, 33 aa, Artificial Sequence
  Cyclic GFR-binding peptide
  MOD_RES (2)..(33): Xaa is C or S
KXSKVVMVTAKKVKPTRGVIKRIQVPRLDQPVX

SEQ ID NO: 64042 - protein, 37 aa, Artificial Sequence; identical to SEQ ID NO: 21893
  Cyclic GFR-binding peptide
  MOD_RES (34)..(34): Xaa is C or S

SEQ ID NO: 64043 - protein, 29 aa, Artificial Sequence
  Cyclic GFR-binding peptide
NSLQEFIPKKRVIEYYVVPLPELQVQTPR

SEQ ID NO: 64044 - protein, 34 aa, Artificial Sequence
  Cyclic GFR-binding peptide
  MOD_RES (32)..(33): Xaa is C or S
SRVVMNVQVEKIVNSSDDVKAVKVSRLKTPAXXP

SEQ ID NO: 64045 - protein, 34 aa, Artificial Sequence
  Cyclic GFR-binding peptide
  MOD_RES (29)..(30): Xaa is C or S
VMNVQVEKIVNSSDDVKAVKVSRLQTPAXXPKPV

SEQ ID NO: 64046 - protein, 33 aa, Artificial Sequence; identical to SEQ ID NO: 14749
  Cyclic GFR-binding peptide
  MOD_RES (27)..(28): Xaa is C or S

SEQ ID NO: 64047 - protein, 35 aa, Artificial Sequence; identical to SEQ ID NO: 48935
  Cyclic GFR-binding peptide
  MOD_RES (31)..(32): Xaa is C or S

SEQ ID NO: 64048 - protein, 33 aa, Artificial Sequence; identical to SEQ ID NO: 14760
  Cyclic GFR-binding peptide
  MOD_RES (28)..(29): Xaa is C or S

SEQ ID NO: 64049 - protein, 32 aa, Artificial Sequence; identical to SEQ ID NO: 14762
  Cyclic GFR-binding peptide
  MOD_RES (2)..(2): Xaa is C or S

SEQ ID NO: 64050 - protein, 28 aa, Artificial Sequence
  Cyclic GFR-binding peptide
  MOD_RES (28)..(28): Xaa is C or S
MNNSLQEIVNSSDDYYLVTLPELQTPAX

SEQ ID NO: 64051 - protein, 32 aa, Artificial Sequence
  Cyclic GFR-binding peptide
  MOD_RES (26)..(27): Xaa is C or S
SMEGIVVKDYEDMIQMTINSLETPVXXAKPIS

SEQ ID NO: 64052 - protein, 30 aa, Artificial Sequence
  Cyclic GFR-binding peptide
  MOD_RES (29)..(30): Xaa is C or S
VMDSMEGIVVKENEDMIQMTINSLETPVXX

SEQ ID NO: 64053 - protein, 36 aa, Artificial Sequence; identical to SEQ ID NO: 14770
  Cyclic GFR-binding peptide
  MOD_RES (32)..(33): Xaa is C or S

SEQ ID NO: 64054 - protein, 31 aa, Artificial Sequence
  Cyclic GFR-binding peptide
  MOD_RES (29)..(30): Xaa is C or S
VIMSMEGIVKPKRGVMIQITINSLAQPVXXP

SEQ ID NO: 64055 - protein, 38 aa, Artificial Sequence
  Cyclic GFR-binding peptide
  MOD_RES (37)..(37): Xaa is C or S
ELHEELRNSLQELKPKKRVYEYYVVPLPEHHVRSPQXK

SEQ ID NO: 64056 - protein, 39 aa, Artificial Sequence
  Cyclic GFR-binding peptide
  MOD_RES (2)..(34)..(35): Xaa is C or S
GXGEVVMEVTAKKVVKDYEDIKRMQVPRLETPVXXAKPI

SEQ ID NO: 64057 - protein, 33 aa, Artificial Sequence
  Cyclic GFR-binding peptide
  MOD_RES (1)..(3): Xaa is C or S
XGXARVVMNSMEGIIVNSSDDMIQVTINSLQTP

SEQ ID NO: 64058 - protein, 32 aa, Artificial Sequence; identical to SEQ ID NO: 14784
  Cyclic GFR-binding peptide
  MOD_RES (1)..(1): Xaa is C or S

SEQ ID NO: 64059 - protein, 32 aa, Artificial Sequence; identical to SEQ ID NO: 14786
  Cyclic GFR-binding peptide
  MOD_RES (1)..(3): Xaa is C or S

SEQ ID NO: 64060 - protein, 39 aa, Artificial Sequence; identical to SEQ ID NO: 21916
  Cyclic GFR-binding peptide
  MOD_RES (2)..(39): Xaa is C or S

SEQ ID NO: 64061 - protein, 23 aa, Artificial Sequence
  Cyclic GFR-binding peptide
NSLQEVKPTRGVYYLITLPELDQ

SEQ ID NO: 64062 - protein, 30 aa, Artificial Sequence
  Cyclic GFR-binding peptide
  MOD_RES (1)..(1): Xaa is C or S
XGEVVMEVQVEKVVKDYEDVKAMKVSRLET

SEQ ID NO: 64063 - protein, 31 aa, Artificial Sequence
  Cyclic GFR-binding peptide
  MOD_RES (2)..(2): Xaa is C or S
KXSRVIMVQVEKVKPKRGVVKAIKVSRLAQP

SEQ ID NO: 64064 - protein, 30 aa, Artificial Sequence
  Cyclic GFR-binding peptide
  MOD_RES (1)..(1): Xaa is C or S
XGEVVMDSMEGIVVKENEDMIQMTINSLET

SEQ ID NO: 64065 - protein, 25 aa, Artificial Sequence
  Cyclic GFR-binding peptide
VVMENSLQEVVKDYEDYYVMPLPEL

SEQ ID NO: 64066 - protein, 36 aa, Artificial Sequence
  Cyclic GFR-binding peptide
  MOD_RES (2)..(4)..(36): Xaa is C or S
RXGXGEVVMESMEGIVVKDYEDMIQMTINSLETPVX

SEQ ID NO: 64067 - protein, 32 aa, Artificial Sequence; identical to SEQ ID NO: 21923
  Cyclic GFR-binding peptide
  MOD_RES (2)..(2): Xaa is C or S

SEQ ID NO: 64068 - protein, 30 aa, Artificial Sequence
  Cyclic GFR-binding peptide
  MOD_RES (30)..(30): Xaa is C or S
KVVMSMEGIVKPTRGVMIQITINSLDQPVX

SEQ ID NO: 64069 - protein, 28 aa, Artificial Sequence
  Cyclic GFR-binding peptide
  MOD_RES (1)..(3): Xaa is C or S
XKXSKVVMNSLQEVKPTRGVYYLITLPE

SEQ ID NO: 64070 - protein, 39 aa, Artificial Sequence; identical to SEQ ID NO: 14794
  Cyclic GFR-binding peptide
  MOD_RES (2)..(4)..(36)..(37): Xaa is C or S

SEQ ID NO: 64071 - protein, 31 aa, Artificial Sequence; identical to SEQ ID NO: 14801
  Cyclic GFR-binding peptide
  MOD_RES (28)..(29): Xaa is C or S

SEQ ID NO: 64072 - protein, 31 aa, Artificial Sequence; identical to SEQ ID NO: 14805
  Cyclic GFR-binding peptide
  MOD_RES (31)..(31): Xaa is C or S

SEQ ID NO: 64073 - protein, 34 aa, Artificial Sequence
  Cyclic GFR-binding peptide
  MOD_RES (32)..(32): Xaa is C or S
SRVVMNVTAKKIVNSSDDIKRVQVPRLKTPAXTP

SEQ ID NO: 64074 - protein, 35 aa, Artificial Sequence; identical to SEQ ID NO: 14811
  Cyclic GFR-binding peptide
  MOD_RES (1)..(33)..(34): Xaa is C or S

SEQ ID NO: 64075 - protein, 29 aa, Artificial Sequence
  Cyclic GFR-binding peptide
  MOD_RES (1)..(1): Xaa is C or S
XSRVVMNVTAKKIVNSSDDIKRVQVPRLK

SEQ ID NO: 64076 - protein, 30 aa, Artificial Sequence
  Cyclic GFR-binding peptide
  MOD_RES (1)..(3): Xaa is C or S
XGXARVVMNSMEGIIVNSSDDMIQVTINSL

SEQ ID NO: 64077 - protein, 32 aa, Artificial Sequence; identical to SEQ ID NO: 14819
  Cyclic GFR-binding peptide
  MOD_RES (30)..(31): Xaa is C or S

SEQ ID NO: 64078 - protein, 31 aa, Artificial Sequence
  Cyclic GFR-binding peptide
  MOD_RES (31)..(31): Xaa is C or S
RVVMNVQVEKIVNSSDDVKAVKVSRLQTPAX

SEQ ID NO: 64079 - protein, 32 aa, Artificial Sequence
  Cyclic GFR-binding peptide
  MOD_RES (30)..(31): Xaa is C or S
VVMESMEGIVVKDYEDMIQMTINSLETPVXXA

SEQ ID NO: 64080 - protein, 34 aa, Artificial Sequence; identical to SEQ ID NO: 14823
  Cyclic GFR-binding peptide
  MOD_RES (30)..(31): Xaa is C or S

SEQ ID NO: 64081 - protein, 26 aa, Artificial Sequence
  Cyclic GFR-binding peptide
VVMNNSLQEIVNSSDDYYLVTLPELQ

SEQ ID NO: 64082 - protein, 31 aa, Artificial Sequence
  Cyclic GFR-binding peptide
  MOD_RES (27)..(27): Xaa is C or S
NVTAKKIVNSSDDIKRVQVPRLKTPAXTPKT

SEQ ID NO: 64083 - protein, 37 aa, Artificial Sequence
  Cyclic GFR-binding peptide
  MOD_RES (2)..(4)..(36)..(37): Xaa is C or S
RXGXGEVVMDVTAKKVVKENEDIKRMQVPRLETPVXX

SEQ ID NO: 64084 - protein, 29 aa, Artificial Sequence
  Cyclic GFR-binding peptide
SKVVMSMEGIVKPTRGVMIQITINSLDQP

SEQ ID NO: 64085 - protein, 29 aa, Artificial Sequence
  Cyclic GFR-binding peptide
  MOD_RES (29)..(29): Xaa is C or S
VMDNSLQEVVKENEDYYLMTLPELETPVX

SEQ ID NO: 64086 - protein, 34 aa, Artificial Sequence
  Cyclic GFR-binding peptide
  MOD_RES (30)..(31): Xaa is C or S
VVMNVTAKKIVNSSDDIKRVQVPRLKTPAXXPKP

SEQ ID NO: 64087 - protein, 32 aa, Artificial Sequence; identical to SEQ ID NO: 21958
  Cyclic GFR-binding peptide
  MOD_RES (1)..(1): Xaa is C or S

SEQ ID NO: 64088 - protein, 23 aa, Artificial Sequence
  Cyclic GFR-binding peptide
FNSLQEHQGQHPKIRYYLMTLPE

SEQ ID NO: 64089 - protein, 39 aa, Artificial Sequence
  Cyclic GFR-binding peptide
  MOD_RES (2)..(33)..(34): Xaa is C or S
KXSRVIMSMEGIVKPKRGVMIQITINSLAQPVXXPAASA

SEQ ID NO: 64090 - protein, 28 aa, Artificial Sequence
  Cyclic GFR-binding peptide
EVVMDVQVEKVVKENEDVKAMKVSRLET

SEQ ID NO: 64091 - protein, 25 aa, Artificial Sequence
  Cyclic GFR-binding peptide
IMVQVEKIKPTKGIVKAIKVSRLDQ

SEQ ID NO: 64092 - protein, 31 aa, Artificial Sequence; identical to SEQ ID NO: 14842
  Cyclic GFR-binding peptide
  MOD_RES (1)..(3): Xaa is C or S

SEQ ID NO: 64093 - protein, 38 aa, Artificial Sequence
  Cyclic GFR-binding peptide
  MOD_RES (2)..(4)..(36)..(37): Xaa is C or S
HXGXARVVMNVQVEKIVNSSDDVKAVKVSRLQTPAXXP

SEQ ID NO: 64094 - protein, 33 aa, Artificial Sequence
  Cyclic GFR-binding peptide
  MOD_RES (30)..(31): Xaa is C or S
KVIMSMEGIIKPTKGIMIQITINSLDQSVXXPS

SEQ ID NO: 64095 - protein, 31 aa, Artificial Sequence
  Cyclic GFR-binding peptide
  MOD_RES (1)..(1): Xaa is C or S
XSKVVMSMEGIVKPTRGVMIQITINSLDQPV

SEQ ID NO: 64096 - protein, 36 aa, Artificial Sequence; identical to SEQ ID NO: 14852
  Cyclic GFR-binding peptide
  MOD_RES (32)..(33): Xaa is C or S

SEQ ID NO: 64097 - protein, 39 aa, Artificial Sequence; identical to SEQ ID NO: 21971
  Cyclic GFR-binding peptide
  MOD_RES (2)..(4): Xaa is C or S

SEQ ID NO: 64098 - protein, 30 aa, Artificial Sequence; identical to SEQ ID NO: 14854
  Cyclic GFR-binding peptide
  MOD_RES (29)..(30): Xaa is C or S

SEQ ID NO: 64099 - protein, 34 aa, Artificial Sequence; identical to SEQ ID NO: 14855
  Cyclic GFR-binding peptide
  MOD_RES (31)..(32): Xaa is C or S

SEQ ID NO: 64100 - protein, 31 aa, Artificial Sequence
  Cyclic GFR-binding peptide
DELTNSLQEFIPKKRVIEYYLVTLPELQVQT

SEQ ID NO: 64101 - protein, 20 aa, Artificial Sequence
  Cyclic GFR-binding peptide
NSLQEVVKENEDYYLMTLPE

SEQ ID NO: 64102 - protein, 41 aa, Artificial Sequence
  Cyclic GFR-binding peptide
  MOD_RES (2)..(4)..(35)..(36): Xaa is C or S
SXKXSRVIMVTAKKVKPKRGVIKRIQVPRLAQPVXXPAASA

SEQ ID NO: 64103 - protein, 29 aa, Artificial Sequence
  Cyclic GFR-binding peptide
  MOD_RES (28)..(29): Xaa is C or S
MEVTAKKVVKDYEDIKRMQVPRLETPVXX

SEQ ID NO: 64104 - protein, 32 aa, Artificial Sequence; identical to SEQ ID NO: 14862
  Cyclic GFR-binding peptide
  MOD_RES (2)..(4): Xaa is C or S

SEQ ID NO: 64105 - protein, 33 aa, Artificial Sequence; identical to SEQ ID NO: 14864
  Cyclic GFR-binding peptide
  MOD_RES (1)..(33): Xaa is C or S

SEQ ID NO: 64106 - protein, 34 aa, Artificial Sequence; identical to SEQ ID NO: 14866
  Cyclic GFR-binding peptide
  MOD_RES (31)..(32): Xaa is C or S

SEQ ID NO: 64107 - protein, 36 aa, Artificial Sequence
  Cyclic GFR-binding peptide
  MOD_RES (1)..(32)..(33): Xaa is C or S
XSKVIMSMEGIIKPTKGIMIQITINSLDQSVXXPSA

SEQ ID NO: 64108 - protein, 39 aa, Artificial Sequence
  Cyclic GFR-binding peptide
  MOD_RES (2)..(4)..(35)..(36): Xaa is C or S
SXKXSKVVMSMEGIVKPTRGVMIQITINSLDQPVXXPSA

SEQ ID NO: 64109 - protein, 36 aa, Artificial Sequence; identical to SEQ ID NO: 14868
  Cyclic GFR-binding peptide
  MOD_RES (31)..(32): Xaa is C or S

SEQ ID NO: 64110 - protein, 34 aa, Artificial Sequence; identical to SEQ ID NO: 21982
  Cyclic GFR-binding peptide
  MOD_RES (2)..(4): Xaa is C or S

SEQ ID NO: 64111 - protein, 30 aa, Artificial Sequence; identical to SEQ ID NO: 14871
  Cyclic GFR-binding peptide
  MOD_RES (2)..(4): Xaa is C or S

SEQ ID NO: 64112 - protein, 36 aa, Artificial Sequence; identical to SEQ ID NO: 14872
  Cyclic GFR-binding peptide
  MOD_RES (2)..(34)..(35): Xaa is C or S

SEQ ID NO: 64113 - protein, 32 aa, Artificial Sequence
  Cyclic GFR-binding peptide
  MOD_RES (32)..(32): Xaa is C or S
GEVVMDVQVEKVVKENEDVKAMKVSRLETPVX

SEQ ID NO: 64114 - protein, 33 aa, Artificial Sequence
  Cyclic GFR-binding peptide
  MOD_RES (30)..(31): Xaa is C or S
VVMDVTAKKVVKENEDIKRMQVPRLETPVXXAK

SEQ ID NO: 64115 - protein, 41 aa, Artificial Sequence; identical to SEQ ID NO: 14874
  Cyclic GFR-binding peptide
  MOD_RES (2)..(4)..(35)..(36): Xaa is C or S

SEQ ID NO: 64116 - protein, 27 aa, Artificial Sequence
  Cyclic GFR-binding peptide
LFVTAKKHQGQHPKIRIKRMQVPREET

SEQ ID NO: 64117 - protein, 30 aa, Artificial Sequence
  Cyclic GFR-binding peptide
  MOD_RES (28)..(28): Xaa is C or S
MNVTAKKIVNSSDDIKRVQVPRLKTPAXTP

SEQ ID NO: 64118 - protein, 21 aa, Artificial Sequence
  Cyclic GFR-binding peptide
MVQVEKVKPKRGVVKAIKVSR

SEQ ID NO: 64119 - protein, 20 aa, Artificial Sequence
  Cyclic GFR-binding peptide
VQVEKVKPTRGVVKAIKVSR

SEQ ID NO: 64120 - protein, 28 aa, Artificial Sequence
  Cyclic GFR-binding peptide
ELTNSLQEFIPKKRVIEYYVVPLPELQV

SEQ ID NO: 64121 - protein, 39 aa, Artificial Sequence; identical to SEQ ID NO: 14877
  Cyclic GFR-binding peptide
  MOD_RES (2)..(4)..(35)..(36): Xaa is C or S

SEQ ID NO: 64122 - protein, 34 aa, Artificial Sequence
  Cyclic GFR-binding peptide
  MOD_RES (30)..(31): Xaa is C or S
VVMNVTAKKIVNSSDDIKRVQVPRLQTPAXXPKP

SEQ ID NO: 64123 - protein, 26 aa, Artificial Sequence
  Cyclic GFR-binding peptide
GEVVMDVQVEKVVKENEDVKAMKVSR

SEQ ID NO: 64124 - protein, 37 aa, Artificial Sequence; identical to SEQ ID NO: 14883
  Cyclic GFR-binding peptide
  MOD_RES (2)..(34)..(35): Xaa is C or S

SEQ ID NO: 64125 - protein, 25 aa, Artificial Sequence
  Cyclic GFR-binding peptide
TSMEGIFIPKKRVIEMIQVTINSLQ

SEQ ID NO: 64126 - protein, 37 aa, Artificial Sequence; identical to SEQ ID NO: 14884
  Cyclic GFR-binding peptide
  MOD_RES (31)..(32): Xaa is C or S

SEQ ID NO: 64127 - protein, 29 aa, Artificial Sequence
  Cyclic GFR-binding peptide
  MOD_RES (1)..(1): Xaa is C or S
XSKVVMSMEGIVKPTRGVMIQITINSLDQ

SEQ ID NO: 64128 - protein, 22 aa, Artificial Sequence
  Cyclic GFR-binding peptide
IMSMEGIIKPTKGIMIQITINS

SEQ ID NO: 64129 - protein, 26 aa, Artificial Sequence
  Cyclic GFR-binding peptide
VMNNSLQEIVNSSDDYYLVTLPELKT

SEQ ID NO: 64130 - protein, 34 aa, Artificial Sequence
  Cyclic GFR-binding peptide
  MOD_RES (29)..(30): Xaa is C or S
VIMSMEGIIKPTKGIMIQITINSLDQSVXXPSAS

SEQ ID NO: 64131 - protein, 36 aa, Artificial Sequence; identical to SEQ ID NO: 22002
  Cyclic GFR-binding peptide
  MOD_RES (33)..(33): Xaa is C or S

SEQ ID NO: 64132 - protein, 34 aa, Artificial Sequence
  Cyclic GFR-binding peptide
  MOD_RES (2)..(4): Xaa is C or S
SXKXSKVVMVTAKKVKPTRGVIKRIQVPRLDQPV

SEQ ID NO: 64133 - protein, 27 aa, Artificial Sequence
  Cyclic GFR-binding peptide
EVVMDVQVEKVVKENEDVKAMKVSRLE

SEQ ID NO: 64134 - protein, 35 aa, Artificial Sequence
  Cyclic GFR-binding peptide
  MOD_RES (2)..(2): Xaa is C or S
AXELHEELRNSLQELKPKKRVYEYYLVTLPEHHVR

SEQ ID NO: 64135 - protein, 39 aa, Artificial Sequence
  Cyclic GFR-binding peptide
  MOD_RES (1)..(38): Xaa is C or S
XALHDELTNSLQEFIPKKRVIEYYLVTLPELQVQTPRXQ

SEQ ID NO: 64136 - protein, 35 aa, Artificial Sequence
  Cyclic GFR-binding peptide
  MOD_RES (32)..(32): Xaa is C or S
LRNSLQELKPKKRVYEYYVVPLPEHHVRSPQXKVS

SEQ ID NO: 64137 - protein, 38 aa, Artificial Sequence
  Cyclic GFR-binding peptide
  MOD_RES (2)..(4)..(36): Xaa is C or S
HXGXSRVVMNVTAKKIVNSSDDIKRVQVPRLKTPAXTP

SEQ ID NO: 64138 - protein, 29 aa, Artificial Sequence
  Cyclic GFR-binding peptide
EVVMDVQVEKVVKENEDVKAMKVSRLETP

SEQ ID NO: 64139 - protein, 39 aa, Artificial Sequence; identical to SEQ ID NO: 14923
  Cyclic GFR-binding peptide
  MOD_RES (2)..(33)..(34): Xaa is C or S

SEQ ID NO: 64140 - protein, 28 aa, Artificial Sequence
  Cyclic GFR-binding peptide
  MOD_RES (1)..(1): Xaa is C or S
XGEVVMDVQVEKVVKENEDVKAMKVSRL

SEQ ID NO: 64141 - protein, 41 aa, Artificial Sequence; identical to SEQ ID NO: 22019
  Cyclic GFR-binding peptide
  MOD_RES (2)..(4)..(41): Xaa is C or S

SEQ ID NO: 64142 - protein, 39 aa, Artificial Sequence
  Cyclic GFR-binding peptide
  MOD_RES (36)..(36): Xaa is C or S
LHDELTNSLQEFIPKKRVIEYYLVTLPELQVQTPRXQVN

SEQ ID NO: 64143 - protein, 28 aa, Artificial Sequence
  Cyclic GFR-binding peptide
VQVEKFIPKKRVIEVKAVKVSRLQVQTP

SEQ ID NO: 64144 - protein, 29 aa, Artificial Sequence
  Cyclic GFR-binding peptide
KVVMSMEGIVKPTRGVMIQITINSLDQPV

SEQ ID NO: 64145 - protein, 29 aa, Artificial Sequence
  Cyclic GFR-binding peptide
LHDELTVQVEKFIPKKRVIEVKAVKVSRL

SEQ ID NO: 64146 - protein, 36 aa, Artificial Sequence
  Cyclic GFR-binding peptide
  MOD_RES (33)..(33): Xaa is C or S
ELTNSLQEFIPKKRVIEYYVVPLPELQVQTPRXQVN

SEQ ID NO: 64147 - protein, 30 aa, Artificial Sequence; identical to SEQ ID NO: 14939
  Cyclic GFR-binding peptide
  MOD_RES (30)..(30): Xaa is C or S

SEQ ID NO: 64148 - protein, 32 aa, Artificial Sequence
  Cyclic GFR-binding peptide
  MOD_RES (1)..(3): Xaa is C or S
XGXSRVVMNSMEGIIVNSSDDMIQVTINSLKT

SEQ ID NO: 64149 - protein, 33 aa, Artificial Sequence
  Cyclic GFR-binding peptide
  MOD_RES (28)..(28): Xaa is C or S
NSLQEHQGQHPKIRYYLMTLPEEETPVXELGED

SEQ ID NO: 64150 - protein, 20 aa, Artificial Sequence
  Cyclic GFR-binding peptide
VTAKKVVKENEDIKRMQVPR

SEQ ID NO: 64151 - protein, 30 aa, Artificial Sequence
  Cyclic GFR-binding peptide
  MOD_RES (30)..(30): Xaa is C or S
VVMDVQVEKVVKENEDVKAMKVSRLETPVX

SEQ ID NO: 64152 - protein, 40 aa, Artificial Sequence; identical to SEQ ID NO: 22034
  Cyclic GFR-binding peptide
  MOD_RES (1)..(3)..(40): Xaa is C or S

SEQ ID NO: 64153 - protein, 35 aa, Artificial Sequence
  Cyclic GFR-binding peptide
  MOD_RES (31)..(32): Xaa is C or S
EVVMEVTAKKVVKDYEDIKRMQVPRLETPVXXAKP

SEQ ID NO: 64154 - protein, 24 aa, Artificial Sequence
  Cyclic GFR-binding peptide
VMDSMEGIVVKENEDMIQMTINSL

SEQ ID NO: 64155 - protein, 37 aa, Artificial Sequence
  Cyclic GFR-binding peptide
  MOD_RES (32)..(33): Xaa is C or S
GEVVMEVTAKKVVKDYEDIKRMQVPRLETPVXXAKPI

SEQ ID NO: 64156 - protein, 30 aa, Artificial Sequence
  Cyclic GFR-binding peptide
ALHDELTNSLQEFIPKKRVIEYYVVPLPEL

SEQ ID NO: 64157 - protein, 35 aa, Artificial Sequence; identical to SEQ ID NO: 14962
  Cyclic GFR-binding peptide
  MOD_RES (1)..(32)..(33): Xaa is C or S

SEQ ID NO: 64158 - protein, 32 aa, Artificial Sequence; identical to SEQ ID NO: 14965
  Cyclic GFR-binding peptide
  MOD_RES (1)..(32): Xaa is C or S

SEQ ID NO: 64159 - protein, 34 aa, Artificial Sequence; identical to SEQ ID NO: 14966
  Cyclic GFR-binding peptide
  MOD_RES (30)..(31): Xaa is C or S

SEQ ID NO: 64160 - protein, 35 aa, Artificial Sequence; identical to SEQ ID NO: 22038
  Cyclic GFR-binding peptide
  MOD_RES (1)..(3): Xaa is C or S

SEQ ID NO: 64161 - protein, 31 aa, Artificial Sequence
  Cyclic GFR-binding peptide
  MOD_RES (30)..(31): Xaa is C or S
KVVMVQVEKVKPTRGVVKAIKVSRLDQPVXX

SEQ ID NO: 64162 - protein, 38 aa, Artificial Sequence; identical to SEQ ID NO: 22042
  Cyclic GFR-binding peptide
  MOD_RES (35)..(35): Xaa is C or S

SEQ ID NO: 64163 - protein, 33 aa, Artificial Sequence
  Cyclic GFR-binding peptide
  MOD_RES (29)..(30): Xaa is C or S
VVMSMEGIVKPTRGVMIQITINSLDQPVXXPSA

SEQ ID NO: 64164 - protein, 31 aa, Artificial Sequence; identical to SEQ ID NO: 14974
  Cyclic GFR-binding peptide
  MOD_RES (1)..(1): Xaa is C or S

SEQ ID NO: 64165 - protein, 40 aa, Artificial Sequence; identical to SEQ ID NO: 14976
  Cyclic GFR-binding peptide
  MOD_RES (2)..(4)..(36)..(37): Xaa is C or S

SEQ ID NO: 64166 - protein, 40 aa, Artificial Sequence; identical to SEQ ID NO: 22046
  Cyclic GFR-binding peptide
  MOD_RES (2)..(4)..(38): Xaa is C or S

SEQ ID NO: 64167 - protein, 32 aa, Artificial Sequence; identical to SEQ ID NO: 22047
  Cyclic GFR-binding peptide
  MOD_RES (1)..(3): Xaa is C or S

SEQ ID NO: 64168 - protein, 27 aa, Artificial Sequence
  Cyclic GFR-binding peptide
QLFVTAKKHQGQHPKIRIKRMQVPREE

SEQ ID NO: 64169 - protein, 24 aa, Artificial Sequence
  Cyclic GFR-binding peptide
IMVQVEKIKPTKGIVKAIKVSRLD

SEQ ID NO: 64170 - protein, 36 aa, Artificial Sequence; identical to SEQ ID NO: 22054
  Cyclic GFR-binding peptide
  MOD_RES (1)..(1): Xaa is C or S

SEQ ID NO: 64171 - protein, 39 aa, Artificial Sequence; identical to SEQ ID NO: 22057
  Cyclic GFR-binding peptide
  MOD_RES (2)..(4): Xaa is C or S

SEQ ID NO: 64172 - protein, 36 aa, Artificial Sequence
  Cyclic GFR-binding peptide
  MOD_RES (1)..(3)..(34)..(35): Xaa is C or S
XKXSKVIMSMEGIIKPTKGIMIQITINSLDQSVXXP

SEQ ID NO: 64173 - protein, 34 aa, Artificial Sequence
  Cyclic GFR-binding peptide
  MOD_RES (2)..(4): Xaa is C or S
RXGXGEVVMDVQVEKVVKENEDVKAMKVSRLETP

SEQ ID NO: 64174 - protein, 33 aa, Artificial Sequence
  Cyclic GFR-binding peptide
  MOD_RES (31)..(32): Xaa is C or S
SRVIMSMEGIVKPKRGVMIQITINSLAQPVXXP

SEQ ID NO: 64175 - protein, 33 aa, Artificial Sequence
  Cyclic GFR-binding peptide
  MOD_RES (29)..(30): Xaa is C or S
VVMVQVEKVKPTRGVVKAIKVSRLDQPVXXPSA

SEQ ID NO: 64176 - protein, 26 aa, Artificial Sequence
  Cyclic GFR-binding peptide
VMVTAKKVKPTRGVIKRIQVPRLDQP

SEQ ID NO: 64177 - protein, 29 aa, Artificial Sequence
  Cyclic GFR-binding peptide
  MOD_RES (26)..(27): Xaa is C or S
VQVEKVVKDYEDVKAMKVSRLETPVXXAK

SEQ ID NO: 64178 - protein, 34 aa, Artificial Sequence; identical to SEQ ID NO: 22063
  Cyclic GFR-binding peptide
  MOD_RES (32)..(32): Xaa is C or S

SEQ ID NO: 64179 - protein, 32 aa, Artificial Sequence
  Cyclic GFR-binding peptide
  MOD_RES (26)..(27): Xaa is C or S
VQVEKIKPTKGIVKAIKVSRLDQSVXXPSASA

SEQ ID NO: 64180 - protein, 32 aa, Artificial Sequence
  Cyclic GFR-binding peptide
  MOD_RES (31)..(32): Xaa is C or S
RVVMNVTAKKIVNSSDDIKRVQVPRLKTPAXX

SEQ ID NO: 64181 - protein, 23 aa, Artificial Sequence
  Cyclic GFR-binding peptide
VIMVTAKKVKPKRGVIKRIQVPR

SEQ ID NO: 64182 - protein, 26 aa, Artificial Sequence
  Cyclic GFR-binding peptide
KVIMVTAKKIKPTKGIIKRIQVPRLD

SEQ ID NO: 64183 - protein, 25 aa, Artificial Sequence
  Cyclic GFR-binding peptide
FNSLQEHQGQHPKIRYYLMTLPEEE

SEQ ID NO: 64184 - protein, 34 aa, Artificial Sequence; identical to SEQ ID NO: 15007
  Cyclic GFR-binding peptide
  MOD_RES (28)..(29): Xaa is C or S

SEQ ID NO: 64185 - protein, 28 aa, Artificial Sequence
  Cyclic GFR-binding peptide
  MOD_RES (28)..(28): Xaa is C or S
MDNSLQEVVKENEDYYVMPLPELETPVX

SEQ ID NO: 64186 - protein, 25 aa, Artificial Sequence
  Cyclic GFR-binding peptide
LFVTAKKHQGQHPKIRIKRMQVPRE

SEQ ID NO: 64187 - protein, 34 aa, Artificial Sequence
  Cyclic GFR-binding peptide
  MOD_RES (1)..(1): Xaa is C or S
XKNHQLFNSLQEHQGQHPKIRYYVMPLPEEETPV

SEQ ID NO: 64188 - protein, 32 aa, Artificial Sequence; identical to SEQ ID NO: 15021
  Cyclic GFR-binding peptide
  MOD_RES (1)..(3): Xaa is C or S

SEQ ID NO: 64189 - protein, 33 aa, Artificial Sequence
  Cyclic GFR-binding peptide
  MOD_RES (1)..(3): Xaa is C or S
XGXSRVVMNSMEGIIVNSSDDMIQVTINSLKTP

SEQ ID NO: 64190 - protein, 36 aa, Artificial Sequence; identical to SEQ ID NO: 22080
  Cyclic GFR-binding peptide
  MOD_RES (2)..(4): Xaa is C or S

SEQ ID NO: 64191 - protein, 31 aa, Artificial Sequence; identical to SEQ ID NO: 49121
  Cyclic GFR-binding peptide
  MOD_RES (26)..(27): Xaa is C or S

SEQ ID NO: 64192 - protein, 26 aa, Artificial Sequence
  Cyclic GFR-binding peptide
FVQVEKHQGQHPKIRVKAMKVSREET

SEQ ID NO: 64193 - protein, 29 aa, Artificial Sequence
  Cyclic GFR-binding peptide
EELRNSLQELKPKKRVYEYYVVPLPEHHV

SEQ ID NO: 64194 - protein, 31 aa, Artificial Sequence
  Cyclic GFR-binding peptide
  MOD_RES (1)..(3): Xaa is C or S
XGXSRVVMNVQVEKIVNSSDDVKAVKVSRLK

SEQ ID NO: 64195 - protein, 34 aa, Artificial Sequence
  Cyclic GFR-binding peptide
  MOD_RES (28)..(28): Xaa is C or S
MNSMEGIIVNSSDDMIQVTINSLKTPAXTPKTVH

SEQ ID NO: 64196 - protein, 29 aa, Artificial Sequence
  Cyclic GFR-binding peptide
  MOD_RES (27)..(28): Xaa is C or S
MVQVEKIKPTKGIVKAIKVSRLDQSVXXP

SEQ ID NO: 64197 - protein, 27 aa, Artificial Sequence
  Cyclic GFR-binding peptide
MNNSLQEIVNSSDDYYVVPLPELKTPA

SEQ ID NO: 64198 - protein, 25 aa, Artificial Sequence
  Cyclic GFR-binding peptide
ELRVTAKKLKPKKRVYEIKRVQVPR

SEQ ID NO: 64199 - protein, 40 aa, Artificial Sequence
  Cyclic GFR-binding peptide
  MOD_RES (1)..(3)..(37): Xaa is C or S
XEXKNHQLFNSLQEHQGQHPKIRYYVMPLPEEETPVXELG

SEQ ID NO: 64200 - protein, 32 aa, Artificial Sequence
  Cyclic GFR-binding peptide
  MOD_RES (30)..(30): Xaa is C or S
NSLQEFIPKKRVIEYYVVPLPELQVQTPRXQV

SEQ ID NO: 64201 - protein, 38 aa, Artificial Sequence; identical to SEQ ID NO: 22096
  Cyclic GFR-binding peptide
  MOD_RES (2)..(4): Xaa is C or S

SEQ ID NO: 64202 - protein, 37 aa, Artificial Sequence
  Cyclic GFR-binding peptide
  MOD_RES (31)..(31): Xaa is C or S
QLFNSLQEHQGQHPKIRYYLMTLPEEETPVXELGEDN

SEQ ID NO: 64203 - protein, 39 aa, Artificial Sequence; identical to SEQ ID NO: 15038
  Cyclic GFR-binding peptide
  MOD_RES (1)..(33)..(34): Xaa is C or S

SEQ ID NO: 64204 - protein, 23 aa, Artificial Sequence
  Cyclic GFR-binding peptide
IMSMEGIVKPKRGVMIQITINSL

SEQ ID NO: 64205 - protein, 32 aa, Artificial Sequence
  Cyclic GFR-binding peptide
  MOD_RES (29)..(30): Xaa is C or S
VIMSMEGIIKPTKGIMIQITINSLDQSVXXPS

SEQ ID NO: 64206 - protein, 37 aa, Artificial Sequence
  Cyclic GFR-binding peptide
  MOD_RES (36)..(36): Xaa is C or S
LHEELRNSLQELKPKKRVYEYYVVPLPEHHVRSPQXK

SEQ ID NO: 64207 - protein, 32 aa, Artificial Sequence
  Cyclic GFR-binding peptide
  MOD_RES (27)..(28): Xaa is C or S
MVTAKKIKPTKGIIKRIQVPRLDQSVXXPSAS

SEQ ID NO: 64208 - protein, 40 aa, Artificial Sequence
  Cyclic GFR-binding peptide
  MOD_RES (2)..(34)..(35): Xaa is C or S
GXARVVMNSMEGIIVNSSDDMIQVTINSLQTPAXXPKPVT

SEQ ID NO: 64209 - protein, 34 aa, Artificial Sequence
  Cyclic GFR-binding peptide
  MOD_RES (29)..(30): Xaa is C or S
VMEVTAKKVVKDYEDIKRMQVPRLETPVXXAKPI

SEQ ID NO: 64210 - protein, 36 aa, Artificial Sequence
  Cyclic GFR-binding peptide
  MOD_RES (31)..(32): Xaa is C or S
SKVVMVTAKKVKPTRGVIKRIQVPRLDQPVXXPSAS

SEQ ID NO: 64211 - protein, 26 aa, Artificial Sequence
  Cyclic GFR-binding peptide
IMVTAKKIKPTKGIIKRIQVPRLDQS

SEQ ID NO: 64212 - protein, 29 aa, Artificial Sequence
  Cyclic GFR-binding peptide
  MOD_RES (29)..(29): Xaa is C or S
VIMVTAKKIKPTKGIIKRIQVPRLDQSVX

SEQ ID NO: 64213 - protein, 26 aa, Artificial Sequence
  Cyclic GFR-binding peptide
MVTAKKVKPKRGVIKRIQVPRLAQPV

SEQ ID NO: 64214 - protein, 27 aa, Artificial Sequence
  Cyclic GFR-binding peptide
NHQLFNSLQEHQGQHPKIRYYLMTLPE

SEQ ID NO: 64215 - protein, 34 aa, Artificial Sequence
  Cyclic GFR-binding peptide
  MOD_RES (1)..(3)..(34): Xaa is C or S
XKXSKVVMVQVEKVKPTRGVVKAIKVSRLDQPVX

SEQ ID NO: 64216 - protein, 37 aa, Artificial Sequence
  Cyclic GFR-binding peptide
  MOD_RES (2)..(34)..(35): Xaa is C or S
GXGEVVMESMEGIVVKDYEDMIQMTINSLETPVXXAK

SEQ ID NO: 64217 - protein, 38 aa, Artificial Sequence; identical to SEQ ID NO: 22113
  Cyclic GFR-binding peptide
  MOD_RES (37)..(37): Xaa is C or S

SEQ ID NO: 64218 - protein, 30 aa, Artificial Sequence
  Cyclic GFR-binding peptide
  MOD_RES (1)..(3): Xaa is C or S
XKXSKVVMVTAKKVKPTRGVIKRIQVPRLD

SEQ ID NO: 64219 - protein, 23 aa, Artificial Sequence
  Cyclic GFR-binding peptide
VTAKKVVKENEDIKRMQVPRLET

SEQ ID NO: 64220 - protein, 30 aa, Artificial Sequence
  Cyclic GFR-binding peptide
  MOD_RES (1)..(1): Xaa is C or S
XSRVIMSMEGIVKPKRGVMIQITINSLAQP

SEQ ID NO: 64221 - protein, 24 aa, Artificial Sequence
  Cyclic GFR-binding peptide
MVTAKKVKPTRGVIKRIQVPRLDQ

SEQ ID NO: 64222 - protein, 38 aa, Artificial Sequence
  Cyclic GFR-binding peptide
  MOD_RES (2)..(33)..(34): Xaa is C or S
KXSKVVMVTAKKVKPTRGVIKRIQVPRLDQPVXXPSAS

SEQ ID NO: 64223 - protein, 38 aa, Artificial Sequence
  Cyclic GFR-binding peptide
  MOD_RES (2)..(33)..(34): Xaa is C or S
KXSKVIMVTAKKIKPTKGIIKRIQVPRLDQSVXXPSAS

SEQ ID NO: 64224 - protein, 24 aa, Artificial Sequence
  Cyclic GFR-binding peptide
FVTAKKHQGQHPKIRIKRMQVPRE

SEQ ID NO: 64225 - protein, 33 aa, Artificial Sequence
  Cyclic GFR-binding peptide
ALHDELTNSLQEFIPKKRVIEYYVVPLPELQVQ

SEQ ID NO: 64226 - protein, 39 aa, Artificial Sequence
  Cyclic GFR-binding peptide
  MOD_RES (1)..(3)..(34)..(35): Xaa is C or S
XKXSRVIMSMEGIVKPKRGVMIQITINSLAQPVXXPAAS

SEQ ID NO: 64227 - protein, 30 aa, Artificial Sequence; identical to SEQ ID NO: 15087
  Cyclic GFR-binding peptide

SEQ ID NO: 64228 - protein, 33 aa, Artificial Sequence; identical to SEQ ID NO: 22135
  Cyclic GFR-binding peptide

SEQ ID NO: 64229 - protein, 34 aa, Artificial Sequence
  Cyclic GFR-binding peptide
ELHEELRNSLQELKPKKRVYEYYVVPLPEHHVRS

SEQ ID NO: 64230 - protein, 29 aa, Artificial Sequence
  Cyclic GFR-binding peptide
  MOD_RES (28)..(29): Xaa is C or S
MDNSLQEVVKENEDYYVMPLPELETPVXX

SEQ ID NO: 64231 - protein, 39 aa, Artificial Sequence; identical to SEQ ID NO: 22138
  Cyclic GFR-binding peptide
  MOD_RES (34)..(34): Xaa is C or S

SEQ ID NO: 64232 - protein, 28 aa, Artificial Sequence
  Cyclic GFR-binding peptide
  MOD_RES (28)..(28): Xaa is C or S
MEVTAKKVVKDYEDIKRMQVPRLETPVX

SEQ ID NO: 64233 - protein, 42 aa, Artificial Sequence
  Cyclic GFR-binding peptide
  MOD_RES (2)..(4)..(36)..(37): Xaa is C or S
HXGXSRVVMNVTAKKIVNSSDDIKRVQVPRLKTPAXXPKPVY

SEQ ID NO: 64234 - protein, 38 aa, Artificial Sequence
  Cyclic GFR-binding peptide
  MOD_RES (1)..(33)..(34): Xaa is C or S
XSRVVMNSMEGIIVNSSDDMIQVTINSLKTPAXXPKPV

SEQ ID NO: 64235 - protein, 39 aa, Artificial Sequence; identical to SEQ ID NO: 15094
  Cyclic GFR-binding peptide
  MOD_RES (1)..(33): Xaa is C or S

SEQ ID NO: 64236 - protein, 36 aa, Artificial Sequence
  Cyclic GFR-binding peptide
  MOD_RES (31)..(32): Xaa is C or S
SRVIMVTAKKVKPKRGVIKRIQVPRLAQPVXXPAAS

SEQ ID NO: 64237 - protein, 29 aa, Artificial Sequence
  Cyclic GFR-binding peptide
  MOD_RES (1)..(3): Xaa is C or S
XKXSKVIMSMEGIIKPTKGIMIQITINSL

SEQ ID NO: 64238 - protein, 37 aa, Artificial Sequence
  Cyclic GFR-binding peptide
  MOD_RES (1)..(32)..(33): Xaa is C or S
XSRVIMVTAKKVKPKRGVIKRIQVPRLAQPVXXPAAS

SEQ ID NO: 64239 - protein, 32 aa, Artificial Sequence; identical to SEQ ID NO: 15102
  Cyclic GFR-binding peptide
  MOD_RES (2)..(2): Xaa is C or S

SEQ ID NO: 64240 - protein, 32 aa, Artificial Sequence; identical to SEQ ID NO: 15103
  Cyclic GFR-binding peptide
  MOD_RES (1)..(1): Xaa is C or S

SEQ ID NO: 64241 - protein, 36 aa, Artificial Sequence
  Cyclic GFR-binding peptide
  MOD_RES (2)..(34)..(35): Xaa is C or S
GXGEVVMDSMEGIVVKENEDMIQMTINSLETPVXXA

SEQ ID NO: 64242 - protein, 31 aa, Artificial Sequence; identical to SEQ ID NO: 15106
  Cyclic GFR-binding peptide
  MOD_RES (28)..(28): Xaa is C or S

SEQ ID NO: 64243 - protein, 38 aa, Artificial Sequence
  Cyclic GFR-binding peptide
  MOD_RES (34)..(34): Xaa is C or S
DELTNSLQEFIPKKRVIEYYVVPLPELQVQTPRXQVNR

SEQ ID NO: 64244 - protein, 39 aa, Artificial Sequence
  Cyclic GFR-binding peptide
  MOD_RES (1)..(33)..(34): Xaa is C or S
XGEVVMDVTAKKVVKENEDIKRMQVPRLETPVXXAKPIK

SEQ ID NO: 64245 - protein, 26 aa, Artificial Sequence
  Cyclic GFR-binding peptide
  MOD_RES (26)..(26): Xaa is C or S
SMEGIVKPKRGVMIQITINSLAQPVX

SEQ ID NO: 64246 - protein, 33 aa, Artificial Sequence
  Cyclic GFR-binding peptide
  MOD_RES (27)..(28): Xaa is C or S
MSMEGIVKPTRGVMIQITINSLDQPVXXPSASA

SEQ ID NO: 64247 - protein, 28 aa, Artificial Sequence
  Cyclic GFR-binding peptide
RVIMSMEGIVKPKRGVMIQITINSLAQP

SEQ ID NO: 64248 - protein, 38 aa, Artificial Sequence
  Cyclic GFR-binding peptide
  MOD_RES (32)..(33): Xaa is C or S
SRVVMNSMEGIIVNSSDDMIQVTINSLKTPAXXPKPVY

SEQ ID NO: 64249 - protein, 38 aa, Artificial Sequence
  Cyclic GFR-binding peptide
  MOD_RES (1)..(3)..(35): Xaa is C or S
XGXSRVVMNVTAKKIVNSSDDIKRVQVPRLKTPAXTPK

SEQ ID NO: 64250 - protein, 33 aa, Artificial Sequence
  Cyclic GFR-binding peptide
  MOD_RES (2)..(2): Xaa is C or S
GXGEVVMEVQVEKVVKDYEDVKAMKVSRLETPV

SEQ ID NO: 64251 - protein, 29 aa, Artificial Sequence
  Cyclic GFR-binding peptide
NHQLFNSLQEHQGQHPKIRYYVMPLPEEE

SEQ ID NO: 64252 - protein, 32 aa, Artificial Sequence; identical to SEQ ID NO: 15127
  Cyclic GFR-binding peptide
  MOD_RES (29)..(30): Xaa is C or S

SEQ ID NO: 64253 - protein, 22 aa, Artificial Sequence
  Cyclic GFR-binding peptide
VQVEKFIPKKRVIEVKAVKVSR

SEQ ID NO: 64254 - protein, 29 aa, Artificial Sequence
  Cyclic GFR-binding peptide
  MOD_RES (1)..(1): Xaa is C or S
XSRVIMNSLQEVKPKRGVYYLITLPELAQ

SEQ ID NO: 64255 - protein, 37 aa, Artificial Sequence
  Cyclic GFR-binding peptide
  MOD_RES (2)..(4)..(36)..(37): Xaa is C or S
HXGXSRVVMNSMEGIIVNSSDDMIQVTINSLKTPAXX

SEQ ID NO: 64256 - protein, 27 aa, Artificial Sequence
  Cyclic GFR-binding peptide
MNNSLQEIVNSSDDYYLVTLPELQTPA

SEQ ID NO: 64257 - protein, 32 aa, Artificial Sequence
  Cyclic GFR-binding peptide
  MOD_RES (27)..(27): Xaa is C or S
NVTAKKIVNSSDDIKRVQVPRLKTPAXTPKTV

SEQ ID NO: 64258 - protein, 30 aa, Artificial Sequence; identical to SEQ ID NO: 15138
  Cyclic GFR-binding peptide
  MOD_RES (26)..(27): Xaa is C or S

SEQ ID NO: 64259 - protein, 33 aa, Artificial Sequence; identical to SEQ ID NO: 22163
  Cyclic GFR-binding peptide
  MOD_RES (33)..(33): Xaa is C or S

SEQ ID NO: 64260 - protein, 25 aa, Artificial Sequence
  Cyclic GFR-binding peptide
SMEGIVVKDYEDMIQMTINSLETPV

SEQ ID NO: 64261 - protein, 38 aa, Artificial Sequence; identical to SEQ ID NO: 15140
  Cyclic GFR-binding peptide
  MOD_RES (1)..(3)..(35)..(36): Xaa is C or S

SEQ ID NO: 64262 - protein, 24 aa, Artificial Sequence
  Cyclic GFR-binding peptide
VMDVQVEKVVKENEDVKAMKVSRL

SEQ ID NO: 64263 - protein, 28 aa, Artificial Sequence
  Cyclic GFR-binding peptide
  MOD_RES (1)..(3): Xaa is C or S
XKXSKVIMVTAKKIKPTKGIIKRIQVPR

SEQ ID NO: 64264 - protein, 22 aa, Artificial Sequence
  Cyclic GFR-binding peptide
IMNSLQEIKPTKGIYYLITLPE

SEQ ID NO: 64265 - protein, 26 aa, Artificial Sequence
  Cyclic GFR-binding peptide
MNSLQEIKPTKGIYYVIPLPELDQSV

SEQ ID NO: 64266 - protein, 32 aa, Artificial Sequence; identical to SEQ ID NO: 15148
  Cyclic GFR-binding peptide
  MOD_RES (32)..(32): Xaa is C or S

SEQ ID NO: 64267 - protein, 26 aa, Artificial Sequence
  Cyclic GFR-binding peptide
VMDSMEGIVVKENEDMIQMTINSLET

SEQ ID NO: 64268 - protein, 30 aa, Artificial Sequence
  Cyclic GFR-binding peptide
  MOD_RES (1)..(1): Xaa is C or S
XSKVVMVTAKKVKPTRGVIKRIQVPRLDQP

SEQ ID NO: 64269 - protein, 34 aa, Artificial Sequence; identical to SEQ ID NO: 22172
  Cyclic GFR-binding peptide
  MOD_RES (30)..(30): Xaa is C or S

SEQ ID NO: 64270 - protein, 30 aa, Artificial Sequence; identical to SEQ ID NO: 22173
  Cyclic GFR-binding peptide

SEQ ID NO: 64271 - protein, 35 aa, Artificial Sequence
  Cyclic GFR-binding peptide
  MOD_RES (2)..(33)..(34): Xaa is C or S
KXSRVIMSMEGIVKPKRGVMIQITINSLAQPVXXP

SEQ ID NO: 64272 - protein, 33 aa, Artificial Sequence
  Cyclic GFR-binding peptide
  MOD_RES (30)..(31): Xaa is C or S
VVMNVTAKKIVNSSDDIKRVQVPRLQTPAXXPK

SEQ ID NO: 64273 - protein, 45 aa, Artificial Sequence
  Cyclic GFR-binding peptide
  MOD_RES (2)..(4)..(41): Xaa is C or S
EXKXALHDELTNSLQEFIPKKRVIEYYLVTLPELQVQTPRXQVNR

SEQ ID NO: 64274 - protein, 30 aa, Artificial Sequence
  Cyclic GFR-binding peptide
  MOD_RES (29)..(30): Xaa is C or S
VIMVQVEKVKPKRGVVKAIKVSRLAQPVXX

SEQ ID NO: 64275 - protein, 24 aa, Artificial Sequence
  Cyclic GFR-binding peptide
IMSMEGIVKPKRGVMIQITINSLA

SEQ ID NO: 64276 - protein, 33 aa, Artificial Sequence; identical to SEQ ID NO: 15162
  Cyclic GFR-binding peptide
  MOD_RES (31)..(32): Xaa is C or S

SEQ ID NO: 64277 - protein, 31 aa, Artificial Sequence
  Cyclic GFR-binding peptide
  MOD_RES (31)..(31): Xaa is C or S
RVVMNVTAKKIVNSSDDIKRVQVPRLQTPAX

SEQ ID NO: 64278 - protein, 28 aa, Artificial Sequence
  Cyclic GFR-binding peptide
  MOD_RES (27)..(28): Xaa is C or S
NNSLQEIVNSSDDYYLVTLPELKTPAXX

SEQ ID NO: 64279 - protein, 33 aa, Artificial Sequence; identical to SEQ ID NO: 22184
  Cyclic GFR-binding peptide
  MOD_RES (1)..(3): Xaa is C or S

SEQ ID NO: 64280 - protein, 29 aa, Artificial Sequence
  Cyclic GFR-binding peptide
  MOD_RES (2)..(4): Xaa is C or S
SXKXSKVIMNSLQEIKPTKGIYYVIPLPE

SEQ ID NO: 64281 - protein, 26 aa, Artificial Sequence
  Cyclic GFR-binding peptide
  MOD_RES (26)..(26): Xaa is C or S
VTAKKVVKDYEDIKRMQVPRLETPVX

SEQ ID NO: 64282 - protein, 28 aa, Artificial Sequence
  Cyclic GFR-binding peptide
  MOD_RES (27)..(28): Xaa is C or S
ENSLQEVVKDYEDYYLMTLPELETPVXX

SEQ ID NO: 64283 - protein, 35 aa, Artificial Sequence
  Cyclic GFR-binding peptide
ELHEELRNSLQELKPKKRVYEYYVVPLPEHHVRSP

SEQ ID NO: 64284 - protein, 32 aa, Artificial Sequence
  Cyclic GFR-binding peptide
  MOD_RES (29)..(30): Xaa is C or S
VIMVQVEKIKPTKGIVKAIKVSRLDQSVXXPS

SEQ ID NO: 64285 - protein, 29 aa, Artificial Sequence
  Cyclic GFR-binding peptide
  MOD_RES (27)..(27): Xaa is C or S
NNSLQEIVNSSDDYYLVTLPELKTPAXTP

SEQ ID NO: 64286 - protein, 33 aa, Artificial Sequence; identical to SEQ ID NO: 15181
  Cyclic GFR-binding peptide
  MOD_RES (30)..(31): Xaa is C or S

SEQ ID NO: 64287 - protein, 26 aa, Artificial Sequence
  Cyclic GFR-binding peptide
VIMNSLQEIKPTKGIYYLITLPELDQ

SEQ ID NO: 64288 - protein, 24 aa, Artificial Sequence
  Cyclic GFR-binding peptide
MDVTAKKVVKENEDIKRMQVPRLE

SEQ ID NO: 64289 - protein, 38 aa, Artificial Sequence
  Cyclic GFR-binding peptide
  MOD_RES (32)..(33): Xaa is C or S
GEVVMESMEGIVVKDYEDMIQMTINSLETPVXXAKPIS

SEQ ID NO: 64290 - protein, 27 aa, Artificial Sequence
  Cyclic GFR-binding peptide
MDVQVEKVVKENEDVKAMKVSRLETPV

SEQ ID NO: 64291 - protein, 35 aa, Artificial Sequence
  Cyclic GFR-binding peptide
  MOD_RES (1)..(33)..(34): Xaa is C or S
XGEVVMEVQVEKVVKDYEDVKAMKVSRLETPVXXA

SEQ ID NO: 64292 - protein, 41 aa, Artificial Sequence
  Cyclic GFR-binding peptide
  MOD_RES (1)..(3)..(35): Xaa is C or S
XGXSRVVMNVQVEKIVNSSDDVKAVKVSRLKTPAXTPKTVH

SEQ ID NO: 64293 - protein, 31 aa, Artificial Sequence; identical to SEQ ID NO: 15186
  Cyclic GFR-binding peptide
  MOD_RES (2)..(4): Xaa is C or S

SEQ ID NO: 64294 - protein, 38 aa, Artificial Sequence; identical to SEQ ID NO: 15189
  Cyclic GFR-binding peptide
  MOD_RES (2)..(34): Xaa is C or S

SEQ ID NO: 64295 - protein, 39 aa, Artificial Sequence
  Cyclic GFR-binding peptide
  MOD_RES (2)..(33)..(34): Xaa is C or S
KXSRVIMVQVEKVKPKRGVVKAIKVSRLAQPVXXPAASA

SEQ ID NO: 64296 - protein, 34 aa, Artificial Sequence
  Cyclic GFR-binding peptide
  MOD_RES (2)..(34): Xaa is C or S
GXSRVVMNVQVEKIVNSSDDVKAVKVSRLKTPAX

SEQ ID NO: 64297 - protein, 37 aa, Artificial Sequence
  Cyclic GFR-binding peptide
  MOD_RES (2)..(4)..(35)..(36): Xaa is C or S
SXKXSRVIMVQVEKVKPKRGVVKAIKVSRLAQPVXXP

SEQ ID NO: 64298 - protein, 29 aa, Artificial Sequence
  Cyclic GFR-binding peptide
  MOD_RES (2)..(4): Xaa is C or S
SXKXSKVIMSMEGIIKPTKGIMIQITINS

SEQ ID NO: 64299 - protein, 38 aa, Artificial Sequence; identical to SEQ ID NO: 15204
  Cyclic GFR-binding peptide
  MOD_RES (2)..(34)..(35): Xaa is C or S

SEQ ID NO: 64300 - protein, 34 aa, Artificial Sequence
  Cyclic GFR-binding peptide
  MOD_RES (34)..(34): Xaa is C or S
DELTNSLQEFIPKKRVIEYYLVTLPELQVQTPRX

SEQ ID NO: 64301 - protein, 29 aa, Artificial Sequence
  Cyclic GFR-binding peptide
LFNSLQEHQGQHPKIRYYVMPLPEEETPV

SEQ ID NO: 64302 - protein, 37 aa, Artificial Sequence
  Cyclic GFR-binding peptide
  MOD_RES (31)..(32): Xaa is C or S
EVVMEVQVEKVVKDYEDVKAMKVSRLETPVXXAKPIS

SEQ ID NO: 64303 - protein, 27 aa, Artificial Sequence
  Cyclic GFR-binding peptide
VVMNSMEGIIVNSSDDMIQVTINSLQT

SEQ ID NO: 64304 - protein, 30 aa, Artificial Sequence; identical to SEQ ID NO: 22207
  Cyclic GFR-binding peptide
  MOD_RES (30)..(30): Xaa is C or S

SEQ ID NO: 64305 - protein, 35 aa, Artificial Sequence
  Cyclic GFR-binding peptide
  MOD_RES (1)..(3)..(35): Xaa is C or S
XGXGEVVMEVQVEKVVKDYEDVKAMKVSRLETPVX

SEQ ID NO: 64306 - protein, 33 aa, Artificial Sequence
  Cyclic GFR-binding peptide
ELHEELRNSLQELKPKKRVYEYYLVTLPEHHVR

SEQ ID NO: 64307 - protein, 26 aa, Artificial Sequence
  Cyclic GFR-binding peptide
VIMVTAKKIKPTKGIIKRIQVPRLDQ

SEQ ID NO: 64308 - protein, 38 aa, Artificial Sequence; identical to SEQ ID NO: 15215
  Cyclic GFR-binding peptide
  MOD_RES (32)..(32): Xaa is C or S

SEQ ID NO: 64309 - protein, 35 aa, Artificial Sequence
  Cyclic GFR-binding peptide
  MOD_RES (32)..(32): Xaa is C or S
LRNSLQELKPKKRVYEYYLVTLPEHHVRSPQXKVS

SEQ ID NO: 64310 - protein, 35 aa, Artificial Sequence; identical to SEQ ID NO: 15219
  Cyclic GFR-binding peptide
  MOD_RES (32)..(33): Xaa is C or S

SEQ ID NO: 64311 - protein, 37 aa, Artificial Sequence
  Cyclic GFR-binding peptide
  MOD_RES (1)..(3): Xaa is C or S
XKXALHDELTNSLQEFIPKKRVIEYYVVPLPELQVQT

SEQ ID NO: 64312 - protein, 37 aa, Artificial Sequence; identical to SEQ ID NO: 22212
  Cyclic GFR-binding peptide
  MOD_RES (32)..(32): Xaa is C or S

SEQ ID NO: 64313 - protein, 36 aa, Artificial Sequence; identical to SEQ ID NO: 22213
  Cyclic GFR-binding peptide
  MOD_RES (33)..(33): Xaa is C or S

SEQ ID NO: 64314 - protein, 24 aa, Artificial Sequence
  Cyclic GFR-binding peptide
KVVMNSLQEVKPTRGVYYLITLPE

SEQ ID NO: 64315 - protein, 36 aa, Artificial Sequence
  Cyclic GFR-binding peptide
  MOD_RES (1)..(3)..(34)..(35): Xaa is C or S
XKXSKVVMVQVEKVKPTRGVVKAIKVSRLDQPVXXP

SEQ ID NO: 64316 - protein, 34 aa, Artificial Sequence
  Cyclic GFR-binding peptide
  MOD_RES (1)..(3): Xaa is C or S
XGXGEVVMEVTAKKVVKDYEDIKRMQVPRLETPV

SEQ ID NO: 64317 - protein, 35 aa, Artificial Sequence; identical to SEQ ID NO: 15224
  Cyclic GFR-binding peptide
  MOD_RES (2)..(33)..(34): Xaa is C or S

SEQ ID NO: 64318 - protein, 29 aa, Artificial Sequence
  Cyclic GFR-binding peptide
  MOD_RES (27)..(28): Xaa is C or S
MNSLQEVKPTRGVYYLITLPELDQPVXXP

SEQ ID NO: 64319 - protein, 31 aa, Artificial Sequence; identical to SEQ ID NO: 15228
  Cyclic GFR-binding peptide
  MOD_RES (27)..(28): Xaa is C or S

SEQ ID NO: 64320 - protein, 28 aa, Artificial Sequence
  Cyclic GFR-binding peptide
  MOD_RES (1)..(1): Xaa is C or S
XSKVIMVQVEKIKPTKGIVKAIKVSRLD

SEQ ID NO: 64321 - protein, 36 aa, Artificial Sequence
  Cyclic GFR-binding peptide
  MOD_RES (30)..(31): Xaa is C or S
VVMDVTAKKVVKENEDIKRMQVPRLETPVXXAKPIK

SEQ ID NO: 64322 - protein, 31 aa, Artificial Sequence
  Cyclic GFR-binding peptide
  MOD_RES (1)..(3): Xaa is C or S
XGXARVVMNVQVEKIVNSSDDVKAVKVSRLQ

SEQ ID NO: 64323 - protein, 35 aa, Artificial Sequence
  Cyclic GFR-binding peptide
  MOD_RES (1)..(32)..(33): Xaa is C or S
XSKVVMVTAKKVKPTRGVIKRIQVPRLDQPVXXPS

SEQ ID NO: 64324 - protein, 31 aa, Artificial Sequence
  Cyclic GFR-binding peptide
  MOD_RES (28)..(28): Xaa is C or S
MNSMEGIIVNSSDDMIQVTINSLKTPAXTPK

SEQ ID NO: 64325 - protein, 40 aa, Artificial Sequence
  Cyclic GFR-binding peptide
  MOD_RES (2)..(4)..(36)..(37): Xaa is C or S
HXGXSRVVMNVTAKKIVNSSDDIKRVQVPRLKTPAXXPKP

SEQ ID NO: 64326 - protein, 35 aa, Artificial Sequence; identical to SEQ ID NO: 15239
  Cyclic GFR-binding peptide
  MOD_RES (2)..(33)..(34): Xaa is C or S

SEQ ID NO: 64327 - protein, 33 aa, Artificial Sequence
  Cyclic GFR-binding peptide
  MOD_RES (30)..(31): Xaa is C or S
VVMNVQVEKIVNSSDDVKAVKVSRLKTPAXXPK

SEQ ID NO: 64328 - protein, 25 aa, Artificial Sequence
  Cyclic GFR-binding peptide
VTAKKHQGQHPKIRIKRMQVPREET

SEQ ID NO: 64329 - protein, 25 aa, Artificial Sequence
  Cyclic GFR-binding peptide
NSLQEFIPKKRVIEYYLVTLPELQV

SEQ ID NO: 64330 - protein, 32 aa, Artificial Sequence; identical to SEQ ID NO: 22238
  Cyclic GFR-binding peptide
  MOD_RES (30)..(30): Xaa is C or S

SEQ ID NO: 64331 - protein, 32 aa, Artificial Sequence
  Cyclic GFR-binding peptide
  MOD_RES (30)..(31): Xaa is C or S
VVMNVQVEKIVNSSDDVKAVKVSRLKTPAXXP

SEQ ID NO: 64332 - protein, 30 aa, Artificial Sequence
  Cyclic GFR-binding peptide
  MOD_RES (29)..(29): Xaa is C or S
FNSLQEHQGQHPKIRYYVMPLPEEETPVXE

SEQ ID NO: 64333 - protein, 29 aa, Artificial Sequence
  Cyclic GFR-binding peptide
ELTVQVEKFIPKKRVIEVKAVKVSRLQVQ

SEQ ID NO: 64334 - protein, 27 aa, Artificial Sequence
  Cyclic GFR-binding peptide
  MOD_RES (1)..(1): Xaa is C or S
XARVVMNVQVEKIVNSSDDVKAVKVSR

SEQ ID NO: 64335 - protein, 36 aa, Artificial Sequence
  Cyclic GFR-binding peptide
  MOD_RES (31)..(32): Xaa is C or S
EVVMDVQVEKVVKENEDVKAMKVSRLETPVXXAKPI

SEQ ID NO: 64336 - protein, 42 aa, Artificial Sequence
  Cyclic GFR-binding peptide
  MOD_RES (2)..(36): Xaa is C or S
EXKNHQLFNSLQEHQGQHPKIRYYVMPLPEEETPVXELGEDN

SEQ ID NO: 64337 - protein, 21 aa, Artificial Sequence
  Cyclic GFR-binding peptide
SMEGIIKPTKGIMIQITINSL

SEQ ID NO: 64338 - protein, 29 aa, Artificial Sequence
  Cyclic GFR-binding peptide
  MOD_RES (1)..(3): Xaa is C or S
XKXSKVVMVQVEKVKPTRGVVKAIKVSRL

SEQ ID NO: 64339 - protein, 31 aa, Artificial Sequence
  Cyclic GFR-binding peptide
  MOD_RES (30)..(31): Xaa is C or S
RVIMVQVEKVKPKRGVVKAIKVSRLAQPVXX

SEQ ID NO: 64340 - protein, 35 aa, Artificial Sequence
  Cyclic GFR-binding peptide
  MOD_RES (2)..(2): Xaa is C or S
KXALHDELTNSLQEFIPKKRVIEYYLVTLPELQVQ

SEQ ID NO: 64341 - protein, 31 aa, Artificial Sequence; identical to SEQ ID NO: 15269
  Cyclic GFR-binding peptide
  MOD_RES (2)..(4): Xaa is C or S

SEQ ID NO: 64342 - protein, 29 aa, Artificial Sequence
  Cyclic GFR-binding peptide
  MOD_RES (2)..(2): Xaa is C or S
GXGEVVMEVQVEKVVKDYEDVKAMKVSRL

SEQ ID NO: 64343 - protein, 29 aa, Artificial Sequence
  Cyclic GFR-binding peptide
  MOD_RES (26)..(26): Xaa is C or S
SMEGIIVNSSDDMIQVTINSLKTPAXTPK

SEQ ID NO: 64344 - protein, 29 aa, Artificial Sequence
  Cyclic GFR-binding peptide
ARVVMNSMEGIIVNSSDDMIQVTINSLQT

SEQ ID NO: 64345 - protein, 31 aa, Artificial Sequence
  Cyclic GFR-binding peptide
  MOD_RES (2)..(4): Xaa is C or S
SXKXSKVVMVTAKKVKPTRGVIKRIQVPRLD

SEQ ID NO: 64346 - protein, 29 aa, Artificial Sequence
  Cyclic GFR-binding peptide
  MOD_RES (2)..(4): Xaa is C or S
SXKXSRVIMVQVEKVKPKRGVVKAIKVSR

SEQ ID NO: 64347 - protein, 23 aa, Artificial Sequence
  Cyclic GFR-binding peptide
VQVEKIKPTKGIVKAIKVSRLDQ

SEQ ID NO: 64348 - protein, 28 aa, Artificial Sequence
  Cyclic GFR-binding peptide
  MOD_RES (28)..(28): Xaa is C or S
MNSMEGIIVNSSDDMIQVTINSLQTPAX

SEQ ID NO: 64349 - protein, 32 aa, Artificial Sequence; identical to SEQ ID NO: 15280
  Cyclic GFR-binding peptide
  MOD_RES (27)..(28): Xaa is C or S

SEQ ID NO: 64350 - protein, 29 aa, Artificial Sequence
  Cyclic GFR-binding peptide
RVVMNSMEGIIVNSSDDMIQVTINSLQTP

SEQ ID NO: 64351 - protein, 31 aa, Artificial Sequence
  Cyclic GFR-binding peptide
  MOD_RES (26)..(27): Xaa is C or S
VTAKKVKPTRGVIKRIQVPRLDQPVXXPSAS

SEQ ID NO: 64352 - protein, 20 aa, Artificial Sequence
  Cyclic GFR-binding peptide
VQVEKVVKDYEDVKAMKVSR

SEQ ID NO: 64353 - protein, 27 aa, Artificial Sequence
  Cyclic GFR-binding peptide
  MOD_RES (1)..(1): Xaa is C or S
XARVVMNNSLQEIVNSSDDYYLVTLPE

SEQ ID NO: 64354 - protein, 33 aa, Artificial Sequence; identical to SEQ ID NO: 22253
  Cyclic GFR-binding peptide
  MOD_RES (33)..(33): Xaa is C or S

SEQ ID NO: 64355 - protein, 30 aa, Artificial Sequence; identical to SEQ ID NO: 15288
  Cyclic GFR-binding peptide
  MOD_RES (1)..(3): Xaa is C or S

SEQ ID NO: 64356 - protein, 36 aa, Artificial Sequence
  Cyclic GFR-binding peptide
  MOD_RES (1)..(32)..(33): Xaa is C or S
XSKVVMVTAKKVKPTRGVIKRIQVPRLDQPVXXPSA

SEQ ID NO: 64357 - protein, 30 aa, Artificial Sequence
  Cyclic GFR-binding peptide
  MOD_RES (1)..(1): Xaa is C or S
XARVVMNVQVEKIVNSSDDVKAVKVSRLQT

SEQ ID NO: 64358 - protein, 35 aa, Artificial Sequence; identical to SEQ ID NO: 15289
  Cyclic GFR-binding peptide
  MOD_RES (29)..(30): Xaa is C or S

SEQ ID NO: 64359 - protein, 32 aa, Artificial Sequence; identical to SEQ ID NO: 22261
  Cyclic GFR-binding peptide
  MOD_RES (2)..(4): Xaa is C or S

SEQ ID NO: 64360 - protein, 27 aa, Artificial Sequence
  Cyclic GFR-binding peptide
  MOD_RES (27)..(27): Xaa is C or S
MNSLQEIKPTKGIYYVIPLPELDQSVX

SEQ ID NO: 64361 - protein, 31 aa, Artificial Sequence
  Cyclic GFR-binding peptide
  MOD_RES (1)..(1): Xaa is C or S
XSRVVMNSMEGIIVNSSDDMIQVTINSLKTP

SEQ ID NO: 64362 - protein, 27 aa, Artificial Sequence
  Cyclic GFR-binding peptide
EELRNSLQELKPKKRVYEYYVVPLPEH

SEQ ID NO: 64363 - protein, 35 aa, Artificial Sequence
  Cyclic GFR-binding peptide
  MOD_RES (29)..(30): Xaa is C or S
VMEVTAKKVVKDYEDIKRMQVPRLETPVXXAKPIS

SEQ ID NO: 64364 - protein, 29 aa, Artificial Sequence
  Cyclic GFR-binding peptide
VVMNNSLQEIVNSSDDYYVVPLPELKTPA

SEQ ID NO: 64365 - protein, 31 aa, Artificial Sequence
  Cyclic GFR-binding peptide
  MOD_RES (30)..(30): Xaa is C or S
NSLQEFIPKKRVIEYYVVPLPELQVQTPRXQ

SEQ ID NO: 64366 - protein, 26 aa, Artificial Sequence
  Cyclic GFR-binding peptide
HQLFNSLQEHQGQHPKIRYYLMTLPE

SEQ ID NO: 64367 - protein, 29 aa, Artificial Sequence
  Cyclic GFR-binding peptide
  MOD_RES (1)..(3): Xaa is C or S
XGXGEVVMDNSLQEVVKENEDYYVMPLPE

SEQ ID NO: 64368 - protein, 26 aa, Artificial Sequence
  Cyclic GFR-binding peptide
IMNSLQEVKPKRGVYYLITLPELAQP

SEQ ID NO: 64369 - protein, 30 aa, Artificial Sequence
  Cyclic GFR-binding peptide
RVVMNSMEGIIVNSSDDMIQVTINSLQTPA

SEQ ID NO: 64370 - protein, 25 aa, Artificial Sequence
  Cyclic GFR-binding peptide
NNSLQEIVNSSDDYYLVTLPELKTP

SEQ ID NO: 64371 - protein, 26 aa, Artificial Sequence
  Cyclic GFR-binding peptide
VIMSMEGIVKPKRGVMIQITINSLAQ

SEQ ID NO: 64372 - protein, 31 aa, Artificial Sequence
  Cyclic GFR-binding peptide
  MOD_RES (29)..(30): Xaa is C or S
VMDSMEGIVVKENEDMIQMTINSLETPVXXA

SEQ ID NO: 64373 - protein, 26 aa, Artificial Sequence
  Cyclic GFR-binding peptide
VIMVQVEKVKPKRGVVKAIKVSRLAQ

SEQ ID NO: 64374 - protein, 42 aa, Artificial Sequence
  Cyclic GFR-binding peptide
  MOD_RES (1)..(3)..(40): Xaa is C or S
XKXALHDELTNSLQEFIPKKRVIEYYLVTLPELQVQTPRXQV

SEQ ID NO: 64375 - protein, 26 aa, Artificial Sequence
  Cyclic GFR-binding peptide
SKVVMNSLQEVKPTRGVYYVIPLPEL

SEQ ID NO: 64376 - protein, 30 aa, Artificial Sequence; identical to SEQ ID NO: 15330
  Cyclic GFR-binding peptide
  MOD_RES (30)..(30): Xaa is C or S

SEQ ID NO: 64377 - protein, 39 aa, Artificial Sequence
  Cyclic GFR-binding peptide
  MOD_RES (1)..(33)..(34): Xaa is C or S
XSRVVMNVTAKKIVNSSDDIKRVQVPRLKTPAXXPKPVY

SEQ ID NO: 64378 - protein, 23 aa, Artificial Sequence
  Cyclic GFR-binding peptide
VIMNSLQEIKPTKGIYYLITLPE

SEQ ID NO: 64379 - protein, 35 aa, Artificial Sequence; identical to SEQ ID NO: 15333
  Cyclic GFR-binding peptide
  MOD_RES (1)..(3)..(35): Xaa is C or S

SEQ ID NO: 64380 - protein, 32 aa, Artificial Sequence
  Cyclic GFR-binding peptide
  MOD_RES (28)..(29): Xaa is C or S
IMVQVEKVKPKRGVVKAIKVSRLAQPVXXPAA

SEQ ID NO: 64381 - protein, 29 aa, Artificial Sequence
  Cyclic GFR-binding peptide
  MOD_RES (26)..(27): Xaa is C or S
SMEGIVKPKRGVMIQITINSLAQPVXXPA

SEQ ID NO: 64382 - protein, 35 aa, Artificial Sequence
  Cyclic GFR-binding peptide
  MOD_RES (2)..(4): Xaa is C or S
RXGXGEVVMESMEGIVVKDYEDMIQMTINSLETPV

SEQ ID NO: 64383 - protein, 35 aa, Artificial Sequence
  Cyclic GFR-binding peptide
  MOD_RES (1)..(3)..(34)..(35): Xaa is C or S
XKXSKVVMVQVEKVKPTRGVVKAIKVSRLDQPVXX

SEQ ID NO: 64384 - protein, 23 aa, Artificial Sequence
  Cyclic GFR-binding peptide
MNSLQEVKPKRGVYYLITLPELA

SEQ ID NO: 64385 - protein, 29 aa, Artificial Sequence
  Cyclic GFR-binding peptide
  MOD_RES (28)..(29): Xaa is C or S
MNNSLQEIVNSSDDYYLVTLPELQTPAXX

SEQ ID NO: 64386 - protein, 37 aa, Artificial Sequence; identical to SEQ ID NO: 22283
  Cyclic GFR-binding peptide
  MOD_RES (1)..(1): Xaa is C or S

SEQ ID NO: 64387 - protein, 27 aa, Artificial Sequence
  Cyclic GFR-binding peptide
VTAKKHQGQHPKIRIKRMQVPREETPV

SEQ ID NO: 64388 - protein, 28 aa, Artificial Sequence
  Cyclic GFR-binding peptide
  MOD_RES (2)..(2): Xaa is C or S
KXSKVIMVTAKKIKPTKGIIKRIQVPRL

SEQ ID NO: 64389 - protein, 28 aa, Artificial Sequence
  Cyclic GFR-binding peptide
VVMNSMEGIIVNSSDDMIQVTINSLKTP

SEQ ID NO: 64390 - protein, 24 aa, Artificial Sequence
  Cyclic GFR-binding peptide
KVIMVQVEKIKPTKGIVKAIKVSR

SEQ ID NO: 64391 - protein, 39 aa, Artificial Sequence
  Cyclic GFR-binding peptide
  MOD_RES (2)..(36): Xaa is C or S
EXKNHQLFNSLQEHQGQHPKIRYYLMTLPEEETPVXELG

SEQ ID NO: 64392 - protein, 22 aa, Artificial Sequence
  Cyclic GFR-binding peptide
NSLQEHQGQHPKIRYYVMPLPE

SEQ ID NO: 64393 - protein, 29 aa, Artificial Sequence
  Cyclic GFR-binding peptide
  MOD_RES (28)..(29): Xaa is C or S
MNSMEGIIVNSSDDMIQVTINSLQTPAXX

SEQ ID NO: 64394 - protein, 29 aa, Artificial Sequence
  Cyclic GFR-binding peptide
  MOD_RES (26)..(27): Xaa is C or S
SMEGIIVNSSDDMIQVTINSLQTPAXXPK

SEQ ID NO: 64395 - protein, 38 aa, Artificial Sequence; identical to SEQ ID NO: 15370
  Cyclic GFR-binding peptide
  MOD_RES (1)..(33)..(34): Xaa is C or S

SEQ ID NO: 64396 - protein, 23 aa, Artificial Sequence
  Cyclic GFR-binding peptide
NVTAKKIVNSSDDIKRVQVPRLK

SEQ ID NO: 64397 - protein, 34 aa, Artificial Sequence; identical to SEQ ID NO: 15374
  Cyclic GFR-binding peptide
  MOD_RES (30)..(31): Xaa is C or S

SEQ ID NO: 64398 - protein, 32 aa, Artificial Sequence
  Cyclic GFR-binding peptide
  MOD_RES (1)..(1): Xaa is C or S
XALHDELTNSLQEFIPKKRVIEYYVVPLPELQ

SEQ ID NO: 64399 - protein, 34 aa, Artificial Sequence
  Cyclic GFR-binding peptide
  MOD_RES (31)..(32): Xaa is C or S
RVVMNSMEGIIVNSSDDMIQVTINSLKTPAXXPK

SEQ ID NO: 64400 - protein, 33 aa, Artificial Sequence
  Cyclic GFR-binding peptide
HEELRNSLQELKPKKRVYEYYLVTLPEHHVRSP

SEQ ID NO: 64401 - protein, 24 aa, Artificial Sequence
  Cyclic GFR-binding peptide
NSLQEVVKDYEDYYVMPLPELETP

SEQ ID NO: 64402 - protein, 29 aa, Artificial Sequence
  Cyclic GFR-binding peptide
LFVQVEKHQGQHPKIRVKAMKVSREETPV

SEQ ID NO: 64403 - protein, 36 aa, Artificial Sequence; identical to SEQ ID NO: 22310
  Cyclic GFR-binding peptide
  MOD_RES (2)..(4): Xaa is C or S

SEQ ID NO: 64404 - protein, 32 aa, Artificial Sequence
  Cyclic GFR-binding peptide
LHDELTNSLQEFIPKKRVIEYYVVPLPELQVQ

SEQ ID NO: 64405 - protein, 36 aa, Artificial Sequence
  Cyclic GFR-binding peptide
  MOD_RES (1)..(3)..(34)..(35): Xaa is C or S
XKXSRVIMVTAKKVKPKRGVIKRIQVPRLAQPVXXP

SEQ ID NO: 64406 - protein, 27 aa, Artificial Sequence
  Cyclic GFR-binding peptide
RSMEGILKPKKRVYEMIQVTINSHHVR

SEQ ID NO: 64407 - protein, 25 aa, Artificial Sequence
  Cyclic GFR-binding peptide
LRSMEGILKPKKRVYEMIQVTINSH

SEQ ID NO: 64408 - protein, 41 aa, Artificial Sequence; identical to SEQ ID NO: 22320
  Cyclic GFR-binding peptide
  MOD_RES (2)..(4)..(41): Xaa is C or S

SEQ ID NO: 64409 - protein, 35 aa, Artificial Sequence; identical to SEQ ID NO: 15398
  Cyclic GFR-binding peptide
  MOD_RES (32)..(33): Xaa is C or S

SEQ ID NO: 64410 - protein, 32 aa, Artificial Sequence; identical to SEQ ID NO: 15399
  Cyclic GFR-binding peptide
  MOD_RES (29)..(30): Xaa is C or S

SEQ ID NO: 64411 - protein, 29 aa, Artificial Sequence
  Cyclic GFR-binding peptide
GEVVMENSLQEVVKDYEDYYLMTLPELET

SEQ ID NO: 64412 - protein, 36 aa, Artificial Sequence; identical to SEQ ID NO: 15402
  Cyclic GFR-binding peptide
  MOD_RES (2)..(33)..(34): Xaa is C or S

SEQ ID NO: 64413 - protein, 26 aa, Artificial Sequence
  Cyclic GFR-binding peptide
VVMNVQVEKIVNSSDDVKAVKVSRLK

SEQ ID NO: 64414 - protein, 30 aa, Artificial Sequence; identical to SEQ ID NO: 15403
  Cyclic GFR-binding peptide
  MOD_RES (1)..(1): Xaa is C or S

SEQ ID NO: 64415 - protein, 23 aa, Artificial Sequence
  Cyclic GFR-binding peptide
VTAKKVKPTRGVIKRIQVPRLDQ

SEQ ID NO: 64416 - protein, 42 aa, Artificial Sequence; identical to SEQ ID NO: 22322
  Cyclic GFR-binding peptide
  MOD_RES (2)..(39): Xaa is C or S

SEQ ID NO: 64417 - protein, 25 aa, Artificial Sequence
  Cyclic GFR-binding peptide
NSLQEVVKENEDYYLMTLPELETPV

SEQ ID NO: 64418 - protein, 27 aa, Artificial Sequence
  Cyclic GFR-binding peptide
  MOD_RES (2)..(2): Xaa is C or S
KXSKVIMVQVEKIKPTKGIVKAIKVSR

SEQ ID NO: 64419 - protein, 30 aa, Artificial Sequence
  Cyclic GFR-binding peptide
  MOD_RES (27)..(28): Xaa is C or S
MVTAKKVKPTRGVIKRIQVPRLDQPVXXPS

SEQ ID NO: 64420 - protein, 31 aa, Artificial Sequence
  Cyclic GFR-binding peptide
  MOD_RES (27)..(28): Xaa is C or S
MVTAKKVKPTRGVIKRIQVPRLDQPVXXPSA

SEQ ID NO: 64421 - protein, 32 aa, Artificial Sequence; identical to SEQ ID NO: 22330
  Cyclic GFR-binding peptide
  MOD_RES (2)..(2): Xaa is C or S

SEQ ID NO: 64422 - protein, 35 aa, Artificial Sequence
  Cyclic GFR-binding peptide
  MOD_RES (2)..(34)..(35): Xaa is C or S
GXGEVVMDSMEGIVVKENEDMIQMTINSLETPVXX

SEQ ID NO: 64423 - protein, 25 aa, Artificial Sequence
  Cyclic GFR-binding peptide
ELTNSLQEFIPKKRVIEYYLVTLPE

SEQ ID NO: 64424 - protein, 34 aa, Artificial Sequence
  Cyclic GFR-binding peptide
  MOD_RES (30)..(30): Xaa is C or S
NSLQELKPKKRVYEYYLVTLPEHHVRSPQXKVSS

SEQ ID NO: 64425 - protein, 37 aa, Artificial Sequence
  Cyclic GFR-binding peptide
  MOD_RES (1)..(35): Xaa is C or S
XKNHQLFNSLQEHQGQHPKIRYYLMTLPEEETPVXEL

SEQ ID NO: 64426 - protein, 25 aa, Artificial Sequence
  Cyclic GFR-binding peptide
RVIMSMEGIVKPKRGVMIQITINSL

SEQ ID NO: 64427 - protein, 35 aa, Artificial Sequence; identical to SEQ ID NO: 15436
  Cyclic GFR-binding peptide
  MOD_RES (2)..(4)..(35): Xaa is C or S

SEQ ID NO: 64428 - protein, 40 aa, Artificial Sequence
  Cyclic GFR-binding peptide
  MOD_RES (1)..(3)..(34)..(35): Xaa is C or S
XKXSRVIMSMEGIVKPKRGVMIQITINSLAQPVXXPAASA

SEQ ID NO: 64429 - protein, 33 aa, Artificial Sequence
  Cyclic GFR-binding peptide
  MOD_RES (31)..(31): Xaa is C or S
QLFNSLQEHQGQHPKIRYYLMTLPEEETPVXEL

SEQ ID NO: 64430 - protein, 39 aa, Artificial Sequence
  Cyclic GFR-binding peptide
  MOD_RES (1)..(33): Xaa is C or S
XSRVVMNVTAKKIVNSSDDIKRVQVPRLKTPAXTPKTVH

SEQ ID NO: 64431 - protein, 32 aa, Artificial Sequence; identical to SEQ ID NO: 22340
  Cyclic GFR-binding peptide

SEQ ID NO: 64432 - protein, 39 aa, Artificial Sequence; identical to SEQ ID NO: 15449
  Cyclic GFR-binding peptide
  MOD_RES (1)..(33)..(34): Xaa is C or S

SEQ ID NO: 64433 - protein, 32 aa, Artificial Sequence
  Cyclic GFR-binding peptide
LHEELRNSLQELKPKKRVYEYYVVPLPEHHVR

SEQ ID NO: 64434 - protein, 33 aa, Artificial Sequence
  Cyclic GFR-binding peptide
  MOD_RES (29)..(30): Xaa is C or S
VMESMEGIVVKDYEDMIQMTINSLETPVXXAKP

SEQ ID NO: 64435 - protein, 38 aa, Artificial Sequence
  Cyclic GFR-binding peptide
  MOD_RES (2)..(34)..(35): Xaa is C or S
GXGEVVMDSMEGIVVKENEDMIQMTINSLETPVXXAKP

SEQ ID NO: 64436 - protein, 34 aa, Artificial Sequence
  Cyclic GFR-binding peptide
  MOD_RES (29)..(30): Xaa is C or S
VMEVQVEKVVKDYEDVKAMKVSRLETPVXXAKPI

SEQ ID NO: 64437 - protein, 36 aa, Artificial Sequence
  Cyclic GFR-binding peptide
  MOD_RES (2)..(34)..(35): Xaa is C or S
GXGEVVMEVTAKKVVKDYEDIKRMQVPRLETPVXXA

SEQ ID NO: 64438 - protein, 34 aa, Artificial Sequence
  Cyclic GFR-binding peptide
  MOD_RES (32)..(33): Xaa is C or S
GEVVMESMEGIVVKDYEDMIQMTINSLETPVXXA

SEQ ID NO: 64439 - protein, 30 aa, Artificial Sequence; identical to SEQ ID NO: 15452
  Cyclic GFR-binding peptide
  MOD_RES (26)..(27): Xaa is C or S

SEQ ID NO: 64440 - protein, 31 aa, Artificial Sequence
  Cyclic GFR-binding peptide
  MOD_RES (1)..(3): Xaa is C or S
XEXKNHQLFNSLQEHQGQHPKIRYYVMPLPE

SEQ ID NO: 64441 - protein, 30 aa, Artificial Sequence; identical to SEQ ID NO: 15455
  Cyclic GFR-binding peptide
  MOD_RES (30)..(30): Xaa is C or S

SEQ ID NO: 64442 - protein, 28 aa, Artificial Sequence
  Cyclic GFR-binding peptide
VIMVTAKKVKPKRGVIKRIQVPRLAQPV

SEQ ID NO: 64443 - protein, 30 aa, Artificial Sequence; identical to SEQ ID NO: 15457
  Cyclic GFR-binding peptide
  MOD_RES (2)..(2): Xaa is C or S

SEQ ID NO: 64444 - protein, 29 aa, Artificial Sequence
  Cyclic GFR-binding peptide
  MOD_RES (27)..(28): Xaa is C or S
MSMEGIVKPTRGVMIQITINSLDQPVXXP

SEQ ID NO: 64445 - protein, 40 aa, Artificial Sequence; identical to SEQ ID NO: 15458
  Cyclic GFR-binding peptide
  MOD_RES (2)..(4)..(36)..(37): Xaa is C or S

SEQ ID NO: 64446 - protein, 32 aa, Artificial Sequence
  Cyclic GFR-binding peptide
  MOD_RES (32)..(32): Xaa is C or S
SRVVMNVTAKKIVNSSDDIKRVQVPRLKTPAX

SEQ ID NO: 64447 - protein, 29 aa, Artificial Sequence
  Cyclic GFR-binding peptide
  MOD_RES (2)..(4): Xaa is C or S
SXKXSKVVMVTAKKVKPTRGVIKRIQVPR

SEQ ID NO: 64448 - protein, 36 aa, Artificial Sequence; identical to SEQ ID NO: 22357
  Cyclic GFR-binding peptide
  MOD_RES (31)..(31): Xaa is C or S

SEQ ID NO: 64449 - protein, 23 aa, Artificial Sequence
  Cyclic GFR-binding peptide
VIMVQVEKIKPTKGIVKAIKVSR

SEQ ID NO: 64450 - protein, 40 aa, Artificial Sequence
  Cyclic GFR-binding peptide
  MOD_RES (2)..(36): Xaa is C or S
EXKNHQLFNSLQEHQGQHPKIRYYVMPLPEEETPVXELGE

SEQ ID NO: 64451 - protein, 21 aa, Artificial Sequence
  Cyclic GFR-binding peptide
DNSLQEVVKENEDYYVMPLPE

SEQ ID NO: 64452 - protein, 29 aa, Artificial Sequence
  Cyclic GFR-binding peptide
EVVMDVTAKKVVKENEDIKRMQVPRLETP

SEQ ID NO: 64453 - protein, 34 aa, Artificial Sequence
  Cyclic GFR-binding peptide
  MOD_RES (30)..(31): Xaa is C or S
KVVMVTAKKVKPTRGVIKRIQVPRLDQPVXXPSA

SEQ ID NO: 64454 - protein, 29 aa, Artificial Sequence
  Cyclic GFR-binding peptide
SRVIMNSLQEVKPKRGVYYLITLPELAQP

SEQ ID NO: 64455 - protein, 36 aa, Artificial Sequence; identical to SEQ ID NO: 22366
  Cyclic GFR-binding peptide
  MOD_RES (2)..(4): Xaa is C or S

SEQ ID NO: 64456 - protein, 34 aa, Artificial Sequence
  Cyclic GFR-binding peptide
  MOD_RES (28)..(29): Xaa is C or S
VMSMEGIVKPTRGVMIQITINSLDQPVXXPSASA

SEQ ID NO: 64457 - protein, 33 aa, Artificial Sequence
  Cyclic GFR-binding peptide
  MOD_RES (1)..(33): Xaa is C or S
XGEVVMESMEGIVVKDYEDMIQMTINSLETPVX

SEQ ID NO: 64458 - protein, 36 aa, Artificial Sequence; identical to SEQ ID NO: 22372
  Cyclic GFR-binding peptide
  MOD_RES (34)..(34): Xaa is C or S

SEQ ID NO: 64459 - protein, 36 aa, Artificial Sequence; identical to SEQ ID NO: 22376
  Cyclic GFR-binding peptide
  MOD_RES (1)..(3): Xaa is C or S

SEQ ID NO: 64460 - protein, 34 aa, Artificial Sequence
  Cyclic GFR-binding peptide
  MOD_RES (34)..(34): Xaa is C or S
KNHQLFNSLQEHQGQHPKIRYYLMTLPEEETPVX

SEQ ID NO: 64461 - protein, 28 aa, Artificial Sequence
  Cyclic GFR-binding peptide
  MOD_RES (1)..(3): Xaa is C or S
XKXSRVIMNSLQEVKPKRGVYYLITLPE

SEQ ID NO: 64462 - protein, 28 aa, Artificial Sequence
  Cyclic GFR-binding peptide
  MOD_RES (27)..(27): Xaa is C or S
NNSLQEIVNSSDDYYVVPLPELKTPAXT

SEQ ID NO: 64463 - protein, 37 aa, Artificial Sequence
  Cyclic GFR-binding peptide
  MOD_RES (2)..(2): Xaa is C or S
AXELHEELRNSLQELKPKKRVYEYYLVTLPEHHVRSP

SEQ ID NO: 64464 - protein, 28 aa, Artificial Sequence
  Cyclic GFR-binding peptide
  MOD_RES (26)..(27): Xaa is C or S
NSLQEIVNSSDDYYLVTLPELQTPAXXP

SEQ ID NO: 64465 - protein, 32 aa, Artificial Sequence; identical to SEQ ID NO: 49461
  Cyclic GFR-binding peptide
  MOD_RES (29)..(30): Xaa is C or S

SEQ ID NO: 64466 - protein, 35 aa, Artificial Sequence; identical to SEQ ID NO: 22390
  Cyclic GFR-binding peptide
  MOD_RES (34)..(34): Xaa is C or S

SEQ ID NO: 64467 - protein, 29 aa, Artificial Sequence
  Cyclic GFR-binding peptide
  MOD_RES (1)..(1): Xaa is C or S
XSKVIMSMEGIIKPTKGIMIQITINSLDQ

SEQ ID NO: 64468 - protein, 41 aa, Artificial Sequence
  Cyclic GFR-binding peptide
  MOD_RES (37)..(37): Xaa is C or S
ELHEELRNSLQELKPKKRVYEYYLVTLPEHHVRSPQXKVSS

SEQ ID NO: 64469 - protein, 26 aa, Artificial Sequence
  Cyclic GFR-binding peptide
MNVQVEKIVNSSDDVKAVKVSRLQTP

SEQ ID NO: 64470 - protein, 37 aa, Artificial Sequence; identical to SEQ ID NO: 22396
  Cyclic GFR-binding peptide
  MOD_RES (1)..(3): Xaa is C or S

SEQ ID NO: 64471 - protein, 33 aa, Artificial Sequence; identical to SEQ ID NO: 22397
  Cyclic GFR-binding peptide
  MOD_RES (29)..(29): Xaa is C or S

SEQ ID NO: 64472 - protein, 33 aa, Artificial Sequence; identical to SEQ ID NO: 22400
  Cyclic GFR-binding peptide
  MOD_RES (28)..(28): Xaa is C or S

SEQ ID NO: 64473 - protein, 27 aa, Artificial Sequence
  Cyclic GFR-binding peptide
  MOD_RES (1)..(1): Xaa is C or S
XSRVIMNSLQEVKPKRGVYYLITLPEL

SEQ ID NO: 64474 - protein, 39 aa, Artificial Sequence
  Cyclic GFR-binding peptide
  MOD_RES (1)..(3)..(34)..(35): Xaa is C or S
XKXSKVVMSMEGIVKPTRGVMIQITINSLDQPVXXPSAS

SEQ ID NO: 64475 - protein, 38 aa, Artificial Sequence; identical to SEQ ID NO: 15503
  Cyclic GFR-binding peptide
  MOD_RES (1)..(3)..(34)..(35): Xaa is C or S

SEQ ID NO: 64476 - protein, 29 aa, Artificial Sequence
  Cyclic GFR-binding peptide
  MOD_RES (2)..(2): Xaa is C or S
KXSKVIMVTAKKIKPTKGIIKRIQVPRLD

SEQ ID NO: 64477 - protein, 30 aa, Artificial Sequence; identical to SEQ ID NO: 22403
  Cyclic GFR-binding peptide

SEQ ID NO: 64478 - protein, 28 aa, Artificial Sequence
  Cyclic GFR-binding peptide
  MOD_RES (1)..(1): Xaa is C or S
XGEVVMEVQVEKVVKDYEDVKAMKVSRL

SEQ ID NO: 64479 - protein, 24 aa, Artificial Sequence
  Cyclic GFR-binding peptide
VVMNNSLQEIVNSSDDYYLVTLPE

SEQ ID NO: 64480 - protein, 33 aa, Artificial Sequence
  Cyclic GFR-binding peptide
  MOD_RES (1)..(3): Xaa is C or S
XKXSKVIMVTAKKIKPTKGIIKRIQVPRLDQSV

SEQ ID NO: 64481 - protein, 33 aa, Artificial Sequence; identical to SEQ ID NO: 15507
  Cyclic GFR-binding peptide
  MOD_RES (1)..(33): Xaa is C or S

SEQ ID NO: 64482 - protein, 33 aa, Artificial Sequence; identical to SEQ ID NO: 15510
  Cyclic GFR-binding peptide
  MOD_RES (1)..(3): Xaa is C or S

SEQ ID NO: 64483 - protein, 30 aa, Artificial Sequence
  Cyclic GFR-binding peptide
  MOD_RES (30)..(30): Xaa is C or S
KVIMVTAKKIKPTKGIIKRIQVPRLDQSVX

SEQ ID NO: 64484 - protein, 31 aa, Artificial Sequence
  Cyclic GFR-binding peptide
LTNSLQEFIPKKRVIEYYVVPLPELQVQTPR

SEQ ID NO: 64485 - protein, 27 aa, Artificial Sequence
  Cyclic GFR-binding peptide
RVVMNSMEGIIVNSSDDMIQVTINSLK

SEQ ID NO: 64486 - protein, 28 aa, Artificial Sequence
  Cyclic GFR-binding peptide
VVMENSLQEVVKDYEDYYVMPLPELETP

SEQ ID NO: 64487 - protein, 25 aa, Artificial Sequence
  Cyclic GFR-binding peptide
SMEGIFIPKKRVIEMIQVTINSLQV

SEQ ID NO: 64488 - protein, 38 aa, Artificial Sequence; identical to SEQ ID NO: 22409
  Cyclic GFR-binding peptide
  MOD_RES (36)..(36): Xaa is C or S

SEQ ID NO: 64489 - protein, 33 aa, Artificial Sequence
  Cyclic GFR-binding peptide
  MOD_RES (2)..(2): Xaa is C or S
GXARVVMNVQVEKIVNSSDDVKAVKVSRLQTPA

SEQ ID NO: 64490 - protein, 31 aa, Artificial Sequence
  Cyclic GFR-binding peptide
  MOD_RES (31)..(31): Xaa is C or S
QLFNSLQEHQGQHPKIRYYVMPLPEEETPVX

SEQ ID NO: 64491 - protein, 26 aa, Artificial Sequence
  Cyclic GFR-binding peptide
VTAKKLKPKKRVYEIKRVQVPRHHVR

SEQ ID NO: 64492 - protein, 38 aa, Artificial Sequence
  Cyclic GFR-binding peptide
  MOD_RES (2)..(4)..(35)..(36): Xaa is C or S
SXKXSKVVMVQVEKVKPTRGVVKAIKVSRLDQPVXXPS

SEQ ID NO: 64493 - protein, 28 aa, Artificial Sequence
  Cyclic GFR-binding peptide
  MOD_RES (28)..(28): Xaa is C or S
VTAKKHQGQHPKIRIKRMQVPREETPVX

SEQ ID NO: 64494 - protein, 31 aa, Artificial Sequence
  Cyclic GFR-binding peptide
  MOD_RES (29)..(30): Xaa is C or S
VMDVQVEKVVKENEDVKAMKVSRLETPVXXA

SEQ ID NO: 64495 - protein, 28 aa, Artificial Sequence
  Cyclic GFR-binding peptide
  MOD_RES (2)..(2): Xaa is C or S
GXSRVVMNNSLQEIVNSSDDYYLVTLPE

SEQ ID NO: 64496 - protein, 36 aa, Artificial Sequence; identical to SEQ ID NO: 15522
  Cyclic GFR-binding peptide
  MOD_RES (32)..(33): Xaa is C or S

SEQ ID NO: 64497 - protein, 28 aa, Artificial Sequence
  Cyclic GFR-binding peptide
LHEELRNSLQELKPKKRVYEYYVVPLPE

SEQ ID NO: 64498 - protein, 22 aa, Artificial Sequence
  Cyclic GFR-binding peptide
MNSMEGIIVNSSDDMIQVTINS

SEQ ID NO: 64499 - protein, 27 aa, Artificial Sequence
  Cyclic GFR-binding peptide
RVVMNNSLQEIVNSSDDYYVVPLPELQ

SEQ ID NO: 64500 - protein, 35 aa, Artificial Sequence; identical to SEQ ID NO: 15524
  Cyclic GFR-binding peptide
  MOD_RES (1)..(33): Xaa is C or S

SEQ ID NO: 64501 - protein, 37 aa, Artificial Sequence
  Cyclic GFR-binding peptide
  MOD_RES (2)..(4)..(35)..(36): Xaa is C or S
SXKXSKVIMVQVEKIKPTKGIVKAIKVSRLDQSVXXP

SEQ ID NO: 64502 - protein, 36 aa, Artificial Sequence
  Cyclic GFR-binding peptide
  MOD_RES (2)..(4): Xaa is C or S
RXEXKNHQLFNSLQEHQGQHPKIRYYVMPLPEEETP

SEQ ID NO: 64503 - protein, 26 aa, Artificial Sequence
  Cyclic GFR-binding peptide
KVVMNSLQEVKPTRGVYYVIPLPELD

SEQ ID NO: 64504 - protein, 26 aa, Artificial Sequence
  Cyclic GFR-binding peptide
VMENSLQEVVKDYEDYYVMPLPELET

SEQ ID NO: 64505 - protein, 34 aa, Artificial Sequence
  Cyclic GFR-binding peptide
  MOD_RES (31)..(32): Xaa is C or S
EVVMEVTAKKVVKDYEDIKRMQVPRLETPVXXAK

SEQ ID NO: 64506 - protein, 36 aa, Artificial Sequence
  Cyclic GFR-binding peptide
  MOD_RES (2)..(34): Xaa is C or S
GXSRVVMNSMEGIIVNSSDDMIQVTINSLKTPAXTP

SEQ ID NO: 64507 - protein, 26 aa, Artificial Sequence
  Cyclic GFR-binding peptide
GEVVMDVTAKKVVKENEDIKRMQVPR

SEQ ID NO: 64508 - protein, 27 aa, Artificial Sequence
  Cyclic GFR-binding peptide
VVMESMEGIVVKDYEDMIQMTINSLET

SEQ ID NO: 64509 - protein, 29 aa, Artificial Sequence
  Cyclic GFR-binding peptide
  MOD_RES (2)..(2): Xaa is C or S
GXGEVVMDNSLQEVVKENEDYYVMPLPEL

SEQ ID NO: 64510 - protein, 41 aa, Artificial Sequence
  Cyclic GFR-binding peptide
  MOD_RES (2)..(4)..(35)..(36): Xaa is C or S
SXKXSRVIMSMEGIVKPKRGVMIQITINSLAQPVXXPAASA

SEQ ID NO: 64511 - protein, 35 aa, Artificial Sequence; identical to SEQ ID NO: 49495
  Cyclic GFR-binding peptide
  MOD_RES (29)..(30): Xaa is C or S

SEQ ID NO: 64512 - protein, 38 aa, Artificial Sequence; identical to SEQ ID NO: 22433
  Cyclic GFR-binding peptide
  MOD_RES (33)..(33): Xaa is C or S

SEQ ID NO: 64513 - protein, 33 aa, Artificial Sequence; identical to SEQ ID NO: 22434
  Cyclic GFR-binding peptide
  MOD_RES (1)..(1): Xaa is C or S

SEQ ID NO: 64514 - protein, 20 aa, Artificial Sequence
  Cyclic GFR-binding peptide
NSLQEIKPTKGIYYLITLPE

SEQ ID NO: 64515 - protein, 31 aa, Artificial Sequence
  Cyclic GFR-binding peptide
  MOD_RES (2)..(4): Xaa is C or S
SXKXSKVIMSMEGIIKPTKGIMIQITINSLD

SEQ ID NO: 64516 - protein, 27 aa, Artificial Sequence
  Cyclic GFR-binding peptide
VIMVTAKKIKPTKGIIKRIQVPRLDQS

SEQ ID NO: 64517 - protein, 24 aa, Artificial Sequence
  Cyclic GFR-binding peptide
SMEGIVVKDYEDMIQMTINSLETP

SEQ ID NO: 64518 - protein, 29 aa, Artificial Sequence
  Cyclic GFR-binding peptide
  MOD_RES (2)..(2): Xaa is C or S
GXARVVMNNSLQEIVNSSDDYYLVTLPEL

SEQ ID NO: 64519 - protein, 29 aa, Artificial Sequence
  Cyclic GFR-binding peptide
  MOD_RES (28)..(28): Xaa is C or S
MNSMEGIIVNSSDDMIQVTINSLKTPAXT

SEQ ID NO: 64520 - protein, 38 aa, Artificial Sequence
  Cyclic GFR-binding peptide
  MOD_RES (2)..(36): Xaa is C or S
EXKNHQLFNSLQEHQGQHPKIRYYVMPLPEEETPVXEL

SEQ ID NO: 64521 - protein, 33 aa, Artificial Sequence
  Cyclic GFR-binding peptide
  MOD_RES (27)..(28): Xaa is C or S
NVTAKKIVNSSDDIKRVQVPRLKTPAXXPKPVY

SEQ ID NO: 64522 - protein, 34 aa, Artificial Sequence; identical to SEQ ID NO: 15564
  Cyclic GFR-binding peptide
  MOD_RES (1)..(32)..(33): Xaa is C or S

SEQ ID NO: 64523 - protein, 33 aa, Artificial Sequence; identical to SEQ ID NO: 15565
  Cyclic GFR-binding peptide
  MOD_RES (30)..(30): Xaa is C or S

SEQ ID NO: 64524 - protein, 35 aa, Artificial Sequence
  Cyclic GFR-binding peptide
  MOD_RES (32)..(33): Xaa is C or S
ARVVMNVQVEKIVNSSDDVKAVKVSRLQTPAXXPK

SEQ ID NO: 64525 - protein, 27 aa, Artificial Sequence
  Cyclic GFR-binding peptide
ELTSMEGIFIPKKRVIEMIQVTINSLQ

SEQ ID NO: 64526 - protein, 40 aa, Artificial Sequence; identical to SEQ ID NO: 15570
  Cyclic GFR-binding peptide
  MOD_RES (2)..(4)..(36): Xaa is C or S

SEQ ID NO: 64527 - protein, 27 aa, Artificial Sequence
  Cyclic GFR-binding peptide
VVMNSMEGIIVNSSDDMIQVTINSLKT

SEQ ID NO: 64528 - protein, 27 aa, Artificial Sequence
  Cyclic GFR-binding peptide
  MOD_RES (26)..(27): Xaa is C or S
NSLQEVVKENEDYYLMTLPELETPVXX

SEQ ID NO: 64529 - protein, 37 aa, Artificial Sequence; identical to SEQ ID NO: 22447
  Cyclic GFR-binding peptide
  MOD_RES (36)..(36): Xaa is C or S

SEQ ID NO: 64530 - protein, 30 aa, Artificial Sequence
  Cyclic GFR-binding peptide
  MOD_RES (1)..(1): Xaa is C or S
XARVVMNSMEGIIVNSSDDMIQVTINSLQT

SEQ ID NO: 64531 - protein, 31 aa, Artificial Sequence; identical to SEQ ID NO: 15577
  Cyclic GFR-binding peptide
  MOD_RES (2)..(4): Xaa is C or S

SEQ ID NO: 64532 - protein, 31 aa, Artificial Sequence; identical to SEQ ID NO: 22448
  Cyclic GFR-binding peptide
  MOD_RES (1)..(1): Xaa is C or S

SEQ ID NO: 64533 - protein, 24 aa, Artificial Sequence
  Cyclic GFR-binding peptide
VIMNSLQEIKPTKGIYYLITLPEL

SEQ ID NO: 64534 - protein, 30 aa, Artificial Sequence
  Cyclic GFR-binding peptide
LRNSLQELKPKKRVYEYYLVTLPEHHVRSP

SEQ ID NO: 64535 - protein, 33 aa, Artificial Sequence
  Cyclic GFR-binding peptide
  MOD_RES (31)..(32): Xaa is C or S
SKVVMSMEGIVKPTRGVMIQITINSLDQPVXXP

SEQ ID NO: 64536 - protein, 32 aa, Artificial Sequence; identical to SEQ ID NO: 15580
  Cyclic GFR-binding peptide
  MOD_RES (29)..(30): Xaa is C or S

SEQ ID NO: 64537 - protein, 42 aa, Artificial Sequence; identical to SEQ ID NO: 22452
  Cyclic GFR-binding peptide
  MOD_RES (2)..(39): Xaa is C or S

SEQ ID NO: 64538 - protein, 34 aa, Artificial Sequence
  Cyclic GFR-binding peptide
  MOD_RES (29)..(29): Xaa is C or S
VMNVTAKKIVNSSDDIKRVQVPRLKTPAXTPKTV

SEQ ID NO: 64539 - protein, 40 aa, Artificial Sequence; identical to SEQ ID NO: 22454
  Cyclic GFR-binding peptide
  MOD_RES (2)..(36): Xaa is C or S

SEQ ID NO: 64540 - protein, 33 aa, Artificial Sequence
  Cyclic GFR-binding peptide
  MOD_RES (27)..(28): Xaa is C or S
MVTAKKIKPTKGIIKRIQVPRLDQSVXXPSASA

SEQ ID NO: 64541 - protein, 31 aa, Artificial Sequence
  Cyclic GFR-binding peptide
KNHQLFNSLQEHQGQHPKIRYYLMTLPEEET

SEQ ID NO: 64542 - protein, 27 aa, Artificial Sequence
  Cyclic GFR-binding peptide
LTSMEGIFIPKKRVIEMIQVTINSLQV

SEQ ID NO: 64543 - protein, 36 aa, Artificial Sequence
  Cyclic GFR-binding peptide
  MOD_RES (2)..(33)..(34): Xaa is C or S
KXSRVIMVTAKKVKPKRGVIKRIQVPRLAQPVXXPA

SEQ ID NO: 64544 - protein, 31 aa, Artificial Sequence
  Cyclic GFR-binding peptide
  MOD_RES (28)..(29): Xaa is C or S
MDVQVEKVVKENEDVKAMKVSRLETPVXXAK

SEQ ID NO: 64545 - protein, 30 aa, Artificial Sequence
  Cyclic GFR-binding peptide
  MOD_RES (1)..(1): Xaa is C or S
XGEVVMDVQVEKVVKENEDVKAMKVSRLET

SEQ ID NO: 64546 - protein, 42 aa, Artificial Sequence; identical to SEQ ID NO: 22457
  Cyclic GFR-binding peptide
  MOD_RES (2)..(4)..(41): Xaa is C or S

SEQ ID NO: 64547 - protein, 37 aa, Artificial Sequence
  Cyclic GFR-binding peptide
  MOD_RES (32)..(32): Xaa is C or S
SRVVMNSMEGIIVNSSDDMIQVTINSLKTPAXTPKTV

SEQ ID NO: 64548 - protein, 27 aa, Artificial Sequence
  Cyclic GFR-binding peptide
  MOD_RES (1)..(1): Xaa is C or S
XGEVVMDVTAKKVVKENEDIKRMQVPR

SEQ ID NO: 64549 - protein, 35 aa, Artificial Sequence
  Cyclic GFR-binding peptide
  MOD_RES (30)..(31): Xaa is C or S
VVMEVQVEKVVKDYEDVKAMKVSRLETPVXXAKPI

SEQ ID NO: 64550 - protein, 32 aa, Artificial Sequence
  Cyclic GFR-binding peptide
DELTNSLQEFIPKKRVIEYYVVPLPELQVQTP

SEQ ID NO: 64551 - protein, 44 aa, Artificial Sequence; identical to SEQ ID NO: 22460
  Cyclic GFR-binding peptide
  MOD_RES (1)..(3)..(40): Xaa is C or S

SEQ ID NO: 64552 - protein, 31 aa, Artificial Sequence
  Cyclic GFR-binding peptide
  MOD_RES (28)..(29): Xaa is C or S
IMVTAKKVKPKRGVIKRIQVPRLAQPVXXPA

SEQ ID NO: 64553 - protein, 34 aa, Artificial Sequence; identical to SEQ ID NO: 15595
  Cyclic GFR-binding peptide
  MOD_RES (30)..(30): Xaa is C or S

SEQ ID NO: 64554 - protein, 34 aa, Artificial Sequence
  Cyclic GFR-binding peptide
LHDELTNSLQEFIPKKRVIEYYLVTLPELQVQTP

SEQ ID NO: 64555 - protein, 39 aa, Artificial Sequence; identical to SEQ ID NO: 15598
  Cyclic GFR-binding peptide
  MOD_RES (1)..(3)..(34)..(35): Xaa is C or S

SEQ ID NO: 64556 - protein, 35 aa, Artificial Sequence
  Cyclic GFR-binding peptide
  MOD_RES (33)..(33): Xaa is C or S
ELTNSLQEFIPKKRVIEYYVVPLPELQVQTPRXQV

SEQ ID NO: 64557 - protein, 25 aa, Artificial Sequence
  Cyclic GFR-binding peptide
VVMNSMEGIIVNSSDDMIQVTINSL

SEQ ID NO: 64558 - protein, 25 aa, Artificial Sequence
  Cyclic GFR-binding peptide
VMESMEGIVVKDYEDMIQMTINSLE

SEQ ID NO: 64559 - protein, 31 aa, Artificial Sequence
  Cyclic GFR-binding peptide
  MOD_RES (2)..(2): Xaa is C or S
AXELHEELRNSLQELKPKKRVYEYYVVPLPE

SEQ ID NO: 64560 - protein, 33 aa, Artificial Sequence
  Cyclic GFR-binding peptide
  MOD_RES (1)..(32)..(33): Xaa is C or S
XSKVIMVTAKKIKPTKGIIKRIQVPRLDQSVXX

SEQ ID NO: 64561 - protein, 43 aa, Artificial Sequence; identical to SEQ ID NO: 22485
  Cyclic GFR-binding peptide
  MOD_RES (1)..(3)..(40): Xaa is C or S

SEQ ID NO: 64562 - protein, 26 aa, Artificial Sequence
  Cyclic GFR-binding peptide
VVMNVQVEKIVNSSDDVKAVKVSRLQ

SEQ ID NO: 64563 - protein, 33 aa, Artificial Sequence; identical to SEQ ID NO: 15618
  Cyclic GFR-binding peptide
  MOD_RES (32)..(33): Xaa is C or S

SEQ ID NO: 64564 - protein, 38 aa, Artificial Sequence
  Cyclic GFR-binding peptide
  MOD_RES (1)..(3)..(35)..(36): Xaa is C or S
XGXGEVVMEVTAKKVVKDYEDIKRMQVPRLETPVXXAK

SEQ ID NO: 64565 - protein, 30 aa, Artificial Sequence; identical to SEQ ID NO: 15621
  Cyclic GFR-binding peptide
  MOD_RES (28)..(29): Xaa is C or S

SEQ ID NO: 64566 - protein, 29 aa, Artificial Sequence
  Cyclic GFR-binding peptide
  MOD_RES (2)..(2): Xaa is C or S
GXSRVVMNSMEGIIVNSSDDMIQVTINSL

SEQ ID NO: 64567 - protein, 24 aa, Artificial Sequence
  Cyclic GFR-binding peptide
RNSLQELKPKKRVYEYYVVPLPEH

SEQ ID NO: 64568 - protein, 34 aa, Artificial Sequence
  Cyclic GFR-binding peptide
  MOD_RES (28)..(29): Xaa is C or S
MDVQVEKVVKENEDVKAMKVSRLETPVXXAKPIK

SEQ ID NO: 64569 - protein, 30 aa, Artificial Sequence; identical to SEQ ID NO: 15627
  Cyclic GFR-binding peptide

SEQ ID NO: 64570 - protein, 29 aa, Artificial Sequence
  Cyclic GFR-binding peptide
  MOD_RES (29)..(29): Xaa is C or S
VMDNSLQEVVKENEDYYVMPLPELETPVX

SEQ ID NO: 64571 - protein, 31 aa, Artificial Sequence
  Cyclic GFR-binding peptide
  MOD_RES (2)..(2): Xaa is C or S
GXSRVVMNVTAKKIVNSSDDIKRVQVPRLKT

SEQ ID NO: 64572 - protein, 32 aa, Artificial Sequence; identical to SEQ ID NO: 49567
  Cyclic GFR-binding peptide
  MOD_RES (27)..(28): Xaa is C or S

SEQ ID NO: 64573 - protein, 34 aa, Artificial Sequence
  Cyclic GFR-binding peptide
  MOD_RES (28)..(29): Xaa is C or S
MNVQVEKIVNSSDDVKAVKVSRLQTPAXXPKPVT

SEQ ID NO: 64574 - protein, 33 aa, Artificial Sequence; identical to SEQ ID NO: 22504
  Cyclic GFR-binding peptide

SEQ ID NO: 64575 - protein, 28 aa, Artificial Sequence
  Cyclic GFR-binding peptide
VIMSMEGIVKPKRGVMIQITINSLAQPV

SEQ ID NO: 64576 - protein, 34 aa, Artificial Sequence
  Cyclic GFR-binding peptide
  MOD_RES (2)..(4): Xaa is C or S
HXGXSRVVMNSMEGIIVNSSDDMIQVTINSLKTP

SEQ ID NO: 64577 - protein, 36 aa, Artificial Sequence; identical to SEQ ID NO: 15644
  Cyclic GFR-binding peptide
  MOD_RES (30)..(31): Xaa is C or S

SEQ ID NO: 64578 - protein, 27 aa, Artificial Sequence
  Cyclic GFR-binding peptide
  MOD_RES (27)..(27): Xaa is C or S
NVQVEKIVNSSDDVKAVKVSRLKTPAX

SEQ ID NO: 64579 - protein, 25 aa, Artificial Sequence
  Cyclic GFR-binding peptide
EVQVEKVVKDYEDVKAMKVSRLETP

SEQ ID NO: 64580 - protein, 37 aa, Artificial Sequence; identical to SEQ ID NO: 15651
  Cyclic GFR-binding peptide
  MOD_RES (1)..(33)..(34): Xaa is C or S

SEQ ID NO: 64581 - protein, 27 aa, Artificial Sequence
  Cyclic GFR-binding peptide
  MOD_RES (1)..(1): Xaa is C or S
XGEVVMENSLQEVVKDYEDYYVMPLPE

SEQ ID NO: 64582 - protein, 33 aa, Artificial Sequence; identical to SEQ ID NO: 22515
  Cyclic GFR-binding peptide
  MOD_RES (31)..(31): Xaa is C or S

SEQ ID NO: 64583 - protein, 42 aa, Artificial Sequence
  Cyclic GFR-binding peptide
  MOD_RES (2)..(4)..(36)..(37): Xaa is C or S
HXGXARVVMNVTAKKIVNSSDDIKRVQVPRLQTPAXXPKPVT

SEQ ID NO: 64584 - protein, 34 aa, Artificial Sequence; identical to SEQ ID NO: 22516
  Cyclic GFR-binding peptide
  MOD_RES (33)..(33): Xaa is C or S

SEQ ID NO: 64585 - protein, 32 aa, Artificial Sequence; identical to SEQ ID NO: 22520
  Cyclic GFR-binding peptide
  MOD_RES (31)..(31): Xaa is C or S

SEQ ID NO: 64586 - protein, 38 aa, Artificial Sequence; identical to SEQ ID NO: 22521
  Cyclic GFR-binding peptide
  MOD_RES (36)..(36): Xaa is C or S

SEQ ID NO: 64587 - protein, 30 aa, Artificial Sequence
  Cyclic GFR-binding peptide
SRVIMVQVEKVKPKRGVVKAIKVSRLAQPV

SEQ ID NO: 64588 - protein, 33 aa, Artificial Sequence; identical to SEQ ID NO: 22522
  Cyclic GFR-binding peptide
  MOD_RES (30)..(30): Xaa is C or S

SEQ ID NO: 64589 - protein, 34 aa, Artificial Sequence; identical to SEQ ID NO: 22523
  Cyclic GFR-binding peptide

SEQ ID NO: 64590 - protein, 31 aa, Artificial Sequence; identical to SEQ ID NO: 15663
  Cyclic GFR-binding peptide
  MOD_RES (1)..(3): Xaa is C or S

SEQ ID NO: 64591 - protein, 26 aa, Artificial Sequence
  Cyclic GFR-binding peptide
DNSLQEVVKENEDYYLMTLPELETPV

SEQ ID NO: 64592 - protein, 37 aa, Artificial Sequence
  Cyclic GFR-binding peptide
  MOD_RES (1)..(33)..(34): Xaa is C or S
XSRVVMNVTAKKIVNSSDDIKRVQVPRLKTPAXXPKP

SEQ ID NO: 64593 - protein, 31 aa, Artificial Sequence; identical to SEQ ID NO: 15669
  Cyclic GFR-binding peptide
  MOD_RES (1)..(1): Xaa is C or S

SEQ ID NO: 64594 - protein, 33 aa, Artificial Sequence
  Cyclic GFR-binding peptide
  MOD_RES (31)..(32): Xaa is C or S
SKVVMVQVEKVKPTRGVVKAIKVSRLDQPVXXP

SEQ ID NO: 64595 - protein, 29 aa, Artificial Sequence
  Cyclic GFR-binding peptide
QLFVTAKKHQGQHPKIRIKRMQVPREETP

SEQ ID NO: 64596 - protein, 36 aa, Artificial Sequence; identical to SEQ ID NO: 15675
  Cyclic GFR-binding peptide
  MOD_RES (31)..(32): Xaa is C or S

SEQ ID NO: 64597 - protein, 36 aa, Artificial Sequence
  Cyclic GFR-binding peptide
  MOD_RES (30)..(31): Xaa is C or S
KVIMSMEGIIKPTKGIMIQITINSLDQSVXXPSASA

SEQ ID NO: 64598 - protein, 32 aa, Artificial Sequence; identical to SEQ ID NO: 22533
  Cyclic GFR-binding peptide
  MOD_RES (30)..(30): Xaa is C or S

SEQ ID NO: 64599 - protein, 29 aa, Artificial Sequence
  Cyclic GFR-binding peptide
ELRNSLQELKPKKRVYEYYVVPLPEHHVR

SEQ ID NO: 64600 - protein, 23 aa, Artificial Sequence
  Cyclic GFR-binding peptide
NSLQELKPKKRVYEYYLVTLPEH

SEQ ID NO: 64601 - protein, 33 aa, Artificial Sequence; identical to SEQ ID NO: 15683
  Cyclic GFR-binding peptide
  MOD_RES (29)..(30): Xaa is C or S

SEQ ID NO: 64602 - protein, 25 aa, Artificial Sequence
  Cyclic GFR-binding peptide
MSMEGIVKPKRGVMIQITINSLAQP

SEQ ID NO: 64603 - protein, 38 aa, Artificial Sequence
  Cyclic GFR-binding peptide
  MOD_RES (2)..(2): Xaa is C or S
KXALHDELTNSLQEFIPKKRVIEYYLVTLPELQVQTPR

SEQ ID NO: 64604 - protein, 32 aa, Artificial Sequence; identical to SEQ ID NO: 15686
  Cyclic GFR-binding peptide
  MOD_RES (31)..(32): Xaa is C or S

SEQ ID NO: 64605 - protein, 29 aa, Artificial Sequence
  Cyclic GFR-binding peptide
ELTSMEGIFIPKKRVIEMIQVTINSLQVQ

SEQ ID NO: 64606 - protein, 34 aa, Artificial Sequence
  Cyclic GFR-binding peptide
  MOD_RES (32)..(32): Xaa is C or S
LRNSLQELKPKKRVYEYYLVTLPEHHVRSPQXKV

SEQ ID NO: 64607 - protein, 40 aa, Artificial Sequence
  Cyclic GFR-binding peptide
  MOD_RES (2)..(4)..(35)..(36): Xaa is C or S
SXKXSKVVMVTAKKVKPTRGVIKRIQVPRLDQPVXXPSAS

SEQ ID NO: 64608 - protein, 34 aa, Artificial Sequence; identical to SEQ ID NO: 15693
  Cyclic GFR-binding peptide
  MOD_RES (28)..(28): Xaa is C or S

SEQ ID NO: 64609 - protein, 38 aa, Artificial Sequence; identical to SEQ ID NO: 22551
  Cyclic GFR-binding peptide
  MOD_RES (2)..(4)..(38): Xaa is C or S

SEQ ID NO: 64610 - protein, 22 aa, Artificial Sequence
  Cyclic GFR-binding peptide
VQVEKHQGQHPKIRVKAMKVSR

SEQ ID NO: 64611 - protein, 45 aa, Artificial Sequence
  Cyclic GFR-binding peptide
  MOD_RES (2)..(4)..(41): Xaa is C or S
AXAXELHEELRNSLQELKPKKRVYEYYLVTLPEHHVRSPQXKVSS

SEQ ID NO: 64612 - protein, 29 aa, Artificial Sequence
  Cyclic GFR-binding peptide
KVIMVTAKKIKPTKGIIKRIQVPRLDQSV

SEQ ID NO: 64613 - protein, 33 aa, Artificial Sequence
  Cyclic GFR-binding peptide
  MOD_RES (30)..(30): Xaa is C or S
NSLQEFIPKKRVIEYYLVTLPELQVQTPRXQVN

SEQ ID NO: 64614 - protein, 30 aa, Artificial Sequence
  Cyclic GFR-binding peptide
  MOD_RES (1)..(1): Xaa is C or S
XALHDELTNSLQEFIPKKRVIEYYVVPLPE

SEQ ID NO: 64615 - protein, 36 aa, Artificial Sequence; identical to SEQ ID NO: 15701
  Cyclic GFR-binding peptide
  MOD_RES (2)..(4)..(36): Xaa is C or S

SEQ ID NO: 64616 - protein, 30 aa, Artificial Sequence; identical to SEQ ID NO: 15702
  Cyclic GFR-binding peptide
  MOD_RES (2)..(2): Xaa is C or S

SEQ ID NO: 64617 - protein, 41 aa, Artificial Sequence
  Cyclic GFR-binding peptide
  MOD_RES (1)..(3)..(35)..(36): Xaa is C or S
XGXGEVVMDVQVEKVVKENEDVKAMKVSRLETPVXXAKPIK

SEQ ID NO: 64618 - protein, 31 aa, Artificial Sequence
  Cyclic GFR-binding peptide
  MOD_RES (31)..(31): Xaa is C or S
EVVMDVQVEKVVKENEDVKAMKVSRLETPVX

SEQ ID NO: 64619 - protein, 33 aa, Artificial Sequence
  Cyclic GFR-binding peptide
  MOD_RES (28)..(29): Xaa is C or S
MESMEGIVVKDYEDMIQMTINSLETPVXXAKPI

SEQ ID NO: 64620 - protein, 34 aa, Artificial Sequence
  Cyclic GFR-binding peptide
  MOD_RES (1)..(3): Xaa is C or S
XGXGEVVMDSMEGIVVKENEDMIQMTINSLETPV

SEQ ID NO: 64621 - protein, 26 aa, Artificial Sequence
  Cyclic GFR-binding peptide
VVMSMEGIVKPTRGVMIQITINSLDQ

SEQ ID NO: 64622 - protein, 32 aa, Artificial Sequence
  Cyclic GFR-binding peptide
  MOD_RES (27)..(28): Xaa is C or S
ESMEGIVVKDYEDMIQMTINSLETPVXXAKPI

SEQ ID NO: 64623 - protein, 29 aa, Artificial Sequence
  Cyclic GFR-binding peptide
VVMDNSLQEVVKENEDYYVMPLPELETPV

SEQ ID NO: 64624 - protein, 31 aa, Artificial Sequence
  Cyclic GFR-binding peptide
  MOD_RES (1)..(3): Xaa is C or S
XKXSKVIMVQVEKIKPTKGIVKAIKVSRLDQ

SEQ ID NO: 64625 - protein, 31 aa, Artificial Sequence
  Cyclic GFR-binding peptide
NHQLFNSLQEHQGQHPKIRYYLMTLPEEETP

SEQ ID NO: 64626 - protein, 35 aa, Artificial Sequence
  Cyclic GFR-binding peptide
  MOD_RES (33)..(33): Xaa is C or S
NHQLFNSLQEHQGQHPKIRYYVMPLPEEETPVXEL

SEQ ID NO: 64627 - protein, 40 aa, Artificial Sequence; identical to SEQ ID NO: 22582
  Cyclic GFR-binding peptide
  MOD_RES (2)..(39): Xaa is C or S

SEQ ID NO: 64628 - protein, 28 aa, Artificial Sequence
  Cyclic GFR-binding peptide
TVQVEKFIPKKRVIEVKAVKVSRLQVQT

SEQ ID NO: 64629 - protein, 33 aa, Artificial Sequence
  Cyclic GFR-binding peptide
  MOD_RES (2)..(4): Xaa is C or S
SXKXSKVIMVQVEKIKPTKGIVKAIKVSRLDQS

SEQ ID NO: 64630 - protein, 36 aa, Artificial Sequence
  Cyclic GFR-binding peptide
  MOD_RES (1)..(3)..(35): Xaa is C or S
XGXSRVVMNSMEGIIVNSSDDMIQVTINSLKTPAXT

SEQ ID NO: 64631 - protein, 26 aa, Artificial Sequence
  Cyclic GFR-binding peptide
DELTNSLQEFIPKKRVIEYYVVPLPE

SEQ ID NO: 64632 - protein, 33 aa, Artificial Sequence; identical to SEQ ID NO: 15728
  Cyclic GFR-binding peptide
  MOD_RES (30)..(31): Xaa is C or S

SEQ ID NO: 64633 - protein, 26 aa, Artificial Sequence
  Cyclic GFR-binding peptide
LFNSLQEHQGQHPKIRYYVMPLPEEE

SEQ ID NO: 64634 - protein, 30 aa, Artificial Sequence
  Cyclic GFR-binding peptide
  MOD_RES (26)..(27): Xaa is C or S
VTAKKIVNSSDDIKRVQVPRLQTPAXXPKP

SEQ ID NO: 64635 - protein, 42 aa, Artificial Sequence
  Cyclic GFR-binding peptide
  MOD_RES (2)..(39): Xaa is C or S
KXALHDELTNSLQEFIPKKRVIEYYLVTLPELQVQTPRXQVN

SEQ ID NO: 64636 - protein, 31 aa, Artificial Sequence; identical to SEQ ID NO: 22593
  Cyclic GFR-binding peptide
  MOD_RES (2)..(2): Xaa is C or S

SEQ ID NO: 64637 - protein, 33 aa, Artificial Sequence; identical to SEQ ID NO: 15734
  Cyclic GFR-binding peptide
  MOD_RES (28)..(29): Xaa is C or S

SEQ ID NO: 64638 - protein, 27 aa, Artificial Sequence
  Cyclic GFR-binding peptide
NSLQEFIPKKRVIEYYVVPLPELQVQT

SEQ ID NO: 64639 - protein, 25 aa, Artificial Sequence
  Cyclic GFR-binding peptide
SRVIMVTAKKVKPKRGVIKRIQVPR

SEQ ID NO: 64640 - protein, 35 aa, Artificial Sequence; identical to SEQ ID NO: 22595
  Cyclic GFR-binding peptide
  MOD_RES (1)..(3): Xaa is C or S

SEQ ID NO: 64641 - protein, 35 aa, Artificial Sequence; identical to SEQ ID NO: 15736
  Cyclic GFR-binding peptide
  MOD_RES (31)..(32): Xaa is C or S

SEQ ID NO: 64642 - protein, 35 aa, Artificial Sequence; identical to SEQ ID NO: 22602
  Cyclic GFR-binding peptide
  MOD_RES (2)..(2): Xaa is C or S

SEQ ID NO: 64643 - protein, 24 aa, Artificial Sequence
  Cyclic GFR-binding peptide
NSLQEIVNSSDDYYVVPLPELQTP

SEQ ID NO: 64644 - protein, 30 aa, Artificial Sequence; identical to SEQ ID NO: 15745
  Cyclic GFR-binding peptide
  MOD_RES (1)..(1): Xaa is C or S

SEQ ID NO: 64645 - protein, 31 aa, Artificial Sequence
  Cyclic GFR-binding peptide
  MOD_RES (2)..(2): Xaa is C or S
EXKNHQLFNSLQEHQGQHPKIRYYLMTLPEE

SEQ ID NO: 64646 - protein, 37 aa, Artificial Sequence; identical to SEQ ID NO: 15750
  Cyclic GFR-binding peptide
  MOD_RES (2)..(33)..(34): Xaa is C or S

SEQ ID NO: 64647 - protein, 37 aa, Artificial Sequence
  Cyclic GFR-binding peptide
  MOD_RES (2)..(34)..(35): Xaa is C or S
GXSRVVMNSMEGIIVNSSDDMIQVTINSLKTPAXXPK

SEQ ID NO: 64648 - protein, 29 aa, Artificial Sequence
  Cyclic GFR-binding peptide
  MOD_RES (27)..(28): Xaa is C or S
DNSLQEVVKENEDYYLMTLPELETPVXXA

SEQ ID NO: 64649 - protein, 32 aa, Artificial Sequence
  Cyclic GFR-binding peptide
  MOD_RES (27)..(28): Xaa is C or S
MVQVEKIKPTKGIVKAIKVSRLDQSVXXPSAS

SEQ ID NO: 64650 - protein, 24 aa, Artificial Sequence
  Cyclic GFR-binding peptide
VTAKKIVNSSDDIKRVQVPRLQTP

SEQ ID NO: 64651 - protein, 32 aa, Artificial Sequence; identical to SEQ ID NO: 15760
  Cyclic GFR-binding peptide
  MOD_RES (30)..(31): Xaa is C or S

SEQ ID NO: 64652 - protein, 32 aa, Artificial Sequence
  Cyclic GFR-binding peptide
  MOD_RES (2)..(2): Xaa is C or S
KXALHDELTNSLQEFIPKKRVIEYYLVTLPEL

SEQ ID NO: 64653 - protein, 36 aa, Artificial Sequence
  Cyclic GFR-binding peptide
  MOD_RES (2)..(4)..(35)..(36): Xaa is C or S
SXKXSKVVMVQVEKVKPTRGVVKAIKVSRLDQPVXX

SEQ ID NO: 64654 - protein, 32 aa, Artificial Sequence
  Cyclic GFR-binding peptide
  MOD_RES (31)..(32): Xaa is C or S
EVVMDVQVEKVVKENEDVKAMKVSRLETPVXX

SEQ ID NO: 64655 - protein, 28 aa, Artificial Sequence
  Cyclic GFR-binding peptide
HDELTSMEGIFIPKKRVIEMIQVTINSL

SEQ ID NO: 64656 - protein, 29 aa, Artificial Sequence
  Cyclic GFR-binding peptide
  MOD_RES (27)..(28): Xaa is C or S
NVQVEKIVNSSDDVKAVKVSRLKTPAXXP

SEQ ID NO: 64657 - protein, 37 aa, Artificial Sequence
  Cyclic GFR-binding peptide
  MOD_RES (31)..(31): Xaa is C or S
RVVMNSMEGIIVNSSDDMIQVTINSLKTPAXTPKTVH

SEQ ID NO: 64658 - protein, 36 aa, Artificial Sequence; identical to SEQ ID NO: 15779
  Cyclic GFR-binding peptide
  MOD_RES (1)..(33): Xaa is C or S

SEQ ID NO: 64659 - protein, 40 aa, Artificial Sequence
  Cyclic GFR-binding peptide
  MOD_RES (2)..(4)..(36)..(37): Xaa is C or S
RXGXGEVVMDSMEGIVVKENEDMIQMTINSLETPVXXAKP

SEQ ID NO: 64660 - protein, 23 aa, Artificial Sequence
  Cyclic GFR-binding peptide
MDVQVEKVVKENEDVKAMKVSRL

SEQ ID NO: 64661 - protein, 37 aa, Artificial Sequence; identical to SEQ ID NO: 15780
  Cyclic GFR-binding peptide
  MOD_RES (1)..(32)..(33): Xaa is C or S

SEQ ID NO: 64662 - protein, 26 aa, Artificial Sequence
  Cyclic GFR-binding peptide
MNNSLQEIVNSSDDYYVVPLPELKTP

SEQ ID NO: 64663 - protein, 31 aa, Artificial Sequence
  Cyclic GFR-binding peptide
  MOD_RES (1)..(1): Xaa is C or S
XARVVMNVQVEKIVNSSDDVKAVKVSRLQTP

SEQ ID NO: 64664 - protein, 38 aa, Artificial Sequence; identical to SEQ ID NO: 22626
  Cyclic GFR-binding peptide
  MOD_RES (2)..(2): Xaa is C or S

SEQ ID NO: 64665 - protein, 34 aa, Artificial Sequence
  Cyclic GFR-binding peptide
  MOD_RES (31)..(32): Xaa is C or S
SRVIMVTAKKVKPKRGVIKRIQVPRLAQPVXXPA

SEQ ID NO: 64666 - protein, 24 aa, Artificial Sequence
  Cyclic GFR-binding peptide
VTAKKLKPKKRVYEIKRVQVPRHH

SEQ ID NO: 64667 - protein, 34 aa, Artificial Sequence; identical to SEQ ID NO: 22628
  Cyclic GFR-binding peptide
  MOD_RES (30)..(30): Xaa is C or S

SEQ ID NO: 64668 - protein, 22 aa, Artificial Sequence
  Cyclic GFR-binding peptide
NSLQEFIPKKRVIEYYLVTLPE

SEQ ID NO: 64669 - protein, 29 aa, Artificial Sequence
  Cyclic GFR-binding peptide
  MOD_RES (2)..(2): Xaa is C or S
KXSKVIMNSLQEIKPTKGIYYLITLPELD

SEQ ID NO: 64670 - protein, 29 aa, Artificial Sequence
  Cyclic GFR-binding peptide
NHQLFVQVEKHQGQHPKIRVKAMKVSREE

SEQ ID NO: 64671 - protein, 34 aa, Artificial Sequence; identical to SEQ ID NO: 22633
  Cyclic GFR-binding peptide
  MOD_RES (33)..(33): Xaa is C or S

SEQ ID NO: 64672 - protein, 25 aa, Artificial Sequence
  Cyclic GFR-binding peptide
NNSLQEIVNSSDDYYVVPLPELQTP

SEQ ID NO: 64673 - protein, 26 aa, Artificial Sequence
  Cyclic GFR-binding peptide
VVMDNSLQEVVKENEDYYVMPLPELE

SEQ ID NO: 64674 - protein, 40 aa, Artificial Sequence; identical to SEQ ID NO: 15800
  Cyclic GFR-binding peptide
  MOD_RES (1)..(3)..(35)..(36): Xaa is C or S

SEQ ID NO: 64675 - protein, 25 aa, Artificial Sequence
  Cyclic GFR-binding peptide
IMVTAKKIKPTKGIIKRIQVPRLDQ

SEQ ID NO: 64676 - protein, 33 aa, Artificial Sequence; identical to SEQ ID NO: 22640
  Cyclic GFR-binding peptide

SEQ ID NO: 64677 - protein, 31 aa, Artificial Sequence; identical to SEQ ID NO: 15805
  Cyclic GFR-binding peptide
  MOD_RES (2)..(2): Xaa is C or S

SEQ ID NO: 64678 - protein, 32 aa, Artificial Sequence
  Cyclic GFR-binding peptide
  MOD_RES (2)..(2): Xaa is C or S
GXSRVVMNSMEGIIVNSSDDMIQVTINSLKTP

SEQ ID NO: 64679 - protein, 40 aa, Artificial Sequence
  Cyclic GFR-binding peptide
  MOD_RES (1)..(3)..(35)..(36): Xaa is C or S
XGXGEVVMDVTAKKVVKENEDIKRMQVPRLETPVXXAKPI

SEQ ID NO: 64680 - protein, 36 aa, Artificial Sequence
  Cyclic GFR-binding peptide
  MOD_RES (1)..(1): Xaa is C or S
XALHDELTNSLQEFIPKKRVIEYYVVPLPELQVQTP

SEQ ID NO: 64681 - protein, 34 aa, Artificial Sequence
  Cyclic GFR-binding peptide
  MOD_RES (2)..(33)..(34): Xaa is C or S
KXSKVIMVTAKKIKPTKGIIKRIQVPRLDQSVXX

SEQ ID NO: 64682 - protein, 24 aa, Artificial Sequence
  Cyclic GFR-binding peptide
NSMEGIIVNSSDDMIQVTINSLQT

SEQ ID NO: 64683 - protein, 30 aa, Artificial Sequence; identical to SEQ ID NO: 15817
  Cyclic GFR-binding peptide
  MOD_RES (26)..(27): Xaa is C or S

SEQ ID NO: 64684 - protein, 29 aa, Artificial Sequence
  Cyclic GFR-binding peptide
  MOD_RES (2)..(2): Xaa is C or S
KXSRVIMVQVEKVKPKRGVVKAIKVSRLA

SEQ ID NO: 64685 - protein, 27 aa, Artificial Sequence
  Cyclic GFR-binding peptide
  MOD_RES (27)..(27): Xaa is C or S
DNSLQEVVKENEDYYLMTLPELETPVX

SEQ ID NO: 64686 - protein, 32 aa, Artificial Sequence
  Cyclic GFR-binding peptide
  MOD_RES (2)..(2): Xaa is C or S
KXSKVIMVTAKKIKPTKGIIKRIQVPRLDQSV

SEQ ID NO: 64687 - protein, 29 aa, Artificial Sequence
  Cyclic GFR-binding peptide
  MOD_RES (1)..(3): Xaa is C or S
XGXSRVVMNNSLQEIVNSSDDYYVVPLPE

SEQ ID NO: 64688 - protein, 34 aa, Artificial Sequence; identical to SEQ ID NO: 22653
  Cyclic GFR-binding peptide
  MOD_RES (32)..(32): Xaa is C or S

SEQ ID NO: 64689 - protein, 37 aa, Artificial Sequence
  Cyclic GFR-binding peptide
  MOD_RES (1)..(3)..(35)..(36): Xaa is C or S
XGXARVVMNVTAKKIVNSSDDIKRVQVPRLQTPAXXP

SEQ ID NO: 64690 - protein, 35 aa, Artificial Sequence
  Cyclic GFR-binding peptide
  MOD_RES (2)..(33)..(34): Xaa is C or S
KXSKVIMSMEGIIKPTKGIMIQITINSLDQSVXXP

SEQ ID NO: 64691 - protein, 26 aa, Artificial Sequence
  Cyclic GFR-binding peptide
  MOD_RES (26)..(26): Xaa is C or S
VTAKKVKPKRGVIKRIQVPRLAQPVX

SEQ ID NO: 64692 - protein, 37 aa, Artificial Sequence; identical to SEQ ID NO: 15832
  Cyclic GFR-binding peptide
  MOD_RES (1)..(33)..(34): Xaa is C or S

SEQ ID NO: 64693 - protein, 31 aa, Artificial Sequence; identical to SEQ ID NO: 15833
  Cyclic GFR-binding peptide
  MOD_RES (1)..(3): Xaa is C or S

SEQ ID NO: 64694 - protein, 33 aa, Artificial Sequence
  Cyclic GFR-binding peptide
  MOD_RES (29)..(29): Xaa is C or S
VMNVTAKKIVNSSDDIKRVQVPRLKTPAXTPKT

SEQ ID NO: 64695 - protein, 30 aa, Artificial Sequence
  Cyclic GFR-binding peptide
  MOD_RES (28)..(29): Xaa is C or S
MEVQVEKVVKDYEDVKAMKVSRLETPVXXA

SEQ ID NO: 64696 - protein, 36 aa, Artificial Sequence; identical to SEQ ID NO: 15843
  Cyclic GFR-binding peptide
  MOD_RES (30)..(31): Xaa is C or S

SEQ ID NO: 64697 - protein, 26 aa, Artificial Sequence
  Cyclic GFR-binding peptide
MNVQVEKIVNSSDDVKAVKVSRLKTP

SEQ ID NO: 64698 - protein, 30 aa, Artificial Sequence
  Cyclic GFR-binding peptide
  MOD_RES (2)..(2): Xaa is C or S
GXARVVMNSMEGIIVNSSDDMIQVTINSLQ

SEQ ID NO: 64699 - protein, 32 aa, Artificial Sequence; identical to SEQ ID NO: 15846
  Cyclic GFR-binding peptide
  MOD_RES (30)..(31): Xaa is C or S

SEQ ID NO: 64700 - protein, 29 aa, Artificial Sequence
  Cyclic GFR-binding peptide
EVVMENSLQEVVKDYEDYYLMTLPELETP

SEQ ID NO: 64701 - protein, 30 aa, Artificial Sequence
  Cyclic GFR-binding peptide
  MOD_RES (30)..(30): Xaa is C or S
NSLQEFIPKKRVIEYYVVPLPELQVQTPRX

SEQ ID NO: 64702 - protein, 32 aa, Artificial Sequence
  Cyclic GFR-binding peptide
  MOD_RES (31)..(31): Xaa is C or S
RVVMNVTAKKIVNSSDDIKRVQVPRLKTPAXT

SEQ ID NO: 64703 - protein, 32 aa, Artificial Sequence
  Cyclic GFR-binding peptide
  MOD_RES (30)..(31): Xaa is C or S
VVMNVTAKKIVNSSDDIKRVQVPRLKTPAXXP

SEQ ID NO: 64704 - protein, 22 aa, Artificial Sequence
  Cyclic GFR-binding peptide
NSLQEIVNSSDDYYLVTLPELK

SEQ ID NO: 64705 - protein, 36 aa, Artificial Sequence
  Cyclic GFR-binding peptide
  MOD_RES (32)..(32): Xaa is C or S
LRNSLQELKPKKRVYEYYVVPLPEHHVRSPQXKVSS

SEQ ID NO: 64706 - protein, 26 aa, Artificial Sequence
  Cyclic GFR-binding peptide
DELTNSLQEFIPKKRVIEYYLVTLPE

SEQ ID NO: 64707 - protein, 38 aa, Artificial Sequence
  Cyclic GFR-binding peptide
  MOD_RES (1)..(3)..(34)..(35): Xaa is C or S
XKXSKVIMVQVEKIKPTKGIVKAIKVSRLDQSVXXPSA

SEQ ID NO: 64708 - protein, 39 aa, Artificial Sequence
  Cyclic GFR-binding peptide
  MOD_RES (2)..(34)..(35): Xaa is C or S
GXARVVMNVTAKKIVNSSDDIKRVQVPRLQTPAXXPKPV

SEQ ID NO: 64709 - protein, 33 aa, Artificial Sequence
  Cyclic GFR-binding peptide
  MOD_RES (1)..(3): Xaa is C or S
XGXGEVVMDSMEGIVVKENEDMIQMTINSLETP

SEQ ID NO: 64710 - protein, 24 aa, Artificial Sequence
  Cyclic GFR-binding peptide
NSLQEHQGQHPKIRYYVMPLPEEE

SEQ ID NO: 64711 - protein, 36 aa, Artificial Sequence
  Cyclic GFR-binding peptide
  MOD_RES (32)..(33): Xaa is C or S
GEVVMDSMEGIVVKENEDMIQMTINSLETPVXXAKP

SEQ ID NO: 64712 - protein, 36 aa, Artificial Sequence; identical to SEQ ID NO: 15867
  Cyclic GFR-binding peptide
  MOD_RES (30)..(31): Xaa is C or S

SEQ ID NO: 64713 - protein, 29 aa, Artificial Sequence
  Cyclic GFR-binding peptide
  MOD_RES (1)..(1): Xaa is C or S
XSKVIMNSLQEIKPTKGIYYVIPLPELDQ

SEQ ID NO: 64714 - protein, 30 aa, Artificial Sequence; identical to SEQ ID NO: 15873
  Cyclic GFR-binding peptide
  MOD_RES (1)..(3): Xaa is C or S

SEQ ID NO: 64715 - protein, 37 aa, Artificial Sequence
  Cyclic GFR-binding peptide
  MOD_RES (2)..(33)..(34): Xaa is C or S
KXSKVIMVTAKKIKPTKGIIKRIQVPRLDQSVXXPSA

SEQ ID NO: 64716 - protein, 26 aa, Artificial Sequence
  Cyclic GFR-binding peptide
VVMVQVEKVKPTRGVVKAIKVSRLDQ

SEQ ID NO: 64717 - protein, 34 aa, Artificial Sequence; identical to SEQ ID NO: 22680
  Cyclic GFR-binding peptide
  MOD_RES (29)..(29): Xaa is C or S

SEQ ID NO: 64718 - protein, 27 aa, Artificial Sequence
  Cyclic GFR-binding peptide
MDNSLQEVVKENEDYYVMPLPELETPV

SEQ ID NO: 64719 - protein, 26 aa, Artificial Sequence
  Cyclic GFR-binding peptide
VMNVQVEKIVNSSDDVKAVKVSRLKT

SEQ ID NO: 64720 - protein, 39 aa, Artificial Sequence
  Cyclic GFR-binding peptide
  MOD_RES (2)..(4)..(36)..(37): Xaa is C or S
RXGXGEVVMEVQVEKVVKDYEDVKAMKVSRLETPVXXAK

SEQ ID NO: 64721 - protein, 26 aa, Artificial Sequence
  Cyclic GFR-binding peptide
KVIMNSLQEIKPTKGIYYVIPLPELD

SEQ ID NO: 64722 - protein, 27 aa, Artificial Sequence
  Cyclic GFR-binding peptide
LRNSLQELKPKKRVYEYYVVPLPEHHV

SEQ ID NO: 64723 - protein, 36 aa, Artificial Sequence; identical to SEQ ID NO: 15887
  Cyclic GFR-binding peptide
  MOD_RES (1)..(3)..(35)..(36): Xaa is C or S

SEQ ID NO: 64724 - protein, 31 aa, Artificial Sequence
  Cyclic GFR-binding peptide
  MOD_RES (2)..(4): Xaa is C or S
HXGXSRVVMNSMEGIIVNSSDDMIQVTINSL

SEQ ID NO: 64725 - protein, 39 aa, Artificial Sequence
  Cyclic GFR-binding peptide
  MOD_RES (2)..(39): Xaa is C or S
AXELHEELRNSLQELKPKKRVYEYYLVTLPEHHVRSPQX

SEQ ID NO: 64726 - protein, 29 aa, Artificial Sequence
  Cyclic GFR-binding peptide
  MOD_RES (1)..(3): Xaa is C or S
XGXARVVMNVQVEKIVNSSDDVKAVKVSR

SEQ ID NO: 64727 - protein, 23 aa, Artificial Sequence
  Cyclic GFR-binding peptide
MDNSLQEVVKENEDYYVMPLPEL

SEQ ID NO: 64728 - protein, 30 aa, Artificial Sequence
  Cyclic GFR-binding peptide
  MOD_RES (28)..(29): Xaa is C or S
MNSMEGIIVNSSDDMIQVTINSLQTPAXXP

SEQ ID NO: 64729 - protein, 33 aa, Artificial Sequence
  Cyclic GFR-binding peptide
  MOD_RES (30)..(31): Xaa is C or S
VVMDVQVEKVVKENEDVKAMKVSRLETPVXXAK

SEQ ID NO: 64730 - protein, 27 aa, Artificial Sequence
  Cyclic GFR-binding peptide
  MOD_RES (26)..(26): Xaa is C or S
SMEGIIVNSSDDMIQVTINSLKTPAXT

SEQ ID NO: 64731 - protein, 29 aa, Artificial Sequence
  Cyclic GFR-binding peptide
  MOD_RES (29)..(29): Xaa is C or S
VVMNSLQEVKPTRGVYYVIPLPELDQPVX

SEQ ID NO: 64732 - protein, 27 aa, Artificial Sequence
  Cyclic GFR-binding peptide
SKVVMNSLQEVKPTRGVYYLITLPELD

SEQ ID NO: 64733 - protein, 37 aa, Artificial Sequence
  Cyclic GFR-binding peptide
  MOD_RES (1)..(3)..(34)..(35): Xaa is C or S
XKXSKVIMVTAKKIKPTKGIIKRIQVPRLDQSVXXPS

SEQ ID NO: 64734 - protein, 34 aa, Artificial Sequence
  Cyclic GFR-binding peptide
  MOD_RES (29)..(30): Xaa is C or S
VMESMEGIVVKDYEDMIQMTINSLETPVXXAKPI

SEQ ID NO: 64735 - protein, 37 aa, Artificial Sequence
  Cyclic GFR-binding peptide
  MOD_RES (1)..(33): Xaa is C or S
XSRVVMNVQVEKIVNSSDDVKAVKVSRLKTPAXTPKT

SEQ ID NO: 64736 - protein, 35 aa, Artificial Sequence; identical to SEQ ID NO: 22697
  Cyclic GFR-binding peptide
  MOD_RES (1)..(3): Xaa is C or S

SEQ ID NO: 64737 - protein, 36 aa, Artificial Sequence; identical to SEQ ID NO: 22699
  Cyclic GFR-binding peptide
  MOD_RES (2)..(4): Xaa is C or S

SEQ ID NO: 64738 - protein, 37 aa, Artificial Sequence; identical to SEQ ID NO: 15910
  Cyclic GFR-binding peptide
  MOD_RES (2)..(4)..(36)..(37): Xaa is C or S

SEQ ID NO: 64739 - protein, 30 aa, Artificial Sequence
  Cyclic GFR-binding peptide
RVVMNSMEGIIVNSSDDMIQVTINSLKTPA

SEQ ID NO: 64740 - protein, 21 aa, Artificial Sequence
  Cyclic GFR-binding peptide
MVTAKKVKPKRGVIKRIQVPR

SEQ ID NO: 64741 - protein, 26 aa, Artificial Sequence
  Cyclic GFR-binding peptide
GEVVMDNSLQEVVKENEDYYLMTLPE

SEQ ID NO: 64742 - protein, 36 aa, Artificial Sequence
  Cyclic GFR-binding peptide
  MOD_RES (31)..(32): Xaa is C or S
RVVMNVQVEKIVNSSDDVKAVKVSRLKTPAXXPKPV

SEQ ID NO: 64743 - protein, 38 aa, Artificial Sequence
  Cyclic GFR-binding peptide
  MOD_RES (1)..(3)..(34)..(35): Xaa is C or S
XKXSKVVMVTAKKVKPTRGVIKRIQVPRLDQPVXXPSA

SEQ ID NO: 64744 - protein, 38 aa, Artificial Sequence; identical to SEQ ID NO: 15921
  Cyclic GFR-binding peptide
  MOD_RES (1)..(33)..(34): Xaa is C or S

SEQ ID NO: 64745 - protein, 41 aa, Artificial Sequence
  Cyclic GFR-binding peptide
  MOD_RES (1)..(3)..(35)..(36): Xaa is C or S
XGXGEVVMDVTAKKVVKENEDIKRMQVPRLETPVXXAKPIK

SEQ ID NO: 64746 - protein, 37 aa, Artificial Sequence
  Cyclic GFR-binding peptide
  MOD_RES (1)..(35): Xaa is C or S
XKNHQLFNSLQEHQGQHPKIRYYVMPLPEEETPVXEL

SEQ ID NO: 64747 - protein, 28 aa, Artificial Sequence
  Cyclic GFR-binding peptide
  MOD_RES (2)..(2): Xaa is C or S
GXGEVVMDVQVEKVVKENEDVKAMKVSR

SEQ ID NO: 64748 - protein, 37 aa, Artificial Sequence
  Cyclic GFR-binding peptide
  MOD_RES (2)..(4)..(35)..(36): Xaa is C or S
SXKXSKVIMVTAKKIKPTKGIIKRIQVPRLDQSVXXP

SEQ ID NO: 64749 - protein, 28 aa, Artificial Sequence
  Cyclic GFR-binding peptide
LHEELRVTAKKLKPKKRVYEIKRVQVPR

SEQ ID NO: 64750 - protein, 28 aa, Artificial Sequence
  Cyclic GFR-binding peptide
LTSMEGIFIPKKRVIEMIQVTINSLQVQ

SEQ ID NO: 64751 - protein, 36 aa, Artificial Sequence; identical to SEQ ID NO: 15927
  Cyclic GFR-binding peptide
  MOD_RES (2)..(4)..(35)..(36): Xaa is C or S

SEQ ID NO: 64752 - protein, 33 aa, Artificial Sequence
  Cyclic GFR-binding peptide
  MOD_RES (27)..(28): Xaa is C or S
MSMEGIVKPKRGVMIQITINSLAQPVXXPAASA

SEQ ID NO: 64753 - protein, 36 aa, Artificial Sequence
  Cyclic GFR-binding peptide
  MOD_RES (31)..(32): Xaa is C or S
RVVMNSMEGIIVNSSDDMIQVTINSLKTPAXXPKPV

SEQ ID NO: 64754 - protein, 29 aa, Artificial Sequence
  Cyclic GFR-binding peptide
LHEELRNSLQELKPKKRVYEYYLVTLPEH

SEQ ID NO: 64755 - protein, 37 aa, Artificial Sequence
  Cyclic GFR-binding peptide
  MOD_RES (1)..(33)..(34): Xaa is C or S
XARVVMNVTAKKIVNSSDDIKRVQVPRLQTPAXXPKP

SEQ ID NO: 64756 - protein, 30 aa, Artificial Sequence
  Cyclic GFR-binding peptide
  MOD_RES (28)..(29): Xaa is C or S
MNSMEGIIVNSSDDMIQVTINSLKTPAXXP

SEQ ID NO: 64757 - protein, 29 aa, Artificial Sequence
  Cyclic GFR-binding peptide
  MOD_RES (29)..(29): Xaa is C or S
VIMNSLQEIKPTKGIYYVIPLPELDQSVX

SEQ ID NO: 64758 - protein, 25 aa, Artificial Sequence
  Cyclic GFR-binding peptide
VTAKKVKPKRGVIKRIQVPRLAQPV

SEQ ID NO: 64759 - protein, 29 aa, Artificial Sequence
  Cyclic GFR-binding peptide
TSMEGIFIPKKRVIEMIQVTINSLQVQTP

SEQ ID NO: 64760 - protein, 35 aa, Artificial Sequence
  Cyclic GFR-binding peptide
  MOD_RES (29)..(30): Xaa is C or S
VIMSMEGIIKPTKGIMIQITINSLDQSVXXPSASA

SEQ ID NO: 64761 - protein, 31 aa, Artificial Sequence; identical to SEQ ID NO: 15937
  Cyclic GFR-binding peptide
  MOD_RES (1)..(1): Xaa is C or S

SEQ ID NO: 64762 - protein, 33 aa, Artificial Sequence
  Cyclic GFR-binding peptide
  MOD_RES (29)..(30): Xaa is C or S
VMEVQVEKVVKDYEDVKAMKVSRLETPVXXAKP

SEQ ID NO: 64763 - protein, 31 aa, Artificial Sequence; identical to SEQ ID NO: 15940
  Cyclic GFR-binding peptide
  MOD_RES (27)..(28): Xaa is C or S

SEQ ID NO: 64764 - protein, 39 aa, Artificial Sequence; identical to SEQ ID NO: 22725
  Cyclic GFR-binding peptide
  MOD_RES (35)..(35): Xaa is C or S

SEQ ID NO: 64765 - protein, 34 aa, Artificial Sequence
  Cyclic GFR-binding peptide
  MOD_RES (2)..(4): Xaa is C or S
SXKXSKVIMVQVEKIKPTKGIVKAIKVSRLDQSV

SEQ ID NO: 64766 - protein, 30 aa, Artificial Sequence; identical to SEQ ID NO: 15943
  Cyclic GFR-binding peptide
  MOD_RES (2)..(4): Xaa is C or S

SEQ ID NO: 64767 - protein, 35 aa, Artificial Sequence
  Cyclic GFR-binding peptide
  MOD_RES (30)..(31): Xaa is C or S
VVMNSMEGIIVNSSDDMIQVTINSLKTPAXXPKPV

SEQ ID NO: 64768 - protein, 33 aa, Artificial Sequence
  Cyclic GFR-binding peptide
  MOD_RES (29)..(29): Xaa is C or S
VMNSMEGIIVNSSDDMIQVTINSLKTPAXTPKT

SEQ ID NO: 64769 - protein, 23 aa, Artificial Sequence
  Cyclic GFR-binding peptide
NVQVEKIVNSSDDVKAVKVSRLK

SEQ ID NO: 64770 - protein, 31 aa, Artificial Sequence; identical to SEQ ID NO: 22738
  Cyclic GFR-binding peptide

SEQ ID NO: 64771 - protein, 32 aa, Artificial Sequence; identical to SEQ ID NO: 15947
  Cyclic GFR-binding peptide
  MOD_RES (27)..(28): Xaa is C or S

SEQ ID NO: 64772 - protein, 27 aa, Artificial Sequence
  Cyclic GFR-binding peptide
  MOD_RES (26)..(27): Xaa is C or S
SMEGIVVKDYEDMIQMTINSLETPVXX

SEQ ID NO: 64773 - protein, 41 aa, Artificial Sequence
  Cyclic GFR-binding peptide
  MOD_RES (1)..(3)..(35)..(36): Xaa is C or S
XGXGEVVMEVQVEKVVKDYEDVKAMKVSRLETPVXXAKPIS

SEQ ID NO: 64774 - protein, 35 aa, Artificial Sequence; identical to SEQ ID NO: 15951
  Cyclic GFR-binding peptide
  MOD_RES (30)..(31): Xaa is C or S

SEQ ID NO: 64775 - protein, 34 aa, Artificial Sequence; identical to SEQ ID NO: 15952
  Cyclic GFR-binding peptide
  MOD_RES (1)..(33)..(34): Xaa is C or S

SEQ ID NO: 64776 - protein, 26 aa, Artificial Sequence
  Cyclic GFR-binding peptide
NVTAKKIVNSSDDIKRVQVPRLKTPA

SEQ ID NO: 64777 - protein, 30 aa, Artificial Sequence; identical to SEQ ID NO: 22744
  Cyclic GFR-binding peptide

SEQ ID NO: 64778 - protein, 26 aa, Artificial Sequence
  Cyclic GFR-binding peptide
SRVIMVTAKKVKPKRGVIKRIQVPRL

SEQ ID NO: 64779 - protein, 26 aa, Artificial Sequence
  Cyclic GFR-binding peptide
  MOD_RES (26)..(26): Xaa is C or S
SMEGIVVKDYEDMIQMTINSLETPVX

SEQ ID NO: 64780 - protein, 25 aa, Artificial Sequence
  Cyclic GFR-binding peptide
RNSLQELKPKKRVYEYYLVTLPEHH

SEQ ID NO: 64781 - protein, 41 aa, Artificial Sequence
  Cyclic GFR-binding peptide
  MOD_RES (2)..(4)..(41): Xaa is C or S
EXKXALHDELTNSLQEFIPKKRVIEYYVVPLPELQVQTPRX

SEQ ID NO: 64782 - protein, 36 aa, Artificial Sequence
  Cyclic GFR-binding peptide
  MOD_RES (1)..(33)..(34): Xaa is C or S
XARVVMNVTAKKIVNSSDDIKRVQVPRLQTPAXXPK

SEQ ID NO: 64783 - protein, 27 aa, Artificial Sequence
  Cyclic GFR-binding peptide
NSLQEHQGQHPKIRYYLMTLPEEETPV

SEQ ID NO: 64784 - protein, 30 aa, Artificial Sequence
  Cyclic GFR-binding peptide
  MOD_RES (26)..(27): Xaa is C or S
SMEGIVVKENEDMIQMTINSLETPVXXAKP

SEQ ID NO: 64785 - protein, 28 aa, Artificial Sequence
  Cyclic GFR-binding peptide
  MOD_RES (28)..(28): Xaa is C or S
NSLQEHQGQHPKIRYYLMTLPEEETPVX

SEQ ID NO: 64786 - protein, 30 aa, Artificial Sequence; identical to SEQ ID NO: 15967
  Cyclic GFR-binding peptide
  MOD_RES (1)..(3): Xaa is C or S

SEQ ID NO: 64787 - protein, 37 aa, Artificial Sequence
  Cyclic GFR-binding peptide
  MOD_RES (1)..(33)..(34): Xaa is C or S
XGEVVMDVQVEKVVKENEDVKAMKVSRLETPVXXAKP

SEQ ID NO: 64788 - protein, 37 aa, Artificial Sequence
  Cyclic GFR-binding peptide
  MOD_RES (1)..(3)..(35)..(36): Xaa is C or S
XGXARVVMNVQVEKIVNSSDDVKAVKVSRLQTPAXXP

SEQ ID NO: 64789 - protein, 30 aa, Artificial Sequence
  Cyclic GFR-binding peptide
  MOD_RES (26)..(27): Xaa is C or S
SMEGIVKPKRGVMIQITINSLAQPVXXPAA

SEQ ID NO: 64790 - protein, 34 aa, Artificial Sequence; identical to SEQ ID NO: 22753
  Cyclic GFR-binding peptide

SEQ ID NO: 64791 - protein, 32 aa, Artificial Sequence; identical to SEQ ID NO: 15970
  Cyclic GFR-binding peptide
  MOD_RES (31)..(32): Xaa is C or S

SEQ ID NO: 64792 - protein, 29 aa, Artificial Sequence
  Cyclic GFR-binding peptide
KNHQLFVQVEKHQGQHPKIRVKAMKVSRE

SEQ ID NO: 64793 - protein, 33 aa, Artificial Sequence
  Cyclic GFR-binding peptide
  MOD_RES (2)..(2): Xaa is C or S
GXGEVVMDVTAKKVVKENEDIKRMQVPRLETPV

SEQ ID NO: 64794 - protein, 31 aa, Artificial Sequence; identical to SEQ ID NO: 15977
  Cyclic GFR-binding peptide
  MOD_RES (2)..(2): Xaa is C or S

SEQ ID NO: 64795 - protein, 27 aa, Artificial Sequence
  Cyclic GFR-binding peptide
VMNNSLQEIVNSSDDYYVVPLPELKTP

SEQ ID NO: 64796 - protein, 28 aa, Artificial Sequence
  Cyclic GFR-binding peptide
  MOD_RES (2)..(2): Xaa is C or S
KXSKVVMNSLQEVKPTRGVYYVIPLPEL

SEQ ID NO: 64797 - protein, 21 aa, Artificial Sequence
  Cyclic GFR-binding peptide
NNSLQEIVNSSDDYYVVPLPE

SEQ ID NO: 64798 - protein, 36 aa, Artificial Sequence; identical to SEQ ID NO: 15987
  Cyclic GFR-binding peptide
  MOD_RES (1)..(33)..(34): Xaa is C or S

SEQ ID NO: 64799 - protein, 30 aa, Artificial Sequence; identical to SEQ ID NO: 15988
  Cyclic GFR-binding peptide

SEQ ID NO: 64800 - protein, 34 aa, Artificial Sequence
  Cyclic GFR-binding peptide
HEELRNSLQELKPKKRVYEYYVVPLPEHHVRSPQ

SEQ ID NO: 64801 - protein, 42 aa, Artificial Sequence; identical to SEQ ID NO: 22770
  Cyclic GFR-binding peptide
  MOD_RES (2)..(4)..(38): Xaa is C or S

SEQ ID NO: 64802 - protein, 38 aa, Artificial Sequence
  Cyclic GFR-binding peptide
  MOD_RES (1)..(32)..(33): Xaa is C or S
XSKVIMSMEGIIKPTKGIMIQITINSLDQSVXXPSASA

SEQ ID NO: 64803 - protein, 28 aa, Artificial Sequence
  Cyclic GFR-binding peptide
  MOD_RES (27)..(28): Xaa is C or S
DVTAKKVVKENEDIKRMQVPRLETPVXX

SEQ ID NO: 64804 - protein, 30 aa, Artificial Sequence
  Cyclic GFR-binding peptide
  MOD_RES (27)..(28): Xaa is C or S
DVQVEKVVKENEDVKAMKVSRLETPVXXAK

SEQ ID NO: 64805 - protein, 23 aa, Artificial Sequence
  Cyclic GFR-binding peptide
FVQVEKHQGQHPKIRVKAMKVSR

SEQ ID NO: 64806 - protein, 36 aa, Artificial Sequence; identical to SEQ ID NO: 15999
  Cyclic GFR-binding peptide
  MOD_RES (30)..(31): Xaa is C or S

SEQ ID NO: 64807 - protein, 31 aa, Artificial Sequence
  Cyclic GFR-binding peptide
  MOD_RES (27)..(28): Xaa is C or S
MVQVEKVKPTRGVVKAIKVSRLDQPVXXPSA

SEQ ID NO: 64808 - protein, 41 aa, Artificial Sequence; identical to SEQ ID NO: 22777
  Cyclic GFR-binding peptide
  MOD_RES (1)..(3)..(40): Xaa is C or S

SEQ ID NO: 64809 - protein, 33 aa, Artificial Sequence; identical to SEQ ID NO: 16001
  Cyclic GFR-binding peptide
  MOD_RES (1)..(33): Xaa is C or S

SEQ ID NO: 64810 - protein, 28 aa, Artificial Sequence
  Cyclic GFR-binding peptide
FNSLQEHQGQHPKIRYYVMPLPEEETPV

SEQ ID NO: 64811 - protein, 30 aa, Artificial Sequence; identical to SEQ ID NO: 16007
  Cyclic GFR-binding peptide
  MOD_RES (1)..(3): Xaa is C or S

SEQ ID NO: 64812 - protein, 30 aa, Artificial Sequence; identical to SEQ ID NO: 16010
  Cyclic GFR-binding peptide
  MOD_RES (27)..(27): Xaa is C or S

SEQ ID NO: 64813 - protein, 37 aa, Artificial Sequence; identical to SEQ ID NO: 16012
  Cyclic GFR-binding peptide
  MOD_RES (2)..(4)..(35)..(36): Xaa is C or S

SEQ ID NO: 64814 - protein, 29 aa, Artificial Sequence
  Cyclic GFR-binding peptide
  MOD_RES (26)..(27): Xaa is C or S
VTAKKVVKENEDIKRMQVPRLETPVXXAK

SEQ ID NO: 64815 - protein, 29 aa, Artificial Sequence
  Cyclic GFR-binding peptide
  MOD_RES (28)..(28): Xaa is C or S
VQVEKHQGQHPKIRVKAMKVSREETPVXE

SEQ ID NO: 64816 - protein, 27 aa, Artificial Sequence
  Cyclic GFR-binding peptide
TNSLQEFIPKKRVIEYYLVTLPELQVQ

SEQ ID NO: 64817 - protein, 26 aa, Artificial Sequence
  Cyclic GFR-binding peptide
GEVVMDNSLQEVVKENEDYYVMPLPE

SEQ ID NO: 64818 - protein, 41 aa, Artificial Sequence
  Cyclic GFR-binding peptide
  MOD_RES (1)..(3)..(40): Xaa is C or S
XKXALHDELTNSLQEFIPKKRVIEYYVVPLPELQVQTPRXQ

SEQ ID NO: 64819 - protein, 29 aa, Artificial Sequence
  Cyclic GFR-binding peptide
  MOD_RES (26)..(27): Xaa is C or S
NSLQEVVKENEDYYVMPLPELETPVXXAK

SEQ ID NO: 64820 - protein, 33 aa, Artificial Sequence
  Cyclic GFR-binding peptide
  MOD_RES (1)..(3): Xaa is C or S
XEXKNHQLFNSLQEHQGQHPKIRYYLMTLPEEE

SEQ ID NO: 64821 - protein, 37 aa, Artificial Sequence
  Cyclic GFR-binding peptide
  MOD_RES (1)..(3)..(34)..(35): Xaa is C or S
XKXSKVIMSMEGIIKPTKGIMIQITINSLDQSVXXPS

SEQ ID NO: 64822 - protein, 31 aa, Artificial Sequence; identical to SEQ ID NO: 22792
  Cyclic GFR-binding peptide

SEQ ID NO: 64823 - protein, 23 aa, Artificial Sequence
  Cyclic GFR-binding peptide
MVTAKKIKPTKGIIKRIQVPRLD

SEQ ID NO: 64824 - protein, 33 aa, Artificial Sequence; identical to SEQ ID NO: 22795
  Cyclic GFR-binding peptide
  MOD_RES (33)..(33): Xaa is C or S

SEQ ID NO: 64825 - protein, 40 aa, Artificial Sequence
  Cyclic GFR-binding peptide
  MOD_RES (2)..(4)..(36)..(37): Xaa is C or S
RXGXGEVVMEVTAKKVVKDYEDIKRMQVPRLETPVXXAKP

SEQ ID NO: 64826 - protein, 34 aa, Artificial Sequence
  Cyclic GFR-binding peptide
  MOD_RES (2)..(4): Xaa is C or S
RXEXKNHQLFNSLQEHQGQHPKIRYYLMTLPEEE

SEQ ID NO: 64827 - protein, 36 aa, Artificial Sequence
  Cyclic GFR-binding peptide
  MOD_RES (2)..(4)..(36): Xaa is C or S
HXGXSRVVMNVQVEKIVNSSDDVKAVKVSRLKTPAX

SEQ ID NO: 64828 - protein, 34 aa, Artificial Sequence; identical to SEQ ID NO: 16039
  Cyclic GFR-binding peptide
  MOD_RES (1)..(33)..(34): Xaa is C or S

SEQ ID NO: 64829 - protein, 30 aa, Artificial Sequence
  Cyclic GFR-binding peptide
GEVVMDVTAKKVVKENEDIKRMQVPRLETP

SEQ ID NO: 64830 - protein, 32 aa, Artificial Sequence
  Cyclic GFR-binding peptide
HEELRNSLQELKPKKRVYEYYVVPLPEHHVRS

SEQ ID NO: 64831 - protein, 39 aa, Artificial Sequence; identical to SEQ ID NO: 16044
  Cyclic GFR-binding peptide
  MOD_RES (2)..(34)..(35): Xaa is C or S

SEQ ID NO: 64832 - protein, 38 aa, Artificial Sequence; identical to SEQ ID NO: 16045
  Cyclic GFR-binding peptide
  MOD_RES (2)..(4)..(36)..(37): Xaa is C or S

SEQ ID NO: 64833 - protein, 29 aa, Artificial Sequence
  Cyclic GFR-binding peptide
  MOD_RES (2)..(4): Xaa is C or S
SXKXSKVVMVQVEKVKPTRGVVKAIKVSR

SEQ ID NO: 64834 - protein, 30 aa, Artificial Sequence
  Cyclic GFR-binding peptide
  MOD_RES (1)..(3): Xaa is C or S
XGXGEVVMEVTAKKVVKDYEDIKRMQVPRL

SEQ ID NO: 64835 - protein, 36 aa, Artificial Sequence; identical to SEQ ID NO: 22811
  Cyclic GFR-binding peptide
  MOD_RES (34)..(34): Xaa is C or S

SEQ ID NO: 64836 - protein, 40 aa, Artificial Sequence
  Cyclic GFR-binding peptide
  MOD_RES (2)..(4)..(38): Xaa is C or S
RXEXKNHQLFNSLQEHQGQHPKIRYYVMPLPEEETPVXEL

SEQ ID NO: 64837 - protein, 30 aa, Artificial Sequence; identical to SEQ ID NO: 16050
  Cyclic GFR-binding peptide
  MOD_RES (28)..(29): Xaa is C or S

SEQ ID NO: 64838 - protein, 38 aa, Artificial Sequence; identical to SEQ ID NO: 22817
  Cyclic GFR-binding peptide
  MOD_RES (34)..(34): Xaa is C or S

SEQ ID NO: 64839 - protein, 26 aa, Artificial Sequence
  Cyclic GFR-binding peptide
ELRNSLQELKPKKRVYEYYLVTLPEH

SEQ ID NO: 64840 - protein, 33 aa, Artificial Sequence; identical to SEQ ID NO: 16059
  Cyclic GFR-binding peptide
  MOD_RES (2)..(4): Xaa is C or S

SEQ ID NO: 64841 - protein, 32 aa, Artificial Sequence
  Cyclic GFR-binding peptide
  MOD_RES (2)..(4): Xaa is C or S
RXGXGEVVMESMEGIVVKDYEDMIQMTINSLE

SEQ ID NO: 64842 - protein, 38 aa, Artificial Sequence
  Cyclic GFR-binding peptide
  MOD_RES (1)..(3)..(34)..(35): Xaa is C or S
XKXSRVIMSMEGIVKPKRGVMIQITINSLAQPVXXPAA

SEQ ID NO: 64843 - protein, 32 aa, Artificial Sequence
  Cyclic GFR-binding peptide
  MOD_RES (2)..(4): Xaa is C or S
SXKXSRVIMVTAKKVKPKRGVIKRIQVPRLAQ

SEQ ID NO: 64844 - protein, 44 aa, Artificial Sequence
  Cyclic GFR-binding peptide
  MOD_RES (2)..(4)..(38): Xaa is C or S
RXEXKNHQLFNSLQEHQGQHPKIRYYVMPLPEEETPVXELGEDN

SEQ ID NO: 64845 - protein, 33 aa, Artificial Sequence
  Cyclic GFR-binding peptide
  MOD_RES (32)..(32): Xaa is C or S
SRVVMNSMEGIIVNSSDDMIQVTINSLKTPAXT

SEQ ID NO: 64846 - protein, 31 aa, Artificial Sequence
  Cyclic GFR-binding peptide
HQLFNSLQEHQGQHPKIRYYLMTLPEEETPV

SEQ ID NO: 64847 - protein, 35 aa, Artificial Sequence; identical to SEQ ID NO: 22834
  Cyclic GFR-binding peptide
  MOD_RES (35)..(35): Xaa is C or S

SEQ ID NO: 64848 - protein, 30 aa, Artificial Sequence
  Cyclic GFR-binding peptide
  MOD_RES (2)..(4): Xaa is C or S
SXKXSKVVMSMEGIVKPTRGVMIQITINSL

SEQ ID NO: 64849 - protein, 24 aa, Artificial Sequence
  Cyclic GFR-binding peptide
VVMDNSLQEVVKENEDYYVMPLPE

SEQ ID NO: 64850 - protein, 21 aa, Artificial Sequence
  Cyclic GFR-binding peptide
NSLQEVVKDYEDYYLMTLPEL

SEQ ID NO: 64851 - protein, 25 aa, Artificial Sequence
  Cyclic GFR-binding peptide
ENSLQEVVKDYEDYYVMPLPELETP

SEQ ID NO: 64852 - protein, 33 aa, Artificial Sequence; identical to SEQ ID NO: 16083
  Cyclic GFR-binding peptide
  MOD_RES (28)..(29): Xaa is C or S

SEQ ID NO: 64853 - protein, 36 aa, Artificial Sequence
  Cyclic GFR-binding peptide
  MOD_RES (1)..(3): Xaa is C or S
XAXELHEELRNSLQELKPKKRVYEYYVVPLPEHHVR

SEQ ID NO: 64854 - protein, 30 aa, Artificial Sequence
  Cyclic GFR-binding peptide
  MOD_RES (26)..(27): Xaa is C or S
SMEGIIVNSSDDMIQVTINSLQTPAXXPKP

SEQ ID NO: 64855 - protein, 21 aa, Artificial Sequence
  Cyclic GFR-binding peptide
MVQVEKIKPTKGIVKAIKVSR

SEQ ID NO: 64856 - protein, 26 aa, Artificial Sequence
  Cyclic GFR-binding peptide
MNVTAKKIVNSSDDIKRVQVPRLKTP

SEQ ID NO: 64857 - protein, 33 aa, Artificial Sequence; identical to SEQ ID NO: 16091
  Cyclic GFR-binding peptide
  MOD_RES (31)..(32): Xaa is C or S

SEQ ID NO: 64858 - protein, 41 aa, Artificial Sequence; identical to SEQ ID NO: 16092
  Cyclic GFR-binding peptide
  MOD_RES (1)..(3)..(35)..(36): Xaa is C or S

SEQ ID NO: 64859 - protein, 29 aa, Artificial Sequence
  Cyclic GFR-binding peptide
KVIMVQVEKIKPTKGIVKAIKVSRLDQSV

SEQ ID NO: 64860 - protein, 37 aa, Artificial Sequence
  Cyclic GFR-binding peptide
  MOD_RES (31)..(32): Xaa is C or S
EVVMESMEGIVVKDYEDMIQMTINSLETPVXXAKPIS

SEQ ID NO: 64861 - protein, 31 aa, Artificial Sequence; identical to SEQ ID NO: 16102
  Cyclic GFR-binding peptide
  MOD_RES (30)..(31): Xaa is C or S

SEQ ID NO: 64862 - protein, 36 aa, Artificial Sequence
  Cyclic GFR-binding peptide
  MOD_RES (34)..(34): Xaa is C or S
KNHQLFNSLQEHQGQHPKIRYYVMPLPEEETPVXEL

SEQ ID NO: 64863 - protein, 25 aa, Artificial Sequence
  Cyclic GFR-binding peptide
MDSMEGIVVKENEDMIQMTINSLET

SEQ ID NO: 64864 - protein, 35 aa, Artificial Sequence; identical to SEQ ID NO: 22856
  Cyclic GFR-binding peptide
  MOD_RES (1)..(3): Xaa is C or S

SEQ ID NO: 64865 - protein, 27 aa, Artificial Sequence
  Cyclic GFR-binding peptide
QLFNSLQEHQGQHPKIRYYVMPLPEEE

SEQ ID NO: 64866 - protein, 24 aa, Artificial Sequence
  Cyclic GFR-binding peptide
VMNSLQEVKPTRGVYYVIPLPELD

SEQ ID NO: 64867 - protein, 32 aa, Artificial Sequence
  Cyclic GFR-binding peptide
  MOD_RES (30)..(30): Xaa is C or S
VVMNSMEGIIVNSSDDMIQVTINSLKTPAXTP

SEQ ID NO: 64868 - protein, 26 aa, Artificial Sequence
  Cyclic GFR-binding peptide
HQLFNSLQEHQGQHPKIRYYVMPLPE

SEQ ID NO: 64869 - protein, 27 aa, Artificial Sequence
  Cyclic GFR-binding peptide
RVVMNNSLQEIVNSSDDYYVVPLPELK

SEQ ID NO: 64870 - protein, 21 aa, Artificial Sequence
  Cyclic GFR-binding peptide
NVQVEKIVNSSDDVKAVKVSR

SEQ ID NO: 64871 - protein, 21 aa, Artificial Sequence
  Cyclic GFR-binding peptide
VQVEKIKPTKGIVKAIKVSRL

SEQ ID NO: 64872 - protein, 24 aa, Artificial Sequence
  Cyclic GFR-binding peptide
MNSLQEVKPTRGVYYVIPLPELDQ

SEQ ID NO: 64873 - protein, 29 aa, Artificial Sequence
  Cyclic GFR-binding peptide
GEVVMEVTAKKVVKDYEDIKRMQVPRLET

SEQ ID NO: 64874 - protein, 33 aa, Artificial Sequence
  Cyclic GFR-binding peptide
  MOD_RES (27)..(28): Xaa is C or S
ESMEGIVVKDYEDMIQMTINSLETPVXXAKPIS

SEQ ID NO: 64875 - protein, 40 aa, Artificial Sequence; identical to SEQ ID NO: 16116
  Cyclic GFR-binding peptide
  MOD_RES (1)..(3)..(35)..(36): Xaa is C or S

SEQ ID NO: 64876 - protein, 22 aa, Artificial Sequence
  Cyclic GFR-binding peptide
EVTAKKVVKDYEDIKRMQVPRL

SEQ ID NO: 64877 - protein, 25 aa, Artificial Sequence
  Cyclic GFR-binding peptide
ELRNSLQELKPKKRVYEYYVVPLPE

SEQ ID NO: 64878 - protein, 37 aa, Artificial Sequence
  Cyclic GFR-binding peptide
  MOD_RES (2)..(34)..(35): Xaa is C or S
GXARVVMNSMEGIIVNSSDDMIQVTINSLQTPAXXPK

SEQ ID NO: 64879 - protein, 35 aa, Artificial Sequence
  Cyclic GFR-binding peptide
  MOD_RES (31)..(32): Xaa is C or S
EVVMESMEGIVVKDYEDMIQMTINSLETPVXXAKP

SEQ ID NO: 64880 - protein, 30 aa, Artificial Sequence
  Cyclic GFR-binding peptide
  MOD_RES (30)..(30): Xaa is C or S
NSLQELKPKKRVYEYYLVTLPEHHVRSPQX

SEQ ID NO: 64881 - protein, 32 aa, Artificial Sequence; identical to SEQ ID NO: 22865
  Cyclic GFR-binding peptide

SEQ ID NO: 64882 - protein, 31 aa, Artificial Sequence
  Cyclic GFR-binding peptide
ELHEELRNSLQELKPKKRVYEYYLVTLPEHH

SEQ ID NO: 64883 - protein, 36 aa, Artificial Sequence; identical to SEQ ID NO: 16125
  Cyclic GFR-binding peptide
  MOD_RES (2)..(4)..(35)..(36): Xaa is C or S

SEQ ID NO: 64884 - protein, 28 aa, Artificial Sequence
  Cyclic GFR-binding peptide
  MOD_RES (26)..(27): Xaa is C or S
SMEGIVVKDYEDMIQMTINSLETPVXXA

SEQ ID NO: 64885 - protein, 36 aa, Artificial Sequence; identical to SEQ ID NO: 16127
  Cyclic GFR-binding peptide
  MOD_RES (2)..(4)..(36): Xaa is C or S

SEQ ID NO: 64886 - protein, 33 aa, Artificial Sequence
  Cyclic GFR-binding peptide
  MOD_RES (2)..(4): Xaa is C or S
EXKXALHDELTNSLQEFIPKKRVIEYYVVPLPE

SEQ ID NO: 64887 - protein, 34 aa, Artificial Sequence
  Cyclic GFR-binding peptide
  MOD_RES (29)..(30): Xaa is C or S
VVMVQVEKVKPTRGVVKAIKVSRLDQPVXXPSAS

SEQ ID NO: 64888 - protein, 33 aa, Artificial Sequence; identical to SEQ ID NO: 22869
  Cyclic GFR-binding peptide
  MOD_RES (2)..(4): Xaa is C or S

SEQ ID NO: 64889 - protein, 30 aa, Artificial Sequence; identical to SEQ ID NO: 16137
  Cyclic GFR-binding peptide

SEQ ID NO: 64890 - protein, 28 aa, Artificial Sequence
  Cyclic GFR-binding peptide
LRSMEGILKPKKRVYEMIQVTINSHHVR

SEQ ID NO: 64891 - protein, 33 aa, Artificial Sequence; identical to SEQ ID NO: 16143
  Cyclic GFR-binding peptide
  MOD_RES (1)..(32)..(33): Xaa is C or S

SEQ ID NO: 64892 - protein, 41 aa, Artificial Sequence
  Cyclic GFR-binding peptide
  MOD_RES (2)..(4)..(36)..(37): Xaa is C or S
HXGXSRVVMNVTAKKIVNSSDDIKRVQVPRLKTPAXXPKPV

SEQ ID NO: 64893 - protein, 33 aa, Artificial Sequence; identical to SEQ ID NO: 16150
  Cyclic GFR-binding peptide
  MOD_RES (1)..(32)..(33): Xaa is C or S

SEQ ID NO: 64894 - protein, 34 aa, Artificial Sequence
  Cyclic GFR-binding peptide
LHEELRNSLQELKPKKRVYEYYLVTLPEHHVRSP

SEQ ID NO: 64895 - protein, 44 aa, Artificial Sequence; identical to SEQ ID NO: 22883
  Cyclic GFR-binding peptide
  MOD_RES (2)..(4)..(38): Xaa is C or S

SEQ ID NO: 64896 - protein, 41 aa, Artificial Sequence; identical to SEQ ID NO: 16154
  Cyclic GFR-binding peptide
  MOD_RES (2)..(4)..(36)..(37): Xaa is C or S

SEQ ID NO: 64897 - protein, 28 aa, Artificial Sequence
  Cyclic GFR-binding peptide
RNSLQELKPKKRVYEYYLVTLPEHHVRS

SEQ ID NO: 64898 - protein, 25 aa, Artificial Sequence
  Cyclic GFR-binding peptide
RSMEGILKPKKRVYEMIQVTINSHH

SEQ ID NO: 64899 - protein, 30 aa, Artificial Sequence
  Cyclic GFR-binding peptide
EVVMEVQVEKVVKDYEDVKAMKVSRLETPV

SEQ ID NO: 64900 - protein, 31 aa, Artificial Sequence
  Cyclic GFR-binding peptide
  MOD_RES (1)..(3): Xaa is C or S
XGXARVVMNVTAKKIVNSSDDIKRVQVPRLQ

SEQ ID NO: 64901 - protein, 33 aa, Artificial Sequence; identical to SEQ ID NO: 16161
  Cyclic GFR-binding peptide
  MOD_RES (2)..(4): Xaa is C or S

SEQ ID NO: 64902 - protein, 40 aa, Artificial Sequence
  Cyclic GFR-binding peptide
  MOD_RES (37)..(37): Xaa is C or S
ELHEELRNSLQELKPKKRVYEYYVVPLPEHHVRSPQXKVS

SEQ ID NO: 64903 - protein, 31 aa, Artificial Sequence; identical to SEQ ID NO: 16165
  Cyclic GFR-binding peptide
  MOD_RES (2)..(2): Xaa is C or S

SEQ ID NO: 64904 - protein, 37 aa, Artificial Sequence; identical to SEQ ID NO: 22897
  Cyclic GFR-binding peptide
  MOD_RES (33)..(33): Xaa is C or S

SEQ ID NO: 64905 - protein, 29 aa, Artificial Sequence
  Cyclic GFR-binding peptide
  MOD_RES (26)..(26): Xaa is C or S
VQVEKIVNSSDDVKAVKVSRLKTPAXTPK

SEQ ID NO: 64906 - protein, 34 aa, Artificial Sequence
  Cyclic GFR-binding peptide
  MOD_RES (2)..(4): Xaa is C or S
SXKXSRVIMVQVEKVKPKRGVVKAIKVSRLAQPV

SEQ ID NO: 64907 - protein, 32 aa, Artificial Sequence; identical to SEQ ID NO: 22898
  Cyclic GFR-binding peptide
  MOD_RES (29)..(29): Xaa is C or S

SEQ ID NO: 64908 - protein, 36 aa, Artificial Sequence
  Cyclic GFR-binding peptide
  MOD_RES (1)..(33)..(34): Xaa is C or S
XGEVVMDSMEGIVVKENEDMIQMTINSLETPVXXAK

SEQ ID NO: 64909 - protein, 22 aa, Artificial Sequence
  Cyclic GFR-binding peptide
MNNSLQEIVNSSDDYYLVTLPE

SEQ ID NO: 64910 - protein, 33 aa, Artificial Sequence; identical to SEQ ID NO: 16173
  Cyclic GFR-binding peptide
  MOD_RES (31)..(32): Xaa is C or S

SEQ ID NO: 64911 - protein, 26 aa, Artificial Sequence
  Cyclic GFR-binding peptide
RVVMNVQVEKIVNSSDDVKAVKVSRL

SEQ ID NO: 64912 - protein, 31 aa, Artificial Sequence; identical to SEQ ID NO: 22907
  Cyclic GFR-binding peptide

SEQ ID NO: 64913 - protein, 29 aa, Artificial Sequence
  Cyclic GFR-binding peptide
KNHQLFNSLQEHQGQHPKIRYYLMTLPEE

SEQ ID NO: 64914 - protein, 27 aa, Artificial Sequence
  Cyclic GFR-binding peptide
HDELTVQVEKFIPKKRVIEVKAVKVSR

SEQ ID NO: 64915 - protein, 30 aa, Artificial Sequence
  Cyclic GFR-binding peptide
  MOD_RES (1)..(3): Xaa is C or S
XKXSKVVMSMEGIVKPTRGVMIQITINSLD

SEQ ID NO: 64916 - protein, 30 aa, Artificial Sequence
  Cyclic GFR-binding peptide
  MOD_RES (27)..(28): Xaa is C or S
MSMEGIIKPTKGIMIQITINSLDQSVXXPS

SEQ ID NO: 64917 - protein, 37 aa, Artificial Sequence; identical to SEQ ID NO: 16183
  Cyclic GFR-binding peptide
  MOD_RES (1)..(3)..(35)..(36): Xaa is C or S

SEQ ID NO: 64918 - protein, 23 aa, Artificial Sequence
  Cyclic GFR-binding peptide
NSLQEHQGQHPKIRYYLMTLPEE

SEQ ID NO: 64919 - protein, 27 aa, Artificial Sequence
  Cyclic GFR-binding peptide
DELTNSLQEFIPKKRVIEYYVVPLPEL

SEQ ID NO: 64920 - protein, 33 aa, Artificial Sequence; identical to SEQ ID NO: 16195
  Cyclic GFR-binding peptide
  MOD_RES (2)..(2): Xaa is C or S

SEQ ID NO: 64921 - protein, 23 aa, Artificial Sequence
  Cyclic GFR-binding peptide
VMENSLQEVVKDYEDYYVMPLPE

SEQ ID NO: 64922 - protein, 34 aa, Artificial Sequence
  Cyclic GFR-binding peptide
  MOD_RES (1)..(3)..(34): Xaa is C or S
XKXSKVIMVTAKKIKPTKGIIKRIQVPRLDQSVX

SEQ ID NO: 64923 - protein, 35 aa, Artificial Sequence
  Cyclic GFR-binding peptide
  MOD_RES (30)..(31): Xaa is C or S
VVMEVTAKKVVKDYEDIKRMQVPRLETPVXXAKPI

SEQ ID NO: 64924 - protein, 23 aa, Artificial Sequence
  Cyclic GFR-binding peptide
DSMEGIVVKENEDMIQMTINSLE

SEQ ID NO: 64925 - protein, 33 aa, Artificial Sequence
  Cyclic GFR-binding peptide
  MOD_RES (29)..(29): Xaa is C or S
VMNVQVEKIVNSSDDVKAVKVSRLKTPAXTPKT

SEQ ID NO: 64926 - protein, 32 aa, Artificial Sequence; identical to SEQ ID NO: 22923
  Cyclic GFR-binding peptide

SEQ ID NO: 64927 - protein, 35 aa, Artificial Sequence
  Cyclic GFR-binding peptide
  MOD_RES (34)..(34): Xaa is C or S
KNHQLFNSLQEHQGQHPKIRYYLMTLPEEETPVXE

SEQ ID NO: 64928 - protein, 29 aa, Artificial Sequence
  Cyclic GFR-binding peptide
  MOD_RES (2)..(2): Xaa is C or S
KXSRVIMSMEGIVKPKRGVMIQITINSLA

SEQ ID NO: 64929 - protein, 28 aa, Artificial Sequence
  Cyclic GFR-binding peptide
  MOD_RES (28)..(28): Xaa is C or S
IMVQVEKVKPKRGVVKAIKVSRLAQPVX

SEQ ID NO: 64930 - protein, 37 aa, Artificial Sequence; identical to SEQ ID NO: 16223
  Cyclic GFR-binding peptide
  MOD_RES (1)..(3)..(35): Xaa is C or S

SEQ ID NO: 64931 - protein, 26 aa, Artificial Sequence
  Cyclic GFR-binding peptide
MNNSLQEIVNSSDDYYVVPLPELQTP

SEQ ID NO: 64932 - protein, 28 aa, Artificial Sequence
  Cyclic GFR-binding peptide
RVVMNNSLQEIVNSSDDYYLVTLPELQT

SEQ ID NO: 64933 - protein, 26 aa, Artificial Sequence
  Cyclic GFR-binding peptide
VMNNSLQEIVNSSDDYYVVPLPELQT

SEQ ID NO: 64934 - protein, 37 aa, Artificial Sequence
  Cyclic GFR-binding peptide
  MOD_RES (1)..(3)..(35): Xaa is C or S
XGXSRVVMNSMEGIIVNSSDDMIQVTINSLKTPAXTP

SEQ ID NO: 64935 - protein, 25 aa, Artificial Sequence
  Cyclic GFR-binding peptide
LRNSLQELKPKKRVYEYYVVPLPEH

SEQ ID NO: 64936 - protein, 28 aa, Artificial Sequence
  Cyclic GFR-binding peptide
GEVVMEVQVEKVVKDYEDVKAMKVSRLE

SEQ ID NO: 64937 - protein, 35 aa, Artificial Sequence; identical to SEQ ID NO: 22944
  Cyclic GFR-binding peptide

SEQ ID NO: 64938 - protein, 24 aa, Artificial Sequence
  Cyclic GFR-binding peptide
VTAKKVKPKRGVIKRIQVPRLAQP

SEQ ID NO: 64939 - protein, 40 aa, Artificial Sequence; identical to SEQ ID NO: 22949
  Cyclic GFR-binding peptide
  MOD_RES (1)..(3)..(40): Xaa is C or S

SEQ ID NO: 64940 - protein, 38 aa, Artificial Sequence
  Cyclic GFR-binding peptide
  MOD_RES (34)..(34): Xaa is C or S
DELTNSLQEFIPKKRVIEYYLVTLPELQVQTPRXQVNR

SEQ ID NO: 64941 - protein, 31 aa, Artificial Sequence
  Cyclic GFR-binding peptide
  MOD_RES (30)..(31): Xaa is C or S
VVMEVTAKKVVKDYEDIKRMQVPRLETPVXX

SEQ ID NO: 64942 - protein, 34 aa, Artificial Sequence
  Cyclic GFR-binding peptide
  MOD_RES (1)..(33)..(34): Xaa is C or S
XGEVVMESMEGIVVKDYEDMIQMTINSLETPVXX

SEQ ID NO: 64943 - protein, 34 aa, Artificial Sequence
  Cyclic GFR-binding peptide
  MOD_RES (1)..(3): Xaa is C or S
XGXSRVVMNVQVEKIVNSSDDVKAVKVSRLKTPA

SEQ ID NO: 64944 - protein, 32 aa, Artificial Sequence
  Cyclic GFR-binding peptide
  MOD_RES (27)..(28): Xaa is C or S
NSMEGIIVNSSDDMIQVTINSLQTPAXXPKPV

SEQ ID NO: 64945 - protein, 22 aa, Artificial Sequence
  Cyclic GFR-binding peptide
ENSLQEVVKDYEDYYVMPLPEL

SEQ ID NO: 64946 - protein, 31 aa, Artificial Sequence; identical to SEQ ID NO: 16249
  Cyclic GFR-binding peptide
  MOD_RES (29)..(30): Xaa is C or S

SEQ ID NO: 64947 - protein, 30 aa, Artificial Sequence
  Cyclic GFR-binding peptide
LHDELTNSLQEFIPKKRVIEYYLVTLPELQ

SEQ ID NO: 64948 - protein, 31 aa, Artificial Sequence
  Cyclic GFR-binding peptide
  MOD_RES (29)..(30): Xaa is C or S
VMNVTAKKIVNSSDDIKRVQVPRLKTPAXXP

SEQ ID NO: 64949 - protein, 40 aa, Artificial Sequence; identical to SEQ ID NO: 22965
  Cyclic GFR-binding peptide
  MOD_RES (37)..(37): Xaa is C or S

SEQ ID NO: 64950 - protein, 30 aa, Artificial Sequence; identical to SEQ ID NO: 22967
  Cyclic GFR-binding peptide

SEQ ID NO: 64951 - protein, 24 aa, Artificial Sequence
  Cyclic GFR-binding peptide
VQVEKVVKDYEDVKAMKVSRLETP

SEQ ID NO: 64952 - protein, 29 aa, Artificial Sequence
  Cyclic GFR-binding peptide
  MOD_RES (26)..(27): Xaa is C or S
VTAKKVKPKRGVIKRIQVPRLAQPVXXPA

SEQ ID NO: 64953 - protein, 34 aa, Artificial Sequence; identical to SEQ ID NO: 16259
  Cyclic GFR-binding peptide
  MOD_RES (28)..(29): Xaa is C or S

SEQ ID NO: 64954 - protein, 29 aa, Artificial Sequence
  Cyclic GFR-binding peptide
  MOD_RES (28)..(29): Xaa is C or S
IMVQVEKVKPKRGVVKAIKVSRLAQPVXX

SEQ ID NO: 64955 - protein, 36 aa, Artificial Sequence; identical to SEQ ID NO: 50040
  Cyclic GFR-binding peptide
  MOD_RES (2)..(33)..(34): Xaa is C or S

SEQ ID NO: 64956 - protein, 27 aa, Artificial Sequence
  Cyclic GFR-binding peptide
LFNSLQEHQGQHPKIRYYLMTLPEEET

SEQ ID NO: 64957 - protein, 40 aa, Artificial Sequence
  Cyclic GFR-binding peptide
  MOD_RES (1)..(3)..(34)..(35): Xaa is C or S
XKXSKVVMSMEGIVKPTRGVMIQITINSLDQPVXXPSASA

SEQ ID NO: 64958 - protein, 31 aa, Artificial Sequence; identical to SEQ ID NO: 22969
  Cyclic GFR-binding peptide

SEQ ID NO: 64959 - protein, 38 aa, Artificial Sequence
  Cyclic GFR-binding peptide
  MOD_RES (35)..(35): Xaa is C or S
HDELTNSLQEFIPKKRVIEYYVVPLPELQVQTPRXQVN

SEQ ID NO: 64960 - protein, 27 aa, Artificial Sequence
  Cyclic GFR-binding peptide
TSMEGIFIPKKRVIEMIQVTINSLQVQ

SEQ ID NO: 64961 - protein, 32 aa, Artificial Sequence
  Cyclic GFR-binding peptide
  MOD_RES (2)..(4): Xaa is C or S
SXKXSKVIMVQVEKIKPTKGIVKAIKVSRLDQ

SEQ ID NO: 64962 - protein, 30 aa, Artificial Sequence
  Cyclic GFR-binding peptide
  MOD_RES (27)..(27): Xaa is C or S
NSMEGIIVNSSDDMIQVTINSLKTPAXTPK

SEQ ID NO: 64963 - protein, 36 aa, Artificial Sequence; identical to SEQ ID NO: 22974
  Cyclic GFR-binding peptide
  MOD_RES (35)..(35): Xaa is C or S

SEQ ID NO: 64964 - protein, 31 aa, Artificial Sequence; identical to SEQ ID NO: 22975
  Cyclic GFR-binding peptide

SEQ ID NO: 64965 - protein, 25 aa, Artificial Sequence
  Cyclic GFR-binding peptide
LTNSLQEFIPKKRVIEYYVVPLPEL

SEQ ID NO: 64966 - protein, 31 aa, Artificial Sequence; identical to SEQ ID NO: 16269
  Cyclic GFR-binding peptide
  MOD_RES (26)..(27): Xaa is C or S

SEQ ID NO: 64967 - protein, 32 aa, Artificial Sequence
  Cyclic GFR-binding peptide
  MOD_RES (28)..(29): Xaa is C or S
VMVQVEKVKPTRGVVKAIKVSRLDQPVXXPSA

SEQ ID NO: 64968 - protein, 31 aa, Artificial Sequence
  Cyclic GFR-binding peptide
  MOD_RES (1)..(1): Xaa is C or S
XGEVVMDSMEGIVVKENEDMIQMTINSLETP

SEQ ID NO: 64969 - protein, 31 aa, Artificial Sequence; identical to SEQ ID NO: 16271
  Cyclic GFR-binding peptide
  MOD_RES (31)..(31): Xaa is C or S

SEQ ID NO: 64970 - protein, 34 aa, Artificial Sequence
  Cyclic GFR-binding peptide
  MOD_RES (29)..(29): Xaa is C or S
FNSLQEHQGQHPKIRYYVMPLPEEETPVXELGED

SEQ ID NO: 64971 - protein, 35 aa, Artificial Sequence
  Cyclic GFR-binding peptide
  MOD_RES (29)..(29): Xaa is C or S
VMNVQVEKIVNSSDDVKAVKVSRLKTPAXTPKTVH

SEQ ID NO: 64972 - protein, 41 aa, Artificial Sequence; identical to SEQ ID NO: 16280
  Cyclic GFR-binding peptide
  MOD_RES (2)..(4)..(36)..(37): Xaa is C or S

SEQ ID NO: 64973 - protein, 25 aa, Artificial Sequence
  Cyclic GFR-binding peptide
EVTAKKVVKDYEDIKRMQVPRLETP

SEQ ID NO: 64974 - protein, 34 aa, Artificial Sequence; identical to SEQ ID NO: 22985
  Cyclic GFR-binding peptide
  MOD_RES (2)..(4): Xaa is C or S

SEQ ID NO: 64975 - protein, 24 aa, Artificial Sequence
  Cyclic GFR-binding peptide
NSLQEVVKENEDYYLMTLPELETP

SEQ ID NO: 64976 - protein, 38 aa, Artificial Sequence
  Cyclic GFR-binding peptide
  MOD_RES (1)..(33)..(34): Xaa is C or S
XGEVVMDVTAKKVVKENEDIKRMQVPRLETPVXXAKPI

SEQ ID NO: 64977 - protein, 35 aa, Artificial Sequence
  Cyclic GFR-binding peptide
  MOD_RES (30)..(31): Xaa is C or S
VVMDSMEGIVVKENEDMIQMTINSLETPVXXAKPI

SEQ ID NO: 64978 - protein, 37 aa, Artificial Sequence
  Cyclic GFR-binding peptide
  MOD_RES (32)..(33): Xaa is C or S
ARVVMNSMEGIIVNSSDDMIQVTINSLQTPAXXPKPV

SEQ ID NO: 64979 - protein, 34 aa, Artificial Sequence
  Cyclic GFR-binding peptide
  MOD_RES (2)..(34): Xaa is C or S
GXGEVVMEVQVEKVVKDYEDVKAMKVSRLETPVX

SEQ ID NO: 64980 - protein, 27 aa, Artificial Sequence
  Cyclic GFR-binding peptide
GEVVMDNSLQEVVKENEDYYVMPLPEL

SEQ ID NO: 64981 - protein, 34 aa, Artificial Sequence
  Cyclic GFR-binding peptide
  MOD_RES (2)..(34): Xaa is C or S
GXGEVVMDVTAKKVVKENEDIKRMQVPRLETPVX

SEQ ID NO: 64982 - protein, 25 aa, Artificial Sequence
  Cyclic GFR-binding peptide
SMEGIVKPKRGVMIQITINSLAQPV

SEQ ID NO: 64983 - protein, 39 aa, Artificial Sequence
  Cyclic GFR-binding peptide
  MOD_RES (37)..(37): Xaa is C or S
ALHDELTNSLQEFIPKKRVIEYYLVTLPELQVQTPRXQV

SEQ ID NO: 64984 - protein, 34 aa, Artificial Sequence
  Cyclic GFR-binding peptide
  MOD_RES (2)..(4): Xaa is C or S
EXKXALHDELTNSLQEFIPKKRVIEYYVVPLPEL

SEQ ID NO: 64985 - protein, 24 aa, Artificial Sequence
  Cyclic GFR-binding peptide
VQVEKHQGQHPKIRVKAMKVSREE

SEQ ID NO: 64986 - protein, 35 aa, Artificial Sequence
  Cyclic GFR-binding peptide
  MOD_RES (1)..(32)..(33): Xaa is C or S
XSKVIMVQVEKIKPTKGIVKAIKVSRLDQSVXXPS

SEQ ID NO: 64987 - protein, 34 aa, Artificial Sequence; identical to SEQ ID NO: 16301
  Cyclic GFR-binding peptide
  MOD_RES (2)..(34): Xaa is C or S

SEQ ID NO: 64988 - protein, 28 aa, Artificial Sequence
  Cyclic GFR-binding peptide
ELRSMEGILKPKKRVYEMIQVTINSHHV

SEQ ID NO: 64989 - protein, 32 aa, Artificial Sequence
  Cyclic GFR-binding peptide
  MOD_RES (28)..(29): Xaa is C or S
IMVQVEKIKPTKGIVKAIKVSRLDQSVXXPSA

SEQ ID NO: 64990 - protein, 37 aa, Artificial Sequence
  Cyclic GFR-binding peptide
  MOD_RES (1)..(3)..(35)..(36): Xaa is C or S
XGXGEVVMEVTAKKVVKDYEDIKRMQVPRLETPVXXA

SEQ ID NO: 64991 - protein, 42 aa, Artificial Sequence
  Cyclic GFR-binding peptide
  MOD_RES (2)..(4)..(36): Xaa is C or S
HXGXSRVVMNSMEGIIVNSSDDMIQVTINSLKTPAXTPKTVH

SEQ ID NO: 64992 - protein, 36 aa, Artificial Sequence
  Cyclic GFR-binding peptide
  MOD_RES (1)..(3)..(34)..(35): Xaa is C or S
XKXSRVIMSMEGIVKPKRGVMIQITINSLAQPVXXP

SEQ ID NO: 64993 - protein, 39 aa, Artificial Sequence; identical to SEQ ID NO: 23013
  Cyclic GFR-binding peptide
  MOD_RES (2)..(36): Xaa is C or S

SEQ ID NO: 64994 - protein, 35 aa, Artificial Sequence
  Cyclic GFR-binding peptide
  MOD_RES (2)..(33)..(34): Xaa is C or S
KXSKVVMSMEGIVKPTRGVMIQITINSLDQPVXXP

SEQ ID NO: 64995 - protein, 30 aa, Artificial Sequence
  Cyclic GFR-binding peptide
SKVIMSMEGIIKPTKGIMIQITINSLDQSV

SEQ ID NO: 64996 - protein, 39 aa, Artificial Sequence
  Cyclic GFR-binding peptide
  MOD_RES (2)..(33)..(34): Xaa is C or S
KXSKVVMSMEGIVKPTRGVMIQITINSLDQPVXXPSASA

SEQ ID NO: 64997 - protein, 26 aa, Artificial Sequence
  Cyclic GFR-binding peptide
ELTNSLQEFIPKKRVIEYYLVTLPEL

SEQ ID NO: 64998 - protein, 27 aa, Artificial Sequence
  Cyclic GFR-binding peptide
LTNSLQEFIPKKRVIEYYVVPLPELQV

SEQ ID NO: 64999 - protein, 37 aa, Artificial Sequence
  Cyclic GFR-binding peptide
  MOD_RES (35)..(35): Xaa is C or S
HEELRNSLQELKPKKRVYEYYVVPLPEHHVRSPQXKV

SEQ ID NO: 65000 - protein, 22 aa, Artificial Sequence
  Cyclic GFR-binding peptide
MDVQVEKVVKENEDVKAMKVSR

SEQ ID NO: 65001 - protein, 30 aa, Artificial Sequence
  Cyclic GFR-binding peptide
  MOD_RES (28)..(29): Xaa is C or S
MDSMEGIVVKENEDMIQMTINSLETPVXXA

SEQ ID NO: 65002 - protein, 28 aa, Artificial Sequence
  Cyclic GFR-binding peptide
  MOD_RES (2)..(2): Xaa is C or S
KXSRVIMSMEGIVKPKRGVMIQITINSL

SEQ ID NO: 65003 - protein, 34 aa, Artificial Sequence
  Cyclic GFR-binding peptide
HDELTNSLQEFIPKKRVIEYYVVPLPELQVQTPR

SEQ ID NO: 65004 - protein, 28 aa, Artificial Sequence
  Cyclic GFR-binding peptide
  MOD_RES (2)..(2): Xaa is C or S
KXSKVIMNSLQEIKPTKGIYYLITLPEL

SEQ ID NO: 65005 - protein, 34 aa, Artificial Sequence
  Cyclic GFR-binding peptide
  MOD_RES (31)..(32): Xaa is C or S
SKVVMSMEGIVKPTRGVMIQITINSLDQPVXXPS

SEQ ID NO: 65006 - protein, 40 aa, Artificial Sequence; identical to SEQ ID NO: 23032
  Cyclic GFR-binding peptide
  MOD_RES (1)..(3)..(40): Xaa is C or S

SEQ ID NO: 65007 - protein, 36 aa, Artificial Sequence
  Cyclic GFR-binding peptide
  MOD_RES (1)..(33)..(34): Xaa is C or S
XSRVVMNVTAKKIVNSSDDIKRVQVPRLKTPAXXPK

SEQ ID NO: 65008 - protein, 34 aa, Artificial Sequence
  Cyclic GFR-binding peptide
  MOD_RES (1)..(32)..(33): Xaa is C or S
XSKVVMSMEGIVKPTRGVMIQITINSLDQPVXXP

SEQ ID NO: 65009 - protein, 36 aa, Artificial Sequence; identical to SEQ ID NO: 50099
  Cyclic GFR-binding peptide
  MOD_RES (1)..(32)..(33): Xaa is C or S

SEQ ID NO: 65010 - protein, 31 aa, Artificial Sequence
  Cyclic GFR-binding peptide
  MOD_RES (2)..(2): Xaa is C or S
KXALHDELTNSLQEFIPKKRVIEYYVVPLPE

SEQ ID NO: 65011 - protein, 30 aa, Artificial Sequence
  Cyclic GFR-binding peptide
  MOD_RES (2)..(4): Xaa is C or S
RXGXGEVVMESMEGIVVKDYEDMIQMTINS

SEQ ID NO: 65012 - protein, 32 aa, Artificial Sequence
  Cyclic GFR-binding peptide
DELTNSLQEFIPKKRVIEYYLVTLPELQVQTP

SEQ ID NO: 65013 - protein, 29 aa, Artificial Sequence
  Cyclic GFR-binding peptide
GEVVMDSMEGIVVKENEDMIQMTINSLET

SEQ ID NO: 65014 - protein, 31 aa, Artificial Sequence; identical to SEQ ID NO: 16348
  Cyclic GFR-binding peptide
  MOD_RES (29)..(30): Xaa is C or S

SEQ ID NO: 65015 - protein, 38 aa, Artificial Sequence
  Cyclic GFR-binding peptide
  MOD_RES (1)..(3)..(34)..(35): Xaa is C or S
XKXSKVVMSMEGIVKPTRGVMIQITINSLDQPVXXPSA

SEQ ID NO: 65016 - protein, 23 aa, Artificial Sequence
  Cyclic GFR-binding peptide
VIMVQVEKVKPKRGVVKAIKVSR

SEQ ID NO: 65017 - protein, 25 aa, Artificial Sequence
  Cyclic GFR-binding peptide
MENSLQEVVKDYEDYYVMPLPELET

SEQ ID NO: 65018 - protein, 28 aa, Artificial Sequence
  Cyclic GFR-binding peptide
KNHQLFVQVEKHQGQHPKIRVKAMKVSR

SEQ ID NO: 65019 - protein, 42 aa, Artificial Sequence; identical to SEQ ID NO: 23046
  Cyclic GFR-binding peptide
  MOD_RES (2)..(4)..(41): Xaa is C or S

SEQ ID NO: 65020 - protein, 31 aa, Artificial Sequence
  Cyclic GFR-binding peptide
  MOD_RES (29)..(30): Xaa is C or S
VMDVTAKKVVKENEDIKRMQVPRLETPVXXA

SEQ ID NO: 65021 - protein, 41 aa, Artificial Sequence; identical to SEQ ID NO: 23049
  Cyclic GFR-binding peptide
  MOD_RES (2)..(4)..(41): Xaa is C or S

SEQ ID NO: 65022 - protein, 32 aa, Artificial Sequence; identical to SEQ ID NO: 23051
  Cyclic GFR-binding peptide

SEQ ID NO: 65023 - protein, 36 aa, Artificial Sequence
  Cyclic GFR-binding peptide
  MOD_RES (1)..(3)..(35)..(36): Xaa is C or S
XGXGEVVMDVTAKKVVKENEDIKRMQVPRLETPVXX

SEQ ID NO: 65024 - protein, 40 aa, Artificial Sequence; identical to SEQ ID NO: 16361
  Cyclic GFR-binding peptide
  MOD_RES (1)..(3)..(35)..(36): Xaa is C or S

SEQ ID NO: 65025 - protein, 26 aa, Artificial Sequence
  Cyclic GFR-binding peptide
SRVIMVQVEKVKPKRGVVKAIKVSRL

SEQ ID NO: 65026 - protein, 33 aa, Artificial Sequence
  Cyclic GFR-binding peptide
  MOD_RES (1)..(33): Xaa is C or S
XGEVVMEVQVEKVVKDYEDVKAMKVSRLETPVX

SEQ ID NO: 65027 - protein, 30 aa, Artificial Sequence; identical to SEQ ID NO: 16363
  Cyclic GFR-binding peptide
  MOD_RES (27)..(28): Xaa is C or S

SEQ ID NO: 65028 - protein, 35 aa, Artificial Sequence; identical to SEQ ID NO: 16364
  Cyclic GFR-binding peptide
  MOD_RES (2)..(4): Xaa is C or S

SEQ ID NO: 65029 - protein, 33 aa, Artificial Sequence; identical to SEQ ID NO: 16365
  Cyclic GFR-binding peptide
  MOD_RES (30)..(31): Xaa is C or S

SEQ ID NO: 65030 - protein, 25 aa, Artificial Sequence
  Cyclic GFR-binding peptide
SKVVMNSLQEVKPTRGVYYVIPLPE

SEQ ID NO: 65031 - protein, 32 aa, Artificial Sequence
  Cyclic GFR-binding peptide
  MOD_RES (2)..(2): Xaa is C or S
GXARVVMNSMEGIIVNSSDDMIQVTINSLQTP

SEQ ID NO: 65032 - protein, 26 aa, Artificial Sequence
  Cyclic GFR-binding peptide
VMNSMEGIIVNSSDDMIQVTINSLKT

SEQ ID NO: 65033 - protein, 34 aa, Artificial Sequence; identical to SEQ ID NO: 16370
  Cyclic GFR-binding peptide
  MOD_RES (32)..(33): Xaa is C or S

SEQ ID NO: 65034 - protein, 28 aa, Artificial Sequence
  Cyclic GFR-binding peptide
SMEGIFIPKKRVIEMIQVTINSLQVQTP

SEQ ID NO: 65035 - protein, 33 aa, Artificial Sequence
  Cyclic GFR-binding peptide
  MOD_RES (27)..(28): Xaa is C or S
DVTAKKVVKENEDIKRMQVPRLETPVXXAKPIK

SEQ ID NO: 65036 - protein, 33 aa, Artificial Sequence
  Cyclic GFR-binding peptide
  MOD_RES (1)..(3): Xaa is C or S
XGXGEVVMEVQVEKVVKDYEDVKAMKVSRLETP

SEQ ID NO: 65037 - protein, 35 aa, Artificial Sequence; identical to SEQ ID NO: 16374
  Cyclic GFR-binding peptide
  MOD_RES (32)..(33): Xaa is C or S

SEQ ID NO: 65038 - protein, 39 aa, Artificial Sequence
  Cyclic GFR-binding peptide
  MOD_RES (2)..(33)..(34): Xaa is C or S
KXSKVIMSMEGIIKPTKGIMIQITINSLDQSVXXPSASA

SEQ ID NO: 65039 - protein, 33 aa, Artificial Sequence; identical to SEQ ID NO: 23062
  Cyclic GFR-binding peptide
  MOD_RES (2)..(2): Xaa is C or S

SEQ ID NO: 65040 - protein, 34 aa, Artificial Sequence; identical to SEQ ID NO: 16376
  Cyclic GFR-binding peptide
  MOD_RES (2)..(4): Xaa is C or S

SEQ ID NO: 65041 - protein, 35 aa, Artificial Sequence; identical to SEQ ID NO: 23065
  Cyclic GFR-binding peptide
  MOD_RES (33)..(33): Xaa is C or S

SEQ ID NO: 65042 - protein, 33 aa, Artificial Sequence
  Cyclic GFR-binding peptide
  MOD_RES (1)..(1): Xaa is C or S
XKNHQLFNSLQEHQGQHPKIRYYVMPLPEEETP

SEQ ID NO: 65043 - protein, 26 aa, Artificial Sequence
  Cyclic GFR-binding peptide
  MOD_RES (26)..(26): Xaa is C or S
NSLQEVVKENEDYYLMTLPELETPVX

SEQ ID NO: 65044 - protein, 27 aa, Artificial Sequence
  Cyclic GFR-binding peptide
HEELRNSLQELKPKKRVYEYYVVPLPE

SEQ ID NO: 65045 - protein, 33 aa, Artificial Sequence; identical to SEQ ID NO: 16386
  Cyclic GFR-binding peptide
  MOD_RES (32)..(33): Xaa is C or S

SEQ ID NO: 65046 - protein, 26 aa, Artificial Sequence
  Cyclic GFR-binding peptide
VMNSLQEVKPTRGVYYVIPLPELDQP

SEQ ID NO: 65047 - protein, 31 aa, Artificial Sequence
  Cyclic GFR-binding peptide
  MOD_RES (2)..(4): Xaa is C or S
SXKXSKVVMVQVEKVKPTRGVVKAIKVSRLD

SEQ ID NO: 65048 - protein, 33 aa, Artificial Sequence
  Cyclic GFR-binding peptide
  MOD_RES (2)..(2): Xaa is C or S
EXKNHQLFNSLQEHQGQHPKIRYYLMTLPEEET

SEQ ID NO: 65049 - protein, 32 aa, Artificial Sequence; identical to SEQ ID NO: 23076
  Cyclic GFR-binding peptide
  MOD_RES (1)..(1): Xaa is C or S

SEQ ID NO: 65050 - protein, 36 aa, Artificial Sequence
  Cyclic GFR-binding peptide
  MOD_RES (2)..(4)..(36): Xaa is C or S
RXGXGEVVMDSMEGIVVKENEDMIQMTINSLETPVX

SEQ ID NO: 65051 - protein, 21 aa, Artificial Sequence
  Cyclic GFR-binding peptide
DVQVEKVVKENEDVKAMKVSR

SEQ ID NO: 65052 - protein, 25 aa, Artificial Sequence
  Cyclic GFR-binding peptide
MNSLQEIKPTKGIYYVIPLPELDQS

SEQ ID NO: 65053 - protein, 35 aa, Artificial Sequence; identical to SEQ ID NO: 16409
  Cyclic GFR-binding peptide
  MOD_RES (31)..(31): Xaa is C or S

SEQ ID NO: 65054 - protein, 32 aa, Artificial Sequence
  Cyclic GFR-binding peptide
  MOD_RES (32)..(32): Xaa is C or S
LRNSLQELKPKKRVYEYYVVPLPEHHVRSPQX

SEQ ID NO: 65055 - protein, 30 aa, Artificial Sequence
  Cyclic GFR-binding peptide
  MOD_RES (29)..(30): Xaa is C or S
VVMSMEGIVKPTRGVMIQITINSLDQPVXX

SEQ ID NO: 65056 - protein, 31 aa, Artificial Sequence
  Cyclic GFR-binding peptide
LRNSLQELKPKKRVYEYYLVTLPEHHVRSPQ

SEQ ID NO: 65057 - protein, 28 aa, Artificial Sequence
  Cyclic GFR-binding peptide
NHQLFVQVEKHQGQHPKIRVKAMKVSRE

SEQ ID NO: 65058 - protein, 29 aa, Artificial Sequence
  Cyclic GFR-binding peptide
HEELRSMEGILKPKKRVYEMIQVTINSHH

SEQ ID NO: 65059 - protein, 33 aa, Artificial Sequence; identical to SEQ ID NO: 16418
  Cyclic GFR-binding peptide
  MOD_RES (27)..(28): Xaa is C or S

SEQ ID NO: 65060 - protein, 36 aa, Artificial Sequence; identical to SEQ ID NO: 16420
  Cyclic GFR-binding peptide
  MOD_RES (31)..(32): Xaa is C or S

SEQ ID NO: 65061 - protein, 37 aa, Artificial Sequence; identical to SEQ ID NO: 16423
  Cyclic GFR-binding peptide
  MOD_RES (31)..(32): Xaa is C or S

SEQ ID NO: 65062 - protein, 29 aa, Artificial Sequence
  Cyclic GFR-binding peptide
  MOD_RES (28)..(28): Xaa is C or S
MNNSLQEIVNSSDDYYLVTLPELKTPAXT

SEQ ID NO: 65063 - protein, 28 aa, Artificial Sequence
  Cyclic GFR-binding peptide
  MOD_RES (27)..(28): Xaa is C or S
DVQVEKVVKENEDVKAMKVSRLETPVXX

SEQ ID NO: 65064 - protein, 28 aa, Artificial Sequence
  Cyclic GFR-binding peptide
HQLFVQVEKHQGQHPKIRVKAMKVSREE

SEQ ID NO: 65065 - protein, 34 aa, Artificial Sequence; identical to SEQ ID NO: 50170
  Cyclic GFR-binding peptide
  MOD_RES (1)..(3)..(34): Xaa is C or S

SEQ ID NO: 65066 - protein, 33 aa, Artificial Sequence
  Cyclic GFR-binding peptide
  MOD_RES (2)..(4): Xaa is C or S
AXAXELHEELRNSLQELKPKKRVYEYYLVTLPE

SEQ ID NO: 65067 - protein, 40 aa, Artificial Sequence
  Cyclic GFR-binding peptide
  MOD_RES (1)..(3)..(40): Xaa is C or S
XKXALHDELTNSLQEFIPKKRVIEYYVVPLPELQVQTPRX

SEQ ID NO: 65068 - protein, 35 aa, Artificial Sequence
  Cyclic GFR-binding peptide
  MOD_RES (2)..(4): Xaa is C or S
HXGXSRVVMNVTAKKIVNSSDDIKRVQVPRLKTPA

SEQ ID NO: 65069 - protein, 24 aa, Artificial Sequence
  Cyclic GFR-binding peptide
ENSLQEVVKDYEDYYLMTLPELET

SEQ ID NO: 65070 - protein, 41 aa, Artificial Sequence
  Cyclic GFR-binding peptide
  MOD_RES (1)..(3)..(35)..(36): Xaa is C or S
XGXSRVVMNVTAKKIVNSSDDIKRVQVPRLKTPAXXPKPVY

SEQ ID NO: 65071 - protein, 26 aa, Artificial Sequence
  Cyclic GFR-binding peptide
VIMNSLQEIKPTKGIYYVIPLPELDQ

SEQ ID NO: 65072 - protein, 28 aa, Artificial Sequence
  Cyclic GFR-binding peptide
VIMVQVEKVKPKRGVVKAIKVSRLAQPV

SEQ ID NO: 65073 - protein, 38 aa, Artificial Sequence; identical to SEQ ID NO: 16451
  Cyclic GFR-binding peptide
  MOD_RES (1)..(33): Xaa is C or S

SEQ ID NO: 65074 - protein, 37 aa, Artificial Sequence
  Cyclic GFR-binding peptide
  MOD_RES (2)..(4)..(36): Xaa is C or S
HXGXSRVVMNSMEGIIVNSSDDMIQVTINSLKTPAXT

SEQ ID NO: 65075 - protein, 35 aa, Artificial Sequence
  Cyclic GFR-binding peptide
  MOD_RES (29)..(30): Xaa is C or S
VMNVQVEKIVNSSDDVKAVKVSRLKTPAXXPKPVY

SEQ ID NO: 65076 - protein, 32 aa, Artificial Sequence
  Cyclic GFR-binding peptide
  MOD_RES (2)..(2): Xaa is C or S
GXGEVVMEVTAKKVVKDYEDIKRMQVPRLETP

SEQ ID NO: 65077 - protein, 35 aa, Artificial Sequence
  Cyclic GFR-binding peptide
  MOD_RES (34)..(34): Xaa is C or S
EELRNSLQELKPKKRVYEYYLVTLPEHHVRSPQXK

SEQ ID NO: 65078 - protein, 35 aa, Artificial Sequence; identical to SEQ ID NO: 23124
  Cyclic GFR-binding peptide
  MOD_RES (1)..(1): Xaa is C or S

SEQ ID NO: 65079 - protein, 30 aa, Artificial Sequence; identical to SEQ ID NO: 23129
  Cyclic GFR-binding peptide

SEQ ID NO: 65080 - protein, 31 aa, Artificial Sequence
  Cyclic GFR-binding peptide
  MOD_RES (1)..(3): Xaa is C or S
XEXKNHQLFNSLQEHQGQHPKIRYYLMTLPE

SEQ ID NO: 65081 - protein, 38 aa, Artificial Sequence; identical to SEQ ID NO: 16470
  Cyclic GFR-binding peptide
  MOD_RES (2)..(4)..(35)..(36): Xaa is C or S

SEQ ID NO: 65082 - protein, 32 aa, Artificial Sequence
  Cyclic GFR-binding peptide
  MOD_RES (2)..(4): Xaa is C or S
SXKXSKVVMSMEGIVKPTRGVMIQITINSLDQ

SEQ ID NO: 65083 - protein, 36 aa, Artificial Sequence; identical to SEQ ID NO: 23134
  Cyclic GFR-binding peptide
  MOD_RES (1)..(1): Xaa is C or S

SEQ ID NO: 65084 - protein, 30 aa, Artificial Sequence
  Cyclic GFR-binding peptide
  MOD_RES (1)..(3): Xaa is C or S
XKXSRVIMVQVEKVKPKRGVVKAIKVSRLA

SEQ ID NO: 65085 - protein, 38 aa, Artificial Sequence
  Cyclic GFR-binding peptide
  MOD_RES (34)..(34): Xaa is C or S
KNHQLFNSLQEHQGQHPKIRYYVMPLPEEETPVXELGE

SEQ ID NO: 65086 - protein, 36 aa, Artificial Sequence
  Cyclic GFR-binding peptide
  MOD_RES (35)..(35): Xaa is C or S
HDELTNSLQEFIPKKRVIEYYLVTLPELQVQTPRXQ

SEQ ID NO: 65087 - protein, 30 aa, Artificial Sequence
  Cyclic GFR-binding peptide
  MOD_RES (26)..(27): Xaa is C or S
VQVEKVKPKRGVVKAIKVSRLAQPVXXPAA

SEQ ID NO: 65088 - protein, 30 aa, Artificial Sequence; identical to SEQ ID NO: 16477
  Cyclic GFR-binding peptide
  MOD_RES (2)..(4): Xaa is C or S

SEQ ID NO: 65089 - protein, 27 aa, Artificial Sequence
  Cyclic GFR-binding peptide
  MOD_RES (26)..(27): Xaa is C or S
VQVEKVVKDYEDVKAMKVSRLETPVXX

SEQ ID NO: 65090 - protein, 25 aa, Artificial Sequence
  Cyclic GFR-binding peptide
MSMEGIVKPTRGVMIQITINSLDQP

SEQ ID NO: 65091 - protein, 28 aa, Artificial Sequence
  Cyclic GFR-binding peptide
  MOD_RES (1)..(1): Xaa is C or S
XSKVVMVQVEKVKPTRGVVKAIKVSRLD

SEQ ID NO: 65092 - protein, 37 aa, Artificial Sequence; identical to SEQ ID NO: 23144
  Cyclic GFR-binding peptide
  MOD_RES (1)..(35): Xaa is C or S

SEQ ID NO: 65093 - protein, 30 aa, Artificial Sequence
  Cyclic GFR-binding peptide
  MOD_RES (1)..(1): Xaa is C or S
XSKVIMVQVEKIKPTKGIVKAIKVSRLDQS

SEQ ID NO: 65094 - protein, 36 aa, Artificial Sequence
  Cyclic GFR-binding peptide
  MOD_RES (2)..(2): Xaa is C or S
KXALHDELTNSLQEFIPKKRVIEYYVVPLPELQVQT

SEQ ID NO: 65095 - protein, 30 aa, Artificial Sequence
  Cyclic GFR-binding peptide
EVVMEVTAKKVVKDYEDIKRMQVPRLETPV

SEQ ID NO: 65096 - protein, 29 aa, Artificial Sequence
  Cyclic GFR-binding peptide
NSLQELKPKKRVYEYYLVTLPEHHVRSPQ

SEQ ID NO: 65097 - protein, 40 aa, Artificial Sequence; identical to SEQ ID NO: 23152
  Cyclic GFR-binding peptide
  MOD_RES (1)..(35): Xaa is C or S

SEQ ID NO: 65098 - protein, 37 aa, Artificial Sequence; identical to SEQ ID NO: 16491
  Cyclic GFR-binding peptide
  MOD_RES (2)..(34): Xaa is C or S

SEQ ID NO: 65099 - protein, 32 aa, Artificial Sequence; identical to SEQ ID NO: 16494
  Cyclic GFR-binding peptide
  MOD_RES (2)..(4): Xaa is C or S

SEQ ID NO: 65100 - protein, 39 aa, Artificial Sequence
  Cyclic GFR-binding peptide
  MOD_RES (2)..(33)..(34): Xaa is C or S
KXSKVVMVQVEKVKPTRGVVKAIKVSRLDQPVXXPSASA

SEQ ID NO: 65101 - protein, 27 aa, Artificial Sequence
  Cyclic GFR-binding peptide
EELRNSLQELKPKKRVYEYYLVTLPEH

SEQ ID NO: 65102 - protein, 42 aa, Artificial Sequence; identical to SEQ ID NO: 16500
  Cyclic GFR-binding peptide
  MOD_RES (2)..(4)..(36): Xaa is C or S

SEQ ID NO: 65103 - protein, 31 aa, Artificial Sequence
  Cyclic GFR-binding peptide
  MOD_RES (30)..(31): Xaa is C or S
VVMEVQVEKVVKDYEDVKAMKVSRLETPVXX

SEQ ID NO: 65104 - protein, 28 aa, Artificial Sequence
  Cyclic GFR-binding peptide
DELTNSLQEFIPKKRVIEYYLVTLPELQ

SEQ ID NO: 65105 - protein, 21 aa, Artificial Sequence
  Cyclic GFR-binding peptide
NVTAKKIVNSSDDIKRVQVPR

SEQ ID NO: 65106 - protein, 28 aa, Artificial Sequence
  Cyclic GFR-binding peptide
  MOD_RES (26)..(27): Xaa is C or S
VQVEKVVKDYEDVKAMKVSRLETPVXXA

SEQ ID NO: 65107 - protein, 40 aa, Artificial Sequence
  Cyclic GFR-binding peptide
  MOD_RES (2)..(4)..(36): Xaa is C or S
HXGXSRVVMNVTAKKIVNSSDDIKRVQVPRLKTPAXTPKT

SEQ ID NO: 65108 - protein, 27 aa, Artificial Sequence
  Cyclic GFR-binding peptide
GEVVMDVTAKKVVKENEDIKRMQVPRL

SEQ ID NO: 65109 - protein, 40 aa, Artificial Sequence
  Cyclic GFR-binding peptide
  MOD_RES (1)..(35): Xaa is C or S
XKNHQLFNSLQEHQGQHPKIRYYLMTLPEEETPVXELGED

SEQ ID NO: 65110 - protein, 31 aa, Artificial Sequence
  Cyclic GFR-binding peptide
  MOD_RES (27)..(28): Xaa is C or S
NVQVEKIVNSSDDVKAVKVSRLQTPAXXPKP

SEQ ID NO: 65111 - protein, 29 aa, Artificial Sequence
  Cyclic GFR-binding peptide
KVIMNSLQEIKPTKGIYYLITLPELDQSV

SEQ ID NO: 65112 - protein, 31 aa, Artificial Sequence
  Cyclic GFR-binding peptide
  MOD_RES (26)..(27): Xaa is C or S
VQVEKVKPKRGVVKAIKVSRLAQPVXXPAAS

SEQ ID NO: 65113 - protein, 36 aa, Artificial Sequence; identical to SEQ ID NO: 16520
  Cyclic GFR-binding peptide
  MOD_RES (2)..(33)..(34): Xaa is C or S

SEQ ID NO: 65114 - protein, 34 aa, Artificial Sequence
  Cyclic GFR-binding peptide
  MOD_RES (30)..(31): Xaa is C or S
KVVMVQVEKVKPTRGVVKAIKVSRLDQPVXXPSA

SEQ ID NO: 65115 - protein, 23 aa, Artificial Sequence
  Cyclic GFR-binding peptide
NSLQEFIPKKRVIEYYLVTLPEL

SEQ ID NO: 65116 - protein, 37 aa, Artificial Sequence
  Cyclic GFR-binding peptide
  MOD_RES (2)..(33)..(34): Xaa is C or S
KXSKVVMVTAKKVKPTRGVIKRIQVPRLDQPVXXPSA

SEQ ID NO: 65117 - protein, 33 aa, Artificial Sequence; identical to SEQ ID NO: 23183
  Cyclic GFR-binding peptide
  MOD_RES (2)..(4): Xaa is C or S

SEQ ID NO: 65118 - protein, 42 aa, Artificial Sequence
  Cyclic GFR-binding peptide
  MOD_RES (2)..(4)..(36)..(37): Xaa is C or S
RXGXGEVVMDVQVEKVVKENEDVKAMKVSRLETPVXXAKPIK

SEQ ID NO: 65119 - protein, 35 aa, Artificial Sequence
  Cyclic GFR-binding peptide
  MOD_RES (31)..(32): Xaa is C or S
SRVIMSMEGIVKPKRGVMIQITINSLAQPVXXPAA

SEQ ID NO: 65120 - protein, 26 aa, Artificial Sequence
  Cyclic GFR-binding peptide
VIMVTAKKVKPKRGVIKRIQVPRLAQ

SEQ ID NO: 65121 - protein, 37 aa, Artificial Sequence; identical to SEQ ID NO: 16533
  Cyclic GFR-binding peptide
  MOD_RES (31)..(32): Xaa is C or S

SEQ ID NO: 65122 - protein, 41 aa, Artificial Sequence
  Cyclic GFR-binding peptide
  MOD_RES (2)..(4)..(36)..(37): Xaa is C or S
RXGXGEVVMESMEGIVVKDYEDMIQMTINSLETPVXXAKPI

SEQ ID NO: 65123 - protein, 33 aa, Artificial Sequence
  Cyclic GFR-binding peptide
  MOD_RES (32)..(33): Xaa is C or S
GEVVMDVTAKKVVKENEDIKRMQVPRLETPVXX

SEQ ID NO: 65124 - protein, 30 aa, Artificial Sequence
  Cyclic GFR-binding peptide
NHQLFNSLQEHQGQHPKIRYYVMPLPEEET

SEQ ID NO: 65125 - protein, 35 aa, Artificial Sequence
  Cyclic GFR-binding peptide
  MOD_RES (2)..(34)..(35): Xaa is C or S
GXARVVMNVQVEKIVNSSDDVKAVKVSRLQTPAXX

SEQ ID NO: 65126 - protein, 33 aa, Artificial Sequence
  Cyclic GFR-binding peptide
  MOD_RES (1)..(32)..(33): Xaa is C or S
XSKVVMSMEGIVKPTRGVMIQITINSLDQPVXX

SEQ ID NO: 65127 - protein, 33 aa, Artificial Sequence
  Cyclic GFR-binding peptide
  MOD_RES (27)..(28): Xaa is C or S
NVQVEKIVNSSDDVKAVKVSRLKTPAXXPKPVY

SEQ ID NO: 65128 - protein, 37 aa, Artificial Sequence; identical to SEQ ID NO: 16546
  Cyclic GFR-binding peptide
  MOD_RES (1)..(3)..(34)..(35): Xaa is C or S

SEQ ID NO: 65129 - protein, 23 aa, Artificial Sequence
  Cyclic GFR-binding peptide
DNSLQEVVKENEDYYLMTLPELE

SEQ ID NO: 65130 - protein, 37 aa, Artificial Sequence
  Cyclic GFR-binding peptide
  MOD_RES (1)..(1): Xaa is C or S
XELHEELRNSLQELKPKKRVYEYYLVTLPEHHVRSPQ

SEQ ID NO: 65131 - protein, 33 aa, Artificial Sequence; identical to SEQ ID NO: 16553
  Cyclic GFR-binding peptide
  MOD_RES (28)..(29): Xaa is C or S

SEQ ID NO: 65132 - protein, 39 aa, Artificial Sequence
  Cyclic GFR-binding peptide
  MOD_RES (1)..(3)..(35)..(36): Xaa is C or S
XGXARVVMNVTAKKIVNSSDDIKRVQVPRLQTPAXXPKP

SEQ ID NO: 65133 - protein, 41 aa, Artificial Sequence; identical to SEQ ID NO: 23194
  Cyclic GFR-binding peptide
  MOD_RES (2)..(39): Xaa is C or S

SEQ ID NO: 65134 - protein, 37 aa, Artificial Sequence
  Cyclic GFR-binding peptide
  MOD_RES (2)..(34): Xaa is C or S
GXSRVVMNVQVEKIVNSSDDVKAVKVSRLKTPAXTPK

SEQ ID NO: 65135 - protein, 35 aa, Artificial Sequence
  Cyclic GFR-binding peptide
ALHDELTNSLQEFIPKKRVIEYYVVPLPELQVQTP

SEQ ID NO: 65136 - protein, 38 aa, Artificial Sequence
  Cyclic GFR-binding peptide
  MOD_RES (1)..(3)..(35)..(36): Xaa is C or S
XGXSRVVMNVTAKKIVNSSDDIKRVQVPRLKTPAXXPK

SEQ ID NO: 65137 - protein, 28 aa, Artificial Sequence
  Cyclic GFR-binding peptide
NHQLFNSLQEHQGQHPKIRYYVMPLPEE

SEQ ID NO: 65138 - protein, 35 aa, Artificial Sequence; identical to SEQ ID NO: 16560
  Cyclic GFR-binding peptide
  MOD_RES (2)..(34)..(35): Xaa is C or S

SEQ ID NO: 65139 - protein, 25 aa, Artificial Sequence
  Cyclic GFR-binding peptide
MEVQVEKVVKDYEDVKAMKVSRLET

SEQ ID NO: 65140 - protein, 34 aa, Artificial Sequence
  Cyclic GFR-binding peptide
  MOD_RES (1)..(3): Xaa is C or S
XGXGEVVMEVQVEKVVKDYEDVKAMKVSRLETPV

SEQ ID NO: 65141 - protein, 25 aa, Artificial Sequence
  Cyclic GFR-binding peptide
MVTAKKIKPTKGIIKRIQVPRLDQS

SEQ ID NO: 65142 - protein, 34 aa, Artificial Sequence; identical to SEQ ID NO: 50276
  Cyclic GFR-binding peptide
  MOD_RES (28)..(29): Xaa is C or S

SEQ ID NO: 65143 - protein, 27 aa, Artificial Sequence
  Cyclic GFR-binding peptide
LRSMEGILKPKKRVYEMIQVTINSHHV

SEQ ID NO: 65144 - protein, 29 aa, Artificial Sequence
  Cyclic GFR-binding peptide
  MOD_RES (27)..(28): Xaa is C or S
DSMEGIVVKENEDMIQMTINSLETPVXXA

SEQ ID NO: 65145 - protein, 30 aa, Artificial Sequence
  Cyclic GFR-binding peptide
  MOD_RES (27)..(28): Xaa is C or S
DVTAKKVVKENEDIKRMQVPRLETPVXXAK

SEQ ID NO: 65146 - protein, 38 aa, Artificial Sequence
  Cyclic GFR-binding peptide
  MOD_RES (1)..(3)..(35)..(36): Xaa is C or S
XGXARVVMNVTAKKIVNSSDDIKRVQVPRLQTPAXXPK

SEQ ID NO: 65147 - protein, 29 aa, Artificial Sequence
  Cyclic GFR-binding peptide
GEVVMENSLQEVVKDYEDYYVMPLPELET

SEQ ID NO: 65148 - protein, 22 aa, Artificial Sequence
  Cyclic GFR-binding peptide
NSLQEVKPTRGVYYVIPLPELD

SEQ ID NO: 65149 - protein, 30 aa, Artificial Sequence
  Cyclic GFR-binding peptide
  MOD_RES (26)..(27): Xaa is C or S
VTAKKVVKENEDIKRMQVPRLETPVXXAKP

SEQ ID NO: 65150 - protein, 31 aa, Artificial Sequence; identical to SEQ ID NO: 16577
  Cyclic GFR-binding peptide
  MOD_RES (26)..(27): Xaa is C or S

SEQ ID NO: 65151 - protein, 29 aa, Artificial Sequence
  Cyclic GFR-binding peptide
  MOD_RES (2)..(2): Xaa is C or S
KXSKVVMNSLQEVKPTRGVYYVIPLPELD

SEQ ID NO: 65152 - protein, 31 aa, Artificial Sequence
  Cyclic GFR-binding peptide
  MOD_RES (1)..(3): Xaa is C or S
XGXSRVVMNVTAKKIVNSSDDIKRVQVPRLK

SEQ ID NO: 65153 - protein, 33 aa, Artificial Sequence; identical to SEQ ID NO: 50285
  Cyclic GFR-binding peptide
  MOD_RES (1)..(3): Xaa is C or S

SEQ ID NO: 65154 - protein, 38 aa, Artificial Sequence; identical to SEQ ID NO: 16582
  Cyclic GFR-binding peptide
  MOD_RES (32)..(32): Xaa is C or S

SEQ ID NO: 65155 - protein, 35 aa, Artificial Sequence; identical to SEQ ID NO: 16584
  Cyclic GFR-binding peptide
  MOD_RES (2)..(34)..(35): Xaa is C or S

SEQ ID NO: 65156 - protein, 30 aa, Artificial Sequence; identical to SEQ ID NO: 16585
  Cyclic GFR-binding peptide
  MOD_RES (29)..(30): Xaa is C or S

SEQ ID NO: 65157 - protein, 32 aa, Artificial Sequence; identical to SEQ ID NO: 16588
  Cyclic GFR-binding peptide
  MOD_RES (32)..(32): Xaa is C or S

SEQ ID NO: 65158 - protein, 22 aa, Artificial Sequence
  Cyclic GFR-binding peptide
VTAKKVKPTRGVIKRIQVPRLD

SEQ ID NO: 65159 - protein, 35 aa, Artificial Sequence
  Cyclic GFR-binding peptide
  MOD_RES (30)..(31): Xaa is C or S
KVIMSMEGIIKPTKGIMIQITINSLDQSVXXPSAS

SEQ ID NO: 65160 - protein, 30 aa, Artificial Sequence
  Cyclic GFR-binding peptide
  MOD_RES (27)..(28): Xaa is C or S
MVQVEKVKPKRGVVKAIKVSRLAQPVXXPA

SEQ ID NO: 65161 - protein, 30 aa, Artificial Sequence; identical to SEQ ID NO: 16593
  Cyclic GFR-binding peptide
  MOD_RES (27)..(28): Xaa is C or S

SEQ ID NO: 65162 - protein, 39 aa, Artificial Sequence; identical to SEQ ID NO: 16594
  Cyclic GFR-binding peptide
  MOD_RES (1)..(33)..(34): Xaa is C or S

SEQ ID NO: 65163 - protein, 34 aa, Artificial Sequence
  Cyclic GFR-binding peptide
  MOD_RES (29)..(30): Xaa is C or S
VVMSMEGIVKPTRGVMIQITINSLDQPVXXPSAS

SEQ ID NO: 65164 - protein, 26 aa, Artificial Sequence
  Cyclic GFR-binding peptide
  MOD_RES (1)..(1): Xaa is C or S
XSKVIMNSLQEIKPTKGIYYLITLPE

SEQ ID NO: 65165 - protein, 34 aa, Artificial Sequence
  Cyclic GFR-binding peptide
  MOD_RES (32)..(32): Xaa is C or S
HQLFNSLQEHQGQHPKIRYYVMPLPEEETPVXEL

SEQ ID NO: 65166 - protein, 33 aa, Artificial Sequence
  Cyclic GFR-binding peptide
  MOD_RES (30)..(30): Xaa is C or S
VVMNVTAKKIVNSSDDIKRVQVPRLKTPAXTPK

SEQ ID NO: 65167 - protein, 27 aa, Artificial Sequence
  Cyclic GFR-binding peptide
VVMDNSLQEVVKENEDYYLMTLPELET

SEQ ID NO: 65168 - protein, 33 aa, Artificial Sequence; identical to SEQ ID NO: 23232
  Cyclic GFR-binding peptide
  MOD_RES (2)..(2): Xaa is C or S

SEQ ID NO: 65169 - protein, 29 aa, Artificial Sequence
  Cyclic GFR-binding peptide
  MOD_RES (2)..(2): Xaa is C or S
GXSRVVMNNSLQEIVNSSDDYYVVPLPEL

SEQ ID NO: 65170 - protein, 33 aa, Artificial Sequence; identical to SEQ ID NO: 23233
  Cyclic GFR-binding peptide

SEQ ID NO: 65171 - protein, 35 aa, Artificial Sequence
  Cyclic GFR-binding peptide
  MOD_RES (2)..(34)..(35): Xaa is C or S
GXSRVVMNVQVEKIVNSSDDVKAVKVSRLKTPAXX

SEQ ID NO: 65172 - protein, 42 aa, Artificial Sequence
  Cyclic GFR-binding peptide
  MOD_RES (2)..(39): Xaa is C or S
AXELHEELRNSLQELKPKKRVYEYYVVPLPEHHVRSPQXKVS

SEQ ID NO: 65173 - protein, 30 aa, Artificial Sequence; identical to SEQ ID NO: 16605
  Cyclic GFR-binding peptide
  MOD_RES (26)..(27): Xaa is C or S

SEQ ID NO: 65174 - protein, 26 aa, Artificial Sequence
  Cyclic GFR-binding peptide
VIMNSLQEVKPKRGVYYLITLPELAQ

SEQ ID NO: 65175 - protein, 24 aa, Artificial Sequence
  Cyclic GFR-binding peptide
VIMVTAKKVKPKRGVIKRIQVPRL

SEQ ID NO: 65176 - protein, 31 aa, Artificial Sequence; identical to SEQ ID NO: 16613
  Cyclic GFR-binding peptide
  MOD_RES (27)..(28): Xaa is C or S

SEQ ID NO: 65177 - protein, 31 aa, Artificial Sequence
  Cyclic GFR-binding peptide
  MOD_RES (26)..(27): Xaa is C or S
VTAKKVVKENEDIKRMQVPRLETPVXXAKPI

SEQ ID NO: 65178 - protein, 36 aa, Artificial Sequence; identical to SEQ ID NO: 16615
  Cyclic GFR-binding peptide
  MOD_RES (1)..(3)..(35)..(36): Xaa is C or S

SEQ ID NO: 65179 - protein, 23 aa, Artificial Sequence
  Cyclic GFR-binding peptide
VIMSMEGIIKPTKGIMIQITINS

SEQ ID NO: 65180 - protein, 22 aa, Artificial Sequence
  Cyclic GFR-binding peptide
VTAKKVVKDYEDIKRMQVPRLE

SEQ ID NO: 65181 - protein, 34 aa, Artificial Sequence
  Cyclic GFR-binding peptide
  MOD_RES (30)..(31): Xaa is C or S
RVIMVTAKKVKPKRGVIKRIQVPRLAQPVXXPAA

SEQ ID NO: 65182 - protein, 24 aa, Artificial Sequence
  Cyclic GFR-binding peptide
VQVEKFIPKKRVIEVKAVKVSRLQ

SEQ ID NO: 65183 - protein, 24 aa, Artificial Sequence
  Cyclic GFR-binding peptide
VIMNSLQEVKPKRGVYYLITLPEL

SEQ ID NO: 65184 - protein, 37 aa, Artificial Sequence; identical to SEQ ID NO: 16634
  Cyclic GFR-binding peptide
  MOD_RES (2)..(4)..(36): Xaa is C or S

SEQ ID NO: 65185 - protein, 25 aa, Artificial Sequence
  Cyclic GFR-binding peptide
MDNSLQEVVKENEDYYLMTLPELET

SEQ ID NO: 65186 - protein, 35 aa, Artificial Sequence
  Cyclic GFR-binding peptide
  MOD_RES (29)..(30): Xaa is C or S
VMNSMEGIIVNSSDDMIQVTINSLKTPAXXPKPVY

SEQ ID NO: 65187 - protein, 39 aa, Artificial Sequence; identical to SEQ ID NO: 23255
  Cyclic GFR-binding peptide
  MOD_RES (1)..(3): Xaa is C or S

SEQ ID NO: 65188 - protein, 28 aa, Artificial Sequence
  Cyclic GFR-binding peptide
EVVMDNSLQEVVKENEDYYVMPLPELET

SEQ ID NO: 65189 - protein, 32 aa, Artificial Sequence
  Cyclic GFR-binding peptide
  MOD_RES (26)..(27): Xaa is C or S
VQVEKVKPTRGVVKAIKVSRLDQPVXXPSASA

SEQ ID NO: 65190 - protein, 22 aa, Artificial Sequence
  Cyclic GFR-binding peptide
NSLQEVVKDYEDYYVMPLPELE

SEQ ID NO: 65191 - protein, 30 aa, Artificial Sequence
  Cyclic GFR-binding peptide
  MOD_RES (30)..(30): Xaa is C or S
KVIMVQVEKIKPTKGIVKAIKVSRLDQSVX

SEQ ID NO: 65192 - protein, 33 aa, Artificial Sequence
  Cyclic GFR-binding peptide
  MOD_RES (2)..(4): Xaa is C or S
RXGXGEVVMEVTAKKVVKDYEDIKRMQVPRLET

SEQ ID NO: 65193 - protein, 35 aa, Artificial Sequence; identical to SEQ ID NO: 23260
  Cyclic GFR-binding peptide

SEQ ID NO: 65194 - protein, 30 aa, Artificial Sequence; identical to SEQ ID NO: 16651
  Cyclic GFR-binding peptide
  MOD_RES (1)..(1): Xaa is C or S

SEQ ID NO: 65195 - protein, 35 aa, Artificial Sequence
  Cyclic GFR-binding peptide
  MOD_RES (1)..(3)..(34)..(35): Xaa is C or S
XKXSRVIMSMEGIVKPKRGVMIQITINSLAQPVXX

SEQ ID NO: 65196 - protein, 37 aa, Artificial Sequence; identical to SEQ ID NO: 16652
  Cyclic GFR-binding peptide
  MOD_RES (2)..(4)..(36)..(37): Xaa is C or S

SEQ ID NO: 65197 - protein, 35 aa, Artificial Sequence; identical to SEQ ID NO: 16658
  Cyclic GFR-binding peptide
  MOD_RES (2)..(34)..(35): Xaa is C or S

SEQ ID NO: 65198 - protein, 31 aa, Artificial Sequence; identical to SEQ ID NO: 16660
  Cyclic GFR-binding peptide
  MOD_RES (2)..(4): Xaa is C or S

SEQ ID NO: 65199 - protein, 22 aa, Artificial Sequence
  Cyclic GFR-binding peptide
IMNSLQEVKPKRGVYYLITLPE

SEQ ID NO: 65200 - protein, 34 aa, Artificial Sequence
  Cyclic GFR-binding peptide
  MOD_RES (28)..(29): Xaa is C or S
IMSMEGIIKPTKGIMIQITINSLDQSVXXPSASA

SEQ ID NO: 65201 - protein, 31 aa, Artificial Sequence
  Cyclic GFR-binding peptide
  MOD_RES (31)..(31): Xaa is C or S
EVVMDVTAKKVVKENEDIKRMQVPRLETPVX

SEQ ID NO: 65202 - protein, 39 aa, Artificial Sequence; identical to SEQ ID NO: 23268
  Cyclic GFR-binding peptide
  MOD_RES (36)..(36): Xaa is C or S

SEQ ID NO: 65203 - protein, 34 aa, Artificial Sequence
  Cyclic GFR-binding peptide
  MOD_RES (32)..(32): Xaa is C or S
SRVVMNVQVEKIVNSSDDVKAVKVSRLKTPAXTP

SEQ ID NO: 65204 - protein, 26 aa, Artificial Sequence
  Cyclic GFR-binding peptide
NVQVEKIVNSSDDVKAVKVSRLKTPA

SEQ ID NO: 65205 - protein, 32 aa, Artificial Sequence; identical to SEQ ID NO: 23272
  Cyclic GFR-binding peptide
  MOD_RES (28)..(28): Xaa is C or S

SEQ ID NO: 65206 - protein, 40 aa, Artificial Sequence; identical to SEQ ID NO: 23273
  Cyclic GFR-binding peptide
  MOD_RES (36)..(36): Xaa is C or S

SEQ ID NO: 65207 - protein, 30 aa, Artificial Sequence
  Cyclic GFR-binding peptide
  MOD_RES (29)..(30): Xaa is C or S
VIMVTAKKVKPKRGVIKRIQVPRLAQPVXX

SEQ ID NO: 65208 - protein, 34 aa, Artificial Sequence; identical to SEQ ID NO: 16680
  Cyclic GFR-binding peptide
  MOD_RES (28)..(29): Xaa is C or S

SEQ ID NO: 65209 - protein, 35 aa, Artificial Sequence
  Cyclic GFR-binding peptide
  MOD_RES (32)..(33): Xaa is C or S
SRVVMNSMEGIIVNSSDDMIQVTINSLKTPAXXPK

SEQ ID NO: 65210 - protein, 37 aa, Artificial Sequence
  Cyclic GFR-binding peptide
  MOD_RES (1)..(32)..(33): Xaa is C or S
XSKVIMVTAKKIKPTKGIIKRIQVPRLDQSVXXPSAS

SEQ ID NO: 65211 - protein, 23 aa, Artificial Sequence
  Cyclic GFR-binding peptide
MVQVEKIKPTKGIVKAIKVSRLD

SEQ ID NO: 65212 - protein, 28 aa, Artificial Sequence
  Cyclic GFR-binding peptide
VMNNSLQEIVNSSDDYYVVPLPELKTPA

SEQ ID NO: 65213 - protein, 39 aa, Artificial Sequence
  Cyclic GFR-binding peptide
  MOD_RES (1)..(3)..(35)..(36): Xaa is C or S
XGXSRVVMNVTAKKIVNSSDDIKRVQVPRLKTPAXXPKP

SEQ ID NO: 65214 - protein, 33 aa, Artificial Sequence
  Cyclic GFR-binding peptide
  MOD_RES (32)..(33): Xaa is C or S
SRVVMNVTAKKIVNSSDDIKRVQVPRLKTPAXX

SEQ ID NO: 65215 - protein, 31 aa, Artificial Sequence
  Cyclic GFR-binding peptide
DELTNSLQEFIPKKRVIEYYVVPLPELQVQT

SEQ ID NO: 65216 - protein, 34 aa, Artificial Sequence
  Cyclic GFR-binding peptide
  MOD_RES (1)..(32)..(33): Xaa is C or S
XSRVIMVQVEKVKPKRGVVKAIKVSRLAQPVXXP

SEQ ID NO: 65217 - protein, 23 aa, Artificial Sequence
  Cyclic GFR-binding peptide
VQVEKVVKENEDVKAMKVSRLET

SEQ ID NO: 65218 - protein, 30 aa, Artificial Sequence
  Cyclic GFR-binding peptide
TNSLQEFIPKKRVIEYYVVPLPELQVQTPR

SEQ ID NO: 65219 - protein, 37 aa, Artificial Sequence
  Cyclic GFR-binding peptide
  MOD_RES (1)..(3)..(34)..(35): Xaa is C or S
XKXSKVVMVQVEKVKPTRGVVKAIKVSRLDQPVXXPS

SEQ ID NO: 65220 - protein, 29 aa, Artificial Sequence
  Cyclic GFR-binding peptide
LTNSLQEFIPKKRVIEYYLVTLPELQVQT

SEQ ID NO: 65221 - protein, 32 aa, Artificial Sequence
  Cyclic GFR-binding peptide
  MOD_RES (30)..(31): Xaa is C or S
RVIMSMEGIVKPKRGVMIQITINSLAQPVXXP

SEQ ID NO: 65222 - protein, 28 aa, Artificial Sequence
  Cyclic GFR-binding peptide
RSMEGILKPKKRVYEMIQVTINSHHVRS

SEQ ID NO: 65223 - protein, 35 aa, Artificial Sequence; identical to SEQ ID NO: 23292
  Cyclic GFR-binding peptide
  MOD_RES (2)..(4): Xaa is C or S

SEQ ID NO: 65224 - protein, 30 aa, Artificial Sequence; identical to SEQ ID NO: 16704
  Cyclic GFR-binding peptide
  MOD_RES (2)..(2): Xaa is C or S

SEQ ID NO: 65225 - protein, 32 aa, Artificial Sequence; identical to SEQ ID NO: 16707
  Cyclic GFR-binding peptide
  MOD_RES (32)..(32): Xaa is C or S

SEQ ID NO: 65226 - protein, 22 aa, Artificial Sequence
  Cyclic GFR-binding peptide
IMSMEGIVKPKRGVMIQITINS

SEQ ID NO: 65227 - protein, 35 aa, Artificial Sequence
  Cyclic GFR-binding peptide
  MOD_RES (2)..(2): Xaa is C or S
EXKNHQLFNSLQEHQGQHPKIRYYVMPLPEEETPV

SEQ ID NO: 65228 - protein, 30 aa, Artificial Sequence
  Cyclic GFR-binding peptide
  MOD_RES (2)..(4): Xaa is C or S
SXKXSKVIMVQVEKIKPTKGIVKAIKVSRL

SEQ ID NO: 65229 - protein, 35 aa, Artificial Sequence; identical to SEQ ID NO: 23307
  Cyclic GFR-binding peptide
  MOD_RES (2)..(2): Xaa is C or S

SEQ ID NO: 65230 - protein, 31 aa, Artificial Sequence
  Cyclic GFR-binding peptide
  MOD_RES (2)..(4): Xaa is C or S
RXGXGEVVMEVTAKKVVKDYEDIKRMQVPRL

SEQ ID NO: 65231 - protein, 34 aa, Artificial Sequence; identical to SEQ ID NO: 16713
  Cyclic GFR-binding peptide
  MOD_RES (31)..(32): Xaa is C or S

SEQ ID NO: 65232 - protein, 27 aa, Artificial Sequence
  Cyclic GFR-binding peptide
IMVQVEKVKPKRGVVKAIKVSRLAQPV

SEQ ID NO: 65233 - protein, 39 aa, Artificial Sequence
  Cyclic GFR-binding peptide
  MOD_RES (2)..(4)..(36): Xaa is C or S
HXGXSRVVMNVQVEKIVNSSDDVKAVKVSRLKTPAXTPK

SEQ ID NO: 65234 - protein, 36 aa, Artificial Sequence
  Cyclic GFR-binding peptide
  MOD_RES (31)..(32): Xaa is C or S
RVVMNSMEGIIVNSSDDMIQVTINSLQTPAXXPKPV

SEQ ID NO: 65235 - protein, 38 aa, Artificial Sequence
  Cyclic GFR-binding peptide
  MOD_RES (2)..(34): Xaa is C or S
GXSRVVMNVTAKKIVNSSDDIKRVQVPRLKTPAXTPKT

SEQ ID NO: 65236 - protein, 39 aa, Artificial Sequence
  Cyclic GFR-binding peptide
  MOD_RES (34)..(34): Xaa is C or S
KNHQLFNSLQEHQGQHPKIRYYLMTLPEEETPVXELGED

SEQ ID NO: 65237 - protein, 31 aa, Artificial Sequence; identical to SEQ ID NO: 16722
  Cyclic GFR-binding peptide
  MOD_RES (30)..(31): Xaa is C or S

SEQ ID NO: 65238 - protein, 32 aa, Artificial Sequence
  Cyclic GFR-binding peptide
  MOD_RES (31)..(32): Xaa is C or S
EVVMDVTAKKVVKENEDIKRMQVPRLETPVXX

SEQ ID NO: 65239 - protein, 30 aa, Artificial Sequence; identical to SEQ ID NO: 16725
  Cyclic GFR-binding peptide

SEQ ID NO: 65240 - protein, 34 aa, Artificial Sequence; identical to SEQ ID NO: 23321
  Cyclic GFR-binding peptide
  MOD_RES (1)..(1): Xaa is C or S

SEQ ID NO: 65241 - protein, 32 aa, Artificial Sequence
  Cyclic GFR-binding peptide
  MOD_RES (1)..(3): Xaa is C or S
XAXELHEELRNSLQELKPKKRVYEYYLVTLPE

SEQ ID NO: 65242 - protein, 34 aa, Artificial Sequence
  Cyclic GFR-binding peptide
  MOD_RES (1)..(33)..(34): Xaa is C or S
XGEVVMEVQVEKVVKDYEDVKAMKVSRLETPVXX

SEQ ID NO: 65243 - protein, 28 aa, Artificial Sequence
  Cyclic GFR-binding peptide
  MOD_RES (26)..(27): Xaa is C or S
VTAKKVVKDYEDIKRMQVPRLETPVXXA

SEQ ID NO: 65244 - protein, 36 aa, Artificial Sequence; identical to SEQ ID NO: 11325
  Cyclic GFR-binding peptide
  MOD_RES (2)..(4)..(36): Xaa is C or S

SEQ ID NO: 65245 - protein, 35 aa, Artificial Sequence
  Cyclic GFR-binding peptide
  MOD_RES (2)..(34)..(35): Xaa is C or S
GXGEVVMEVQVEKVVKDYEDVKAMKVSRLETPVXX

SEQ ID NO: 65246 - protein, 31 aa, Artificial Sequence; identical to SEQ ID NO: 21373
  Cyclic GFR-binding peptide
  MOD_RES (30)..(30): Xaa is C or S

SEQ ID NO: 65247 - protein, 39 aa, Artificial Sequence
  Cyclic GFR-binding peptide
  MOD_RES (1)..(3)..(35)..(36): Xaa is C or S
XGXSRVVMNVQVEKIVNSSDDVKAVKVSRLKTPAXXPKP

SEQ ID NO: 65248 - protein, 34 aa, Artificial Sequence
  Cyclic GFR-binding peptide
  MOD_RES (1)..(3)..(34): Xaa is C or S
XKXSRVIMVQVEKVKPKRGVVKAIKVSRLAQPVX

SEQ ID NO: 65249 - protein, 32 aa, Artificial Sequence; identical to SEQ ID NO: 11335
  Cyclic GFR-binding peptide
  MOD_RES (26)..(27): Xaa is C or S

SEQ ID NO: 65250 - protein, 35 aa, Artificial Sequence; identical to SEQ ID NO: 11337
  Cyclic GFR-binding peptide
  MOD_RES (1)..(33)..(34): Xaa is C or S

SEQ ID NO: 65251 - protein, 34 aa, Artificial Sequence; identical to SEQ ID NO: 21376
  Cyclic GFR-binding peptide
  MOD_RES (34)..(34): Xaa is C or S

SEQ ID NO: 65252 - protein, 30 aa, Artificial Sequence
  Cyclic GFR-binding peptide
  MOD_RES (28)..(29): Xaa is C or S
MNVTAKKIVNSSDDIKRVQVPRLQTPAXXP

SEQ ID NO: 65253 - protein, 24 aa, Artificial Sequence
  Cyclic GFR-binding peptide
KVIMNSLQEIKPTKGIYYLITLPE

SEQ ID NO: 65254 - protein, 38 aa, Artificial Sequence
  Cyclic GFR-binding peptide
  MOD_RES (2)..(4)..(36): Xaa is C or S
HXGXSRVVMNSMEGIIVNSSDDMIQVTINSLKTPAXTP

SEQ ID NO: 65255 - protein, 32 aa, Artificial Sequence; identical to SEQ ID NO: 11343
  Cyclic GFR-binding peptide
  MOD_RES (26)..(27): Xaa is C or S

SEQ ID NO: 65256 - protein, 40 aa, Artificial Sequence; identical to SEQ ID NO: 11344
  Cyclic GFR-binding peptide
  MOD_RES (2)..(34)..(35): Xaa is C or S

SEQ ID NO: 65257 - protein, 26 aa, Artificial Sequence
  Cyclic GFR-binding peptide
VMNNSLQEIVNSSDDYYLVTLPELQT

SEQ ID NO: 65258 - protein, 41 aa, Artificial Sequence
  Cyclic GFR-binding peptide
  MOD_RES (2)..(4)..(38): Xaa is C or S
RXEXKNHQLFNSLQEHQGQHPKIRYYVMPLPEEETPVXELG

SEQ ID NO: 65259 - protein, 38 aa, Artificial Sequence
  Cyclic GFR-binding peptide
  MOD_RES (1)..(3)..(37): Xaa is C or S
XEXKNHQLFNSLQEHQGQHPKIRYYVMPLPEEETPVXE

SEQ ID NO: 65260 - protein, 36 aa, Artificial Sequence
  Cyclic GFR-binding peptide
  MOD_RES (2)..(33)..(34): Xaa is C or S
KXSKVIMVQVEKIKPTKGIVKAIKVSRLDQSVXXPS

SEQ ID NO: 65261 - protein, 32 aa, Artificial Sequence; identical to SEQ ID NO: 21383
  Cyclic GFR-binding peptide

SEQ ID NO: 65262 - protein, 24 aa, Artificial Sequence
  Cyclic GFR-binding peptide
VMVQVEKVKPTRGVVKAIKVSRLD

SEQ ID NO: 65263 - protein, 33 aa, Artificial Sequence; identical to SEQ ID NO: 11360
  Cyclic GFR-binding peptide
  MOD_RES (27)..(28): Xaa is C or S

SEQ ID NO: 65264 - protein, 35 aa, Artificial Sequence; identical to SEQ ID NO: 11362
  Cyclic GFR-binding peptide
  MOD_RES (2)..(34)..(35): Xaa is C or S

SEQ ID NO: 65265 - protein, 23 aa, Artificial Sequence
  Cyclic GFR-binding peptide
VVMVTAKKVKPTRGVIKRIQVPR

SEQ ID NO: 65266 - protein, 32 aa, Artificial Sequence; identical to SEQ ID NO: 21390
  Cyclic GFR-binding peptide
  MOD_RES (31)..(31): Xaa is C or S

SEQ ID NO: 65267 - protein, 37 aa, Artificial Sequence; identical to SEQ ID NO: 11370
  Cyclic GFR-binding peptide
  MOD_RES (32)..(33): Xaa is C or S

SEQ ID NO: 65268 - protein, 36 aa, Artificial Sequence; identical to SEQ ID NO: 11371
  Cyclic GFR-binding peptide
  MOD_RES (1)..(32)..(33): Xaa is C or S

SEQ ID NO: 65269 - protein, 33 aa, Artificial Sequence
  Cyclic GFR-binding peptide
  MOD_RES (1)..(32)..(33): Xaa is C or S
XSKVIMVQVEKIKPTKGIVKAIKVSRLDQSVXX

SEQ ID NO: 65270 - protein, 39 aa, Artificial Sequence; identical to SEQ ID NO: 21398
  Cyclic GFR-binding peptide
  MOD_RES (1)..(38): Xaa is C or S

SEQ ID NO: 65271 - protein, 35 aa, Artificial Sequence; identical to SEQ ID NO: 21400
  Cyclic GFR-binding peptide
  MOD_RES (31)..(31): Xaa is C or S

SEQ ID NO: 65272 - protein, 33 aa, Artificial Sequence; identical to SEQ ID NO: 11377
  Cyclic GFR-binding peptide
  MOD_RES (2)..(4): Xaa is C or S

SEQ ID NO: 65273 - protein, 39 aa, Artificial Sequence
  Cyclic GFR-binding peptide
  MOD_RES (2)..(33)..(34): Xaa is C or S
KXSKVIMVQVEKIKPTKGIVKAIKVSRLDQSVXXPSASA

SEQ ID NO: 65274 - protein, 39 aa, Artificial Sequence
  Cyclic GFR-binding peptide
  MOD_RES (2)..(4)..(36)..(37): Xaa is C or S
HXGXSRVVMNSMEGIIVNSSDDMIQVTINSLKTPAXXPK

SEQ ID NO: 65275 - protein, 27 aa, Artificial Sequence
  Cyclic GFR-binding peptide
NSLQEHQGQHPKIRYYVMPLPEEETPV

SEQ ID NO: 65276 - protein, 25 aa, Artificial Sequence
  Cyclic GFR-binding peptide
EVVMDVTAKKVVKENEDIKRMQVPR

SEQ ID NO: 65277 - protein, 29 aa, Artificial Sequence
  Cyclic GFR-binding peptide
VVMEVQVEKVVKDYEDVKAMKVSRLETPV

SEQ ID NO: 65278 - protein, 31 aa, Artificial Sequence
  Cyclic GFR-binding peptide
  MOD_RES (31)..(31): Xaa is C or S
RVVMNVQVEKIVNSSDDVKAVKVSRLKTPAX

SEQ ID NO: 65279 - protein, 33 aa, Artificial Sequence
  Cyclic GFR-binding peptide
  MOD_RES (1)..(33): Xaa is C or S
XSRVVMNSMEGIIVNSSDDMIQVTINSLKTPAX

SEQ ID NO: 65280 - protein, 35 aa, Artificial Sequence
  Cyclic GFR-binding peptide
  MOD_RES (29)..(29): Xaa is C or S
VMNSMEGIIVNSSDDMIQVTINSLKTPAXTPKTVH

SEQ ID NO: 65281 - protein, 32 aa, Artificial Sequence
  Cyclic GFR-binding peptide
  MOD_RES (1)..(3): Xaa is C or S
XGXSRVVMNVQVEKIVNSSDDVKAVKVSRLKT

SEQ ID NO: 65282 - protein, 31 aa, Artificial Sequence
  Cyclic GFR-binding peptide
  MOD_RES (30)..(31): Xaa is C or S
VVMNSMEGIIVNSSDDMIQVTINSLKTPAXX

SEQ ID NO: 65283 - protein, 36 aa, Artificial Sequence
  Cyclic GFR-binding peptide
  MOD_RES (32)..(33): Xaa is C or S
GEVVMEVQVEKVVKDYEDVKAMKVSRLETPVXXAKP

SEQ ID NO: 65284 - protein, 31 aa, Artificial Sequence
  Cyclic GFR-binding peptide
  MOD_RES (1)..(3): Xaa is C or S
XKXSKVVMVQVEKVKPTRGVVKAIKVSRLDQ

SEQ ID NO: 65285 - protein, 33 aa, Artificial Sequence
  Cyclic GFR-binding peptide
  MOD_RES (1)..(3): Xaa is C or S
XGXARVVMNVTAKKIVNSSDDIKRVQVPRLQTP

SEQ ID NO: 65286 - protein, 29 aa, Artificial Sequence
  Cyclic GFR-binding peptide
  MOD_RES (29)..(29): Xaa is C or S
VIMVTAKKVKPKRGVIKRIQVPRLAQPVX

SEQ ID NO: 65287 - protein, 34 aa, Artificial Sequence; identical to SEQ ID NO: 21411
  Cyclic GFR-binding peptide
  MOD_RES (2)..(2): Xaa is C or S

SEQ ID NO: 65288 - protein, 33 aa, Artificial Sequence
  Cyclic GFR-binding peptide
DELTNSLQEFIPKKRVIEYYVVPLPELQVQTPR

SEQ ID NO: 65289 - protein, 33 aa, Artificial Sequence
  Cyclic GFR-binding peptide
  MOD_RES (1)..(3): Xaa is C or S
XKXSRVIMVTAKKVKPKRGVIKRIQVPRLAQPV

SEQ ID NO: 65290 - protein, 40 aa, Artificial Sequence
  Cyclic GFR-binding peptide
  MOD_RES (1)..(3)..(37): Xaa is C or S
XEXKNHQLFNSLQEHQGQHPKIRYYLMTLPEEETPVXELG

SEQ ID NO: 65291 - protein, 29 aa, Artificial Sequence
  Cyclic GFR-binding peptide
KNHQLFNSLQEHQGQHPKIRYYVMPLPEE

SEQ ID NO: 65292 - protein, 35 aa, Artificial Sequence; identical to SEQ ID NO: 11404
  Cyclic GFR-binding peptide
  MOD_RES (2)..(4): Xaa is C or S

SEQ ID NO: 65293 - protein, 35 aa, Artificial Sequence
  Cyclic GFR-binding peptide
  MOD_RES (1)..(3)..(34)..(35): Xaa is C or S
XKXSRVIMVQVEKVKPKRGVVKAIKVSRLAQPVXX

SEQ ID NO: 65294 - protein, 25 aa, Artificial Sequence
  Cyclic GFR-binding peptide
MNSLQEVKPTRGVYYLITLPELDQP

SEQ ID NO: 65295 - protein, 34 aa, Artificial Sequence; identical to SEQ ID NO: 11407
  Cyclic GFR-binding peptide
  MOD_RES (28)..(29): Xaa is C or S

SEQ ID NO: 65296 - protein, 38 aa, Artificial Sequence; identical to SEQ ID NO: 21418
  Cyclic GFR-binding peptide
  MOD_RES (2)..(2): Xaa is C or S

SEQ ID NO: 65297 - protein, 29 aa, Artificial Sequence
  Cyclic GFR-binding peptide
  MOD_RES (27)..(28): Xaa is C or S
EVTAKKVVKDYEDIKRMQVPRLETPVXXA

SEQ ID NO: 65298 - protein, 22 aa, Artificial Sequence
  Cyclic GFR-binding peptide
VMSMEGIVKPTRGVMIQITINS

SEQ ID NO: 65299 - protein, 21 aa, Artificial Sequence
  Cyclic GFR-binding peptide
VTAKKVKPKRGVIKRIQVPRL

SEQ ID NO: 65300 - protein, 37 aa, Artificial Sequence; identical to SEQ ID NO: 21424
  Cyclic GFR-binding peptide
  MOD_RES (35)..(35): Xaa is C or S

SEQ ID NO: 65301 - protein, 29 aa, Artificial Sequence
  Cyclic GFR-binding peptide
SRVVMNVQVEKIVNSSDDVKAVKVSRLKT

SEQ ID NO: 65302 - protein, 27 aa, Artificial Sequence
  Cyclic GFR-binding peptide
VMNNSLQEIVNSSDDYYVVPLPELQTP

SEQ ID NO: 65303 - protein, 34 aa, Artificial Sequence
  Cyclic GFR-binding peptide
  MOD_RES (32)..(33): Xaa is C or S
GEVVMEVTAKKVVKDYEDIKRMQVPRLETPVXXA

SEQ ID NO: 65304 - protein, 25 aa, Artificial Sequence
  Cyclic GFR-binding peptide
LTNSLQEFIPKKRVIEYYLVTLPEL

SEQ ID NO: 65305 - protein, 37 aa, Artificial Sequence
  Cyclic GFR-binding peptide
  MOD_RES (2)..(36): Xaa is C or S
EXKNHQLFNSLQEHQGQHPKIRYYLMTLPEEETPVXE

SEQ ID NO: 65306 - protein, 25 aa, Artificial Sequence
  Cyclic GFR-binding peptide
NSLQEVVKENEDYYVMPLPELETPV

SEQ ID NO: 65307 - protein, 31 aa, Artificial Sequence
  Cyclic GFR-binding peptide
  MOD_RES (28)..(29): Xaa is C or S
MEVQVEKVVKDYEDVKAMKVSRLETPVXXAK

SEQ ID NO: 65308 - protein, 35 aa, Artificial Sequence
  Cyclic GFR-binding peptide
  MOD_RES (2)..(4): Xaa is C or S
RXEXKNHQLFNSLQEHQGQHPKIRYYVMPLPEEET

SEQ ID NO: 65309 - protein, 35 aa, Artificial Sequence; identical to SEQ ID NO: 11427
  Cyclic GFR-binding peptide
  MOD_RES (2)..(33)..(34): Xaa is C or S

SEQ ID NO: 65310 - protein, 41 aa, Artificial Sequence
  Cyclic GFR-binding peptide
  MOD_RES (2)..(39): Xaa is C or S
KXALHDELTNSLQEFIPKKRVIEYYLVTLPELQVQTPRXQV

SEQ ID NO: 65311 - protein, 31 aa, Artificial Sequence; identical to SEQ ID NO: 11436
  Cyclic GFR-binding peptide
  MOD_RES (1)..(3): Xaa is C or S

SEQ ID NO: 65312 - protein, 32 aa, Artificial Sequence; identical to SEQ ID NO: 21439
  Cyclic GFR-binding peptide

SEQ ID NO: 65313 - protein, 38 aa, Artificial Sequence
  Cyclic GFR-binding peptide
  MOD_RES (1)..(32)..(33): Xaa is C or S
XSKVVMVTAKKVKPTRGVIKRIQVPRLDQPVXXPSASA

SEQ ID NO: 65314 - protein, 35 aa, Artificial Sequence
  Cyclic GFR-binding peptide
  MOD_RES (29)..(30): Xaa is C or S
VMNVQVEKIVNSSDDVKAVKVSRLQTPAXXPKPVT

SEQ ID NO: 65315 - protein, 38 aa, Artificial Sequence; identical to SEQ ID NO: 46386
  Cyclic GFR-binding peptide
  MOD_RES (2)..(33)..(34): Xaa is C or S

SEQ ID NO: 65316 - protein, 28 aa, Artificial Sequence
  Cyclic GFR-binding peptide
  MOD_RES (26)..(26): Xaa is C or S
VQVEKIVNSSDDVKAVKVSRLKTPAXTP

SEQ ID NO: 65317 - protein, 31 aa, Artificial Sequence
  Cyclic GFR-binding peptide
  MOD_RES (1)..(1): Xaa is C or S
XKNHQLFNSLQEHQGQHPKIRYYVMPLPEEE

SEQ ID NO: 65318 - protein, 24 aa, Artificial Sequence
  Cyclic GFR-binding peptide
VIMVTAKKIKPTKGIIKRIQVPRL

SEQ ID NO: 65319 - protein, 40 aa, Artificial Sequence
  Cyclic GFR-binding peptide
  MOD_RES (2)..(4)..(36): Xaa is C or S
HXGXSRVVMNVQVEKIVNSSDDVKAVKVSRLKTPAXTPKT

SEQ ID NO: 65320 - protein, 30 aa, Artificial Sequence
  Cyclic GFR-binding peptide
  MOD_RES (1)..(3): Xaa is C or S
XGXARVVMNVTAKKIVNSSDDIKRVQVPRL

SEQ ID NO: 65321 - protein, 44 aa, Artificial Sequence
  Cyclic GFR-binding peptide
  MOD_RES (1)..(3)..(40): Xaa is C or S
XAXELHEELRNSLQELKPKKRVYEYYLVTLPEHHVRSPQXKVSS

SEQ ID NO: 65322 - protein, 24 aa, Artificial Sequence
  Cyclic GFR-binding peptide
VQVEKIVNSSDDVKAVKVSRLKTP

SEQ ID NO: 65323 - protein, 31 aa, Artificial Sequence; identical to SEQ ID NO: 21460
  Cyclic GFR-binding peptide

SEQ ID NO: 65324 - protein, 32 aa, Artificial Sequence; identical to SEQ ID NO: 11467
  Cyclic GFR-binding peptide
  MOD_RES (28)..(29): Xaa is C or S

SEQ ID NO: 65325 - protein, 40 aa, Artificial Sequence
  Cyclic GFR-binding peptide
  MOD_RES (2)..(34)..(35): Xaa is C or S
GXGEVVMDVQVEKVVKENEDVKAMKVSRLETPVXXAKPIK

SEQ ID NO: 65326 - protein, 31 aa, Artificial Sequence; identical to SEQ ID NO: 11471
  Cyclic GFR-binding peptide
  MOD_RES (29)..(30): Xaa is C or S

SEQ ID NO: 65327 - protein, 28 aa, Artificial Sequence
  Cyclic GFR-binding peptide
  MOD_RES (28)..(28): Xaa is C or S
VMVTAKKVKPTRGVIKRIQVPRLDQPVX

SEQ ID NO: 65328 - protein, 31 aa, Artificial Sequence
  Cyclic GFR-binding peptide
  MOD_RES (28)..(29): Xaa is C or S
MNVQVEKIVNSSDDVKAVKVSRLKTPAXXPK

SEQ ID NO: 65329 - protein, 37 aa, Artificial Sequence
  Cyclic GFR-binding peptide
  MOD_RES (2)..(4)..(36): Xaa is C or S
HXGXSRVVMNVQVEKIVNSSDDVKAVKVSRLKTPAXT

SEQ ID NO: 65330 - protein, 31 aa, Artificial Sequence
  Cyclic GFR-binding peptide
  MOD_RES (30)..(31): Xaa is C or S
VVMNVQVEKIVNSSDDVKAVKVSRLQTPAXX

SEQ ID NO: 65331 - protein, 31 aa, Artificial Sequence
  Cyclic GFR-binding peptide
  MOD_RES (28)..(29): Xaa is C or S
IMSMEGIIKPTKGIMIQITINSLDQSVXXPS

SEQ ID NO: 65332 - protein, 35 aa, Artificial Sequence
  Cyclic GFR-binding peptide
  MOD_RES (2)..(4)..(35): Xaa is C or S
SXKXSKVIMSMEGIIKPTKGIMIQITINSLDQSVX

SEQ ID NO: 65333 - protein, 30 aa, Artificial Sequence
  Cyclic GFR-binding peptide
  MOD_RES (26)..(27): Xaa is C or S
VTAKKIVNSSDDIKRVQVPRLKTPAXXPKP

SEQ ID NO: 65334 - protein, 26 aa, Artificial Sequence
  Cyclic GFR-binding peptide
  MOD_RES (1)..(1): Xaa is C or S
XSKVIMVTAKKIKPTKGIIKRIQVPR

SEQ ID NO: 65335 - protein, 30 aa, Artificial Sequence; identical to SEQ ID NO: 11480
  Cyclic GFR-binding peptide
  MOD_RES (30)..(30): Xaa is C or S

SEQ ID NO: 65336 - protein, 29 aa, Artificial Sequence
  Cyclic GFR-binding peptide
  MOD_RES (26)..(27): Xaa is C or S
NSLQEVKPTRGVYYLITLPELDQPVXXPS

SEQ ID NO: 65337 - protein, 33 aa, Artificial Sequence
  Cyclic GFR-binding peptide
  MOD_RES (32)..(32): Xaa is C or S
LTNSLQEFIPKKRVIEYYLVTLPELQVQTPRXQ

SEQ ID NO: 65338 - protein, 41 aa, Artificial Sequence; identical to SEQ ID NO: 21473
  Cyclic GFR-binding peptide
  MOD_RES (37)..(37): Xaa is C or S

SEQ ID NO: 65339 - protein, 23 aa, Artificial Sequence
  Cyclic GFR-binding peptide
NNSLQEIVNSSDDYYLVTLPELQ

SEQ ID NO: 65340 - protein, 35 aa, Artificial Sequence; identical to SEQ ID NO: 21475
  Cyclic GFR-binding peptide
  MOD_RES (2)..(2): Xaa is C or S

SEQ ID NO: 65341 - protein, 37 aa, Artificial Sequence
  Cyclic GFR-binding peptide
  MOD_RES (2)..(33)..(34): Xaa is C or S
KXSKVIMSMEGIIKPTKGIMIQITINSLDQSVXXPSA

SEQ ID NO: 65342 - protein, 32 aa, Artificial Sequence
  Cyclic GFR-binding peptide
  MOD_RES (32)..(32): Xaa is C or S
ARVVMNVTAKKIVNSSDDIKRVQVPRLQTPAX

SEQ ID NO: 65343 - protein, 40 aa, Artificial Sequence
  Cyclic GFR-binding peptide
  MOD_RES (1)..(3)..(40): Xaa is C or S
XAXELHEELRNSLQELKPKKRVYEYYVVPLPEHHVRSPQX

SEQ ID NO: 65344 - protein, 28 aa, Artificial Sequence
  Cyclic GFR-binding peptide
NHQLFNSLQEHQGQHPKIRYYLMTLPEE

SEQ ID NO: 65345 - protein, 37 aa, Artificial Sequence
  Cyclic GFR-binding peptide
  MOD_RES (37)..(37): Xaa is C or S
ELHEELRNSLQELKPKKRVYEYYVVPLPEHHVRSPQX

SEQ ID NO: 65346 - protein, 27 aa, Artificial Sequence
  Cyclic GFR-binding peptide
LFVQVEKHQGQHPKIRVKAMKVSREET

SEQ ID NO: 65347 - protein, 22 aa, Artificial Sequence
  Cyclic GFR-binding peptide
SMEGIVVKENEDMIQMTINSLE

SEQ ID NO: 65348 - protein, 31 aa, Artificial Sequence
  Cyclic GFR-binding peptide
ARVVMNSMEGIIVNSSDDMIQVTINSLQTPA

SEQ ID NO: 65349 - protein, 32 aa, Artificial Sequence
  Cyclic GFR-binding peptide
  MOD_RES (29)..(30): Xaa is C or S
VMEVTAKKVVKDYEDIKRMQVPRLETPVXXAK

SEQ ID NO: 65350 - protein, 42 aa, Artificial Sequence
  Cyclic GFR-binding peptide
  MOD_RES (2)..(4)..(38): Xaa is C or S
RXEXKNHQLFNSLQEHQGQHPKIRYYVMPLPEEETPVXELGE

SEQ ID NO: 65351 - protein, 29 aa, Artificial Sequence
  Cyclic GFR-binding peptide
LRNSLQELKPKKRVYEYYVVPLPEHHVRS

SEQ ID NO: 65352 - protein, 30 aa, Artificial Sequence
  Cyclic GFR-binding peptide
  MOD_RES (28)..(29): Xaa is C or S
IMVTAKKVKPKRGVIKRIQVPRLAQPVXXP

SEQ ID NO: 65353 - protein, 28 aa, Artificial Sequence
  Cyclic GFR-binding peptide
SKVIMVQVEKIKPTKGIVKAIKVSRLDQ

SEQ ID NO: 65354 - protein, 33 aa, Artificial Sequence; identical to SEQ ID NO: 11491
  Cyclic GFR-binding peptide
  MOD_RES (27)..(28): Xaa is C or S

SEQ ID NO: 65355 - protein, 30 aa, Artificial Sequence; identical to SEQ ID NO: 11495
  Cyclic GFR-binding peptide
  MOD_RES (27)..(28): Xaa is C or S

SEQ ID NO: 65356 - protein, 35 aa, Artificial Sequence; identical to SEQ ID NO: 11502
  Cyclic GFR-binding peptide
  MOD_RES (1)..(3)..(34)..(35): Xaa is C or S

SEQ ID NO: 65357 - protein, 37 aa, Artificial Sequence; identical to SEQ ID NO: 21493
  Cyclic GFR-binding peptide
  MOD_RES (33)..(33): Xaa is C or S

SEQ ID NO: 65358 - protein, 37 aa, Artificial Sequence; identical to SEQ ID NO: 21494
  Cyclic GFR-binding peptide
  MOD_RES (37)..(37): Xaa is C or S

SEQ ID NO: 65359 - protein, 38 aa, Artificial Sequence; identical to SEQ ID NO: 11503
  Cyclic GFR-binding peptide
  MOD_RES (2)..(4)..(36)..(37): Xaa is C or S

SEQ ID NO: 65360 - protein, 29 aa, Artificial Sequence
  Cyclic GFR-binding peptide
  MOD_RES (1)..(3): Xaa is C or S
XGXSRVVMNSMEGIIVNSSDDMIQVTINS

SEQ ID NO: 65361 - protein, 40 aa, Artificial Sequence; identical to SEQ ID NO: 21495
  Cyclic GFR-binding peptide
  MOD_RES (1)..(38): Xaa is C or S

SEQ ID NO: 65362 - protein, 35 aa, Artificial Sequence
  Cyclic GFR-binding peptide
  MOD_RES (29)..(30): Xaa is C or S
VVMSMEGIVKPTRGVMIQITINSLDQPVXXPSASA

SEQ ID NO: 65363 - protein, 29 aa, Artificial Sequence
  Cyclic GFR-binding peptide
DELTNSLQEFIPKKRVIEYYVVPLPELQV

SEQ ID NO: 65364 - protein, 28 aa, Artificial Sequence
  Cyclic GFR-binding peptide
SKVIMSMEGIIKPTKGIMIQITINSLDQ

SEQ ID NO: 65365 - protein, 26 aa, Artificial Sequence
  Cyclic GFR-binding peptide
  MOD_RES (26)..(26): Xaa is C or S
SMEGIVKPTRGVMIQITINSLDQPVX

SEQ ID NO: 65366 - protein, 31 aa, Artificial Sequence
  Cyclic GFR-binding peptide
  MOD_RES (1)..(3): Xaa is C or S
XGXSRVVMNSMEGIIVNSSDDMIQVTINSLK

SEQ ID NO: 65367 - protein, 26 aa, Artificial Sequence
  Cyclic GFR-binding peptide
ARVVMNVTAKKIVNSSDDIKRVQVPR

SEQ ID NO: 65368 - protein, 40 aa, Artificial Sequence
  Cyclic GFR-binding peptide
  MOD_RES (2)..(34)..(35): Xaa is C or S
GXSRVVMNSMEGIIVNSSDDMIQVTINSLKTPAXXPKPVY

SEQ ID NO: 65369 - protein, 29 aa, Artificial Sequence
  Cyclic GFR-binding peptide
  MOD_RES (2)..(2): Xaa is C or S
GXGEVVMDNSLQEVVKENEDYYLMTLPEL

SEQ ID NO: 65370 - protein, 31 aa, Artificial Sequence
  Cyclic GFR-binding peptide
  MOD_RES (27)..(27): Xaa is C or S
NVQVEKIVNSSDDVKAVKVSRLKTPAXTPKT

SEQ ID NO: 65371 - protein, 31 aa, Artificial Sequence; identical to SEQ ID NO: 21504
  Cyclic GFR-binding peptide

SEQ ID NO: 65372 - protein, 35 aa, Artificial Sequence; identical to SEQ ID NO: 21505
  Cyclic GFR-binding peptide

SEQ ID NO: 65373 - protein, 34 aa, Artificial Sequence
  Cyclic GFR-binding peptide
  MOD_RES (31)..(32): Xaa is C or S
SRVIMSMEGIVKPKRGVMIQITINSLAQPVXXPA

SEQ ID NO: 65374 - protein, 26 aa, Artificial Sequence
  Cyclic GFR-binding peptide
SRVVMNVTAKKIVNSSDDIKRVQVPR

SEQ ID NO: 65375 - protein, 32 aa, Artificial Sequence
  Cyclic GFR-binding peptide
  MOD_RES (31)..(32): Xaa is C or S
RVVMNVTAKKIVNSSDDIKRVQVPRLQTPAXX

SEQ ID NO: 65376 - protein, 33 aa, Artificial Sequence
  Cyclic GFR-binding peptide
  MOD_RES (2)..(4): Xaa is C or S
SXKXSRVIMVQVEKVKPKRGVVKAIKVSRLAQP

SEQ ID NO: 65377 - protein, 34 aa, Artificial Sequence
  Cyclic GFR-binding peptide
  MOD_RES (2)..(33)..(34): Xaa is C or S
KXSRVIMVTAKKVKPKRGVIKRIQVPRLAQPVXX

SEQ ID NO: 65378 - protein, 24 aa, Artificial Sequence
  Cyclic GFR-binding peptide
VVMDNSLQEVVKENEDYYLMTLPE

SEQ ID NO: 65379 - protein, 31 aa, Artificial Sequence; identical to SEQ ID NO: 11530
  Cyclic GFR-binding peptide
  MOD_RES (31)..(31): Xaa is C or S

SEQ ID NO: 65380 - protein, 25 aa, Artificial Sequence
  Cyclic GFR-binding peptide
EVVMEVQVEKVVKDYEDVKAMKVSR

SEQ ID NO: 65381 - protein, 27 aa, Artificial Sequence
  Cyclic GFR-binding peptide
ELTVQVEKFIPKKRVIEVKAVKVSRLQ

SEQ ID NO: 65382 - protein, 36 aa, Artificial Sequence; identical to SEQ ID NO: 11541
  Cyclic GFR-binding peptide
  MOD_RES (32)..(33): Xaa is C or S

SEQ ID NO: 65383 - protein, 38 aa, Artificial Sequence; identical to SEQ ID NO: 21522
  Cyclic GFR-binding peptide
  MOD_RES (34)..(34): Xaa is C or S

SEQ ID NO: 65384 - protein, 31 aa, Artificial Sequence; identical to SEQ ID NO: 11544
  Cyclic GFR-binding peptide
  MOD_RES (1)..(1): Xaa is C or S

SEQ ID NO: 65385 - protein, 39 aa, Artificial Sequence
  Cyclic GFR-binding peptide
  MOD_RES (1)..(35): Xaa is C or S
XKNHQLFNSLQEHQGQHPKIRYYLMTLPEEETPVXELGE

SEQ ID NO: 65386 - protein, 34 aa, Artificial Sequence; identical to SEQ ID NO: 11549
  Cyclic GFR-binding peptide
  MOD_RES (1)..(3): Xaa is C or S

SEQ ID NO: 65387 - protein, 35 aa, Artificial Sequence; identical to SEQ ID NO: 21527
  Cyclic GFR-binding peptide

SEQ ID NO: 65388 - protein, 33 aa, Artificial Sequence
  Cyclic GFR-binding peptide
  MOD_RES (31)..(31): Xaa is C or S
RNSLQELKPKKRVYEYYVVPLPEHHVRSPQXKV

SEQ ID NO: 65389 - protein, 30 aa, Artificial Sequence
  Cyclic GFR-binding peptide
  MOD_RES (29)..(29): Xaa is C or S
VMNVTAKKIVNSSDDIKRVQVPRLKTPAXT

SEQ ID NO: 65390 - protein, 35 aa, Artificial Sequence; identical to SEQ ID NO: 11552
  Cyclic GFR-binding peptide
  MOD_RES (29)..(30): Xaa is C or S

SEQ ID NO: 65391 - protein, 31 aa, Artificial Sequence; identical to SEQ ID NO: 21530
  Cyclic GFR-binding peptide
  MOD_RES (2)..(2): Xaa is C or S

SEQ ID NO: 65392 - protein, 41 aa, Artificial Sequence
  Cyclic GFR-binding peptide
  MOD_RES (1)..(3)..(40): Xaa is C or S
XAXELHEELRNSLQELKPKKRVYEYYLVTLPEHHVRSPQXK

SEQ ID NO: 65393 - protein, 40 aa, Artificial Sequence
  Cyclic GFR-binding peptide
  MOD_RES (1)..(3)..(35): Xaa is C or S
XGXSRVVMNVQVEKIVNSSDDVKAVKVSRLKTPAXTPKTV

SEQ ID NO: 65394 - protein, 29 aa, Artificial Sequence
  Cyclic GFR-binding peptide
RVIMNSLQEVKPKRGVYYLITLPELAQPV

SEQ ID NO: 65395 - protein, 28 aa, Artificial Sequence
  Cyclic GFR-binding peptide
GEVVMDNSLQEVVKENEDYYVMPLPELE

SEQ ID NO: 65396 - protein, 38 aa, Artificial Sequence; identical to SEQ ID NO: 21534
  Cyclic GFR-binding peptide
  MOD_RES (1)..(35): Xaa is C or S

SEQ ID NO: 65397 - protein, 31 aa, Artificial Sequence; identical to SEQ ID NO: 46470
  Cyclic GFR-binding peptide
  MOD_RES (1)..(3): Xaa is C or S

SEQ ID NO: 65398 - protein, 24 aa, Artificial Sequence
  Cyclic GFR-binding peptide
TSMEGIFIPKKRVIEMIQVTINSL

SEQ ID NO: 65399 - protein, 31 aa, Artificial Sequence
  Cyclic GFR-binding peptide
  MOD_RES (2)..(2): Xaa is C or S
GXGEVVMDSMEGIVVKENEDMIQMTINSLET

SEQ ID NO: 65400 - protein, 25 aa, Artificial Sequence
  Cyclic GFR-binding peptide
IMSMEGIVKPKRGVMIQITINSLAQ

SEQ ID NO: 65401 - protein, 33 aa, Artificial Sequence; identical to SEQ ID NO: 11574
  Cyclic GFR-binding peptide
  MOD_RES (1)..(33): Xaa is C or S

SEQ ID NO: 65402 - protein, 37 aa, Artificial Sequence; identical to SEQ ID NO: 11577
  Cyclic GFR-binding peptide
  MOD_RES (32)..(33): Xaa is C or S

SEQ ID NO: 65403 - protein, 32 aa, Artificial Sequence
  Cyclic GFR-binding peptide
  MOD_RES (31)..(32): Xaa is C or S
SKVVMVQVEKVKPTRGVVKAIKVSRLDQPVXX

SEQ ID NO: 65404 - protein, 26 aa, Artificial Sequence
  Cyclic GFR-binding peptide
  MOD_RES (1)..(1): Xaa is C or S
XSKVVMNSLQEVKPTRGVYYLITLPE

SEQ ID NO: 65405 - protein, 30 aa, Artificial Sequence; identical to SEQ ID NO: 21553
  Cyclic GFR-binding peptide

SEQ ID NO: 65406 - protein, 35 aa, Artificial Sequence
  Cyclic GFR-binding peptide
  MOD_RES (2)..(4): Xaa is C or S
RXGXGEVVMEVTAKKVVKDYEDIKRMQVPRLETPV

SEQ ID NO: 65407 - protein, 37 aa, Artificial Sequence; identical to SEQ ID NO: 11585
  Cyclic GFR-binding peptide
  MOD_RES (1)..(3)..(34)..(35): Xaa is C or S

SEQ ID NO: 65408 - protein, 35 aa, Artificial Sequence; identical to SEQ ID NO: 11586
  Cyclic GFR-binding peptide
  MOD_RES (1)..(32)..(33): Xaa is C or S

SEQ ID NO: 65409 - protein, 35 aa, Artificial Sequence
  Cyclic GFR-binding peptide
  MOD_RES (29)..(29): Xaa is C or S
FNSLQEHQGQHPKIRYYVMPLPEEETPVXELGEDN

SEQ ID NO: 65410 - protein, 36 aa, Artificial Sequence
  Cyclic GFR-binding peptide
  MOD_RES (30)..(31): Xaa is C or S
RVIMVQVEKVKPKRGVVKAIKVSRLAQPVXXPAASA

SEQ ID NO: 65411 - protein, 33 aa, Artificial Sequence; identical to SEQ ID NO: 11587
  Cyclic GFR-binding peptide
  MOD_RES (28)..(29): Xaa is C or S

SEQ ID NO: 65412 - protein, 34 aa, Artificial Sequence; identical to SEQ ID NO: 21559
  Cyclic GFR-binding peptide
  MOD_RES (32)..(32): Xaa is C or S

SEQ ID NO: 65413 - protein, 30 aa, Artificial Sequence; identical to SEQ ID NO: 11591
  Cyclic GFR-binding peptide

SEQ ID NO: 65414 - protein, 35 aa, Artificial Sequence
  Cyclic GFR-binding peptide
  MOD_RES (2)..(34): Xaa is C or S
GXSRVVMNVTAKKIVNSSDDIKRVQVPRLKTPAXT

SEQ ID NO: 65415 - protein, 34 aa, Artificial Sequence; identical to SEQ ID NO: 11600
  Cyclic GFR-binding peptide
  MOD_RES (1)..(33)..(34): Xaa is C or S

SEQ ID NO: 65416 - protein, 25 aa, Artificial Sequence
  Cyclic GFR-binding peptide
MNSLQEIKPTKGIYYLITLPELDQS

SEQ ID NO: 65417 - protein, 31 aa, Artificial Sequence; identical to SEQ ID NO: 46510
  Cyclic GFR-binding peptide
  MOD_RES (1)..(1): Xaa is C or S

SEQ ID NO: 65418 - protein, 31 aa, Artificial Sequence; identical to SEQ ID NO: 11607
  Cyclic GFR-binding peptide
  MOD_RES (30)..(31): Xaa is C or S

SEQ ID NO: 65419 - protein, 28 aa, Artificial Sequence
  Cyclic GFR-binding peptide
  MOD_RES (26)..(27): Xaa is C or S
NSLQEVVKDYEDYYLMTLPELETPVXXA

SEQ ID NO: 65420 - protein, 35 aa, Artificial Sequence
  Cyclic GFR-binding peptide
  MOD_RES (30)..(31): Xaa is C or S
RVIMVTAKKVKPKRGVIKRIQVPRLAQPVXXPAAS

SEQ ID NO: 65421 - protein, 27 aa, Artificial Sequence
  Cyclic GFR-binding peptide
VVMDVQVEKVVKENEDVKAMKVSRLET

SEQ ID NO: 65422 - protein, 38 aa, Artificial Sequence
  Cyclic GFR-binding peptide
  MOD_RES (33)..(33): Xaa is C or S
NHQLFNSLQEHQGQHPKIRYYVMPLPEEETPVXELGED

SEQ ID NO: 65423 - protein, 39 aa, Artificial Sequence
  Cyclic GFR-binding peptide
  MOD_RES (2)..(4)..(38): Xaa is C or S
RXEXKNHQLFNSLQEHQGQHPKIRYYLMTLPEEETPVXE

SEQ ID NO: 65424 - protein, 22 aa, Artificial Sequence
  Cyclic GFR-binding peptide
VTAKKIVNSSDDIKRVQVPRLQ

SEQ ID NO: 65425 - protein, 32 aa, Artificial Sequence
  Cyclic GFR-binding peptide
  MOD_RES (27)..(28): Xaa is C or S
NVTAKKIVNSSDDIKRVQVPRLKTPAXXPKPV

SEQ ID NO: 65426 - protein, 23 aa, Artificial Sequence
  Cyclic GFR-binding peptide
NSLQEHQGQHPKIRYYVMPLPEE

SEQ ID NO: 65427 - protein, 31 aa, Artificial Sequence
  Cyclic GFR-binding peptide
  MOD_RES (1)..(3): Xaa is C or S
XKXSKVIMSMEGIIKPTKGIMIQITINSLDQ

SEQ ID NO: 65428 - protein, 37 aa, Artificial Sequence; identical to SEQ ID NO: 21589
  Cyclic GFR-binding peptide
  MOD_RES (31)..(31): Xaa is C or S

SEQ ID NO: 65429 - protein, 33 aa, Artificial Sequence
  Cyclic GFR-binding peptide
  MOD_RES (2)..(2): Xaa is C or S
KXALHDELTNSLQEFIPKKRVIEYYLVTLPELQ

SEQ ID NO: 65430 - protein, 29 aa, Artificial Sequence
  Cyclic GFR-binding peptide
GEVVMDVQVEKVVKENEDVKAMKVSRLET

SEQ ID NO: 65431 - protein, 34 aa, Artificial Sequence; identical to SEQ ID NO: 11627
  Cyclic GFR-binding peptide
  MOD_RES (1)..(33)..(34): Xaa is C or S

SEQ ID NO: 65432 - protein, 24 aa, Artificial Sequence
  Cyclic GFR-binding peptide
FVQVEKHQGQHPKIRVKAMKVSRE

SEQ ID NO: 65433 - protein, 36 aa, Artificial Sequence
  Cyclic GFR-binding peptide
  MOD_RES (33)..(33): Xaa is C or S
NHQLFNSLQEHQGQHPKIRYYLMTLPEEETPVXELG

SEQ ID NO: 65434 - protein, 35 aa, Artificial Sequence
  Cyclic GFR-binding peptide
  MOD_RES (2)..(33)..(34): Xaa is C or S
KXSKVIMVQVEKIKPTKGIVKAIKVSRLDQSVXXP

SEQ ID NO: 65435 - protein, 34 aa, Artificial Sequence; identical to SEQ ID NO: 46532
  Cyclic GFR-binding peptide
  MOD_RES (29)..(30): Xaa is C or S

SEQ ID NO: 65436 - protein, 28 aa, Artificial Sequence
  Cyclic GFR-binding peptide
  MOD_RES (26)..(27): Xaa is C or S
NSLQEVVKENEDYYLMTLPELETPVXXA

SEQ ID NO: 65437 - protein, 24 aa, Artificial Sequence
  Cyclic GFR-binding peptide
IMVTAKKVKPKRGVIKRIQVPRLA

SEQ ID NO: 65438 - protein, 28 aa, Artificial Sequence
  Cyclic GFR-binding peptide
  MOD_RES (2)..(2): Xaa is C or S
KXSKVIMVQVEKIKPTKGIVKAIKVSRL

SEQ ID NO: 65439 - protein, 25 aa, Artificial Sequence
  Cyclic GFR-binding peptide
NVTAKKIVNSSDDIKRVQVPRLQTP

SEQ ID NO: 65440 - protein, 42 aa, Artificial Sequence; identical to SEQ ID NO: 21605
  Cyclic GFR-binding peptide
  MOD_RES (1)..(3)..(40): Xaa is C or S

SEQ ID NO: 65441 - protein, 33 aa, Artificial Sequence
  Cyclic GFR-binding peptide
  MOD_RES (28)..(29): Xaa is C or S
VMVQVEKVKPTRGVVKAIKVSRLDQPVXXPSAS

SEQ ID NO: 65442 - protein, 39 aa, Artificial Sequence; identical to SEQ ID NO: 11641
  Cyclic GFR-binding peptide
  MOD_RES (2)..(34)..(35): Xaa is C or S

SEQ ID NO: 65443 - protein, 35 aa, Artificial Sequence; identical to SEQ ID NO: 11643
  Cyclic GFR-binding peptide
  MOD_RES (31)..(32): Xaa is C or S

SEQ ID NO: 65444 - protein, 31 aa, Artificial Sequence
  Cyclic GFR-binding peptide
  MOD_RES (30)..(31): Xaa is C or S
KVIMVQVEKIKPTKGIVKAIKVSRLDQSVXX

SEQ ID NO: 65445 - protein, 37 aa, Artificial Sequence
  Cyclic GFR-binding peptide
  MOD_RES (31)..(32): Xaa is C or S
RVVMNVQVEKIVNSSDDVKAVKVSRLKTPAXXPKPVY

SEQ ID NO: 65446 - protein, 35 aa, Artificial Sequence; identical to SEQ ID NO: 11645
  Cyclic GFR-binding peptide
  MOD_RES (1)..(33)..(34): Xaa is C or S

SEQ ID NO: 65447 - protein, 36 aa, Artificial Sequence; identical to SEQ ID NO: 11646
  Cyclic GFR-binding peptide
  MOD_RES (2)..(34)..(35): Xaa is C or S

SEQ ID NO: 65448 - protein, 33 aa, Artificial Sequence
  Cyclic GFR-binding peptide
  MOD_RES (1)..(32)..(33): Xaa is C or S
XSKVIMSMEGIIKPTKGIMIQITINSLDQSVXX

SEQ ID NO: 65449 - protein, 30 aa, Artificial Sequence; identical to SEQ ID NO: 11651
  Cyclic GFR-binding peptide
  MOD_RES (28)..(29): Xaa is C or S

SEQ ID NO: 65450 - protein, 28 aa, Artificial Sequence
  Cyclic GFR-binding peptide
  MOD_RES (28)..(28): Xaa is C or S
MNSMEGIIVNSSDDMIQVTINSLKTPAX

SEQ ID NO: 65451 - protein, 27 aa, Artificial Sequence
  Cyclic GFR-binding peptide
  MOD_RES (26)..(27): Xaa is C or S
NSLQEIKPTKGIYYVIPLPELDQSVXX

SEQ ID NO: 65452 - protein, 35 aa, Artificial Sequence
  Cyclic GFR-binding peptide
  MOD_RES (2)..(4): Xaa is C or S
RXEXKNHQLFNSLQEHQGQHPKIRYYLMTLPEEET

SEQ ID NO: 65453 - protein, 40 aa, Artificial Sequence
  Cyclic GFR-binding peptide
  MOD_RES (1)..(38): Xaa is C or S
XALHDELTNSLQEFIPKKRVIEYYVVPLPELQVQTPRXQV

SEQ ID NO: 65454 - protein, 31 aa, Artificial Sequence
  Cyclic GFR-binding peptide
  MOD_RES (1)..(1): Xaa is C or S
XGEVVMDVQVEKVVKENEDVKAMKVSRLETP

SEQ ID NO: 65455 - protein, 35 aa, Artificial Sequence; identical to SEQ ID NO: 11660
  Cyclic GFR-binding peptide
  MOD_RES (1)..(32)..(33): Xaa is C or S

SEQ ID NO: 65456 - protein, 29 aa, Artificial Sequence
  Cyclic GFR-binding peptide
GEVVMDVTAKKVVKENEDIKRMQVPRLET

SEQ ID NO: 65457 - protein, 25 aa, Artificial Sequence
  Cyclic GFR-binding peptide
VVMDNSLQEVVKENEDYYVMPLPEL

SEQ ID NO: 65458 - protein, 22 aa, Artificial Sequence
  Cyclic GFR-binding peptide
NSLQEIVNSSDDYYLVTLPELQ

SEQ ID NO: 65459 - protein, 24 aa, Artificial Sequence
  Cyclic GFR-binding peptide
VVMESMEGIVVKDYEDMIQMTINS

SEQ ID NO: 65460 - protein, 31 aa, Artificial Sequence; identical to SEQ ID NO: 11672
  Cyclic GFR-binding peptide
  MOD_RES (26)..(26): Xaa is C or S

SEQ ID NO: 65461 - protein, 29 aa, Artificial Sequence
  Cyclic GFR-binding peptide
  MOD_RES (27)..(28): Xaa is C or S
NVTAKKIVNSSDDIKRVQVPRLQTPAXXP

SEQ ID NO: 65462 - protein, 41 aa, Artificial Sequence
  Cyclic GFR-binding peptide
  MOD_RES (2)..(39): Xaa is C or S
KXALHDELTNSLQEFIPKKRVIEYYVVPLPELQVQTPRXQV

SEQ ID NO: 65463 - protein, 25 aa, Artificial Sequence
  Cyclic GFR-binding peptide
NSLQEFIPKKRVIEYYVVPLPELQV

SEQ ID NO: 65464 - protein, 35 aa, Artificial Sequence; identical to SEQ ID NO: 21631
  Cyclic GFR-binding peptide
  MOD_RES (33)..(33): Xaa is C or S

SEQ ID NO: 65465 - protein, 34 aa, Artificial Sequence; identical to SEQ ID NO: 21636
  Cyclic GFR-binding peptide
  MOD_RES (1)..(3): Xaa is C or S

SEQ ID NO: 65466 - protein, 34 aa, Artificial Sequence; identical to SEQ ID NO: 11681
  Cyclic GFR-binding peptide
  MOD_RES (2)..(4): Xaa is C or S

SEQ ID NO: 65467 - protein, 39 aa, Artificial Sequence; identical to SEQ ID NO: 11683
  Cyclic GFR-binding peptide
  MOD_RES (2)..(33)..(34): Xaa is C or S

SEQ ID NO: 65468 - protein, 31 aa, Artificial Sequence; identical to SEQ ID NO: 11686
  Cyclic GFR-binding peptide
  MOD_RES (31)..(31): Xaa is C or S

SEQ ID NO: 65469 - protein, 27 aa, Artificial Sequence
  Cyclic GFR-binding peptide
RVIMSMEGIVKPKRGVMIQITINSLAQ

SEQ ID NO: 65470 - protein, 31 aa, Artificial Sequence
  Cyclic GFR-binding peptide
  MOD_RES (31)..(31): Xaa is C or S
RVVMNSMEGIIVNSSDDMIQVTINSLKTPAX

SEQ ID NO: 65471 - protein, 37 aa, Artificial Sequence; identical to SEQ ID NO: 21643
  Cyclic GFR-binding peptide
  MOD_RES (32)..(32): Xaa is C or S

SEQ ID NO: 65472 - protein, 29 aa, Artificial Sequence
  Cyclic GFR-binding peptide
  MOD_RES (26)..(27): Xaa is C or S
VTAKKVKPTRGVIKRIQVPRLDQPVXXPS

SEQ ID NO: 65473 - protein, 30 aa, Artificial Sequence; identical to SEQ ID NO: 11701
  Cyclic GFR-binding peptide
  MOD_RES (27)..(27): Xaa is C or S

SEQ ID NO: 65474 - protein, 34 aa, Artificial Sequence
  Cyclic GFR-binding peptide
  MOD_RES (30)..(31): Xaa is C or S
VVMEVQVEKVVKDYEDVKAMKVSRLETPVXXAKP

SEQ ID NO: 65475 - protein, 25 aa, Artificial Sequence
  Cyclic GFR-binding peptide
SKVIMSMEGIIKPTKGIMIQITINS

SEQ ID NO: 65476 - protein, 28 aa, Artificial Sequence
  Cyclic GFR-binding peptide
  MOD_RES (1)..(1): Xaa is C or S
XARVVMNNSLQEIVNSSDDYYLVTLPEL

SEQ ID NO: 65477 - protein, 32 aa, Artificial Sequence
  Cyclic GFR-binding peptide
  MOD_RES (30)..(31): Xaa is C or S
KVVMSMEGIVKPTRGVMIQITINSLDQPVXXP

SEQ ID NO: 65478 - protein, 34 aa, Artificial Sequence
  Cyclic GFR-binding peptide
  MOD_RES (30)..(31): Xaa is C or S
RVIMVQVEKVKPKRGVVKAIKVSRLAQPVXXPAA

SEQ ID NO: 65479 - protein, 28 aa, Artificial Sequence
  Cyclic GFR-binding peptide
  MOD_RES (27)..(28): Xaa is C or S
MVQVEKIKPTKGIVKAIKVSRLDQSVXX

SEQ ID NO: 65480 - protein, 30 aa, Artificial Sequence; identical to SEQ ID NO: 21660
  Cyclic GFR-binding peptide

SEQ ID NO: 65481 - protein, 39 aa, Artificial Sequence; identical to SEQ ID NO: 21661
  Cyclic GFR-binding peptide
  MOD_RES (36)..(36): Xaa is C or S

SEQ ID NO: 65482 - protein, 25 aa, Artificial Sequence
  Cyclic GFR-binding peptide
VMNNSLQEIVNSSDDYYVVPLPELQ

SEQ ID NO: 65483 - protein, 35 aa, Artificial Sequence
  Cyclic GFR-binding peptide
  MOD_RES (35)..(35): Xaa is C or S
HDELTNSLQEFIPKKRVIEYYLVTLPELQVQTPRX

SEQ ID NO: 65484 - protein, 26 aa, Artificial Sequence
  Cyclic GFR-binding peptide
RVVMNVTAKKIVNSSDDIKRVQVPRL

SEQ ID NO: 65485 - protein, 33 aa, Artificial Sequence; identical to SEQ ID NO: 11729
  Cyclic GFR-binding peptide
  MOD_RES (1)..(3): Xaa is C or S

SEQ ID NO: 65486 - protein, 33 aa, Artificial Sequence; identical to SEQ ID NO: 11730
  Cyclic GFR-binding peptide
  MOD_RES (1)..(3): Xaa is C or S

SEQ ID NO: 65487 - protein, 22 aa, Artificial Sequence
  Cyclic GFR-binding peptide
SMEGIVVKDYEDMIQMTINSLE

SEQ ID NO: 65488 - protein, 28 aa, Artificial Sequence
  Cyclic GFR-binding peptide
  MOD_RES (26)..(27): Xaa is C or S
SMEGIIVNSSDDMIQVTINSLQTPAXXP

SEQ ID NO: 65489 - protein, 31 aa, Artificial Sequence
  Cyclic GFR-binding peptide
  MOD_RES (2)..(4): Xaa is C or S
SXKXSRVIMVQVEKVKPKRGVVKAIKVSRLA

SEQ ID NO: 65490 - protein, 22 aa, Artificial Sequence
  Cyclic GFR-binding peptide
IMVTAKKVKPKRGVIKRIQVPR

SEQ ID NO: 65491 - protein, 32 aa, Artificial Sequence
  Cyclic GFR-binding peptide
  MOD_RES (2)..(2): Xaa is C or S
KXSRVIMSMEGIVKPKRGVMIQITINSLAQPV

SEQ ID NO: 65492 - protein, 30 aa, Artificial Sequence
  Cyclic GFR-binding peptide
  MOD_RES (1)..(3): Xaa is C or S
XGXSRVVMNVQVEKIVNSSDDVKAVKVSRL

SEQ ID NO: 65493 - protein, 26 aa, Artificial Sequence
  Cyclic GFR-binding peptide
QLFVTAKKHQGQHPKIRIKRMQVPRE

SEQ ID NO: 65494 - protein, 33 aa, Artificial Sequence; identical to SEQ ID NO: 11746
  Cyclic GFR-binding peptide
  MOD_RES (27)..(28): Xaa is C or S

SEQ ID NO: 65495 - protein, 34 aa, Artificial Sequence; identical to SEQ ID NO: 11747
  Cyclic GFR-binding peptide
  MOD_RES (28)..(29): Xaa is C or S

SEQ ID NO: 65496 - protein, 40 aa, Artificial Sequence
  Cyclic GFR-binding peptide
  MOD_RES (1)..(3)..(40): Xaa is C or S
XAXELHEELRNSLQELKPKKRVYEYYLVTLPEHHVRSPQX

SEQ ID NO: 65497 - protein, 37 aa, Artificial Sequence; identical to SEQ ID NO: 11754
  Cyclic GFR-binding peptide
  MOD_RES (31)..(32): Xaa is C or S

SEQ ID NO: 65498 - protein, 30 aa, Artificial Sequence; identical to SEQ ID NO: 21682
  Cyclic GFR-binding peptide

SEQ ID NO: 65499 - protein, 38 aa, Artificial Sequence
  Cyclic GFR-binding peptide
  MOD_RES (1)..(33): Xaa is C or S
XSRVVMNSMEGIIVNSSDDMIQVTINSLKTPAXTPKTV

SEQ ID NO: 65500 - protein, 31 aa, Artificial Sequence
  Cyclic GFR-binding peptide
  MOD_RES (27)..(28): Xaa is C or S
EVTAKKVVKDYEDIKRMQVPRLETPVXXAKP

SEQ ID NO: 65501 - protein, 28 aa, Artificial Sequence
  Cyclic GFR-binding peptide
VIMNSLQEIKPTKGIYYLITLPELDQSV

SEQ ID NO: 65502 - protein, 40 aa, Artificial Sequence
  Cyclic GFR-binding peptide
  MOD_RES (1)..(3)..(35)..(36): Xaa is C or S
XGXGEVVMDSMEGIVVKENEDMIQMTINSLETPVXXAKPI

SEQ ID NO: 65503 - protein, 36 aa, Artificial Sequence; identical to SEQ ID NO: 21694
  Cyclic GFR-binding peptide
  MOD_RES (2)..(4): Xaa is C or S

SEQ ID NO: 65504 - protein, 42 aa, Artificial Sequence; identical to SEQ ID NO: 21696
  Cyclic GFR-binding peptide
  MOD_RES (1)..(3)..(37): Xaa is C or S

SEQ ID NO: 65505 - protein, 38 aa, Artificial Sequence; identical to SEQ ID NO: 11770
  Cyclic GFR-binding peptide
  MOD_RES (1)..(33)..(34): Xaa is C or S

SEQ ID NO: 65506 - protein, 28 aa, Artificial Sequence
  Cyclic GFR-binding peptide
  MOD_RES (26)..(27): Xaa is C or S
NSLQEIKPTKGIYYLITLPELDQSVXXP

SEQ ID NO: 65507 - protein, 38 aa, Artificial Sequence
  Cyclic GFR-binding peptide
  MOD_RES (2)..(4)..(36): Xaa is C or S
HXGXSRVVMNVQVEKIVNSSDDVKAVKVSRLKTPAXTP

SEQ ID NO: 65508 - protein, 34 aa, Artificial Sequence; identical to SEQ ID NO: 11780
  Cyclic GFR-binding peptide
  MOD_RES (1)..(3): Xaa is C or S

SEQ ID NO: 65509 - protein, 35 aa, Artificial Sequence; identical to SEQ ID NO: 21705
  Cyclic GFR-binding peptide
  MOD_RES (33)..(33): Xaa is C or S

SEQ ID NO: 65510 - protein, 26 aa, Artificial Sequence
  Cyclic GFR-binding peptide
MEVQVEKVVKDYEDVKAMKVSRLETP

SEQ ID NO: 65511 - protein, 29 aa, Artificial Sequence
  Cyclic GFR-binding peptide
  MOD_RES (1)..(1): Xaa is C or S
XSKVIMVTAKKIKPTKGIIKRIQVPRLDQ

SEQ ID NO: 65512 - protein, 39 aa, Artificial Sequence
  Cyclic GFR-binding peptide
  MOD_RES (2)..(4)..(35)..(36): Xaa is C or S
SXKXSRVIMSMEGIVKPKRGVMIQITINSLAQPVXXPAA

SEQ ID NO: 65513 - protein, 36 aa, Artificial Sequence
  Cyclic GFR-binding peptide
  MOD_RES (2)..(34)..(35): Xaa is C or S
GXGEVVMEVQVEKVVKDYEDVKAMKVSRLETPVXXA

SEQ ID NO: 65514 - protein, 36 aa, Artificial Sequence; identical to SEQ ID NO: 11789
  Cyclic GFR-binding peptide
  MOD_RES (1)..(32)..(33): Xaa is C or S

SEQ ID NO: 65515 - protein, 30 aa, Artificial Sequence; identical to SEQ ID NO: 11790
  Cyclic GFR-binding peptide
  MOD_RES (30)..(30): Xaa is C or S

SEQ ID NO: 65516 - protein, 30 aa, Artificial Sequence
  Cyclic GFR-binding peptide
  MOD_RES (1)..(1): Xaa is C or S
XKNHQLFNSLQEHQGQHPKIRYYVMPLPEE

SEQ ID NO: 65517 - protein, 21 aa, Artificial Sequence
  Cyclic GFR-binding peptide
MVTAKKIKPTKGIIKRIQVPR

SEQ ID NO: 65518 - protein, 23 aa, Artificial Sequence
  Cyclic GFR-binding peptide
VIMSMEGIVKPKRGVMIQITINS

SEQ ID NO: 65519 - protein, 29 aa, Artificial Sequence
  Cyclic GFR-binding peptide
  MOD_RES (2)..(4): Xaa is C or S
SXKXSKVIMVTAKKIKPTKGIIKRIQVPR

SEQ ID NO: 65520 - protein, 39 aa, Artificial Sequence
  Cyclic GFR-binding peptide
  MOD_RES (2)..(34)..(35): Xaa is C or S
GXSRVVMNVTAKKIVNSSDDIKRVQVPRLKTPAXXPKPV

SEQ ID NO: 65521 - protein, 36 aa, Artificial Sequence
  Cyclic GFR-binding peptide
  MOD_RES (32)..(32): Xaa is C or S
LRNSLQELKPKKRVYEYYLVTLPEHHVRSPQXKVSS

SEQ ID NO: 65522 - protein, 29 aa, Artificial Sequence
  Cyclic GFR-binding peptide
LHDELTNSLQEFIPKKRVIEYYVVPLPEL

SEQ ID NO: 65523 - protein, 32 aa, Artificial Sequence; identical to SEQ ID NO: 11806
  Cyclic GFR-binding peptide
  MOD_RES (26)..(26): Xaa is C or S

SEQ ID NO: 65524 - protein, 24 aa, Artificial Sequence
  Cyclic GFR-binding peptide
IMNSLQEIKPTKGIYYVIPLPELD

SEQ ID NO: 65525 - protein, 43 aa, Artificial Sequence
  Cyclic GFR-binding peptide
  MOD_RES (2)..(39): Xaa is C or S
KXALHDELTNSLQEFIPKKRVIEYYLVTLPELQVQTPRXQVNR

SEQ ID NO: 65526 - protein, 28 aa, Artificial Sequence
  Cyclic GFR-binding peptide
  MOD_RES (26)..(27): Xaa is C or S
NSLQEIVNSSDDYYVVPLPELKTPAXXP

SEQ ID NO: 65527 - protein, 25 aa, Artificial Sequence
  Cyclic GFR-binding peptide
SRVIMSMEGIVKPKRGVMIQITINS

SEQ ID NO: 65528 - protein, 37 aa, Artificial Sequence
  Cyclic GFR-binding peptide
  MOD_RES (2)..(4)..(36)..(37): Xaa is C or S
RXGXGEVVMDVQVEKVVKENEDVKAMKVSRLETPVXX

SEQ ID NO: 65529 - protein, 31 aa, Artificial Sequence; identical to SEQ ID NO: 21725
  Cyclic GFR-binding peptide
  MOD_RES (1)..(3): Xaa is C or S

SEQ ID NO: 65530 - protein, 34 aa, Artificial Sequence
  Cyclic GFR-binding peptide
  MOD_RES (31)..(32): Xaa is C or S
SRVIMVQVEKVKPKRGVVKAIKVSRLAQPVXXPA

SEQ ID NO: 65531 - protein, 29 aa, Artificial Sequence
  Cyclic GFR-binding peptide
  MOD_RES (26)..(27): Xaa is C or S
NSLQEIVNSSDDYYVVPLPELQTPAXXPK

SEQ ID NO: 65532 - protein, 35 aa, Artificial Sequence
  Cyclic GFR-binding peptide
  MOD_RES (29)..(30): Xaa is C or S
VVMVQVEKVKPTRGVVKAIKVSRLDQPVXXPSASA

SEQ ID NO: 65533 - protein, 27 aa, Artificial Sequence
  Cyclic GFR-binding peptide
  MOD_RES (1)..(1): Xaa is C or S
XSRVIMSMEGIVKPKRGVMIQITINSL

SEQ ID NO: 65534 - protein, 27 aa, Artificial Sequence
  Cyclic GFR-binding peptide
NHQLFVQVEKHQGQHPKIRVKAMKVSR

SEQ ID NO: 65535 - protein, 36 aa, Artificial Sequence; identical to SEQ ID NO: 11821
  Cyclic GFR-binding peptide
  MOD_RES (1)..(3)..(35): Xaa is C or S

SEQ ID NO: 65536 - protein, 29 aa, Artificial Sequence
  Cyclic GFR-binding peptide
KVIMSMEGIIKPTKGIMIQITINSLDQSV

SEQ ID NO: 65537 - protein, 45 aa, Artificial Sequence
  Cyclic GFR-binding peptide
  MOD_RES (2)..(4)..(41): Xaa is C or S
EXKXALHDELTNSLQEFIPKKRVIEYYVVPLPELQVQTPRXQVNR

SEQ ID NO: 65538 - protein, 34 aa, Artificial Sequence
  Cyclic GFR-binding peptide
  MOD_RES (2)..(4): Xaa is C or S
SXKXSKVVMSMEGIVKPTRGVMIQITINSLDQPV

SEQ ID NO: 65539 - protein, 27 aa, Artificial Sequence
  Cyclic GFR-binding peptide
  MOD_RES (2)..(2): Xaa is C or S
KXSRVIMSMEGIVKPKRGVMIQITINS

SEQ ID NO: 65540 - protein, 30 aa, Artificial Sequence
  Cyclic GFR-binding peptide
  MOD_RES (26)..(27): Xaa is C or S
SMEGIIKPTKGIMIQITINSLDQSVXXPSA

SEQ ID NO: 65541 - protein, 39 aa, Artificial Sequence
  Cyclic GFR-binding peptide
  MOD_RES (2)..(4)..(36)..(37): Xaa is C or S
RXGXGEVVMEVTAKKVVKDYEDIKRMQVPRLETPVXXAK

SEQ ID NO: 65542 - protein, 25 aa, Artificial Sequence
  Cyclic GFR-binding peptide
SRVIMVQVEKVKPKRGVVKAIKVSR

SEQ ID NO: 65543 - protein, 29 aa, Artificial Sequence
  Cyclic GFR-binding peptide
  MOD_RES (26)..(27): Xaa is C or S
VQVEKIKPTKGIVKAIKVSRLDQSVXXPS

SEQ ID NO: 65544 - protein, 29 aa, Artificial Sequence
  Cyclic GFR-binding peptide
  MOD_RES (1)..(1): Xaa is C or S
XSKVIMNSLQEIKPTKGIYYLITLPELDQ

SEQ ID NO: 65545 - protein, 36 aa, Artificial Sequence
  Cyclic GFR-binding peptide
  MOD_RES (30)..(31): Xaa is C or S
VVMNVTAKKIVNSSDDIKRVQVPRLKTPAXXPKPVY

SEQ ID NO: 65546 - protein, 31 aa, Artificial Sequence
  Cyclic GFR-binding peptide
  MOD_RES (29)..(29): Xaa is C or S
FNSLQEHQGQHPKIRYYVMPLPEEETPVXEL

SEQ ID NO: 65547 - protein, 38 aa, Artificial Sequence; identical to SEQ ID NO: 21758
  Cyclic GFR-binding peptide
  MOD_RES (1)..(38): Xaa is C or S

SEQ ID NO: 65548 - protein, 21 aa, Artificial Sequence
  Cyclic GFR-binding peptide
DNSLQEVVKENEDYYLMTLPE

SEQ ID NO: 65549 - protein, 28 aa, Artificial Sequence
  Cyclic GFR-binding peptide
VVMNSLQEVKPTRGVYYVIPLPELDQPV

SEQ ID NO: 65550 - protein, 22 aa, Artificial Sequence
  Cyclic GFR-binding peptide
SMEGIVKPTRGVMIQITINSLD

SEQ ID NO: 65551 - protein, 29 aa, Artificial Sequence
  Cyclic GFR-binding peptide
  MOD_RES (27)..(28): Xaa is C or S
NNSLQEIVNSSDDYYVVPLPELKTPAXXP

SEQ ID NO: 65552 - protein, 22 aa, Artificial Sequence
  Cyclic GFR-binding peptide
MDVTAKKVVKENEDIKRMQVPR

SEQ ID NO: 65553 - protein, 38 aa, Artificial Sequence; identical to SEQ ID NO: 11856
  Cyclic GFR-binding peptide
  MOD_RES (1)..(3)..(34)..(35): Xaa is C or S

SEQ ID NO: 65554 - protein, 20 aa, Artificial Sequence
  Cyclic GFR-binding peptide
VQVEKIVNSSDDVKAVKVSR

SEQ ID NO: 65555 - protein, 26 aa, Artificial Sequence
  Cyclic GFR-binding peptide
KVIMVQVEKIKPTKGIVKAIKVSRLD

SEQ ID NO: 65556 - protein, 31 aa, Artificial Sequence; identical to SEQ ID NO: 11860
  Cyclic GFR-binding peptide
  MOD_RES (29)..(30): Xaa is C or S

SEQ ID NO: 65557 - protein, 26 aa, Artificial Sequence
  Cyclic GFR-binding peptide
EELRNSLQELKPKKRVYEYYLVTLPE

SEQ ID NO: 65558 - protein, 39 aa, Artificial Sequence
  Cyclic GFR-binding peptide
  MOD_RES (2)..(4)..(35)..(36): Xaa is C or S
SXKXSKVVMVQVEKVKPTRGVVKAIKVSRLDQPVXXPSA

SEQ ID NO: 65559 - protein, 35 aa, Artificial Sequence
  Cyclic GFR-binding peptide
  MOD_RES (1)..(3)..(35): Xaa is C or S
XGXGEVVMDSMEGIVVKENEDMIQMTINSLETPVX

SEQ ID NO: 65560 - protein, 30 aa, Artificial Sequence; identical to SEQ ID NO: 11863
  Cyclic GFR-binding peptide
  MOD_RES (1)..(3): Xaa is C or S

SEQ ID NO: 65561 - protein, 34 aa, Artificial Sequence; identical to SEQ ID NO: 11864
  Cyclic GFR-binding peptide
  MOD_RES (1)..(3)..(34): Xaa is C or S

SEQ ID NO: 65562 - protein, 32 aa, Artificial Sequence; identical to SEQ ID NO: 11868
  Cyclic GFR-binding peptide
  MOD_RES (28)..(29): Xaa is C or S

SEQ ID NO: 65563 - protein, 28 aa, Artificial Sequence
  Cyclic GFR-binding peptide
EVVMEVTAKKVVKDYEDIKRMQVPRLET

SEQ ID NO: 65564 - protein, 37 aa, Artificial Sequence
  Cyclic GFR-binding peptide
  MOD_RES (1)..(3)..(35)..(36): Xaa is C or S
XGXSRVVMNVTAKKIVNSSDDIKRVQVPRLKTPAXXP

SEQ ID NO: 65565 - protein, 41 aa, Artificial Sequence; identical to SEQ ID NO: 11877
  Cyclic GFR-binding peptide
  MOD_RES (2)..(4)..(36)..(37): Xaa is C or S

SEQ ID NO: 65566 - protein, 32 aa, Artificial Sequence; identical to SEQ ID NO: 21775
  Cyclic GFR-binding peptide
  MOD_RES (30)..(30): Xaa is C or S

SEQ ID NO: 65567 - protein, 41 aa, Artificial Sequence
  Cyclic GFR-binding peptide
  MOD_RES (2)..(4)..(41): Xaa is C or S
AXAXELHEELRNSLQELKPKKRVYEYYVVPLPEHHVRSPQX

SEQ ID NO: 65568 - protein, 30 aa, Artificial Sequence; identical to SEQ ID NO: 11887
  Cyclic GFR-binding peptide
  MOD_RES (26)..(27): Xaa is C or S

SEQ ID NO: 65569 - protein, 33 aa, Artificial Sequence
  Cyclic GFR-binding peptide
  MOD_RES (32)..(32): Xaa is C or S
LRNSLQELKPKKRVYEYYVVPLPEHHVRSPQXK

SEQ ID NO: 65570 - protein, 28 aa, Artificial Sequence
  Cyclic GFR-binding peptide
SRVVMNNSLQEIVNSSDDYYVVPLPELK

SEQ ID NO: 65571 - protein, 34 aa, Artificial Sequence; identical to SEQ ID NO: 11892
  Cyclic GFR-binding peptide
  MOD_RES (1)..(3)..(34): Xaa is C or S

SEQ ID NO: 65572 - protein, 32 aa, Artificial Sequence
  Cyclic GFR-binding peptide
  MOD_RES (32)..(32): Xaa is C or S
SRVVMNSMEGIIVNSSDDMIQVTINSLKTPAX

SEQ ID NO: 65573 - protein, 31 aa, Artificial Sequence
  Cyclic GFR-binding peptide
  MOD_RES (27)..(28): Xaa is C or S
NVTAKKIVNSSDDIKRVQVPRLQTPAXXPKP

SEQ ID NO: 65574 - protein, 25 aa, Artificial Sequence
  Cyclic GFR-binding peptide
RVIMNSLQEVKPKRGVYYLITLPEL

SEQ ID NO: 65575 - protein, 29 aa, Artificial Sequence
  Cyclic GFR-binding peptide
  MOD_RES (1)..(1): Xaa is C or S
XSKVVMNSLQEVKPTRGVYYLITLPELDQ

SEQ ID NO: 65576 - protein, 29 aa, Artificial Sequence
  Cyclic GFR-binding peptide
  MOD_RES (1)..(1): Xaa is C or S
XSKVVMNSLQEVKPTRGVYYVIPLPELDQ

SEQ ID NO: 65577 - protein, 36 aa, Artificial Sequence
  Cyclic GFR-binding peptide
  MOD_RES (2)..(4)..(36): Xaa is C or S
RXGXGEVVMEVTAKKVVKDYEDIKRMQVPRLETPVX

SEQ ID NO: 65578 - protein, 33 aa, Artificial Sequence
  Cyclic GFR-binding peptide
  MOD_RES (30)..(31): Xaa is C or S
RVIMVTAKKVKPKRGVIKRIQVPRLAQPVXXPA

SEQ ID NO: 65579 - protein, 35 aa, Artificial Sequence
  Cyclic GFR-binding peptide
  MOD_RES (1)..(33)..(34): Xaa is C or S
XARVVMNSMEGIIVNSSDDMIQVTINSLQTPAXXP

SEQ ID NO: 65580 - protein, 22 aa, Artificial Sequence
  Cyclic GFR-binding peptide
IMNSLQEIKPTKGIYYVIPLPE

SEQ ID NO: 65581 - protein, 33 aa, Artificial Sequence; identical to SEQ ID NO: 21798
  Cyclic GFR-binding peptide
  MOD_RES (28)..(28): Xaa is C or S

SEQ ID NO: 65582 - protein, 35 aa, Artificial Sequence
  Cyclic GFR-binding peptide
  MOD_RES (31)..(32): Xaa is C or S
RVVMNSMEGIIVNSSDDMIQVTINSLKTPAXXPKP

SEQ ID NO: 65583 - protein, 30 aa, Artificial Sequence; identical to SEQ ID NO: 11918
  Cyclic GFR-binding peptide
  MOD_RES (1)..(1): Xaa is C or S

SEQ ID NO: 65584 - protein, 28 aa, Artificial Sequence
  Cyclic GFR-binding peptide
HQLFVTAKKHQGQHPKIRIKRMQVPREE

SEQ ID NO: 65585 - protein, 33 aa, Artificial Sequence; identical to SEQ ID NO: 21804
  Cyclic GFR-binding peptide

SEQ ID NO: 65586 - protein, 32 aa, Artificial Sequence
  Cyclic GFR-binding peptide
  MOD_RES (30)..(31): Xaa is C or S
KVIMVTAKKIKPTKGIIKRIQVPRLDQSVXXP

SEQ ID NO: 65587 - protein, 34 aa, Artificial Sequence; identical to SEQ ID NO: 11925
  Cyclic GFR-binding peptide
  MOD_RES (29)..(30): Xaa is C or S

SEQ ID NO: 65588 - protein, 40 aa, Artificial Sequence
  Cyclic GFR-binding peptide
  MOD_RES (2)..(4)..(35)..(36): Xaa is C or S
SXKXSKVVMSMEGIVKPTRGVMIQITINSLDQPVXXPSAS

SEQ ID NO: 65589 - protein, 36 aa, Artificial Sequence; identical to SEQ ID NO: 21805
  Cyclic GFR-binding peptide
  MOD_RES (2)..(2): Xaa is C or S

SEQ ID NO: 65590 - protein, 32 aa, Artificial Sequence
  Cyclic GFR-binding peptide
  MOD_RES (29)..(30): Xaa is C or S
VIMVQVEKVKPKRGVVKAIKVSRLAQPVXXPA

SEQ ID NO: 65591 - protein, 30 aa, Artificial Sequence; identical to SEQ ID NO: 21807
  Cyclic GFR-binding peptide
  MOD_RES (30)..(30): Xaa is C or S

SEQ ID NO: 65592 - protein, 31 aa, Artificial Sequence
  Cyclic GFR-binding peptide
  MOD_RES (26)..(26): Xaa is C or S
VTAKKIVNSSDDIKRVQVPRLKTPAXTPKTV

SEQ ID NO: 65593 - protein, 27 aa, Artificial Sequence
  Cyclic GFR-binding peptide
IMNSLQEIKPTKGIYYVIPLPELDQSV

SEQ ID NO: 65594 - protein, 24 aa, Artificial Sequence
  Cyclic GFR-binding peptide
SMEGIFIPKKRVIEMIQVTINSLQ

SEQ ID NO: 65595 - protein, 28 aa, Artificial Sequence
  Cyclic GFR-binding peptide
SKVIMNSLQEIKPTKGIYYLITLPELDQ

SEQ ID NO: 65596 - protein, 27 aa, Artificial Sequence
  Cyclic GFR-binding peptide
  MOD_RES (26)..(27): Xaa is C or S
VQVEKVKPKRGVVKAIKVSRLAQPVXX

SEQ ID NO: 65597 - protein, 32 aa, Artificial Sequence; identical to SEQ ID NO: 21818
  Cyclic GFR-binding peptide
  MOD_RES (31)..(31): Xaa is C or S

SEQ ID NO: 65598 - protein, 30 aa, Artificial Sequence
  Cyclic GFR-binding peptide
  MOD_RES (2)..(4): Xaa is C or S
RXGXGEVVMEVTAKKVVKDYEDIKRMQVPR

SEQ ID NO: 65599 - protein, 38 aa, Artificial Sequence
  Cyclic GFR-binding peptide
  MOD_RES (2)..(33)..(34): Xaa is C or S
KXSKVVMVQVEKVKPTRGVVKAIKVSRLDQPVXXPSAS

SEQ ID NO: 65600 - protein, 32 aa, Artificial Sequence
  Cyclic GFR-binding peptide
  MOD_RES (28)..(29): Xaa is C or S
MDSMEGIVVKENEDMIQMTINSLETPVXXAKP

SEQ ID NO: 65601 - protein, 28 aa, Artificial Sequence
  Cyclic GFR-binding peptide
SKVIMNSLQEIKPTKGIYYVIPLPELDQ

SEQ ID NO: 65602 - protein, 35 aa, Artificial Sequence
  Cyclic GFR-binding peptide
  MOD_RES (29)..(30): Xaa is C or S
VMNSMEGIIVNSSDDMIQVTINSLQTPAXXPKPVT

SEQ ID NO: 65603 - protein, 36 aa, Artificial Sequence
  Cyclic GFR-binding peptide
  MOD_RES (36)..(36): Xaa is C or S
LHDELTNSLQEFIPKKRVIEYYVVPLPELQVQTPRX

SEQ ID NO: 65604 - protein, 34 aa, Artificial Sequence; identical to SEQ ID NO: 21827
  Cyclic GFR-binding peptide
  MOD_RES (2)..(4): Xaa is C or S

SEQ ID NO: 65605 - protein, 36 aa, Artificial Sequence
  Cyclic GFR-binding peptide
  MOD_RES (30)..(30): Xaa is C or S
VVMNSMEGIIVNSSDDMIQVTINSLKTPAXTPKTVH

SEQ ID NO: 65606 - protein, 23 aa, Artificial Sequence
  Cyclic GFR-binding peptide
NSMEGIIVNSSDDMIQVTINSLK

SEQ ID NO: 65607 - protein, 36 aa, Artificial Sequence
  Cyclic GFR-binding peptide
  MOD_RES (30)..(31): Xaa is C or S
VVMEVTAKKVVKDYEDIKRMQVPRLETPVXXAKPIS

SEQ ID NO: 65608 - protein, 29 aa, Artificial Sequence
  Cyclic GFR-binding peptide
  MOD_RES (29)..(29): Xaa is C or S
VMESMEGIVVKDYEDMIQMTINSLETPVX

SEQ ID NO: 65609 - protein, 33 aa, Artificial Sequence; identical to SEQ ID NO: 21834
  Cyclic GFR-binding peptide
  MOD_RES (2)..(4): Xaa is C or S

SEQ ID NO: 65610 - protein, 35 aa, Artificial Sequence
  Cyclic GFR-binding peptide
  MOD_RES (31)..(32): Xaa is C or S
RVVMNVQVEKIVNSSDDVKAVKVSRLKTPAXXPKP

SEQ ID NO: 65611 - protein, 24 aa, Artificial Sequence
  Cyclic GFR-binding peptide
MNSLQEVKPTRGVYYLITLPELDQ

SEQ ID NO: 65612 - protein, 29 aa, Artificial Sequence
  Cyclic GFR-binding peptide
  MOD_RES (27)..(28): Xaa is C or S
MVQVEKVKPKRGVVKAIKVSRLAQPVXXP

SEQ ID NO: 65613 - protein, 35 aa, Artificial Sequence
  Cyclic GFR-binding peptide
  MOD_RES (30)..(31): Xaa is C or S
KVIMVQVEKIKPTKGIVKAIKVSRLDQSVXXPSAS

SEQ ID NO: 65614 - protein, 43 aa, Artificial Sequence; identical to SEQ ID NO: 21839
  Cyclic GFR-binding peptide
  MOD_RES (2)..(4)..(41): Xaa is C or S

SEQ ID NO: 65615 - protein, 39 aa, Artificial Sequence
  Cyclic GFR-binding peptide
  MOD_RES (1)..(3)..(35)..(36): Xaa is C or S
XGXGEVVMESMEGIVVKDYEDMIQMTINSLETPVXXAKP

SEQ ID NO: 65616 - protein, 28 aa, Artificial Sequence
  Cyclic GFR-binding peptide
  MOD_RES (2)..(2): Xaa is C or S
GXGEVVMDNSLQEVVKENEDYYLMTLPE

SEQ ID NO: 65617 - protein, 31 aa, Artificial Sequence; identical to SEQ ID NO: 11973
  Cyclic GFR-binding peptide

SEQ ID NO: 65618 - protein, 30 aa, Artificial Sequence; identical to SEQ ID NO: 21842
  Cyclic GFR-binding peptide

SEQ ID NO: 65619 - protein, 32 aa, Artificial Sequence
  Cyclic GFR-binding peptide
ELRNSLQELKPKKRVYEYYVVPLPEHHVRSPQ

SEQ ID NO: 65620 - protein, 26 aa, Artificial Sequence
  Cyclic GFR-binding peptide
MNSLQEVKPKRGVYYLITLPELAQPV

SEQ ID NO: 65621 - protein, 30 aa, Artificial Sequence; identical to SEQ ID NO: 11978
  Cyclic GFR-binding peptide
  MOD_RES (1)..(3): Xaa is C or S

SEQ ID NO: 65622 - protein, 33 aa, Artificial Sequence
  Cyclic GFR-binding peptide
  MOD_RES (27)..(28): Xaa is C or S
MVQVEKVKPKRGVVKAIKVSRLAQPVXXPAASA

SEQ ID NO: 65623 - protein, 32 aa, Artificial Sequence
  Cyclic GFR-binding peptide
  MOD_RES (1)..(3): Xaa is C or S
XGXGEVVMEVTAKKVVKDYEDIKRMQVPRLET

SEQ ID NO: 65624 - protein, 32 aa, Artificial Sequence
  Cyclic GFR-binding peptide
  MOD_RES (2)..(4): Xaa is C or S
SXKXSKVIMVTAKKIKPTKGIIKRIQVPRLDQ

SEQ ID NO: 65625 - protein, 33 aa, Artificial Sequence
  Cyclic GFR-binding peptide
  MOD_RES (2)..(4): Xaa is C or S
HXGXARVVMNVQVEKIVNSSDDVKAVKVSRLQT

SEQ ID NO: 65626 - protein, 36 aa, Artificial Sequence
  Cyclic GFR-binding peptide
  MOD_RES (2)..(2): Xaa is C or S
AXELHEELRNSLQELKPKKRVYEYYLVTLPEHHVRS

SEQ ID NO: 65627 - protein, 25 aa, Artificial Sequence
  Cyclic GFR-binding peptide
SKVIMVQVEKIKPTKGIVKAIKVSR

SEQ ID NO: 65628 - protein, 30 aa, Artificial Sequence; identical to SEQ ID NO: 11983
  Cyclic GFR-binding peptide

SEQ ID NO: 65629 - protein, 34 aa, Artificial Sequence; identical to SEQ ID NO: 21855
  Cyclic GFR-binding peptide
  MOD_RES (2)..(4): Xaa is C or S

SEQ ID NO: 65630 - protein, 24 aa, Artificial Sequence
  Cyclic GFR-binding peptide
RVIMVTAKKVKPKRGVIKRIQVPR

SEQ ID NO: 65631 - protein, 28 aa, Artificial Sequence
  Cyclic GFR-binding peptide
  MOD_RES (2)..(2): Xaa is C or S
GXGEVVMESMEGIVVKDYEDMIQMTINS

SEQ ID NO: 65632 - protein, 36 aa, Artificial Sequence
  Cyclic GFR-binding peptide
  MOD_RES (30)..(31): Xaa is C or S
VVMNVTAKKIVNSSDDIKRVQVPRLQTPAXXPKPVT

SEQ ID NO: 65633 - protein, 30 aa, Artificial Sequence
  Cyclic GFR-binding peptide
  MOD_RES (28)..(29): Xaa is C or S
VMVQVEKVKPTRGVVKAIKVSRLDQPVXXP

SEQ ID NO: 65634 - protein, 31 aa, Artificial Sequence; identical to SEQ ID NO: 21857
  Cyclic GFR-binding peptide
  MOD_RES (1)..(1): Xaa is C or S

SEQ ID NO: 65635 - protein, 37 aa, Artificial Sequence; identical to SEQ ID NO: 11988
  Cyclic GFR-binding peptide
  MOD_RES (31)..(32): Xaa is C or S

SEQ ID NO: 65636 - protein, 33 aa, Artificial Sequence; identical to SEQ ID NO: 21862
  Cyclic GFR-binding peptide
  MOD_RES (32)..(32): Xaa is C or S

SEQ ID NO: 65637 - protein, 23 aa, Artificial Sequence
  Cyclic GFR-binding peptide
FNSLQEHQGQHPKIRYYVMPLPE

SEQ ID NO: 65638 - protein, 36 aa, Artificial Sequence; identical to SEQ ID NO: 11992
  Cyclic GFR-binding peptide
  MOD_RES (2)..(4)..(36): Xaa is C or S

SEQ ID NO: 65639 - protein, 33 aa, Artificial Sequence; identical to SEQ ID NO: 11993
  Cyclic GFR-binding peptide
  MOD_RES (28)..(29): Xaa is C or S

SEQ ID NO: 65640 - protein, 30 aa, Artificial Sequence; identical to SEQ ID NO: 21864
  Cyclic GFR-binding peptide

SEQ ID NO: 65641 - protein, 28 aa, Artificial Sequence
  Cyclic GFR-binding peptide
KVVMNSLQEVKPTRGVYYVIPLPELDQP

SEQ ID NO: 65642 - protein, 33 aa, Artificial Sequence; identical to SEQ ID NO: 11997
  Cyclic GFR-binding peptide
  MOD_RES (30)..(31): Xaa is C or S

SEQ ID NO: 65643 - protein, 33 aa, Artificial Sequence; identical to SEQ ID NO: 21867
  Cyclic GFR-binding peptide
  MOD_RES (2)..(4): Xaa is C or S

SEQ ID NO: 65644 - protein, 37 aa, Artificial Sequence; identical to SEQ ID NO: 21869
  Cyclic GFR-binding peptide
  MOD_RES (37)..(37): Xaa is C or S

SEQ ID NO: 65645 - protein, 31 aa, Artificial Sequence
  Cyclic GFR-binding peptide
HEELRNSLQELKPKKRVYEYYLVTLPEHHVR

SEQ ID NO: 65646 - protein, 40 aa, Artificial Sequence
  Cyclic GFR-binding peptide
  MOD_RES (2)..(4)..(36)..(37): Xaa is C or S
HXGXSRVVMNSMEGIIVNSSDDMIQVTINSLKTPAXXPKP

SEQ ID NO: 65647 - protein, 29 aa, Artificial Sequence
  Cyclic GFR-binding peptide
  MOD_RES (27)..(28): Xaa is C or S
MVTAKKVKPTRGVIKRIQVPRLDQPVXXP

SEQ ID NO: 65648 - protein, 40 aa, Artificial Sequence; identical to SEQ ID NO: 21878
  Cyclic GFR-binding peptide
  MOD_RES (2)..(4): Xaa is C or S

SEQ ID NO: 65649 - protein, 26 aa, Artificial Sequence
  Cyclic GFR-binding peptide
NSLQEFIPKKRVIEYYLVTLPELQVQ

SEQ ID NO: 65650 - protein, 25 aa, Artificial Sequence
  Cyclic GFR-binding peptide
RVVMNVQVEKIVNSSDDVKAVKVSR

SEQ ID NO: 65651 - protein, 32 aa, Artificial Sequence
  Cyclic GFR-binding peptide
  MOD_RES (26)..(26): Xaa is C or S
VTAKKIVNSSDDIKRVQVPRLKTPAXTPKTVH

SEQ ID NO: 65652 - protein, 31 aa, Artificial Sequence; identical to SEQ ID NO: 12004
  Cyclic GFR-binding peptide
  MOD_RES (27)..(28): Xaa is C or S

SEQ ID NO: 65653 - protein, 33 aa, Artificial Sequence
  Cyclic GFR-binding peptide
  MOD_RES (28)..(29): Xaa is C or S
MNVTAKKIVNSSDDIKRVQVPRLQTPAXXPKPV

SEQ ID NO: 65654 - protein, 25 aa, Artificial Sequence
  Cyclic GFR-binding peptide
MDNSLQEVVKENEDYYVMPLPELET

SEQ ID NO: 65655 - protein, 24 aa, Artificial Sequence
  Cyclic GFR-binding peptide
NSLQELKPKKRVYEYYVVPLPEHH

SEQ ID NO: 65656 - protein, 29 aa, Artificial Sequence
  Cyclic GFR-binding peptide
VVMDVTAKKVVKENEDIKRMQVPRLETPV

SEQ ID NO: 65657 - protein, 35 aa, Artificial Sequence
  Cyclic GFR-binding peptide
  MOD_RES (31)..(31): Xaa is C or S
RNSLQELKPKKRVYEYYLVTLPEHHVRSPQXKVSS

SEQ ID NO: 65658 - protein, 30 aa, Artificial Sequence; identical to SEQ ID NO: 46805
  Cyclic GFR-binding peptide
  MOD_RES (27)..(28): Xaa is C or S

SEQ ID NO: 65659 - protein, 26 aa, Artificial Sequence
  Cyclic GFR-binding peptide
VMESMEGIVVKDYEDMIQMTINSLET

SEQ ID NO: 65660 - protein, 33 aa, Artificial Sequence
  Cyclic GFR-binding peptide
  MOD_RES (28)..(28): Xaa is C or S
MNVTAKKIVNSSDDIKRVQVPRLKTPAXTPKTV

SEQ ID NO: 65661 - protein, 42 aa, Artificial Sequence; identical to SEQ ID NO: 21891
  Cyclic GFR-binding peptide
  MOD_RES (1)..(3)..(40): Xaa is C or S

SEQ ID NO: 65662 - protein, 38 aa, Artificial Sequence
  Cyclic GFR-binding peptide
  MOD_RES (33)..(33): Xaa is C or S
NHQLFNSLQEHQGQHPKIRYYLMTLPEEETPVXELGED

SEQ ID NO: 65663 - protein, 29 aa, Artificial Sequence
  Cyclic GFR-binding peptide
  MOD_RES (2)..(4): Xaa is C or S
SXKXSKVIMNSLQEIKPTKGIYYLITLPE

SEQ ID NO: 65664 - protein, 25 aa, Artificial Sequence
  Cyclic GFR-binding peptide
TNSLQEFIPKKRVIEYYLVTLPELQ

SEQ ID NO: 65665 - protein, 35 aa, Artificial Sequence; identical to SEQ ID NO: 12027
  Cyclic GFR-binding peptide
  MOD_RES (1)..(3)..(34)..(35): Xaa is C or S

SEQ ID NO: 65666 - protein, 38 aa, Artificial Sequence
  Cyclic GFR-binding peptide
  MOD_RES (1)..(32)..(33): Xaa is C or S
XSKVIMVQVEKIKPTKGIVKAIKVSRLDQSVXXPSASA

SEQ ID NO: 65667 - protein, 27 aa, Artificial Sequence
  Cyclic GFR-binding peptide
SRVIMVTAKKVKPKRGVIKRIQVPRLA

SEQ ID NO: 65668 - protein, 27 aa, Artificial Sequence
  Cyclic GFR-binding peptide
KVIMNSLQEIKPTKGIYYVIPLPELDQ

SEQ ID NO: 65669 - protein, 33 aa, Artificial Sequence; identical to SEQ ID NO: 12033
  Cyclic GFR-binding peptide
  MOD_RES (1)..(3): Xaa is C or S

SEQ ID NO: 65670 - protein, 33 aa, Artificial Sequence
  Cyclic GFR-binding peptide
  MOD_RES (32)..(33): Xaa is C or S
GEVVMESMEGIVVKDYEDMIQMTINSLETPVXX

SEQ ID NO: 65671 - protein, 20 aa, Artificial Sequence
  Cyclic GFR-binding peptide
VQVEKVKPKRGVVKAIKVSR

SEQ ID NO: 65672 - protein, 34 aa, Artificial Sequence; identical to SEQ ID NO: 12036
  Cyclic GFR-binding peptide
  MOD_RES (2)..(4): Xaa is C or S

SEQ ID NO: 65673 - protein, 22 aa, Artificial Sequence
  Cyclic GFR-binding peptide
NSLQELKPKKRVYEYYLVTLPE

SEQ ID NO: 65674 - protein, 31 aa, Artificial Sequence; identical to SEQ ID NO: 12038
  Cyclic GFR-binding peptide

SEQ ID NO: 65675 - protein, 33 aa, Artificial Sequence
  Cyclic GFR-binding peptide
  MOD_RES (30)..(31): Xaa is C or S
KVIMVQVEKIKPTKGIVKAIKVSRLDQSVXXPS

SEQ ID NO: 65676 - protein, 39 aa, Artificial Sequence; identical to SEQ ID NO: 12040
  Cyclic GFR-binding peptide
  MOD_RES (1)..(3)..(35): Xaa is C or S

SEQ ID NO: 65677 - protein, 35 aa, Artificial Sequence
  Cyclic GFR-binding peptide
  MOD_RES (2)..(4): Xaa is C or S
HXGXARVVMNVQVEKIVNSSDDVKAVKVSRLQTPA

SEQ ID NO: 65678 - protein, 31 aa, Artificial Sequence; identical to SEQ ID NO: 12044
  Cyclic GFR-binding peptide
  MOD_RES (28)..(29): Xaa is C or S

SEQ ID NO: 65679 - protein, 34 aa, Artificial Sequence
  Cyclic GFR-binding peptide
  MOD_RES (1)..(3): Xaa is C or S
XGXGEVVMDVTAKKVVKENEDIKRMQVPRLETPV

SEQ ID NO: 65680 - protein, 26 aa, Artificial Sequence
  Cyclic GFR-binding peptide
  MOD_RES (1)..(1): Xaa is C or S
XSKVVMVTAKKVKPTRGVIKRIQVPR

SEQ ID NO: 65681 - protein, 29 aa, Artificial Sequence
  Cyclic GFR-binding peptide
  MOD_RES (1)..(3): Xaa is C or S
XGXGEVVMDVTAKKVVKENEDIKRMQVPR

SEQ ID NO: 65682 - protein, 32 aa, Artificial Sequence; identical to SEQ ID NO: 12052
  Cyclic GFR-binding peptide
  MOD_RES (1)..(32): Xaa is C or S

SEQ ID NO: 65683 - protein, 32 aa, Artificial Sequence
  Cyclic GFR-binding peptide
  MOD_RES (1)..(3): Xaa is C or S
XKXSRVIMSMEGIVKPKRGVMIQITINSLAQP

SEQ ID NO: 65684 - protein, 29 aa, Artificial Sequence
  Cyclic GFR-binding peptide
  MOD_RES (1)..(3): Xaa is C or S
XKXSKVVMNSLQEVKPTRGVYYVIPLPEL

SEQ ID NO: 65685 - protein, 37 aa, Artificial Sequence; identical to SEQ ID NO: 46834
  Cyclic GFR-binding peptide
  MOD_RES (1)..(32)..(33): Xaa is C or S

SEQ ID NO: 65686 - protein, 31 aa, Artificial Sequence
  Cyclic GFR-binding peptide
  MOD_RES (28)..(29): Xaa is C or S
MESMEGIVVKDYEDMIQMTINSLETPVXXAK

SEQ ID NO: 65687 - protein, 33 aa, Artificial Sequence
  Cyclic GFR-binding peptide
  MOD_RES (28)..(29): Xaa is C or S
VMSMEGIVKPTRGVMIQITINSLDQPVXXPSAS

SEQ ID NO: 65688 - protein, 32 aa, Artificial Sequence
  Cyclic GFR-binding peptide
  MOD_RES (2)..(2): Xaa is C or S
GXGEVVMDVTAKKVVKENEDIKRMQVPRLETP

SEQ ID NO: 65689 - protein, 24 aa, Artificial Sequence
  Cyclic GFR-binding peptide
VMEVQVEKVVKDYEDVKAMKVSRL

SEQ ID NO: 65690 - protein, 35 aa, Artificial Sequence; identical to SEQ ID NO: 21917
  Cyclic GFR-binding peptide
  MOD_RES (30)..(30): Xaa is C or S

SEQ ID NO: 65691 - protein, 33 aa, Artificial Sequence; identical to SEQ ID NO: 21918
  Cyclic GFR-binding peptide
  MOD_RES (2)..(4): Xaa is C or S

SEQ ID NO: 65692 - protein, 29 aa, Artificial Sequence
  Cyclic GFR-binding peptide
KVVMNSLQEVKPTRGVYYLITLPELDQPV

SEQ ID NO: 65693 - protein, 31 aa, Artificial Sequence; identical to SEQ ID NO: 12065
  Cyclic GFR-binding peptide
  MOD_RES (27)..(27): Xaa is C or S

SEQ ID NO: 65694 - protein, 34 aa, Artificial Sequence
  Cyclic GFR-binding peptide
  MOD_RES (32)..(32): Xaa is C or S
LTNSLQEFIPKKRVIEYYVVPLPELQVQTPRXQV

SEQ ID NO: 65695 - protein, 39 aa, Artificial Sequence
  Cyclic GFR-binding peptide
  MOD_RES (2)..(4)..(35)..(36): Xaa is C or S
SXKXSKVIMVTAKKIKPTKGIIKRIQVPRLDQSVXXPSA

SEQ ID NO: 65696 - protein, 33 aa, Artificial Sequence
  Cyclic GFR-binding peptide
  MOD_RES (32)..(32): Xaa is C or S
SRVVMNVTAKKIVNSSDDIKRVQVPRLKTPAXT

SEQ ID NO: 65697 - protein, 31 aa, Artificial Sequence
  Cyclic GFR-binding peptide
  MOD_RES (31)..(31): Xaa is C or S
EVVMEVQVEKVVKDYEDVKAMKVSRLETPVX

SEQ ID NO: 65698 - protein, 38 aa, Artificial Sequence; identical to SEQ ID NO: 12069
  Cyclic GFR-binding peptide
  MOD_RES (32)..(33): Xaa is C or S

SEQ ID NO: 65699 - protein, 32 aa, Artificial Sequence
  Cyclic GFR-binding peptide
ELRNSLQELKPKKRVYEYYLVTLPEHHVRSPQ

SEQ ID NO: 65700 - protein, 35 aa, Artificial Sequence
  Cyclic GFR-binding peptide
  MOD_RES (35)..(35): Xaa is C or S
HDELTNSLQEFIPKKRVIEYYVVPLPELQVQTPRX

SEQ ID NO: 65701 - protein, 35 aa, Artificial Sequence; identical to SEQ ID NO: 12075
  Cyclic GFR-binding peptide
  MOD_RES (1)..(3)..(35): Xaa is C or S

SEQ ID NO: 65702 - protein, 34 aa, Artificial Sequence
  Cyclic GFR-binding peptide
  MOD_RES (31)..(32): Xaa is C or S
SKVIMVQVEKIKPTKGIVKAIKVSRLDQSVXXPS

SEQ ID NO: 65703 - protein, 37 aa, Artificial Sequence; identical to SEQ ID NO: 21936
  Cyclic GFR-binding peptide
  MOD_RES (33)..(33): Xaa is C or S

SEQ ID NO: 65704 - protein, 35 aa, Artificial Sequence
  Cyclic GFR-binding peptide
  MOD_RES (30)..(31): Xaa is C or S
KVVMVTAKKVKPTRGVIKRIQVPRLDQPVXXPSAS

SEQ ID NO: 65705 - protein, 37 aa, Artificial Sequence; identical to SEQ ID NO: 12081
  Cyclic GFR-binding peptide
  MOD_RES (1)..(3)..(35)..(36): Xaa is C or S

SEQ ID NO: 65706 - protein, 25 aa, Artificial Sequence
  Cyclic GFR-binding peptide
MNSMEGIIVNSSDDMIQVTINSLKT

SEQ ID NO: 65707 - protein, 35 aa, Artificial Sequence; identical to SEQ ID NO: 21943
  Cyclic GFR-binding peptide
  MOD_RES (32)..(32): Xaa is C or S

SEQ ID NO: 65708 - protein, 34 aa, Artificial Sequence; identical to SEQ ID NO: 12083
  Cyclic GFR-binding peptide
  MOD_RES (32)..(32): Xaa is C or S

SEQ ID NO: 65709 - protein, 26 aa, Artificial Sequence
  Cyclic GFR-binding peptide
VMNVTAKKIVNSSDDIKRVQVPRLKT

SEQ ID NO: 65710 - protein, 29 aa, Artificial Sequence
  Cyclic GFR-binding peptide
  MOD_RES (2)..(4): Xaa is C or S
SXKXSRVIMSMEGIVKPKRGVMIQITINS

SEQ ID NO: 65711 - protein, 36 aa, Artificial Sequence
  Cyclic GFR-binding peptide
  MOD_RES (2)..(4)..(36): Xaa is C or S
HXGXARVVMNVQVEKIVNSSDDVKAVKVSRLQTPAX

SEQ ID NO: 65712 - protein, 28 aa, Artificial Sequence
  Cyclic GFR-binding peptide
  MOD_RES (27)..(28): Xaa is C or S
MSMEGIIKPTKGIMIQITINSLDQSVXX

SEQ ID NO: 65713 - protein, 39 aa, Artificial Sequence; identical to SEQ ID NO: 21953
  Cyclic GFR-binding peptide
  MOD_RES (34)..(34): Xaa is C or S

SEQ ID NO: 65714 - protein, 39 aa, Artificial Sequence
  Cyclic GFR-binding peptide
  MOD_RES (36)..(36): Xaa is C or S
LHEELRNSLQELKPKKRVYEYYLVTLPEHHVRSPQXKVS

SEQ ID NO: 65715 - protein, 25 aa, Artificial Sequence
  Cyclic GFR-binding peptide
ELRSMEGILKPKKRVYEMIQVTINS

SEQ ID NO: 65716 - protein, 35 aa, Artificial Sequence
  Cyclic GFR-binding peptide
  MOD_RES (1)..(33)..(34): Xaa is C or S
XSRVVMNSMEGIIVNSSDDMIQVTINSLKTPAXXP

SEQ ID NO: 65717 - protein, 30 aa, Artificial Sequence
  Cyclic GFR-binding peptide
  MOD_RES (2)..(4): Xaa is C or S
SXKXSRVIMSMEGIVKPKRGVMIQITINSL

SEQ ID NO: 65718 - protein, 40 aa, Artificial Sequence
  Cyclic GFR-binding peptide
  MOD_RES (2)..(4)..(36)..(37): Xaa is C or S
HXGXARVVMNSMEGIIVNSSDDMIQVTINSLQTPAXXPKP

SEQ ID NO: 65719 - protein, 33 aa, Artificial Sequence; identical to SEQ ID NO: 21960
  Cyclic GFR-binding peptide
  MOD_RES (32)..(32): Xaa is C or S

SEQ ID NO: 65720 - protein, 35 aa, Artificial Sequence
  Cyclic GFR-binding peptide
  MOD_RES (1)..(3)..(34)..(35): Xaa is C or S
XKXSKVIMVTAKKIKPTKGIIKRIQVPRLDQSVXX

SEQ ID NO: 65721 - protein, 29 aa, Artificial Sequence
  Cyclic GFR-binding peptide
  MOD_RES (1)..(1): Xaa is C or S
XGEVVMDNSLQEVVKENEDYYLMTLPELE

SEQ ID NO: 65722 - protein, 44 aa, Artificial Sequence; identical to SEQ ID NO: 21963
  Cyclic GFR-binding peptide
  MOD_RES (1)..(3)..(40): Xaa is C or S

SEQ ID NO: 65723 - protein, 34 aa, Artificial Sequence
  Cyclic GFR-binding peptide
  MOD_RES (2)..(4): Xaa is C or S
HXGXARVVMNVTAKKIVNSSDDIKRVQVPRLQTP

SEQ ID NO: 65724 - protein, 39 aa, Artificial Sequence
  Cyclic GFR-binding peptide
  MOD_RES (1)..(3): Xaa is C or S
XAXELHEELRNSLQELKPKKRVYEYYVVPLPEHHVRSPQ

SEQ ID NO: 65725 - protein, 29 aa, Artificial Sequence
  Cyclic GFR-binding peptide
SRVVMNSMEGIIVNSSDDMIQVTINSLKT

SEQ ID NO: 65726 - protein, 27 aa, Artificial Sequence
  Cyclic GFR-binding peptide
  MOD_RES (26)..(27): Xaa is C or S
VQVEKIVNSSDDVKAVKVSRLKTPAXX

SEQ ID NO: 65727 - protein, 35 aa, Artificial Sequence
  Cyclic GFR-binding peptide
  MOD_RES (1)..(3)..(34)..(35): Xaa is C or S
XKXSRVIMVTAKKVKPKRGVIKRIQVPRLAQPVXX

SEQ ID NO: 65728 - protein, 31 aa, Artificial Sequence
  Cyclic GFR-binding peptide
  MOD_RES (30)..(31): Xaa is C or S
RVIMVTAKKVKPKRGVIKRIQVPRLAQPVXX

SEQ ID NO: 65729 - protein, 35 aa, Artificial Sequence
  Cyclic GFR-binding peptide
  MOD_RES (1)..(33)..(34): Xaa is C or S
XGEVVMESMEGIVVKDYEDMIQMTINSLETPVXXA

SEQ ID NO: 65730 - protein, 30 aa, Artificial Sequence; identical to SEQ ID NO: 21975
  Cyclic GFR-binding peptide

SEQ ID NO: 65731 - protein, 34 aa, Artificial Sequence
  Cyclic GFR-binding peptide
  MOD_RES (1)..(3)..(34): Xaa is C or S
XKXSRVIMVTAKKVKPKRGVIKRIQVPRLAQPVX

SEQ ID NO: 65732 - protein, 23 aa, Artificial Sequence
  Cyclic GFR-binding peptide
MDVTAKKVVKENEDIKRMQVPRL

SEQ ID NO: 65733 - protein, 34 aa, Artificial Sequence; identical to SEQ ID NO: 12123
  Cyclic GFR-binding peptide
  MOD_RES (1)..(3)..(34): Xaa is C or S

SEQ ID NO: 65734 - protein, 30 aa, Artificial Sequence
  Cyclic GFR-binding peptide
  MOD_RES (1)..(3): Xaa is C or S
XGXGEVVMDVTAKKVVKENEDIKRMQVPRL

SEQ ID NO: 65735 - protein, 25 aa, Artificial Sequence
  Cyclic GFR-binding peptide
NNSLQEIVNSSDDYYVVPLPELKTP

SEQ ID NO: 65736 - protein, 38 aa, Artificial Sequence; identical to SEQ ID NO: 21981
  Cyclic GFR-binding peptide
  MOD_RES (2)..(4): Xaa is C or S

SEQ ID NO: 65737 - protein, 28 aa, Artificial Sequence
  Cyclic GFR-binding peptide
  MOD_RES (28)..(28): Xaa is C or S
MESMEGIVVKDYEDMIQMTINSLETPVX

SEQ ID NO: 65738 - protein, 29 aa, Artificial Sequence
  Cyclic GFR-binding peptide
  MOD_RES (1)..(1): Xaa is C or S
XGEVVMEVQVEKVVKDYEDVKAMKVSRLE

SEQ ID NO: 65739 - protein, 28 aa, Artificial Sequence
  Cyclic GFR-binding peptide
VIMVTAKKIKPTKGIIKRIQVPRLDQSV

SEQ ID NO: 65740 - protein, 31 aa, Artificial Sequence
  Cyclic GFR-binding peptide
ARVVMNVQVEKIVNSSDDVKAVKVSRLQTPA

SEQ ID NO: 65741 - protein, 36 aa, Artificial Sequence
  Cyclic GFR-binding peptide
  MOD_RES (30)..(31): Xaa is C or S
VVMDVQVEKVVKENEDVKAMKVSRLETPVXXAKPIK

SEQ ID NO: 65742 - protein, 33 aa, Artificial Sequence
  Cyclic GFR-binding peptide
  MOD_RES (30)..(31): Xaa is C or S
VVMNSMEGIIVNSSDDMIQVTINSLKTPAXXPK

SEQ ID NO: 65743 - protein, 22 aa, Artificial Sequence
  Cyclic GFR-binding peptide
SMEGIIVNSSDDMIQVTINSLQ

SEQ ID NO: 65744 - protein, 24 aa, Artificial Sequence
  Cyclic GFR-binding peptide
LFNSLQEHQGQHPKIRYYLMTLPE

SEQ ID NO: 65745 - protein, 28 aa, Artificial Sequence
  Cyclic GFR-binding peptide
  MOD_RES (27)..(28): Xaa is C or S
ESMEGIVVKDYEDMIQMTINSLETPVXX

SEQ ID NO: 65746 - protein, 33 aa, Artificial Sequence
  Cyclic GFR-binding peptide
  MOD_RES (27)..(28): Xaa is C or S
MVQVEKIKPTKGIVKAIKVSRLDQSVXXPSASA

SEQ ID NO: 65747 - protein, 32 aa, Artificial Sequence
  Cyclic GFR-binding peptide
  MOD_RES (27)..(28): Xaa is C or S
DSMEGIVVKENEDMIQMTINSLETPVXXAKPI

SEQ ID NO: 65748 - protein, 24 aa, Artificial Sequence
  Cyclic GFR-binding peptide
MVTAKKVKPKRGVIKRIQVPRLAQ

SEQ ID NO: 65749 - protein, 33 aa, Artificial Sequence; identical to SEQ ID NO: 12150
  Cyclic GFR-binding peptide
  MOD_RES (29)..(30): Xaa is C or S

SEQ ID NO: 65750 - protein, 43 aa, Artificial Sequence
  Cyclic GFR-binding peptide
  MOD_RES (2)..(39): Xaa is C or S
AXELHEELRNSLQELKPKKRVYEYYLVTLPEHHVRSPQXKVSS

SEQ ID NO: 65751 - protein, 32 aa, Artificial Sequence
  Cyclic GFR-binding peptide
  MOD_RES (29)..(29): Xaa is C or S
FNSLQEHQGQHPKIRYYVMPLPEEETPVXELG

SEQ ID NO: 65752 - protein, 28 aa, Artificial Sequence
  Cyclic GFR-binding peptide
  MOD_RES (1)..(1): Xaa is C or S
XSRVVMNSMEGIIVNSSDDMIQVTINSL

SEQ ID NO: 65753 - protein, 41 aa, Artificial Sequence
  Cyclic GFR-binding peptide
  MOD_RES (1)..(3)..(40): Xaa is C or S
XAXELHEELRNSLQELKPKKRVYEYYVVPLPEHHVRSPQXK

SEQ ID NO: 65754 - protein, 26 aa, Artificial Sequence
  Cyclic GFR-binding peptide
QLFNSLQEHQGQHPKIRYYVMPLPEE

SEQ ID NO: 65755 - protein, 23 aa, Artificial Sequence
  Cyclic GFR-binding peptide
VIMNSLQEVKPKRGVYYLITLPE

SEQ ID NO: 65756 - protein, 26 aa, Artificial Sequence
  Cyclic GFR-binding peptide
  MOD_RES (1)..(1): Xaa is C or S
XSKVVMNSLQEVKPTRGVYYVIPLPE

SEQ ID NO: 65757 - protein, 36 aa, Artificial Sequence
  Cyclic GFR-binding peptide
  MOD_RES (1)..(32)..(33): Xaa is C or S
XSKVIMVTAKKIKPTKGIIKRIQVPRLDQSVXXPSA

SEQ ID NO: 65758 - protein, 31 aa, Artificial Sequence
  Cyclic GFR-binding peptide
  MOD_RES (30)..(31): Xaa is C or S
VVMDSMEGIVVKENEDMIQMTINSLETPVXX

SEQ ID NO: 65759 - protein, 30 aa, Artificial Sequence
  Cyclic GFR-binding peptide
  MOD_RES (2)..(2): Xaa is C or S
KXSRVIMVQVEKVKPKRGVVKAIKVSRLAQ

SEQ ID NO: 65760 - protein, 28 aa, Artificial Sequence
  Cyclic GFR-binding peptide
  MOD_RES (27)..(27): Xaa is C or S
NVQVEKIVNSSDDVKAVKVSRLKTPAXT

SEQ ID NO: 65761 - protein, 31 aa, Artificial Sequence
  Cyclic GFR-binding peptide
  MOD_RES (1)..(1): Xaa is C or S
XELHEELRNSLQELKPKKRVYEYYLVTLPEH

SEQ ID NO: 65762 - protein, 25 aa, Artificial Sequence
  Cyclic GFR-binding peptide
SKVIMNSLQEIKPTKGIYYVIPLPE

SEQ ID NO: 65763 - protein, 29 aa, Artificial Sequence
  Cyclic GFR-binding peptide
  MOD_RES (2)..(2): Xaa is C or S
GXGEVVMESMEGIVVKDYEDMIQMTINSL

SEQ ID NO: 65764 - protein, 31 aa, Artificial Sequence; identical to SEQ ID NO: 46932
  Cyclic GFR-binding peptide
  MOD_RES (28)..(29): Xaa is C or S

SEQ ID NO: 65765 - protein, 26 aa, Artificial Sequence
  Cyclic GFR-binding peptide
EVVMEVTAKKVVKDYEDIKRMQVPRL

SEQ ID NO: 65766 - protein, 34 aa, Artificial Sequence
  Cyclic GFR-binding peptide
  MOD_RES (31)..(32): Xaa is C or S
RVVMNVTAKKIVNSSDDIKRVQVPRLQTPAXXPK

SEQ ID NO: 65767 - protein, 24 aa, Artificial Sequence
  Cyclic GFR-binding peptide
LRNSLQELKPKKRVYEYYLVTLPE

SEQ ID NO: 65768 - protein, 26 aa, Artificial Sequence
  Cyclic GFR-binding peptide
VVMNVTAKKIVNSSDDIKRVQVPRLK

SEQ ID NO: 65769 - protein, 33 aa, Artificial Sequence
  Cyclic GFR-binding peptide
  MOD_RES (31)..(32): Xaa is C or S
RVVMNVTAKKIVNSSDDIKRVQVPRLKTPAXXP

SEQ ID NO: 65770 - protein, 38 aa, Artificial Sequence; identical to SEQ ID NO: 22018
  Cyclic GFR-binding peptide
  MOD_RES (2)..(2): Xaa is C or S

SEQ ID NO: 65771 - protein, 32 aa, Artificial Sequence
  Cyclic GFR-binding peptide
  MOD_RES (2)..(4): Xaa is C or S
HXGXARVVMNVTAKKIVNSSDDIKRVQVPRLQ

SEQ ID NO: 65772 - protein, 38 aa, Artificial Sequence; identical to SEQ ID NO: 12188
  Cyclic GFR-binding peptide
  MOD_RES (1)..(3)..(35): Xaa is C or S

SEQ ID NO: 65773 - protein, 26 aa, Artificial Sequence
  Cyclic GFR-binding peptide
MNNSLQEIVNSSDDYYLVTLPELKTP

SEQ ID NO: 65774 - protein, 36 aa, Artificial Sequence
  Cyclic GFR-binding peptide
  MOD_RES (1)..(3)..(35)..(36): Xaa is C or S
XGXARVVMNVQVEKIVNSSDDVKAVKVSRLQTPAXX

SEQ ID NO: 65775 - protein, 32 aa, Artificial Sequence
  Cyclic GFR-binding peptide
LHDELTNSLQEFIPKKRVIEYYLVTLPELQVQ

SEQ ID NO: 65776 - protein, 42 aa, Artificial Sequence
  Cyclic GFR-binding peptide
  MOD_RES (2)..(4)..(36)..(37): Xaa is C or S
HXGXARVVMNVQVEKIVNSSDDVKAVKVSRLQTPAXXPKPVT

SEQ ID NO: 65777 - protein, 29 aa, Artificial Sequence
  Cyclic GFR-binding peptide
  MOD_RES (27)..(28): Xaa is C or S
MVTAKKIKPTKGIIKRIQVPRLDQSVXXP

SEQ ID NO: 65778 - protein, 33 aa, Artificial Sequence
  Cyclic GFR-binding peptide
  MOD_RES (1)..(3): Xaa is C or S
XKXSRVIMVQVEKVKPKRGVVKAIKVSRLAQPV

SEQ ID NO: 65779 - protein, 37 aa, Artificial Sequence
  Cyclic GFR-binding peptide
  MOD_RES (31)..(32): Xaa is C or S
EVVMDVTAKKVVKENEDIKRMQVPRLETPVXXAKPIK

SEQ ID NO: 65780 - protein, 25 aa, Artificial Sequence
  Cyclic GFR-binding peptide
VQVEKVKPKRGVVKAIKVSRLAQPV

SEQ ID NO: 65781 - protein, 37 aa, Artificial Sequence
  Cyclic GFR-binding peptide
  MOD_RES (31)..(32): Xaa is C or S
RVVMNSMEGIIVNSSDDMIQVTINSLKTPAXXPKPVY

SEQ ID NO: 65782 - protein, 31 aa, Artificial Sequence
  Cyclic GFR-binding peptide
  MOD_RES (1)..(1): Xaa is C or S
XSKVIMVQVEKIKPTKGIVKAIKVSRLDQSV

SEQ ID NO: 65783 - protein, 37 aa, Artificial Sequence
  Cyclic GFR-binding peptide
  MOD_RES (1)..(32)..(33): Xaa is C or S
XSKVIMVQVEKIKPTKGIVKAIKVSRLDQSVXXPSAS

SEQ ID NO: 65784 - protein, 38 aa, Artificial Sequence; identical to SEQ ID NO: 46959
  Cyclic GFR-binding peptide
  MOD_RES (1)..(32)..(33): Xaa is C or S

SEQ ID NO: 65785 - protein, 31 aa, Artificial Sequence
  Cyclic GFR-binding peptide
  MOD_RES (29)..(30): Xaa is C or S
VMESMEGIVVKDYEDMIQMTINSLETPVXXA

SEQ ID NO: 65786 - protein, 32 aa, Artificial Sequence
  Cyclic GFR-binding peptide
LHEELRNSLQELKPKKRVYEYYLVTLPEHHVR

SEQ ID NO: 65787 - protein, 30 aa, Artificial Sequence
  Cyclic GFR-binding peptide
ELTNSLQEFIPKKRVIEYYLVTLPELQVQT

SEQ ID NO: 65788 - protein, 29 aa, Artificial Sequence
  Cyclic GFR-binding peptide
  MOD_RES (26)..(27): Xaa is C or S
SMEGIVVKENEDMIQMTINSLETPVXXAK

SEQ ID NO: 65789 - protein, 38 aa, Artificial Sequence; identical to SEQ ID NO: 12216
  Cyclic GFR-binding peptide
  MOD_RES (1)..(3)..(35)..(36): Xaa is C or S

SEQ ID NO: 65790 - protein, 35 aa, Artificial Sequence; identical to SEQ ID NO: 12218
  Cyclic GFR-binding peptide
  MOD_RES (31)..(32): Xaa is C or S

SEQ ID NO: 65791 - protein, 27 aa, Artificial Sequence
  Cyclic GFR-binding peptide
  MOD_RES (2)..(2): Xaa is C or S
KXSKVVMVTAKKVKPTRGVIKRIQVPR

SEQ ID NO: 65792 - protein, 33 aa, Artificial Sequence
  Cyclic GFR-binding peptide
  MOD_RES (30)..(31): Xaa is C or S
VVMNVQVEKIVNSSDDVKAVKVSRLQTPAXXPK

SEQ ID NO: 65793 - protein, 27 aa, Artificial Sequence
  Cyclic GFR-binding peptide
VVMNNSLQEIVNSSDDYYVVPLPELKT

SEQ ID NO: 65794 - protein, 25 aa, Artificial Sequence
  Cyclic GFR-binding peptide
MVTAKKVKPKRGVIKRIQVPRLAQP

SEQ ID NO: 65795 - protein, 31 aa, Artificial Sequence
  Cyclic GFR-binding peptide
  MOD_RES (28)..(28): Xaa is C or S
MNVTAKKIVNSSDDIKRVQVPRLKTPAXTPK

SEQ ID NO: 65796 - protein, 33 aa, Artificial Sequence
  Cyclic GFR-binding peptide
  MOD_RES (1)..(32)..(33): Xaa is C or S
XSKVVMVTAKKVKPTRGVIKRIQVPRLDQPVXX

SEQ ID NO: 65797 - protein, 32 aa, Artificial Sequence; identical to SEQ ID NO: 22051
  Cyclic GFR-binding peptide
  MOD_RES (32)..(32): Xaa is C or S

SEQ ID NO: 65798 - protein, 31 aa, Artificial Sequence
  Cyclic GFR-binding peptide
  MOD_RES (26)..(27): Xaa is C or S
VQVEKIVNSSDDVKAVKVSRLQTPAXXPKPV

SEQ ID NO: 65799 - protein, 32 aa, Artificial Sequence
  Cyclic GFR-binding peptide
  MOD_RES (2)..(2): Xaa is C or S
KXSKVVMVTAKKVKPTRGVIKRIQVPRLDQPV

SEQ ID NO: 65800 - protein, 29 aa, Artificial Sequence
  Cyclic GFR-binding peptide
  MOD_RES (26)..(27): Xaa is C or S
SMEGIVKPTRGVMIQITINSLDQPVXXPS

SEQ ID NO: 65801 - protein, 23 aa, Artificial Sequence
  Cyclic GFR-binding peptide
NSLQEIVNSSDDYYLVTLPELKT

SEQ ID NO: 65802 - protein, 31 aa, Artificial Sequence; identical to SEQ ID NO: 46981
  Cyclic GFR-binding peptide
  MOD_RES (27)..(28): Xaa is C or S

SEQ ID NO: 65803 - protein, 39 aa, Artificial Sequence
  Cyclic GFR-binding peptide
  MOD_RES (37)..(37): Xaa is C or S
ELHEELRNSLQELKPKKRVYEYYLVTLPEHHVRSPQXKV

SEQ ID NO: 65804 - protein, 37 aa, Artificial Sequence
  Cyclic GFR-binding peptide
  MOD_RES (1)..(3)..(34)..(35): Xaa is C or S
XKXSRVIMVQVEKVKPKRGVVKAIKVSRLAQPVXXPA

SEQ ID NO: 65805 - protein, 26 aa, Artificial Sequence
  Cyclic GFR-binding peptide
MESMEGIVVKDYEDMIQMTINSLETP

SEQ ID NO: 65806 - protein, 43 aa, Artificial Sequence; identical to SEQ ID NO: 22065
  Cyclic GFR-binding peptide
  MOD_RES (1)..(3)..(37): Xaa is C or S

SEQ ID NO: 65807 - protein, 28 aa, Artificial Sequence
  Cyclic GFR-binding peptide
  MOD_RES (27)..(28): Xaa is C or S
MSMEGIVKPTRGVMIQITINSLDQPVXX

SEQ ID NO: 65808 - protein, 28 aa, Artificial Sequence
  Cyclic GFR-binding peptide
  MOD_RES (27)..(28): Xaa is C or S
NSMEGIIVNSSDDMIQVTINSLQTPAXX

SEQ ID NO: 65809 - protein, 27 aa, Artificial Sequence
  Cyclic GFR-binding peptide
  MOD_RES (27)..(27): Xaa is C or S
NVTAKKIVNSSDDIKRVQVPRLKTPAX

SEQ ID NO: 65810 - protein, 23 aa, Artificial Sequence
  Cyclic GFR-binding peptide
MENSLQEVVKDYEDYYLMTLPEL

SEQ ID NO: 65811 - protein, 22 aa, Artificial Sequence
  Cyclic GFR-binding peptide
NSLQEVVKENEDYYLMTLPELE

SEQ ID NO: 65812 - protein, 34 aa, Artificial Sequence; identical to SEQ ID NO: 22070
  Cyclic GFR-binding peptide
  MOD_RES (2)..(4): Xaa is C or S

SEQ ID NO: 65813 - protein, 33 aa, Artificial Sequence; identical to SEQ ID NO: 12249
  Cyclic GFR-binding peptide
  MOD_RES (1)..(33): Xaa is C or S

SEQ ID NO: 65814 - protein, 30 aa, Artificial Sequence
  Cyclic GFR-binding peptide
EVVMDVTAKKVVKENEDIKRMQVPRLETPV

SEQ ID NO: 65815 - protein, 27 aa, Artificial Sequence
  Cyclic GFR-binding peptide
HDELTNSLQEFIPKKRVIEYYVVPLPE

SEQ ID NO: 65816 - protein, 38 aa, Artificial Sequence
  Cyclic GFR-binding peptide
  MOD_RES (2)..(4): Xaa is C or S
AXAXELHEELRNSLQELKPKKRVYEYYVVPLPEHHVRS

SEQ ID NO: 65817 - protein, 35 aa, Artificial Sequence
  Cyclic GFR-binding peptide
  MOD_RES (34)..(34): Xaa is C or S
EELRNSLQELKPKKRVYEYYVVPLPEHHVRSPQXK

SEQ ID NO: 65818 - protein, 25 aa, Artificial Sequence
  Cyclic GFR-binding peptide
KVVMSMEGIVKPTRGVMIQITINSL

SEQ ID NO: 65819 - protein, 34 aa, Artificial Sequence
  Cyclic GFR-binding peptide
  MOD_RES (1)..(33)..(34): Xaa is C or S
XSRVVMNSMEGIIVNSSDDMIQVTINSLKTPAXX

SEQ ID NO: 65820 - protein, 30 aa, Artificial Sequence
  Cyclic GFR-binding peptide
  MOD_RES (26)..(27): Xaa is C or S
SMEGIIVNSSDDMIQVTINSLKTPAXXPKP

SEQ ID NO: 65821 - protein, 30 aa, Artificial Sequence; identical to SEQ ID NO: 12256
  Cyclic GFR-binding peptide
  MOD_RES (27)..(28): Xaa is C or S

SEQ ID NO: 65822 - protein, 20 aa, Artificial Sequence
  Cyclic GFR-binding peptide
NSLQEVVKENEDYYVMPLPE

SEQ ID NO: 65823 - protein, 35 aa, Artificial Sequence; identical to SEQ ID NO: 12261
  Cyclic GFR-binding peptide
  MOD_RES (2)..(4)..(35): Xaa is C or S

SEQ ID NO: 65824 - protein, 29 aa, Artificial Sequence
  Cyclic GFR-binding peptide
LRSMEGILKPKKRVYEMIQVTINSHHVRS

SEQ ID NO: 65825 - protein, 35 aa, Artificial Sequence; identical to SEQ ID NO: 12262
  Cyclic GFR-binding peptide
  MOD_RES (30)..(30): Xaa is C or S

SEQ ID NO: 65826 - protein, 36 aa, Artificial Sequence
  Cyclic GFR-binding peptide
  MOD_RES (1)..(1): Xaa is C or S
XALHDELTNSLQEFIPKKRVIEYYLVTLPELQVQTP

SEQ ID NO: 65827 - protein, 32 aa, Artificial Sequence
  Cyclic GFR-binding peptide
  MOD_RES (1)..(32): Xaa is C or S
XSKVVMVQVEKVKPTRGVVKAIKVSRLDQPVX

SEQ ID NO: 65828 - protein, 30 aa, Artificial Sequence; identical to SEQ ID NO: 22087
  Cyclic GFR-binding peptide
  MOD_RES (2)..(2): Xaa is C or S

SEQ ID NO: 65829 - protein, 37 aa, Artificial Sequence
  Cyclic GFR-binding peptide
  MOD_RES (2)..(34)..(35): Xaa is C or S
GXGEVVMEVTAKKVVKDYEDIKRMQVPRLETPVXXAK

SEQ ID NO: 65830 - protein, 41 aa, Artificial Sequence; identical to SEQ ID NO: 22092
  Cyclic GFR-binding peptide
  MOD_RES (1)..(3)..(40): Xaa is C or S

SEQ ID NO: 65831 - protein, 34 aa, Artificial Sequence; identical to SEQ ID NO: 12270
  Cyclic GFR-binding peptide
  MOD_RES (2)..(4): Xaa is C or S

SEQ ID NO: 65832 - protein, 30 aa, Artificial Sequence; identical to SEQ ID NO: 12274
  Cyclic GFR-binding peptide
  MOD_RES (1)..(1): Xaa is C or S

SEQ ID NO: 65833 - protein, 30 aa, Artificial Sequence
  Cyclic GFR-binding peptide
  MOD_RES (30)..(30): Xaa is C or S
LFNSLQEHQGQHPKIRYYLMTLPEEETPVX

SEQ ID NO: 65834 - protein, 33 aa, Artificial Sequence
  Cyclic GFR-binding peptide
  MOD_RES (32)..(32): Xaa is C or S
HQLFNSLQEHQGQHPKIRYYVMPLPEEETPVXE

SEQ ID NO: 65835 - protein, 30 aa, Artificial Sequence; identical to SEQ ID NO: 12281
  Cyclic GFR-binding peptide
  MOD_RES (2)..(2): Xaa is C or S

SEQ ID NO: 65836 - protein, 35 aa, Artificial Sequence; identical to SEQ ID NO: 12282
  Cyclic GFR-binding peptide
  MOD_RES (1)..(33)..(34): Xaa is C or S

SEQ ID NO: 65837 - protein, 29 aa, Artificial Sequence
  Cyclic GFR-binding peptide
ALHDELTNSLQEFIPKKRVIEYYLVTLPE

SEQ ID NO: 65838 - protein, 24 aa, Artificial Sequence
  Cyclic GFR-binding peptide
VQVEKVVKENEDVKAMKVSRLETP

SEQ ID NO: 65839 - protein, 28 aa, Artificial Sequence
  Cyclic GFR-binding peptide
VVMNSMEGIIVNSSDDMIQVTINSLQTP

SEQ ID NO: 65840 - protein, 35 aa, Artificial Sequence
  Cyclic GFR-binding peptide
LHEELRNSLQELKPKKRVYEYYLVTLPEHHVRSPQ

SEQ ID NO: 65841 - protein, 34 aa, Artificial Sequence; identical to SEQ ID NO: 12291
  Cyclic GFR-binding peptide
  MOD_RES (31)..(32): Xaa is C or S

SEQ ID NO: 65842 - protein, 30 aa, Artificial Sequence
  Cyclic GFR-binding peptide
  MOD_RES (1)..(3): Xaa is C or S
XKXSKVIMVTAKKIKPTKGIIKRIQVPRLD

SEQ ID NO: 65843 - protein, 43 aa, Artificial Sequence
  Cyclic GFR-binding peptide
  MOD_RES (2)..(4)..(41): Xaa is C or S
EXKXALHDELTNSLQEFIPKKRVIEYYLVTLPELQVQTPRXQV

SEQ ID NO: 65844 - protein, 22 aa, Artificial Sequence
  Cyclic GFR-binding peptide
MSMEGIVKPKRGVMIQITINSL

SEQ ID NO: 65845 - protein, 25 aa, Artificial Sequence
  Cyclic GFR-binding peptide
VMENSLQEVVKDYEDYYVMPLPELE

SEQ ID NO: 65846 - protein, 40 aa, Artificial Sequence; identical to SEQ ID NO: 12300
  Cyclic GFR-binding peptide
  MOD_RES (2)..(4)..(35)..(36): Xaa is C or S

SEQ ID NO: 65847 - protein, 25 aa, Artificial Sequence
  Cyclic GFR-binding peptide
SMEGIIKPTKGIMIQITINSLDQSV

SEQ ID NO: 65848 - protein, 28 aa, Artificial Sequence
  Cyclic GFR-binding peptide
  MOD_RES (27)..(28): Xaa is C or S
DNSLQEVVKENEDYYVMPLPELETPVXX

SEQ ID NO: 65849 - protein, 29 aa, Artificial Sequence
  Cyclic GFR-binding peptide
  MOD_RES (28)..(28): Xaa is C or S
NSLQEHQGQHPKIRYYVMPLPEEETPVXE

SEQ ID NO: 65850 - protein, 28 aa, Artificial Sequence
  Cyclic GFR-binding peptide
LTVQVEKFIPKKRVIEVKAVKVSRLQVQ

SEQ ID NO: 65851 - protein, 36 aa, Artificial Sequence
  Cyclic GFR-binding peptide
  MOD_RES (33)..(33): Xaa is C or S
NHQLFNSLQEHQGQHPKIRYYVMPLPEEETPVXELG

SEQ ID NO: 65852 - protein, 38 aa, Artificial Sequence; identical to SEQ ID NO: 22117
  Cyclic GFR-binding peptide
  MOD_RES (34)..(34): Xaa is C or S

SEQ ID NO: 65853 - protein, 30 aa, Artificial Sequence; identical to SEQ ID NO: 12306
  Cyclic GFR-binding peptide
  MOD_RES (28)..(29): Xaa is C or S

SEQ ID NO: 65854 - protein, 28 aa, Artificial Sequence
  Cyclic GFR-binding peptide
  MOD_RES (1)..(1): Xaa is C or S
XSRVVMNNSLQEIVNSSDDYYLVTLPEL

SEQ ID NO: 65855 - protein, 39 aa, Artificial Sequence
  Cyclic GFR-binding peptide
  MOD_RES (2)..(34)..(35): Xaa is C or S
GXGEVVMESMEGIVVKDYEDMIQMTINSLETPVXXAKPI

SEQ ID NO: 65856 - protein, 34 aa, Artificial Sequence; identical to SEQ ID NO: 12312
  Cyclic GFR-binding peptide
  MOD_RES (29)..(30): Xaa is C or S

SEQ ID NO: 65857 - protein, 34 aa, Artificial Sequence; identical to SEQ ID NO: 12313
  Cyclic GFR-binding peptide
  MOD_RES (30)..(31): Xaa is C or S

SEQ ID NO: 65858 - protein, 38 aa, Artificial Sequence
  Cyclic GFR-binding peptide
  MOD_RES (2)..(4)..(35)..(36): Xaa is C or S
SXKXSKVIMVQVEKIKPTKGIVKAIKVSRLDQSVXXPS

SEQ ID NO: 65859 - protein, 30 aa, Artificial Sequence
  Cyclic GFR-binding peptide
EVVMESMEGIVVKDYEDMIQMTINSLETPV

SEQ ID NO: 65860 - protein, 23 aa, Artificial Sequence
  Cyclic GFR-binding peptide
MVTAKKVKPKRGVIKRIQVPRLA

SEQ ID NO: 65861 - protein, 34 aa, Artificial Sequence; identical to SEQ ID NO: 22126
  Cyclic GFR-binding peptide
  MOD_RES (31)..(31): Xaa is C or S

SEQ ID NO: 65862 - protein, 31 aa, Artificial Sequence
  Cyclic GFR-binding peptide
  MOD_RES (29)..(30): Xaa is C or S
VMNVTAKKIVNSSDDIKRVQVPRLQTPAXXP

SEQ ID NO: 65863 - protein, 29 aa, Artificial Sequence
  Cyclic GFR-binding peptide
KVVMVQVEKVKPTRGVVKAIKVSRLDQPV

SEQ ID NO: 65864 - protein, 39 aa, Artificial Sequence; identical to SEQ ID NO: 12324
  Cyclic GFR-binding peptide
  MOD_RES (2)..(34): Xaa is C or S

SEQ ID NO: 65865 - protein, 30 aa, Artificial Sequence
  Cyclic GFR-binding peptide
  MOD_RES (30)..(30): Xaa is C or S
VVMESMEGIVVKDYEDMIQMTINSLETPVX

SEQ ID NO: 65866 - protein, 39 aa, Artificial Sequence; identical to SEQ ID NO: 12327
  Cyclic GFR-binding peptide
  MOD_RES (2)..(4)..(35)..(36): Xaa is C or S

SEQ ID NO: 65867 - protein, 29 aa, Artificial Sequence
  Cyclic GFR-binding peptide
  MOD_RES (1)..(3): Xaa is C or S
XKXSRVIMSMEGIVKPKRGVMIQITINSL

SEQ ID NO: 65868 - protein, 35 aa, Artificial Sequence; identical to SEQ ID NO: 12328
  Cyclic GFR-binding peptide
  MOD_RES (2)..(4): Xaa is C or S

SEQ ID NO: 65869 - protein, 31 aa, Artificial Sequence
  Cyclic GFR-binding peptide
  MOD_RES (28)..(29): Xaa is C or S
IMVQVEKVKPKRGVVKAIKVSRLAQPVXXPA

SEQ ID NO: 65870 - protein, 36 aa, Artificial Sequence; identical to SEQ ID NO: 12329
  Cyclic GFR-binding peptide
  MOD_RES (2)..(4)..(36): Xaa is C or S

SEQ ID NO: 65871 - protein, 33 aa, Artificial Sequence
  Cyclic GFR-binding peptide
  MOD_RES (28)..(29): Xaa is C or S
VMVTAKKVKPTRGVIKRIQVPRLDQPVXXPSAS

SEQ ID NO: 65872 - protein, 36 aa, Artificial Sequence
  Cyclic GFR-binding peptide
  MOD_RES (2)..(2): Xaa is C or S
AXELHEELRNSLQELKPKKRVYEYYVVPLPEHHVRS

SEQ ID NO: 65873 - protein, 38 aa, Artificial Sequence
  Cyclic GFR-binding peptide
  MOD_RES (1)..(33)..(34): Xaa is C or S
XGEVVMESMEGIVVKDYEDMIQMTINSLETPVXXAKPI

SEQ ID NO: 65874 - protein, 34 aa, Artificial Sequence; identical to SEQ ID NO: 12333
  Cyclic GFR-binding peptide
  MOD_RES (30)..(31): Xaa is C or S

SEQ ID NO: 65875 - protein, 27 aa, Artificial Sequence
  Cyclic GFR-binding peptide
HDELTNSLQEFIPKKRVIEYYLVTLPE

SEQ ID NO: 65876 - protein, 24 aa, Artificial Sequence
  Cyclic GFR-binding peptide
VVMNVQVEKIVNSSDDVKAVKVSR

SEQ ID NO: 65877 - protein, 35 aa, Artificial Sequence
  Cyclic GFR-binding peptide
  MOD_RES (31)..(32): Xaa is C or S
SKVIMVQVEKIKPTKGIVKAIKVSRLDQSVXXPSA

SEQ ID NO: 65878 - protein, 26 aa, Artificial Sequence
  Cyclic GFR-binding peptide
EVVMDSMEGIVVKENEDMIQMTINSL

SEQ ID NO: 65879 - protein, 41 aa, Artificial Sequence
  Cyclic GFR-binding peptide
  MOD_RES (2)..(36): Xaa is C or S
EXKNHQLFNSLQEHQGQHPKIRYYVMPLPEEETPVXELGED

SEQ ID NO: 65880 - protein, 33 aa, Artificial Sequence; identical to SEQ ID NO: 12345
  Cyclic GFR-binding peptide
  MOD_RES (2)..(2): Xaa is C or S

SEQ ID NO: 65881 - protein, 29 aa, Artificial Sequence
  Cyclic GFR-binding peptide
  MOD_RES (1)..(1): Xaa is C or S
XSKVVMVTAKKVKPTRGVIKRIQVPRLDQ

SEQ ID NO: 65882 - protein, 32 aa, Artificial Sequence; identical to SEQ ID NO: 22142
  Cyclic GFR-binding peptide

SEQ ID NO: 65883 - protein, 34 aa, Artificial Sequence
  Cyclic GFR-binding peptide
  MOD_RES (2)..(34): Xaa is C or S
GXARVVMNSMEGIIVNSSDDMIQVTINSLQTPAX

SEQ ID NO: 65884 - protein, 24 aa, Artificial Sequence
  Cyclic GFR-binding peptide
KVVMVTAKKVKPTRGVIKRIQVPR

SEQ ID NO: 65885 - protein, 28 aa, Artificial Sequence
  Cyclic GFR-binding peptide
EELRSMEGILKPKKRVYEMIQVTINSHH

SEQ ID NO: 65886 - protein, 34 aa, Artificial Sequence; identical to SEQ ID NO: 12350
  Cyclic GFR-binding peptide
  MOD_RES (1)..(33)..(34): Xaa is C or S

SEQ ID NO: 65887 - protein, 27 aa, Artificial Sequence
  Cyclic GFR-binding peptide
IMSMEGIVKPKRGVMIQITINSLAQPV

SEQ ID NO: 65888 - protein, 34 aa, Artificial Sequence
  Cyclic GFR-binding peptide
  MOD_RES (2)..(4): Xaa is C or S
SXKXSRVIMVTAKKVKPKRGVIKRIQVPRLAQPV

SEQ ID NO: 65889 - protein, 29 aa, Artificial Sequence
  Cyclic GFR-binding peptide
  MOD_RES (2)..(2): Xaa is C or S
KXSKVVMVTAKKVKPTRGVIKRIQVPRLD

SEQ ID NO: 65890 - protein, 27 aa, Artificial Sequence
  Cyclic GFR-binding peptide
VTAKKLKPKKRVYEIKRVQVPRHHVRS

SEQ ID NO: 65891 - protein, 33 aa, Artificial Sequence
  Cyclic GFR-binding peptide
  MOD_RES (31)..(32): Xaa is C or S
EVVMEVTAKKVVKDYEDIKRMQVPRLETPVXXA

SEQ ID NO: 65892 - protein, 32 aa, Artificial Sequence
  Cyclic GFR-binding peptide
  MOD_RES (1)..(1): Xaa is C or S
XALHDELTNSLQEFIPKKRVIEYYLVTLPELQ

SEQ ID NO: 65893 - protein, 35 aa, Artificial Sequence
  Cyclic GFR-binding peptide
  MOD_RES (31)..(32): Xaa is C or S
EVVMEVQVEKVVKDYEDVKAMKVSRLETPVXXAKP

SEQ ID NO: 65894 - protein, 28 aa, Artificial Sequence
  Cyclic GFR-binding peptide
VVMNVTAKKIVNSSDDIKRVQVPRLKTP

SEQ ID NO: 65895 - protein, 37 aa, Artificial Sequence; identical to SEQ ID NO: 22156
  Cyclic GFR-binding peptide
  MOD_RES (2)..(4): Xaa is C or S

SEQ ID NO: 65896 - protein, 30 aa, Artificial Sequence
  Cyclic GFR-binding peptide
  MOD_RES (2)..(2): Xaa is C or S
KXSRVIMSMEGIVKPKRGVMIQITINSLAQ

SEQ ID NO: 65897 - protein, 31 aa, Artificial Sequence; identical to SEQ ID NO: 12363
  Cyclic GFR-binding peptide
  MOD_RES (30)..(31): Xaa is C or S

SEQ ID NO: 65898 - protein, 29 aa, Artificial Sequence
  Cyclic GFR-binding peptide
  MOD_RES (1)..(3): Xaa is C or S
XGXGEVVMENSLQEVVKDYEDYYVMPLPE

SEQ ID NO: 65899 - protein, 32 aa, Artificial Sequence
  Cyclic GFR-binding peptide
  MOD_RES (30)..(31): Xaa is C or S
VVMDSMEGIVVKENEDMIQMTINSLETPVXXA

SEQ ID NO: 65900 - protein, 31 aa, Artificial Sequence
  Cyclic GFR-binding peptide
  MOD_RES (2)..(4): Xaa is C or S
RXGXGEVVMDVTAKKVVKENEDIKRMQVPRL

SEQ ID NO: 65901 - protein, 35 aa, Artificial Sequence
  Cyclic GFR-binding peptide
  MOD_RES (1)..(3)..(35): Xaa is C or S
XGXSRVVMNSMEGIIVNSSDDMIQVTINSLKTPAX

SEQ ID NO: 65902 - protein, 30 aa, Artificial Sequence
  Cyclic GFR-binding peptide
  MOD_RES (29)..(30): Xaa is C or S
VMESMEGIVVKDYEDMIQMTINSLETPVXX

SEQ ID NO: 65903 - protein, 26 aa, Artificial Sequence
  Cyclic GFR-binding peptide
RVIMVTAKKVKPKRGVIKRIQVPRLA

SEQ ID NO: 65904 - protein, 31 aa, Artificial Sequence; identical to SEQ ID NO: 22161
  Cyclic GFR-binding peptide

SEQ ID NO: 65905 - protein, 38 aa, Artificial Sequence
  Cyclic GFR-binding peptide
  MOD_RES (2)..(34)..(35): Xaa is C or S
GXGEVVMEVTAKKVVKDYEDIKRMQVPRLETPVXXAKP

SEQ ID NO: 65906 - protein, 34 aa, Artificial Sequence
  Cyclic GFR-binding peptide
  MOD_RES (28)..(29): Xaa is C or S
MNVTAKKIVNSSDDIKRVQVPRLKTPAXXPKPVY

SEQ ID NO: 65907 - protein, 42 aa, Artificial Sequence
  Cyclic GFR-binding peptide
  MOD_RES (2)..(4)..(36)..(37): Xaa is C or S
HXGXARVVMNSMEGIIVNSSDDMIQVTINSLQTPAXXPKPVT

SEQ ID NO: 65908 - protein, 28 aa, Artificial Sequence
  Cyclic GFR-binding peptide
  MOD_RES (28)..(28): Xaa is C or S
IMVTAKKVKPKRGVIKRIQVPRLAQPVX

SEQ ID NO: 65909 - protein, 32 aa, Artificial Sequence; identical to SEQ ID NO: 22165
  Cyclic GFR-binding peptide

SEQ ID NO: 65910 - protein, 33 aa, Artificial Sequence; identical to SEQ ID NO: 12381
  Cyclic GFR-binding peptide
  MOD_RES (31)..(32): Xaa is C or S

SEQ ID NO: 65911 - protein, 36 aa, Artificial Sequence
  Cyclic GFR-binding peptide
  MOD_RES (2)..(4)..(36): Xaa is C or S
HXGXARVVMNSMEGIIVNSSDDMIQVTINSLQTPAX

SEQ ID NO: 65912 - protein, 37 aa, Artificial Sequence
  Cyclic GFR-binding peptide
  MOD_RES (1)..(3)..(35)..(36): Xaa is C or S
XGXARVVMNSMEGIIVNSSDDMIQVTINSLQTPAXXP

SEQ ID NO: 65913 - protein, 29 aa, Artificial Sequence
  Cyclic GFR-binding peptide
  MOD_RES (28)..(29): Xaa is C or S
MDVQVEKVVKENEDVKAMKVSRLETPVXX

SEQ ID NO: 65914 - protein, 34 aa, Artificial Sequence
  Cyclic GFR-binding peptide
  MOD_RES (30)..(31): Xaa is C or S
VVMDVTAKKVVKENEDIKRMQVPRLETPVXXAKP

SEQ ID NO: 65915 - protein, 34 aa, Artificial Sequence
  Cyclic GFR-binding peptide
  MOD_RES (32)..(32): Xaa is C or S
HQLFNSLQEHQGQHPKIRYYLMTLPEEETPVXEL

SEQ ID NO: 65916 - protein, 28 aa, Artificial Sequence
  Cyclic GFR-binding peptide
  MOD_RES (28)..(28): Xaa is C or S
VMVQVEKVKPTRGVVKAIKVSRLDQPVX

SEQ ID NO: 65917 - protein, 26 aa, Artificial Sequence
  Cyclic GFR-binding peptide
KVVMVTAKKVKPTRGVIKRIQVPRLD

SEQ ID NO: 65918 - protein, 36 aa, Artificial Sequence
  Cyclic GFR-binding peptide
  MOD_RES (36)..(36): Xaa is C or S
LHEELRNSLQELKPKKRVYEYYLVTLPEHHVRSPQX

SEQ ID NO: 65919 - protein, 27 aa, Artificial Sequence
  Cyclic GFR-binding peptide
KVVMSMEGIVKPTRGVMIQITINSLDQ

SEQ ID NO: 65920 - protein, 39 aa, Artificial Sequence; identical to SEQ ID NO: 22177
  Cyclic GFR-binding peptide
  MOD_RES (2)..(4): Xaa is C or S

SEQ ID NO: 65921 - protein, 32 aa, Artificial Sequence; identical to SEQ ID NO: 12389
  Cyclic GFR-binding peptide
  MOD_RES (31)..(32): Xaa is C or S

SEQ ID NO: 65922 - protein, 32 aa, Artificial Sequence
  Cyclic GFR-binding peptide
  MOD_RES (30)..(31): Xaa is C or S
VVMNVTAKKIVNSSDDIKRVQVPRLQTPAXXP

SEQ ID NO: 65923 - protein, 38 aa, Artificial Sequence
  Cyclic GFR-binding peptide
  MOD_RES (2)..(4): Xaa is C or S
EXKXALHDELTNSLQEFIPKKRVIEYYVVPLPELQVQT

SEQ ID NO: 65924 - protein, 32 aa, Artificial Sequence
  Cyclic GFR-binding peptide
  MOD_RES (2)..(2): Xaa is C or S
GXGEVVMDVQVEKVVKENEDVKAMKVSRLETP

SEQ ID NO: 65925 - protein, 30 aa, Artificial Sequence
  Cyclic GFR-binding peptide
  MOD_RES (28)..(29): Xaa is C or S
IMVQVEKVKPKRGVVKAIKVSRLAQPVXXP

SEQ ID NO: 65926 - protein, 25 aa, Artificial Sequence
  Cyclic GFR-binding peptide
SRVIMNSLQEVKPKRGVYYLITLPE

SEQ ID NO: 65927 - protein, 37 aa, Artificial Sequence
  Cyclic GFR-binding peptide
  MOD_RES (2)..(4)..(36)..(37): Xaa is C or S
RXGXGEVVMDSMEGIVVKENEDMIQMTINSLETPVXX

SEQ ID NO: 65928 - protein, 32 aa, Artificial Sequence
  Cyclic GFR-binding peptide
  MOD_RES (32)..(32): Xaa is C or S
ARVVMNVQVEKIVNSSDDVKAVKVSRLQTPAX

SEQ ID NO: 65929 - protein, 34 aa, Artificial Sequence
  Cyclic GFR-binding peptide
  MOD_RES (2)..(4): Xaa is C or S
AXAXELHEELRNSLQELKPKKRVYEYYVVPLPEH

SEQ ID NO: 65930 - protein, 29 aa, Artificial Sequence
  Cyclic GFR-binding peptide
  MOD_RES (1)..(1): Xaa is C or S
XGEVVMDVQVEKVVKENEDVKAMKVSRLE

SEQ ID NO: 65931 - protein, 30 aa, Artificial Sequence
  Cyclic GFR-binding peptide
  MOD_RES (1)..(1): Xaa is C or S
XSRVVMNVTAKKIVNSSDDIKRVQVPRLKT

SEQ ID NO: 65932 - protein, 35 aa, Artificial Sequence; identical to SEQ ID NO: 12418
  Cyclic GFR-binding peptide
  MOD_RES (2)..(34): Xaa is C or S

SEQ ID NO: 65933 - protein, 30 aa, Artificial Sequence
  Cyclic GFR-binding peptide
  MOD_RES (2)..(2): Xaa is C or S
EXKNHQLFNSLQEHQGQHPKIRYYVMPLPE

SEQ ID NO: 65934 - protein, 35 aa, Artificial Sequence
  Cyclic GFR-binding peptide
  MOD_RES (32)..(32): Xaa is C or S
SRVVMNVTAKKIVNSSDDIKRVQVPRLKTPAXTPK

SEQ ID NO: 65935 - protein, 28 aa, Artificial Sequence
  Cyclic GFR-binding peptide
VMNNSLQEIVNSSDDYYVVPLPELQTPA

SEQ ID NO: 65936 - protein, 35 aa, Artificial Sequence; identical to SEQ ID NO: 12422
  Cyclic GFR-binding peptide
  MOD_RES (2)..(4): Xaa is C or S

SEQ ID NO: 65937 - protein, 35 aa, Artificial Sequence
  Cyclic GFR-binding peptide
  MOD_RES (2)..(4)..(35): Xaa is C or S
SXKXSRVIMVQVEKVKPKRGVVKAIKVSRLAQPVX

SEQ ID NO: 65938 - protein, 34 aa, Artificial Sequence; identical to SEQ ID NO: 22190
  Cyclic GFR-binding peptide
  MOD_RES (1)..(1): Xaa is C or S

SEQ ID NO: 65939 - protein, 32 aa, Artificial Sequence
  Cyclic GFR-binding peptide
  MOD_RES (1)..(32): Xaa is C or S
XSKVVMSMEGIVKPTRGVMIQITINSLDQPVX

SEQ ID NO: 65940 - protein, 30 aa, Artificial Sequence
  Cyclic GFR-binding peptide
  MOD_RES (1)..(3): Xaa is C or S
XKXSKVIMVQVEKIKPTKGIVKAIKVSRLD

SEQ ID NO: 65941 - protein, 37 aa, Artificial Sequence; identical to SEQ ID NO: 12427
  Cyclic GFR-binding peptide
  MOD_RES (1)..(32)..(33): Xaa is C or S

SEQ ID NO: 65942 - protein, 35 aa, Artificial Sequence; identical to SEQ ID NO: 12428
  Cyclic GFR-binding peptide
  MOD_RES (1)..(3)..(34)..(35): Xaa is C or S

SEQ ID NO: 65943 - protein, 29 aa, Artificial Sequence
  Cyclic GFR-binding peptide
VVMNVTAKKIVNSSDDIKRVQVPRLKTPA

SEQ ID NO: 65944 - protein, 36 aa, Artificial Sequence; identical to SEQ ID NO: 22194
  Cyclic GFR-binding peptide
  MOD_RES (34)..(34): Xaa is C or S

SEQ ID NO: 65945 - protein, 24 aa, Artificial Sequence
  Cyclic GFR-binding peptide
MSMEGIIKPTKGIMIQITINSLDQ

SEQ ID NO: 65946 - protein, 31 aa, Artificial Sequence
  Cyclic GFR-binding peptide
  MOD_RES (29)..(30): Xaa is C or S
VMEVQVEKVVKDYEDVKAMKVSRLETPVXXA

SEQ ID NO: 65947 - protein, 30 aa, Artificial Sequence; identical to SEQ ID NO: 12430
  Cyclic GFR-binding peptide

SEQ ID NO: 65948 - protein, 36 aa, Artificial Sequence; identical to SEQ ID NO: 12434
  Cyclic GFR-binding peptide
  MOD_RES (2)..(4)..(36): Xaa is C or S

SEQ ID NO: 65949 - protein, 31 aa, Artificial Sequence; identical to SEQ ID NO: 12441
  Cyclic GFR-binding peptide
  MOD_RES (1)..(3): Xaa is C or S

SEQ ID NO: 65950 - protein, 33 aa, Artificial Sequence; identical to SEQ ID NO: 22196
  Cyclic GFR-binding peptide

SEQ ID NO: 65951 - protein, 34 aa, Artificial Sequence; identical to SEQ ID NO: 12444
  Cyclic GFR-binding peptide
  MOD_RES (28)..(29): Xaa is C or S

SEQ ID NO: 65952 - protein, 29 aa, Artificial Sequence
  Cyclic GFR-binding peptide
  MOD_RES (28)..(29): Xaa is C or S
MNNSLQEIVNSSDDYYLVTLPELKTPAXX

SEQ ID NO: 65953 - protein, 31 aa, Artificial Sequence; identical to SEQ ID NO: 22199
  Cyclic GFR-binding peptide

SEQ ID NO: 65954 - protein, 23 aa, Artificial Sequence
  Cyclic GFR-binding peptide
VTAKKVKPKRGVIKRIQVPRLAQ

SEQ ID NO: 65955 - protein, 28 aa, Artificial Sequence
  Cyclic GFR-binding peptide
QLFVTAKKHQGQHPKIRIKRMQVPREET

SEQ ID NO: 65956 - protein, 36 aa, Artificial Sequence; identical to SEQ ID NO: 22205
  Cyclic GFR-binding peptide
  MOD_RES (2)..(4): Xaa is C or S

SEQ ID NO: 65957 - protein, 26 aa, Artificial Sequence
  Cyclic GFR-binding peptide
EVVMDNSLQEVVKENEDYYVMPLPEL

SEQ ID NO: 65958 - protein, 26 aa, Artificial Sequence
  Cyclic GFR-binding peptide
DELTVQVEKFIPKKRVIEVKAVKVSR

SEQ ID NO: 65959 - protein, 21 aa, Artificial Sequence
  Cyclic GFR-binding peptide
NSLQEVKPKRGVYYLITLPEL

SEQ ID NO: 65960 - protein, 25 aa, Artificial Sequence
  Cyclic GFR-binding peptide
NSLQEHQGQHPKIRYYVMPLPEEET

SEQ ID NO: 65961 - protein, 32 aa, Artificial Sequence; identical to SEQ ID NO: 12468
  Cyclic GFR-binding peptide
  MOD_RES (32)..(32): Xaa is C or S

SEQ ID NO: 65962 - protein, 41 aa, Artificial Sequence; identical to SEQ ID NO: 12469
  Cyclic GFR-binding peptide
  MOD_RES (2)..(4)..(36)..(37): Xaa is C or S

SEQ ID NO: 65963 - protein, 32 aa, Artificial Sequence; identical to SEQ ID NO: 22215
  Cyclic GFR-binding peptide

SEQ ID NO: 65964 - protein, 25 aa, Artificial Sequence
  Cyclic GFR-binding peptide
EVVMESMEGIVVKDYEDMIQMTINS

SEQ ID NO: 65965 - protein, 32 aa, Artificial Sequence
  Cyclic GFR-binding peptide
  MOD_RES (31)..(32): Xaa is C or S
SKVVMSMEGIVKPTRGVMIQITINSLDQPVXX

SEQ ID NO: 65966 - protein, 33 aa, Artificial Sequence
  Cyclic GFR-binding peptide
  MOD_RES (31)..(31): Xaa is C or S
RVVMNVTAKKIVNSSDDIKRVQVPRLKTPAXTP

SEQ ID NO: 65967 - protein, 34 aa, Artificial Sequence
  Cyclic GFR-binding peptide
  MOD_RES (28)..(28): Xaa is C or S
MNVTAKKIVNSSDDIKRVQVPRLKTPAXTPKTVH

SEQ ID NO: 65968 - protein, 35 aa, Artificial Sequence
  Cyclic GFR-binding peptide
  MOD_RES (31)..(31): Xaa is C or S
RVVMNSMEGIIVNSSDDMIQVTINSLKTPAXTPKT

SEQ ID NO: 65969 - protein, 32 aa, Artificial Sequence
  Cyclic GFR-binding peptide
  MOD_RES (1)..(3): Xaa is C or S
XKXALHDELTNSLQEFIPKKRVIEYYLVTLPE

SEQ ID NO: 65970 - protein, 31 aa, Artificial Sequence
  Cyclic GFR-binding peptide
HEELRNSLQELKPKKRVYEYYVVPLPEHHVR

SEQ ID NO: 65971 - protein, 34 aa, Artificial Sequence
  Cyclic GFR-binding peptide
  MOD_RES (30)..(31): Xaa is C or S
VVMNVQVEKIVNSSDDVKAVKVSRLQTPAXXPKP

SEQ ID NO: 65972 - protein, 26 aa, Artificial Sequence
  Cyclic GFR-binding peptide
VVMNSMEGIIVNSSDDMIQVTINSLQ

SEQ ID NO: 65973 - protein, 32 aa, Artificial Sequence; identical to SEQ ID NO: 12482
  Cyclic GFR-binding peptide
  MOD_RES (28)..(29): Xaa is C or S

SEQ ID NO: 65974 - protein, 29 aa, Artificial Sequence
  Cyclic GFR-binding peptide
  MOD_RES (29)..(29): Xaa is C or S
VMDVTAKKVVKENEDIKRMQVPRLETPVX

SEQ ID NO: 65975 - protein, 25 aa, Artificial Sequence
  Cyclic GFR-binding peptide
NSLQELKPKKRVYEYYLVTLPEHHV

SEQ ID NO: 65976 - protein, 40 aa, Artificial Sequence
  Cyclic GFR-binding peptide
  MOD_RES (1)..(3)..(35)..(36): Xaa is C or S
XGXARVVMNVQVEKIVNSSDDVKAVKVSRLQTPAXXPKPV

SEQ ID NO: 65977 - protein, 35 aa, Artificial Sequence; identical to SEQ ID NO: 12487
  Cyclic GFR-binding peptide
  MOD_RES (31)..(31): Xaa is C or S

SEQ ID NO: 65978 - protein, 25 aa, Artificial Sequence
  Cyclic GFR-binding peptide
VQVEKFIPKKRVIEVKAVKVSRLQV

SEQ ID NO: 65979 - protein, 43 aa, Artificial Sequence; identical to SEQ ID NO: 22233
  Cyclic GFR-binding peptide
  MOD_RES (1)..(3)..(40): Xaa is C or S

SEQ ID NO: 65980 - protein, 27 aa, Artificial Sequence
  Cyclic GFR-binding peptide
MENSLQEVVKDYEDYYLMTLPELETPV

SEQ ID NO: 65981 - protein, 31 aa, Artificial Sequence
  Cyclic GFR-binding peptide
  MOD_RES (30)..(31): Xaa is C or S
KVVMVTAKKVKPTRGVIKRIQVPRLDQPVXX

SEQ ID NO: 65982 - protein, 28 aa, Artificial Sequence
  Cyclic GFR-binding peptide
NSLQEFIPKKRVIEYYLVTLPELQVQTP

SEQ ID NO: 65983 - protein, 29 aa, Artificial Sequence
  Cyclic GFR-binding peptide
  MOD_RES (2)..(4): Xaa is C or S
SXKXSKVVMNSLQEVKPTRGVYYVIPLPE

SEQ ID NO: 65984 - protein, 36 aa, Artificial Sequence
  Cyclic GFR-binding peptide
  MOD_RES (32)..(33): Xaa is C or S
GEVVMEVTAKKVVKDYEDIKRMQVPRLETPVXXAKP

SEQ ID NO: 65985 - protein, 31 aa, Artificial Sequence; identical to SEQ ID NO: 22239
  Cyclic GFR-binding peptide
  MOD_RES (2)..(2): Xaa is C or S

SEQ ID NO: 65986 - protein, 22 aa, Artificial Sequence
  Cyclic GFR-binding peptide
MNSLQEVKPTRGVYYLITLPEL

SEQ ID NO: 65987 - protein, 23 aa, Artificial Sequence
  Cyclic GFR-binding peptide
NSLQEVKPTRGVYYVIPLPELDQ

SEQ ID NO: 65988 - protein, 33 aa, Artificial Sequence
  Cyclic GFR-binding peptide
  MOD_RES (2)..(4): Xaa is C or S
EXKXALHDELTNSLQEFIPKKRVIEYYLVTLPE

SEQ ID NO: 65989 - protein, 39 aa, Artificial Sequence; identical to SEQ ID NO: 22241
  Cyclic GFR-binding peptide
  MOD_RES (37)..(37): Xaa is C or S

SEQ ID NO: 65990 - protein, 31 aa, Artificial Sequence; identical to SEQ ID NO: 12504
  Cyclic GFR-binding peptide
  MOD_RES (2)..(2): Xaa is C or S

SEQ ID NO: 65991 - protein, 41 aa, Artificial Sequence; identical to SEQ ID NO: 22243
  Cyclic GFR-binding peptide
  MOD_RES (2)..(36): Xaa is C or S

SEQ ID NO: 65992 - protein, 41 aa, Artificial Sequence; identical to SEQ ID NO: 12507
  Cyclic GFR-binding peptide
  MOD_RES (2)..(4)..(35)..(36): Xaa is C or S

SEQ ID NO: 65993 - protein, 28 aa, Artificial Sequence
  Cyclic GFR-binding peptide
LTNSLQEFIPKKRVIEYYLVTLPELQVQ

SEQ ID NO: 65994 - protein, 27 aa, Artificial Sequence
  Cyclic GFR-binding peptide
GEVVMDVQVEKVVKENEDVKAMKVSRL

SEQ ID NO: 65995 - protein, 32 aa, Artificial Sequence; identical to SEQ ID NO: 22245
  Cyclic GFR-binding peptide
  MOD_RES (1)..(3): Xaa is C or S

SEQ ID NO: 65996 - protein, 35 aa, Artificial Sequence; identical to SEQ ID NO: 12519
  Cyclic GFR-binding peptide
  MOD_RES (1)..(33)..(34): Xaa is C or S

SEQ ID NO: 65997 - protein, 27 aa, Artificial Sequence
  Cyclic GFR-binding peptide
RVVMNSMEGIIVNSSDDMIQVTINSLQ

SEQ ID NO: 65998 - protein, 31 aa, Artificial Sequence
  Cyclic GFR-binding peptide
  MOD_RES (2)..(4): Xaa is C or S
HXGXSRVVMNVTAKKIVNSSDDIKRVQVPRL

SEQ ID NO: 65999 - protein, 34 aa, Artificial Sequence; identical to SEQ ID NO: 12523
  Cyclic GFR-binding peptide
  MOD_RES (29)..(30): Xaa is C or S

SEQ ID NO: 66000 - protein, 37 aa, Artificial Sequence
  Cyclic GFR-binding peptide
  MOD_RES (33)..(33): Xaa is C or S
NHQLFNSLQEHQGQHPKIRYYLMTLPEEETPVXELGE

SEQ ID NO: 66001 - protein, 31 aa, Artificial Sequence; identical to SEQ ID NO: 12527
  Cyclic GFR-binding peptide
  MOD_RES (29)..(30): Xaa is C or S

SEQ ID NO: 66002 - protein, 30 aa, Artificial Sequence
  Cyclic GFR-binding peptide
  MOD_RES (29)..(30): Xaa is C or S
VMEVQVEKVVKDYEDVKAMKVSRLETPVXX

SEQ ID NO: 66003 - protein, 35 aa, Artificial Sequence
  Cyclic GFR-binding peptide
  MOD_RES (1)..(3)..(35): Xaa is C or S
XGXGEVVMDVQVEKVVKENEDVKAMKVSRLETPVX

SEQ ID NO: 66004 - protein, 31 aa, Artificial Sequence; identical to SEQ ID NO: 12537
  Cyclic GFR-binding peptide
  MOD_RES (26)..(27): Xaa is C or S

SEQ ID NO: 66005 - protein, 35 aa, Artificial Sequence
  Cyclic GFR-binding peptide
  MOD_RES (1)..(32)..(33): Xaa is C or S
XSKVIMVTAKKIKPTKGIIKRIQVPRLDQSVXXPS

SEQ ID NO: 66006 - protein, 24 aa, Artificial Sequence
  Cyclic GFR-binding peptide
NSLQEIKPTKGIYYVIPLPELDQS

SEQ ID NO: 66007 - protein, 30 aa, Artificial Sequence
  Cyclic GFR-binding peptide
DELTNSLQEFIPKKRVIEYYLVTLPELQVQ

SEQ ID NO: 66008 - protein, 22 aa, Artificial Sequence
  Cyclic GFR-binding peptide
MDSMEGIVVKENEDMIQMTINS

SEQ ID NO: 66009 - protein, 25 aa, Artificial Sequence
  Cyclic GFR-binding peptide
EVVMENSLQEVVKDYEDYYVMPLPE

SEQ ID NO: 66010 - protein, 43 aa, Artificial Sequence
  Cyclic GFR-binding peptide
  MOD_RES (2)..(39): Xaa is C or S
KXALHDELTNSLQEFIPKKRVIEYYVVPLPELQVQTPRXQVNR

SEQ ID NO: 66011 - protein, 22 aa, Artificial Sequence
  Cyclic GFR-binding peptide
VTAKKVVKENEDIKRMQVPRLE

SEQ ID NO: 66012 - protein, 34 aa, Artificial Sequence; identical to SEQ ID NO: 22267
  Cyclic GFR-binding peptide
  MOD_RES (2)..(2): Xaa is C or S

SEQ ID NO: 66013 - protein, 29 aa, Artificial Sequence
  Cyclic GFR-binding peptide
  MOD_RES (1)..(3): Xaa is C or S
XGXGEVVMDNSLQEVVKENEDYYLMTLPE

SEQ ID NO: 66014 - protein, 41 aa, Artificial Sequence
  Cyclic GFR-binding peptide
  MOD_RES (2)..(4)..(38): Xaa is C or S
RXEXKNHQLFNSLQEHQGQHPKIRYYLMTLPEEETPVXELG

SEQ ID NO: 66015 - protein, 31 aa, Artificial Sequence
  Cyclic GFR-binding peptide
  MOD_RES (1)..(3): Xaa is C or S
XKXSKVVMVTAKKVKPTRGVIKRIQVPRLDQ

SEQ ID NO: 66016 - protein, 33 aa, Artificial Sequence
  Cyclic GFR-binding peptide
KNHQLFNSLQEHQGQHPKIRYYLMTLPEEETPV

SEQ ID NO: 66017 - protein, 35 aa, Artificial Sequence
  Cyclic GFR-binding peptide
  MOD_RES (30)..(30): Xaa is C or S
LFNSLQEHQGQHPKIRYYLMTLPEEETPVXELGED

SEQ ID NO: 66018 - protein, 30 aa, Artificial Sequence
  Cyclic GFR-binding peptide
ELHEELRNSLQELKPKKRVYEYYLVTLPEH

SEQ ID NO: 66019 - protein, 23 aa, Artificial Sequence
  Cyclic GFR-binding peptide
NSLQEVKPKRGVYYLITLPELAQ

SEQ ID NO: 66020 - protein, 39 aa, Artificial Sequence
  Cyclic GFR-binding peptide
  MOD_RES (2)..(4): Xaa is C or S
AXAXELHEELRNSLQELKPKKRVYEYYVVPLPEHHVRSP

SEQ ID NO: 66021 - protein, 37 aa, Artificial Sequence; identical to SEQ ID NO: 12571
  Cyclic GFR-binding peptide
  MOD_RES (32)..(33): Xaa is C or S

SEQ ID NO: 66022 - protein, 32 aa, Artificial Sequence
  Cyclic GFR-binding peptide
  MOD_RES (32)..(32): Xaa is C or S
SRVVMNVQVEKIVNSSDDVKAVKVSRLKTPAX

SEQ ID NO: 66023 - protein, 36 aa, Artificial Sequence; identical to SEQ ID NO: 22280
  Cyclic GFR-binding peptide
  MOD_RES (32)..(32): Xaa is C or S

SEQ ID NO: 66024 - protein, 35 aa, Artificial Sequence
  Cyclic GFR-binding peptide
  MOD_RES (33)..(33): Xaa is C or S
ELRNSLQELKPKKRVYEYYVVPLPEHHVRSPQXKV

SEQ ID NO: 66025 - protein, 24 aa, Artificial Sequence
  Cyclic GFR-binding peptide
NNSLQEIVNSSDDYYVVPLPELKT

SEQ ID NO: 66026 - protein, 34 aa, Artificial Sequence
  Cyclic GFR-binding peptide
  MOD_RES (2)..(34): Xaa is C or S
GXSRVVMNSMEGIIVNSSDDMIQVTINSLKTPAX

SEQ ID NO: 66027 - protein, 34 aa, Artificial Sequence; identical to SEQ ID NO: 12587
  Cyclic GFR-binding peptide
  MOD_RES (31)..(32): Xaa is C or S

SEQ ID NO: 66028 - protein, 37 aa, Artificial Sequence; identical to SEQ ID NO: 22289
  Cyclic GFR-binding peptide
  MOD_RES (34)..(34): Xaa is C or S

SEQ ID NO: 66029 - protein, 31 aa, Artificial Sequence
  Cyclic GFR-binding peptide
  MOD_RES (1)..(1): Xaa is C or S
XSKVIMSMEGIIKPTKGIMIQITINSLDQSV

SEQ ID NO: 66030 - protein, 25 aa, Artificial Sequence
  Cyclic GFR-binding peptide
RVVMNNSLQEIVNSSDDYYLVTLPE

SEQ ID NO: 66031 - protein, 32 aa, Artificial Sequence; identical to SEQ ID NO: 12604
  Cyclic GFR-binding peptide
  MOD_RES (27)..(27): Xaa is C or S

SEQ ID NO: 66032 - protein, 21 aa, Artificial Sequence
  Cyclic GFR-binding peptide
SMEGIIVNSSDDMIQVTINSL

SEQ ID NO: 66033 - protein, 37 aa, Artificial Sequence
  Cyclic GFR-binding peptide
  MOD_RES (1)..(3)..(34)..(35): Xaa is C or S
XKXSRVIMVTAKKVKPKRGVIKRIQVPRLAQPVXXPA

SEQ ID NO: 66034 - protein, 35 aa, Artificial Sequence; identical to SEQ ID NO: 22301
  Cyclic GFR-binding peptide
  MOD_RES (35)..(35): Xaa is C or S

SEQ ID NO: 66035 - protein, 40 aa, Artificial Sequence
  Cyclic GFR-binding peptide
  MOD_RES (2)..(4)..(36)..(37): Xaa is C or S
HXGXSRVVMNVQVEKIVNSSDDVKAVKVSRLKTPAXXPKP

SEQ ID NO: 66036 - protein, 37 aa, Artificial Sequence
  Cyclic GFR-binding peptide
  MOD_RES (33)..(33): Xaa is C or S
NHQLFNSLQEHQGQHPKIRYYVMPLPEEETPVXELGE

SEQ ID NO: 66037 - protein, 32 aa, Artificial Sequence; identical to SEQ ID NO: 12611
  Cyclic GFR-binding peptide
  MOD_RES (30)..(31): Xaa is C or S

SEQ ID NO: 66038 - protein, 23 aa, Artificial Sequence
  Cyclic GFR-binding peptide
MSMEGIIKPTKGIMIQITINSLD

SEQ ID NO: 66039 - protein, 26 aa, Artificial Sequence
  Cyclic GFR-binding peptide
VMEVQVEKVVKDYEDVKAMKVSRLET

SEQ ID NO: 66040 - protein, 34 aa, Artificial Sequence
  Cyclic GFR-binding peptide
  MOD_RES (31)..(31): Xaa is C or S
RVVMNVTAKKIVNSSDDIKRVQVPRLKTPAXTPK

SEQ ID NO: 66041 - protein, 37 aa, Artificial Sequence
  Cyclic GFR-binding peptide
  MOD_RES (2)..(4)..(35)..(36): Xaa is C or S
SXKXSKVVMVQVEKVKPTRGVVKAIKVSRLDQPVXXP

SEQ ID NO: 66042 - protein, 36 aa, Artificial Sequence
  Cyclic GFR-binding peptide
  MOD_RES (32)..(32): Xaa is C or S
SRVVMNSMEGIIVNSSDDMIQVTINSLKTPAXTPKT

SEQ ID NO: 66043 - protein, 34 aa, Artificial Sequence
  Cyclic GFR-binding peptide
  MOD_RES (30)..(30): Xaa is C or S
VVMNVQVEKIVNSSDDVKAVKVSRLKTPAXTPKT

SEQ ID NO: 66044 - protein, 41 aa, Artificial Sequence; identical to SEQ ID NO: 12629
  Cyclic GFR-binding peptide
  MOD_RES (2)..(4)..(35)..(36): Xaa is C or S

SEQ ID NO: 66045 - protein, 27 aa, Artificial Sequence
  Cyclic GFR-binding peptide
ARVVMNSMEGIIVNSSDDMIQVTINSL

SEQ ID NO: 66046 - protein, 24 aa, Artificial Sequence
  Cyclic GFR-binding peptide
VQVEKIVNSSDDVKAVKVSRLQTP

SEQ ID NO: 66047 - protein, 34 aa, Artificial Sequence; identical to SEQ ID NO: 12632
  Cyclic GFR-binding peptide
  MOD_RES (29)..(29): Xaa is C or S

SEQ ID NO: 66048 - protein, 28 aa, Artificial Sequence
  Cyclic GFR-binding peptide
HDELTNSLQEFIPKKRVIEYYLVTLPEL

SEQ ID NO: 66049 - protein, 32 aa, Artificial Sequence
  Cyclic GFR-binding peptide
  MOD_RES (28)..(29): Xaa is C or S
IMSMEGIIKPTKGIMIQITINSLDQSVXXPSA

SEQ ID NO: 66050 - protein, 33 aa, Artificial Sequence; identical to SEQ ID NO: 12639
  Cyclic GFR-binding peptide
  MOD_RES (29)..(30): Xaa is C or S

SEQ ID NO: 66051 - protein, 33 aa, Artificial Sequence; identical to SEQ ID NO: 22323
  Cyclic GFR-binding peptide

SEQ ID NO: 66052 - protein, 24 aa, Artificial Sequence
  Cyclic GFR-binding peptide
TNSLQEFIPKKRVIEYYLVTLPEL

SEQ ID NO: 66053 - protein, 24 aa, Artificial Sequence
  Cyclic GFR-binding peptide
KVVMVQVEKVKPTRGVVKAIKVSR

SEQ ID NO: 66054 - protein, 33 aa, Artificial Sequence; identical to SEQ ID NO: 22327
  Cyclic GFR-binding peptide
  MOD_RES (2)..(2): Xaa is C or S

SEQ ID NO: 66055 - protein, 27 aa, Artificial Sequence
  Cyclic GFR-binding peptide
SRVVMNSMEGIIVNSSDDMIQVTINSL

SEQ ID NO: 66056 - protein, 29 aa, Artificial Sequence
  Cyclic GFR-binding peptide
  MOD_RES (27)..(28): Xaa is C or S
DVQVEKVVKENEDVKAMKVSRLETPVXXA

SEQ ID NO: 66057 - protein, 31 aa, Artificial Sequence
  Cyclic GFR-binding peptide
  MOD_RES (27)..(28): Xaa is C or S
DVQVEKVVKENEDVKAMKVSRLETPVXXAKP

SEQ ID NO: 66058 - protein, 35 aa, Artificial Sequence; identical to SEQ ID NO: 12652
  Cyclic GFR-binding peptide
  MOD_RES (32)..(33): Xaa is C or S

SEQ ID NO: 66059 - protein, 39 aa, Artificial Sequence; identical to SEQ ID NO: 22331
  Cyclic GFR-binding peptide
  MOD_RES (2)..(4)..(38): Xaa is C or S

SEQ ID NO: 66060 - protein, 27 aa, Artificial Sequence
  Cyclic GFR-binding peptide
  MOD_RES (26)..(26): Xaa is C or S
VQVEKIVNSSDDVKAVKVSRLKTPAXT

SEQ ID NO: 66061 - protein, 35 aa, Artificial Sequence; identical to SEQ ID NO: 22334
  Cyclic GFR-binding peptide
  MOD_RES (31)..(31): Xaa is C or S

SEQ ID NO: 66062 - protein, 35 aa, Artificial Sequence
  Cyclic GFR-binding peptide
  MOD_RES (2)..(33)..(34): Xaa is C or S
KXSRVIMVQVEKVKPKRGVVKAIKVSRLAQPVXXP

SEQ ID NO: 66063 - protein, 29 aa, Artificial Sequence
  Cyclic GFR-binding peptide
VVMNSMEGIIVNSSDDMIQVTINSLQTPA

SEQ ID NO: 66064 - protein, 31 aa, Artificial Sequence; identical to SEQ ID NO: 22337
  Cyclic GFR-binding peptide

SEQ ID NO: 66065 - protein, 23 aa, Artificial Sequence
  Cyclic GFR-binding peptide
VMVTAKKVKPTRGVIKRIQVPRL

SEQ ID NO: 66066 - protein, 41 aa, Artificial Sequence
  Cyclic GFR-binding peptide
  MOD_RES (1)..(3)..(35)..(36): Xaa is C or S
XGXSRVVMNVQVEKIVNSSDDVKAVKVSRLKTPAXXPKPVY

SEQ ID NO: 66067 - protein, 29 aa, Artificial Sequence
  Cyclic GFR-binding peptide
  MOD_RES (29)..(29): Xaa is C or S
VVMVQVEKVKPTRGVVKAIKVSRLDQPVX

SEQ ID NO: 66068 - protein, 35 aa, Artificial Sequence; identical to SEQ ID NO: 12667
  Cyclic GFR-binding peptide
  MOD_RES (2)..(4): Xaa is C or S

SEQ ID NO: 66069 - protein, 28 aa, Artificial Sequence
  Cyclic GFR-binding peptide
  MOD_RES (26)..(27): Xaa is C or S
SMEGIIKPTKGIMIQITINSLDQSVXXP

SEQ ID NO: 66070 - protein, 23 aa, Artificial Sequence
  Cyclic GFR-binding peptide
NSLQEVVKDYEDYYLMTLPELET

SEQ ID NO: 66071 - protein, 27 aa, Artificial Sequence
  Cyclic GFR-binding peptide
  MOD_RES (27)..(27): Xaa is C or S
MVTAKKVKPKRGVIKRIQVPRLAQPVX

SEQ ID NO: 66072 - protein, 33 aa, Artificial Sequence; identical to SEQ ID NO: 12681
  Cyclic GFR-binding peptide
  MOD_RES (2)..(4): Xaa is C or S

SEQ ID NO: 66073 - protein, 34 aa, Artificial Sequence
  Cyclic GFR-binding peptide
  MOD_RES (28)..(29): Xaa is C or S
MNSMEGIIVNSSDDMIQVTINSLKTPAXXPKPVY

SEQ ID NO: 66074 - protein, 28 aa, Artificial Sequence
  Cyclic GFR-binding peptide
  MOD_RES (26)..(27): Xaa is C or S
SMEGIVKPKRGVMIQITINSLAQPVXXP

SEQ ID NO: 66075 - protein, 31 aa, Artificial Sequence
  Cyclic GFR-binding peptide
EELRNSLQELKPKKRVYEYYLVTLPEHHVRS

SEQ ID NO: 66076 - protein, 36 aa, Artificial Sequence
  Cyclic GFR-binding peptide
  MOD_RES (32)..(32): Xaa is C or S
SRVVMNVQVEKIVNSSDDVKAVKVSRLKTPAXTPKT

SEQ ID NO: 66077 - protein, 30 aa, Artificial Sequence
  Cyclic GFR-binding peptide
RVVMNVQVEKIVNSSDDVKAVKVSRLKTPA

SEQ ID NO: 66078 - protein, 30 aa, Artificial Sequence
  Cyclic GFR-binding peptide
  MOD_RES (1)..(1): Xaa is C or S
XSKVVMSMEGIVKPTRGVMIQITINSLDQP

SEQ ID NO: 66079 - protein, 22 aa, Artificial Sequence
  Cyclic GFR-binding peptide
IMVQVEKVKPKRGVVKAIKVSR

SEQ ID NO: 66080 - protein, 40 aa, Artificial Sequence
  Cyclic GFR-binding peptide
  MOD_RES (1)..(3)..(35)..(36): Xaa is C or S
XGXGEVVMDVQVEKVVKENEDVKAMKVSRLETPVXXAKPI

SEQ ID NO: 66081 - protein, 41 aa, Artificial Sequence; identical to SEQ ID NO: 22350
  Cyclic GFR-binding peptide
  MOD_RES (1)..(3)..(37): Xaa is C or S

SEQ ID NO: 66082 - protein, 34 aa, Artificial Sequence; identical to SEQ ID NO: 12691
  Cyclic GFR-binding peptide
  MOD_RES (30)..(31): Xaa is C or S

SEQ ID NO: 66083 - protein, 34 aa, Artificial Sequence
  Cyclic GFR-binding peptide
  MOD_RES (29)..(30): Xaa is C or S
VIMVQVEKIKPTKGIVKAIKVSRLDQSVXXPSAS

SEQ ID NO: 66084 - protein, 28 aa, Artificial Sequence
  Cyclic GFR-binding peptide
  MOD_RES (1)..(1): Xaa is C or S
XGEVVMEVTAKKVVKDYEDIKRMQVPRL

SEQ ID NO: 66085 - protein, 38 aa, Artificial Sequence
  Cyclic GFR-binding peptide
  MOD_RES (1)..(3)..(35)..(36): Xaa is C or S
XGXSRVVMNVQVEKIVNSSDDVKAVKVSRLKTPAXXPK

SEQ ID NO: 66086 - protein, 38 aa, Artificial Sequence
  Cyclic GFR-binding peptide
  MOD_RES (2)..(34)..(35): Xaa is C or S
GXGEVVMEVQVEKVVKDYEDVKAMKVSRLETPVXXAKP

SEQ ID NO: 66087 - protein, 39 aa, Artificial Sequence
  Cyclic GFR-binding peptide
  MOD_RES (2)..(34)..(35): Xaa is C or S
GXGEVVMDVQVEKVVKENEDVKAMKVSRLETPVXXAKPI

SEQ ID NO: 66088 - protein, 36 aa, Artificial Sequence; identical to SEQ ID NO: 12696
  Cyclic GFR-binding peptide
  MOD_RES (2)..(4)..(36): Xaa is C or S

SEQ ID NO: 66089 - protein, 40 aa, Artificial Sequence
  Cyclic GFR-binding peptide
  MOD_RES (2)..(4)..(35)..(36): Xaa is C or S
SXKXSKVVMVQVEKVKPTRGVVKAIKVSRLDQPVXXPSAS

SEQ ID NO: 66090 - protein, 34 aa, Artificial Sequence
  Cyclic GFR-binding peptide
  MOD_RES (29)..(30): Xaa is C or S
VMDVTAKKVVKENEDIKRMQVPRLETPVXXAKPI

SEQ ID NO: 66091 - protein, 29 aa, Artificial Sequence
  Cyclic GFR-binding peptide
  MOD_RES (1)..(1): Xaa is C or S
XKNHQLFVQVEKHQGQHPKIRVKAMKVSR

SEQ ID NO: 66092 - protein, 37 aa, Artificial Sequence
  Cyclic GFR-binding peptide
  MOD_RES (2)..(4): Xaa is C or S
EXKXALHDELTNSLQEFIPKKRVIEYYLVTLPELQVQ

SEQ ID NO: 66093 - protein, 22 aa, Artificial Sequence
  Cyclic GFR-binding peptide
NSLQEIVNSSDDYYVVPLPELK

SEQ ID NO: 66094 - protein, 36 aa, Artificial Sequence
  Cyclic GFR-binding peptide
  MOD_RES (1)..(3)..(35)..(36): Xaa is C or S
XGXGEVVMDSMEGIVVKENEDMIQMTINSLETPVXX

SEQ ID NO: 66095 - protein, 32 aa, Artificial Sequence; identical to SEQ ID NO: 12706
  Cyclic GFR-binding peptide
  MOD_RES (27)..(28): Xaa is C or S

SEQ ID NO: 66096 - protein, 38 aa, Artificial Sequence; identical to SEQ ID NO: 47349
  Cyclic GFR-binding peptide
  MOD_RES (2)..(4)..(35)..(36): Xaa is C or S

SEQ ID NO: 66097 - protein, 33 aa, Artificial Sequence; identical to SEQ ID NO: 12713
  Cyclic GFR-binding peptide
  MOD_RES (32)..(33): Xaa is C or S

SEQ ID NO: 66098 - protein, 27 aa, Artificial Sequence
  Cyclic GFR-binding peptide
HQLFNSLQEHQGQHPKIRYYLMTLPEE

SEQ ID NO: 66099 - protein, 37 aa, Artificial Sequence; identical to SEQ ID NO: 12715
  Cyclic GFR-binding peptide
  MOD_RES (1)..(3)..(35)..(36): Xaa is C or S

SEQ ID NO: 66100 - protein, 32 aa, Artificial Sequence
  Cyclic GFR-binding peptide
  MOD_RES (26)..(27): Xaa is C or S
VQVEKVKPKRGVVKAIKVSRLAQPVXXPAASA

SEQ ID NO: 66101 - protein, 37 aa, Artificial Sequence; identical to SEQ ID NO: 12719
  Cyclic GFR-binding peptide
  MOD_RES (32)..(33): Xaa is C or S

SEQ ID NO: 66102 - protein, 39 aa, Artificial Sequence
  Cyclic GFR-binding peptide
  MOD_RES (2)..(4)..(36)..(37): Xaa is C or S
HXGXARVVMNSMEGIIVNSSDDMIQVTINSLQTPAXXPK

SEQ ID NO: 66103 - protein, 37 aa, Artificial Sequence
  Cyclic GFR-binding peptide
  MOD_RES (1)..(33)..(34): Xaa is C or S
XGEVVMEVTAKKVVKDYEDIKRMQVPRLETPVXXAKP

SEQ ID NO: 66104 - protein, 35 aa, Artificial Sequence; identical to SEQ ID NO: 12720
  Cyclic GFR-binding peptide
  MOD_RES (2)..(34)..(35): Xaa is C or S

SEQ ID NO: 66105 - protein, 22 aa, Artificial Sequence
  Cyclic GFR-binding peptide
VTAKKIVNSSDDIKRVQVPRLK

SEQ ID NO: 66106 - protein, 38 aa, Artificial Sequence
  Cyclic GFR-binding peptide
  MOD_RES (2)..(34): Xaa is C or S
GXSRVVMNSMEGIIVNSSDDMIQVTINSLKTPAXTPKT

SEQ ID NO: 66107 - protein, 30 aa, Artificial Sequence; identical to SEQ ID NO: 12728
  Cyclic GFR-binding peptide
  MOD_RES (2)..(2): Xaa is C or S

SEQ ID NO: 66108 - protein, 26 aa, Artificial Sequence
  Cyclic GFR-binding peptide
  MOD_RES (26)..(26): Xaa is C or S
VTAKKIVNSSDDIKRVQVPRLKTPAX

SEQ ID NO: 66109 - protein, 32 aa, Artificial Sequence
  Cyclic GFR-binding peptide
  MOD_RES (2)..(2): Xaa is C or S
KXALHDELTNSLQEFIPKKRVIEYYVVPLPEL

SEQ ID NO: 66110 - protein, 38 aa, Artificial Sequence; identical to SEQ ID NO: 12733
  Cyclic GFR-binding peptide
  MOD_RES (2)..(34)..(35): Xaa is C or S

SEQ ID NO: 66111 - protein, 29 aa, Artificial Sequence
  Cyclic GFR-binding peptide
RVTAKKLKPKKRVYEIKRVQVPRHHVRSP

SEQ ID NO: 66112 - protein, 28 aa, Artificial Sequence
  Cyclic GFR-binding peptide
  MOD_RES (27)..(28): Xaa is C or S
MNSLQEVKPTRGVYYVIPLPELDQPVXX

SEQ ID NO: 66113 - protein, 32 aa, Artificial Sequence
  Cyclic GFR-binding peptide
  MOD_RES (28)..(29): Xaa is C or S
MDVQVEKVVKENEDVKAMKVSRLETPVXXAKP

SEQ ID NO: 66114 - protein, 35 aa, Artificial Sequence; identical to SEQ ID NO: 12740
  Cyclic GFR-binding peptide
  MOD_RES (29)..(29): Xaa is C or S

SEQ ID NO: 66115 - protein, 27 aa, Artificial Sequence
  Cyclic GFR-binding peptide
VVMNVQVEKIVNSSDDVKAVKVSRLQT

SEQ ID NO: 66116 - protein, 24 aa, Artificial Sequence
  Cyclic GFR-binding peptide
DVTAKKVVKENEDIKRMQVPRLET

SEQ ID NO: 66117 - protein, 31 aa, Artificial Sequence; identical to SEQ ID NO: 12747
  Cyclic GFR-binding peptide
  MOD_RES (1)..(3): Xaa is C or S

SEQ ID NO: 66118 - protein, 34 aa, Artificial Sequence
  Cyclic GFR-binding peptide
  MOD_RES (28)..(28): Xaa is C or S
MNVQVEKIVNSSDDVKAVKVSRLKTPAXTPKTVH

SEQ ID NO: 66119 - protein, 38 aa, Artificial Sequence; identical to SEQ ID NO: 22404
  Cyclic GFR-binding peptide
  MOD_RES (1)..(38): Xaa is C or S

SEQ ID NO: 66120 - protein, 35 aa, Artificial Sequence
  Cyclic GFR-binding peptide
  MOD_RES (31)..(32): Xaa is C or S
SKVIMSMEGIIKPTKGIMIQITINSLDQSVXXPSA

SEQ ID NO: 66121 - protein, 35 aa, Artificial Sequence; identical to SEQ ID NO: 12757
  Cyclic GFR-binding peptide
  MOD_RES (31)..(32): Xaa is C or S

SEQ ID NO: 66122 - protein, 32 aa, Artificial Sequence
  Cyclic GFR-binding peptide
  MOD_RES (1)..(3): Xaa is C or S
XAXELHEELRNSLQELKPKKRVYEYYVVPLPE

SEQ ID NO: 66123 - protein, 35 aa, Artificial Sequence
  Cyclic GFR-binding peptide
  MOD_RES (1)..(3)..(34)..(35): Xaa is C or S
XKXSKVIMVQVEKIKPTKGIVKAIKVSRLDQSVXX

SEQ ID NO: 66124 - protein, 29 aa, Artificial Sequence
  Cyclic GFR-binding peptide
  MOD_RES (29)..(29): Xaa is C or S
FVTAKKHQGQHPKIRIKRMQVPREETPVX

SEQ ID NO: 66125 - protein, 35 aa, Artificial Sequence
  Cyclic GFR-binding peptide
  MOD_RES (29)..(30): Xaa is C or S
VMESMEGIVVKDYEDMIQMTINSLETPVXXAKPIS

SEQ ID NO: 66126 - protein, 25 aa, Artificial Sequence
  Cyclic GFR-binding peptide
MNVTAKKIVNSSDDIKRVQVPRLQT

SEQ ID NO: 66127 - protein, 29 aa, Artificial Sequence
  Cyclic GFR-binding peptide
  MOD_RES (29)..(29): Xaa is C or S
VMNSMEGIIVNSSDDMIQVTINSLKTPAX

SEQ ID NO: 66128 - protein, 35 aa, Artificial Sequence
  Cyclic GFR-binding peptide
  MOD_RES (33)..(33): Xaa is C or S
ELRNSLQELKPKKRVYEYYLVTLPEHHVRSPQXKV

SEQ ID NO: 66129 - protein, 34 aa, Artificial Sequence
  Cyclic GFR-binding peptide
  MOD_RES (30)..(31): Xaa is C or S
KVIMSMEGIIKPTKGIMIQITINSLDQSVXXPSA

SEQ ID NO: 66130 - protein, 33 aa, Artificial Sequence; identical to SEQ ID NO: 12763
  Cyclic GFR-binding peptide
  MOD_RES (27)..(28): Xaa is C or S

SEQ ID NO: 66131 - protein, 36 aa, Artificial Sequence
  Cyclic GFR-binding peptide
  MOD_RES (31)..(32): Xaa is C or S
RVVMNVQVEKIVNSSDDVKAVKVSRLQTPAXXPKPV

SEQ ID NO: 66132 - protein, 27 aa, Artificial Sequence
  Cyclic GFR-binding peptide
MNNSLQEIVNSSDDYYLVTLPELKTPA

SEQ ID NO: 66133 - protein, 42 aa, Artificial Sequence
  Cyclic GFR-binding peptide
  MOD_RES (1)..(38): Xaa is C or S
XALHDELTNSLQEFIPKKRVIEYYVVPLPELQVQTPRXQVNR

SEQ ID NO: 66134 - protein, 33 aa, Artificial Sequence; identical to SEQ ID NO: 12770
  Cyclic GFR-binding peptide
  MOD_RES (27)..(27): Xaa is C or S

SEQ ID NO: 66135 - protein, 32 aa, Artificial Sequence; identical to SEQ ID NO: 12773
  Cyclic GFR-binding peptide
  MOD_RES (2)..(2): Xaa is C or S

SEQ ID NO: 66136 - protein, 39 aa, Artificial Sequence; identical to SEQ ID NO: 22420
  Cyclic GFR-binding peptide
  MOD_RES (1)..(3)..(37): Xaa is C or S

SEQ ID NO: 66137 - protein, 26 aa, Artificial Sequence
  Cyclic GFR-binding peptide
  MOD_RES (26)..(26): Xaa is C or S
VQVEKIKPTKGIVKAIKVSRLDQSVX

SEQ ID NO: 66138 - protein, 35 aa, Artificial Sequence
  Cyclic GFR-binding peptide
  MOD_RES (30)..(30): Xaa is C or S
VVMNSMEGIIVNSSDDMIQVTINSLKTPAXTPKTV

SEQ ID NO: 66139 - protein, 39 aa, Artificial Sequence
  Cyclic GFR-binding peptide
  MOD_RES (2)..(4): Xaa is C or S
EXKXALHDELTNSLQEFIPKKRVIEYYVVPLPELQVQTP

SEQ ID NO: 66140 - protein, 34 aa, Artificial Sequence; identical to SEQ ID NO: 22424
  Cyclic GFR-binding peptide
  MOD_RES (2)..(4): Xaa is C or S

SEQ ID NO: 66141 - protein, 31 aa, Artificial Sequence; identical to SEQ ID NO: 22425
  Cyclic GFR-binding peptide
  MOD_RES (30)..(30): Xaa is C or S

SEQ ID NO: 66142 - protein, 34 aa, Artificial Sequence; identical to SEQ ID NO: 12775
  Cyclic GFR-binding peptide
  MOD_RES (28)..(29): Xaa is C or S

SEQ ID NO: 66143 - protein, 25 aa, Artificial Sequence
  Cyclic GFR-binding peptide
MENSLQEVVKDYEDYYLMTLPELET

SEQ ID NO: 66144 - protein, 34 aa, Artificial Sequence
  Cyclic GFR-binding peptide
  MOD_RES (1)..(33)..(34): Xaa is C or S
XSRVVMNVQVEKIVNSSDDVKAVKVSRLKTPAXX

SEQ ID NO: 66145 - protein, 32 aa, Artificial Sequence
  Cyclic GFR-binding peptide
  MOD_RES (32)..(32): Xaa is C or S
GEVVMDSMEGIVVKENEDMIQMTINSLETPVX

SEQ ID NO: 66146 - protein, 29 aa, Artificial Sequence
  Cyclic GFR-binding peptide
  MOD_RES (1)..(3): Xaa is C or S
XGXARVVMNVTAKKIVNSSDDIKRVQVPR

SEQ ID NO: 66147 - protein, 37 aa, Artificial Sequence
  Cyclic GFR-binding peptide
  MOD_RES (31)..(31): Xaa is C or S
QLFNSLQEHQGQHPKIRYYVMPLPEEETPVXELGEDN

SEQ ID NO: 66148 - protein, 40 aa, Artificial Sequence; identical to SEQ ID NO: 12797
  Cyclic GFR-binding peptide
  MOD_RES (2)..(34)..(35): Xaa is C or S

SEQ ID NO: 66149 - protein, 28 aa, Artificial Sequence
  Cyclic GFR-binding peptide
  MOD_RES (2)..(2): Xaa is C or S
GXGEVVMDNSLQEVVKENEDYYVMPLPE

SEQ ID NO: 66150 - protein, 36 aa, Artificial Sequence; identical to SEQ ID NO: 12802
  Cyclic GFR-binding peptide
  MOD_RES (30)..(31): Xaa is C or S

SEQ ID NO: 66151 - protein, 33 aa, Artificial Sequence
  Cyclic GFR-binding peptide
  MOD_RES (31)..(32): Xaa is C or S
RVVMNVTAKKIVNSSDDIKRVQVPRLQTPAXXP

SEQ ID NO: 66152 - protein, 34 aa, Artificial Sequence
  Cyclic GFR-binding peptide
  MOD_RES (1)..(33)..(34): Xaa is C or S
XGEVVMDSMEGIVVKENEDMIQMTINSLETPVXX

SEQ ID NO: 66153 - protein, 33 aa, Artificial Sequence
  Cyclic GFR-binding peptide
  MOD_RES (29)..(30): Xaa is C or S
VMEVTAKKVVKDYEDIKRMQVPRLETPVXXAKP

SEQ ID NO: 66154 - protein, 35 aa, Artificial Sequence
  Cyclic GFR-binding peptide
  MOD_RES (1)..(3)..(35): Xaa is C or S
XGXGEVVMEVTAKKVVKDYEDIKRMQVPRLETPVX

SEQ ID NO: 66155 - protein, 39 aa, Artificial Sequence; identical to SEQ ID NO: 12808
  Cyclic GFR-binding peptide
  MOD_RES (2)..(34)..(35): Xaa is C or S

SEQ ID NO: 66156 - protein, 26 aa, Artificial Sequence
  Cyclic GFR-binding peptide
NNSLQEIVNSSDDYYVVPLPELQTPA

SEQ ID NO: 66157 - protein, 27 aa, Artificial Sequence
  Cyclic GFR-binding peptide
FNSLQEHQGQHPKIRYYLMTLPEEETP

SEQ ID NO: 66158 - protein, 38 aa, Artificial Sequence; identical to SEQ ID NO: 12815
  Cyclic GFR-binding peptide
  MOD_RES (2)..(34)..(35): Xaa is C or S

SEQ ID NO: 66159 - protein, 30 aa, Artificial Sequence; identical to SEQ ID NO: 22449
  Cyclic GFR-binding peptide
  MOD_RES (30)..(30): Xaa is C or S

SEQ ID NO: 66160 - protein, 31 aa, Artificial Sequence
  Cyclic GFR-binding peptide
  MOD_RES (28)..(28): Xaa is C or S
MNVQVEKIVNSSDDVKAVKVSRLKTPAXTPK

SEQ ID NO: 66161 - protein, 25 aa, Artificial Sequence
  Cyclic GFR-binding peptide
VVMNSLQEVKPTRGVYYLITLPELD

SEQ ID NO: 66162 - protein, 35 aa, Artificial Sequence
  Cyclic GFR-binding peptide
  MOD_RES (1)..(3)..(34)..(35): Xaa is C or S
XKXSKVVMVTAKKVKPTRGVIKRIQVPRLDQPVXX

SEQ ID NO: 66163 - protein, 26 aa, Artificial Sequence
  Cyclic GFR-binding peptide
VVMESMEGIVVKDYEDMIQMTINSLE

SEQ ID NO: 66164 - protein, 23 aa, Artificial Sequence
  Cyclic GFR-binding peptide
VTAKKIVNSSDDIKRVQVPRLKT

SEQ ID NO: 66165 - protein, 28 aa, Artificial Sequence
  Cyclic GFR-binding peptide
  MOD_RES (26)..(27): Xaa is C or S
NSLQEVKPTRGVYYVIPLPELDQPVXXP

SEQ ID NO: 66166 - protein, 26 aa, Artificial Sequence
  Cyclic GFR-binding peptide
GEVVMENSLQEVVKDYEDYYLMTLPE

SEQ ID NO: 66167 - protein, 22 aa, Artificial Sequence
  Cyclic GFR-binding peptide
DVTAKKVVKENEDIKRMQVPRL

SEQ ID NO: 66168 - protein, 29 aa, Artificial Sequence
  Cyclic GFR-binding peptide
  MOD_RES (28)..(28): Xaa is C or S
NSLQEHQGQHPKIRYYLMTLPEEETPVXE

SEQ ID NO: 66169 - protein, 36 aa, Artificial Sequence
  Cyclic GFR-binding peptide
  MOD_RES (1)..(3)..(35)..(36): Xaa is C or S
XGXARVVMNSMEGIIVNSSDDMIQVTINSLQTPAXX

SEQ ID NO: 66170 - protein, 32 aa, Artificial Sequence
  Cyclic GFR-binding peptide
  MOD_RES (1)..(1): Xaa is C or S
XELHEELRNSLQELKPKKRVYEYYLVTLPEHH

SEQ ID NO: 66171 - protein, 28 aa, Artificial Sequence
  Cyclic GFR-binding peptide
  MOD_RES (27)..(28): Xaa is C or S
EVTAKKVVKDYEDIKRMQVPRLETPVXX

SEQ ID NO: 66172 - protein, 30 aa, Artificial Sequence
  Cyclic GFR-binding peptide
  MOD_RES (27)..(28): Xaa is C or S
NVTAKKIVNSSDDIKRVQVPRLKTPAXXPK

SEQ ID NO: 66173 - protein, 24 aa, Artificial Sequence
  Cyclic GFR-binding peptide
VMNNSLQEIVNSSDDYYVVPLPEL

SEQ ID NO: 66174 - protein, 31 aa, Artificial Sequence
  Cyclic GFR-binding peptide
  MOD_RES (2)..(2): Xaa is C or S
EXKNHQLFNSLQEHQGQHPKIRYYVMPLPEE

SEQ ID NO: 66175 - protein, 26 aa, Artificial Sequence
  Cyclic GFR-binding peptide
  MOD_RES (26)..(26): Xaa is C or S
NSLQEVKPKRGVYYLITLPELAQPVX

SEQ ID NO: 66176 - protein, 26 aa, Artificial Sequence
  Cyclic GFR-binding peptide
VMNSMEGIIVNSSDDMIQVTINSLQT

SEQ ID NO: 66177 - protein, 23 aa, Artificial Sequence
  Cyclic GFR-binding peptide
MNSLQEVKPTRGVYYLITLPELD

SEQ ID NO: 66178 - protein, 40 aa, Artificial Sequence
  Cyclic GFR-binding peptide
  MOD_RES (2)..(4)..(36)..(37): Xaa is C or S
HXGXARVVMNVQVEKIVNSSDDVKAVKVSRLQTPAXXPKP

SEQ ID NO: 66179 - protein, 24 aa, Artificial Sequence
  Cyclic GFR-binding peptide
MNSLQEIKPTKGIYYVIPLPELDQ

SEQ ID NO: 66180 - protein, 37 aa, Artificial Sequence
  Cyclic GFR-binding peptide
  MOD_RES (1)..(3)..(35): Xaa is C or S
XGXSRVVMNVTAKKIVNSSDDIKRVQVPRLKTPAXTP

SEQ ID NO: 66181 - protein, 23 aa, Artificial Sequence
  Cyclic GFR-binding peptide
SMEGIVKPTRGVMIQITINSLDQ

SEQ ID NO: 66182 - protein, 39 aa, Artificial Sequence; identical to SEQ ID NO: 22469
  Cyclic GFR-binding peptide
  MOD_RES (35)..(35): Xaa is C or S

SEQ ID NO: 66183 - protein, 41 aa, Artificial Sequence
  Cyclic GFR-binding peptide
  MOD_RES (1)..(3)..(35)..(36): Xaa is C or S
XGXARVVMNVTAKKIVNSSDDIKRVQVPRLQTPAXXPKPVT

SEQ ID NO: 66184 - protein, 36 aa, Artificial Sequence
  Cyclic GFR-binding peptide
  MOD_RES (31)..(32): Xaa is C or S
EVVMDSMEGIVVKENEDMIQMTINSLETPVXXAKPI

SEQ ID NO: 66185 - protein, 26 aa, Artificial Sequence
  Cyclic GFR-binding peptide
DELTSMEGIFIPKKRVIEMIQVTINS

SEQ ID NO: 66186 - protein, 27 aa, Artificial Sequence
  Cyclic GFR-binding peptide
RVVMNVQVEKIVNSSDDVKAVKVSRLQ

SEQ ID NO: 66187 - protein, 39 aa, Artificial Sequence
  Cyclic GFR-binding peptide
  MOD_RES (2)..(34)..(35): Xaa is C or S
GXARVVMNSMEGIIVNSSDDMIQVTINSLQTPAXXPKPV

SEQ ID NO: 66188 - protein, 30 aa, Artificial Sequence
  Cyclic GFR-binding peptide
  MOD_RES (1)..(1): Xaa is C or S
XGEVVMESMEGIVVKDYEDMIQMTINSLET

SEQ ID NO: 66189 - protein, 44 aa, Artificial Sequence
  Cyclic GFR-binding peptide
  MOD_RES (2)..(4)..(41): Xaa is C or S
AXAXELHEELRNSLQELKPKKRVYEYYLVTLPEHHVRSPQXKVS

SEQ ID NO: 66190 - protein, 33 aa, Artificial Sequence
  Cyclic GFR-binding peptide
  MOD_RES (28)..(29): Xaa is C or S
MNSMEGIIVNSSDDMIQVTINSLKTPAXXPKPV

SEQ ID NO: 66191 - protein, 33 aa, Artificial Sequence; identical to SEQ ID NO: 12866
  Cyclic GFR-binding peptide
  MOD_RES (32)..(33): Xaa is C or S

SEQ ID NO: 66192 - protein, 32 aa, Artificial Sequence
  Cyclic GFR-binding peptide
  MOD_RES (2)..(4): Xaa is C or S
RXGXGEVVMDVQVEKVVKENEDVKAMKVSRLE

SEQ ID NO: 66193 - protein, 35 aa, Artificial Sequence
  Cyclic GFR-binding peptide
  MOD_RES (2)..(33)..(34): Xaa is C or S
KXSRVIMVTAKKVKPKRGVIKRIQVPRLAQPVXXP

SEQ ID NO: 66194 - protein, 28 aa, Artificial Sequence
  Cyclic GFR-binding peptide
GEVVMESMEGIVVKDYEDMIQMTINSLE

SEQ ID NO: 66195 - protein, 31 aa, Artificial Sequence; identical to SEQ ID NO: 12869
  Cyclic GFR-binding peptide
  MOD_RES (27)..(28): Xaa is C or S

SEQ ID NO: 66196 - protein, 22 aa, Artificial Sequence
  Cyclic GFR-binding peptide
NVTAKKIVNSSDDIKRVQVPRL

SEQ ID NO: 66197 - protein, 39 aa, Artificial Sequence
  Cyclic GFR-binding peptide
  MOD_RES (1)..(3): Xaa is C or S
XAXELHEELRNSLQELKPKKRVYEYYLVTLPEHHVRSPQ

SEQ ID NO: 66198 - protein, 33 aa, Artificial Sequence; identical to SEQ ID NO: 12871
  Cyclic GFR-binding peptide
  MOD_RES (2)..(4): Xaa is C or S

SEQ ID NO: 66199 - protein, 27 aa, Artificial Sequence
  Cyclic GFR-binding peptide
MNSMEGIIVNSSDDMIQVTINSLQTPA

SEQ ID NO: 66200 - protein, 24 aa, Artificial Sequence
  Cyclic GFR-binding peptide
VVMDVQVEKVVKENEDVKAMKVSR

SEQ ID NO: 66201 - protein, 25 aa, Artificial Sequence
  Cyclic GFR-binding peptide
NVQVEKIVNSSDDVKAVKVSRLKTP

SEQ ID NO: 66202 - protein, 36 aa, Artificial Sequence
  Cyclic GFR-binding peptide
  MOD_RES (1)..(33): Xaa is C or S
XSRVVMNVTAKKIVNSSDDIKRVQVPRLKTPAXTPK

SEQ ID NO: 66203 - protein, 30 aa, Artificial Sequence
  Cyclic GFR-binding peptide
  MOD_RES (2)..(2): Xaa is C or S
KXSKVIMVTAKKIKPTKGIIKRIQVPRLDQ

SEQ ID NO: 66204 - protein, 41 aa, Artificial Sequence
  Cyclic GFR-binding peptide
  MOD_RES (2)..(4)..(36)..(37): Xaa is C or S
RXGXGEVVMDSMEGIVVKENEDMIQMTINSLETPVXXAKPI

SEQ ID NO: 66205 - protein, 36 aa, Artificial Sequence
  Cyclic GFR-binding peptide
  MOD_RES (32)..(32): Xaa is C or S
LTNSLQEFIPKKRVIEYYVVPLPELQVQTPRXQVNR

SEQ ID NO: 66206 - protein, 30 aa, Artificial Sequence
  Cyclic GFR-binding peptide
  MOD_RES (1)..(1): Xaa is C or S
XALHDELTNSLQEFIPKKRVIEYYLVTLPE

SEQ ID NO: 66207 - protein, 29 aa, Artificial Sequence
  Cyclic GFR-binding peptide
  MOD_RES (26)..(27): Xaa is C or S
SMEGIVVKDYEDMIQMTINSLETPVXXAK

SEQ ID NO: 66208 - protein, 33 aa, Artificial Sequence; identical to SEQ ID NO: 22495
  Cyclic GFR-binding peptide

SEQ ID NO: 66209 - protein, 23 aa, Artificial Sequence
  Cyclic GFR-binding peptide
VMSMEGIVKPTRGVMIQITINSL

SEQ ID NO: 66210 - protein, 32 aa, Artificial Sequence
  Cyclic GFR-binding peptide
  MOD_RES (30)..(30): Xaa is C or S
LFNSLQEHQGQHPKIRYYLMTLPEEETPVXEL

SEQ ID NO: 66211 - protein, 33 aa, Artificial Sequence
  Cyclic GFR-binding peptide
ELHEELRNSLQELKPKKRVYEYYVVPLPEHHVR

SEQ ID NO: 66212 - protein, 27 aa, Artificial Sequence
  Cyclic GFR-binding peptide
SRVVMNNSLQEIVNSSDDYYLVTLPEL

SEQ ID NO: 66213 - protein, 27 aa, Artificial Sequence
  Cyclic GFR-binding peptide
QLFNSLQEHQGQHPKIRYYLMTLPEEE

SEQ ID NO: 66214 - protein, 30 aa, Artificial Sequence
  Cyclic GFR-binding peptide
  MOD_RES (30)..(30): Xaa is C or S
NSLQELKPKKRVYEYYVVPLPEHHVRSPQX

SEQ ID NO: 66215 - protein, 27 aa, Artificial Sequence
  Cyclic GFR-binding peptide
VQVEKHQGQHPKIRVKAMKVSREETPV

SEQ ID NO: 66216 - protein, 30 aa, Artificial Sequence
  Cyclic GFR-binding peptide
  MOD_RES (28)..(29): Xaa is C or S
MNVQVEKIVNSSDDVKAVKVSRLKTPAXXP

SEQ ID NO: 66217 - protein, 32 aa, Artificial Sequence
  Cyclic GFR-binding peptide
  MOD_RES (1)..(3): Xaa is C or S
XGXARVVMNVTAKKIVNSSDDIKRVQVPRLQT

SEQ ID NO: 66218 - protein, 35 aa, Artificial Sequence
  Cyclic GFR-binding peptide
  MOD_RES (31)..(32): Xaa is C or S
SRVIMVQVEKVKPKRGVVKAIKVSRLAQPVXXPAA

SEQ ID NO: 66219 - protein, 28 aa, Artificial Sequence
  Cyclic GFR-binding peptide
VVMNNSLQEIVNSSDDYYVVPLPELKTP

SEQ ID NO: 66220 - protein, 23 aa, Artificial Sequence
  Cyclic GFR-binding peptide
RNSLQELKPKKRVYEYYVVPLPE

SEQ ID NO: 66221 - protein, 25 aa, Artificial Sequence
  Cyclic GFR-binding peptide
VVMEVQVEKVVKDYEDVKAMKVSRL

SEQ ID NO: 66222 - protein, 27 aa, Artificial Sequence
  Cyclic GFR-binding peptide
  MOD_RES (26)..(27): Xaa is C or S
NSLQEVVKDYEDYYVMPLPELETPVXX

SEQ ID NO: 66223 - protein, 28 aa, Artificial Sequence
  Cyclic GFR-binding peptide
  MOD_RES (2)..(2): Xaa is C or S
GXARVVMNNSLQEIVNSSDDYYLVTLPE

SEQ ID NO: 66224 - protein, 31 aa, Artificial Sequence
  Cyclic GFR-binding peptide
  MOD_RES (27)..(28): Xaa is C or S
NVQVEKIVNSSDDVKAVKVSRLKTPAXXPKP

SEQ ID NO: 66225 - protein, 39 aa, Artificial Sequence
  Cyclic GFR-binding peptide
  MOD_RES (2)..(4)..(35)..(36): Xaa is C or S
SXKXSRVIMVQVEKVKPKRGVVKAIKVSRLAQPVXXPAA

SEQ ID NO: 66226 - protein, 32 aa, Artificial Sequence; identical to SEQ ID NO: 12896
  Cyclic GFR-binding peptide
  MOD_RES (26)..(27): Xaa is C or S

SEQ ID NO: 66227 - protein, 29 aa, Artificial Sequence
  Cyclic GFR-binding peptide
VTAKKLKPKKRVYEIKRVQVPRHHVRSPQ

SEQ ID NO: 66228 - protein, 36 aa, Artificial Sequence
  Cyclic GFR-binding peptide
  MOD_RES (2)..(34): Xaa is C or S
GXSRVVMNVTAKKIVNSSDDIKRVQVPRLKTPAXTP

SEQ ID NO: 66229 - protein, 34 aa, Artificial Sequence
  Cyclic GFR-binding peptide
  MOD_RES (29)..(30): Xaa is C or S
VMNSMEGIIVNSSDDMIQVTINSLQTPAXXPKPV

SEQ ID NO: 66230 - protein, 41 aa, Artificial Sequence; identical to SEQ ID NO: 12906
  Cyclic GFR-binding peptide
  MOD_RES (1)..(3)..(35)..(36): Xaa is C or S

SEQ ID NO: 66231 - protein, 35 aa, Artificial Sequence
  Cyclic GFR-binding peptide
  MOD_RES (31)..(31): Xaa is C or S
TNSLQEFIPKKRVIEYYLVTLPELQVQTPRXQVNR

SEQ ID NO: 66232 - protein, 37 aa, Artificial Sequence; identical to SEQ ID NO: 22524
  Cyclic GFR-binding peptide
  MOD_RES (2)..(4): Xaa is C or S

SEQ ID NO: 66233 - protein, 37 aa, Artificial Sequence; identical to SEQ ID NO: 22527
  Cyclic GFR-binding peptide
  MOD_RES (2)..(4): Xaa is C or S

SEQ ID NO: 66234 - protein, 30 aa, Artificial Sequence
  Cyclic GFR-binding peptide
  MOD_RES (29)..(30): Xaa is C or S
VIMSMEGIVKPKRGVMIQITINSLAQPVXX

SEQ ID NO: 66235 - protein, 35 aa, Artificial Sequence
  Cyclic GFR-binding peptide
  MOD_RES (1)..(33)..(34): Xaa is C or S
XGEVVMDSMEGIVVKENEDMIQMTINSLETPVXXA

SEQ ID NO: 66236 - protein, 34 aa, Artificial Sequence; identical to SEQ ID NO: 12914
  Cyclic GFR-binding peptide
  MOD_RES (1)..(33)..(34): Xaa is C or S

SEQ ID NO: 66237 - protein, 33 aa, Artificial Sequence
  Cyclic GFR-binding peptide
  MOD_RES (1)..(3): Xaa is C or S
XGXSRVVMNVQVEKIVNSSDDVKAVKVSRLKTP

SEQ ID NO: 66238 - protein, 37 aa, Artificial Sequence
  Cyclic GFR-binding peptide
  MOD_RES (32)..(33): Xaa is C or S
ARVVMNVQVEKIVNSSDDVKAVKVSRLQTPAXXPKPV

SEQ ID NO: 66239 - protein, 27 aa, Artificial Sequence
  Cyclic GFR-binding peptide
VIMSMEGIIKPTKGIMIQITINSLDQS

SEQ ID NO: 66240 - protein, 37 aa, Artificial Sequence
  Cyclic GFR-binding peptide
  MOD_RES (2)..(4): Xaa is C or S
EXKXALHDELTNSLQEFIPKKRVIEYYVVPLPELQVQ

SEQ ID NO: 66241 - protein, 28 aa, Artificial Sequence
  Cyclic GFR-binding peptide
LFVTAKKHQGQHPKIRIKRMQVPREETP

SEQ ID NO: 66242 - protein, 36 aa, Artificial Sequence
  Cyclic GFR-binding peptide
ALHDELTNSLQEFIPKKRVIEYYVVPLPELQVQTPR

SEQ ID NO: 66243 - protein, 30 aa, Artificial Sequence
  Cyclic GFR-binding peptide
  MOD_RES (27)..(27): Xaa is C or S
NVQVEKIVNSSDDVKAVKVSRLKTPAXTPK

SEQ ID NO: 66244 - protein, 20 aa, Artificial Sequence
  Cyclic GFR-binding peptide
SMEGIVKPTRGVMIQITINS

SEQ ID NO: 66245 - protein, 30 aa, Artificial Sequence
  Cyclic GFR-binding peptide
  MOD_RES (26)..(27): Xaa is C or S
VTAKKVKPKRGVIKRIQVPRLAQPVXXPAA

SEQ ID NO: 66246 - protein, 28 aa, Artificial Sequence
  Cyclic GFR-binding peptide
SRVIMNSLQEVKPKRGVYYLITLPELAQ

SEQ ID NO: 66247 - protein, 28 aa, Artificial Sequence
  Cyclic GFR-binding peptide
  MOD_RES (27)..(28): Xaa is C or S
NVTAKKIVNSSDDIKRVQVPRLQTPAXX

SEQ ID NO: 66248 - protein, 22 aa, Artificial Sequence
  Cyclic GFR-binding peptide
NSLQEVKPTRGVYYLITLPELD

SEQ ID NO: 66249 - protein, 31 aa, Artificial Sequence; identical to SEQ ID NO: 12928
  Cyclic GFR-binding peptide
  MOD_RES (30)..(31): Xaa is C or S

SEQ ID NO: 66250 - protein, 31 aa, Artificial Sequence; identical to SEQ ID NO: 12929
  Cyclic GFR-binding peptide
  MOD_RES (27)..(28): Xaa is C or S

SEQ ID NO: 66251 - protein, 41 aa, Artificial Sequence; identical to SEQ ID NO: 12930
  Cyclic GFR-binding peptide
  MOD_RES (1)..(3)..(35)..(36): Xaa is C or S

SEQ ID NO: 66252 - protein, 33 aa, Artificial Sequence
  Cyclic GFR-binding peptide
  MOD_RES (1)..(33): Xaa is C or S
XGEVVMDVQVEKVVKENEDVKAMKVSRLETPVX

SEQ ID NO: 66253 - protein, 28 aa, Artificial Sequence
  Cyclic GFR-binding peptide
  MOD_RES (26)..(27): Xaa is C or S
NSLQEIVNSSDDYYVVPLPELQTPAXXP

SEQ ID NO: 66254 - protein, 36 aa, Artificial Sequence
  Cyclic GFR-binding peptide
  MOD_RES (32)..(32): Xaa is C or S
HQLFNSLQEHQGQHPKIRYYVMPLPEEETPVXELGE

SEQ ID NO: 66255 - protein, 28 aa, Artificial Sequence
  Cyclic GFR-binding peptide
  MOD_RES (1)..(3): Xaa is C or S
XKXSKVVMVTAKKVKPTRGVIKRIQVPR

SEQ ID NO: 66256 - protein, 32 aa, Artificial Sequence; identical to SEQ ID NO: 22557
  Cyclic GFR-binding peptide

SEQ ID NO: 66257 - protein, 32 aa, Artificial Sequence
  Cyclic GFR-binding peptide
  MOD_RES (2)..(4): Xaa is C or S
RXEXKNHQLFNSLQEHQGQHPKIRYYLMTLPE

SEQ ID NO: 66258 - protein, 26 aa, Artificial Sequence
  Cyclic GFR-binding peptide
VMNNSLQEIVNSSDDYYVVPLPELKT

SEQ ID NO: 66259 - protein, 39 aa, Artificial Sequence
  Cyclic GFR-binding peptide
  MOD_RES (1)..(38): Xaa is C or S
XELHEELRNSLQELKPKKRVYEYYVVPLPEHHVRSPQXK

SEQ ID NO: 66260 - protein, 33 aa, Artificial Sequence
  Cyclic GFR-binding peptide
  MOD_RES (2)..(4): Xaa is C or S
HXGXARVVMNSMEGIIVNSSDDMIQVTINSLQT

SEQ ID NO: 66261 - protein, 35 aa, Artificial Sequence
  Cyclic GFR-binding peptide
  MOD_RES (29)..(30): Xaa is C or S
VMNVTAKKIVNSSDDIKRVQVPRLKTPAXXPKPVY

SEQ ID NO: 66262 - protein, 27 aa, Artificial Sequence
  Cyclic GFR-binding peptide
VMEVTAKKVVKDYEDIKRMQVPRLETP

SEQ ID NO: 66263 - protein, 35 aa, Artificial Sequence
  Cyclic GFR-binding peptide
  MOD_RES (1)..(3)..(35): Xaa is C or S
XGXARVVMNVQVEKIVNSSDDVKAVKVSRLQTPAX

SEQ ID NO: 66264 - protein, 30 aa, Artificial Sequence
  Cyclic GFR-binding peptide
  MOD_RES (2)..(4): Xaa is C or S
SXKXSKVIMVTAKKIKPTKGIIKRIQVPRL

SEQ ID NO: 66265 - protein, 31 aa, Artificial Sequence; identical to SEQ ID NO: 12956
  Cyclic GFR-binding peptide
  MOD_RES (2)..(2): Xaa is C or S

SEQ ID NO: 66266 - protein, 38 aa, Artificial Sequence; identical to SEQ ID NO: 22571
  Cyclic GFR-binding peptide
  MOD_RES (2)..(36): Xaa is C or S

SEQ ID NO: 66267 - protein, 25 aa, Artificial Sequence
  Cyclic GFR-binding peptide
IMNSLQEIKPTKGIYYVIPLPELDQ

SEQ ID NO: 66268 - protein, 31 aa, Artificial Sequence; identical to SEQ ID NO: 12964
  Cyclic GFR-binding peptide
  MOD_RES (2)..(4): Xaa is C or S

SEQ ID NO: 66269 - protein, 26 aa, Artificial Sequence
  Cyclic GFR-binding peptide
VMNVTAKKIVNSSDDIKRVQVPRLQT

SEQ ID NO: 66270 - protein, 39 aa, Artificial Sequence; identical to SEQ ID NO: 22579
  Cyclic GFR-binding peptide
  MOD_RES (2)..(4)..(38): Xaa is C or S

SEQ ID NO: 66271 - protein, 29 aa, Artificial Sequence
  Cyclic GFR-binding peptide
SRVIMSMEGIVKPKRGVMIQITINSLAQP

SEQ ID NO: 66272 - protein, 27 aa, Artificial Sequence
  Cyclic GFR-binding peptide
  MOD_RES (27)..(27): Xaa is C or S
ENSLQEVVKDYEDYYVMPLPELETPVX

SEQ ID NO: 66273 - protein, 31 aa, Artificial Sequence; identical to SEQ ID NO: 22584
  Cyclic GFR-binding peptide
  MOD_RES (31)..(31): Xaa is C or S

SEQ ID NO: 66274 - protein, 38 aa, Artificial Sequence
  Cyclic GFR-binding peptide
  MOD_RES (2)..(4)..(35)..(36): Xaa is C or S
SXKXSKVIMSMEGIIKPTKGIMIQITINSLDQSVXXPS

SEQ ID NO: 66275 - protein, 28 aa, Artificial Sequence
  Cyclic GFR-binding peptide
  MOD_RES (26)..(27): Xaa is C or S
VTAKKIVNSSDDIKRVQVPRLQTPAXXP

SEQ ID NO: 66276 - protein, 29 aa, Artificial Sequence
  Cyclic GFR-binding peptide
  MOD_RES (26)..(27): Xaa is C or S
NSLQEIVNSSDDYYVVPLPELKTPAXXPK

SEQ ID NO: 66277 - protein, 34 aa, Artificial Sequence
  Cyclic GFR-binding peptide
  MOD_RES (1)..(1): Xaa is C or S
XKNHQLFNSLQEHQGQHPKIRYYLMTLPEEETPV

SEQ ID NO: 66278 - protein, 32 aa, Artificial Sequence
  Cyclic GFR-binding peptide
  MOD_RES (2)..(4): Xaa is C or S
SXKXSRVIMVQVEKVKPKRGVVKAIKVSRLAQ

SEQ ID NO: 66279 - protein, 27 aa, Artificial Sequence
  Cyclic GFR-binding peptide
ARVVMNNSLQEIVNSSDDYYLVTLPEL

SEQ ID NO: 66280 - protein, 33 aa, Artificial Sequence
  Cyclic GFR-binding peptide
EELRNSLQELKPKKRVYEYYLVTLPEHHVRSPQ

SEQ ID NO: 66281 - protein, 32 aa, Artificial Sequence; identical to SEQ ID NO: 12981
  Cyclic GFR-binding peptide
  MOD_RES (29)..(30): Xaa is C or S

SEQ ID NO: 66282 - protein, 39 aa, Artificial Sequence
  Cyclic GFR-binding peptide
  MOD_RES (1)..(33)..(34): Xaa is C or S
XSRVVMNSMEGIIVNSSDDMIQVTINSLKTPAXXPKPVY

SEQ ID NO: 66283 - protein, 24 aa, Artificial Sequence
  Cyclic GFR-binding peptide
MNSMEGIIVNSSDDMIQVTINSLQ

SEQ ID NO: 66284 - protein, 22 aa, Artificial Sequence
  Cyclic GFR-binding peptide
MVTAKKIKPTKGIIKRIQVPRL

SEQ ID NO: 66285 - protein, 33 aa, Artificial Sequence; identical to SEQ ID NO: 12987
  Cyclic GFR-binding peptide
  MOD_RES (2)..(4): Xaa is C or S

SEQ ID NO: 66286 - protein, 34 aa, Artificial Sequence; identical to SEQ ID NO: 12991
  Cyclic GFR-binding peptide
  MOD_RES (2)..(33)..(34): Xaa is C or S

SEQ ID NO: 66287 - protein, 29 aa, Artificial Sequence
  Cyclic GFR-binding peptide
HDELTVQVEKFIPKKRVIEVKAVKVSRLQ

SEQ ID NO: 66288 - protein, 38 aa, Artificial Sequence
  Cyclic GFR-binding peptide
  MOD_RES (2)..(4)..(36)..(37): Xaa is C or S
HXGXSRVVMNSMEGIIVNSSDDMIQVTINSLKTPAXXP

SEQ ID NO: 66289 - protein, 31 aa, Artificial Sequence
  Cyclic GFR-binding peptide
  MOD_RES (2)..(4): Xaa is C or S
RXGXGEVVMESMEGIVVKDYEDMIQMTINSL

SEQ ID NO: 66290 - protein, 22 aa, Artificial Sequence
  Cyclic GFR-binding peptide
NSLQEVVKDYEDYYLMTLPELE

SEQ ID NO: 66291 - protein, 28 aa, Artificial Sequence
  Cyclic GFR-binding peptide
  MOD_RES (27)..(28): Xaa is C or S
NVQVEKIVNSSDDVKAVKVSRLQTPAXX

SEQ ID NO: 66292 - protein, 33 aa, Artificial Sequence; identical to SEQ ID NO: 12997
  Cyclic GFR-binding peptide
  MOD_RES (31)..(32): Xaa is C or S

SEQ ID NO: 66293 - protein, 24 aa, Artificial Sequence
  Cyclic GFR-binding peptide
LFVQVEKHQGQHPKIRVKAMKVSR

SEQ ID NO: 66294 - protein, 26 aa, Artificial Sequence
  Cyclic GFR-binding peptide
LTNSLQEFIPKKRVIEYYLVTLPELQ

SEQ ID NO: 66295 - protein, 26 aa, Artificial Sequence
  Cyclic GFR-binding peptide
LRVTAKKLKPKKRVYEIKRVQVPRHH

SEQ ID NO: 66296 - protein, 27 aa, Artificial Sequence
  Cyclic GFR-binding peptide
  MOD_RES (1)..(1): Xaa is C or S
XSKVVMVTAKKVKPTRGVIKRIQVPRL

SEQ ID NO: 66297 - protein, 34 aa, Artificial Sequence; identical to SEQ ID NO: 13001
  Cyclic GFR-binding peptide
  MOD_RES (30)..(31): Xaa is C or S

SEQ ID NO: 66298 - protein, 25 aa, Artificial Sequence
  Cyclic GFR-binding peptide
MNVTAKKIVNSSDDIKRVQVPRLKT

SEQ ID NO: 66299 - protein, 37 aa, Artificial Sequence; identical to SEQ ID NO: 13007
  Cyclic GFR-binding peptide
  MOD_RES (2)..(34)..(35): Xaa is C or S

SEQ ID NO: 66300 - protein, 34 aa, Artificial Sequence
  Cyclic GFR-binding peptide
  MOD_RES (29)..(30): Xaa is C or S
VVMVTAKKVKPTRGVIKRIQVPRLDQPVXXPSAS

SEQ ID NO: 66301 - protein, 32 aa, Artificial Sequence
  Cyclic GFR-binding peptide
  MOD_RES (1)..(3): Xaa is C or S
XKXSKVVMSMEGIVKPTRGVMIQITINSLDQP

SEQ ID NO: 66302 - protein, 37 aa, Artificial Sequence; identical to SEQ ID NO: 22607
  Cyclic GFR-binding peptide
  MOD_RES (1)..(35): Xaa is C or S

SEQ ID NO: 66303 - protein, 29 aa, Artificial Sequence
  Cyclic GFR-binding peptide
  MOD_RES (1)..(3): Xaa is C or S
XKXSKVVMVTAKKVKPTRGVIKRIQVPRL

SEQ ID NO: 66304 - protein, 23 aa, Artificial Sequence
  Cyclic GFR-binding peptide
NNSLQEIVNSSDDYYVVPLPELK

SEQ ID NO: 66305 - protein, 31 aa, Artificial Sequence
  Cyclic GFR-binding peptide
  MOD_RES (2)..(2): Xaa is C or S
KXSKVVMSMEGIVKPTRGVMIQITINSLDQP

SEQ ID NO: 66306 - protein, 26 aa, Artificial Sequence
  Cyclic GFR-binding peptide
IMSMEGIIKPTKGIMIQITINSLDQS

SEQ ID NO: 66307 - protein, 35 aa, Artificial Sequence
  Cyclic GFR-binding peptide
LHDELTNSLQEFIPKKRVIEYYVVPLPELQVQTPR

SEQ ID NO: 66308 - protein, 31 aa, Artificial Sequence; identical to SEQ ID NO: 13028
  Cyclic GFR-binding peptide
  MOD_RES (29)..(30): Xaa is C or S

SEQ ID NO: 66309 - protein, 37 aa, Artificial Sequence
  Cyclic GFR-binding peptide
  MOD_RES (1)..(33): Xaa is C or S
XSRVVMNVTAKKIVNSSDDIKRVQVPRLKTPAXTPKT

SEQ ID NO: 66310 - protein, 33 aa, Artificial Sequence
  Cyclic GFR-binding peptide
  MOD_RES (28)..(29): Xaa is C or S
MNSMEGIIVNSSDDMIQVTINSLQTPAXXPKPV

SEQ ID NO: 66311 - protein, 35 aa, Artificial Sequence
  Cyclic GFR-binding peptide
  MOD_RES (1)..(35): Xaa is C or S
XKNHQLFNSLQEHQGQHPKIRYYLMTLPEEETPVX

SEQ ID NO: 66312 - protein, 29 aa, Artificial Sequence
  Cyclic GFR-binding peptide
  MOD_RES (26)..(27): Xaa is C or S
NSLQEVVKENEDYYLMTLPELETPVXXAK

SEQ ID NO: 66313 - protein, 43 aa, Artificial Sequence
  Cyclic GFR-binding peptide
  MOD_RES (2)..(4)..(41): Xaa is C or S
EXKXALHDELTNSLQEFIPKKRVIEYYVVPLPELQVQTPRXQV

SEQ ID NO: 66314 - protein, 30 aa, Artificial Sequence
  Cyclic GFR-binding peptide
  MOD_RES (1)..(1): Xaa is C or S
XSRVIMVTAKKVKPKRGVIKRIQVPRLAQP

SEQ ID NO: 66315 - protein, 34 aa, Artificial Sequence
  Cyclic GFR-binding peptide
  MOD_RES (29)..(30): Xaa is C or S
VMNVTAKKIVNSSDDIKRVQVPRLQTPAXXPKPV

SEQ ID NO: 66316 - protein, 31 aa, Artificial Sequence; identical to SEQ ID NO: 13037
  Cyclic GFR-binding peptide
  MOD_RES (28)..(29): Xaa is C or S

SEQ ID NO: 66317 - protein, 30 aa, Artificial Sequence; identical to SEQ ID NO: 13038
  Cyclic GFR-binding peptide
  MOD_RES (1)..(3): Xaa is C or S

SEQ ID NO: 66318 - protein, 31 aa, Artificial Sequence; identical to SEQ ID NO: 13044
  Cyclic GFR-binding peptide
  MOD_RES (2)..(4): Xaa is C or S

SEQ ID NO: 66319 - protein, 25 aa, Artificial Sequence
  Cyclic GFR-binding peptide
VMVQVEKVKPTRGVVKAIKVSRLDQ

SEQ ID NO: 66320 - protein, 37 aa, Artificial Sequence
  Cyclic GFR-binding peptide
  MOD_RES (2)..(34)..(35): Xaa is C or S
GXGEVVMEVQVEKVVKDYEDVKAMKVSRLETPVXXAK

SEQ ID NO: 66321 - protein, 28 aa, Artificial Sequence
  Cyclic GFR-binding peptide
SRVIMVQVEKVKPKRGVVKAIKVSRLAQ

SEQ ID NO: 66322 - protein, 33 aa, Artificial Sequence
  Cyclic GFR-binding peptide
  MOD_RES (27)..(27): Xaa is C or S
NVTAKKIVNSSDDIKRVQVPRLKTPAXTPKTVH

SEQ ID NO: 66323 - protein, 32 aa, Artificial Sequence
  Cyclic GFR-binding peptide
  MOD_RES (30)..(31): Xaa is C or S
VVMEVTAKKVVKDYEDIKRMQVPRLETPVXXA

SEQ ID NO: 66324 - protein, 37 aa, Artificial Sequence
  Cyclic GFR-binding peptide
  MOD_RES (36)..(36): Xaa is C or S
LHDELTNSLQEFIPKKRVIEYYVVPLPELQVQTPRXQ

SEQ ID NO: 66325 - protein, 32 aa, Artificial Sequence
  Cyclic GFR-binding peptide
NHQLFNSLQEHQGQHPKIRYYVMPLPEEETPV

SEQ ID NO: 66326 - protein, 25 aa, Artificial Sequence
  Cyclic GFR-binding peptide
LRNSLQELKPKKRVYEYYLVTLPEH

SEQ ID NO: 66327 - protein, 27 aa, Artificial Sequence
  Cyclic GFR-binding peptide
  MOD_RES (27)..(27): Xaa is C or S
NNSLQEIVNSSDDYYVVPLPELQTPAX

SEQ ID NO: 66328 - protein, 32 aa, Artificial Sequence; identical to SEQ ID NO: 22629
  Cyclic GFR-binding peptide

SEQ ID NO: 66329 - protein, 32 aa, Artificial Sequence
  Cyclic GFR-binding peptide
  MOD_RES (31)..(32): Xaa is C or S
SKVIMVTAKKIKPTKGIIKRIQVPRLDQSVXX

SEQ ID NO: 66330 - protein, 25 aa, Artificial Sequence
  Cyclic GFR-binding peptide
RVVMNSMEGIIVNSSDDMIQVTINS

SEQ ID NO: 66331 - protein, 34 aa, Artificial Sequence; identical to SEQ ID NO: 13056
  Cyclic GFR-binding peptide
  MOD_RES (1)..(3): Xaa is C or S

SEQ ID NO: 66332 - protein, 24 aa, Artificial Sequence
  Cyclic GFR-binding peptide
DNSLQEVVKENEDYYLMTLPELET

SEQ ID NO: 66333 - protein, 38 aa, Artificial Sequence
  Cyclic GFR-binding peptide
  MOD_RES (32)..(33): Xaa is C or S
GEVVMEVQVEKVVKDYEDVKAMKVSRLETPVXXAKPIS

SEQ ID NO: 66334 - protein, 27 aa, Artificial Sequence
  Cyclic GFR-binding peptide
  MOD_RES (2)..(2): Xaa is C or S
KXSRVIMNSLQEVKPKRGVYYLITLPE

SEQ ID NO: 66335 - protein, 30 aa, Artificial Sequence; identical to SEQ ID NO: 22642
  Cyclic GFR-binding peptide

SEQ ID NO: 66336 - protein, 35 aa, Artificial Sequence; identical to SEQ ID NO: 22643
  Cyclic GFR-binding peptide
  MOD_RES (2)..(4): Xaa is C or S

SEQ ID NO: 66337 - protein, 31 aa, Artificial Sequence
  Cyclic GFR-binding peptide
  MOD_RES (28)..(29): Xaa is C or S
MEVTAKKVVKDYEDIKRMQVPRLETPVXXAK

SEQ ID NO: 66338 - protein, 38 aa, Artificial Sequence; identical to SEQ ID NO: 13071
  Cyclic GFR-binding peptide
  MOD_RES (32)..(33): Xaa is C or S

SEQ ID NO: 66339 - protein, 28 aa, Artificial Sequence
  Cyclic GFR-binding peptide
  MOD_RES (26)..(27): Xaa is C or S
SMEGIVVKENEDMIQMTINSLETPVXXA

SEQ ID NO: 66340 - protein, 24 aa, Artificial Sequence
  Cyclic GFR-binding peptide
VMVTAKKVKPTRGVIKRIQVPRLD

SEQ ID NO: 66341 - protein, 30 aa, Artificial Sequence
  Cyclic GFR-binding peptide
  MOD_RES (30)..(30): Xaa is C or S
RVIMVTAKKVKPKRGVIKRIQVPRLAQPVX

SEQ ID NO: 66342 - protein, 32 aa, Artificial Sequence
  Cyclic GFR-binding peptide
  MOD_RES (2)..(2): Xaa is C or S
EXKNHQLFNSLQEHQGQHPKIRYYVMPLPEEE

SEQ ID NO: 66343 - protein, 29 aa, Artificial Sequence
  Cyclic GFR-binding peptide
VVMNNSLQEIVNSSDDYYVVPLPELQTPA

SEQ ID NO: 66344 - protein, 33 aa, Artificial Sequence; identical to SEQ ID NO: 13081
  Cyclic GFR-binding peptide
  MOD_RES (30)..(31): Xaa is C or S

SEQ ID NO: 66345 - protein, 31 aa, Artificial Sequence
  Cyclic GFR-binding peptide
  MOD_RES (28)..(29): Xaa is C or S
MNVTAKKIVNSSDDIKRVQVPRLQTPAXXPK

SEQ ID NO: 66346 - protein, 38 aa, Artificial Sequence
  Cyclic GFR-binding peptide
  MOD_RES (1)..(3)..(37): Xaa is C or S
XEXKNHQLFNSLQEHQGQHPKIRYYLMTLPEEETPVXE

SEQ ID NO: 66347 - protein, 29 aa, Artificial Sequence
  Cyclic GFR-binding peptide
  MOD_RES (29)..(29): Xaa is C or S
VMNVQVEKIVNSSDDVKAVKVSRLKTPAX

SEQ ID NO: 66348 - protein, 27 aa, Artificial Sequence
  Cyclic GFR-binding peptide
VIMVQVEKIKPTKGIVKAIKVSRLDQS

SEQ ID NO: 66349 - protein, 38 aa, Artificial Sequence
  Cyclic GFR-binding peptide
  MOD_RES (2)..(4): Xaa is C or S
AXAXELHEELRNSLQELKPKKRVYEYYLVTLPEHHVRS

SEQ ID NO: 66350 - protein, 31 aa, Artificial Sequence
  Cyclic GFR-binding peptide
  MOD_RES (1)..(1): Xaa is C or S
XSKVVMVTAKKVKPTRGVIKRIQVPRLDQPV

SEQ ID NO: 66351 - protein, 41 aa, Artificial Sequence
  Cyclic GFR-binding peptide
  MOD_RES (2)..(4)..(36)..(37): Xaa is C or S
RXGXGEVVMDVQVEKVVKENEDVKAMKVSRLETPVXXAKPI

SEQ ID NO: 66352 - protein, 32 aa, Artificial Sequence; identical to SEQ ID NO: 13087
  Cyclic GFR-binding peptide
  MOD_RES (1)..(3): Xaa is C or S

SEQ ID NO: 66353 - protein, 30 aa, Artificial Sequence; identical to SEQ ID NO: 13088
  Cyclic GFR-binding peptide

SEQ ID NO: 66354 - protein, 25 aa, Artificial Sequence
  Cyclic GFR-binding peptide
VVMEVTAKKVVKDYEDIKRMQVPRL

SEQ ID NO: 66355 - protein, 32 aa, Artificial Sequence
  Cyclic GFR-binding peptide
  MOD_RES (2)..(4): Xaa is C or S
RXGXGEVVMDSMEGIVVKENEDMIQMTINSLE

SEQ ID NO: 66356 - protein, 41 aa, Artificial Sequence; identical to SEQ ID NO: 22659
  Cyclic GFR-binding peptide
  MOD_RES (2)..(39): Xaa is C or S

SEQ ID NO: 66357 - protein, 23 aa, Artificial Sequence
  Cyclic GFR-binding peptide
IMNSLQEIKPTKGIYYLITLPEL

SEQ ID NO: 66358 - protein, 35 aa, Artificial Sequence; identical to SEQ ID NO: 47655
  Cyclic GFR-binding peptide
  MOD_RES (1)..(3)..(34)..(35): Xaa is C or S

SEQ ID NO: 66359 - protein, 33 aa, Artificial Sequence
  Cyclic GFR-binding peptide
  MOD_RES (28)..(28): Xaa is C or S
MNVQVEKIVNSSDDVKAVKVSRLKTPAXTPKTV

SEQ ID NO: 66360 - protein, 29 aa, Artificial Sequence
  Cyclic GFR-binding peptide
RVIMVQVEKVKPKRGVVKAIKVSRLAQPV

SEQ ID NO: 66361 - protein, 36 aa, Artificial Sequence
  Cyclic GFR-binding peptide
  MOD_RES (34)..(34): Xaa is C or S
EELRNSLQELKPKKRVYEYYVVPLPEHHVRSPQXKV

SEQ ID NO: 66362 - protein, 33 aa, Artificial Sequence; identical to SEQ ID NO: 13108
  Cyclic GFR-binding peptide
  MOD_RES (28)..(29): Xaa is C or S

SEQ ID NO: 66363 - protein, 28 aa, Artificial Sequence
  Cyclic GFR-binding peptide
ELRVTAKKLKPKKRVYEIKRVQVPRHHV

SEQ ID NO: 66364 - protein, 35 aa, Artificial Sequence
  Cyclic GFR-binding peptide
  MOD_RES (2)..(4): Xaa is C or S
HXGXARVVMNSMEGIIVNSSDDMIQVTINSLQTPA

SEQ ID NO: 66365 - protein, 35 aa, Artificial Sequence; identical to SEQ ID NO: 13114
  Cyclic GFR-binding peptide
  MOD_RES (1)..(3)..(34)..(35): Xaa is C or S

SEQ ID NO: 66366 - protein, 26 aa, Artificial Sequence
  Cyclic GFR-binding peptide
ARVVMNSMEGIIVNSSDDMIQVTINS

SEQ ID NO: 66367 - protein, 29 aa, Artificial Sequence
  Cyclic GFR-binding peptide
  MOD_RES (1)..(1): Xaa is C or S
XSRVIMVTAKKVKPKRGVIKRIQVPRLAQ

SEQ ID NO: 66368 - protein, 38 aa, Artificial Sequence
  Cyclic GFR-binding peptide
  MOD_RES (1)..(38): Xaa is C or S
XALHDELTNSLQEFIPKKRVIEYYLVTLPELQVQTPRX

SEQ ID NO: 66369 - protein, 45 aa, Artificial Sequence; identical to SEQ ID NO: 22669
  Cyclic GFR-binding peptide
  MOD_RES (2)..(4)..(41): Xaa is C or S

SEQ ID NO: 66370 - protein, 26 aa, Artificial Sequence
  Cyclic GFR-binding peptide
SRVVMNSMEGIIVNSSDDMIQVTINS

SEQ ID NO: 66371 - protein, 31 aa, Artificial Sequence
  Cyclic GFR-binding peptide
  MOD_RES (1)..(3): Xaa is C or S
XGXGEVVMEVTAKKVVKDYEDIKRMQVPRLE

SEQ ID NO: 66372 - protein, 32 aa, Artificial Sequence; identical to SEQ ID NO: 13126
  Cyclic GFR-binding peptide
  MOD_RES (2)..(4): Xaa is C or S

SEQ ID NO: 66373 - protein, 34 aa, Artificial Sequence
  Cyclic GFR-binding peptide
  MOD_RES (1)..(33): Xaa is C or S
XSRVVMNVTAKKIVNSSDDIKRVQVPRLKTPAXT

SEQ ID NO: 66374 - protein, 26 aa, Artificial Sequence
  Cyclic GFR-binding peptide
LFVTAKKHQGQHPKIRIKRMQVPREE

SEQ ID NO: 66375 - protein, 32 aa, Artificial Sequence; identical to SEQ ID NO: 22674
  Cyclic GFR-binding peptide
  MOD_RES (1)..(1): Xaa is C or S

SEQ ID NO: 66376 - protein, 37 aa, Artificial Sequence
  Cyclic GFR-binding peptide
  MOD_RES (31)..(32): Xaa is C or S
RVVMNVTAKKIVNSSDDIKRVQVPRLQTPAXXPKPVT

SEQ ID NO: 66377 - protein, 26 aa, Artificial Sequence
  Cyclic GFR-binding peptide
VMDVTAKKVVKENEDIKRMQVPRLET

SEQ ID NO: 66378 - protein, 30 aa, Artificial Sequence
  Cyclic GFR-binding peptide
  MOD_RES (28)..(29): Xaa is C or S
VMSMEGIVKPTRGVMIQITINSLDQPVXXP

SEQ ID NO: 66379 - protein, 33 aa, Artificial Sequence; identical to SEQ ID NO: 22676
  Cyclic GFR-binding peptide
  MOD_RES (29)..(29): Xaa is C or S

SEQ ID NO: 66380 - protein, 34 aa, Artificial Sequence; identical to SEQ ID NO: 22677
  Cyclic GFR-binding peptide
  MOD_RES (31)..(31): Xaa is C or S

SEQ ID NO: 66381 - protein, 28 aa, Artificial Sequence
  Cyclic GFR-binding peptide
  MOD_RES (28)..(28): Xaa is C or S
MNVTAKKIVNSSDDIKRVQVPRLKTPAX

SEQ ID NO: 66382 - protein, 31 aa, Artificial Sequence
  Cyclic GFR-binding peptide
  MOD_RES (29)..(30): Xaa is C or S
VIMVQVEKVKPKRGVVKAIKVSRLAQPVXXP

SEQ ID NO: 66383 - protein, 31 aa, Artificial Sequence
  Cyclic GFR-binding peptide
ALHDELTNSLQEFIPKKRVIEYYLVTLPELQ

SEQ ID NO: 66384 - protein, 29 aa, Artificial Sequence
  Cyclic GFR-binding peptide
  MOD_RES (29)..(29): Xaa is C or S
VMENSLQEVVKDYEDYYLMTLPELETPVX

SEQ ID NO: 66385 - protein, 31 aa, Artificial Sequence
  Cyclic GFR-binding peptide
  MOD_RES (26)..(27): Xaa is C or S
VQVEKVVKENEDVKAMKVSRLETPVXXAKPI

SEQ ID NO: 66386 - protein, 20 aa, Artificial Sequence
  Cyclic GFR-binding peptide
VTAKKIKPTKGIIKRIQVPR

SEQ ID NO: 66387 - protein, 28 aa, Artificial Sequence
  Cyclic GFR-binding peptide
  MOD_RES (2)..(2): Xaa is C or S
GXSRVVMNSMEGIIVNSSDDMIQVTINS

SEQ ID NO: 66388 - protein, 28 aa, Artificial Sequence
  Cyclic GFR-binding peptide
  MOD_RES (26)..(27): Xaa is C or S
VQVEKVKPTRGVVKAIKVSRLDQPVXXP

SEQ ID NO: 66389 - protein, 40 aa, Artificial Sequence
  Cyclic GFR-binding peptide
  MOD_RES (2)..(4)..(35)..(36): Xaa is C or S
SXKXSKVIMVTAKKIKPTKGIIKRIQVPRLDQSVXXPSAS

SEQ ID NO: 66390 - protein, 32 aa, Artificial Sequence
  Cyclic GFR-binding peptide
  MOD_RES (30)..(30): Xaa is C or S
NSLQELKPKKRVYEYYLVTLPEHHVRSPQXKV

SEQ ID NO: 66391 - protein, 35 aa, Artificial Sequence; identical to SEQ ID NO: 13142
  Cyclic GFR-binding peptide
  MOD_RES (31)..(32): Xaa is C or S

SEQ ID NO: 66392 - protein, 37 aa, Artificial Sequence; identical to SEQ ID NO: 13143
  Cyclic GFR-binding peptide
  MOD_RES (2)..(4)..(36): Xaa is C or S

SEQ ID NO: 66393 - protein, 28 aa, Artificial Sequence
  Cyclic GFR-binding peptide
LHEELRSMEGILKPKKRVYEMIQVTINS

SEQ ID NO: 66394 - protein, 35 aa, Artificial Sequence
  Cyclic GFR-binding peptide
  MOD_RES (2)..(4)..(35): Xaa is C or S
SXKXSKVIMVQVEKIKPTKGIVKAIKVSRLDQSVX

SEQ ID NO: 66395 - protein, 37 aa, Artificial Sequence
  Cyclic GFR-binding peptide
  MOD_RES (2)..(2): Xaa is C or S
AXELHEELRNSLQELKPKKRVYEYYVVPLPEHHVRSP

SEQ ID NO: 66396 - protein, 34 aa, Artificial Sequence; identical to SEQ ID NO: 13149
  Cyclic GFR-binding peptide
  MOD_RES (2)..(34): Xaa is C or S

SEQ ID NO: 66397 - protein, 33 aa, Artificial Sequence; identical to SEQ ID NO: 13151
  Cyclic GFR-binding peptide
  MOD_RES (28)..(29): Xaa is C or S

SEQ ID NO: 66398 - protein, 37 aa, Artificial Sequence
  Cyclic GFR-binding peptide
  MOD_RES (32)..(33): Xaa is C or S
ARVVMNVTAKKIVNSSDDIKRVQVPRLQTPAXXPKPV

SEQ ID NO: 66399 - protein, 21 aa, Artificial Sequence
  Cyclic GFR-binding peptide
NSLQEIKPTKGIYYVIPLPEL

SEQ ID NO: 66400 - protein, 34 aa, Artificial Sequence
  Cyclic GFR-binding peptide
  MOD_RES (2)..(4): Xaa is C or S
SXKXSKVIMVTAKKIKPTKGIIKRIQVPRLDQSV

SEQ ID NO: 66401 - protein, 34 aa, Artificial Sequence
  Cyclic GFR-binding peptide
  MOD_RES (31)..(31): Xaa is C or S
TNSLQEFIPKKRVIEYYLVTLPELQVQTPRXQVN

SEQ ID NO: 66402 - protein, 28 aa, Artificial Sequence
  Cyclic GFR-binding peptide
NSLQEFIPKKRVIEYYVVPLPELQVQTP

SEQ ID NO: 66403 - protein, 21 aa, Artificial Sequence
  Cyclic GFR-binding peptide
NSLQEVVKENEDYYLMTLPEL

SEQ ID NO: 66404 - protein, 37 aa, Artificial Sequence; identical to SEQ ID NO: 13161
  Cyclic GFR-binding peptide
  MOD_RES (2)..(34)..(35): Xaa is C or S

SEQ ID NO: 66405 - protein, 36 aa, Artificial Sequence; identical to SEQ ID NO: 13168
  Cyclic GFR-binding peptide
  MOD_RES (31)..(32): Xaa is C or S

SEQ ID NO: 66406 - protein, 23 aa, Artificial Sequence
  Cyclic GFR-binding peptide
SMEGIFIPKKRVIEMIQVTINSL

SEQ ID NO: 66407 - protein, 24 aa, Artificial Sequence
  Cyclic GFR-binding peptide
MNNSLQEIVNSSDDYYLVTLPELK

SEQ ID NO: 66408 - protein, 39 aa, Artificial Sequence
  Cyclic GFR-binding peptide
  MOD_RES (1)..(33)..(34): Xaa is C or S
XGEVVMDVQVEKVVKENEDVKAMKVSRLETPVXXAKPIK

SEQ ID NO: 66409 - protein, 31 aa, Artificial Sequence; identical to SEQ ID NO: 13177
  Cyclic GFR-binding peptide
  MOD_RES (30)..(31): Xaa is C or S

SEQ ID NO: 66410 - protein, 30 aa, Artificial Sequence; identical to SEQ ID NO: 13181
  Cyclic GFR-binding peptide
  MOD_RES (28)..(29): Xaa is C or S

SEQ ID NO: 66411 - protein, 30 aa, Artificial Sequence; identical to SEQ ID NO: 13182
  Cyclic GFR-binding peptide

SEQ ID NO: 66412 - protein, 31 aa, Artificial Sequence
  Cyclic GFR-binding peptide
  MOD_RES (30)..(30): Xaa is C or S
NSLQELKPKKRVYEYYVVPLPEHHVRSPQXK

SEQ ID NO: 66413 - protein, 39 aa, Artificial Sequence
  Cyclic GFR-binding peptide
  MOD_RES (2)..(33)..(34): Xaa is C or S
KXSRVIMVTAKKVKPKRGVIKRIQVPRLAQPVXXPAASA

SEQ ID NO: 66414 - protein, 22 aa, Artificial Sequence
  Cyclic GFR-binding peptide
DNSLQEVVKENEDYYLMTLPEL

SEQ ID NO: 66415 - protein, 27 aa, Artificial Sequence
  Cyclic GFR-binding peptide
  MOD_RES (1)..(1): Xaa is C or S
XGEVVMESMEGIVVKDYEDMIQMTINS

SEQ ID NO: 66416 - protein, 32 aa, Artificial Sequence
  Cyclic GFR-binding peptide
  MOD_RES (32)..(32): Xaa is C or S
HQLFNSLQEHQGQHPKIRYYLMTLPEEETPVX

SEQ ID NO: 66417 - protein, 29 aa, Artificial Sequence
  Cyclic GFR-binding peptide
  MOD_RES (29)..(29): Xaa is C or S
VMEVQVEKVVKDYEDVKAMKVSRLETPVX

SEQ ID NO: 66418 - protein, 30 aa, Artificial Sequence
  Cyclic GFR-binding peptide
  MOD_RES (30)..(30): Xaa is C or S
VVMNSMEGIIVNSSDDMIQVTINSLKTPAX

SEQ ID NO: 66419 - protein, 42 aa, Artificial Sequence; identical to SEQ ID NO: 13190
  Cyclic GFR-binding peptide
  MOD_RES (2)..(4)..(36)..(37): Xaa is C or S

SEQ ID NO: 66420 - protein, 25 aa, Artificial Sequence
  Cyclic GFR-binding peptide
FNSLQEHQGQHPKIRYYVMPLPEEE

SEQ ID NO: 66421 - protein, 27 aa, Artificial Sequence
  Cyclic GFR-binding peptide
GEVVMDSMEGIVVKENEDMIQMTINSL

SEQ ID NO: 66422 - protein, 31 aa, Artificial Sequence
  Cyclic GFR-binding peptide
  MOD_RES (1)..(1): Xaa is C or S
XGEVVMEVTAKKVVKDYEDIKRMQVPRLETP

SEQ ID NO: 66423 - protein, 31 aa, Artificial Sequence
  Cyclic GFR-binding peptide
  MOD_RES (28)..(29): Xaa is C or S
MNVTAKKIVNSSDDIKRVQVPRLKTPAXXPK

SEQ ID NO: 66424 - protein, 33 aa, Artificial Sequence
  Cyclic GFR-binding peptide
  MOD_RES (30)..(30): Xaa is C or S
NSLQELKPKKRVYEYYLVTLPEHHVRSPQXKVS

SEQ ID NO: 66425 - protein, 37 aa, Artificial Sequence; identical to SEQ ID NO: 13198
  Cyclic GFR-binding peptide
  MOD_RES (2)..(34)..(35): Xaa is C or S

SEQ ID NO: 66426 - protein, 40 aa, Artificial Sequence
  Cyclic GFR-binding peptide
  MOD_RES (1)..(3)..(35)..(36): Xaa is C or S
XGXSRVVMNSMEGIIVNSSDDMIQVTINSLKTPAXXPKPV

SEQ ID NO: 66427 - protein, 34 aa, Artificial Sequence; identical to SEQ ID NO: 13201
  Cyclic GFR-binding peptide
  MOD_RES (32)..(33): Xaa is C or S

SEQ ID NO: 66428 - protein, 40 aa, Artificial Sequence
  Cyclic GFR-binding peptide
  MOD_RES (34)..(34): Xaa is C or S
KNHQLFNSLQEHQGQHPKIRYYLMTLPEEETPVXELGEDN

SEQ ID NO: 66429 - protein, 27 aa, Artificial Sequence
  Cyclic GFR-binding peptide
  MOD_RES (27)..(27): Xaa is C or S
MNSLQEVKPTRGVYYLITLPELDQPVX

SEQ ID NO: 66430 - protein, 30 aa, Artificial Sequence
  Cyclic GFR-binding peptide
SKVVMVQVEKVKPTRGVVKAIKVSRLDQPV

SEQ ID NO: 66431 - protein, 26 aa, Artificial Sequence
  Cyclic GFR-binding peptide
FVTAKKHQGQHPKIRIKRMQVPREET

SEQ ID NO: 66432 - protein, 31 aa, Artificial Sequence; identical to SEQ ID NO: 22720
  Cyclic GFR-binding peptide
  MOD_RES (2)..(2): Xaa is C or S

SEQ ID NO: 66433 - protein, 32 aa, Artificial Sequence
  Cyclic GFR-binding peptide
  MOD_RES (1)..(3): Xaa is C or S
XEXKNHQLFNSLQEHQGQHPKIRYYLMTLPEE

SEQ ID NO: 66434 - protein, 38 aa, Artificial Sequence
  Cyclic GFR-binding peptide
  MOD_RES (1)..(3)..(35)..(36): Xaa is C or S
XGXGEVVMESMEGIVVKDYEDMIQMTINSLETPVXXAK

SEQ ID NO: 66435 - protein, 31 aa, Artificial Sequence; identical to SEQ ID NO: 13224
  Cyclic GFR-binding peptide
  MOD_RES (31)..(31): Xaa is C or S

SEQ ID NO: 66436 - protein, 29 aa, Artificial Sequence
  Cyclic GFR-binding peptide
LTSMEGIFIPKKRVIEMIQVTINSLQVQT

SEQ ID NO: 66437 - protein, 27 aa, Artificial Sequence
  Cyclic GFR-binding peptide
RVVMNNSLQEIVNSSDDYYLVTLPELK

SEQ ID NO: 66438 - protein, 31 aa, Artificial Sequence
  Cyclic GFR-binding peptide
  MOD_RES (26)..(27): Xaa is C or S
SMEGIVKPTRGVMIQITINSLDQPVXXPSAS

SEQ ID NO: 66439 - protein, 36 aa, Artificial Sequence; identical to SEQ ID NO: 22741
  Cyclic GFR-binding peptide
  MOD_RES (2)..(2): Xaa is C or S

SEQ ID NO: 66440 - protein, 31 aa, Artificial Sequence; identical to SEQ ID NO: 13236
  Cyclic GFR-binding peptide
  MOD_RES (1)..(3): Xaa is C or S

SEQ ID NO: 66441 - protein, 28 aa, Artificial Sequence
  Cyclic GFR-binding peptide
  MOD_RES (28)..(28): Xaa is C or S
MNVTAKKIVNSSDDIKRVQVPRLQTPAX

SEQ ID NO: 66442 - protein, 29 aa, Artificial Sequence
  Cyclic GFR-binding peptide
  MOD_RES (26)..(27): Xaa is C or S
VQVEKVKPKRGVVKAIKVSRLAQPVXXPA

SEQ ID NO: 66443 - protein, 41 aa, Artificial Sequence
  Cyclic GFR-binding peptide
  MOD_RES (2)..(4)..(35)..(36): Xaa is C or S
SXKXSKVIMSMEGIIKPTKGIMIQITINSLDQSVXXPSASA

SEQ ID NO: 66444 - protein, 36 aa, Artificial Sequence
  Cyclic GFR-binding peptide
  MOD_RES (2)..(4)..(35)..(36): Xaa is C or S
SXKXSKVIMSMEGIIKPTKGIMIQITINSLDQSVXX

SEQ ID NO: 66445 - protein, 28 aa, Artificial Sequence
  Cyclic GFR-binding peptide
  MOD_RES (28)..(28): Xaa is C or S
MNNSLQEIVNSSDDYYVVPLPELQTPAX

SEQ ID NO: 66446 - protein, 26 aa, Artificial Sequence
  Cyclic GFR-binding peptide
FNSLQEHQGQHPKIRYYLMTLPEEET

SEQ ID NO: 66447 - protein, 35 aa, Artificial Sequence
  Cyclic GFR-binding peptide
  MOD_RES (34)..(34): Xaa is C or S
DELTNSLQEFIPKKRVIEYYVVPLPELQVQTPRXQ

SEQ ID NO: 66448 - protein, 30 aa, Artificial Sequence; identical to SEQ ID NO: 13252
  Cyclic GFR-binding peptide
  MOD_RES (26)..(27): Xaa is C or S

SEQ ID NO: 66449 - protein, 28 aa, Artificial Sequence
  Cyclic GFR-binding peptide
  MOD_RES (1)..(1): Xaa is C or S
XSRVVMNNSLQEIVNSSDDYYVVPLPEL

SEQ ID NO: 66450 - protein, 21 aa, Artificial Sequence
  Cyclic GFR-binding peptide
SMEGIVVKDYEDMIQMTINSL

SEQ ID NO: 66451 - protein, 39 aa, Artificial Sequence; identical to SEQ ID NO: 22749
  Cyclic GFR-binding peptide
  MOD_RES (35)..(35): Xaa is C or S

SEQ ID NO: 66452 - protein, 42 aa, Artificial Sequence
  Cyclic GFR-binding peptide
  MOD_RES (2)..(39): Xaa is C or S
KXALHDELTNSLQEFIPKKRVIEYYVVPLPELQVQTPRXQVN

SEQ ID NO: 66453 - protein, 34 aa, Artificial Sequence
  Cyclic GFR-binding peptide
  MOD_RES (29)..(30): Xaa is C or S
VMNVTAKKIVNSSDDIKRVQVPRLKTPAXXPKPV

SEQ ID NO: 66454 - protein, 30 aa, Artificial Sequence; identical to SEQ ID NO: 22759
  Cyclic GFR-binding peptide

SEQ ID NO: 66455 - protein, 27 aa, Artificial Sequence
  Cyclic GFR-binding peptide
  MOD_RES (1)..(1): Xaa is C or S
XSRVVMNVQVEKIVNSSDDVKAVKVSR

SEQ ID NO: 66456 - protein, 33 aa, Artificial Sequence
  Cyclic GFR-binding peptide
  MOD_RES (28)..(29): Xaa is C or S
MEVQVEKVVKDYEDVKAMKVSRLETPVXXAKPI

SEQ ID NO: 66457 - protein, 31 aa, Artificial Sequence; identical to SEQ ID NO: 13267
  Cyclic GFR-binding peptide
  MOD_RES (29)..(30): Xaa is C or S

SEQ ID NO: 66458 - protein, 28 aa, Artificial Sequence
  Cyclic GFR-binding peptide
HEELRNSLQELKPKKRVYEYYLVTLPEH

SEQ ID NO: 66459 - protein, 28 aa, Artificial Sequence
  Cyclic GFR-binding peptide
  MOD_RES (1)..(1): Xaa is C or S
XSRVIMVQVEKVKPKRGVVKAIKVSRLA

SEQ ID NO: 66460 - protein, 31 aa, Artificial Sequence
  Cyclic GFR-binding peptide
  MOD_RES (2)..(2): Xaa is C or S
KXSKVIMVTAKKIKPTKGIIKRIQVPRLDQS

SEQ ID NO: 66461 - protein, 36 aa, Artificial Sequence
  Cyclic GFR-binding peptide
  MOD_RES (2)..(4)..(36): Xaa is C or S
HXGXSRVVMNVTAKKIVNSSDDIKRVQVPRLKTPAX

SEQ ID NO: 66462 - protein, 30 aa, Artificial Sequence
  Cyclic GFR-binding peptide
  MOD_RES (29)..(29): Xaa is C or S
FNSLQEHQGQHPKIRYYLMTLPEEETPVXE

SEQ ID NO: 66463 - protein, 37 aa, Artificial Sequence; identical to SEQ ID NO: 13275
  Cyclic GFR-binding peptide
  MOD_RES (2)..(34)..(35): Xaa is C or S

SEQ ID NO: 66464 - protein, 30 aa, Artificial Sequence
  Cyclic GFR-binding peptide
RVVMNVTAKKIVNSSDDIKRVQVPRLQTPA

SEQ ID NO: 66465 - protein, 30 aa, Artificial Sequence
  Cyclic GFR-binding peptide
GEVVMEVTAKKVVKDYEDIKRMQVPRLETP

SEQ ID NO: 66466 - protein, 30 aa, Artificial Sequence
  Cyclic GFR-binding peptide
  MOD_RES (28)..(29): Xaa is C or S
MNVQVEKIVNSSDDVKAVKVSRLQTPAXXP

SEQ ID NO: 66467 - protein, 37 aa, Artificial Sequence
  Cyclic GFR-binding peptide
  MOD_RES (34)..(34): Xaa is C or S
DELTNSLQEFIPKKRVIEYYVVPLPELQVQTPRXQVN

SEQ ID NO: 66468 - protein, 29 aa, Artificial Sequence
  Cyclic GFR-binding peptide
  MOD_RES (27)..(28): Xaa is C or S
MSMEGIVKPKRGVMIQITINSLAQPVXXP

SEQ ID NO: 66469 - protein, 32 aa, Artificial Sequence; identical to SEQ ID NO: 13303
  Cyclic GFR-binding peptide
  MOD_RES (28)..(28): Xaa is C or S

SEQ ID NO: 66470 - protein, 26 aa, Artificial Sequence
  Cyclic GFR-binding peptide
ENSLQEVVKDYEDYYVMPLPELETPV

SEQ ID NO: 66471 - protein, 29 aa, Artificial Sequence
  Cyclic GFR-binding peptide
EELRVTAKKLKPKKRVYEIKRVQVPRHHV

SEQ ID NO: 66472 - protein, 33 aa, Artificial Sequence
  Cyclic GFR-binding peptide
  MOD_RES (2)..(2): Xaa is C or S
GXGEVVMDSMEGIVVKENEDMIQMTINSLETPV

SEQ ID NO: 66473 - protein, 26 aa, Artificial Sequence
  Cyclic GFR-binding peptide
LFNSLQEHQGQHPKIRYYLMTLPEEE

SEQ ID NO: 66474 - protein, 36 aa, Artificial Sequence; identical to SEQ ID NO: 22796
  Cyclic GFR-binding peptide
  MOD_RES (33)..(33): Xaa is C or S

SEQ ID NO: 66475 - protein, 22 aa, Artificial Sequence
  Cyclic GFR-binding peptide
NNSLQEIVNSSDDYYLVTLPEL

SEQ ID NO: 66476 - protein, 40 aa, Artificial Sequence; identical to SEQ ID NO: 13314
  Cyclic GFR-binding peptide
  MOD_RES (1)..(3)..(35)..(36): Xaa is C or S

SEQ ID NO: 66477 - protein, 37 aa, Artificial Sequence; identical to SEQ ID NO: 22799
  Cyclic GFR-binding peptide
  MOD_RES (2)..(4): Xaa is C or S

SEQ ID NO: 66478 - protein, 38 aa, Artificial Sequence
  Cyclic GFR-binding peptide
  MOD_RES (35)..(35): Xaa is C or S
HEELRNSLQELKPKKRVYEYYLVTLPEHHVRSPQXKVS

SEQ ID NO: 66479 - protein, 28 aa, Artificial Sequence
  Cyclic GFR-binding peptide
  MOD_RES (1)..(3): Xaa is C or S
XKXSKVIMVQVEKIKPTKGIVKAIKVSR

SEQ ID NO: 66480 - protein, 36 aa, Artificial Sequence
  Cyclic GFR-binding peptide
  MOD_RES (1)..(3)..(35): Xaa is C or S
XGXSRVVMNVTAKKIVNSSDDIKRVQVPRLKTPAXT

SEQ ID NO: 66481 - protein, 37 aa, Artificial Sequence
  Cyclic GFR-binding peptide
  MOD_RES (1)..(32)..(33): Xaa is C or S
XSRVIMSMEGIVKPKRGVMIQITINSLAQPVXXPAAS

SEQ ID NO: 66482 - protein, 25 aa, Artificial Sequence
  Cyclic GFR-binding peptide
VVMNNSLQEIVNSSDDYYVVPLPEL

SEQ ID NO: 66483 - protein, 21 aa, Artificial Sequence
  Cyclic GFR-binding peptide
SMEGIVVKENEDMIQMTINSL

SEQ ID NO: 66484 - protein, 41 aa, Artificial Sequence; identical to SEQ ID NO: 13326
  Cyclic GFR-binding peptide
  MOD_RES (1)..(3)..(35)..(36): Xaa is C or S

SEQ ID NO: 66485 - protein, 33 aa, Artificial Sequence
  Cyclic GFR-binding peptide
  MOD_RES (1)..(3): Xaa is C or S
XGXGEVVMEVTAKKVVKDYEDIKRMQVPRLETP

SEQ ID NO: 66486 - protein, 38 aa, Artificial Sequence
  Cyclic GFR-binding peptide
  MOD_RES (35)..(35): Xaa is C or S
HEELRNSLQELKPKKRVYEYYVVPLPEHHVRSPQXKVS

SEQ ID NO: 66487 - protein, 32 aa, Artificial Sequence; identical to SEQ ID NO: 22805
  Cyclic GFR-binding peptide

SEQ ID NO: 66488 - protein, 33 aa, Artificial Sequence; identical to SEQ ID NO: 13333
  Cyclic GFR-binding peptide
  MOD_RES (28)..(28): Xaa is C or S

SEQ ID NO: 66489 - protein, 32 aa, Artificial Sequence
  Cyclic GFR-binding peptide
  MOD_RES (26)..(26): Xaa is C or S
SMEGIIVNSSDDMIQVTINSLKTPAXTPKTVH

SEQ ID NO: 66490 - protein, 29 aa, Artificial Sequence
  Cyclic GFR-binding peptide
  MOD_RES (28)..(29): Xaa is C or S
MNNSLQEIVNSSDDYYVVPLPELKTPAXX

SEQ ID NO: 66491 - protein, 31 aa, Artificial Sequence
  Cyclic GFR-binding peptide
  MOD_RES (28)..(29): Xaa is C or S
IMVTAKKIKPTKGIIKRIQVPRLDQSVXXPS

SEQ ID NO: 66492 - protein, 33 aa, Artificial Sequence
  Cyclic GFR-binding peptide
  MOD_RES (2)..(33): Xaa is C or S
KXSRVIMVQVEKVKPKRGVVKAIKVSRLAQPVX

SEQ ID NO: 66493 - protein, 29 aa, Artificial Sequence
  Cyclic GFR-binding peptide
ARVVMNVQVEKIVNSSDDVKAVKVSRLQT

SEQ ID NO: 66494 - protein, 30 aa, Artificial Sequence
  Cyclic GFR-binding peptide
  MOD_RES (29)..(30): Xaa is C or S
VIMVTAKKIKPTKGIIKRIQVPRLDQSVXX

SEQ ID NO: 66495 - protein, 29 aa, Artificial Sequence
  Cyclic GFR-binding peptide
  MOD_RES (1)..(3): Xaa is C or S
XKXSKVVMNSLQEVKPTRGVYYLITLPEL

SEQ ID NO: 66496 - protein, 29 aa, Artificial Sequence
  Cyclic GFR-binding peptide
  MOD_RES (26)..(27): Xaa is C or S
VQVEKIVNSSDDVKAVKVSRLKTPAXXPK

SEQ ID NO: 66497 - protein, 38 aa, Artificial Sequence
  Cyclic GFR-binding peptide
  MOD_RES (2)..(4)..(36)..(37): Xaa is C or S
HXGXSRVVMNVQVEKIVNSSDDVKAVKVSRLKTPAXXP

SEQ ID NO: 66498 - protein, 40 aa, Artificial Sequence; identical to SEQ ID NO: 22813
  Cyclic GFR-binding peptide
  MOD_RES (37)..(37): Xaa is C or S

SEQ ID NO: 66499 - protein, 25 aa, Artificial Sequence
  Cyclic GFR-binding peptide
DVTAKKVVKENEDIKRMQVPRLETP

SEQ ID NO: 66500 - protein, 40 aa, Artificial Sequence
  Cyclic GFR-binding peptide
  MOD_RES (1)..(3)..(34)..(35): Xaa is C or S
XKXSRVIMVQVEKVKPKRGVVKAIKVSRLAQPVXXPAASA

SEQ ID NO: 66501 - protein, 29 aa, Artificial Sequence
  Cyclic GFR-binding peptide
  MOD_RES (26)..(27): Xaa is C or S
VTAKKVVKDYEDIKRMQVPRLETPVXXAK

SEQ ID NO: 66502 - protein, 29 aa, Artificial Sequence
  Cyclic GFR-binding peptide
  MOD_RES (2)..(2): Xaa is C or S
KXSRVIMNSLQEVKPKRGVYYLITLPELA

SEQ ID NO: 66503 - protein, 41 aa, Artificial Sequence
  Cyclic GFR-binding peptide
  MOD_RES (37)..(37): Xaa is C or S
ALHDELTNSLQEFIPKKRVIEYYLVTLPELQVQTPRXQVNR

SEQ ID NO: 66504 - protein, 31 aa, Artificial Sequence; identical to SEQ ID NO: 22822
  Cyclic GFR-binding peptide

SEQ ID NO: 66505 - protein, 35 aa, Artificial Sequence; identical to SEQ ID NO: 13356
  Cyclic GFR-binding peptide
  MOD_RES (1)..(3)..(35): Xaa is C or S

SEQ ID NO: 66506 - protein, 37 aa, Artificial Sequence; identical to SEQ ID NO: 13357
  Cyclic GFR-binding peptide
  MOD_RES (1)..(3)..(35): Xaa is C or S

SEQ ID NO: 66507 - protein, 25 aa, Artificial Sequence
  Cyclic GFR-binding peptide
NSLQEHQGQHPKIRYYLMTLPEEET

SEQ ID NO: 66508 - protein, 30 aa, Artificial Sequence; identical to SEQ ID NO: 13360
  Cyclic GFR-binding peptide
  MOD_RES (2)..(4): Xaa is C or S

SEQ ID NO: 66509 - protein, 29 aa, Artificial Sequence
  Cyclic GFR-binding peptide
  MOD_RES (26)..(27): Xaa is C or S
NSLQEVVKDYEDYYVMPLPELETPVXXAK

SEQ ID NO: 66510 - protein, 29 aa, Artificial Sequence
  Cyclic GFR-binding peptide
  MOD_RES (1)..(1): Xaa is C or S
XARVVMNNSLQEIVNSSDDYYVVPLPELQ

SEQ ID NO: 66511 - protein, 33 aa, Artificial Sequence
  Cyclic GFR-binding peptide
  MOD_RES (30)..(31): Xaa is C or S
KVVMVTAKKVKPTRGVIKRIQVPRLDQPVXXPS

SEQ ID NO: 66512 - protein, 25 aa, Artificial Sequence
  Cyclic GFR-binding peptide
QLFVQVEKHQGQHPKIRVKAMKVSR

SEQ ID NO: 66513 - protein, 32 aa, Artificial Sequence; identical to SEQ ID NO: 13369
  Cyclic GFR-binding peptide
  MOD_RES (28)..(29): Xaa is C or S

SEQ ID NO: 66514 - protein, 32 aa, Artificial Sequence; identical to SEQ ID NO: 13378
  Cyclic GFR-binding peptide
  MOD_RES (29)..(30): Xaa is C or S

SEQ ID NO: 66515 - protein, 32 aa, Artificial Sequence
  Cyclic GFR-binding peptide
  MOD_RES (26)..(27): Xaa is C or S
SMEGIIVNSSDDMIQVTINSLKTPAXXPKPVY

SEQ ID NO: 66516 - protein, 37 aa, Artificial Sequence; identical to SEQ ID NO: 47868
  Cyclic GFR-binding peptide
  MOD_RES (31)..(32): Xaa is C or S

SEQ ID NO: 66517 - protein, 30 aa, Artificial Sequence
  Cyclic GFR-binding peptide
  MOD_RES (27)..(28): Xaa is C or S
NSMEGIIVNSSDDMIQVTINSLKTPAXXPK

SEQ ID NO: 66518 - protein, 27 aa, Artificial Sequence
  Cyclic GFR-binding peptide
FVTAKKHQGQHPKIRIKRMQVPREETP

SEQ ID NO: 66519 - protein, 34 aa, Artificial Sequence
  Cyclic GFR-binding peptide
  MOD_RES (1)..(3): Xaa is C or S
XGXARVVMNVTAKKIVNSSDDIKRVQVPRLQTPA

SEQ ID NO: 66520 - protein, 29 aa, Artificial Sequence
  Cyclic GFR-binding peptide
SRVVMNVTAKKIVNSSDDIKRVQVPRLKT

SEQ ID NO: 66521 - protein, 26 aa, Artificial Sequence
  Cyclic GFR-binding peptide
EVVMDVQVEKVVKENEDVKAMKVSRL

SEQ ID NO: 66522 - protein, 33 aa, Artificial Sequence
  Cyclic GFR-binding peptide
  MOD_RES (2)..(4): Xaa is C or S
HXGXSRVVMNVQVEKIVNSSDDVKAVKVSRLKT

SEQ ID NO: 66523 - protein, 32 aa, Artificial Sequence; identical to SEQ ID NO: 13392
  Cyclic GFR-binding peptide
  MOD_RES (31)..(32): Xaa is C or S

SEQ ID NO: 66524 - protein, 28 aa, Artificial Sequence
  Cyclic GFR-binding peptide
  MOD_RES (28)..(28): Xaa is C or S
MNVQVEKIVNSSDDVKAVKVSRLKTPAX

SEQ ID NO: 66525 - protein, 39 aa, Artificial Sequence
  Cyclic GFR-binding peptide
  MOD_RES (2)..(4): Xaa is C or S
AXAXELHEELRNSLQELKPKKRVYEYYLVTLPEHHVRSP

SEQ ID NO: 66526 - protein, 28 aa, Artificial Sequence
  Cyclic GFR-binding peptide
VVMDVQVEKVVKENEDVKAMKVSRLETP

SEQ ID NO: 66527 - protein, 28 aa, Artificial Sequence
  Cyclic GFR-binding peptide
  MOD_RES (1)..(3): Xaa is C or S
XKXSKVIMSMEGIIKPTKGIMIQITINS

SEQ ID NO: 66528 - protein, 35 aa, Artificial Sequence; identical to SEQ ID NO: 22859
  Cyclic GFR-binding peptide
  MOD_RES (32)..(32): Xaa is C or S

SEQ ID NO: 66529 - protein, 29 aa, Artificial Sequence
  Cyclic GFR-binding peptide
RNSLQELKPKKRVYEYYLVTLPEHHVRSP

SEQ ID NO: 66530 - protein, 38 aa, Artificial Sequence; identical to SEQ ID NO: 13407
  Cyclic GFR-binding peptide
  MOD_RES (1)..(32)..(33): Xaa is C or S

SEQ ID NO: 66531 - protein, 24 aa, Artificial Sequence
  Cyclic GFR-binding peptide
MVQVEKIKPTKGIVKAIKVSRLDQ

SEQ ID NO: 66532 - protein, 34 aa, Artificial Sequence
  Cyclic GFR-binding peptide
  MOD_RES (2)..(4): Xaa is C or S
HXGXSRVVMNVTAKKIVNSSDDIKRVQVPRLKTP

SEQ ID NO: 66533 - protein, 30 aa, Artificial Sequence
  Cyclic GFR-binding peptide
ALHDELTNSLQEFIPKKRVIEYYLVTLPEL

SEQ ID NO: 66534 - protein, 32 aa, Artificial Sequence
  Cyclic GFR-binding peptide
  MOD_RES (1)..(3): Xaa is C or S
XKXALHDELTNSLQEFIPKKRVIEYYVVPLPE

SEQ ID NO: 66535 - protein, 28 aa, Artificial Sequence
  Cyclic GFR-binding peptide
  MOD_RES (2)..(2): Xaa is C or S
KXSKVIMSMEGIIKPTKGIMIQITINSL

SEQ ID NO: 66536 - protein, 29 aa, Artificial Sequence
  Cyclic GFR-binding peptide
  MOD_RES (27)..(28): Xaa is C or S
NSMEGIIVNSSDDMIQVTINSLKTPAXXP

SEQ ID NO: 66537 - protein, 31 aa, Artificial Sequence
  Cyclic GFR-binding peptide
  MOD_RES (2)..(2): Xaa is C or S
KXSKVIMVQVEKIKPTKGIVKAIKVSRLDQS

SEQ ID NO: 66538 - protein, 32 aa, Artificial Sequence
  Cyclic GFR-binding peptide
  MOD_RES (1)..(3): Xaa is C or S
XKXSKVIMSMEGIIKPTKGIMIQITINSLDQS

SEQ ID NO: 66539 - protein, 40 aa, Artificial Sequence
  Cyclic GFR-binding peptide
  MOD_RES (2)..(4)..(35)..(36): Xaa is C or S
SXKXSRVIMVTAKKVKPKRGVIKRIQVPRLAQPVXXPAAS

SEQ ID NO: 66540 - protein, 37 aa, Artificial Sequence
  Cyclic GFR-binding peptide
  MOD_RES (2)..(34): Xaa is C or S
GXSRVVMNSMEGIIVNSSDDMIQVTINSLKTPAXTPK

SEQ ID NO: 66541 - protein, 41 aa, Artificial Sequence
  Cyclic GFR-binding peptide
  MOD_RES (2)..(4)..(35)..(36): Xaa is C or S
SXKXSKVIMVQVEKIKPTKGIVKAIKVSRLDQSVXXPSASA

SEQ ID NO: 66542 - protein, 30 aa, Artificial Sequence
  Cyclic GFR-binding peptide
HQLFNSLQEHQGQHPKIRYYLMTLPEEETP

SEQ ID NO: 66543 - protein, 26 aa, Artificial Sequence
  Cyclic GFR-binding peptide
VMENSLQEVVKDYEDYYLMTLPELET

SEQ ID NO: 66544 - protein, 30 aa, Artificial Sequence
  Cyclic GFR-binding peptide
  MOD_RES (28)..(28): Xaa is C or S
NSLQEHQGQHPKIRYYVMPLPEEETPVXEL

SEQ ID NO: 66545 - protein, 32 aa, Artificial Sequence; identical to SEQ ID NO: 13439
  Cyclic GFR-binding peptide
  MOD_RES (29)..(30): Xaa is C or S

SEQ ID NO: 66546 - protein, 24 aa, Artificial Sequence
  Cyclic GFR-binding peptide
VMSMEGIVKPTRGVMIQITINSLD

SEQ ID NO: 66547 - protein, 30 aa, Artificial Sequence
  Cyclic GFR-binding peptide
  MOD_RES (1)..(1): Xaa is C or S
XKNHQLFNSLQEHQGQHPKIRYYLMTLPEE

SEQ ID NO: 66548 - protein, 31 aa, Artificial Sequence
  Cyclic GFR-binding peptide
  MOD_RES (30)..(30): Xaa is C or S
NSLQEFIPKKRVIEYYLVTLPELQVQTPRXQ

SEQ ID NO: 66549 - protein, 36 aa, Artificial Sequence; identical to SEQ ID NO: 13443
  Cyclic GFR-binding peptide
  MOD_RES (31)..(32): Xaa is C or S

SEQ ID NO: 66550 - protein, 30 aa, Artificial Sequence
  Cyclic GFR-binding peptide
SKVIMVTAKKIKPTKGIIKRIQVPRLDQSV

SEQ ID NO: 66551 - protein, 27 aa, Artificial Sequence
  Cyclic GFR-binding peptide
ARVVMNVTAKKIVNSSDDIKRVQVPRL

SEQ ID NO: 66552 - protein, 36 aa, Artificial Sequence; identical to SEQ ID NO: 22884
  Cyclic GFR-binding peptide
  MOD_RES (36)..(36): Xaa is C or S

SEQ ID NO: 66553 - protein, 34 aa, Artificial Sequence; identical to SEQ ID NO: 13449
  Cyclic GFR-binding peptide
  MOD_RES (28)..(28): Xaa is C or S

SEQ ID NO: 66554 - protein, 33 aa, Artificial Sequence
  Cyclic GFR-binding peptide
  MOD_RES (31)..(31): Xaa is C or S
TNSLQEFIPKKRVIEYYVVPLPELQVQTPRXQV

SEQ ID NO: 66555 - protein, 30 aa, Artificial Sequence
  Cyclic GFR-binding peptide
  MOD_RES (28)..(29): Xaa is C or S
VMVTAKKVKPTRGVIKRIQVPRLDQPVXXP

SEQ ID NO: 66556 - protein, 24 aa, Artificial Sequence
  Cyclic GFR-binding peptide
VMDVTAKKVVKENEDIKRMQVPRL

SEQ ID NO: 66557 - protein, 33 aa, Artificial Sequence
  Cyclic GFR-binding peptide
  MOD_RES (32)..(33): Xaa is C or S
GEVVMEVTAKKVVKDYEDIKRMQVPRLETPVXX

SEQ ID NO: 66558 - protein, 33 aa, Artificial Sequence
  Cyclic GFR-binding peptide
  MOD_RES (1)..(33): Xaa is C or S
XGEVVMDSMEGIVVKENEDMIQMTINSLETPVX

SEQ ID NO: 66559 - protein, 38 aa, Artificial Sequence
  Cyclic GFR-binding peptide
  MOD_RES (1)..(35): Xaa is C or S
XKNHQLFNSLQEHQGQHPKIRYYVMPLPEEETPVXELG

SEQ ID NO: 66560 - protein, 26 aa, Artificial Sequence
  Cyclic GFR-binding peptide
VVMDNSLQEVVKENEDYYLMTLPELE

SEQ ID NO: 66561 - protein, 42 aa, Artificial Sequence
  Cyclic GFR-binding peptide
  MOD_RES (2)..(4)..(36)..(37): Xaa is C or S
RXGXGEVVMESMEGIVVKDYEDMIQMTINSLETPVXXAKPIS

SEQ ID NO: 66562 - protein, 27 aa, Artificial Sequence
  Cyclic GFR-binding peptide
IMNSLQEIKPTKGIYYLITLPELDQSV

SEQ ID NO: 66563 - protein, 34 aa, Artificial Sequence
  Cyclic GFR-binding peptide
  MOD_RES (31)..(32): Xaa is C or S
SKVVMVTAKKVKPTRGVIKRIQVPRLDQPVXXPS

SEQ ID NO: 66564 - protein, 32 aa, Artificial Sequence; identical to SEQ ID NO: 22895
  Cyclic GFR-binding peptide
  MOD_RES (1)..(1): Xaa is C or S

SEQ ID NO: 66565 - protein, 41 aa, Artificial Sequence
  Cyclic GFR-binding peptide
  MOD_RES (37)..(37): Xaa is C or S
ALHDELTNSLQEFIPKKRVIEYYVVPLPELQVQTPRXQVNR

SEQ ID NO: 66566 - protein, 25 aa, Artificial Sequence
  Cyclic GFR-binding peptide
SMEGIVVKENEDMIQMTINSLETPV

SEQ ID NO: 66567 - protein, 27 aa, Artificial Sequence
  Cyclic GFR-binding peptide
SRVVMNVTAKKIVNSSDDIKRVQVPRL

SEQ ID NO: 66568 - protein, 32 aa, Artificial Sequence
  Cyclic GFR-binding peptide
  MOD_RES (1)..(1): Xaa is C or S
XSRVVMNVTAKKIVNSSDDIKRVQVPRLKTPA

SEQ ID NO: 66569 - protein, 22 aa, Artificial Sequence
  Cyclic GFR-binding peptide
NSLQEHQGQHPKIRYYLMTLPE

SEQ ID NO: 66570 - protein, 32 aa, Artificial Sequence
  Cyclic GFR-binding peptide
NHQLFNSLQEHQGQHPKIRYYLMTLPEEETPV

SEQ ID NO: 66571 - protein, 36 aa, Artificial Sequence
  Cyclic GFR-binding peptide
  MOD_RES (32)..(33): Xaa is C or S
GEVVMESMEGIVVKDYEDMIQMTINSLETPVXXAKP

SEQ ID NO: 66572 - protein, 31 aa, Artificial Sequence; identical to SEQ ID NO: 22900
  Cyclic GFR-binding peptide

SEQ ID NO: 66573 - protein, 29 aa, Artificial Sequence
  Cyclic GFR-binding peptide
  MOD_RES (27)..(28): Xaa is C or S
ESMEGIVVKDYEDMIQMTINSLETPVXXA

SEQ ID NO: 66574 - protein, 20 aa, Artificial Sequence
  Cyclic GFR-binding peptide
NSLQEVKPTRGVYYVIPLPE

SEQ ID NO: 66575 - protein, 40 aa, Artificial Sequence
  Cyclic GFR-binding peptide
  MOD_RES (2)..(4)..(36): Xaa is C or S
HXGXSRVVMNSMEGIIVNSSDDMIQVTINSLKTPAXTPKT

SEQ ID NO: 66576 - protein, 21 aa, Artificial Sequence
  Cyclic GFR-binding peptide
MNSLQEVKPTRGVYYVIPLPE

SEQ ID NO: 66577 - protein, 39 aa, Artificial Sequence
  Cyclic GFR-binding peptide
  MOD_RES (1)..(35): Xaa is C or S
XKNHQLFNSLQEHQGQHPKIRYYVMPLPEEETPVXELGE

SEQ ID NO: 66578 - protein, 26 aa, Artificial Sequence
  Cyclic GFR-binding peptide
MEVTAKKVVKDYEDIKRMQVPRLETP

SEQ ID NO: 66579 - protein, 34 aa, Artificial Sequence
  Cyclic GFR-binding peptide
  MOD_RES (1)..(32)..(33): Xaa is C or S
XSKVIMVQVEKIKPTKGIVKAIKVSRLDQSVXXP

SEQ ID NO: 66580 - protein, 42 aa, Artificial Sequence
  Cyclic GFR-binding peptide
  MOD_RES (2)..(4)..(41): Xaa is C or S
EXKXALHDELTNSLQEFIPKKRVIEYYVVPLPELQVQTPRXQ

SEQ ID NO: 66581 - protein, 34 aa, Artificial Sequence; identical to SEQ ID NO: 13486
  Cyclic GFR-binding peptide
  MOD_RES (2)..(4): Xaa is C or S

SEQ ID NO: 66582 - protein, 27 aa, Artificial Sequence
  Cyclic GFR-binding peptide
VVMVTAKKVKPTRGVIKRIQVPRLDQP

SEQ ID NO: 66583 - protein, 32 aa, Artificial Sequence
  Cyclic GFR-binding peptide
  MOD_RES (29)..(30): Xaa is C or S
VIMVTAKKIKPTKGIIKRIQVPRLDQSVXXPS

SEQ ID NO: 66584 - protein, 28 aa, Artificial Sequence
  Cyclic GFR-binding peptide
VMDSMEGIVVKENEDMIQMTINSLETPV

SEQ ID NO: 66585 - protein, 32 aa, Artificial Sequence
  Cyclic GFR-binding peptide
  MOD_RES (28)..(29): Xaa is C or S
IMSMEGIVKPKRGVMIQITINSLAQPVXXPAA

SEQ ID NO: 66586 - protein, 31 aa, Artificial Sequence; identical to SEQ ID NO: 13493
  Cyclic GFR-binding peptide
  MOD_RES (2)..(2): Xaa is C or S

SEQ ID NO: 66587 - protein, 22 aa, Artificial Sequence
  Cyclic GFR-binding peptide
NSLQEVKPKRGVYYLITLPELA

SEQ ID NO: 66588 - protein, 38 aa, Artificial Sequence
  Cyclic GFR-binding peptide
  MOD_RES (32)..(32): Xaa is C or S
HQLFNSLQEHQGQHPKIRYYLMTLPEEETPVXELGEDN

SEQ ID NO: 66589 - protein, 29 aa, Artificial Sequence
  Cyclic GFR-binding peptide
EVVMDNSLQEVVKENEDYYVMPLPELETP

SEQ ID NO: 66590 - protein, 31 aa, Artificial Sequence; identical to SEQ ID NO: 13499
  Cyclic GFR-binding peptide
  MOD_RES (27)..(28): Xaa is C or S

SEQ ID NO: 66591 - protein, 26 aa, Artificial Sequence
  Cyclic GFR-binding peptide
KVIMNSLQEIKPTKGIYYLITLPELD

SEQ ID NO: 66592 - protein, 20 aa, Artificial Sequence
  Cyclic GFR-binding peptide
VTAKKVKPTRGVIKRIQVPR

SEQ ID NO: 66593 - protein, 27 aa, Artificial Sequence
  Cyclic GFR-binding peptide
MDVTAKKVVKENEDIKRMQVPRLETPV

SEQ ID NO: 66594 - protein, 39 aa, Artificial Sequence
  Cyclic GFR-binding peptide
  MOD_RES (2)..(4)..(38): Xaa is C or S
RXEXKNHQLFNSLQEHQGQHPKIRYYVMPLPEEETPVXE

SEQ ID NO: 66595 - protein, 39 aa, Artificial Sequence; identical to SEQ ID NO: 13507
  Cyclic GFR-binding peptide
  MOD_RES (1)..(3)..(35)..(36): Xaa is C or S

SEQ ID NO: 66596 - protein, 30 aa, Artificial Sequence
  Cyclic GFR-binding peptide
  MOD_RES (2)..(2): Xaa is C or S
KXSKVVMVTAKKVKPTRGVIKRIQVPRLDQ

SEQ ID NO: 66597 - protein, 35 aa, Artificial Sequence; identical to SEQ ID NO: 13511
  Cyclic GFR-binding peptide
  MOD_RES (29)..(30): Xaa is C or S

SEQ ID NO: 66598 - protein, 25 aa, Artificial Sequence
  Cyclic GFR-binding peptide
KVIMNSLQEIKPTKGIYYVIPLPEL

SEQ ID NO: 66599 - protein, 31 aa, Artificial Sequence
  Cyclic GFR-binding peptide
LTNSLQEFIPKKRVIEYYLVTLPELQVQTPR

SEQ ID NO: 66600 - protein, 32 aa, Artificial Sequence
  Cyclic GFR-binding peptide
  MOD_RES (28)..(29): Xaa is C or S
MNVTAKKIVNSSDDIKRVQVPRLKTPAXXPKP

SEQ ID NO: 66601 - protein, 31 aa, Artificial Sequence; identical to SEQ ID NO: 13517
  Cyclic GFR-binding peptide
  MOD_RES (1)..(1): Xaa is C or S

SEQ ID NO: 66602 - protein, 25 aa, Artificial Sequence
  Cyclic GFR-binding peptide
VVMDVTAKKVVKENEDIKRMQVPRL

SEQ ID NO: 66603 - protein, 36 aa, Artificial Sequence
  Cyclic GFR-binding peptide
  MOD_RES (34)..(34): Xaa is C or S
DELTNSLQEFIPKKRVIEYYLVTLPELQVQTPRXQV

SEQ ID NO: 66604 - protein, 31 aa, Artificial Sequence
  Cyclic GFR-binding peptide
  MOD_RES (26)..(26): Xaa is C or S
SMEGIIVNSSDDMIQVTINSLKTPAXTPKTV

SEQ ID NO: 66605 - protein, 24 aa, Artificial Sequence
  Cyclic GFR-binding peptide
MDVQVEKVVKENEDVKAMKVSRLE

SEQ ID NO: 66606 - protein, 34 aa, Artificial Sequence; identical to SEQ ID NO: 22928
  Cyclic GFR-binding peptide
  MOD_RES (34)..(34): Xaa is C or S

SEQ ID NO: 66607 - protein, 39 aa, Artificial Sequence; identical to SEQ ID NO: 13524
  Cyclic GFR-binding peptide
  MOD_RES (2)..(4)..(36)..(37): Xaa is C or S

SEQ ID NO: 66608 - protein, 39 aa, Artificial Sequence
  Cyclic GFR-binding peptide
  MOD_RES (1)..(33)..(34): Xaa is C or S
XGEVVMEVTAKKVVKDYEDIKRMQVPRLETPVXXAKPIS

SEQ ID NO: 66609 - protein, 34 aa, Artificial Sequence; identical to SEQ ID NO: 13526
  Cyclic GFR-binding peptide
  MOD_RES (29)..(30): Xaa is C or S

SEQ ID NO: 66610 - protein, 29 aa, Artificial Sequence
  Cyclic GFR-binding peptide
RSMEGILKPKKRVYEMIQVTINSHHVRSP

SEQ ID NO: 66611 - protein, 30 aa, Artificial Sequence; identical to SEQ ID NO: 22933
  Cyclic GFR-binding peptide

SEQ ID NO: 66612 - protein, 34 aa, Artificial Sequence
  Cyclic GFR-binding peptide
  MOD_RES (30)..(30): Xaa is C or S
NSLQELKPKKRVYEYYVVPLPEHHVRSPQXKVSS

SEQ ID NO: 66613 - protein, 34 aa, Artificial Sequence
  Cyclic GFR-binding peptide
  MOD_RES (31)..(32): Xaa is C or S
RVVMNVQVEKIVNSSDDVKAVKVSRLKTPAXXPK

SEQ ID NO: 66614 - protein, 26 aa, Artificial Sequence
  Cyclic GFR-binding peptide
  MOD_RES (26)..(26): Xaa is C or S
SMEGIIVNSSDDMIQVTINSLKTPAX

SEQ ID NO: 66615 - protein, 33 aa, Artificial Sequence
  Cyclic GFR-binding peptide
  MOD_RES (33)..(33): Xaa is C or S
ELTNSLQEFIPKKRVIEYYVVPLPELQVQTPRX

SEQ ID NO: 66616 - protein, 38 aa, Artificial Sequence; identical to SEQ ID NO: 13529
  Cyclic GFR-binding peptide
  MOD_RES (2)..(33)..(34): Xaa is C or S

SEQ ID NO: 66617 - protein, 32 aa, Artificial Sequence
  Cyclic GFR-binding peptide
  MOD_RES (27)..(28): Xaa is C or S
DVQVEKVVKENEDVKAMKVSRLETPVXXAKPI

SEQ ID NO: 66618 - protein, 24 aa, Artificial Sequence
  Cyclic GFR-binding peptide
VQVEKVKPKRGVVKAIKVSRLAQP

SEQ ID NO: 66619 - protein, 38 aa, Artificial Sequence; identical to SEQ ID NO: 13530
  Cyclic GFR-binding peptide
  MOD_RES (1)..(3)..(35)..(36): Xaa is C or S

SEQ ID NO: 66620 - protein, 35 aa, Artificial Sequence; identical to SEQ ID NO: 13536
  Cyclic GFR-binding peptide
  MOD_RES (32)..(33): Xaa is C or S

SEQ ID NO: 66621 - protein, 27 aa, Artificial Sequence
  Cyclic GFR-binding peptide
MNVQVEKIVNSSDDVKAVKVSRLQTPA

SEQ ID NO: 66622 - protein, 35 aa, Artificial Sequence; identical to SEQ ID NO: 13540
  Cyclic GFR-binding peptide
  MOD_RES (31)..(32): Xaa is C or S

SEQ ID NO: 66623 - protein, 37 aa, Artificial Sequence
  Cyclic GFR-binding peptide
  MOD_RES (2)..(4)..(35)..(36): Xaa is C or S
SXKXSRVIMSMEGIVKPKRGVMIQITINSLAQPVXXP

SEQ ID NO: 66624 - protein, 29 aa, Artificial Sequence
  Cyclic GFR-binding peptide
  MOD_RES (28)..(29): Xaa is C or S
MDVTAKKVVKENEDIKRMQVPRLETPVXX

SEQ ID NO: 66625 - protein, 34 aa, Artificial Sequence
  Cyclic GFR-binding peptide
  MOD_RES (32)..(33): Xaa is C or S
GEVVMEVQVEKVVKDYEDVKAMKVSRLETPVXXA

SEQ ID NO: 66626 - protein, 23 aa, Artificial Sequence
  Cyclic GFR-binding peptide
NVTAKKIVNSSDDIKRVQVPRLQ

SEQ ID NO: 66627 - protein, 36 aa, Artificial Sequence; identical to SEQ ID NO: 22943
  Cyclic GFR-binding peptide
  MOD_RES (35)..(35): Xaa is C or S

SEQ ID NO: 66628 - protein, 40 aa, Artificial Sequence
  Cyclic GFR-binding peptide
  MOD_RES (1)..(3)..(34)..(35): Xaa is C or S
XKXSRVIMVTAKKVKPKRGVIKRIQVPRLAQPVXXPAASA

SEQ ID NO: 66629 - protein, 33 aa, Artificial Sequence; identical to SEQ ID NO: 22951
  Cyclic GFR-binding peptide
  MOD_RES (31)..(31): Xaa is C or S

SEQ ID NO: 66630 - protein, 27 aa, Artificial Sequence
  Cyclic GFR-binding peptide
  MOD_RES (1)..(1): Xaa is C or S
XSRVIMVQVEKVKPKRGVVKAIKVSRL

SEQ ID NO: 66631 - protein, 24 aa, Artificial Sequence
  Cyclic GFR-binding peptide
VMDNSLQEVVKENEDYYLMTLPEL

SEQ ID NO: 66632 - protein, 33 aa, Artificial Sequence; identical to SEQ ID NO: 22955
  Cyclic GFR-binding peptide

SEQ ID NO: 66633 - protein, 30 aa, Artificial Sequence; identical to SEQ ID NO: 13552
  Cyclic GFR-binding peptide
  MOD_RES (27)..(28): Xaa is C or S

SEQ ID NO: 66634 - protein, 34 aa, Artificial Sequence
  Cyclic GFR-binding peptide
  MOD_RES (2)..(34): Xaa is C or S
GXGEVVMDSMEGIVVKENEDMIQMTINSLETPVX

SEQ ID NO: 66635 - protein, 33 aa, Artificial Sequence
  Cyclic GFR-binding peptide
  MOD_RES (2)..(2): Xaa is C or S
GXSRVVMNSMEGIIVNSSDDMIQVTINSLKTPA

SEQ ID NO: 66636 - protein, 33 aa, Artificial Sequence; identical to SEQ ID NO: 22959
  Cyclic GFR-binding peptide

SEQ ID NO: 66637 - protein, 41 aa, Artificial Sequence
  Cyclic GFR-binding peptide
  MOD_RES (1)..(3)..(35)..(36): Xaa is C or S
XGXGEVVMEVTAKKVVKDYEDIKRMQVPRLETPVXXAKPIS

SEQ ID NO: 66638 - protein, 32 aa, Artificial Sequence
  Cyclic GFR-binding peptide
  MOD_RES (1)..(3): Xaa is C or S
XGXGEVVMDSMEGIVVKENEDMIQMTINSLET

SEQ ID NO: 66639 - protein, 28 aa, Artificial Sequence
  Cyclic GFR-binding peptide
  MOD_RES (2)..(2): Xaa is C or S
KXSKVVMVQVEKVKPTRGVVKAIKVSRL

SEQ ID NO: 66640 - protein, 31 aa, Artificial Sequence
  Cyclic GFR-binding peptide
  MOD_RES (31)..(31): Xaa is C or S
SKVVMVQVEKVKPTRGVVKAIKVSRLDQPVX

SEQ ID NO: 66641 - protein, 30 aa, Artificial Sequence
  Cyclic GFR-binding peptide
  MOD_RES (1)..(1): Xaa is C or S
XSRVVMNVQVEKIVNSSDDVKAVKVSRLKT

SEQ ID NO: 66642 - protein, 31 aa, Artificial Sequence; identical to SEQ ID NO: 13567
  Cyclic GFR-binding peptide
  MOD_RES (28)..(28): Xaa is C or S

SEQ ID NO: 66643 - protein, 27 aa, Artificial Sequence
  Cyclic GFR-binding peptide
EVVMDSMEGIVVKENEDMIQMTINSLE

SEQ ID NO: 66644 - protein, 23 aa, Artificial Sequence
  Cyclic GFR-binding peptide
NSLQEIVNSSDDYYLVTLPELQT

SEQ ID NO: 66645 - protein, 40 aa, Artificial Sequence; identical to SEQ ID NO: 13571
  Cyclic GFR-binding peptide
  MOD_RES (2)..(4)..(36): Xaa is C or S

SEQ ID NO: 66646 - protein, 27 aa, Artificial Sequence
  Cyclic GFR-binding peptide
  MOD_RES (1)..(1): Xaa is C or S
XSRVVMNVTAKKIVNSSDDIKRVQVPR

SEQ ID NO: 66647 - protein, 30 aa, Artificial Sequence
  Cyclic GFR-binding peptide
  MOD_RES (29)..(30): Xaa is C or S
VMDVTAKKVVKENEDIKRMQVPRLETPVXX

SEQ ID NO: 66648 - protein, 32 aa, Artificial Sequence; identical to SEQ ID NO: 13577
  Cyclic GFR-binding peptide
  MOD_RES (29)..(30): Xaa is C or S

SEQ ID NO: 66649 - protein, 40 aa, Artificial Sequence; identical to SEQ ID NO: 22977
  Cyclic GFR-binding peptide
  MOD_RES (34)..(34): Xaa is C or S

SEQ ID NO: 66650 - protein, 28 aa, Artificial Sequence
  Cyclic GFR-binding peptide
  MOD_RES (27)..(28): Xaa is C or S
MVQVEKVKPTRGVVKAIKVSRLDQPVXX

SEQ ID NO: 66651 - protein, 39 aa, Artificial Sequence
  Cyclic GFR-binding peptide
  MOD_RES (35)..(35): Xaa is C or S
HDELTNSLQEFIPKKRVIEYYLVTLPELQVQTPRXQVNR

SEQ ID NO: 66652 - protein, 36 aa, Artificial Sequence; identical to SEQ ID NO: 22980
  Cyclic GFR-binding peptide

SEQ ID NO: 66653 - protein, 25 aa, Artificial Sequence
  Cyclic GFR-binding peptide
LTVQVEKFIPKKRVIEVKAVKVSRL

SEQ ID NO: 66654 - protein, 39 aa, Artificial Sequence; identical to SEQ ID NO: 13589
  Cyclic GFR-binding peptide
  MOD_RES (1)..(3)..(35)..(36): Xaa is C or S

SEQ ID NO: 66655 - protein, 30 aa, Artificial Sequence
  Cyclic GFR-binding peptide
  MOD_RES (26)..(27): Xaa is C or S
VQVEKVKPTRGVVKAIKVSRLDQPVXXPSA

SEQ ID NO: 66656 - protein, 39 aa, Artificial Sequence
  Cyclic GFR-binding peptide
  MOD_RES (1)..(33)..(34): Xaa is C or S
XSRVVMNVQVEKIVNSSDDVKAVKVSRLKTPAXXPKPVY

SEQ ID NO: 66657 - protein, 27 aa, Artificial Sequence
  Cyclic GFR-binding peptide
VMSMEGIVKPTRGVMIQITINSLDQPV

SEQ ID NO: 66658 - protein, 28 aa, Artificial Sequence
  Cyclic GFR-binding peptide
VIMVQVEKIKPTKGIVKAIKVSRLDQSV

SEQ ID NO: 66659 - protein, 31 aa, Artificial Sequence
  Cyclic GFR-binding peptide
  MOD_RES (1)..(1): Xaa is C or S
XGEVVMEVQVEKVVKDYEDVKAMKVSRLETP

SEQ ID NO: 66660 - protein, 27 aa, Artificial Sequence
  Cyclic GFR-binding peptide
GEVVMENSLQEVVKDYEDYYVMPLPEL

SEQ ID NO: 66661 - protein, 37 aa, Artificial Sequence; identical to SEQ ID NO: 13602
  Cyclic GFR-binding peptide
  MOD_RES (1)..(32)..(33): Xaa is C or S

SEQ ID NO: 66662 - protein, 29 aa, Artificial Sequence
  Cyclic GFR-binding peptide
  MOD_RES (26)..(26): Xaa is C or S
VTAKKIVNSSDDIKRVQVPRLKTPAXTPK

SEQ ID NO: 66663 - protein, 43 aa, Artificial Sequence; identical to SEQ ID NO: 22991
  Cyclic GFR-binding peptide
  MOD_RES (1)..(3)..(40): Xaa is C or S

SEQ ID NO: 66664 - protein, 40 aa, Artificial Sequence; identical to SEQ ID NO: 22993
  Cyclic GFR-binding peptide
  MOD_RES (2)..(39): Xaa is C or S

SEQ ID NO: 66665 - protein, 34 aa, Artificial Sequence
  Cyclic GFR-binding peptide
  MOD_RES (1)..(33)..(34): Xaa is C or S
XGEVVMDVQVEKVVKENEDVKAMKVSRLETPVXX

SEQ ID NO: 66666 - protein, 27 aa, Artificial Sequence
  Cyclic GFR-binding peptide
VVMNNSLQEIVNSSDDYYLVTLPELQT

SEQ ID NO: 66667 - protein, 41 aa, Artificial Sequence; identical to SEQ ID NO: 13606
  Cyclic GFR-binding peptide
  MOD_RES (1)..(3)..(35): Xaa is C or S

SEQ ID NO: 66668 - protein, 35 aa, Artificial Sequence; identical to SEQ ID NO: 13609
  Cyclic GFR-binding peptide
  MOD_RES (31)..(32): Xaa is C or S

SEQ ID NO: 66669 - protein, 24 aa, Artificial Sequence
  Cyclic GFR-binding peptide
VQVEKIKPTKGIVKAIKVSRLDQS

SEQ ID NO: 66670 - protein, 31 aa, Artificial Sequence
  Cyclic GFR-binding peptide
  MOD_RES (26)..(27): Xaa is C or S
VQVEKVVKDYEDVKAMKVSRLETPVXXAKPI

SEQ ID NO: 66671 - protein, 26 aa, Artificial Sequence
  Cyclic GFR-binding peptide
MNSLQEVKPTRGVYYVIPLPELDQPV

SEQ ID NO: 66672 - protein, 40 aa, Artificial Sequence
  Cyclic GFR-binding peptide
  MOD_RES (1)..(3)..(35)..(36): Xaa is C or S
XGXGEVVMESMEGIVVKDYEDMIQMTINSLETPVXXAKPI

SEQ ID NO: 66673 - protein, 25 aa, Artificial Sequence
  Cyclic GFR-binding peptide
VQVEKIVNSSDDVKAVKVSRLKTPA

SEQ ID NO: 66674 - protein, 33 aa, Artificial Sequence; identical to SEQ ID NO: 13619
  Cyclic GFR-binding peptide
  MOD_RES (2)..(33): Xaa is C or S

SEQ ID NO: 66675 - protein, 38 aa, Artificial Sequence; identical to SEQ ID NO: 13621
  Cyclic GFR-binding peptide
  MOD_RES (2)..(34)..(35): Xaa is C or S

SEQ ID NO: 66676 - protein, 42 aa, Artificial Sequence
  Cyclic GFR-binding peptide
  MOD_RES (2)..(4)..(38): Xaa is C or S
RXEXKNHQLFNSLQEHQGQHPKIRYYLMTLPEEETPVXELGE

SEQ ID NO: 66677 - protein, 31 aa, Artificial Sequence
  Cyclic GFR-binding peptide
  MOD_RES (1)..(3): Xaa is C or S
XGXGEVVMDVTAKKVVKENEDIKRMQVPRLE

SEQ ID NO: 66678 - protein, 35 aa, Artificial Sequence
  Cyclic GFR-binding peptide
  MOD_RES (32)..(32): Xaa is C or S
SRVVMNVQVEKIVNSSDDVKAVKVSRLKTPAXTPK

SEQ ID NO: 66679 - protein, 32 aa, Artificial Sequence; identical to SEQ ID NO: 23014
  Cyclic GFR-binding peptide
  MOD_RES (2)..(2): Xaa is C or S

SEQ ID NO: 66680 - protein, 37 aa, Artificial Sequence; identical to SEQ ID NO: 23015
  Cyclic GFR-binding peptide
  MOD_RES (35)..(35): Xaa is C or S

SEQ ID NO: 66681 - protein, 29 aa, Artificial Sequence
  Cyclic GFR-binding peptide
LTNSLQEFIPKKRVIEYYVVPLPELQVQT

SEQ ID NO: 66682 - protein, 43 aa, Artificial Sequence
  Cyclic GFR-binding peptide
  MOD_RES (2)..(39): Xaa is C or S
AXELHEELRNSLQELKPKKRVYEYYVVPLPEHHVRSPQXKVSS

SEQ ID NO: 66683 - protein, 32 aa, Artificial Sequence; identical to SEQ ID NO: 23022
  Cyclic GFR-binding peptide
  MOD_RES (30)..(30): Xaa is C or S

SEQ ID NO: 66684 - protein, 33 aa, Artificial Sequence; identical to SEQ ID NO: 23023
  Cyclic GFR-binding peptide
  MOD_RES (1)..(3): Xaa is C or S

SEQ ID NO: 66685 - protein, 31 aa, Artificial Sequence
  Cyclic GFR-binding peptide
  MOD_RES (31)..(31): Xaa is C or S
RVVMNSMEGIIVNSSDDMIQVTINSLQTPAX

SEQ ID NO: 66686 - protein, 21 aa, Artificial Sequence
  Cyclic GFR-binding peptide
VTAKKVVKDYEDIKRMQVPRL

SEQ ID NO: 66687 - protein, 30 aa, Artificial Sequence; identical to SEQ ID NO: 13639
  Cyclic GFR-binding peptide
  MOD_RES (29)..(30): Xaa is C or S

SEQ ID NO: 66688 - protein, 40 aa, Artificial Sequence
  Cyclic GFR-binding peptide
  MOD_RES (2)..(4): Xaa is C or S
AXAXELHEELRNSLQELKPKKRVYEYYVVPLPEHHVRSPQ

SEQ ID NO: 66689 - protein, 27 aa, Artificial Sequence
  Cyclic GFR-binding peptide
  MOD_RES (27)..(27): Xaa is C or S
MNSLQEVKPKRGVYYLITLPELAQPVX

SEQ ID NO: 66690 - protein, 31 aa, Artificial Sequence
  Cyclic GFR-binding peptide
  MOD_RES (28)..(29): Xaa is C or S
IMVQVEKIKPTKGIVKAIKVSRLDQSVXXPS

SEQ ID NO: 66691 - protein, 28 aa, Artificial Sequence
  Cyclic GFR-binding peptide
VIMSMEGIIKPTKGIMIQITINSLDQSV

SEQ ID NO: 66692 - protein, 33 aa, Artificial Sequence
  Cyclic GFR-binding peptide
  MOD_RES (2)..(33): Xaa is C or S
KXSRVIMVTAKKVKPKRGVIKRIQVPRLAQPVX

SEQ ID NO: 66693 - protein, 35 aa, Artificial Sequence
  Cyclic GFR-binding peptide
  MOD_RES (32)..(33): Xaa is C or S
GEVVMESMEGIVVKDYEDMIQMTINSLETPVXXAK

SEQ ID NO: 66694 - protein, 27 aa, Artificial Sequence
  Cyclic GFR-binding peptide
RVVMNVQVEKIVNSSDDVKAVKVSRLK

SEQ ID NO: 66695 - protein, 32 aa, Artificial Sequence
  Cyclic GFR-binding peptide
  MOD_RES (27)..(28): Xaa is C or S
NSMEGIIVNSSDDMIQVTINSLKTPAXXPKPV

SEQ ID NO: 66696 - protein, 34 aa, Artificial Sequence; identical to SEQ ID NO: 13651
  Cyclic GFR-binding peptide
  MOD_RES (2)..(4): Xaa is C or S

SEQ ID NO: 66697 - protein, 26 aa, Artificial Sequence
  Cyclic GFR-binding peptide
MDNSLQEVVKENEDYYLMTLPELETP

SEQ ID NO: 66698 - protein, 39 aa, Artificial Sequence
  Cyclic GFR-binding peptide
  MOD_RES (35)..(35): Xaa is C or S
HDELTNSLQEFIPKKRVIEYYVVPLPELQVQTPRXQVNR

SEQ ID NO: 66699 - protein, 39 aa, Artificial Sequence
  Cyclic GFR-binding peptide
  MOD_RES (1)..(3)..(35)..(36): Xaa is C or S
XGXSRVVMNSMEGIIVNSSDDMIQVTINSLKTPAXXPKP

SEQ ID NO: 66700 - protein, 28 aa, Artificial Sequence
  Cyclic GFR-binding peptide
  MOD_RES (26)..(27): Xaa is C or S
VTAKKIKPTKGIIKRIQVPRLDQSVXXP

SEQ ID NO: 66701 - protein, 31 aa, Artificial Sequence
  Cyclic GFR-binding peptide
  MOD_RES (31)..(31): Xaa is C or S
SKVIMVTAKKIKPTKGIIKRIQVPRLDQSVX

SEQ ID NO: 66702 - protein, 34 aa, Artificial Sequence
  Cyclic GFR-binding peptide
  MOD_RES (2)..(4): Xaa is C or S
RXEXKNHQLFNSLQEHQGQHPKIRYYVMPLPEEE

SEQ ID NO: 66703 - protein, 34 aa, Artificial Sequence; identical to SEQ ID NO: 23047
  Cyclic GFR-binding peptide

SEQ ID NO: 66704 - protein, 32 aa, Artificial Sequence; identical to SEQ ID NO: 13674
  Cyclic GFR-binding peptide
  MOD_RES (28)..(29): Xaa is C or S

SEQ ID NO: 66705 - protein, 29 aa, Artificial Sequence
  Cyclic GFR-binding peptide
  MOD_RES (1)..(1): Xaa is C or S
XSRVVMNNSLQEIVNSSDDYYVVPLPELK

SEQ ID NO: 66706 - protein, 22 aa, Artificial Sequence
  Cyclic GFR-binding peptide
MSMEGIIKPTKGIMIQITINSL

SEQ ID NO: 66707 - protein, 29 aa, Artificial Sequence
  Cyclic GFR-binding peptide
  MOD_RES (28)..(29): Xaa is C or S
IMVTAKKIKPTKGIIKRIQVPRLDQSVXX

SEQ ID NO: 66708 - protein, 28 aa, Artificial Sequence
  Cyclic GFR-binding peptide
VVMESMEGIVVKDYEDMIQMTINSLETP

SEQ ID NO: 66709 - protein, 29 aa, Artificial Sequence
  Cyclic GFR-binding peptide
  MOD_RES (28)..(29): Xaa is C or S
MDSMEGIVVKENEDMIQMTINSLETPVXX

SEQ ID NO: 66710 - protein, 24 aa, Artificial Sequence
  Cyclic GFR-binding peptide
NVQVEKIVNSSDDVKAVKVSRLKT

SEQ ID NO: 66711 - protein, 39 aa, Artificial Sequence
  Cyclic GFR-binding peptide
  MOD_RES (2)..(34): Xaa is C or S
GXSRVVMNVQVEKIVNSSDDVKAVKVSRLKTPAXTPKTV

SEQ ID NO: 66712 - protein, 30 aa, Artificial Sequence
  Cyclic GFR-binding peptide
  MOD_RES (26)..(27): Xaa is C or S
VTAKKIKPTKGIIKRIQVPRLDQSVXXPSA

SEQ ID NO: 66713 - protein, 36 aa, Artificial Sequence
  Cyclic GFR-binding peptide
  MOD_RES (30)..(31): Xaa is C or S
KVVMVQVEKVKPTRGVVKAIKVSRLDQPVXXPSASA

SEQ ID NO: 66714 - protein, 38 aa, Artificial Sequence; identical to SEQ ID NO: 23061
  Cyclic GFR-binding peptide
  MOD_RES (37)..(37): Xaa is C or S

SEQ ID NO: 66715 - protein, 20 aa, Artificial Sequence
  Cyclic GFR-binding peptide
NSLQEVVKDYEDYYVMPLPE

SEQ ID NO: 66716 - protein, 40 aa, Artificial Sequence; identical to SEQ ID NO: 13688
  Cyclic GFR-binding peptide
  MOD_RES (2)..(4)..(36)..(37): Xaa is C or S

SEQ ID NO: 66717 - protein, 31 aa, Artificial Sequence
  Cyclic GFR-binding peptide
  MOD_RES (28)..(29): Xaa is C or S
MNSMEGIIVNSSDDMIQVTINSLKTPAXXPK

SEQ ID NO: 66718 - protein, 28 aa, Artificial Sequence
  Cyclic GFR-binding peptide
  MOD_RES (28)..(28): Xaa is C or S
MNVQVEKIVNSSDDVKAVKVSRLQTPAX

SEQ ID NO: 66719 - protein, 30 aa, Artificial Sequence; identical to SEQ ID NO: 13699
  Cyclic GFR-binding peptide
  MOD_RES (26)..(27): Xaa is C or S

SEQ ID NO: 66720 - protein, 39 aa, Artificial Sequence; identical to SEQ ID NO: 13700
  Cyclic GFR-binding peptide
  MOD_RES (2)..(34): Xaa is C or S

SEQ ID NO: 66721 - protein, 40 aa, Artificial Sequence; identical to SEQ ID NO: 23069
  Cyclic GFR-binding peptide
  MOD_RES (1)..(38): Xaa is C or S

SEQ ID NO: 66722 - protein, 38 aa, Artificial Sequence; identical to SEQ ID NO: 23070
  Cyclic GFR-binding peptide
  MOD_RES (34)..(34): Xaa is C or S

SEQ ID NO: 66723 - protein, 34 aa, Artificial Sequence
  Cyclic GFR-binding peptide
  MOD_RES (2)..(2): Xaa is C or S
EXKNHQLFNSLQEHQGQHPKIRYYLMTLPEEETP

SEQ ID NO: 66724 - protein, 22 aa, Artificial Sequence
  Cyclic GFR-binding peptide
SMEGIIVNSSDDMIQVTINSLK

SEQ ID NO: 66725 - protein, 34 aa, Artificial Sequence
  Cyclic GFR-binding peptide
  MOD_RES (2)..(4): Xaa is C or S
RXGXGEVVMEVTAKKVVKDYEDIKRMQVPRLETP

SEQ ID NO: 66726 - protein, 35 aa, Artificial Sequence
  Cyclic GFR-binding peptide
  MOD_RES (2)..(4): Xaa is C or S
HXGXSRVVMNVQVEKIVNSSDDVKAVKVSRLKTPA

SEQ ID NO: 66727 - protein, 32 aa, Artificial Sequence
  Cyclic GFR-binding peptide
  MOD_RES (2)..(4): Xaa is C or S
SXKXSRVIMSMEGIVKPKRGVMIQITINSLAQ

SEQ ID NO: 66728 - protein, 24 aa, Artificial Sequence
  Cyclic GFR-binding peptide
VIMNSLQEIKPTKGIYYVIPLPEL

SEQ ID NO: 66729 - protein, 23 aa, Artificial Sequence
  Cyclic GFR-binding peptide
VTAKKIKPTKGIIKRIQVPRLDQ

SEQ ID NO: 66730 - protein, 31 aa, Artificial Sequence
  Cyclic GFR-binding peptide
  MOD_RES (1)..(3): Xaa is C or S
XKXSRVIMSMEGIVKPKRGVMIQITINSLAQ

SEQ ID NO: 66731 - protein, 38 aa, Artificial Sequence; identical to SEQ ID NO: 23079
  Cyclic GFR-binding peptide
  MOD_RES (34)..(34): Xaa is C or S

SEQ ID NO: 66732 - protein, 26 aa, Artificial Sequence
  Cyclic GFR-binding peptide
EVQVEKVVKDYEDVKAMKVSRLETPV

SEQ ID NO: 66733 - protein, 33 aa, Artificial Sequence
  Cyclic GFR-binding peptide
  MOD_RES (29)..(29): Xaa is C or S
FNSLQEHQGQHPKIRYYLMTLPEEETPVXELGE

SEQ ID NO: 66734 - protein, 40 aa, Artificial Sequence; identical to SEQ ID NO: 23082
  Cyclic GFR-binding peptide
  MOD_RES (36)..(36): Xaa is C or S

SEQ ID NO: 66735 - protein, 25 aa, Artificial Sequence
  Cyclic GFR-binding peptide
DNSLQEVVKENEDYYLMTLPELETP

SEQ ID NO: 66736 - protein, 31 aa, Artificial Sequence
  Cyclic GFR-binding peptide
  MOD_RES (1)..(3): Xaa is C or S
XKXSRVIMVQVEKVKPKRGVVKAIKVSRLAQ

SEQ ID NO: 66737 - protein, 39 aa, Artificial Sequence; identical to SEQ ID NO: 13720
  Cyclic GFR-binding peptide
  MOD_RES (1)..(3)..(34)..(35): Xaa is C or S

SEQ ID NO: 66738 - protein, 38 aa, Artificial Sequence
  Cyclic GFR-binding peptide
  MOD_RES (37)..(37): Xaa is C or S
ALHDELTNSLQEFIPKKRVIEYYLVTLPELQVQTPRXQ

SEQ ID NO: 66739 - protein, 21 aa, Artificial Sequence
  Cyclic GFR-binding peptide
NSLQEIVNSSDDYYLVTLPEL

SEQ ID NO: 66740 - protein, 25 aa, Artificial Sequence
  Cyclic GFR-binding peptide
SKVIMNSLQEIKPTKGIYYLITLPE

SEQ ID NO: 66741 - protein, 37 aa, Artificial Sequence
  Cyclic GFR-binding peptide
  MOD_RES (32)..(33): Xaa is C or S
SRVVMNSMEGIIVNSSDDMIQVTINSLKTPAXXPKPV

SEQ ID NO: 66742 - protein, 35 aa, Artificial Sequence
  Cyclic GFR-binding peptide
  MOD_RES (31)..(32): Xaa is C or S
RVVMNSMEGIIVNSSDDMIQVTINSLQTPAXXPKP

SEQ ID NO: 66743 - protein, 38 aa, Artificial Sequence
  Cyclic GFR-binding peptide
  MOD_RES (2)..(2): Xaa is C or S
KXALHDELTNSLQEFIPKKRVIEYYVVPLPELQVQTPR

SEQ ID NO: 66744 - protein, 31 aa, Artificial Sequence
  Cyclic GFR-binding peptide
  MOD_RES (27)..(28): Xaa is C or S
DSMEGIVVKENEDMIQMTINSLETPVXXAKP

SEQ ID NO: 66745 - protein, 32 aa, Artificial Sequence
  Cyclic GFR-binding peptide
  MOD_RES (2)..(2): Xaa is C or S
GXGEVVMESMEGIVVKDYEDMIQMTINSLETP

SEQ ID NO: 66746 - protein, 28 aa, Artificial Sequence
  Cyclic GFR-binding peptide
GEVVMENSLQEVVKDYEDYYLMTLPELE

SEQ ID NO: 66747 - protein, 40 aa, Artificial Sequence
  Cyclic GFR-binding peptide
  MOD_RES (2)..(34)..(35): Xaa is C or S
GXGEVVMDVTAKKVVKENEDIKRMQVPRLETPVXXAKPIK

SEQ ID NO: 66748 - protein, 25 aa, Artificial Sequence
  Cyclic GFR-binding peptide
SKVVMVTAKKVKPTRGVIKRIQVPR

SEQ ID NO: 66749 - protein, 29 aa, Artificial Sequence
  Cyclic GFR-binding peptide
TNSLQEFIPKKRVIEYYVVPLPELQVQTP

SEQ ID NO: 66750 - protein, 36 aa, Artificial Sequence
  Cyclic GFR-binding peptide
  MOD_RES (30)..(31): Xaa is C or S
KVVMVTAKKVKPTRGVIKRIQVPRLDQPVXXPSASA

SEQ ID NO: 66751 - protein, 41 aa, Artificial Sequence
  Cyclic GFR-binding peptide
  MOD_RES (1)..(3)..(40): Xaa is C or S
XKXALHDELTNSLQEFIPKKRVIEYYLVTLPELQVQTPRXQ

SEQ ID NO: 66752 - protein, 25 aa, Artificial Sequence
  Cyclic GFR-binding peptide
MNVQVEKIVNSSDDVKAVKVSRLQT

SEQ ID NO: 66753 - protein, 25 aa, Artificial Sequence
  Cyclic GFR-binding peptide
NSLQEVVKDYEDYYVMPLPELETPV

SEQ ID NO: 66754 - protein, 28 aa, Artificial Sequence
  Cyclic GFR-binding peptide
  MOD_RES (1)..(3): Xaa is C or S
XKXSKVVMNSLQEVKPTRGVYYVIPLPE

SEQ ID NO: 66755 - protein, 29 aa, Artificial Sequence
  Cyclic GFR-binding peptide
  MOD_RES (1)..(3): Xaa is C or S
XKXSKVIMNSLQEIKPTKGIYYLITLPEL

SEQ ID NO: 66756 - protein, 26 aa, Artificial Sequence
  Cyclic GFR-binding peptide
LTVQVEKFIPKKRVIEVKAVKVSRLQ

SEQ ID NO: 66757 - protein, 38 aa, Artificial Sequence; identical to SEQ ID NO: 23104
  Cyclic GFR-binding peptide
  MOD_RES (1)..(3): Xaa is C or S

SEQ ID NO: 66758 - protein, 23 aa, Artificial Sequence
  Cyclic GFR-binding peptide
ENSLQEVVKDYEDYYVMPLPELE

SEQ ID NO: 66759 - protein, 23 aa, Artificial Sequence
  Cyclic GFR-binding peptide
SMEGIVKPKRGVMIQITINSLAQ

SEQ ID NO: 66760 - protein, 31 aa, Artificial Sequence; identical to SEQ ID NO: 23106
  Cyclic GFR-binding peptide

SEQ ID NO: 66761 - protein, 34 aa, Artificial Sequence; identical to SEQ ID NO: 13760
  Cyclic GFR-binding peptide
  MOD_RES (31)..(32): Xaa is C or S

SEQ ID NO: 66762 - protein, 33 aa, Artificial Sequence
  Cyclic GFR-binding peptide
  MOD_RES (1)..(33): Xaa is C or S
XARVVMNSMEGIIVNSSDDMIQVTINSLQTPAX

SEQ ID NO: 66763 - protein, 31 aa, Artificial Sequence
  Cyclic GFR-binding peptide
  MOD_RES (2)..(4): Xaa is C or S
RXGXGEVVMEVQVEKVVKDYEDVKAMKVSRL

SEQ ID NO: 66764 - protein, 31 aa, Artificial Sequence; identical to SEQ ID NO: 23117
  Cyclic GFR-binding peptide
  MOD_RES (31)..(31): Xaa is C or S

SEQ ID NO: 66765 - protein, 29 aa, Artificial Sequence
  Cyclic GFR-binding peptide
VVMENSLQEVVKDYEDYYLMTLPELETPV

SEQ ID NO: 66766 - protein, 31 aa, Artificial Sequence; identical to SEQ ID NO: 13766
  Cyclic GFR-binding peptide
  MOD_RES (31)..(31): Xaa is C or S

SEQ ID NO: 66767 - protein, 34 aa, Artificial Sequence; identical to SEQ ID NO: 13769
  Cyclic GFR-binding peptide
  MOD_RES (1)..(3): Xaa is C or S

SEQ ID NO: 66768 - protein, 27 aa, Artificial Sequence
  Cyclic GFR-binding peptide
  MOD_RES (26)..(27): Xaa is C or S
NSLQEVVKENEDYYVMPLPELETPVXX

SEQ ID NO: 66769 - protein, 31 aa, Artificial Sequence; identical to SEQ ID NO: 23119
  Cyclic GFR-binding peptide
  MOD_RES (31)..(31): Xaa is C or S

SEQ ID NO: 66770 - protein, 30 aa, Artificial Sequence
  Cyclic GFR-binding peptide
HEELRNSLQELKPKKRVYEYYLVTLPEHHV

SEQ ID NO: 66771 - protein, 44 aa, Artificial Sequence
  Cyclic GFR-binding peptide
  MOD_RES (1)..(3)..(40): Xaa is C or S
XAXELHEELRNSLQELKPKKRVYEYYVVPLPEHHVRSPQXKVSS

SEQ ID NO: 66772 - protein, 30 aa, Artificial Sequence
  Cyclic GFR-binding peptide
  MOD_RES (2)..(2): Xaa is C or S
GXGEVVMDSMEGIVVKENEDMIQMTINSLE

SEQ ID NO: 66773 - protein, 43 aa, Artificial Sequence
  Cyclic GFR-binding peptide
  MOD_RES (1)..(3)..(40): Xaa is C or S
XAXELHEELRNSLQELKPKKRVYEYYVVPLPEHHVRSPQXKVS

SEQ ID NO: 66774 - protein, 35 aa, Artificial Sequence
  Cyclic GFR-binding peptide
  MOD_RES (2)..(34)..(35): Xaa is C or S
GXGEVVMEVTAKKVVKDYEDIKRMQVPRLETPVXX

SEQ ID NO: 66775 - protein, 25 aa, Artificial Sequence
  Cyclic GFR-binding peptide
RNSLQELKPKKRVYEYYVVPLPEHH

SEQ ID NO: 66776 - protein, 33 aa, Artificial Sequence; identical to SEQ ID NO: 13778
  Cyclic GFR-binding peptide
  MOD_RES (29)..(30): Xaa is C or S

SEQ ID NO: 66777 - protein, 38 aa, Artificial Sequence; identical to SEQ ID NO: 23125
  Cyclic GFR-binding peptide
  MOD_RES (36)..(36): Xaa is C or S

SEQ ID NO: 66778 - protein, 31 aa, Artificial Sequence; identical to SEQ ID NO: 13783
  Cyclic GFR-binding peptide
  MOD_RES (26)..(27): Xaa is C or S

SEQ ID NO: 66779 - protein, 26 aa, Artificial Sequence
  Cyclic GFR-binding peptide
EVVMDNSLQEVVKENEDYYLMTLPEL

SEQ ID NO: 66780 - protein, 38 aa, Artificial Sequence; identical to SEQ ID NO: 13789
  Cyclic GFR-binding peptide
  MOD_RES (2)..(34)..(35): Xaa is C or S

SEQ ID NO: 66781 - protein, 42 aa, Artificial Sequence; identical to SEQ ID NO: 23128
  Cyclic GFR-binding peptide
  MOD_RES (2)..(39): Xaa is C or S

SEQ ID NO: 66782 - protein, 43 aa, Artificial Sequence
  Cyclic GFR-binding peptide
  MOD_RES (1)..(3)..(37): Xaa is C or S
XEXKNHQLFNSLQEHQGQHPKIRYYVMPLPEEETPVXELGEDN

SEQ ID NO: 66783 - protein, 33 aa, Artificial Sequence
  Cyclic GFR-binding peptide
  MOD_RES (2)..(2): Xaa is C or S
KXALHDELTNSLQEFIPKKRVIEYYVVPLPELQ

SEQ ID NO: 66784 - protein, 33 aa, Artificial Sequence; identical to SEQ ID NO: 23136
  Cyclic GFR-binding peptide

SEQ ID NO: 66785 - protein, 34 aa, Artificial Sequence; identical to SEQ ID NO: 13795
  Cyclic GFR-binding peptide
  MOD_RES (2)..(33)..(34): Xaa is C or S

SEQ ID NO: 66786 - protein, 34 aa, Artificial Sequence; identical to SEQ ID NO: 23140
  Cyclic GFR-binding peptide

SEQ ID NO: 66787 - protein, 30 aa, Artificial Sequence; identical to SEQ ID NO: 13806
  Cyclic GFR-binding peptide
  MOD_RES (29)..(30): Xaa is C or S

SEQ ID NO: 66788 - protein, 30 aa, Artificial Sequence; identical to SEQ ID NO: 13807
  Cyclic GFR-binding peptide
  MOD_RES (1)..(1): Xaa is C or S

SEQ ID NO: 66789 - protein, 33 aa, Artificial Sequence
  Cyclic GFR-binding peptide
  MOD_RES (29)..(30): Xaa is C or S
VIMVTAKKVKPKRGVIKRIQVPRLAQPVXXPAA

SEQ ID NO: 66790 - protein, 35 aa, Artificial Sequence
  Cyclic GFR-binding peptide
  MOD_RES (1)..(32)..(33): Xaa is C or S
XSRVIMVTAKKVKPKRGVIKRIQVPRLAQPVXXPA

SEQ ID NO: 66791 - protein, 38 aa, Artificial Sequence; identical to SEQ ID NO: 23149
  Cyclic GFR-binding peptide
  MOD_RES (37)..(37): Xaa is C or S

SEQ ID NO: 66792 - protein, 35 aa, Artificial Sequence; identical to SEQ ID NO: 13812
  Cyclic GFR-binding peptide
  MOD_RES (31)..(32): Xaa is C or S

SEQ ID NO: 66793 - protein, 38 aa, Artificial Sequence
  Cyclic GFR-binding peptide
  MOD_RES (2)..(4)..(35)..(36): Xaa is C or S
SXKXSKVVMVTAKKVKPTRGVIKRIQVPRLDQPVXXPS

SEQ ID NO: 66794 - protein, 34 aa, Artificial Sequence
  Cyclic GFR-binding peptide
  MOD_RES (1)..(33)..(34): Xaa is C or S
XARVVMNVQVEKIVNSSDDVKAVKVSRLQTPAXX

SEQ ID NO: 66795 - protein, 32 aa, Artificial Sequence; identical to SEQ ID NO: 13814
  Cyclic GFR-binding peptide
  MOD_RES (26)..(27): Xaa is C or S

SEQ ID NO: 66796 - protein, 39 aa, Artificial Sequence
  Cyclic GFR-binding peptide
  MOD_RES (2)..(4)..(36)..(37): Xaa is C or S
HXGXSRVVMNVQVEKIVNSSDDVKAVKVSRLKTPAXXPK

SEQ ID NO: 66797 - protein, 28 aa, Artificial Sequence
  Cyclic GFR-binding peptide
  MOD_RES (27)..(28): Xaa is C or S
EVQVEKVVKDYEDVKAMKVSRLETPVXX

SEQ ID NO: 66798 - protein, 28 aa, Artificial Sequence
  Cyclic GFR-binding peptide
LFNSLQEHQGQHPKIRYYLMTLPEEETP

SEQ ID NO: 66799 - protein, 32 aa, Artificial Sequence; identical to SEQ ID NO: 23151
  Cyclic GFR-binding peptide
  MOD_RES (1)..(3): Xaa is C or S

SEQ ID NO: 66800 - protein, 27 aa, Artificial Sequence
  Cyclic GFR-binding peptide
RVVMNNSLQEIVNSSDDYYLVTLPELQ

SEQ ID NO: 66801 - protein, 31 aa, Artificial Sequence
  Cyclic GFR-binding peptide
  MOD_RES (31)..(31): Xaa is C or S
RNSLQELKPKKRVYEYYLVTLPEHHVRSPQX

SEQ ID NO: 66802 - protein, 30 aa, Artificial Sequence
  Cyclic GFR-binding peptide
ARVVMNSMEGIIVNSSDDMIQVTINSLQTP

SEQ ID NO: 66803 - protein, 28 aa, Artificial Sequence
  Cyclic GFR-binding peptide
  MOD_RES (26)..(27): Xaa is C or S
VTAKKVVKENEDIKRMQVPRLETPVXXA

SEQ ID NO: 66804 - protein, 38 aa, Artificial Sequence
  Cyclic GFR-binding peptide
  MOD_RES (1)..(3)..(35)..(36): Xaa is C or S
XGXGEVVMDVQVEKVVKENEDVKAMKVSRLETPVXXAK

SEQ ID NO: 66805 - protein, 38 aa, Artificial Sequence
  Cyclic GFR-binding peptide
  MOD_RES (1)..(3)..(35)..(36): Xaa is C or S
XGXGEVVMEVQVEKVVKDYEDVKAMKVSRLETPVXXAK

SEQ ID NO: 66806 - protein, 25 aa, Artificial Sequence
  Cyclic GFR-binding peptide
MNNSLQEIVNSSDDYYVVPLPELQT

SEQ ID NO: 66807 - protein, 30 aa, Artificial Sequence; identical to SEQ ID NO: 13832
  Cyclic GFR-binding peptide
  MOD_RES (26)..(26): Xaa is C or S

SEQ ID NO: 66808 - protein, 29 aa, Artificial Sequence
  Cyclic GFR-binding peptide
  MOD_RES (28)..(29): Xaa is C or S
IMSMEGIIKPTKGIMIQITINSLDQSVXX

SEQ ID NO: 66809 - protein, 25 aa, Artificial Sequence
  Cyclic GFR-binding peptide
RVVMNNSLQEIVNSSDDYYVVPLPE

SEQ ID NO: 66810 - protein, 36 aa, Artificial Sequence
  Cyclic GFR-binding peptide
  MOD_RES (2)..(4)..(35)..(36): Xaa is C or S
SXKXSRVIMSMEGIVKPKRGVMIQITINSLAQPVXX

SEQ ID NO: 66811 - protein, 29 aa, Artificial Sequence
  Cyclic GFR-binding peptide
  MOD_RES (27)..(28): Xaa is C or S
MVQVEKVKPTRGVVKAIKVSRLDQPVXXP

SEQ ID NO: 66812 - protein, 29 aa, Artificial Sequence
  Cyclic GFR-binding peptide
RVVMNVTAKKIVNSSDDIKRVQVPRLKTP

SEQ ID NO: 66813 - protein, 29 aa, Artificial Sequence
  Cyclic GFR-binding peptide
TVQVEKFIPKKRVIEVKAVKVSRLQVQTP

SEQ ID NO: 66814 - protein, 32 aa, Artificial Sequence
  Cyclic GFR-binding peptide
  MOD_RES (1)..(3): Xaa is C or S
XGXGEVVMDVQVEKVVKENEDVKAMKVSRLET

SEQ ID NO: 66815 - protein, 35 aa, Artificial Sequence; identical to SEQ ID NO: 13838
  Cyclic GFR-binding peptide
  MOD_RES (32)..(33): Xaa is C or S

SEQ ID NO: 66816 - protein, 40 aa, Artificial Sequence; identical to SEQ ID NO: 13839
  Cyclic GFR-binding peptide
  MOD_RES (2)..(4)..(35)..(36): Xaa is C or S

SEQ ID NO: 66817 - protein, 33 aa, Artificial Sequence
  Cyclic GFR-binding peptide
  MOD_RES (1)..(3): Xaa is C or S
XAXELHEELRNSLQELKPKKRVYEYYVVPLPEH

SEQ ID NO: 66818 - protein, 26 aa, Artificial Sequence
  Cyclic GFR-binding peptide
NSLQELKPKKRVYEYYLVTLPEHHVR

SEQ ID NO: 66819 - protein, 28 aa, Artificial Sequence
  Cyclic GFR-binding peptide
  MOD_RES (28)..(28): Xaa is C or S
MDNSLQEVVKENEDYYLMTLPELETPVX

SEQ ID NO: 66820 - protein, 25 aa, Artificial Sequence
  Cyclic GFR-binding peptide
VMNVTAKKIVNSSDDIKRVQVPRLQ

SEQ ID NO: 66821 - protein, 34 aa, Artificial Sequence
  Cyclic GFR-binding peptide
  MOD_RES (2)..(2): Xaa is C or S
AXELHEELRNSLQELKPKKRVYEYYLVTLPEHHV

SEQ ID NO: 66822 - protein, 25 aa, Artificial Sequence
  Cyclic GFR-binding peptide
NSLQEIKPTKGIYYLITLPELDQSV

SEQ ID NO: 66823 - protein, 25 aa, Artificial Sequence
  Cyclic GFR-binding peptide
VMEVTAKKVVKDYEDIKRMQVPRLE

SEQ ID NO: 66824 - protein, 30 aa, Artificial Sequence; identical to SEQ ID NO: 13860
  Cyclic GFR-binding peptide
  MOD_RES (28)..(28): Xaa is C or S

SEQ ID NO: 66825 - protein, 32 aa, Artificial Sequence; identical to SEQ ID NO: 13861
  Cyclic GFR-binding peptide
  MOD_RES (27)..(28): Xaa is C or S

SEQ ID NO: 66826 - protein, 25 aa, Artificial Sequence
  Cyclic GFR-binding peptide
EVVMENSLQEVVKDYEDYYLMTLPE

SEQ ID NO: 66827 - protein, 27 aa, Artificial Sequence
  Cyclic GFR-binding peptide
  MOD_RES (1)..(1): Xaa is C or S
XARVVMNVTAKKIVNSSDDIKRVQVPR

SEQ ID NO: 66828 - protein, 36 aa, Artificial Sequence
  Cyclic GFR-binding peptide
  MOD_RES (2)..(4): Xaa is C or S
RXEXKNHQLFNSLQEHQGQHPKIRYYLMTLPEEETP

SEQ ID NO: 66829 - protein, 26 aa, Artificial Sequence
  Cyclic GFR-binding peptide
MNSLQEVKPTRGVYYLITLPELDQPV

SEQ ID NO: 66830 - protein, 27 aa, Artificial Sequence
  Cyclic GFR-binding peptide
VVMNSLQEVKPTRGVYYLITLPELDQP

SEQ ID NO: 66831 - protein, 32 aa, Artificial Sequence
  Cyclic GFR-binding peptide
  MOD_RES (28)..(28): Xaa is C or S
NSLQEHQGQHPKIRYYLMTLPEEETPVXELGE

SEQ ID NO: 66832 - protein, 36 aa, Artificial Sequence; identical to SEQ ID NO: 23191
  Cyclic GFR-binding peptide
  MOD_RES (1)..(3): Xaa is C or S

SEQ ID NO: 66833 - protein, 28 aa, Artificial Sequence
  Cyclic GFR-binding peptide
  MOD_RES (2)..(2): Xaa is C or S
KXSKVVMSMEGIVKPTRGVMIQITINSL

SEQ ID NO: 66834 - protein, 24 aa, Artificial Sequence
  Cyclic GFR-binding peptide
MVQVEKVKPKRGVVKAIKVSRLAQ

SEQ ID NO: 66835 - protein, 32 aa, Artificial Sequence; identical to SEQ ID NO: 48254
  Cyclic GFR-binding peptide
  MOD_RES (31)..(32): Xaa is C or S

SEQ ID NO: 66836 - protein, 37 aa, Artificial Sequence
  Cyclic GFR-binding peptide
  MOD_RES (31)..(32): Xaa is C or S
SKVIMVQVEKIKPTKGIVKAIKVSRLDQSVXXPSASA

SEQ ID NO: 66837 - protein, 31 aa, Artificial Sequence; identical to SEQ ID NO: 48261
  Cyclic GFR-binding peptide
  MOD_RES (31)..(31): Xaa is C or S

SEQ ID NO: 66838 - protein, 32 aa, Artificial Sequence
  Cyclic GFR-binding peptide
  MOD_RES (28)..(29): Xaa is C or S
MDVTAKKVVKENEDIKRMQVPRLETPVXXAKP

SEQ ID NO: 66839 - protein, 34 aa, Artificial Sequence; identical to SEQ ID NO: 13895
  Cyclic GFR-binding peptide
  MOD_RES (32)..(33): Xaa is C or S

SEQ ID NO: 66840 - protein, 26 aa, Artificial Sequence
  Cyclic GFR-binding peptide
NSLQEFIPKKRVIEYYVVPLPELQVQ

SEQ ID NO: 66841 - protein, 33 aa, Artificial Sequence
  Cyclic GFR-binding peptide
  MOD_RES (1)..(33): Xaa is C or S
XARVVMNVQVEKIVNSSDDVKAVKVSRLQTPAX

SEQ ID NO: 66842 - protein, 33 aa, Artificial Sequence; identical to SEQ ID NO: 23213
  Cyclic GFR-binding peptide
  MOD_RES (2)..(4): Xaa is C or S

SEQ ID NO: 66843 - protein, 30 aa, Artificial Sequence; identical to SEQ ID NO: 13905
  Cyclic GFR-binding peptide
  MOD_RES (27)..(28): Xaa is C or S

SEQ ID NO: 66844 - protein, 32 aa, Artificial Sequence
  Cyclic GFR-binding peptide
  MOD_RES (26)..(27): Xaa is C or S
VQVEKIVNSSDDVKAVKVSRLQTPAXXPKPVT

SEQ ID NO: 66845 - protein, 35 aa, Artificial Sequence
  Cyclic GFR-binding peptide
  MOD_RES (30)..(31): Xaa is C or S
RVIMVQVEKVKPKRGVVKAIKVSRLAQPVXXPAAS

SEQ ID NO: 66846 - protein, 33 aa, Artificial Sequence
  Cyclic GFR-binding peptide
  MOD_RES (32)..(32): Xaa is C or S
SRVVMNVQVEKIVNSSDDVKAVKVSRLKTPAXT

SEQ ID NO: 66847 - protein, 36 aa, Artificial Sequence
  Cyclic GFR-binding peptide
  MOD_RES (2)..(33)..(34): Xaa is C or S
KXSKVIMSMEGIIKPTKGIMIQITINSLDQSVXXPS

SEQ ID NO: 66848 - protein, 33 aa, Artificial Sequence
  Cyclic GFR-binding peptide
  MOD_RES (27)..(28): Xaa is C or S
NVTAKKIVNSSDDIKRVQVPRLQTPAXXPKPVT

SEQ ID NO: 66849 - protein, 37 aa, Artificial Sequence
  Cyclic GFR-binding peptide
  MOD_RES (31)..(31): Xaa is C or S
RVVMNVTAKKIVNSSDDIKRVQVPRLKTPAXTPKTVH

SEQ ID NO: 66850 - protein, 27 aa, Artificial Sequence
  Cyclic GFR-binding peptide
SKVIMVTAKKIKPTKGIIKRIQVPRLD

SEQ ID NO: 66851 - protein, 33 aa, Artificial Sequence
  Cyclic GFR-binding peptide
  MOD_RES (31)..(32): Xaa is C or S
EVVMDVQVEKVVKENEDVKAMKVSRLETPVXXA

SEQ ID NO: 66852 - protein, 33 aa, Artificial Sequence
  Cyclic GFR-binding peptide
  MOD_RES (31)..(32): Xaa is C or S
SRVIMVQVEKVKPKRGVVKAIKVSRLAQPVXXP

SEQ ID NO: 66853 - protein, 29 aa, Artificial Sequence
  Cyclic GFR-binding peptide
  MOD_RES (27)..(28): Xaa is C or S
ENSLQEVVKDYEDYYLMTLPELETPVXXA

SEQ ID NO: 66854 - protein, 23 aa, Artificial Sequence
  Cyclic GFR-binding peptide
SMEGIIVNSSDDMIQVTINSLKT

SEQ ID NO: 66855 - protein, 35 aa, Artificial Sequence
  Cyclic GFR-binding peptide
  MOD_RES (2)..(4): Xaa is C or S
HXGXSRVVMNSMEGIIVNSSDDMIQVTINSLKTPA

SEQ ID NO: 66856 - protein, 40 aa, Artificial Sequence; identical to SEQ ID NO: 13917
  Cyclic GFR-binding peptide
  MOD_RES (1)..(3)..(34)..(35): Xaa is C or S

SEQ ID NO: 66857 - protein, 32 aa, Artificial Sequence; identical to SEQ ID NO: 13918
  Cyclic GFR-binding peptide
  MOD_RES (27)..(28): Xaa is C or S

SEQ ID NO: 66858 - protein, 24 aa, Artificial Sequence
  Cyclic GFR-binding peptide
NSLQELKPKKRVYEYYLVTLPEHH

SEQ ID NO: 66859 - protein, 29 aa, Artificial Sequence
  Cyclic GFR-binding peptide
  MOD_RES (28)..(29): Xaa is C or S
VMNSLQEVKPTRGVYYLITLPELDQPVXX

SEQ ID NO: 66860 - protein, 33 aa, Artificial Sequence; identical to SEQ ID NO: 13919
  Cyclic GFR-binding peptide
  MOD_RES (2)..(33): Xaa is C or S

SEQ ID NO: 66861 - protein, 35 aa, Artificial Sequence; identical to SEQ ID NO: 23222
  Cyclic GFR-binding peptide
  MOD_RES (1)..(35): Xaa is C or S

SEQ ID NO: 66862 - protein, 36 aa, Artificial Sequence
  Cyclic GFR-binding peptide
  MOD_RES (35)..(35): Xaa is C or S
HEELRNSLQELKPKKRVYEYYVVPLPEHHVRSPQXK

SEQ ID NO: 66863 - protein, 29 aa, Artificial Sequence
  Cyclic GFR-binding peptide
ELRSMEGILKPKKRVYEMIQVTINSHHVR

SEQ ID NO: 66864 - protein, 31 aa, Artificial Sequence; identical to SEQ ID NO: 13920
  Cyclic GFR-binding peptide
  MOD_RES (28)..(29): Xaa is C or S

SEQ ID NO: 66865 - protein, 32 aa, Artificial Sequence; identical to SEQ ID NO: 48290
  Cyclic GFR-binding peptide
  MOD_RES (2)..(2): Xaa is C or S

SEQ ID NO: 66866 - protein, 41 aa, Artificial Sequence; identical to SEQ ID NO: 23226
  Cyclic GFR-binding peptide
  MOD_RES (1)..(3)..(40): Xaa is C or S

SEQ ID NO: 66867 - protein, 29 aa, Artificial Sequence
  Cyclic GFR-binding peptide
EVVMDSMEGIVVKENEDMIQMTINSLETP

SEQ ID NO: 66868 - protein, 37 aa, Artificial Sequence; identical to SEQ ID NO: 23228
  Cyclic GFR-binding peptide
  MOD_RES (2)..(36): Xaa is C or S

SEQ ID NO: 66869 - protein, 29 aa, Artificial Sequence
  Cyclic GFR-binding peptide
  MOD_RES (28)..(29): Xaa is C or S
MENSLQEVVKDYEDYYVMPLPELETPVXX

SEQ ID NO: 66870 - protein, 36 aa, Artificial Sequence
  Cyclic GFR-binding peptide
ALHDELTNSLQEFIPKKRVIEYYLVTLPELQVQTPR

SEQ ID NO: 66871 - protein, 32 aa, Artificial Sequence; identical to SEQ ID NO: 13941
  Cyclic GFR-binding peptide
  MOD_RES (32)..(32): Xaa is C or S

SEQ ID NO: 66872 - protein, 29 aa, Artificial Sequence
  Cyclic GFR-binding peptide
  MOD_RES (1)..(3): Xaa is C or S
XGXARVVMNNSLQEIVNSSDDYYLVTLPE

SEQ ID NO: 66873 - protein, 30 aa, Artificial Sequence; identical to SEQ ID NO: 13945
  Cyclic GFR-binding peptide
  MOD_RES (29)..(29): Xaa is C or S

SEQ ID NO: 66874 - protein, 31 aa, Artificial Sequence
  Cyclic GFR-binding peptide
SRVVMNVTAKKIVNSSDDIKRVQVPRLKTPA

SEQ ID NO: 66875 - protein, 25 aa, Artificial Sequence
  Cyclic GFR-binding peptide
IMVQVEKVKPKRGVVKAIKVSRLAQ

SEQ ID NO: 66876 - protein, 20 aa, Artificial Sequence
  Cyclic GFR-binding peptide
VQVEKVVKENEDVKAMKVSR

SEQ ID NO: 66877 - protein, 33 aa, Artificial Sequence; identical to SEQ ID NO: 23237
  Cyclic GFR-binding peptide
  MOD_RES (32)..(32): Xaa is C or S

SEQ ID NO: 66878 - protein, 30 aa, Artificial Sequence
  Cyclic GFR-binding peptide
HEELRNSLQELKPKKRVYEYYVVPLPEHHV

SEQ ID NO: 66879 - protein, 42 aa, Artificial Sequence
  Cyclic GFR-binding peptide
  MOD_RES (2)..(4)..(36)..(37): Xaa is C or S
RXGXGEVVMEVQVEKVVKDYEDVKAMKVSRLETPVXXAKPIS

SEQ ID NO: 66880 - protein, 23 aa, Artificial Sequence
  Cyclic GFR-binding peptide
VQVEKFIPKKRVIEVKAVKVSRL

SEQ ID NO: 66881 - protein, 25 aa, Artificial Sequence
  Cyclic GFR-binding peptide
MNVQVEKIVNSSDDVKAVKVSRLKT

SEQ ID NO: 66882 - protein, 41 aa, Artificial Sequence; identical to SEQ ID NO: 23247
  Cyclic GFR-binding peptide
  MOD_RES (2)..(39): Xaa is C or S

SEQ ID NO: 66883 - protein, 40 aa, Artificial Sequence
  Cyclic GFR-binding peptide
  MOD_RES (36)..(36): Xaa is C or S
LHEELRNSLQELKPKKRVYEYYVVPLPEHHVRSPQXKVSS

SEQ ID NO: 66884 - protein, 37 aa, Artificial Sequence; identical to SEQ ID NO: 13953
  Cyclic GFR-binding peptide
  MOD_RES (2)..(33)..(34): Xaa is C or S

SEQ ID NO: 66885 - protein, 41 aa, Artificial Sequence; identical to SEQ ID NO: 23249
  Cyclic GFR-binding peptide
  MOD_RES (2)..(4)..(38): Xaa is C or S

SEQ ID NO: 66886 - protein, 39 aa, Artificial Sequence
  Cyclic GFR-binding peptide
  MOD_RES (1)..(3)..(35)..(36): Xaa is C or S
XGXGEVVMDVQVEKVVKENEDVKAMKVSRLETPVXXAKP

SEQ ID NO: 66887 - protein, 28 aa, Artificial Sequence
  Cyclic GFR-binding peptide
  MOD_RES (1)..(3): Xaa is C or S
XKXSKVVMVQVEKVKPTRGVVKAIKVSR

SEQ ID NO: 66888 - protein, 32 aa, Artificial Sequence; identical to SEQ ID NO: 23250
  Cyclic GFR-binding peptide
  MOD_RES (1)..(3): Xaa is C or S

SEQ ID NO: 66889 - protein, 26 aa, Artificial Sequence
  Cyclic GFR-binding peptide
VMEVTAKKVVKDYEDIKRMQVPRLET

SEQ ID NO: 66890 - protein, 29 aa, Artificial Sequence
  Cyclic GFR-binding peptide
LHEELRSMEGILKPKKRVYEMIQVTINSH

SEQ ID NO: 66891 - protein, 36 aa, Artificial Sequence
  Cyclic GFR-binding peptide
  MOD_RES (1)..(33): Xaa is C or S
XSRVVMNVQVEKIVNSSDDVKAVKVSRLKTPAXTPK

SEQ ID NO: 66892 - protein, 39 aa, Artificial Sequence
  Cyclic GFR-binding peptide
  MOD_RES (2)..(39): Xaa is C or S
AXELHEELRNSLQELKPKKRVYEYYVVPLPEHHVRSPQX

SEQ ID NO: 66893 - protein, 30 aa, Artificial Sequence; identical to SEQ ID NO: 48324
  Cyclic GFR-binding peptide
  MOD_RES (1)..(1): Xaa is C or S

SEQ ID NO: 66894 - protein, 29 aa, Artificial Sequence
  Cyclic GFR-binding peptide
KVIMNSLQEIKPTKGIYYVIPLPELDQSV

SEQ ID NO: 66895 - protein, 31 aa, Artificial Sequence; identical to SEQ ID NO: 13976
  Cyclic GFR-binding peptide
  MOD_RES (28)..(29): Xaa is C or S

SEQ ID NO: 66896 - protein, 38 aa, Artificial Sequence; identical to SEQ ID NO: 13979
  Cyclic GFR-binding peptide
  MOD_RES (2)..(4)..(36)..(37): Xaa is C or S

SEQ ID NO: 66897 - protein, 28 aa, Artificial Sequence
  Cyclic GFR-binding peptide
  MOD_RES (28)..(28): Xaa is C or S
IMNSLQEIKPTKGIYYLITLPELDQSVX

SEQ ID NO: 66898 - protein, 27 aa, Artificial Sequence
  Cyclic GFR-binding peptide
EVVMDNSLQEVVKENEDYYVMPLPELE

SEQ ID NO: 66899 - protein, 29 aa, Artificial Sequence
  Cyclic GFR-binding peptide
SKVVMVTAKKVKPTRGVIKRIQVPRLDQP

SEQ ID NO: 66900 - protein, 28 aa, Artificial Sequence
  Cyclic GFR-binding peptide
VMDVQVEKVVKENEDVKAMKVSRLETPV

SEQ ID NO: 66901 - protein, 24 aa, Artificial Sequence
  Cyclic GFR-binding peptide
NSLQEVKPTRGVYYLITLPELDQP

SEQ ID NO: 66902 - protein, 29 aa, Artificial Sequence
  Cyclic GFR-binding peptide
DELTVQVEKFIPKKRVIEVKAVKVSRLQV

SEQ ID NO: 66903 - protein, 27 aa, Artificial Sequence
  Cyclic GFR-binding peptide
  MOD_RES (26)..(27): Xaa is C or S
VQVEKIKPTKGIVKAIKVSRLDQSVXX

SEQ ID NO: 66904 - protein, 28 aa, Artificial Sequence
  Cyclic GFR-binding peptide
  MOD_RES (28)..(28): Xaa is C or S
MEVQVEKVVKDYEDVKAMKVSRLETPVX

SEQ ID NO: 66905 - protein, 26 aa, Artificial Sequence
  Cyclic GFR-binding peptide
  MOD_RES (26)..(26): Xaa is C or S
NSLQEVKPTRGVYYLITLPELDQPVX

SEQ ID NO: 66906 - protein, 28 aa, Artificial Sequence
  Cyclic GFR-binding peptide
  MOD_RES (28)..(28): Xaa is C or S
VMSMEGIVKPTRGVMIQITINSLDQPVX

SEQ ID NO: 66907 - protein, 31 aa, Artificial Sequence; identical to SEQ ID NO: 23281
  Cyclic GFR-binding peptide

SEQ ID NO: 66908 - protein, 29 aa, Artificial Sequence
  Cyclic GFR-binding peptide
  MOD_RES (29)..(29): Xaa is C or S
FNSLQEHQGQHPKIRYYLMTLPEEETPVX

SEQ ID NO: 66909 - protein, 28 aa, Artificial Sequence
  Cyclic GFR-binding peptide
VVMDNSLQEVVKENEDYYLMTLPELETP

SEQ ID NO: 66910 - protein, 32 aa, Artificial Sequence; identical to SEQ ID NO: 14011
  Cyclic GFR-binding peptide
  MOD_RES (2)..(2): Xaa is C or S

SEQ ID NO: 66911 - protein, 25 aa, Artificial Sequence
  Cyclic GFR-binding peptide
VVMDSMEGIVVKENEDMIQMTINSL

SEQ ID NO: 66912 - protein, 31 aa, Artificial Sequence
  Cyclic GFR-binding peptide
  MOD_RES (30)..(31): Xaa is C or S
KVIMVTAKKIKPTKGIIKRIQVPRLDQSVXX

SEQ ID NO: 66913 - protein, 21 aa, Artificial Sequence
  Cyclic GFR-binding peptide
SMEGIVKPKRGVMIQITINSL

SEQ ID NO: 66914 - protein, 34 aa, Artificial Sequence
  Cyclic GFR-binding peptide
  MOD_RES (1)..(33)..(34): Xaa is C or S
XARVVMNSMEGIIVNSSDDMIQVTINSLQTPAXX

SEQ ID NO: 66915 - protein, 24 aa, Artificial Sequence
  Cyclic GFR-binding peptide
NSLQEVVKENEDYYVMPLPELETP

SEQ ID NO: 66916 - protein, 33 aa, Artificial Sequence
  Cyclic GFR-binding peptide
  MOD_RES (27)..(28): Xaa is C or S
MVQVEKVKPTRGVVKAIKVSRLDQPVXXPSASA

SEQ ID NO: 66917 - protein, 32 aa, Artificial Sequence; identical to SEQ ID NO: 23295
  Cyclic GFR-binding peptide
  MOD_RES (30)..(30): Xaa is C or S

SEQ ID NO: 66918 - protein, 30 aa, Artificial Sequence
  Cyclic GFR-binding peptide
  MOD_RES (28)..(29): Xaa is C or S
IMSMEGIVKPKRGVMIQITINSLAQPVXXP

SEQ ID NO: 66919 - protein, 23 aa, Artificial Sequence
  Cyclic GFR-binding peptide
VQVEKHQGQHPKIRVKAMKVSRE

SEQ ID NO: 66920 - protein, 35 aa, Artificial Sequence
  Cyclic GFR-binding peptide
  MOD_RES (2)..(34): Xaa is C or S
GXSRVVMNVQVEKIVNSSDDVKAVKVSRLKTPAXT

SEQ ID NO: 66921 - protein, 39 aa, Artificial Sequence
  Cyclic GFR-binding peptide
  MOD_RES (1)..(3)..(35)..(36): Xaa is C or S
XGXGEVVMEVQVEKVVKDYEDVKAMKVSRLETPVXXAKP

SEQ ID NO: 66922 - protein, 28 aa, Artificial Sequence
  Cyclic GFR-binding peptide
  MOD_RES (1)..(3): Xaa is C or S
XKXSRVIMSMEGIVKPKRGVMIQITINS

SEQ ID NO: 66923 - protein, 27 aa, Artificial Sequence
  Cyclic GFR-binding peptide
HEELRSMEGILKPKKRVYEMIQVTINS

SEQ ID NO: 66924 - protein, 42 aa, Artificial Sequence; identical to SEQ ID NO: 23305
  Cyclic GFR-binding peptide
  MOD_RES (2)..(4)..(41): Xaa is C or S

SEQ ID NO: 66925 - protein, 24 aa, Artificial Sequence
  Cyclic GFR-binding peptide
IMNSLQEIKPTKGIYYLITLPELD

SEQ ID NO: 66926 - protein, 30 aa, Artificial Sequence; identical to SEQ ID NO: 23306
  Cyclic GFR-binding peptide

SEQ ID NO: 66927 - protein, 35 aa, Artificial Sequence
  Cyclic GFR-binding peptide
  MOD_RES (29)..(30): Xaa is C or S
VMEVQVEKVVKDYEDVKAMKVSRLETPVXXAKPIS

SEQ ID NO: 66928 - protein, 22 aa, Artificial Sequence
  Cyclic GFR-binding peptide
MENSLQEVVKDYEDYYLMTLPE

SEQ ID NO: 66929 - protein, 34 aa, Artificial Sequence; identical to SEQ ID NO: 23309
  Cyclic GFR-binding peptide
  MOD_RES (1)..(1): Xaa is C or S

SEQ ID NO: 66930 - protein, 39 aa, Artificial Sequence
  Cyclic GFR-binding peptide
  MOD_RES (2)..(34): Xaa is C or S
GXSRVVMNVTAKKIVNSSDDIKRVQVPRLKTPAXTPKTV

SEQ ID NO: 66931 - protein, 30 aa, Artificial Sequence; identical to SEQ ID NO: 23311
  Cyclic GFR-binding peptide
  MOD_RES (30)..(30): Xaa is C or S

SEQ ID NO: 66932 - protein, 35 aa, Artificial Sequence; identical to SEQ ID NO: 14038
  Cyclic GFR-binding peptide
  MOD_RES (30)..(31): Xaa is C or S

SEQ ID NO: 66933 - protein, 27 aa, Artificial Sequence
  Cyclic GFR-binding peptide
  MOD_RES (26)..(27): Xaa is C or S
VQVEKIVNSSDDVKAVKVSRLQTPAXX

SEQ ID NO: 66934 - protein, 28 aa, Artificial Sequence
  Cyclic GFR-binding peptide
  MOD_RES (1)..(1): Xaa is C or S
XARVVMNNSLQEIVNSSDDYYVVPLPEL

SEQ ID NO: 66935 - protein, 27 aa, Artificial Sequence
  Cyclic GFR-binding peptide
  MOD_RES (27)..(27): Xaa is C or S
EVQVEKVVKDYEDVKAMKVSRLETPVX

SEQ ID NO: 66936 - protein, 38 aa, Artificial Sequence
  Cyclic GFR-binding peptide
  MOD_RES (2)..(4)..(36)..(37): Xaa is C or S
RXGXGEVVMEVTAKKVVKDYEDIKRMQVPRLETPVXXA

SEQ ID NO: 66937 - protein, 34 aa, Artificial Sequence
  Cyclic GFR-binding peptide
  MOD_RES (2)..(4): Xaa is C or S
SXKXSKVVMVQVEKVKPTRGVVKAIKVSRLDQPV

SEQ ID NO: 66938 - protein, 27 aa, Artificial Sequence
  Cyclic GFR-binding peptide
MDSMEGIVVKENEDMIQMTINSLETPV

SEQ ID NO: 66939 - protein, 35 aa, Artificial Sequence; identical to SEQ ID NO: 14049
  Cyclic GFR-binding peptide
  MOD_RES (2)..(34): Xaa is C or S

SEQ ID NO: 66940 - protein, 31 aa, Artificial Sequence
  Cyclic GFR-binding peptide
  MOD_RES (30)..(30): Xaa is C or S
VVMNSMEGIIVNSSDDMIQVTINSLKTPAXT

SEQ ID NO: 66941 - protein, 39 aa, Artificial Sequence
  Cyclic GFR-binding peptide
  MOD_RES (2)..(33)..(34): Xaa is C or S
KXSKVIMVTAKKIKPTKGIIKRIQVPRLDQSVXXPSASA

SEQ ID NO: 66942 - protein, 29 aa, Artificial Sequence
  Cyclic GFR-binding peptide
HEELRVTAKKLKPKKRVYEIKRVQVPRHH

SEQ ID NO: 66943 - protein, 27 aa, Artificial Sequence
  Cyclic GFR-binding peptide
  MOD_RES (26)..(27): Xaa is C or S
VTAKKIKPTKGIIKRIQVPRLDQSVXX

SEQ ID NO: 66944 - protein, 30 aa, Artificial Sequence
  Cyclic GFR-binding peptide
  MOD_RES (2)..(4): Xaa is C or S
SXKXSKVVMVTAKKVKPTRGVIKRIQVPRL

SEQ ID NO: 66945 - protein, 28 aa, Artificial Sequence
  Cyclic GFR-binding peptide
  MOD_RES (28)..(28): Xaa is C or S
IMSMEGIVKPKRGVMIQITINSLAQPVX

SEQ ID NO: 66946 - protein, 32 aa, Artificial Sequence
  Cyclic GFR-binding peptide
  MOD_RES (29)..(29): Xaa is C or S
VMNVQVEKIVNSSDDVKAVKVSRLKTPAXTPK

SEQ ID NO: 66947 - protein, 24 aa, Artificial Sequence
  Cyclic GFR-binding peptide
VTAKKVKPTRGVIKRIQVPRLDQP

SEQ ID NO: 66948 - protein, 26 aa, Artificial Sequence
  Cyclic GFR-binding peptide
SKVVMNSLQEVKPTRGVYYLITLPEL

SEQ ID NO: 66949 - protein, 29 aa, Artificial Sequence
  Cyclic GFR-binding peptide
SKVIMSMEGIIKPTKGIMIQITINSLDQS

SEQ ID NO: 66950 - protein, 24 aa, Artificial Sequence
  Cyclic GFR-binding peptide
NVQVEKIVNSSDDVKAVKVSRLQT

SEQ ID NO: 66951 - protein, 31 aa, Artificial Sequence; identical to SEQ ID NO: 14065
  Cyclic GFR-binding peptide
  MOD_RES (27)..(28): Xaa is C or S

SEQ ID NO: 66952 - protein, 36 aa, Artificial Sequence; identical to SEQ ID NO: 14069
  Cyclic GFR-binding peptide
  MOD_RES (31)..(31): Xaa is C or S

SEQ ID NO: 66953 - protein, 32 aa, Artificial Sequence; identical to SEQ ID NO: 14070
  Cyclic GFR-binding peptide
  MOD_RES (27)..(28): Xaa is C or S

SEQ ID NO: 66954 - protein, 26 aa, Artificial Sequence
  Cyclic GFR-binding peptide
  MOD_RES (26)..(26): Xaa is C or S
NSLQEVVKDYEDYYLMTLPELETPVX

SEQ ID NO: 66955 - protein, 26 aa, Artificial Sequence
  Cyclic GFR-binding peptide
IMVTAKKVKPKRGVIKRIQVPRLAQP

SEQ ID NO: 66956 - protein, 30 aa, Artificial Sequence; identical to SEQ ID NO: 21382
  Cyclic GFR-binding peptide

SEQ ID NO: 66957 - protein, 34 aa, Artificial Sequence
  Cyclic GFR-binding peptide
  MOD_RES (30)..(31): Xaa is C or S
VVMEVTAKKVVKDYEDIKRMQVPRLETPVXXAKP

SEQ ID NO: 66958 - protein, 34 aa, Artificial Sequence; identical to SEQ ID NO: 14077
  Cyclic GFR-binding peptide
  MOD_RES (28)..(29): Xaa is C or S

SEQ ID NO: 66959 - protein, 34 aa, Artificial Sequence; identical to SEQ ID NO: 14080
  Cyclic GFR-binding peptide
  MOD_RES (32)..(33): Xaa is C or S

SEQ ID NO: 66960 - protein, 32 aa, Artificial Sequence
  Cyclic GFR-binding peptide
  MOD_RES (1)..(32): Xaa is C or S
XSKVIMSMEGIIKPTKGIMIQITINSLDQSVX

SEQ ID NO: 66961 - protein, 25 aa, Artificial Sequence
  Cyclic GFR-binding peptide
SMEGIIVNSSDDMIQVTINSLQTPA

SEQ ID NO: 66962 - protein, 32 aa, Artificial Sequence
  Cyclic GFR-binding peptide
  MOD_RES (1)..(1): Xaa is C or S
XGEVVMDVTAKKVVKENEDIKRMQVPRLETPV

SEQ ID NO: 66963 - protein, 31 aa, Artificial Sequence; identical to SEQ ID NO: 21391
  Cyclic GFR-binding peptide
  MOD_RES (31)..(31): Xaa is C or S

SEQ ID NO: 66964 - protein, 26 aa, Artificial Sequence
  Cyclic GFR-binding peptide
VQVEKFIPKKRVIEVKAVKVSRLQVQ

SEQ ID NO: 66965 - protein, 27 aa, Artificial Sequence
  Cyclic GFR-binding peptide
RVIMNSLQEVKPKRGVYYLITLPELAQ

SEQ ID NO: 66966 - protein, 32 aa, Artificial Sequence
  Cyclic GFR-binding peptide
  MOD_RES (26)..(27): Xaa is C or S
VTAKKIVNSSDDIKRVQVPRLKTPAXXPKPVY

SEQ ID NO: 66967 - protein, 38 aa, Artificial Sequence; identical to SEQ ID NO: 14100
  Cyclic GFR-binding peptide
  MOD_RES (2)..(34)..(35): Xaa is C or S

SEQ ID NO: 66968 - protein, 34 aa, Artificial Sequence
  Cyclic GFR-binding peptide
  MOD_RES (30)..(31): Xaa is C or S
KVIMVQVEKIKPTKGIVKAIKVSRLDQSVXXPSA

SEQ ID NO: 66969 - protein, 33 aa, Artificial Sequence
  Cyclic GFR-binding peptide
  MOD_RES (27)..(28): Xaa is C or S
EVTAKKVVKDYEDIKRMQVPRLETPVXXAKPIS

SEQ ID NO: 66970 - protein, 34 aa, Artificial Sequence
  Cyclic GFR-binding peptide
  MOD_RES (1)..(33)..(34): Xaa is C or S
XGEVVMEVTAKKVVKDYEDIKRMQVPRLETPVXX

SEQ ID NO: 66971 - protein, 36 aa, Artificial Sequence
  Cyclic GFR-binding peptide
  MOD_RES (35)..(35): Xaa is C or S
HDELTNSLQEFIPKKRVIEYYVVPLPELQVQTPRXQ

SEQ ID NO: 66972 - protein, 24 aa, Artificial Sequence
  Cyclic GFR-binding peptide
VVMDSMEGIVVKENEDMIQMTINS

SEQ ID NO: 66973 - protein, 37 aa, Artificial Sequence; identical to SEQ ID NO: 21402
  Cyclic GFR-binding peptide
  MOD_RES (37)..(37): Xaa is C or S

SEQ ID NO: 66974 - protein, 34 aa, Artificial Sequence
  Cyclic GFR-binding peptide
  MOD_RES (2)..(4): Xaa is C or S
RXGXGEVVMDSMEGIVVKENEDMIQMTINSLETP

SEQ ID NO: 66975 - protein, 25 aa, Artificial Sequence
  Cyclic GFR-binding peptide
MVQVEKVKPKRGVVKAIKVSRLAQP

SEQ ID NO: 66976 - protein, 26 aa, Artificial Sequence
  Cyclic GFR-binding peptide
RVIMVQVEKVKPKRGVVKAIKVSRLA

SEQ ID NO: 66977 - protein, 35 aa, Artificial Sequence; identical to SEQ ID NO: 14116
  Cyclic GFR-binding peptide
  MOD_RES (1)..(33)..(34): Xaa is C or S

SEQ ID NO: 66978 - protein, 21 aa, Artificial Sequence
  Cyclic GFR-binding peptide
MVQVEKVKPTRGVVKAIKVSR

SEQ ID NO: 66979 - protein, 25 aa, Artificial Sequence
  Cyclic GFR-binding peptide
TNSLQEFIPKKRVIEYYVVPLPELQ

SEQ ID NO: 66980 - protein, 45 aa, Artificial Sequence; identical to SEQ ID NO: 21404
  Cyclic GFR-binding peptide
  MOD_RES (2)..(4)..(41): Xaa is C or S

SEQ ID NO: 66981 - protein, 33 aa, Artificial Sequence; identical to SEQ ID NO: 14118
  Cyclic GFR-binding peptide
  MOD_RES (30)..(31): Xaa is C or S

SEQ ID NO: 66982 - protein, 37 aa, Artificial Sequence; identical to SEQ ID NO: 14119
  Cyclic GFR-binding peptide
  MOD_RES (31)..(32): Xaa is C or S

SEQ ID NO: 66983 - protein, 34 aa, Artificial Sequence; identical to SEQ ID NO: 21406
  Cyclic GFR-binding peptide

SEQ ID NO: 66984 - protein, 37 aa, Artificial Sequence
  Cyclic GFR-binding peptide
  MOD_RES (1)..(3): Xaa is C or S
XKXALHDELTNSLQEFIPKKRVIEYYLVTLPELQVQT

SEQ ID NO: 66985 - protein, 27 aa, Artificial Sequence
  Cyclic GFR-binding peptide
  MOD_RES (27)..(27): Xaa is C or S
MNSLQEVKPTRGVYYVIPLPELDQPVX

SEQ ID NO: 66986 - protein, 28 aa, Artificial Sequence
  Cyclic GFR-binding peptide
  MOD_RES (2)..(2): Xaa is C or S
GXARVVMNNSLQEIVNSSDDYYVVPLPE

SEQ ID NO: 66987 - protein, 25 aa, Artificial Sequence
  Cyclic GFR-binding peptide
IMSMEGIIKPTKGIMIQITINSLDQ

SEQ ID NO: 66988 - protein, 38 aa, Artificial Sequence; identical to SEQ ID NO: 14136
  Cyclic GFR-binding peptide
  MOD_RES (2)..(34)..(35): Xaa is C or S

SEQ ID NO: 66989 - protein, 28 aa, Artificial Sequence
  Cyclic GFR-binding peptide
SKVVMNSLQEVKPTRGVYYVIPLPELDQ

SEQ ID NO: 66990 - protein, 42 aa, Artificial Sequence
  Cyclic GFR-binding peptide
  MOD_RES (2)..(4)..(36): Xaa is C or S
HXGXSRVVMNVTAKKIVNSSDDIKRVQVPRLKTPAXTPKTVH

SEQ ID NO: 66991 - protein, 32 aa, Artificial Sequence; identical to SEQ ID NO: 21416
  Cyclic GFR-binding peptide
  MOD_RES (32)..(32): Xaa is C or S

SEQ ID NO: 66992 - protein, 30 aa, Artificial Sequence; identical to SEQ ID NO: 14143
  Cyclic GFR-binding peptide
  MOD_RES (30)..(30): Xaa is C or S

SEQ ID NO: 66993 - protein, 36 aa, Artificial Sequence; identical to SEQ ID NO: 14144
  Cyclic GFR-binding peptide
  MOD_RES (2)..(33)..(34): Xaa is C or S

SEQ ID NO: 66994 - protein, 30 aa, Artificial Sequence; identical to SEQ ID NO: 21417
  Cyclic GFR-binding peptide

SEQ ID NO: 66995 - protein, 23 aa, Artificial Sequence
  Cyclic GFR-binding peptide
IMVQVEKVKPKRGVVKAIKVSRL

SEQ ID NO: 66996 - protein, 40 aa, Artificial Sequence
  Cyclic GFR-binding peptide
  MOD_RES (2)..(34)..(35): Xaa is C or S
GXGEVVMESMEGIVVKDYEDMIQMTINSLETPVXXAKPIS

SEQ ID NO: 66997 - protein, 40 aa, Artificial Sequence; identical to SEQ ID NO: 14153
  Cyclic GFR-binding peptide
  MOD_RES (2)..(4)..(36)..(37): Xaa is C or S

SEQ ID NO: 66998 - protein, 30 aa, Artificial Sequence
  Cyclic GFR-binding peptide
  MOD_RES (29)..(30): Xaa is C or S
VMNSMEGIIVNSSDDMIQVTINSLKTPAXX

SEQ ID NO: 66999 - protein, 27 aa, Artificial Sequence
  Cyclic GFR-binding peptide
VMVQVEKVKPTRGVVKAIKVSRLDQPV

SEQ ID NO: 67000 - protein, 31 aa, Artificial Sequence
  Cyclic GFR-binding peptide
  MOD_RES (1)..(1): Xaa is C or S
XELHEELRNSLQELKPKKRVYEYYVVPLPEH

SEQ ID NO: 67001 - protein, 40 aa, Artificial Sequence
  Cyclic GFR-binding peptide
  MOD_RES (1)..(38): Xaa is C or S
XALHDELTNSLQEFIPKKRVIEYYLVTLPELQVQTPRXQV

SEQ ID NO: 67002 - protein, 38 aa, Artificial Sequence
  Cyclic GFR-binding peptide
  MOD_RES (32)..(33): Xaa is C or S
ARVVMNSMEGIIVNSSDDMIQVTINSLQTPAXXPKPVT

SEQ ID NO: 67003 - protein, 33 aa, Artificial Sequence
  Cyclic GFR-binding peptide
  MOD_RES (2)..(33): Xaa is C or S
KXSKVVMSMEGIVKPTRGVMIQITINSLDQPVX

SEQ ID NO: 67004 - protein, 38 aa, Artificial Sequence
  Cyclic GFR-binding peptide
  MOD_RES (1)..(3)..(35): Xaa is C or S
XGXSRVVMNVQVEKIVNSSDDVKAVKVSRLKTPAXTPK

SEQ ID NO: 67005 - protein, 28 aa, Artificial Sequence
  Cyclic GFR-binding peptide
  MOD_RES (2)..(2): Xaa is C or S
GXARVVMNVQVEKIVNSSDDVKAVKVSR

SEQ ID NO: 67006 - protein, 37 aa, Artificial Sequence; identical to SEQ ID NO: 14164
  Cyclic GFR-binding peptide
  MOD_RES (2)..(34)..(35): Xaa is C or S

SEQ ID NO: 67007 - protein, 42 aa, Artificial Sequence; identical to SEQ ID NO: 14166
  Cyclic GFR-binding peptide
  MOD_RES (2)..(4)..(36)..(37): Xaa is C or S

SEQ ID NO: 67008 - protein, 33 aa, Artificial Sequence
  Cyclic GFR-binding peptide
  MOD_RES (2)..(4): Xaa is C or S
AXAXELHEELRNSLQELKPKKRVYEYYVVPLPE

SEQ ID NO: 67009 - protein, 35 aa, Artificial Sequence; identical to SEQ ID NO: 21434
  Cyclic GFR-binding peptide
  MOD_RES (35)..(35): Xaa is C or S

SEQ ID NO: 67010 - protein, 30 aa, Artificial Sequence
  Cyclic GFR-binding peptide
  MOD_RES (30)..(30): Xaa is C or S
RVIMSMEGIVKPKRGVMIQITINSLAQPVX

SEQ ID NO: 67011 - protein, 40 aa, Artificial Sequence; identical to SEQ ID NO: 14167
  Cyclic GFR-binding peptide
  MOD_RES (2)..(4)..(35)..(36): Xaa is C or S

SEQ ID NO: 67012 - protein, 34 aa, Artificial Sequence
  Cyclic GFR-binding peptide
  MOD_RES (31)..(32): Xaa is C or S
RVVMNVTAKKIVNSSDDIKRVQVPRLKTPAXXPK

SEQ ID NO: 67013 - protein, 28 aa, Artificial Sequence
  Cyclic GFR-binding peptide
  MOD_RES (27)..(28): Xaa is C or S
MVTAKKIKPTKGIIKRIQVPRLDQSVXX

SEQ ID NO: 67014 - protein, 31 aa, Artificial Sequence; identical to SEQ ID NO: 21444
  Cyclic GFR-binding peptide

SEQ ID NO: 67015 - protein, 36 aa, Artificial Sequence
  Cyclic GFR-binding peptide
  MOD_RES (2)..(4)..(35)..(36): Xaa is C or S
SXKXSKVVMSMEGIVKPTRGVMIQITINSLDQPVXX

SEQ ID NO: 67016 - protein, 33 aa, Artificial Sequence
  Cyclic GFR-binding peptide
  MOD_RES (29)..(30): Xaa is C or S
VIMVQVEKVKPKRGVVKAIKVSRLAQPVXXPAA

SEQ ID NO: 67017 - protein, 26 aa, Artificial Sequence
  Cyclic GFR-binding peptide
SMEGIFIPKKRVIEMIQVTINSLQVQ

SEQ ID NO: 67018 - protein, 26 aa, Artificial Sequence
  Cyclic GFR-binding peptide
  MOD_RES (26)..(26): Xaa is C or S
VTAKKIVNSSDDIKRVQVPRLQTPAX

SEQ ID NO: 67019 - protein, 32 aa, Artificial Sequence
  Cyclic GFR-binding peptide
  MOD_RES (28)..(29): Xaa is C or S
MEVQVEKVVKDYEDVKAMKVSRLETPVXXAKP

SEQ ID NO: 67020 - protein, 33 aa, Artificial Sequence
  Cyclic GFR-binding peptide
  MOD_RES (2)..(2): Xaa is C or S
GXGEVVMEVTAKKVVKDYEDIKRMQVPRLETPV

SEQ ID NO: 67021 - protein, 43 aa, Artificial Sequence
  Cyclic GFR-binding peptide
  MOD_RES (1)..(3)..(40): Xaa is C or S
XAXELHEELRNSLQELKPKKRVYEYYLVTLPEHHVRSPQXKVS

SEQ ID NO: 67022 - protein, 32 aa, Artificial Sequence
  Cyclic GFR-binding peptide
  MOD_RES (27)..(28): Xaa is C or S
DVTAKKVVKENEDIKRMQVPRLETPVXXAKPI

SEQ ID NO: 67023 - protein, 35 aa, Artificial Sequence
  Cyclic GFR-binding peptide
  MOD_RES (1)..(3): Xaa is C or S
XEXKNHQLFNSLQEHQGQHPKIRYYVMPLPEEETP

SEQ ID NO: 67024 - protein, 29 aa, Artificial Sequence
  Cyclic GFR-binding peptide
ALHDELTVQVEKFIPKKRVIEVKAVKVSR

SEQ ID NO: 67025 - protein, 25 aa, Artificial Sequence
  Cyclic GFR-binding peptide
MDVQVEKVVKENEDVKAMKVSRLET

SEQ ID NO: 67026 - protein, 39 aa, Artificial Sequence; identical to SEQ ID NO: 14185
  Cyclic GFR-binding peptide
  MOD_RES (2)..(34)..(35): Xaa is C or S

SEQ ID NO: 67027 - protein, 36 aa, Artificial Sequence
  Cyclic GFR-binding peptide
  MOD_RES (2)..(34)..(35): Xaa is C or S
GXARVVMNSMEGIIVNSSDDMIQVTINSLQTPAXXP

SEQ ID NO: 67028 - protein, 31 aa, Artificial Sequence; identical to SEQ ID NO: 21457
  Cyclic GFR-binding peptide
  MOD_RES (30)..(30): Xaa is C or S

SEQ ID NO: 67029 - protein, 34 aa, Artificial Sequence
  Cyclic GFR-binding peptide
  MOD_RES (2)..(4): Xaa is C or S
HXGXARVVMNSMEGIIVNSSDDMIQVTINSLQTP

SEQ ID NO: 67030 - protein, 28 aa, Artificial Sequence
  Cyclic GFR-binding peptide
  MOD_RES (26)..(27): Xaa is C or S
VQVEKIVNSSDDVKAVKVSRLKTPAXXP

SEQ ID NO: 67031 - protein, 22 aa, Artificial Sequence
  Cyclic GFR-binding peptide
IMVQVEKIKPTKGIVKAIKVSR

SEQ ID NO: 67032 - protein, 34 aa, Artificial Sequence
  Cyclic GFR-binding peptide
  MOD_RES (33)..(33): Xaa is C or S
NHQLFNSLQEHQGQHPKIRYYLMTLPEEETPVXE

SEQ ID NO: 67033 - protein, 30 aa, Artificial Sequence
  Cyclic GFR-binding peptide
  MOD_RES (1)..(3): Xaa is C or S
XGXGEVVMDSMEGIVVKENEDMIQMTINSL

SEQ ID NO: 67034 - protein, 26 aa, Artificial Sequence
  Cyclic GFR-binding peptide
GEVVMDSMEGIVVKENEDMIQMTINS

SEQ ID NO: 67035 - protein, 30 aa, Artificial Sequence
  Cyclic GFR-binding peptide
  MOD_RES (27)..(28): Xaa is C or S
EVTAKKVVKDYEDIKRMQVPRLETPVXXAK

SEQ ID NO: 67036 - protein, 34 aa, Artificial Sequence
  Cyclic GFR-binding peptide
  MOD_RES (28)..(29): Xaa is C or S
IMVTAKKIKPTKGIIKRIQVPRLDQSVXXPSASA

SEQ ID NO: 67037 - protein, 42 aa, Artificial Sequence
  Cyclic GFR-binding peptide
  MOD_RES (2)..(4)..(36)..(37): Xaa is C or S
RXGXGEVVMDSMEGIVVKENEDMIQMTINSLETPVXXAKPIK

SEQ ID NO: 67038 - protein, 39 aa, Artificial Sequence
  Cyclic GFR-binding peptide
  MOD_RES (36)..(36): Xaa is C or S
LHEELRNSLQELKPKKRVYEYYVVPLPEHHVRSPQXKVS

SEQ ID NO: 67039 - protein, 30 aa, Artificial Sequence; identical to SEQ ID NO: 14202
  Cyclic GFR-binding peptide
  MOD_RES (28)..(29): Xaa is C or S

SEQ ID NO: 67040 - protein, 26 aa, Artificial Sequence
  Cyclic GFR-binding peptide
SMEGILKPKKRVYEMIQVTINSHHVR

SEQ ID NO: 67041 - protein, 36 aa, Artificial Sequence
  Cyclic GFR-binding peptide
  MOD_RES (1)..(33)..(34): Xaa is C or S
XARVVMNSMEGIIVNSSDDMIQVTINSLQTPAXXPK

SEQ ID NO: 67042 - protein, 33 aa, Artificial Sequence
  Cyclic GFR-binding peptide
  MOD_RES (28)..(29): Xaa is C or S
MEVTAKKVVKDYEDIKRMQVPRLETPVXXAKPI

SEQ ID NO: 67043 - protein, 26 aa, Artificial Sequence
  Cyclic GFR-binding peptide
RNSLQELKPKKRVYEYYVVPLPEHHV

SEQ ID NO: 67044 - protein, 29 aa, Artificial Sequence
  Cyclic GFR-binding peptide
ELHEELRSMEGILKPKKRVYEMIQVTINS

SEQ ID NO: 67045 - protein, 28 aa, Artificial Sequence
  Cyclic GFR-binding peptide
KVIMNSLQEIKPTKGIYYLITLPELDQS

SEQ ID NO: 67046 - protein, 23 aa, Artificial Sequence
  Cyclic GFR-binding peptide
ESMEGIVVKDYEDMIQMTINSLE

SEQ ID NO: 67047 - protein, 41 aa, Artificial Sequence
  Cyclic GFR-binding peptide
  MOD_RES (1)..(3)..(35)..(36): Xaa is C or S
XGXGEVVMDSMEGIVVKENEDMIQMTINSLETPVXXAKPIK

SEQ ID NO: 67048 - protein, 31 aa, Artificial Sequence; identical to SEQ ID NO: 14223
  Cyclic GFR-binding peptide
  MOD_RES (2)..(2): Xaa is C or S

SEQ ID NO: 67049 - protein, 36 aa, Artificial Sequence
  Cyclic GFR-binding peptide
  MOD_RES (31)..(32): Xaa is C or S
EVVMEVQVEKVVKDYEDVKAMKVSRLETPVXXAKPI

SEQ ID NO: 67050 - protein, 30 aa, Artificial Sequence
  Cyclic GFR-binding peptide
GEVVMESMEGIVVKDYEDMIQMTINSLETP

SEQ ID NO: 67051 - protein, 27 aa, Artificial Sequence
  Cyclic GFR-binding peptide
VMENSLQEVVKDYEDYYLMTLPELETP

SEQ ID NO: 67052 - protein, 32 aa, Artificial Sequence
  Cyclic GFR-binding peptide
  MOD_RES (27)..(28): Xaa is C or S
NVQVEKIVNSSDDVKAVKVSRLKTPAXXPKPV

SEQ ID NO: 67053 - protein, 39 aa, Artificial Sequence
  Cyclic GFR-binding peptide
  MOD_RES (1)..(3)..(35): Xaa is C or S
XGXSRVVMNVTAKKIVNSSDDIKRVQVPRLKTPAXTPKT

SEQ ID NO: 67054 - protein, 35 aa, Artificial Sequence
  Cyclic GFR-binding peptide
  MOD_RES (31)..(32): Xaa is C or S
RVVMNVTAKKIVNSSDDIKRVQVPRLQTPAXXPKP

SEQ ID NO: 67055 - protein, 43 aa, Artificial Sequence; identical to SEQ ID NO: 21496
  Cyclic GFR-binding peptide
  MOD_RES (2)..(4)..(38): Xaa is C or S

SEQ ID NO: 67056 - protein, 27 aa, Artificial Sequence
  Cyclic GFR-binding peptide
EVVMEVQVEKVVKDYEDVKAMKVSRLE

SEQ ID NO: 67057 - protein, 30 aa, Artificial Sequence
  Cyclic GFR-binding peptide
GEVVMDSMEGIVVKENEDMIQMTINSLETP

SEQ ID NO: 67058 - protein, 32 aa, Artificial Sequence; identical to SEQ ID NO: 14235
  Cyclic GFR-binding peptide
  MOD_RES (31)..(32): Xaa is C or S

SEQ ID NO: 67059 - protein, 36 aa, Artificial Sequence; identical to SEQ ID NO: 14236
  Cyclic GFR-binding peptide
  MOD_RES (2)..(34)..(35): Xaa is C or S

SEQ ID NO: 67060 - protein, 29 aa, Artificial Sequence
  Cyclic GFR-binding peptide
  MOD_RES (1)..(1): Xaa is C or S
XSRVVMNSMEGIIVNSSDDMIQVTINSLK

SEQ ID NO: 67061 - protein, 29 aa, Artificial Sequence
  Cyclic GFR-binding peptide
QLFNSLQEHQGQHPKIRYYLMTLPEEETP

SEQ ID NO: 67062 - protein, 28 aa, Artificial Sequence
  Cyclic GFR-binding peptide
VVMVTAKKVKPTRGVIKRIQVPRLDQPV

SEQ ID NO: 67063 - protein, 34 aa, Artificial Sequence
  Cyclic GFR-binding peptide
LHEELRNSLQELKPKKRVYEYYVVPLPEHHVRSP

SEQ ID NO: 67064 - protein, 33 aa, Artificial Sequence; identical to SEQ ID NO: 14243
  Cyclic GFR-binding peptide
  MOD_RES (31)..(32): Xaa is C or S

SEQ ID NO: 67065 - protein, 28 aa, Artificial Sequence
  Cyclic GFR-binding peptide
VIMNSLQEIKPTKGIYYVIPLPELDQSV

SEQ ID NO: 67066 - protein, 31 aa, Artificial Sequence
  Cyclic GFR-binding peptide
  MOD_RES (27)..(28): Xaa is C or S
MVTAKKIKPTKGIIKRIQVPRLDQSVXXPSA

SEQ ID NO: 67067 - protein, 36 aa, Artificial Sequence
  Cyclic GFR-binding peptide
  MOD_RES (30)..(31): Xaa is C or S
VVMEVQVEKVVKDYEDVKAMKVSRLETPVXXAKPIS

SEQ ID NO: 67068 - protein, 31 aa, Artificial Sequence; identical to SEQ ID NO: 14248
  Cyclic GFR-binding peptide
  MOD_RES (26)..(27): Xaa is C or S

SEQ ID NO: 67069 - protein, 35 aa, Artificial Sequence; identical to SEQ ID NO: 14250
  Cyclic GFR-binding peptide
  MOD_RES (30)..(31): Xaa is C or S

SEQ ID NO: 67070 - protein, 34 aa, Artificial Sequence
  Cyclic GFR-binding peptide
HDELTNSLQEFIPKKRVIEYYLVTLPELQVQTPR

SEQ ID NO: 67071 - protein, 32 aa, Artificial Sequence
  Cyclic GFR-binding peptide
  MOD_RES (31)..(32): Xaa is C or S
EVVMEVTAKKVVKDYEDIKRMQVPRLETPVXX

SEQ ID NO: 67072 - protein, 26 aa, Artificial Sequence
  Cyclic GFR-binding peptide
VTAKKHQGQHPKIRIKRMQVPREETP

SEQ ID NO: 67073 - protein, 25 aa, Artificial Sequence
  Cyclic GFR-binding peptide
SKVVMNSLQEVKPTRGVYYLITLPE

SEQ ID NO: 67074 - protein, 44 aa, Artificial Sequence; identical to SEQ ID NO: 21516
  Cyclic GFR-binding peptide
  MOD_RES (2)..(4)..(41): Xaa is C or S

SEQ ID NO: 67075 - protein, 36 aa, Artificial Sequence
  Cyclic GFR-binding peptide
  MOD_RES (1)..(33)..(34): Xaa is C or S
XGEVVMDVTAKKVVKENEDIKRMQVPRLETPVXXAK

SEQ ID NO: 67076 - protein, 34 aa, Artificial Sequence; identical to SEQ ID NO: 14253
  Cyclic GFR-binding peptide
  MOD_RES (31)..(32): Xaa is C or S

SEQ ID NO: 67077 - protein, 23 aa, Artificial Sequence
  Cyclic GFR-binding peptide
VMNNSLQEIVNSSDDYYLVTLPE

SEQ ID NO: 67078 - protein, 30 aa, Artificial Sequence
  Cyclic GFR-binding peptide
EELRNSLQELKPKKRVYEYYVVPLPEHHVR

SEQ ID NO: 67079 - protein, 31 aa, Artificial Sequence
  Cyclic GFR-binding peptide
GEVVMDSMEGIVVKENEDMIQMTINSLETPV

SEQ ID NO: 67080 - protein, 32 aa, Artificial Sequence; identical to SEQ ID NO: 48555
  Cyclic GFR-binding peptide
  MOD_RES (1)..(32): Xaa is C or S

SEQ ID NO: 67081 - protein, 32 aa, Artificial Sequence
  Cyclic GFR-binding peptide
  MOD_RES (27)..(28): Xaa is C or S
EVQVEKVVKDYEDVKAMKVSRLETPVXXAKPI

SEQ ID NO: 67082 - protein, 31 aa, Artificial Sequence; identical to SEQ ID NO: 21525
  Cyclic GFR-binding peptide
  MOD_RES (1)..(1): Xaa is C or S

SEQ ID NO: 67083 - protein, 35 aa, Artificial Sequence; identical to SEQ ID NO: 21531
  Cyclic GFR-binding peptide
  MOD_RES (30)..(30): Xaa is C or S

SEQ ID NO: 67084 - protein, 38 aa, Artificial Sequence
  Cyclic GFR-binding peptide
  MOD_RES (2)..(4)..(36)..(37): Xaa is C or S
HXGXARVVMNSMEGIIVNSSDDMIQVTINSLQTPAXXP

SEQ ID NO: 67085 - protein, 28 aa, Artificial Sequence
  Cyclic GFR-binding peptide
  MOD_RES (1)..(1): Xaa is C or S
XSKVVMVTAKKVKPTRGVIKRIQVPRLD

SEQ ID NO: 67086 - protein, 37 aa, Artificial Sequence; identical to SEQ ID NO: 21536
  Cyclic GFR-binding peptide
  MOD_RES (35)..(35): Xaa is C or S

SEQ ID NO: 67087 - protein, 32 aa, Artificial Sequence
  Cyclic GFR-binding peptide
  MOD_RES (30)..(31): Xaa is C or S
KVIMVQVEKIKPTKGIVKAIKVSRLDQSVXXP

SEQ ID NO: 67088 - protein, 24 aa, Artificial Sequence
  Cyclic GFR-binding peptide
TVQVEKFIPKKRVIEVKAVKVSRL

SEQ ID NO: 67089 - protein, 29 aa, Artificial Sequence
  Cyclic GFR-binding peptide
  MOD_RES (27)..(27): Xaa is C or S
NVQVEKIVNSSDDVKAVKVSRLKTPAXTP

SEQ ID NO: 67090 - protein, 39 aa, Artificial Sequence
  Cyclic GFR-binding peptide
  MOD_RES (1)..(33)..(34): Xaa is C or S
XARVVMNSMEGIIVNSSDDMIQVTINSLQTPAXXPKPVT

SEQ ID NO: 67091 - protein, 30 aa, Artificial Sequence; identical to SEQ ID NO: 21546
  Cyclic GFR-binding peptide
  MOD_RES (1)..(1): Xaa is C or S

SEQ ID NO: 67092 - protein, 36 aa, Artificial Sequence
  Cyclic GFR-binding peptide
  MOD_RES (36)..(36): Xaa is C or S
LHDELTNSLQEFIPKKRVIEYYLVTLPELQVQTPRX

SEQ ID NO: 67093 - protein, 40 aa, Artificial Sequence
  Cyclic GFR-binding peptide
  MOD_RES (2)..(4): Xaa is C or S
EXKXALHDELTNSLQEFIPKKRVIEYYLVTLPELQVQTPR

SEQ ID NO: 67094 - protein, 27 aa, Artificial Sequence
  Cyclic GFR-binding peptide
  MOD_RES (27)..(27): Xaa is C or S
NSMEGIIVNSSDDMIQVTINSLKTPAX

SEQ ID NO: 67095 - protein, 25 aa, Artificial Sequence
  Cyclic GFR-binding peptide
MNNSLQEIVNSSDDYYLVTLPELQT

SEQ ID NO: 67096 - protein, 32 aa, Artificial Sequence
  Cyclic GFR-binding peptide
  MOD_RES (31)..(32): Xaa is C or S
SRVIMVTAKKVKPKRGVIKRIQVPRLAQPVXX

SEQ ID NO: 67097 - protein, 29 aa, Artificial Sequence
  Cyclic GFR-binding peptide
  MOD_RES (26)..(27): Xaa is C or S
NSLQEIKPTKGIYYVIPLPELDQSVXXPS

SEQ ID NO: 67098 - protein, 38 aa, Artificial Sequence; identical to SEQ ID NO: 21560
  Cyclic GFR-binding peptide
  MOD_RES (1)..(38): Xaa is C or S

SEQ ID NO: 67099 - protein, 35 aa, Artificial Sequence; identical to SEQ ID NO: 14293
  Cyclic GFR-binding peptide
  MOD_RES (32)..(33): Xaa is C or S

SEQ ID NO: 67100 - protein, 36 aa, Artificial Sequence
  Cyclic GFR-binding peptide
  MOD_RES (30)..(31): Xaa is C or S
VVMNVQVEKIVNSSDDVKAVKVSRLKTPAXXPKPVY

SEQ ID NO: 67101 - protein, 36 aa, Artificial Sequence; identical to SEQ ID NO: 14297
  Cyclic GFR-binding peptide
  MOD_RES (31)..(32): Xaa is C or S

SEQ ID NO: 67102 - protein, 29 aa, Artificial Sequence
  Cyclic GFR-binding peptide
LRVTAKKLKPKKRVYEIKRVQVPRHHVRS

SEQ ID NO: 67103 - protein, 25 aa, Artificial Sequence
  Cyclic GFR-binding peptide
VVMENSLQEVVKDYEDYYLMTLPEL

SEQ ID NO: 67104 - protein, 41 aa, Artificial Sequence; identical to SEQ ID NO: 14306
  Cyclic GFR-binding peptide
  MOD_RES (2)..(4)..(35)..(36): Xaa is C or S

SEQ ID NO: 67105 - protein, 28 aa, Artificial Sequence
  Cyclic GFR-binding peptide
ELTNSLQEFIPKKRVIEYYLVTLPELQV

SEQ ID NO: 67106 - protein, 32 aa, Artificial Sequence; identical to SEQ ID NO: 21570
  Cyclic GFR-binding peptide
  MOD_RES (2)..(4): Xaa is C or S

SEQ ID NO: 67107 - protein, 33 aa, Artificial Sequence; identical to SEQ ID NO: 21572
  Cyclic GFR-binding peptide
  MOD_RES (33)..(33): Xaa is C or S

SEQ ID NO: 67108 - protein, 32 aa, Artificial Sequence; identical to SEQ ID NO: 14314
  Cyclic GFR-binding peptide
  MOD_RES (32)..(32): Xaa is C or S

SEQ ID NO: 67109 - protein, 38 aa, Artificial Sequence; identical to SEQ ID NO: 14318
  Cyclic GFR-binding peptide
  MOD_RES (1)..(32)..(33): Xaa is C or S

SEQ ID NO: 67110 - protein, 41 aa, Artificial Sequence; identical to SEQ ID NO: 21575
  Cyclic GFR-binding peptide
  MOD_RES (2)..(36): Xaa is C or S

SEQ ID NO: 67111 - protein, 35 aa, Artificial Sequence
  Cyclic GFR-binding peptide
  MOD_RES (30)..(31): Xaa is C or S
KVIMVTAKKIKPTKGIIKRIQVPRLDQSVXXPSAS

SEQ ID NO: 67112 - protein, 22 aa, Artificial Sequence
  Cyclic GFR-binding peptide
NSLQELKPKKRVYEYYVVPLPE

SEQ ID NO: 67113 - protein, 32 aa, Artificial Sequence; identical to SEQ ID NO: 21579
  Cyclic GFR-binding peptide

SEQ ID NO: 67114 - protein, 31 aa, Artificial Sequence; identical to SEQ ID NO: 14320
  Cyclic GFR-binding peptide
  MOD_RES (29)..(29): Xaa is C or S

SEQ ID NO: 67115 - protein, 24 aa, Artificial Sequence
  Cyclic GFR-binding peptide
VMDNSLQEVVKENEDYYVMPLPEL

SEQ ID NO: 67116 - protein, 34 aa, Artificial Sequence
  Cyclic GFR-binding peptide
  MOD_RES (31)..(32): Xaa is C or S
EVVMDVQVEKVVKENEDVKAMKVSRLETPVXXAK

SEQ ID NO: 67117 - protein, 38 aa, Artificial Sequence
  Cyclic GFR-binding peptide
  MOD_RES (2)..(33)..(34): Xaa is C or S
KXSRVIMSMEGIVKPKRGVMIQITINSLAQPVXXPAAS

SEQ ID NO: 67118 - protein, 36 aa, Artificial Sequence
  Cyclic GFR-binding peptide
  MOD_RES (2)..(4)..(36): Xaa is C or S
HXGXSRVVMNSMEGIIVNSSDDMIQVTINSLKTPAX

SEQ ID NO: 67119 - protein, 34 aa, Artificial Sequence; identical to SEQ ID NO: 14332
  Cyclic GFR-binding peptide
  MOD_RES (1)..(3): Xaa is C or S

SEQ ID NO: 67120 - protein, 34 aa, Artificial Sequence
  Cyclic GFR-binding peptide
  MOD_RES (1)..(3): Xaa is C or S
XKXALHDELTNSLQEFIPKKRVIEYYVVPLPELQ

SEQ ID NO: 67121 - protein, 29 aa, Artificial Sequence
  Cyclic GFR-binding peptide
LHEELRNSLQELKPKKRVYEYYVVPLPEH

SEQ ID NO: 67122 - protein, 36 aa, Artificial Sequence; identical to SEQ ID NO: 21590
  Cyclic GFR-binding peptide
  MOD_RES (1)..(3): Xaa is C or S

SEQ ID NO: 67123 - protein, 27 aa, Artificial Sequence
  Cyclic GFR-binding peptide
  MOD_RES (27)..(27): Xaa is C or S
ENSLQEVVKDYEDYYLMTLPELETPVX

SEQ ID NO: 67124 - protein, 35 aa, Artificial Sequence
  Cyclic GFR-binding peptide
ALHDELTNSLQEFIPKKRVIEYYLVTLPELQVQTP

SEQ ID NO: 67125 - protein, 35 aa, Artificial Sequence
  Cyclic GFR-binding peptide
  MOD_RES (2)..(34): Xaa is C or S
GXSRVVMNSMEGIIVNSSDDMIQVTINSLKTPAXT

SEQ ID NO: 67126 - protein, 33 aa, Artificial Sequence
  Cyclic GFR-binding peptide
  MOD_RES (29)..(30): Xaa is C or S
VMNSMEGIIVNSSDDMIQVTINSLKTPAXXPKP

SEQ ID NO: 67127 - protein, 29 aa, Artificial Sequence
  Cyclic GFR-binding peptide
KNHQLFVTAKKHQGQHPKIRIKRMQVPRE

SEQ ID NO: 67128 - protein, 26 aa, Artificial Sequence
  Cyclic GFR-binding peptide
ESMEGIVVKDYEDMIQMTINSLETPV

SEQ ID NO: 67129 - protein, 29 aa, Artificial Sequence
  Cyclic GFR-binding peptide
RVIMSMEGIVKPKRGVMIQITINSLAQPV

SEQ ID NO: 67130 - protein, 32 aa, Artificial Sequence; identical to SEQ ID NO: 14352
  Cyclic GFR-binding peptide
  MOD_RES (26)..(27): Xaa is C or S

SEQ ID NO: 67131 - protein, 22 aa, Artificial Sequence
  Cyclic GFR-binding peptide
MVTAKKVKPKRGVIKRIQVPRL

SEQ ID NO: 67132 - protein, 25 aa, Artificial Sequence
  Cyclic GFR-binding peptide
VIMNSLQEVKPKRGVYYLITLPELA

SEQ ID NO: 67133 - protein, 32 aa, Artificial Sequence
  Cyclic GFR-binding peptide
  MOD_RES (2)..(4): Xaa is C or S
SXKXSKVIMSMEGIIKPTKGIMIQITINSLDQ

SEQ ID NO: 67134 - protein, 30 aa, Artificial Sequence; identical to SEQ ID NO: 14358
  Cyclic GFR-binding peptide
  MOD_RES (26)..(27): Xaa is C or S

SEQ ID NO: 67135 - protein, 24 aa, Artificial Sequence
  Cyclic GFR-binding peptide
NSMEGIIVNSSDDMIQVTINSLKT

SEQ ID NO: 67136 - protein, 32 aa, Artificial Sequence; identical to SEQ ID NO: 21608
  Cyclic GFR-binding peptide
  MOD_RES (2)..(2): Xaa is C or S

SEQ ID NO: 67137 - protein, 32 aa, Artificial Sequence
  Cyclic GFR-binding peptide
  MOD_RES (32)..(32): Xaa is C or S
LTNSLQEFIPKKRVIEYYVVPLPELQVQTPRX

SEQ ID NO: 67138 - protein, 38 aa, Artificial Sequence
  Cyclic GFR-binding peptide
  MOD_RES (2)..(4)..(38): Xaa is C or S
RXEXKNHQLFNSLQEHQGQHPKIRYYLMTLPEEETPVX

SEQ ID NO: 67139 - protein, 29 aa, Artificial Sequence
  Cyclic GFR-binding peptide
  MOD_RES (2)..(2): Xaa is C or S
GXARVVMNNSLQEIVNSSDDYYVVPLPEL

SEQ ID NO: 67140 - protein, 39 aa, Artificial Sequence; identical to SEQ ID NO: 21614
  Cyclic GFR-binding peptide
  MOD_RES (36)..(36): Xaa is C or S

SEQ ID NO: 67141 - protein, 32 aa, Artificial Sequence; identical to SEQ ID NO: 14371
  Cyclic GFR-binding peptide
  MOD_RES (29)..(30): Xaa is C or S

SEQ ID NO: 67142 - protein, 37 aa, Artificial Sequence; identical to SEQ ID NO: 21619
  Cyclic GFR-binding peptide
  MOD_RES (2)..(36): Xaa is C or S

SEQ ID NO: 67143 - protein, 36 aa, Artificial Sequence; identical to SEQ ID NO: 21620
  Cyclic GFR-binding peptide
  MOD_RES (33)..(33): Xaa is C or S

SEQ ID NO: 67144 - protein, 25 aa, Artificial Sequence
  Cyclic GFR-binding peptide
NSLQELKPKKRVYEYYVVPLPEHHV

SEQ ID NO: 67145 - protein, 29 aa, Artificial Sequence
  Cyclic GFR-binding peptide
RVVMNVTAKKIVNSSDDIKRVQVPRLQTP

SEQ ID NO: 67146 - protein, 37 aa, Artificial Sequence; identical to SEQ ID NO: 14378
  Cyclic GFR-binding peptide
  MOD_RES (2)..(4)..(35)..(36): Xaa is C or S

SEQ ID NO: 67147 - protein, 24 aa, Artificial Sequence
  Cyclic GFR-binding peptide
VVMNSLQEVKPTRGVYYVIPLPEL

SEQ ID NO: 67148 - protein, 27 aa, Artificial Sequence
  Cyclic GFR-binding peptide
MENSLQEVVKDYEDYYVMPLPELETPV

SEQ ID NO: 67149 - protein, 32 aa, Artificial Sequence; identical to SEQ ID NO: 14387
  Cyclic GFR-binding peptide
  MOD_RES (27)..(28): Xaa is C or S

SEQ ID NO: 67150 - protein, 36 aa, Artificial Sequence; identical to SEQ ID NO: 48646
  Cyclic GFR-binding peptide
  MOD_RES (30)..(31): Xaa is C or S

SEQ ID NO: 67151 - protein, 31 aa, Artificial Sequence
  Cyclic GFR-binding peptide
  MOD_RES (27)..(28): Xaa is C or S
DVTAKKVVKENEDIKRMQVPRLETPVXXAKP

SEQ ID NO: 67152 - protein, 26 aa, Artificial Sequence
  Cyclic GFR-binding peptide
VMDNSLQEVVKENEDYYLMTLPELET

SEQ ID NO: 67153 - protein, 28 aa, Artificial Sequence
  Cyclic GFR-binding peptide
  MOD_RES (26)..(26): Xaa is C or S
NSLQEIVNSSDDYYVVPLPELKTPAXTP

SEQ ID NO: 67154 - protein, 29 aa, Artificial Sequence
  Cyclic GFR-binding peptide
  MOD_RES (2)..(4): Xaa is C or S
SXKXSRVIMNSLQEVKPKRGVYYLITLPE

SEQ ID NO: 67155 - protein, 40 aa, Artificial Sequence; identical to SEQ ID NO: 21630
  Cyclic GFR-binding peptide
  MOD_RES (37)..(37): Xaa is C or S

SEQ ID NO: 67156 - protein, 25 aa, Artificial Sequence
  Cyclic GFR-binding peptide
VQVEKHQGQHPKIRVKAMKVSREET

SEQ ID NO: 67157 - protein, 30 aa, Artificial Sequence; identical to SEQ ID NO: 14400
  Cyclic GFR-binding peptide
  MOD_RES (28)..(29): Xaa is C or S

SEQ ID NO: 67158 - protein, 31 aa, Artificial Sequence; identical to SEQ ID NO: 14401
  Cyclic GFR-binding peptide
  MOD_RES (31)..(31): Xaa is C or S

SEQ ID NO: 67159 - protein, 35 aa, Artificial Sequence; identical to SEQ ID NO: 48655
  Cyclic GFR-binding peptide
  MOD_RES (2)..(4)..(35): Xaa is C or S

SEQ ID NO: 67160 - protein, 38 aa, Artificial Sequence; identical to SEQ ID NO: 14402
  Cyclic GFR-binding peptide
  MOD_RES (32)..(33): Xaa is C or S

SEQ ID NO: 67161 - protein, 41 aa, Artificial Sequence
  Cyclic GFR-binding peptide
  MOD_RES (1)..(3)..(35)..(36): Xaa is C or S
XGXSRVVMNSMEGIIVNSSDDMIQVTINSLKTPAXXPKPVY

SEQ ID NO: 67162 - protein, 27 aa, Artificial Sequence
  Cyclic GFR-binding peptide
  MOD_RES (26)..(27): Xaa is C or S
NSLQEIVNSSDDYYVVPLPELKTPAXX

SEQ ID NO: 67163 - protein, 36 aa, Artificial Sequence; identical to SEQ ID NO: 14406
  Cyclic GFR-binding peptide
  MOD_RES (1)..(33)..(34): Xaa is C or S

SEQ ID NO: 67164 - protein, 30 aa, Artificial Sequence; identical to SEQ ID NO: 14409
  Cyclic GFR-binding peptide
  MOD_RES (2)..(2): Xaa is C or S

SEQ ID NO: 67165 - protein, 34 aa, Artificial Sequence
  Cyclic GFR-binding peptide
  MOD_RES (2)..(4): Xaa is C or S
SXKXSRVIMSMEGIVKPKRGVMIQITINSLAQPV

SEQ ID NO: 67166 - protein, 29 aa, Artificial Sequence
  Cyclic GFR-binding peptide
  MOD_RES (29)..(29): Xaa is C or S
VIMVQVEKVKPKRGVVKAIKVSRLAQPVX

SEQ ID NO: 67167 - protein, 37 aa, Artificial Sequence
  Cyclic GFR-binding peptide
  MOD_RES (2)..(4): Xaa is C or S
RXEXKNHQLFNSLQEHQGQHPKIRYYVMPLPEEETPV

SEQ ID NO: 67168 - protein, 34 aa, Artificial Sequence
  Cyclic GFR-binding peptide
  MOD_RES (31)..(31): Xaa is C or S
RNSLQELKPKKRVYEYYVVPLPEHHVRSPQXKVS

SEQ ID NO: 67169 - protein, 26 aa, Artificial Sequence
  Cyclic GFR-binding peptide
  MOD_RES (26)..(26): Xaa is C or S
NSLQEIVNSSDDYYLVTLPELQTPAX

SEQ ID NO: 67170 - protein, 38 aa, Artificial Sequence; identical to SEQ ID NO: 21645
  Cyclic GFR-binding peptide
  MOD_RES (2)..(4): Xaa is C or S

SEQ ID NO: 67171 - protein, 34 aa, Artificial Sequence
  Cyclic GFR-binding peptide
  MOD_RES (28)..(29): Xaa is C or S
VMVTAKKVKPTRGVIKRIQVPRLDQPVXXPSASA

SEQ ID NO: 67172 - protein, 33 aa, Artificial Sequence; identical to SEQ ID NO: 21646
  Cyclic GFR-binding peptide

SEQ ID NO: 67173 - protein, 27 aa, Artificial Sequence
  Cyclic GFR-binding peptide
IMVQVEKIKPTKGIVKAIKVSRLDQSV

SEQ ID NO: 67174 - protein, 37 aa, Artificial Sequence
  Cyclic GFR-binding peptide
  MOD_RES (2)..(34)..(35): Xaa is C or S
GXARVVMNVQVEKIVNSSDDVKAVKVSRLQTPAXXPK

SEQ ID NO: 67175 - protein, 34 aa, Artificial Sequence
  Cyclic GFR-binding peptide
  MOD_RES (30)..(31): Xaa is C or S
VVMNSMEGIIVNSSDDMIQVTINSLQTPAXXPKP

SEQ ID NO: 67176 - protein, 30 aa, Artificial Sequence
  Cyclic GFR-binding peptide
  MOD_RES (26)..(27): Xaa is C or S
SMEGIVVKDYEDMIQMTINSLETPVXXAKP

SEQ ID NO: 67177 - protein, 39 aa, Artificial Sequence; identical to SEQ ID NO: 21650
  Cyclic GFR-binding peptide
  MOD_RES (36)..(36): Xaa is C or S

SEQ ID NO: 67178 - protein, 29 aa, Artificial Sequence
  Cyclic GFR-binding peptide
VVMEVTAKKVVKDYEDIKRMQVPRLETPV

SEQ ID NO: 67179 - protein, 28 aa, Artificial Sequence
  Cyclic GFR-binding peptide
GEVVMDVTAKKVVKENEDIKRMQVPRLE

SEQ ID NO: 67180 - protein, 35 aa, Artificial Sequence; identical to SEQ ID NO: 21659
  Cyclic GFR-binding peptide
  MOD_RES (31)..(31): Xaa is C or S

SEQ ID NO: 67181 - protein, 26 aa, Artificial Sequence
  Cyclic GFR-binding peptide
VVMEVTAKKVVKDYEDIKRMQVPRLE

SEQ ID NO: 67182 - protein, 33 aa, Artificial Sequence
  Cyclic GFR-binding peptide
  MOD_RES (33)..(33): Xaa is C or S
ELTNSLQEFIPKKRVIEYYLVTLPELQVQTPRX

SEQ ID NO: 67183 - protein, 36 aa, Artificial Sequence; identical to SEQ ID NO: 14439
  Cyclic GFR-binding peptide
  MOD_RES (2)..(33)..(34): Xaa is C or S

SEQ ID NO: 67184 - protein, 36 aa, Artificial Sequence; identical to SEQ ID NO: 14440
  Cyclic GFR-binding peptide
  MOD_RES (32)..(33): Xaa is C or S

SEQ ID NO: 67185 - protein, 25 aa, Artificial Sequence
  Cyclic GFR-binding peptide
MVTAKKVKPTRGVIKRIQVPRLDQP

SEQ ID NO: 67186 - protein, 23 aa, Artificial Sequence
  Cyclic GFR-binding peptide
MDSMEGIVVKENEDMIQMTINSL

SEQ ID NO: 67187 - protein, 37 aa, Artificial Sequence
  Cyclic GFR-binding peptide
  MOD_RES (32)..(33): Xaa is C or S
SRVVMNVQVEKIVNSSDDVKAVKVSRLKTPAXXPKPV

SEQ ID NO: 67188 - protein, 22 aa, Artificial Sequence
  Cyclic GFR-binding peptide
SMEGIIKPTKGIMIQITINSLD

SEQ ID NO: 67189 - protein, 41 aa, Artificial Sequence
  Cyclic GFR-binding peptide
  MOD_RES (2)..(4)..(35)..(36): Xaa is C or S
SXKXSRVIMVQVEKVKPKRGVVKAIKVSRLAQPVXXPAASA

SEQ ID NO: 67190 - protein, 31 aa, Artificial Sequence
  Cyclic GFR-binding peptide
  MOD_RES (2)..(4): Xaa is C or S
SXKXSKVIMVQVEKIKPTKGIVKAIKVSRLD

SEQ ID NO: 67191 - protein, 27 aa, Artificial Sequence
  Cyclic GFR-binding peptide
  MOD_RES (26)..(27): Xaa is C or S
NSLQEIKPTKGIYYLITLPELDQSVXX

SEQ ID NO: 67192 - protein, 29 aa, Artificial Sequence
  Cyclic GFR-binding peptide
SKVIMVQVEKIKPTKGIVKAIKVSRLDQS

SEQ ID NO: 67193 - protein, 36 aa, Artificial Sequence
  Cyclic GFR-binding peptide
  MOD_RES (1)..(35): Xaa is C or S
XKNHQLFNSLQEHQGQHPKIRYYLMTLPEEETPVXE

SEQ ID NO: 67194 - protein, 29 aa, Artificial Sequence
  Cyclic GFR-binding peptide
  MOD_RES (26)..(27): Xaa is C or S
NSLQEVKPTRGVYYVIPLPELDQPVXXPS

SEQ ID NO: 67195 - protein, 26 aa, Artificial Sequence
  Cyclic GFR-binding peptide
SKVVMVQVEKVKPTRGVVKAIKVSRL

SEQ ID NO: 67196 - protein, 23 aa, Artificial Sequence
  Cyclic GFR-binding peptide
MENSLQEVVKDYEDYYVMPLPEL

SEQ ID NO: 67197 - protein, 29 aa, Artificial Sequence
  Cyclic GFR-binding peptide
  MOD_RES (28)..(29): Xaa is C or S
IMNSLQEVKPKRGVYYLITLPELAQPVXX

SEQ ID NO: 67198 - protein, 27 aa, Artificial Sequence
  Cyclic GFR-binding peptide
  MOD_RES (1)..(1): Xaa is C or S
XGEVVMDSMEGIVVKENEDMIQMTINS

SEQ ID NO: 67199 - protein, 32 aa, Artificial Sequence; identical to SEQ ID NO: 21676
  Cyclic GFR-binding peptide
  MOD_RES (31)..(31): Xaa is C or S

SEQ ID NO: 67200 - protein, 34 aa, Artificial Sequence; identical to SEQ ID NO: 21677
  Cyclic GFR-binding peptide
  MOD_RES (30)..(30): Xaa is C or S

SEQ ID NO: 67201 - protein, 25 aa, Artificial Sequence
  Cyclic GFR-binding peptide
RVIMVQVEKVKPKRGVVKAIKVSRL

SEQ ID NO: 67202 - protein, 28 aa, Artificial Sequence
  Cyclic GFR-binding peptide
  MOD_RES (27)..(28): Xaa is C or S
NVQVEKIVNSSDDVKAVKVSRLKTPAXX

SEQ ID NO: 67203 - protein, 27 aa, Artificial Sequence
  Cyclic GFR-binding peptide
  MOD_RES (26)..(27): Xaa is C or S
VQVEKVKPTRGVVKAIKVSRLDQPVXX

SEQ ID NO: 67204 - protein, 26 aa, Artificial Sequence
  Cyclic GFR-binding peptide
VMNSLQEVKPTRGVYYLITLPELDQP

SEQ ID NO: 67205 - protein, 25 aa, Artificial Sequence
  Cyclic GFR-binding peptide
VVMNVTAKKIVNSSDDIKRVQVPRL

SEQ ID NO: 67206 - protein, 24 aa, Artificial Sequence
  Cyclic GFR-binding peptide
SMEGILKPKKRVYEMIQVTINSHH

SEQ ID NO: 67207 - protein, 30 aa, Artificial Sequence
  Cyclic GFR-binding peptide
EELRNSLQELKPKKRVYEYYLVTLPEHHVR

SEQ ID NO: 67208 - protein, 36 aa, Artificial Sequence; identical to SEQ ID NO: 14464
  Cyclic GFR-binding peptide
  MOD_RES (32)..(33): Xaa is C or S

SEQ ID NO: 67209 - protein, 30 aa, Artificial Sequence; identical to SEQ ID NO: 14465
  Cyclic GFR-binding peptide
  MOD_RES (28)..(29): Xaa is C or S

SEQ ID NO: 67210 - protein, 23 aa, Artificial Sequence
  Cyclic GFR-binding peptide
SMEGIVVKDYEDMIQMTINSLET

SEQ ID NO: 67211 - protein, 33 aa, Artificial Sequence
  Cyclic GFR-binding peptide
  MOD_RES (30)..(31): Xaa is C or S
KVVMVQVEKVKPTRGVVKAIKVSRLDQPVXXPS

SEQ ID NO: 67212 - protein, 32 aa, Artificial Sequence; identical to SEQ ID NO: 48708
  Cyclic GFR-binding peptide
  MOD_RES (26)..(27): Xaa is C or S

SEQ ID NO: 67213 - protein, 31 aa, Artificial Sequence
  Cyclic GFR-binding peptide
  MOD_RES (30)..(31): Xaa is C or S
VVMNVTAKKIVNSSDDIKRVQVPRLQTPAXX

SEQ ID NO: 67214 - protein, 40 aa, Artificial Sequence
  Cyclic GFR-binding peptide
  MOD_RES (1)..(38): Xaa is C or S
XELHEELRNSLQELKPKKRVYEYYLVTLPEHHVRSPQXKV

SEQ ID NO: 67215 - protein, 31 aa, Artificial Sequence; identical to SEQ ID NO: 14471
  Cyclic GFR-binding peptide
  MOD_RES (2)..(2): Xaa is C or S

SEQ ID NO: 67216 - protein, 38 aa, Artificial Sequence; identical to SEQ ID NO: 14473
  Cyclic GFR-binding peptide
  MOD_RES (2)..(4)..(36): Xaa is C or S

SEQ ID NO: 67217 - protein, 35 aa, Artificial Sequence
  Cyclic GFR-binding peptide
  MOD_RES (2)..(4): Xaa is C or S
AXAXELHEELRNSLQELKPKKRVYEYYVVPLPEHH

SEQ ID NO: 67218 - protein, 24 aa, Artificial Sequence
  Cyclic GFR-binding peptide
MVTAKKIKPTKGIIKRIQVPRLDQ

SEQ ID NO: 67219 - protein, 29 aa, Artificial Sequence
  Cyclic GFR-binding peptide
ARVVMNNSLQEIVNSSDDYYVVPLPELQT

SEQ ID NO: 67220 - protein, 37 aa, Artificial Sequence; identical to SEQ ID NO: 21698
  Cyclic GFR-binding peptide
  MOD_RES (33)..(33): Xaa is C or S

SEQ ID NO: 67221 - protein, 22 aa, Artificial Sequence
  Cyclic GFR-binding peptide
VTAKKIKPTKGIIKRIQVPRLD

SEQ ID NO: 67222 - protein, 34 aa, Artificial Sequence; identical to SEQ ID NO: 14486
  Cyclic GFR-binding peptide
  MOD_RES (29)..(30): Xaa is C or S

SEQ ID NO: 67223 - protein, 38 aa, Artificial Sequence
  Cyclic GFR-binding peptide
  MOD_RES (2)..(4)..(35)..(36): Xaa is C or S
SXKXSRVIMVQVEKVKPKRGVVKAIKVSRLAQPVXXPA

SEQ ID NO: 67224 - protein, 25 aa, Artificial Sequence
  Cyclic GFR-binding peptide
FVTAKKHQGQHPKIRIKRMQVPREE

SEQ ID NO: 67225 - protein, 35 aa, Artificial Sequence
  Cyclic GFR-binding peptide
  MOD_RES (31)..(31): Xaa is C or S
QLFNSLQEHQGQHPKIRYYVMPLPEEETPVXELGE

SEQ ID NO: 67226 - protein, 33 aa, Artificial Sequence; identical to SEQ ID NO: 14491
  Cyclic GFR-binding peptide
  MOD_RES (2)..(33): Xaa is C or S

SEQ ID NO: 67227 - protein, 28 aa, Artificial Sequence
  Cyclic GFR-binding peptide
HDELTVQVEKFIPKKRVIEVKAVKVSRL

SEQ ID NO: 67228 - protein, 31 aa, Artificial Sequence
  Cyclic GFR-binding peptide
  MOD_RES (1)..(3): Xaa is C or S
XKXSRVIMVTAKKVKPKRGVIKRIQVPRLAQ

SEQ ID NO: 67229 - protein, 26 aa, Artificial Sequence
  Cyclic GFR-binding peptide
DNSLQEVVKENEDYYVMPLPELETPV

SEQ ID NO: 67230 - protein, 37 aa, Artificial Sequence
  Cyclic GFR-binding peptide
  MOD_RES (31)..(32): Xaa is C or S
SRVIMSMEGIVKPKRGVMIQITINSLAQPVXXPAASA

SEQ ID NO: 67231 - protein, 23 aa, Artificial Sequence
  Cyclic GFR-binding peptide
VVMVQVEKVKPTRGVVKAIKVSR

SEQ ID NO: 67232 - protein, 33 aa, Artificial Sequence
  Cyclic GFR-binding peptide
  MOD_RES (27)..(28): Xaa is C or S
NSMEGIIVNSSDDMIQVTINSLQTPAXXPKPVT

SEQ ID NO: 67233 - protein, 27 aa, Artificial Sequence
  Cyclic GFR-binding peptide
  MOD_RES (27)..(27): Xaa is C or S
NNSLQEIVNSSDDYYLVTLPELQTPAX

SEQ ID NO: 67234 - protein, 30 aa, Artificial Sequence
  Cyclic GFR-binding peptide
  MOD_RES (26)..(26): Xaa is C or S
VQVEKIVNSSDDVKAVKVSRLKTPAXTPKT

SEQ ID NO: 67235 - protein, 26 aa, Artificial Sequence
  Cyclic GFR-binding peptide
ELTSMEGIFIPKKRVIEMIQVTINSL

SEQ ID NO: 67236 - protein, 36 aa, Artificial Sequence
  Cyclic GFR-binding peptide
  MOD_RES (1)..(3)..(34)..(35): Xaa is C or S
XKXSKVVMSMEGIVKPTRGVMIQITINSLDQPVXXP

SEQ ID NO: 67237 - protein, 37 aa, Artificial Sequence; identical to SEQ ID NO: 14521
  Cyclic GFR-binding peptide
  MOD_RES (32)..(32): Xaa is C or S

SEQ ID NO: 67238 - protein, 26 aa, Artificial Sequence
  Cyclic GFR-binding peptide
NSMEGIIVNSSDDMIQVTINSLQTPA

SEQ ID NO: 67239 - protein, 28 aa, Artificial Sequence
  Cyclic GFR-binding peptide
  MOD_RES (26)..(27): Xaa is C or S
VTAKKIVNSSDDIKRVQVPRLKTPAXXP

SEQ ID NO: 67240 - protein, 35 aa, Artificial Sequence; identical to SEQ ID NO: 21726
  Cyclic GFR-binding peptide
  MOD_RES (2)..(2): Xaa is C or S

SEQ ID NO: 67241 - protein, 29 aa, Artificial Sequence
  Cyclic GFR-binding peptide
  MOD_RES (28)..(29): Xaa is C or S
IMSMEGIVKPKRGVMIQITINSLAQPVXX

SEQ ID NO: 67242 - protein, 41 aa, Artificial Sequence; identical to SEQ ID NO: 14526
  Cyclic GFR-binding peptide
  MOD_RES (2)..(4)..(36)..(37): Xaa is C or S

SEQ ID NO: 67243 - protein, 36 aa, Artificial Sequence; identical to SEQ ID NO: 21731
  Cyclic GFR-binding peptide
  MOD_RES (32)..(32): Xaa is C or S

SEQ ID NO: 67244 - protein, 28 aa, Artificial Sequence
  Cyclic GFR-binding peptide
  MOD_RES (1)..(3): Xaa is C or S
XKXSKVIMNSLQEIKPTKGIYYVIPLPE

SEQ ID NO: 67245 - protein, 27 aa, Artificial Sequence
  Cyclic GFR-binding peptide
  MOD_RES (27)..(27): Xaa is C or S
NVQVEKIVNSSDDVKAVKVSRLQTPAX

SEQ ID NO: 67246 - protein, 30 aa, Artificial Sequence; identical to SEQ ID NO: 21737
  Cyclic GFR-binding peptide

SEQ ID NO: 67247 - protein, 33 aa, Artificial Sequence; identical to SEQ ID NO: 14531
  Cyclic GFR-binding peptide
  MOD_RES (1)..(3): Xaa is C or S

SEQ ID NO: 67248 - protein, 24 aa, Artificial Sequence
  Cyclic GFR-binding peptide
KVIMSMEGIIKPTKGIMIQITINS

SEQ ID NO: 67249 - protein, 35 aa, Artificial Sequence
  Cyclic GFR-binding peptide
  MOD_RES (29)..(30): Xaa is C or S
VMNVTAKKIVNSSDDIKRVQVPRLQTPAXXPKPVT

SEQ ID NO: 67250 - protein, 40 aa, Artificial Sequence; identical to SEQ ID NO: 14534
  Cyclic GFR-binding peptide
  MOD_RES (2)..(34)..(35): Xaa is C or S

SEQ ID NO: 67251 - protein, 34 aa, Artificial Sequence
  Cyclic GFR-binding peptide
  MOD_RES (2)..(33)..(34): Xaa is C or S
KXSKVVMSMEGIVKPTRGVMIQITINSLDQPVXX

SEQ ID NO: 67252 - protein, 28 aa, Artificial Sequence
  Cyclic GFR-binding peptide
  MOD_RES (28)..(28): Xaa is C or S
VMNSLQEVKPTRGVYYVIPLPELDQPVX

SEQ ID NO: 67253 - protein, 24 aa, Artificial Sequence
  Cyclic GFR-binding peptide
MNVTAKKIVNSSDDIKRVQVPRLQ

SEQ ID NO: 67254 - protein, 36 aa, Artificial Sequence
  Cyclic GFR-binding peptide
  MOD_RES (2)..(4)..(35)..(36): Xaa is C or S
SXKXSRVIMVQVEKVKPKRGVVKAIKVSRLAQPVXX

SEQ ID NO: 67255 - protein, 27 aa, Artificial Sequence
  Cyclic GFR-binding peptide
RNSLQELKPKKRVYEYYVVPLPEHHVR

SEQ ID NO: 67256 - protein, 29 aa, Artificial Sequence
  Cyclic GFR-binding peptide
  MOD_RES (1)..(1): Xaa is C or S
XKNHQLFNSLQEHQGQHPKIRYYLMTLPE

SEQ ID NO: 67257 - protein, 39 aa, Artificial Sequence
  Cyclic GFR-binding peptide
  MOD_RES (1)..(3)..(34)..(35): Xaa is C or S
XKXSRVIMVQVEKVKPKRGVVKAIKVSRLAQPVXXPAAS

SEQ ID NO: 67258 - protein, 28 aa, Artificial Sequence
  Cyclic GFR-binding peptide
LFVQVEKHQGQHPKIRVKAMKVSREETP

SEQ ID NO: 67259 - protein, 22 aa, Artificial Sequence
  Cyclic GFR-binding peptide
NSLQEIKPTKGIYYLITLPELD

SEQ ID NO: 67260 - protein, 36 aa, Artificial Sequence
  Cyclic GFR-binding peptide
  MOD_RES (30)..(31): Xaa is C or S
RVIMVTAKKVKPKRGVIKRIQVPRLAQPVXXPAASA

SEQ ID NO: 67261 - protein, 24 aa, Artificial Sequence
  Cyclic GFR-binding peptide
VMENSLQEVVKDYEDYYLMTLPEL

SEQ ID NO: 67262 - protein, 29 aa, Artificial Sequence
  Cyclic GFR-binding peptide
  MOD_RES (29)..(29): Xaa is C or S
VIMSMEGIVKPKRGVMIQITINSLAQPVX

SEQ ID NO: 67263 - protein, 29 aa, Artificial Sequence
  Cyclic GFR-binding peptide
  MOD_RES (1)..(3): Xaa is C or S
XKXSKVIMVQVEKIKPTKGIVKAIKVSRL

SEQ ID NO: 67264 - protein, 36 aa, Artificial Sequence
  Cyclic GFR-binding peptide
  MOD_RES (31)..(32): Xaa is C or S
SRVIMSMEGIVKPKRGVMIQITINSLAQPVXXPAAS

SEQ ID NO: 67265 - protein, 24 aa, Artificial Sequence
  Cyclic GFR-binding peptide
LTVQVEKFIPKKRVIEVKAVKVSR

SEQ ID NO: 67266 - protein, 32 aa, Artificial Sequence
  Cyclic GFR-binding peptide
  MOD_RES (1)..(3): Xaa is C or S
XGXGEVVMDVTAKKVVKENEDIKRMQVPRLET

SEQ ID NO: 67267 - protein, 39 aa, Artificial Sequence
  Cyclic GFR-binding peptide
  MOD_RES (2)..(34)..(35): Xaa is C or S
GXARVVMNVQVEKIVNSSDDVKAVKVSRLQTPAXXPKPV

SEQ ID NO: 67268 - protein, 30 aa, Artificial Sequence; identical to SEQ ID NO: 21761
  Cyclic GFR-binding peptide

SEQ ID NO: 67269 - protein, 29 aa, Artificial Sequence
  Cyclic GFR-binding peptide
  MOD_RES (28)..(28): Xaa is C or S
MNNSLQEIVNSSDDYYVVPLPELKTPAXT

SEQ ID NO: 67270 - protein, 29 aa, Artificial Sequence
  Cyclic GFR-binding peptide
VVMNNSLQEIVNSSDDYYLVTLPELQTPA

SEQ ID NO: 67271 - protein, 37 aa, Artificial Sequence
  Cyclic GFR-binding peptide
  MOD_RES (2)..(36): Xaa is C or S
EXKNHQLFNSLQEHQGQHPKIRYYVMPLPEEETPVXE

SEQ ID NO: 67272 - protein, 20 aa, Artificial Sequence
  Cyclic GFR-binding peptide
NSLQEVKPTRGVYYLITLPE

SEQ ID NO: 67273 - protein, 30 aa, Artificial Sequence; identical to SEQ ID NO: 21767
  Cyclic GFR-binding peptide
  MOD_RES (28)..(28): Xaa is C or S

SEQ ID NO: 67274 - protein, 30 aa, Artificial Sequence; identical to SEQ ID NO: 21771
  Cyclic GFR-binding peptide

SEQ ID NO: 67275 - protein, 27 aa, Artificial Sequence
  Cyclic GFR-binding peptide
KVVMNSLQEVKPTRGVYYLITLPELDQ

SEQ ID NO: 67276 - protein, 32 aa, Artificial Sequence
  Cyclic GFR-binding peptide
  MOD_RES (1)..(3): Xaa is C or S
XKXSKVVMVTAKKVKPTRGVIKRIQVPRLDQP

SEQ ID NO: 67277 - protein, 28 aa, Artificial Sequence
  Cyclic GFR-binding peptide
QLFNSLQEHQGQHPKIRYYVMPLPEEET

SEQ ID NO: 67278 - protein, 30 aa, Artificial Sequence
  Cyclic GFR-binding peptide
  MOD_RES (1)..(1): Xaa is C or S
XSRVIMVQVEKVKPKRGVVKAIKVSRLAQP

SEQ ID NO: 67279 - protein, 24 aa, Artificial Sequence
  Cyclic GFR-binding peptide
SMEGIIKPTKGIMIQITINSLDQS

SEQ ID NO: 67280 - protein, 29 aa, Artificial Sequence
  Cyclic GFR-binding peptide
ELHEELRNSLQELKPKKRVYEYYLVTLPE

SEQ ID NO: 67281 - protein, 34 aa, Artificial Sequence
  Cyclic GFR-binding peptide
  MOD_RES (2)..(34): Xaa is C or S
GXGEVVMESMEGIVVKDYEDMIQMTINSLETPVX

SEQ ID NO: 67282 - protein, 34 aa, Artificial Sequence; identical to SEQ ID NO: 14580
  Cyclic GFR-binding peptide
  MOD_RES (29)..(30): Xaa is C or S

SEQ ID NO: 67283 - protein, 37 aa, Artificial Sequence
  Cyclic GFR-binding peptide
  MOD_RES (2)..(34)..(35): Xaa is C or S
GXSRVVMNVQVEKIVNSSDDVKAVKVSRLKTPAXXPK

SEQ ID NO: 67284 - protein, 32 aa, Artificial Sequence; identical to SEQ ID NO: 14585
  Cyclic GFR-binding peptide
  MOD_RES (29)..(30): Xaa is C or S

SEQ ID NO: 67285 - protein, 34 aa, Artificial Sequence
  Cyclic GFR-binding peptide
HEELRNSLQELKPKKRVYEYYLVTLPEHHVRSPQ

SEQ ID NO: 67286 - protein, 31 aa, Artificial Sequence; identical to SEQ ID NO: 14586
  Cyclic GFR-binding peptide
  MOD_RES (26)..(26): Xaa is C or S

SEQ ID NO: 67287 - protein, 32 aa, Artificial Sequence
  Cyclic GFR-binding peptide
  MOD_RES (29)..(29): Xaa is C or S
VMNSMEGIIVNSSDDMIQVTINSLKTPAXTPK

SEQ ID NO: 67288 - protein, 30 aa, Artificial Sequence; identical to SEQ ID NO: 14588
  Cyclic GFR-binding peptide
  MOD_RES (1)..(3): Xaa is C or S

SEQ ID NO: 67289 - protein, 34 aa, Artificial Sequence; identical to SEQ ID NO: 21783
  Cyclic GFR-binding peptide

SEQ ID NO: 67290 - protein, 30 aa, Artificial Sequence
  Cyclic GFR-binding peptide
  MOD_RES (27)..(28): Xaa is C or S
DSMEGIVVKENEDMIQMTINSLETPVXXAK

SEQ ID NO: 67291 - protein, 39 aa, Artificial Sequence
  Cyclic GFR-binding peptide
  MOD_RES (1)..(33)..(34): Xaa is C or S
XGEVVMDSMEGIVVKENEDMIQMTINSLETPVXXAKPIK

SEQ ID NO: 67292 - protein, 37 aa, Artificial Sequence; identical to SEQ ID NO: 21792
  Cyclic GFR-binding peptide
  MOD_RES (33)..(33): Xaa is C or S

SEQ ID NO: 67293 - protein, 32 aa, Artificial Sequence
  Cyclic GFR-binding peptide
  MOD_RES (1)..(1): Xaa is C or S
XARVVMNVTAKKIVNSSDDIKRVQVPRLQTPA

SEQ ID NO: 67294 - protein, 33 aa, Artificial Sequence
  Cyclic GFR-binding peptide
HDELTNSLQEFIPKKRVIEYYVVPLPELQVQTP

SEQ ID NO: 67295 - protein, 34 aa, Artificial Sequence
  Cyclic GFR-binding peptide
  MOD_RES (2)..(33)..(34): Xaa is C or S
KXSRVIMVQVEKVKPKRGVVKAIKVSRLAQPVXX

SEQ ID NO: 67296 - protein, 33 aa, Artificial Sequence; identical to SEQ ID NO: 14606
  Cyclic GFR-binding peptide
  MOD_RES (1)..(32)..(33): Xaa is C or S

SEQ ID NO: 67297 - protein, 37 aa, Artificial Sequence
  Cyclic GFR-binding peptide
  MOD_RES (37)..(37): Xaa is C or S
ALHDELTNSLQEFIPKKRVIEYYVVPLPELQVQTPRX

SEQ ID NO: 67298 - protein, 27 aa, Artificial Sequence
  Cyclic GFR-binding peptide
MNVTAKKIVNSSDDIKRVQVPRLQTPA

SEQ ID NO: 67299 - protein, 33 aa, Artificial Sequence; identical to SEQ ID NO: 14607
  Cyclic GFR-binding peptide
  MOD_RES (31)..(32): Xaa is C or S

SEQ ID NO: 67300 - protein, 32 aa, Artificial Sequence
  Cyclic GFR-binding peptide
  MOD_RES (32)..(32): Xaa is C or S
LRNSLQELKPKKRVYEYYLVTLPEHHVRSPQX

SEQ ID NO: 67301 - protein, 25 aa, Artificial Sequence
  Cyclic GFR-binding peptide
VQVEKVVKENEDVKAMKVSRLETPV

SEQ ID NO: 67302 - protein, 30 aa, Artificial Sequence; identical to SEQ ID NO: 14615
  Cyclic GFR-binding peptide
  MOD_RES (29)..(30): Xaa is C or S

SEQ ID NO: 67303 - protein, 37 aa, Artificial Sequence
  Cyclic GFR-binding peptide
  MOD_RES (31)..(32): Xaa is C or S
SRVIMVQVEKVKPKRGVVKAIKVSRLAQPVXXPAASA

SEQ ID NO: 67304 - protein, 38 aa, Artificial Sequence; identical to SEQ ID NO: 14617
  Cyclic GFR-binding peptide
  MOD_RES (1)..(33)..(34): Xaa is C or S

SEQ ID NO: 67305 - protein, 28 aa, Artificial Sequence
  Cyclic GFR-binding peptide
  MOD_RES (2)..(2): Xaa is C or S
KXSRVIMVTAKKVKPKRGVIKRIQVPRL

SEQ ID NO: 67306 - protein, 35 aa, Artificial Sequence; identical to SEQ ID NO: 14619
  Cyclic GFR-binding peptide
  MOD_RES (29)..(30): Xaa is C or S

SEQ ID NO: 67307 - protein, 35 aa, Artificial Sequence
  Cyclic GFR-binding peptide
  MOD_RES (2)..(33)..(34): Xaa is C or S
KXSKVVMVTAKKVKPTRGVIKRIQVPRLDQPVXXP

SEQ ID NO: 67308 - protein, 36 aa, Artificial Sequence
  Cyclic GFR-binding peptide
  MOD_RES (2)..(4)..(36): Xaa is C or S
RXGXGEVVMEVQVEKVVKDYEDVKAMKVSRLETPVX

SEQ ID NO: 67309 - protein, 23 aa, Artificial Sequence
  Cyclic GFR-binding peptide
VTAKKIVNSSDDIKRVQVPRLQT

SEQ ID NO: 67310 - protein, 34 aa, Artificial Sequence; identical to SEQ ID NO: 48833
  Cyclic GFR-binding peptide
  MOD_RES (1)..(32)..(33): Xaa is C or S

SEQ ID NO: 67311 - protein, 27 aa, Artificial Sequence
  Cyclic GFR-binding peptide
  MOD_RES (2)..(2): Xaa is C or S
KXSKVVMVQVEKVKPTRGVVKAIKVSR

SEQ ID NO: 67312 - protein, 27 aa, Artificial Sequence
  Cyclic GFR-binding peptide
  MOD_RES (1)..(1): Xaa is C or S
XGEVVMENSLQEVVKDYEDYYLMTLPE

SEQ ID NO: 67313 - protein, 37 aa, Artificial Sequence
  Cyclic GFR-binding peptide
  MOD_RES (32)..(33): Xaa is C or S
SRVVMNVTAKKIVNSSDDIKRVQVPRLKTPAXXPKPV

SEQ ID NO: 67314 - protein, 22 aa, Artificial Sequence
  Cyclic GFR-binding peptide
MNNSLQEIVNSSDDYYVVPLPE

SEQ ID NO: 67315 - protein, 36 aa, Artificial Sequence
  Cyclic GFR-binding peptide
  MOD_RES (2)..(34): Xaa is C or S
GXSRVVMNVQVEKIVNSSDDVKAVKVSRLKTPAXTP

SEQ ID NO: 67316 - protein, 30 aa, Artificial Sequence; identical to SEQ ID NO: 21812
  Cyclic GFR-binding peptide
  MOD_RES (1)..(1): Xaa is C or S

SEQ ID NO: 67317 - protein, 24 aa, Artificial Sequence
  Cyclic GFR-binding peptide
VQVEKVKPTRGVVKAIKVSRLDQP

SEQ ID NO: 67318 - protein, 33 aa, Artificial Sequence; identical to SEQ ID NO: 14635
  Cyclic GFR-binding peptide
  MOD_RES (2)..(33): Xaa is C or S

SEQ ID NO: 67319 - protein, 30 aa, Artificial Sequence
  Cyclic GFR-binding peptide
  MOD_RES (29)..(29): Xaa is C or S
VMNSMEGIIVNSSDDMIQVTINSLKTPAXT

SEQ ID NO: 67320 - protein, 41 aa, Artificial Sequence; identical to SEQ ID NO: 14642
  Cyclic GFR-binding peptide
  MOD_RES (2)..(4)..(36)..(37): Xaa is C or S

SEQ ID NO: 67321 - protein, 34 aa, Artificial Sequence; identical to SEQ ID NO: 14643
  Cyclic GFR-binding peptide
  MOD_RES (29)..(30): Xaa is C or S

SEQ ID NO: 67322 - protein, 37 aa, Artificial Sequence
  Cyclic GFR-binding peptide
  MOD_RES (32)..(33): Xaa is C or S
GEVVMEVQVEKVVKDYEDVKAMKVSRLETPVXXAKPI

SEQ ID NO: 67323 - protein, 39 aa, Artificial Sequence
  Cyclic GFR-binding peptide
  MOD_RES (2)..(34)..(35): Xaa is C or S
GXGEVVMDVTAKKVVKENEDIKRMQVPRLETPVXXAKPI

SEQ ID NO: 67324 - protein, 36 aa, Artificial Sequence; identical to SEQ ID NO: 14650
  Cyclic GFR-binding peptide
  MOD_RES (31)..(32): Xaa is C or S

SEQ ID NO: 67325 - protein, 28 aa, Artificial Sequence
  Cyclic GFR-binding peptide
  MOD_RES (27)..(28): Xaa is C or S
NNSLQEIVNSSDDYYVVPLPELQTPAXX

SEQ ID NO: 67326 - protein, 36 aa, Artificial Sequence
  Cyclic GFR-binding peptide
  MOD_RES (36)..(36): Xaa is C or S
LHEELRNSLQELKPKKRVYEYYVVPLPEHHVRSPQX

SEQ ID NO: 67327 - protein, 38 aa, Artificial Sequence
  Cyclic GFR-binding peptide
  MOD_RES (36)..(36): Xaa is C or S
LHDELTNSLQEFIPKKRVIEYYVVPLPELQVQTPRXQV

SEQ ID NO: 67328 - protein, 35 aa, Artificial Sequence
  Cyclic GFR-binding peptide
LHEELRNSLQELKPKKRVYEYYVVPLPEHHVRSPQ

SEQ ID NO: 67329 - protein, 39 aa, Artificial Sequence; identical to SEQ ID NO: 21820
  Cyclic GFR-binding peptide
  MOD_RES (33)..(33): Xaa is C or S

SEQ ID NO: 67330 - protein, 27 aa, Artificial Sequence
  Cyclic GFR-binding peptide
SKVVMNSLQEVKPTRGVYYVIPLPELD

SEQ ID NO: 67331 - protein, 33 aa, Artificial Sequence
  Cyclic GFR-binding peptide
  MOD_RES (1)..(33): Xaa is C or S
XGEVVMEVTAKKVVKDYEDIKRMQVPRLETPVX

SEQ ID NO: 67332 - protein, 27 aa, Artificial Sequence
  Cyclic GFR-binding peptide
IMVTAKKIKPTKGIIKRIQVPRLDQSV

SEQ ID NO: 67333 - protein, 30 aa, Artificial Sequence
  Cyclic GFR-binding peptide
  MOD_RES (2)..(4): Xaa is C or S
RXGXGEVVMDVTAKKVVKENEDIKRMQVPR

SEQ ID NO: 67334 - protein, 33 aa, Artificial Sequence
  Cyclic GFR-binding peptide
  MOD_RES (29)..(30): Xaa is C or S
VIMVTAKKIKPTKGIIKRIQVPRLDQSVXXPSA

SEQ ID NO: 67335 - protein, 31 aa, Artificial Sequence
  Cyclic GFR-binding peptide
  MOD_RES (30)..(31): Xaa is C or S
VVMESMEGIVVKDYEDMIQMTINSLETPVXX

SEQ ID NO: 67336 - protein, 34 aa, Artificial Sequence; identical to SEQ ID NO: 14666
  Cyclic GFR-binding peptide
  MOD_RES (2)..(34): Xaa is C or S

SEQ ID NO: 67337 - protein, 36 aa, Artificial Sequence
  Cyclic GFR-binding peptide
  MOD_RES (32)..(33): Xaa is C or S
ARVVMNSMEGIIVNSSDDMIQVTINSLQTPAXXPKP

SEQ ID NO: 67338 - protein, 26 aa, Artificial Sequence
  Cyclic GFR-binding peptide
  MOD_RES (26)..(26): Xaa is C or S
SMEGIIVNSSDDMIQVTINSLQTPAX

SEQ ID NO: 67339 - protein, 33 aa, Artificial Sequence; identical to SEQ ID NO: 21836
  Cyclic GFR-binding peptide
  MOD_RES (2)..(2): Xaa is C or S

SEQ ID NO: 67340 - protein, 29 aa, Artificial Sequence
  Cyclic GFR-binding peptide
  MOD_RES (27)..(28): Xaa is C or S
MNSLQEIKPTKGIYYLITLPELDQSVXXP

SEQ ID NO: 67341 - protein, 29 aa, Artificial Sequence
  Cyclic GFR-binding peptide
  MOD_RES (29)..(29): Xaa is C or S
VMNNSLQEIVNSSDDYYLVTLPELKTPAX

SEQ ID NO: 67342 - protein, 34 aa, Artificial Sequence; identical to SEQ ID NO: 21840
  Cyclic GFR-binding peptide
  MOD_RES (2)..(2): Xaa is C or S

SEQ ID NO: 67343 - protein, 34 aa, Artificial Sequence; identical to SEQ ID NO: 14681
  Cyclic GFR-binding peptide
  MOD_RES (31)..(32): Xaa is C or S

SEQ ID NO: 67344 - protein, 35 aa, Artificial Sequence; identical to SEQ ID NO: 21843
  Cyclic GFR-binding peptide
  MOD_RES (31)..(31): Xaa is C or S

SEQ ID NO: 67345 - protein, 33 aa, Artificial Sequence; identical to SEQ ID NO: 21844
  Cyclic GFR-binding peptide
  MOD_RES (31)..(31): Xaa is C or S

SEQ ID NO: 67346 - protein, 36 aa, Artificial Sequence
  Cyclic GFR-binding peptide
  MOD_RES (1)..(3)..(34)..(35): Xaa is C or S
XKXSKVVMVTAKKVKPTRGVIKRIQVPRLDQPVXXP

SEQ ID NO: 67347 - protein, 31 aa, Artificial Sequence; identical to SEQ ID NO: 14682
  Cyclic GFR-binding peptide
  MOD_RES (30)..(31): Xaa is C or S

SEQ ID NO: 67348 - protein, 30 aa, Artificial Sequence
  Cyclic GFR-binding peptide
  MOD_RES (2)..(4): Xaa is C or S
RXGXGEVVMEVQVEKVVKDYEDVKAMKVSR

SEQ ID NO: 67349 - protein, 31 aa, Artificial Sequence
  Cyclic GFR-binding peptide
  MOD_RES (1)..(1): Xaa is C or S
XGEVVMDVTAKKVVKENEDIKRMQVPRLETP

SEQ ID NO: 67350 - protein, 32 aa, Artificial Sequence
  Cyclic GFR-binding peptide
  MOD_RES (29)..(29): Xaa is C or S
FNSLQEHQGQHPKIRYYLMTLPEEETPVXELG

SEQ ID NO: 67351 - protein, 27 aa, Artificial Sequence
  Cyclic GFR-binding peptide
  MOD_RES (26)..(27): Xaa is C or S
SMEGIVVKENEDMIQMTINSLETPVXX

SEQ ID NO: 67352 - protein, 33 aa, Artificial Sequence; identical to SEQ ID NO: 14684
  Cyclic GFR-binding peptide
  MOD_RES (27)..(28): Xaa is C or S

SEQ ID NO: 67353 - protein, 25 aa, Artificial Sequence
  Cyclic GFR-binding peptide
NNSLQEIVNSSDDYYLVTLPELQTP

SEQ ID NO: 67354 - protein, 26 aa, Artificial Sequence
  Cyclic GFR-binding peptide
TNSLQEFIPKKRVIEYYLVTLPELQV

SEQ ID NO: 67355 - protein, 32 aa, Artificial Sequence
  Cyclic GFR-binding peptide
  MOD_RES (30)..(31): Xaa is C or S
VVMNSMEGIIVNSSDDMIQVTINSLKTPAXXP

SEQ ID NO: 67356 - protein, 24 aa, Artificial Sequence
  Cyclic GFR-binding peptide
LFVTAKKHQGQHPKIRIKRMQVPR

SEQ ID NO: 67357 - protein, 34 aa, Artificial Sequence; identical to SEQ ID NO: 14690
  Cyclic GFR-binding peptide
  MOD_RES (2)..(33)..(34): Xaa is C or S

SEQ ID NO: 67358 - protein, 36 aa, Artificial Sequence
  Cyclic GFR-binding peptide
  MOD_RES (32)..(32): Xaa is C or S
LTNSLQEFIPKKRVIEYYLVTLPELQVQTPRXQVNR

SEQ ID NO: 67359 - protein, 34 aa, Artificial Sequence
  Cyclic GFR-binding peptide
  MOD_RES (34)..(34): Xaa is C or S
EELRNSLQELKPKKRVYEYYLVTLPEHHVRSPQX

SEQ ID NO: 67360 - protein, 27 aa, Artificial Sequence
  Cyclic GFR-binding peptide
  MOD_RES (1)..(1): Xaa is C or S
XSKVVMNSLQEVKPTRGVYYLITLPEL

SEQ ID NO: 67361 - protein, 28 aa, Artificial Sequence
  Cyclic GFR-binding peptide
RVVMNVTAKKIVNSSDDIKRVQVPRLQT

SEQ ID NO: 67362 - protein, 26 aa, Artificial Sequence
  Cyclic GFR-binding peptide
HQLFVQVEKHQGQHPKIRVKAMKVSR

SEQ ID NO: 67363 - protein, 28 aa, Artificial Sequence
  Cyclic GFR-binding peptide
VMNNSLQEIVNSSDDYYLVTLPELQTPA

SEQ ID NO: 67364 - protein, 36 aa, Artificial Sequence
  Cyclic GFR-binding peptide
  MOD_RES (2)..(4)..(36): Xaa is C or S
RXGXGEVVMDVTAKKVVKENEDIKRMQVPRLETPVX

SEQ ID NO: 67365 - protein, 23 aa, Artificial Sequence
  Cyclic GFR-binding peptide
VVMSMEGIVKPTRGVMIQITINS

SEQ ID NO: 67366 - protein, 30 aa, Artificial Sequence; identical to SEQ ID NO: 14709
  Cyclic GFR-binding peptide
  MOD_RES (29)..(30): Xaa is C or S

SEQ ID NO: 67367 - protein, 32 aa, Artificial Sequence; identical to SEQ ID NO: 14718
  Cyclic GFR-binding peptide
  MOD_RES (28)..(29): Xaa is C or S

SEQ ID NO: 67368 - protein, 32 aa, Artificial Sequence
  Cyclic GFR-binding peptide
  MOD_RES (29)..(30): Xaa is C or S
VMNVQVEKIVNSSDDVKAVKVSRLKTPAXXPK

SEQ ID NO: 67369 - protein, 31 aa, Artificial Sequence; identical to SEQ ID NO: 21879
  Cyclic GFR-binding peptide

SEQ ID NO: 67370 - protein, 26 aa, Artificial Sequence
  Cyclic GFR-binding peptide
NVQVEKIVNSSDDVKAVKVSRLQTPA

SEQ ID NO: 67371 - protein, 31 aa, Artificial Sequence
  Cyclic GFR-binding peptide
  MOD_RES (2)..(4): Xaa is C or S
SXKXSRVIMSMEGIVKPKRGVMIQITINSLA

SEQ ID NO: 67372 - protein, 36 aa, Artificial Sequence
  Cyclic GFR-binding peptide
  MOD_RES (30)..(31): Xaa is C or S
VVMDSMEGIVVKENEDMIQMTINSLETPVXXAKPIK

SEQ ID NO: 67373 - protein, 29 aa, Artificial Sequence
  Cyclic GFR-binding peptide
  MOD_RES (28)..(29): Xaa is C or S
VMNSLQEVKPTRGVYYVIPLPELDQPVXX

SEQ ID NO: 67374 - protein, 29 aa, Artificial Sequence
  Cyclic GFR-binding peptide
SKVVMNSLQEVKPTRGVYYLITLPELDQP

SEQ ID NO: 67375 - protein, 33 aa, Artificial Sequence; identical to SEQ ID NO: 21884
  Cyclic GFR-binding peptide
  MOD_RES (1)..(3): Xaa is C or S

SEQ ID NO: 67376 - protein, 33 aa, Artificial Sequence
  Cyclic GFR-binding peptide
HEELRNSLQELKPKKRVYEYYVVPLPEHHVRSP

SEQ ID NO: 67377 - protein, 30 aa, Artificial Sequence
  Cyclic GFR-binding peptide
  MOD_RES (2)..(2): Xaa is C or S
EXKNHQLFNSLQEHQGQHPKIRYYLMTLPE

SEQ ID NO: 67378 - protein, 31 aa, Artificial Sequence; identical to SEQ ID NO: 14732
  Cyclic GFR-binding peptide
  MOD_RES (30)..(31): Xaa is C or S

SEQ ID NO: 67379 - protein, 36 aa, Artificial Sequence
  Cyclic GFR-binding peptide
  MOD_RES (1)..(35): Xaa is C or S
XKNHQLFNSLQEHQGQHPKIRYYVMPLPEEETPVXE

SEQ ID NO: 67380 - protein, 32 aa, Artificial Sequence
  Cyclic GFR-binding peptide
  MOD_RES (1)..(32): Xaa is C or S
XSKVVMVTAKKVKPTRGVIKRIQVPRLDQPVX

SEQ ID NO: 67381 - protein, 33 aa, Artificial Sequence
  Cyclic GFR-binding peptide
  MOD_RES (31)..(32): Xaa is C or S
RVVMNSMEGIIVNSSDDMIQVTINSLKTPAXXP

SEQ ID NO: 67382 - protein, 33 aa, Artificial Sequence
  Cyclic GFR-binding peptide
LHEELRNSLQELKPKKRVYEYYLVTLPEHHVRS

SEQ ID NO: 67383 - protein, 34 aa, Artificial Sequence
  Cyclic GFR-binding peptide
  MOD_RES (2)..(34): Xaa is C or S
GXSRVVMNVTAKKIVNSSDDIKRVQVPRLKTPAX

SEQ ID NO: 67384 - protein, 29 aa, Artificial Sequence
  Cyclic GFR-binding peptide
  MOD_RES (2)..(4): Xaa is C or S
SXKXSKVVMSMEGIVKPTRGVMIQITINS

SEQ ID NO: 67385 - protein, 29 aa, Artificial Sequence
  Cyclic GFR-binding peptide
VVMNVQVEKIVNSSDDVKAVKVSRLKTPA

SEQ ID NO: 67386 - protein, 26 aa, Artificial Sequence
  Cyclic GFR-binding peptide
KVVMSMEGIVKPTRGVMIQITINSLD

SEQ ID NO: 67387 - protein, 41 aa, Artificial Sequence
  Cyclic GFR-binding peptide
  MOD_RES (2)..(4)..(36)..(37): Xaa is C or S
RXGXGEVVMDVTAKKVVKENEDIKRMQVPRLETPVXXAKPI

SEQ ID NO: 67388 - protein, 31 aa, Artificial Sequence
  Cyclic GFR-binding peptide
  MOD_RES (2)..(4): Xaa is C or S
RXGXGEVVMDVQVEKVVKENEDVKAMKVSRL

SEQ ID NO: 67389 - protein, 32 aa, Artificial Sequence; identical to SEQ ID NO: 14743
  Cyclic GFR-binding peptide
  MOD_RES (1)..(3): Xaa is C or S

SEQ ID NO: 67390 - protein, 30 aa, Artificial Sequence; identical to SEQ ID NO: 14747
  Cyclic GFR-binding peptide
  MOD_RES (2)..(4): Xaa is C or S

SEQ ID NO: 67391 - protein, 29 aa, Artificial Sequence
  Cyclic GFR-binding peptide
  MOD_RES (28)..(28): Xaa is C or S
VTAKKHQGQHPKIRIKRMQVPREETPVXE

SEQ ID NO: 67392 - protein, 23 aa, Artificial Sequence
  Cyclic GFR-binding peptide
NSLQEFIPKKRVIEYYVVPLPEL

SEQ ID NO: 67393 - protein, 41 aa, Artificial Sequence
  Cyclic GFR-binding peptide
  MOD_RES (2)..(4)..(36)..(37): Xaa is C or S
HXGXARVVMNVTAKKIVNSSDDIKRVQVPRLQTPAXXPKPV

SEQ ID NO: 67394 - protein, 37 aa, Artificial Sequence; identical to SEQ ID NO: 14753
  Cyclic GFR-binding peptide
  MOD_RES (31)..(32): Xaa is C or S

SEQ ID NO: 67395 - protein, 36 aa, Artificial Sequence
  Cyclic GFR-binding peptide
  MOD_RES (2)..(33)..(34): Xaa is C or S
KXSRVIMSMEGIVKPKRGVMIQITINSLAQPVXXPA

SEQ ID NO: 67396 - protein, 35 aa, Artificial Sequence
  Cyclic GFR-binding peptide
  MOD_RES (31)..(32): Xaa is C or S
RVVMNVQVEKIVNSSDDVKAVKVSRLQTPAXXPKP

SEQ ID NO: 67397 - protein, 42 aa, Artificial Sequence; identical to SEQ ID NO: 21903
  Cyclic GFR-binding peptide
  MOD_RES (2)..(36): Xaa is C or S

SEQ ID NO: 67398 - protein, 22 aa, Artificial Sequence
  Cyclic GFR-binding peptide
MNSLQEVKPTRGVYYVIPLPEL

SEQ ID NO: 67399 - protein, 31 aa, Artificial Sequence; identical to SEQ ID NO: 14761
  Cyclic GFR-binding peptide
  MOD_RES (1)..(1): Xaa is C or S

SEQ ID NO: 67400 - protein, 28 aa, Artificial Sequence
  Cyclic GFR-binding peptide
  MOD_RES (1)..(3): Xaa is C or S
XKXSKVIMNSLQEIKPTKGIYYLITLPE

SEQ ID NO: 67401 - protein, 32 aa, Artificial Sequence; identical to SEQ ID NO: 14765
  Cyclic GFR-binding peptide
  MOD_RES (30)..(31): Xaa is C or S

SEQ ID NO: 67402 - protein, 34 aa, Artificial Sequence; identical to SEQ ID NO: 21906
  Cyclic GFR-binding peptide
  MOD_RES (31)..(31): Xaa is C or S

SEQ ID NO: 67403 - protein, 38 aa, Artificial Sequence; identical to SEQ ID NO: 21909
  Cyclic GFR-binding peptide
  MOD_RES (1)..(3): Xaa is C or S

SEQ ID NO: 67404 - protein, 27 aa, Artificial Sequence
  Cyclic GFR-binding peptide
VIMVTAKKVKPKRGVIKRIQVPRLAQP

SEQ ID NO: 67405 - protein, 36 aa, Artificial Sequence
  Cyclic GFR-binding peptide
  MOD_RES (32)..(33): Xaa is C or S
ARVVMNVTAKKIVNSSDDIKRVQVPRLQTPAXXPKP

SEQ ID NO: 67406 - protein, 32 aa, Artificial Sequence; identical to SEQ ID NO: 14771
  Cyclic GFR-binding peptide
  MOD_RES (26)..(26): Xaa is C or S

SEQ ID NO: 67407 - protein, 38 aa, Artificial Sequence
  Cyclic GFR-binding peptide
  MOD_RES (1)..(3)..(35)..(36): Xaa is C or S
XGXGEVVMDSMEGIVVKENEDMIQMTINSLETPVXXAK

SEQ ID NO: 67408 - protein, 27 aa, Artificial Sequence
  Cyclic GFR-binding peptide
NSLQELKPKKRVYEYYVVPLPEHHVRS

SEQ ID NO: 67409 - protein, 34 aa, Artificial Sequence
  Cyclic GFR-binding peptide
  MOD_RES (31)..(32): Xaa is C or S
EVVMDSMEGIVVKENEDMIQMTINSLETPVXXAK

SEQ ID NO: 67410 - protein, 39 aa, Artificial Sequence; identical to SEQ ID NO: 21915
  Cyclic GFR-binding peptide
  MOD_RES (2)..(4): Xaa is C or S

SEQ ID NO: 67411 - protein, 36 aa, Artificial Sequence
  Cyclic GFR-binding peptide
  MOD_RES (1)..(3)..(34)..(35): Xaa is C or S
XKXSKVIMVQVEKIKPTKGIVKAIKVSRLDQSVXXP

SEQ ID NO: 67412 - protein, 44 aa, Artificial Sequence
  Cyclic GFR-binding peptide
  MOD_RES (2)..(4)..(38): Xaa is C or S
RXEXKNHQLFNSLQEHQGQHPKIRYYLMTLPEEETPVXELGEDN

SEQ ID NO: 67413 - protein, 36 aa, Artificial Sequence
  Cyclic GFR-binding peptide
  MOD_RES (1)..(3)..(34)..(35): Xaa is C or S
XKXSRVIMVQVEKVKPKRGVVKAIKVSRLAQPVXXP

SEQ ID NO: 67414 - protein, 39 aa, Artificial Sequence; identical to SEQ ID NO: 21922
  Cyclic GFR-binding peptide
  MOD_RES (1)..(35): Xaa is C or S

SEQ ID NO: 67415 - protein, 38 aa, Artificial Sequence
  Cyclic GFR-binding peptide
  MOD_RES (32)..(33): Xaa is C or S
ARVVMNVQVEKIVNSSDDVKAVKVSRLQTPAXXPKPVT

SEQ ID NO: 67416 - protein, 36 aa, Artificial Sequence; identical to SEQ ID NO: 14796
  Cyclic GFR-binding peptide
  MOD_RES (1)..(33)..(34): Xaa is C or S

SEQ ID NO: 67417 - protein, 30 aa, Artificial Sequence
  Cyclic GFR-binding peptide
  MOD_RES (30)..(30): Xaa is C or S
VVMEVTAKKVVKDYEDIKRMQVPRLETPVX

SEQ ID NO: 67418 - protein, 27 aa, Artificial Sequence
  Cyclic GFR-binding peptide
DELTVQVEKFIPKKRVIEVKAVKVSRL

SEQ ID NO: 67419 - protein, 35 aa, Artificial Sequence; identical to SEQ ID NO: 14802
  Cyclic GFR-binding peptide
  MOD_RES (29)..(30): Xaa is C or S

SEQ ID NO: 67420 - protein, 38 aa, Artificial Sequence; identical to SEQ ID NO: 21932
  Cyclic GFR-binding peptide
  MOD_RES (1)..(3)..(37): Xaa is C or S

SEQ ID NO: 67421 - protein, 28 aa, Artificial Sequence
  Cyclic GFR-binding peptide
KNHQLFNSLQEHQGQHPKIRYYVMPLPE

SEQ ID NO: 67422 - protein, 24 aa, Artificial Sequence
  Cyclic GFR-binding peptide
MEVQVEKVVKDYEDVKAMKVSRLE

SEQ ID NO: 67423 - protein, 33 aa, Artificial Sequence
  Cyclic GFR-binding peptide
  MOD_RES (30)..(30): Xaa is C or S
NSLQEFIPKKRVIEYYVVPLPELQVQTPRXQVN

SEQ ID NO: 67424 - protein, 39 aa, Artificial Sequence; identical to SEQ ID NO: 14816
  Cyclic GFR-binding peptide
  MOD_RES (1)..(3)..(35)..(36): Xaa is C or S

SEQ ID NO: 67425 - protein, 38 aa, Artificial Sequence; identical to SEQ ID NO: 21942
  Cyclic GFR-binding peptide
  MOD_RES (2)..(4): Xaa is C or S

SEQ ID NO: 67426 - protein, 32 aa, Artificial Sequence
  Cyclic GFR-binding peptide
  MOD_RES (31)..(32): Xaa is C or S
RVVMNSMEGIIVNSSDDMIQVTINSLKTPAXX

SEQ ID NO: 67427 - protein, 29 aa, Artificial Sequence
  Cyclic GFR-binding peptide
HDELTSMEGIFIPKKRVIEMIQVTINSLQ

SEQ ID NO: 67428 - protein, 32 aa, Artificial Sequence; identical to SEQ ID NO: 14821
  Cyclic GFR-binding peptide
  MOD_RES (27)..(28): Xaa is C or S

SEQ ID NO: 67429 - protein, 36 aa, Artificial Sequence
  Cyclic GFR-binding peptide
  MOD_RES (32)..(33): Xaa is C or S
SRVVMNSMEGIIVNSSDDMIQVTINSLKTPAXXPKP

SEQ ID NO: 67430 - protein, 30 aa, Artificial Sequence
  Cyclic GFR-binding peptide
  MOD_RES (2)..(4): Xaa is C or S
HXGXSRVVMNVTAKKIVNSSDDIKRVQVPR

SEQ ID NO: 67431 - protein, 34 aa, Artificial Sequence
  Cyclic GFR-binding peptide
LHDELTNSLQEFIPKKRVIEYYVVPLPELQVQTP

SEQ ID NO: 67432 - protein, 34 aa, Artificial Sequence
  Cyclic GFR-binding peptide
  MOD_RES (1)..(33)..(34): Xaa is C or S
XGEVVMDVTAKKVVKENEDIKRMQVPRLETPVXX

SEQ ID NO: 67433 - protein, 33 aa, Artificial Sequence
  Cyclic GFR-binding peptide
  MOD_RES (31)..(32): Xaa is C or S
SKVIMSMEGIIKPTKGIMIQITINSLDQSVXXP

SEQ ID NO: 67434 - protein, 39 aa, Artificial Sequence; identical to SEQ ID NO: 21959
  Cyclic GFR-binding peptide
  MOD_RES (1)..(3): Xaa is C or S

SEQ ID NO: 67435 - protein, 29 aa, Artificial Sequence
  Cyclic GFR-binding peptide
KVVMVTAKKVKPTRGVIKRIQVPRLDQPV

SEQ ID NO: 67436 - protein, 33 aa, Artificial Sequence
  Cyclic GFR-binding peptide
  MOD_RES (27)..(28): Xaa is C or S
NSMEGIIVNSSDDMIQVTINSLKTPAXXPKPVY

SEQ ID NO: 67437 - protein, 34 aa, Artificial Sequence
  Cyclic GFR-binding peptide
  MOD_RES (29)..(30): Xaa is C or S
VIMVTAKKVKPKRGVIKRIQVPRLAQPVXXPAAS

SEQ ID NO: 67438 - protein, 39 aa, Artificial Sequence
  Cyclic GFR-binding peptide
  MOD_RES (1)..(3)..(35)..(36): Xaa is C or S
XGXGEVVMDSMEGIVVKENEDMIQMTINSLETPVXXAKP

SEQ ID NO: 67439 - protein, 30 aa, Artificial Sequence
  Cyclic GFR-binding peptide
LRNSLQELKPKKRVYEYYVVPLPEHHVRSP

SEQ ID NO: 67440 - protein, 36 aa, Artificial Sequence; identical to SEQ ID NO: 14836
  Cyclic GFR-binding peptide
  MOD_RES (1)..(32)..(33): Xaa is C or S

SEQ ID NO: 67441 - protein, 29 aa, Artificial Sequence
  Cyclic GFR-binding peptide
  MOD_RES (27)..(28): Xaa is C or S
NNSLQEIVNSSDDYYLVTLPELQTPAXXP

SEQ ID NO: 67442 - protein, 42 aa, Artificial Sequence
  Cyclic GFR-binding peptide
  MOD_RES (1)..(3)..(37): Xaa is C or S
XEXKNHQLFNSLQEHQGQHPKIRYYLMTLPEEETPVXELGED

SEQ ID NO: 67443 - protein, 28 aa, Artificial Sequence
  Cyclic GFR-binding peptide
  MOD_RES (28)..(28): Xaa is C or S
IMNSLQEIKPTKGIYYVIPLPELDQSVX

SEQ ID NO: 67444 - protein, 32 aa, Artificial Sequence
  Cyclic GFR-binding peptide
  MOD_RES (1)..(1): Xaa is C or S
XKNHQLFNSLQEHQGQHPKIRYYLMTLPEEET

SEQ ID NO: 67445 - protein, 28 aa, Artificial Sequence
  Cyclic GFR-binding peptide
VVMNVQVEKIVNSSDDVKAVKVSRLKTP

SEQ ID NO: 67446 - protein, 31 aa, Artificial Sequence
  Cyclic GFR-binding peptide
  MOD_RES (2)..(4): Xaa is C or S
SXKXSKVIMVTAKKIKPTKGIIKRIQVPRLD

SEQ ID NO: 67447 - protein, 34 aa, Artificial Sequence; identical to SEQ ID NO: 14853
  Cyclic GFR-binding peptide
  MOD_RES (30)..(30): Xaa is C or S

SEQ ID NO: 67448 - protein, 35 aa, Artificial Sequence
  Cyclic GFR-binding peptide
  MOD_RES (1)..(3)..(35): Xaa is C or S
XGXGEVVMESMEGIVVKDYEDMIQMTINSLETPVX

SEQ ID NO: 67449 - protein, 40 aa, Artificial Sequence
  Cyclic GFR-binding peptide
  MOD_RES (2)..(39): Xaa is C or S
AXELHEELRNSLQELKPKKRVYEYYVVPLPEHHVRSPQXK

SEQ ID NO: 67450 - protein, 31 aa, Artificial Sequence; identical to SEQ ID NO: 14857
  Cyclic GFR-binding peptide
  MOD_RES (2)..(4): Xaa is C or S

SEQ ID NO: 67451 - protein, 27 aa, Artificial Sequence
  Cyclic GFR-binding peptide
  MOD_RES (26)..(27): Xaa is C or S
SMEGIIKPTKGIMIQITINSLDQSVXX

SEQ ID NO: 67452 - protein, 31 aa, Artificial Sequence
  Cyclic GFR-binding peptide
ELHEELRNSLQELKPKKRVYEYYVVPLPEHH

SEQ ID NO: 67453 - protein, 32 aa, Artificial Sequence; identical to SEQ ID NO: 21977
  Cyclic GFR-binding peptide
  MOD_RES (32)..(32): Xaa is C or S

SEQ ID NO: 67454 - protein, 24 aa, Artificial Sequence
  Cyclic GFR-binding peptide
SMEGIVKPTRGVMIQITINSLDQP

SEQ ID NO: 67455 - protein, 36 aa, Artificial Sequence; identical to SEQ ID NO: 14865
  Cyclic GFR-binding peptide
  MOD_RES (1)..(33)..(34): Xaa is C or S

SEQ ID NO: 67456 - protein, 28 aa, Artificial Sequence
  Cyclic GFR-binding peptide
  MOD_RES (27)..(28): Xaa is C or S
NNSLQEIVNSSDDYYVVPLPELKTPAXX

SEQ ID NO: 67457 - protein, 36 aa, Artificial Sequence
  Cyclic GFR-binding peptide
  MOD_RES (2)..(34)..(35): Xaa is C or S
GXSRVVMNSMEGIIVNSSDDMIQVTINSLKTPAXXP

SEQ ID NO: 67458 - protein, 30 aa, Artificial Sequence
  Cyclic GFR-binding peptide
  MOD_RES (30)..(30): Xaa is C or S
VVMDSMEGIVVKENEDMIQMTINSLETPVX

SEQ ID NO: 67459 - protein, 27 aa, Artificial Sequence
  Cyclic GFR-binding peptide
NSLQEFIPKKRVIEYYLVTLPELQVQT

SEQ ID NO: 67460 - protein, 36 aa, Artificial Sequence; identical to SEQ ID NO: 21990
  Cyclic GFR-binding peptide
  MOD_RES (33)..(33): Xaa is C or S

SEQ ID NO: 67461 - protein, 38 aa, Artificial Sequence; identical to SEQ ID NO: 49031
  Cyclic GFR-binding peptide
  MOD_RES (1)..(3)..(34)..(35): Xaa is C or S

SEQ ID NO: 67462 - protein, 23 aa, Artificial Sequence
  Cyclic GFR-binding peptide
MVTAKKVKPTRGVIKRIQVPRLD

SEQ ID NO: 67463 - protein, 28 aa, Artificial Sequence
  Cyclic GFR-binding peptide
RVVMNSMEGIIVNSSDDMIQVTINSLQT

SEQ ID NO: 67464 - protein, 39 aa, Artificial Sequence; identical to SEQ ID NO: 14889
  Cyclic GFR-binding peptide
  MOD_RES (1)..(3)..(35)..(36): Xaa is C or S

SEQ ID NO: 67465 - protein, 21 aa, Artificial Sequence
  Cyclic GFR-binding peptide
MNSLQEIKPTKGIYYLITLPE

SEQ ID NO: 67466 - protein, 35 aa, Artificial Sequence
  Cyclic GFR-binding peptide
  MOD_RES (2)..(4)..(35): Xaa is C or S
SXKXSKVIMVTAKKIKPTKGIIKRIQVPRLDQSVX

SEQ ID NO: 67467 - protein, 37 aa, Artificial Sequence; identical to SEQ ID NO: 14895
  Cyclic GFR-binding peptide
  MOD_RES (1)..(3)..(34)..(35): Xaa is C or S

SEQ ID NO: 67468 - protein, 33 aa, Artificial Sequence
  Cyclic GFR-binding peptide
  MOD_RES (29)..(30): Xaa is C or S
VMNVQVEKIVNSSDDVKAVKVSRLKTPAXXPKP

SEQ ID NO: 67469 - protein, 36 aa, Artificial Sequence; identical to SEQ ID NO: 14901
  Cyclic GFR-binding peptide
  MOD_RES (30)..(31): Xaa is C or S

SEQ ID NO: 67470 - protein, 42 aa, Artificial Sequence
  Cyclic GFR-binding peptide
  MOD_RES (2)..(4)..(36)..(37): Xaa is C or S
HXGXSRVVMNSMEGIIVNSSDDMIQVTINSLKTPAXXPKPVY

SEQ ID NO: 67471 - protein, 29 aa, Artificial Sequence
  Cyclic GFR-binding peptide
  MOD_RES (29)..(29): Xaa is C or S
VMEVTAKKVVKDYEDIKRMQVPRLETPVX

SEQ ID NO: 67472 - protein, 37 aa, Artificial Sequence
  Cyclic GFR-binding peptide
  MOD_RES (2)..(4)..(35)..(36): Xaa is C or S
SXKXSKVIMSMEGIIKPTKGIMIQITINSLDQSVXXP

SEQ ID NO: 67473 - protein, 36 aa, Artificial Sequence
  Cyclic GFR-binding peptide
  MOD_RES (31)..(32): Xaa is C or S
EVVMESMEGIVVKDYEDMIQMTINSLETPVXXAKPI

SEQ ID NO: 67474 - protein, 35 aa, Artificial Sequence
  Cyclic GFR-binding peptide
  MOD_RES (30)..(31): Xaa is C or S
KVVMSMEGIVKPTRGVMIQITINSLDQPVXXPSAS

SEQ ID NO: 67475 - protein, 31 aa, Artificial Sequence
  Cyclic GFR-binding peptide
  MOD_RES (1)..(1): Xaa is C or S
XSKVVMVQVEKVKPTRGVVKAIKVSRLDQPV

SEQ ID NO: 67476 - protein, 33 aa, Artificial Sequence
  Cyclic GFR-binding peptide
  MOD_RES (29)..(30): Xaa is C or S
VMDVQVEKVVKENEDVKAMKVSRLETPVXXAKP

SEQ ID NO: 67477 - protein, 29 aa, Artificial Sequence
  Cyclic GFR-binding peptide
  MOD_RES (27)..(28): Xaa is C or S
EVQVEKVVKDYEDVKAMKVSRLETPVXXA

SEQ ID NO: 67478 - protein, 30 aa, Artificial Sequence; identical to SEQ ID NO: 14918
  Cyclic GFR-binding peptide
  MOD_RES (26)..(27): Xaa is C or S

SEQ ID NO: 67479 - protein, 35 aa, Artificial Sequence; identical to SEQ ID NO: 22007
  Cyclic GFR-binding peptide
  MOD_RES (1)..(3): Xaa is C or S

SEQ ID NO: 67480 - protein, 35 aa, Artificial Sequence; identical to SEQ ID NO: 14919
  Cyclic GFR-binding peptide
  MOD_RES (2)..(34)..(35): Xaa is C or S

SEQ ID NO: 67481 - protein, 33 aa, Artificial Sequence; identical to SEQ ID NO: 14921
  Cyclic GFR-binding peptide
  MOD_RES (32)..(32): Xaa is C or S

SEQ ID NO: 67482 - protein, 37 aa, Artificial Sequence; identical to SEQ ID NO: 22014
  Cyclic GFR-binding peptide
  MOD_RES (34)..(34): Xaa is C or S

SEQ ID NO: 67483 - protein, 31 aa, Artificial Sequence; identical to SEQ ID NO: 14924
  Cyclic GFR-binding peptide
  MOD_RES (26)..(27): Xaa is C or S

SEQ ID NO: 67484 - protein, 39 aa, Artificial Sequence
  Cyclic GFR-binding peptide
  MOD_RES (35)..(35): Xaa is C or S
HEELRNSLQELKPKKRVYEYYVVPLPEHHVRSPQXKVSS

SEQ ID NO: 67485 - protein, 30 aa, Artificial Sequence
  Cyclic GFR-binding peptide
  MOD_RES (29)..(30): Xaa is C or S
VMNVTAKKIVNSSDDIKRVQVPRLQTPAXX

SEQ ID NO: 67486 - protein, 26 aa, Artificial Sequence
  Cyclic GFR-binding peptide
  MOD_RES (1)..(1): Xaa is C or S
XSKVVMVQVEKVKPTRGVVKAIKVSR

SEQ ID NO: 67487 - protein, 33 aa, Artificial Sequence
  Cyclic GFR-binding peptide
  MOD_RES (1)..(3): Xaa is C or S
XKXSKVIMVQVEKIKPTKGIVKAIKVSRLDQSV

SEQ ID NO: 67488 - protein, 37 aa, Artificial Sequence
  Cyclic GFR-binding peptide
  MOD_RES (2)..(4)..(36)..(37): Xaa is C or S
HXGXSRVVMNVQVEKIVNSSDDVKAVKVSRLKTPAXX

SEQ ID NO: 67489 - protein, 26 aa, Artificial Sequence
  Cyclic GFR-binding peptide
MNSLQEIKPTKGIYYLITLPELDQSV

SEQ ID NO: 67490 - protein, 36 aa, Artificial Sequence; identical to SEQ ID NO: 14942
  Cyclic GFR-binding peptide
  MOD_RES (1)..(3)..(34)..(35): Xaa is C or S

SEQ ID NO: 67491 - protein, 45 aa, Artificial Sequence; identical to SEQ ID NO: 22032
  Cyclic GFR-binding peptide
  MOD_RES (2)..(4)..(41): Xaa is C or S

SEQ ID NO: 67492 - protein, 36 aa, Artificial Sequence; identical to SEQ ID NO: 14943
  Cyclic GFR-binding peptide
  MOD_RES (30)..(31): Xaa is C or S

SEQ ID NO: 67493 - protein, 37 aa, Artificial Sequence
  Cyclic GFR-binding peptide
  MOD_RES (1)..(3)..(35)..(36): Xaa is C or S
XGXSRVVMNSMEGIIVNSSDDMIQVTINSLKTPAXXP

SEQ ID NO: 67494 - protein, 35 aa, Artificial Sequence; identical to SEQ ID NO: 22033
  Cyclic GFR-binding peptide
  MOD_RES (34)..(34): Xaa is C or S

SEQ ID NO: 67495 - protein, 31 aa, Artificial Sequence; identical to SEQ ID NO: 14949
  Cyclic GFR-binding peptide
  MOD_RES (1)..(3): Xaa is C or S

SEQ ID NO: 67496 - protein, 27 aa, Artificial Sequence
  Cyclic GFR-binding peptide
SRVIMSMEGIVKPKRGVMIQITINSLA

SEQ ID NO: 67497 - protein, 34 aa, Artificial Sequence
  Cyclic GFR-binding peptide
  MOD_RES (28)..(29): Xaa is C or S
IMVQVEKIKPTKGIVKAIKVSRLDQSVXXPSASA

SEQ ID NO: 67498 - protein, 33 aa, Artificial Sequence
  Cyclic GFR-binding peptide
  MOD_RES (32)..(33): Xaa is C or S
ARVVMNSMEGIIVNSSDDMIQVTINSLQTPAXX

SEQ ID NO: 67499 - protein, 33 aa, Artificial Sequence
  Cyclic GFR-binding peptide
  MOD_RES (28)..(29): Xaa is C or S
MNVTAKKIVNSSDDIKRVQVPRLKTPAXXPKPV

SEQ ID NO: 67500 - protein, 27 aa, Artificial Sequence
  Cyclic GFR-binding peptide
VVMNVTAKKIVNSSDDIKRVQVPRLQT

SEQ ID NO: 67501 - protein, 25 aa, Artificial Sequence
  Cyclic GFR-binding peptide
VQVEKIVNSSDDVKAVKVSRLQTPA

SEQ ID NO: 67502 - protein, 38 aa, Artificial Sequence; identical to SEQ ID NO: 14958
  Cyclic GFR-binding peptide
  MOD_RES (1)..(33)..(34): Xaa is C or S

SEQ ID NO: 67503 - protein, 29 aa, Artificial Sequence
  Cyclic GFR-binding peptide
  MOD_RES (2)..(2): Xaa is C or S
GXGEVVMEVTAKKVVKDYEDIKRMQVPRL

SEQ ID NO: 67504 - protein, 22 aa, Artificial Sequence
  Cyclic GFR-binding peptide
MVTAKKVKPTRGVIKRIQVPRL

SEQ ID NO: 67505 - protein, 25 aa, Artificial Sequence
  Cyclic GFR-binding peptide
ELTSMEGIFIPKKRVIEMIQVTINS

SEQ ID NO: 67506 - protein, 33 aa, Artificial Sequence; identical to SEQ ID NO: 22037
  Cyclic GFR-binding peptide
  MOD_RES (2)..(2): Xaa is C or S

SEQ ID NO: 67507 - protein, 30 aa, Artificial Sequence; identical to SEQ ID NO: 14967
  Cyclic GFR-binding peptide
  MOD_RES (29)..(30): Xaa is C or S

SEQ ID NO: 67508 - protein, 32 aa, Artificial Sequence
  Cyclic GFR-binding peptide
  MOD_RES (27)..(28): Xaa is C or S
NVQVEKIVNSSDDVKAVKVSRLQTPAXXPKPV

SEQ ID NO: 67509 - protein, 36 aa, Artificial Sequence; identical to SEQ ID NO: 14970
  Cyclic GFR-binding peptide
  MOD_RES (1)..(3)..(34)..(35): Xaa is C or S

SEQ ID NO: 67510 - protein, 31 aa, Artificial Sequence; identical to SEQ ID NO: 14972
  Cyclic GFR-binding peptide
  MOD_RES (1)..(1): Xaa is C or S

SEQ ID NO: 67511 - protein, 31 aa, Artificial Sequence
  Cyclic GFR-binding peptide
GEVVMDVQVEKVVKENEDVKAMKVSRLETPV

SEQ ID NO: 67512 - protein, 39 aa, Artificial Sequence
  Cyclic GFR-binding peptide
  MOD_RES (2)..(4)..(36)..(37): Xaa is C or S
HXGXARVVMNVQVEKIVNSSDDVKAVKVSRLQTPAXXPK

SEQ ID NO: 67513 - protein, 41 aa, Artificial Sequence; identical to SEQ ID NO: 14981
  Cyclic GFR-binding peptide
  MOD_RES (2)..(4)..(36)..(37): Xaa is C or S

SEQ ID NO: 67514 - protein, 28 aa, Artificial Sequence
  Cyclic GFR-binding peptide
KVVMSMEGIVKPTRGVMIQITINSLDQP

SEQ ID NO: 67515 - protein, 41 aa, Artificial Sequence
  Cyclic GFR-binding peptide
  MOD_RES (1)..(3)..(37): Xaa is C or S
XEXKNHQLFNSLQEHQGQHPKIRYYVMPLPEEETPVXELGE

SEQ ID NO: 67516 - protein, 21 aa, Artificial Sequence
  Cyclic GFR-binding peptide
ENSLQEVVKDYEDYYVMPLPE

SEQ ID NO: 67517 - protein, 42 aa, Artificial Sequence; identical to SEQ ID NO: 22059
  Cyclic GFR-binding peptide
  MOD_RES (2)..(4)..(38): Xaa is C or S

SEQ ID NO: 67518 - protein, 23 aa, Artificial Sequence
  Cyclic GFR-binding peptide
EVQVEKVVKDYEDVKAMKVSRLE

SEQ ID NO: 67519 - protein, 41 aa, Artificial Sequence
  Cyclic GFR-binding peptide
  MOD_RES (1)..(35): Xaa is C or S
XKNHQLFNSLQEHQGQHPKIRYYLMTLPEEETPVXELGEDN

SEQ ID NO: 67520 - protein, 35 aa, Artificial Sequence
  Cyclic GFR-binding peptide
  MOD_RES (1)..(3)..(35): Xaa is C or S
XGXARVVMNSMEGIIVNSSDDMIQVTINSLQTPAX

SEQ ID NO: 67521 - protein, 28 aa, Artificial Sequence
  Cyclic GFR-binding peptide
  MOD_RES (28)..(28): Xaa is C or S
IMNSLQEVKPKRGVYYLITLPELAQPVX

SEQ ID NO: 67522 - protein, 40 aa, Artificial Sequence; identical to SEQ ID NO: 14996
  Cyclic GFR-binding peptide
  MOD_RES (2)..(4)..(36)..(37): Xaa is C or S

SEQ ID NO: 67523 - protein, 32 aa, Artificial Sequence; identical to SEQ ID NO: 15001
  Cyclic GFR-binding peptide
  MOD_RES (26)..(27): Xaa is C or S

SEQ ID NO: 67524 - protein, 30 aa, Artificial Sequence
  Cyclic GFR-binding peptide
  MOD_RES (30)..(30): Xaa is C or S
NSLQEFIPKKRVIEYYLVTLPELQVQTPRX

SEQ ID NO: 67525 - protein, 36 aa, Artificial Sequence; identical to SEQ ID NO: 22062
  Cyclic GFR-binding peptide
  MOD_RES (2)..(2): Xaa is C or S

SEQ ID NO: 67526 - protein, 31 aa, Artificial Sequence
  Cyclic GFR-binding peptide
GEVVMEVQVEKVVKDYEDVKAMKVSRLETPV

SEQ ID NO: 67527 - protein, 29 aa, Artificial Sequence
  Cyclic GFR-binding peptide
  MOD_RES (26)..(27): Xaa is C or S
NSLQEVVKDYEDYYLMTLPELETPVXXAK

SEQ ID NO: 67528 - protein, 32 aa, Artificial Sequence; identical to SEQ ID NO: 22067
  Cyclic GFR-binding peptide
  MOD_RES (1)..(3): Xaa is C or S

SEQ ID NO: 67529 - protein, 26 aa, Artificial Sequence
  Cyclic GFR-binding peptide
VMNVQVEKIVNSSDDVKAVKVSRLQT

SEQ ID NO: 67530 - protein, 33 aa, Artificial Sequence
  Cyclic GFR-binding peptide
KNHQLFNSLQEHQGQHPKIRYYVMPLPEEETPV

SEQ ID NO: 67531 - protein, 33 aa, Artificial Sequence
  Cyclic GFR-binding peptide
  MOD_RES (1)..(1): Xaa is C or S
XELHEELRNSLQELKPKKRVYEYYLVTLPEHHV

SEQ ID NO: 67532 - protein, 32 aa, Artificial Sequence; identical to SEQ ID NO: 22072
  Cyclic GFR-binding peptide

SEQ ID NO: 67533 - protein, 35 aa, Artificial Sequence; identical to SEQ ID NO: 15013
  Cyclic GFR-binding peptide
  MOD_RES (2)..(34)..(35): Xaa is C or S

SEQ ID NO: 67534 - protein, 37 aa, Artificial Sequence
  Cyclic GFR-binding peptide
  MOD_RES (31)..(32): Xaa is C or S
SKVVMSMEGIVKPTRGVMIQITINSLDQPVXXPSASA

SEQ ID NO: 67535 - protein, 24 aa, Artificial Sequence
  Cyclic GFR-binding peptide
NSLQEIKPTKGIYYLITLPELDQS

SEQ ID NO: 67536 - protein, 31 aa, Artificial Sequence; identical to SEQ ID NO: 22078
  Cyclic GFR-binding peptide

SEQ ID NO: 67537 - protein, 35 aa, Artificial Sequence
  Cyclic GFR-binding peptide
LHDELTNSLQEFIPKKRVIEYYLVTLPELQVQTPR

SEQ ID NO: 67538 - protein, 26 aa, Artificial Sequence
  Cyclic GFR-binding peptide
  MOD_RES (26)..(26): Xaa is C or S
VQVEKVVKENEDVKAMKVSRLETPVX

SEQ ID NO: 67539 - protein, 30 aa, Artificial Sequence
  Cyclic GFR-binding peptide
  MOD_RES (29)..(30): Xaa is C or S
VMNVQVEKIVNSSDDVKAVKVSRLKTPAXX

SEQ ID NO: 67540 - protein, 23 aa, Artificial Sequence
  Cyclic GFR-binding peptide
MNSLQEIKPTKGIYYLITLPELD

SEQ ID NO: 67541 - protein, 34 aa, Artificial Sequence
  Cyclic GFR-binding peptide
  MOD_RES (30)..(30): Xaa is C or S
VVMNVTAKKIVNSSDDIKRVQVPRLKTPAXTPKT

SEQ ID NO: 67542 - protein, 28 aa, Artificial Sequence
  Cyclic GFR-binding peptide
ELTVQVEKFIPKKRVIEVKAVKVSRLQV

SEQ ID NO: 67543 - protein, 34 aa, Artificial Sequence
  Cyclic GFR-binding peptide
  MOD_RES (28)..(29): Xaa is C or S
VMVQVEKVKPTRGVVKAIKVSRLDQPVXXPSASA

SEQ ID NO: 67544 - protein, 32 aa, Artificial Sequence; identical to SEQ ID NO: 15031
  Cyclic GFR-binding peptide
  MOD_RES (31)..(32): Xaa is C or S

SEQ ID NO: 67545 - protein, 22 aa, Artificial Sequence
  Cyclic GFR-binding peptide
MVQVEKIKPTKGIVKAIKVSRL

SEQ ID NO: 67546 - protein, 32 aa, Artificial Sequence; identical to SEQ ID NO: 15033
  Cyclic GFR-binding peptide
  MOD_RES (2)..(2): Xaa is C or S

SEQ ID NO: 67547 - protein, 32 aa, Artificial Sequence
  Cyclic GFR-binding peptide
  MOD_RES (2)..(2): Xaa is C or S
KXSRVIMVQVEKVKPKRGVVKAIKVSRLAQPV

SEQ ID NO: 67548 - protein, 27 aa, Artificial Sequence
  Cyclic GFR-binding peptide
  MOD_RES (26)..(27): Xaa is C or S
NSLQEIVNSSDDYYVVPLPELQTPAXX

SEQ ID NO: 67549 - protein, 27 aa, Artificial Sequence
  Cyclic GFR-binding peptide
SKVVMVQVEKVKPTRGVVKAIKVSRLD

SEQ ID NO: 67550 - protein, 36 aa, Artificial Sequence
  Cyclic GFR-binding peptide
  MOD_RES (2)..(4): Xaa is C or S
EXKXALHDELTNSLQEFIPKKRVIEYYLVTLPELQV

SEQ ID NO: 67551 - protein, 28 aa, Artificial Sequence
  Cyclic GFR-binding peptide
SKVVMSMEGIVKPTRGVMIQITINSLDQ

SEQ ID NO: 67552 - protein, 35 aa, Artificial Sequence
  Cyclic GFR-binding peptide
  MOD_RES (29)..(30): Xaa is C or S
VIMVTAKKVKPKRGVIKRIQVPRLAQPVXXPAASA

SEQ ID NO: 67553 - protein, 28 aa, Artificial Sequence
  Cyclic GFR-binding peptide
  MOD_RES (26)..(27): Xaa is C or S
VTAKKVKPKRGVIKRIQVPRLAQPVXXP

SEQ ID NO: 67554 - protein, 37 aa, Artificial Sequence
  Cyclic GFR-binding peptide
  MOD_RES (31)..(32): Xaa is C or S
SRVIMVTAKKVKPKRGVIKRIQVPRLAQPVXXPAASA

SEQ ID NO: 67555 - protein, 30 aa, Artificial Sequence
  Cyclic GFR-binding peptide
  MOD_RES (30)..(30): Xaa is C or S
KVVMVTAKKVKPTRGVIKRIQVPRLDQPVX

SEQ ID NO: 67556 - protein, 35 aa, Artificial Sequence; identical to SEQ ID NO: 15048
  Cyclic GFR-binding peptide
  MOD_RES (29)..(30): Xaa is C or S

SEQ ID NO: 67557 - protein, 29 aa, Artificial Sequence
  Cyclic GFR-binding peptide
  MOD_RES (28)..(29): Xaa is C or S
IMNSLQEIKPTKGIYYVIPLPELDQSVXX

SEQ ID NO: 67558 - protein, 34 aa, Artificial Sequence
  Cyclic GFR-binding peptide
  MOD_RES (1)..(32)..(33): Xaa is C or S
XSRVIMVTAKKVKPKRGVIKRIQVPRLAQPVXXP

SEQ ID NO: 67559 - protein, 36 aa, Artificial Sequence; identical to SEQ ID NO: 22107
  Cyclic GFR-binding peptide
  MOD_RES (34)..(34): Xaa is C or S

SEQ ID NO: 67560 - protein, 28 aa, Artificial Sequence
  Cyclic GFR-binding peptide
EELRNSLQELKPKKRVYEYYVVPLPEHH

SEQ ID NO: 67561 - protein, 39 aa, Artificial Sequence
  Cyclic GFR-binding peptide
  MOD_RES (1)..(33): Xaa is C or S
XSRVVMNSMEGIIVNSSDDMIQVTINSLKTPAXTPKTVH

SEQ ID NO: 67562 - protein, 25 aa, Artificial Sequence
  Cyclic GFR-binding peptide
MNSMEGIIVNSSDDMIQVTINSLQT

SEQ ID NO: 67563 - protein, 27 aa, Artificial Sequence
  Cyclic GFR-binding peptide
  MOD_RES (1)..(1): Xaa is C or S
XGEVVMDNSLQEVVKENEDYYVMPLPE

SEQ ID NO: 67564 - protein, 33 aa, Artificial Sequence; identical to SEQ ID NO: 22119
  Cyclic GFR-binding peptide
  MOD_RES (30)..(30): Xaa is C or S

SEQ ID NO: 67565 - protein, 32 aa, Artificial Sequence; identical to SEQ ID NO: 15064
  Cyclic GFR-binding peptide
  MOD_RES (29)..(30): Xaa is C or S

SEQ ID NO: 67566 - protein, 31 aa, Artificial Sequence
  Cyclic GFR-binding peptide
SRVVMNVQVEKIVNSSDDVKAVKVSRLKTPA

SEQ ID NO: 67567 - protein, 25 aa, Artificial Sequence
  Cyclic GFR-binding peptide
NSMEGIIVNSSDDMIQVTINSLQTP

SEQ ID NO: 67568 - protein, 39 aa, Artificial Sequence
  Cyclic GFR-binding peptide
  MOD_RES (2)..(39): Xaa is C or S
KXALHDELTNSLQEFIPKKRVIEYYVVPLPELQVQTPRX

SEQ ID NO: 67569 - protein, 34 aa, Artificial Sequence
  Cyclic GFR-binding peptide
  MOD_RES (28)..(29): Xaa is C or S
IMVTAKKVKPKRGVIKRIQVPRLAQPVXXPAASA

SEQ ID NO: 67570 - protein, 20 aa, Artificial Sequence
  Cyclic GFR-binding peptide
SMEGIIKPTKGIMIQITINS

SEQ ID NO: 67571 - protein, 38 aa, Artificial Sequence
  Cyclic GFR-binding peptide
  MOD_RES (34)..(34): Xaa is C or S
EELRNSLQELKPKKRVYEYYVVPLPEHHVRSPQXKVSS

SEQ ID NO: 67572 - protein, 34 aa, Artificial Sequence; identical to SEQ ID NO: 15076
  Cyclic GFR-binding peptide
  MOD_RES (32)..(33): Xaa is C or S

SEQ ID NO: 67573 - protein, 26 aa, Artificial Sequence
  Cyclic GFR-binding peptide
VVMDSMEGIVVKENEDMIQMTINSLE

SEQ ID NO: 67574 - protein, 32 aa, Artificial Sequence; identical to SEQ ID NO: 15084
  Cyclic GFR-binding peptide
  MOD_RES (29)..(29): Xaa is C or S

SEQ ID NO: 67575 - protein, 32 aa, Artificial Sequence
  Cyclic GFR-binding peptide
  MOD_RES (28)..(29): Xaa is C or S
MEVTAKKVVKDYEDIKRMQVPRLETPVXXAKP

SEQ ID NO: 67576 - protein, 29 aa, Artificial Sequence
  Cyclic GFR-binding peptide
  MOD_RES (29)..(29): Xaa is C or S
VVMSMEGIVKPTRGVMIQITINSLDQPVX

SEQ ID NO: 67577 - protein, 31 aa, Artificial Sequence; identical to SEQ ID NO: 15088
  Cyclic GFR-binding peptide
  MOD_RES (1)..(1): Xaa is C or S

SEQ ID NO: 67578 - protein, 35 aa, Artificial Sequence
  Cyclic GFR-binding peptide
  MOD_RES (30)..(30): Xaa is C or S
VVMNVTAKKIVNSSDDIKRVQVPRLKTPAXTPKTV

SEQ ID NO: 67579 - protein, 35 aa, Artificial Sequence; identical to SEQ ID NO: 15090
  Cyclic GFR-binding peptide
  MOD_RES (2)..(34)..(35): Xaa is C or S

SEQ ID NO: 67580 - protein, 32 aa, Artificial Sequence; identical to SEQ ID NO: 22139
  Cyclic GFR-binding peptide

SEQ ID NO: 67581 - protein, 25 aa, Artificial Sequence
  Cyclic GFR-binding peptide
VMDVQVEKVVKENEDVKAMKVSRLE

SEQ ID NO: 67582 - protein, 39 aa, Artificial Sequence
  Cyclic GFR-binding peptide
  MOD_RES (2)..(34)..(35): Xaa is C or S
GXGEVVMEVQVEKVVKDYEDVKAMKVSRLETPVXXAKPI

SEQ ID NO: 67583 - protein, 32 aa, Artificial Sequence; identical to SEQ ID NO: 15096
  Cyclic GFR-binding peptide
  MOD_RES (28)..(29): Xaa is C or S

SEQ ID NO: 67584 - protein, 38 aa, Artificial Sequence
  Cyclic GFR-binding peptide
  MOD_RES (2)..(34)..(35): Xaa is C or S
GXGEVVMESMEGIVVKDYEDMIQMTINSLETPVXXAKP

SEQ ID NO: 67585 - protein, 36 aa, Artificial Sequence
  Cyclic GFR-binding peptide
  MOD_RES (30)..(31): Xaa is C or S
KVIMVQVEKIKPTKGIVKAIKVSRLDQSVXXPSASA

SEQ ID NO: 67586 - protein, 35 aa, Artificial Sequence
  Cyclic GFR-binding peptide
  MOD_RES (33)..(33): Xaa is C or S
NHQLFNSLQEHQGQHPKIRYYLMTLPEEETPVXEL

SEQ ID NO: 67587 - protein, 28 aa, Artificial Sequence
  Cyclic GFR-binding peptide
VTAKKLKPKKRVYEIKRVQVPRHHVRSP

SEQ ID NO: 67588 - protein, 29 aa, Artificial Sequence
  Cyclic GFR-binding peptide
ELTNSLQEFIPKKRVIEYYVVPLPELQVQ

SEQ ID NO: 67589 - protein, 34 aa, Artificial Sequence; identical to SEQ ID NO: 15114
  Cyclic GFR-binding peptide
  MOD_RES (28)..(29): Xaa is C or S

SEQ ID NO: 67590 - protein, 35 aa, Artificial Sequence
  Cyclic GFR-binding peptide
  MOD_RES (2)..(4): Xaa is C or S
RXGXGEVVMEVQVEKVVKDYEDVKAMKVSRLETPV

SEQ ID NO: 67591 - protein, 28 aa, Artificial Sequence
  Cyclic GFR-binding peptide
  MOD_RES (27)..(28): Xaa is C or S
MVQVEKVKPKRGVVKAIKVSRLAQPVXX

SEQ ID NO: 67592 - protein, 37 aa, Artificial Sequence; identical to SEQ ID NO: 15119
  Cyclic GFR-binding peptide
  MOD_RES (1)..(3)..(35)..(36): Xaa is C or S

SEQ ID NO: 67593 - protein, 27 aa, Artificial Sequence
  Cyclic GFR-binding peptide
  MOD_RES (27)..(27): Xaa is C or S
MNSLQEIKPTKGIYYLITLPELDQSVX

SEQ ID NO: 67594 - protein, 31 aa, Artificial Sequence; identical to SEQ ID NO: 15129
  Cyclic GFR-binding peptide
  MOD_RES (2)..(4): Xaa is C or S

SEQ ID NO: 67595 - protein, 23 aa, Artificial Sequence
  Cyclic GFR-binding peptide
SMEGIIVNSSDDMIQVTINSLQT

SEQ ID NO: 67596 - protein, 28 aa, Artificial Sequence
  Cyclic GFR-binding peptide
EVVMESMEGIVVKDYEDMIQMTINSLET

SEQ ID NO: 67597 - protein, 21 aa, Artificial Sequence
  Cyclic GFR-binding peptide
VQVEKVKPTRGVVKAIKVSRL

SEQ ID NO: 67598 - protein, 35 aa, Artificial Sequence
  Cyclic GFR-binding peptide
  MOD_RES (1)..(3)..(35): Xaa is C or S
XGXSRVVMNVTAKKIVNSSDDIKRVQVPRLKTPAX

SEQ ID NO: 67599 - protein, 26 aa, Artificial Sequence
  Cyclic GFR-binding peptide
VVMNNSLQEIVNSSDDYYVVPLPELK

SEQ ID NO: 67600 - protein, 34 aa, Artificial Sequence; identical to SEQ ID NO: 22162
  Cyclic GFR-binding peptide
  MOD_RES (2)..(4): Xaa is C or S

SEQ ID NO: 67601 - protein, 28 aa, Artificial Sequence
  Cyclic GFR-binding peptide
  MOD_RES (28)..(28): Xaa is C or S
NSLQEHQGQHPKIRYYVMPLPEEETPVX

SEQ ID NO: 67602 - protein, 24 aa, Artificial Sequence
  Cyclic GFR-binding peptide
FNSLQEHQGQHPKIRYYLMTLPEE

SEQ ID NO: 67603 - protein, 31 aa, Artificial Sequence
  Cyclic GFR-binding peptide
ELTNSLQEFIPKKRVIEYYLVTLPELQVQTP

SEQ ID NO: 67604 - protein, 33 aa, Artificial Sequence
  Cyclic GFR-binding peptide
  MOD_RES (30)..(31): Xaa is C or S
KVIMVTAKKIKPTKGIIKRIQVPRLDQSVXXPS

SEQ ID NO: 67605 - protein, 30 aa, Artificial Sequence
  Cyclic GFR-binding peptide
  MOD_RES (27)..(28): Xaa is C or S
NVTAKKIVNSSDDIKRVQVPRLQTPAXXPK

SEQ ID NO: 67606 - protein, 37 aa, Artificial Sequence
  Cyclic GFR-binding peptide
  MOD_RES (2)..(33)..(34): Xaa is C or S
KXSKVIMVQVEKIKPTKGIVKAIKVSRLDQSVXXPSA

SEQ ID NO: 67607 - protein, 38 aa, Artificial Sequence
  Cyclic GFR-binding peptide
  MOD_RES (32)..(32): Xaa is C or S
SRVVMNSMEGIIVNSSDDMIQVTINSLKTPAXTPKTVH

SEQ ID NO: 67608 - protein, 33 aa, Artificial Sequence
  Cyclic GFR-binding peptide
  MOD_RES (30)..(31): Xaa is C or S
RVIMVQVEKVKPKRGVVKAIKVSRLAQPVXXPA

SEQ ID NO: 67609 - protein, 42 aa, Artificial Sequence
  Cyclic GFR-binding peptide
  MOD_RES (2)..(4)..(41): Xaa is C or S
EXKXALHDELTNSLQEFIPKKRVIEYYLVTLPELQVQTPRXQ

SEQ ID NO: 67610 - protein, 41 aa, Artificial Sequence; identical to SEQ ID NO: 22170
  Cyclic GFR-binding peptide
  MOD_RES (1)..(35): Xaa is C or S

SEQ ID NO: 67611 - protein, 33 aa, Artificial Sequence
  Cyclic GFR-binding peptide
  MOD_RES (30)..(31): Xaa is C or S
VVMDSMEGIVVKENEDMIQMTINSLETPVXXAK

SEQ ID NO: 67612 - protein, 26 aa, Artificial Sequence
  Cyclic GFR-binding peptide
VVMNNSLQEIVNSSDDYYVVPLPELQ

SEQ ID NO: 67613 - protein, 32 aa, Artificial Sequence
  Cyclic GFR-binding peptide
  MOD_RES (26)..(27): Xaa is C or S
SMEGIVVKENEDMIQMTINSLETPVXXAKPIK

SEQ ID NO: 67614 - protein, 42 aa, Artificial Sequence
  Cyclic GFR-binding peptide
  MOD_RES (1)..(3)..(37): Xaa is C or S
XEXKNHQLFNSLQEHQGQHPKIRYYVMPLPEEETPVXELGED

SEQ ID NO: 67615 - protein, 32 aa, Artificial Sequence; identical to SEQ ID NO: 15159
  Cyclic GFR-binding peptide
  MOD_RES (2)..(4): Xaa is C or S

SEQ ID NO: 67616 - protein, 23 aa, Artificial Sequence
  Cyclic GFR-binding peptide
NSLQELKPKKRVYEYYVVPLPEH

SEQ ID NO: 67617 - protein, 30 aa, Artificial Sequence
  Cyclic GFR-binding peptide
RNSLQELKPKKRVYEYYLVTLPEHHVRSPQ

SEQ ID NO: 67618 - protein, 31 aa, Artificial Sequence; identical to SEQ ID NO: 15163
  Cyclic GFR-binding peptide
  MOD_RES (27)..(28): Xaa is C or S

SEQ ID NO: 67619 - protein, 32 aa, Artificial Sequence
  Cyclic GFR-binding peptide
  MOD_RES (31)..(32): Xaa is C or S
SRVIMSMEGIVKPKRGVMIQITINSLAQPVXX

SEQ ID NO: 67620 - protein, 36 aa, Artificial Sequence
  Cyclic GFR-binding peptide
  MOD_RES (30)..(30): Xaa is C or S
VVMNVQVEKIVNSSDDVKAVKVSRLKTPAXTPKTVH

SEQ ID NO: 67621 - protein, 37 aa, Artificial Sequence; identical to SEQ ID NO: 15168
  Cyclic GFR-binding peptide
  MOD_RES (1)..(3)..(35)..(36): Xaa is C or S

SEQ ID NO: 67622 - protein, 35 aa, Artificial Sequence
  Cyclic GFR-binding peptide
  MOD_RES (2)..(2): Xaa is C or S
AXELHEELRNSLQELKPKKRVYEYYVVPLPEHHVR

SEQ ID NO: 67623 - protein, 31 aa, Artificial Sequence; identical to SEQ ID NO: 15171
  Cyclic GFR-binding peptide
  MOD_RES (29)..(30): Xaa is C or S

SEQ ID NO: 67624 - protein, 35 aa, Artificial Sequence
  Cyclic GFR-binding peptide
  MOD_RES (2)..(4): Xaa is C or S
HXGXARVVMNVTAKKIVNSSDDIKRVQVPRLQTPA

SEQ ID NO: 67625 - protein, 24 aa, Artificial Sequence
  Cyclic GFR-binding peptide
MNSLQEVKPKRGVYYLITLPELAQ

SEQ ID NO: 67626 - protein, 36 aa, Artificial Sequence
  Cyclic GFR-binding peptide
  MOD_RES (1)..(3): Xaa is C or S
XAXELHEELRNSLQELKPKKRVYEYYLVTLPEHHVR

SEQ ID NO: 67627 - protein, 22 aa, Artificial Sequence
  Cyclic GFR-binding peptide
VQVEKIVNSSDDVKAVKVSRLK

SEQ ID NO: 67628 - protein, 32 aa, Artificial Sequence
  Cyclic GFR-binding peptide
KNHQLFNSLQEHQGQHPKIRYYVMPLPEEETP

SEQ ID NO: 67629 - protein, 27 aa, Artificial Sequence
  Cyclic GFR-binding peptide
VVMVQVEKVKPTRGVVKAIKVSRLDQP

SEQ ID NO: 67630 - protein, 23 aa, Artificial Sequence
  Cyclic GFR-binding peptide
IMVTAKKIKPTKGIIKRIQVPRL

SEQ ID NO: 67631 - protein, 35 aa, Artificial Sequence
  Cyclic GFR-binding peptide
  MOD_RES (31)..(32): Xaa is C or S
SKVVMVQVEKVKPTRGVVKAIKVSRLDQPVXXPSA

SEQ ID NO: 67632 - protein, 30 aa, Artificial Sequence
  Cyclic GFR-binding peptide
  MOD_RES (26)..(27): Xaa is C or S
VTAKKVVKDYEDIKRMQVPRLETPVXXAKP

SEQ ID NO: 67633 - protein, 38 aa, Artificial Sequence; identical to SEQ ID NO: 15179
  Cyclic GFR-binding peptide
  MOD_RES (2)..(4)..(36)..(37): Xaa is C or S

SEQ ID NO: 67634 - protein, 32 aa, Artificial Sequence
  Cyclic GFR-binding peptide
  MOD_RES (31)..(31): Xaa is C or S
QLFNSLQEHQGQHPKIRYYLMTLPEEETPVXE

SEQ ID NO: 67635 - protein, 26 aa, Artificial Sequence
  Cyclic GFR-binding peptide
  MOD_RES (1)..(1): Xaa is C or S
XSKVVMSMEGIVKPTRGVMIQITINS

SEQ ID NO: 67636 - protein, 41 aa, Artificial Sequence
  Cyclic GFR-binding peptide
  MOD_RES (2)..(4)..(35)..(36): Xaa is C or S
SXKXSKVVMVTAKKVKPTRGVIKRIQVPRLDQPVXXPSASA

SEQ ID NO: 67637 - protein, 29 aa, Artificial Sequence
  Cyclic GFR-binding peptide
  MOD_RES (1)..(3): Xaa is C or S
XGXGEVVMEVTAKKVVKDYEDIKRMQVPR

SEQ ID NO: 67638 - protein, 25 aa, Artificial Sequence
  Cyclic GFR-binding peptide
IMVTAKKVKPKRGVIKRIQVPRLAQ

SEQ ID NO: 67639 - protein, 34 aa, Artificial Sequence
  Cyclic GFR-binding peptide
  MOD_RES (2)..(4): Xaa is C or S
EXKXALHDELTNSLQEFIPKKRVIEYYLVTLPEL

SEQ ID NO: 67640 - protein, 31 aa, Artificial Sequence
  Cyclic GFR-binding peptide
  MOD_RES (2)..(2): Xaa is C or S
AXELHEELRNSLQELKPKKRVYEYYLVTLPE

SEQ ID NO: 67641 - protein, 23 aa, Artificial Sequence
  Cyclic GFR-binding peptide
DVQVEKVVKENEDVKAMKVSRLE

SEQ ID NO: 67642 - protein, 36 aa, Artificial Sequence
  Cyclic GFR-binding peptide
  MOD_RES (30)..(30): Xaa is C or S
LFNSLQEHQGQHPKIRYYVMPLPEEETPVXELGEDN

SEQ ID NO: 67643 - protein, 33 aa, Artificial Sequence; identical to SEQ ID NO: 15187
  Cyclic GFR-binding peptide
  MOD_RES (1)..(3): Xaa is C or S

SEQ ID NO: 67644 - protein, 31 aa, Artificial Sequence
  Cyclic GFR-binding peptide
  MOD_RES (31)..(31): Xaa is C or S
SKVIMSMEGIIKPTKGIMIQITINSLDQSVX

SEQ ID NO: 67645 - protein, 32 aa, Artificial Sequence; identical to SEQ ID NO: 15190
  Cyclic GFR-binding peptide
  MOD_RES (26)..(27): Xaa is C or S

SEQ ID NO: 67646 - protein, 29 aa, Artificial Sequence
  Cyclic GFR-binding peptide
  MOD_RES (2)..(4): Xaa is C or S
SXKXSKVVMNSLQEVKPTRGVYYLITLPE

SEQ ID NO: 67647 - protein, 31 aa, Artificial Sequence
  Cyclic GFR-binding peptide
  MOD_RES (26)..(27): Xaa is C or S
VQVEKIKPTKGIVKAIKVSRLDQSVXXPSAS

SEQ ID NO: 67648 - protein, 36 aa, Artificial Sequence
  Cyclic GFR-binding peptide
  MOD_RES (2)..(4)..(35)..(36): Xaa is C or S
SXKXSKVIMVQVEKIKPTKGIVKAIKVSRLDQSVXX

SEQ ID NO: 67649 - protein, 28 aa, Artificial Sequence
  Cyclic GFR-binding peptide
  MOD_RES (27)..(28): Xaa is C or S
ENSLQEVVKDYEDYYVMPLPELETPVXX

SEQ ID NO: 67650 - protein, 40 aa, Artificial Sequence
  Cyclic GFR-binding peptide
  MOD_RES (1)..(3)..(35)..(36): Xaa is C or S
XGXSRVVMNVQVEKIVNSSDDVKAVKVSRLKTPAXXPKPV

SEQ ID NO: 67651 - protein, 26 aa, Artificial Sequence
  Cyclic GFR-binding peptide
ELTNSLQEFIPKKRVIEYYVVPLPEL

SEQ ID NO: 67652 - protein, 29 aa, Artificial Sequence
  Cyclic GFR-binding peptide
EVVMDNSLQEVVKENEDYYLMTLPELETP

SEQ ID NO: 67653 - protein, 29 aa, Artificial Sequence
  Cyclic GFR-binding peptide
HDELTNSLQEFIPKKRVIEYYLVTLPELQ

SEQ ID NO: 67654 - protein, 21 aa, Artificial Sequence
  Cyclic GFR-binding peptide
MSMEGIIKPTKGIMIQITINS

SEQ ID NO: 67655 - protein, 36 aa, Artificial Sequence
  Cyclic GFR-binding peptide
  MOD_RES (31)..(32): Xaa is C or S
SKVIMSMEGIIKPTKGIMIQITINSLDQSVXXPSAS

SEQ ID NO: 67656 - protein, 30 aa, Artificial Sequence
  Cyclic GFR-binding peptide
LTNSLQEFIPKKRVIEYYVVPLPELQVQTP

SEQ ID NO: 67657 - protein, 35 aa, Artificial Sequence; identical to SEQ ID NO: 15205
  Cyclic GFR-binding peptide
  MOD_RES (1)..(33): Xaa is C or S

SEQ ID NO: 67658 - protein, 30 aa, Artificial Sequence; identical to SEQ ID NO: 15206
  Cyclic GFR-binding peptide

SEQ ID NO: 67659 - protein, 31 aa, Artificial Sequence; identical to SEQ ID NO: 15208
  Cyclic GFR-binding peptide
  MOD_RES (2)..(4): Xaa is C or S

SEQ ID NO: 67660 - protein, 32 aa, Artificial Sequence
  Cyclic GFR-binding peptide
  MOD_RES (27)..(28): Xaa is C or S
MVQVEKVKPKRGVVKAIKVSRLAQPVXXPAAS

SEQ ID NO: 67661 - protein, 26 aa, Artificial Sequence
  Cyclic GFR-binding peptide
  MOD_RES (1)..(1): Xaa is C or S
XSRVIMVTAKKVKPKRGVIKRIQVPR

SEQ ID NO: 67662 - protein, 24 aa, Artificial Sequence
  Cyclic GFR-binding peptide
VMNSMEGIIVNSSDDMIQVTINSL

SEQ ID NO: 67663 - protein, 34 aa, Artificial Sequence
  Cyclic GFR-binding peptide
  MOD_RES (32)..(33): Xaa is C or S
GEVVMDSMEGIVVKENEDMIQMTINSLETPVXXA

SEQ ID NO: 67664 - protein, 38 aa, Artificial Sequence
  Cyclic GFR-binding peptide
  MOD_RES (1)..(33)..(34): Xaa is C or S
XGEVVMDSMEGIVVKENEDMIQMTINSLETPVXXAKPI

SEQ ID NO: 67665 - protein, 30 aa, Artificial Sequence
  Cyclic GFR-binding peptide
  MOD_RES (27)..(28): Xaa is C or S
NVQVEKIVNSSDDVKAVKVSRLKTPAXXPK

SEQ ID NO: 67666 - protein, 33 aa, Artificial Sequence
  Cyclic GFR-binding peptide
  MOD_RES (30)..(30): Xaa is C or S
LFNSLQEHQGQHPKIRYYLMTLPEEETPVXELG

SEQ ID NO: 67667 - protein, 29 aa, Artificial Sequence
  Cyclic GFR-binding peptide
  MOD_RES (27)..(28): Xaa is C or S
NSMEGIIVNSSDDMIQVTINSLQTPAXXP

SEQ ID NO: 67668 - protein, 26 aa, Artificial Sequence
  Cyclic GFR-binding peptide
GEVVMESMEGIVVKDYEDMIQMTINS

SEQ ID NO: 67669 - protein, 36 aa, Artificial Sequence
  Cyclic GFR-binding peptide
  MOD_RES (2)..(36): Xaa is C or S
EXKNHQLFNSLQEHQGQHPKIRYYLMTLPEEETPVX

SEQ ID NO: 67670 - protein, 32 aa, Artificial Sequence
  Cyclic GFR-binding peptide
  MOD_RES (32)..(32): Xaa is C or S
GEVVMEVQVEKVVKDYEDVKAMKVSRLETPVX

SEQ ID NO: 67671 - protein, 25 aa, Artificial Sequence
  Cyclic GFR-binding peptide
VVMVTAKKVKPTRGVIKRIQVPRLD

SEQ ID NO: 67672 - protein, 35 aa, Artificial Sequence; identical to SEQ ID NO: 15221
  Cyclic GFR-binding peptide
  MOD_RES (31)..(32): Xaa is C or S

SEQ ID NO: 67673 - protein, 35 aa, Artificial Sequence
  Cyclic GFR-binding peptide
  MOD_RES (29)..(30): Xaa is C or S
VMDVQVEKVVKENEDVKAMKVSRLETPVXXAKPIK

SEQ ID NO: 67674 - protein, 37 aa, Artificial Sequence; identical to SEQ ID NO: 22219
  Cyclic GFR-binding peptide
  MOD_RES (34)..(34): Xaa is C or S

SEQ ID NO: 67675 - protein, 36 aa, Artificial Sequence
  Cyclic GFR-binding peptide
  MOD_RES (30)..(30): Xaa is C or S
LFNSLQEHQGQHPKIRYYLMTLPEEETPVXELGEDN

SEQ ID NO: 67676 - protein, 34 aa, Artificial Sequence
  Cyclic GFR-binding peptide
  MOD_RES (1)..(1): Xaa is C or S
XALHDELTNSLQEFIPKKRVIEYYLVTLPELQVQ

SEQ ID NO: 67677 - protein, 36 aa, Artificial Sequence; identical to SEQ ID NO: 22220
  Cyclic GFR-binding peptide
  MOD_RES (32)..(32): Xaa is C or S

SEQ ID NO: 67678 - protein, 31 aa, Artificial Sequence
  Cyclic GFR-binding peptide
  MOD_RES (30)..(31): Xaa is C or S
KVVMSMEGIVKPTRGVMIQITINSLDQPVXX

SEQ ID NO: 67679 - protein, 27 aa, Artificial Sequence
  Cyclic GFR-binding peptide
EVVMENSLQEVVKDYEDYYVMPLPELE

SEQ ID NO: 67680 - protein, 33 aa, Artificial Sequence
  Cyclic GFR-binding peptide
  MOD_RES (1)..(33): Xaa is C or S
XSRVVMNVQVEKIVNSSDDVKAVKVSRLKTPAX

SEQ ID NO: 67681 - protein, 34 aa, Artificial Sequence
  Cyclic GFR-binding peptide
  MOD_RES (2)..(34): Xaa is C or S
GXARVVMNVTAKKIVNSSDDIKRVQVPRLQTPAX

SEQ ID NO: 67682 - protein, 35 aa, Artificial Sequence
  Cyclic GFR-binding peptide
  MOD_RES (1)..(33)..(34): Xaa is C or S
XGEVVMDVQVEKVVKENEDVKAMKVSRLETPVXXA

SEQ ID NO: 67683 - protein, 38 aa, Artificial Sequence; identical to SEQ ID NO: 22226
  Cyclic GFR-binding peptide
  MOD_RES (1)..(3): Xaa is C or S

SEQ ID NO: 67684 - protein, 26 aa, Artificial Sequence
  Cyclic GFR-binding peptide
  MOD_RES (26)..(26): Xaa is C or S
NSLQEIKPTKGIYYVIPLPELDQSVX

SEQ ID NO: 67685 - protein, 36 aa, Artificial Sequence; identical to SEQ ID NO: 15241
  Cyclic GFR-binding peptide
  MOD_RES (31)..(31): Xaa is C or S

SEQ ID NO: 67686 - protein, 28 aa, Artificial Sequence
  Cyclic GFR-binding peptide
ELRNSLQELKPKKRVYEYYVVPLPEHHV

SEQ ID NO: 67687 - protein, 24 aa, Artificial Sequence
  Cyclic GFR-binding peptide
VTAKKIKPTKGIIKRIQVPRLDQS

SEQ ID NO: 67688 - protein, 37 aa, Artificial Sequence; identical to SEQ ID NO: 22231
  Cyclic GFR-binding peptide
  MOD_RES (36)..(36): Xaa is C or S

SEQ ID NO: 67689 - protein, 25 aa, Artificial Sequence
  Cyclic GFR-binding peptide
VMDSMEGIVVKENEDMIQMTINSLE

SEQ ID NO: 67690 - protein, 37 aa, Artificial Sequence; identical to SEQ ID NO: 15244
  Cyclic GFR-binding peptide
  MOD_RES (31)..(32): Xaa is C or S

SEQ ID NO: 67691 - protein, 36 aa, Artificial Sequence
  Cyclic GFR-binding peptide
  MOD_RES (1)..(1): Xaa is C or S
XELHEELRNSLQELKPKKRVYEYYLVTLPEHHVRSP

SEQ ID NO: 67692 - protein, 30 aa, Artificial Sequence
  Cyclic GFR-binding peptide
LTNSLQEFIPKKRVIEYYLVTLPELQVQTP

SEQ ID NO: 67693 - protein, 23 aa, Artificial Sequence
  Cyclic GFR-binding peptide
TVQVEKFIPKKRVIEVKAVKVSR

SEQ ID NO: 67694 - protein, 28 aa, Artificial Sequence
  Cyclic GFR-binding peptide
RVVMNNSLQEIVNSSDDYYVVPLPELQT

SEQ ID NO: 67695 - protein, 29 aa, Artificial Sequence
  Cyclic GFR-binding peptide
  MOD_RES (1)..(3): Xaa is C or S
XGXSRVVMNVTAKKIVNSSDDIKRVQVPR

SEQ ID NO: 67696 - protein, 31 aa, Artificial Sequence
  Cyclic GFR-binding peptide
  MOD_RES (2)..(4): Xaa is C or S
HXGXSRVVMNVQVEKIVNSSDDVKAVKVSRL

SEQ ID NO: 67697 - protein, 39 aa, Artificial Sequence
  Cyclic GFR-binding peptide
  MOD_RES (1)..(38): Xaa is C or S
XELHEELRNSLQELKPKKRVYEYYLVTLPEHHVRSPQXK

SEQ ID NO: 67698 - protein, 30 aa, Artificial Sequence
  Cyclic GFR-binding peptide
  MOD_RES (28)..(29): Xaa is C or S
MNVTAKKIVNSSDDIKRVQVPRLKTPAXXP

SEQ ID NO: 67699 - protein, 27 aa, Artificial Sequence
  Cyclic GFR-binding peptide
VMNNSLQEIVNSSDDYYLVTLPELQTP

SEQ ID NO: 67700 - protein, 36 aa, Artificial Sequence; identical to SEQ ID NO: 15266
  Cyclic GFR-binding peptide
  MOD_RES (31)..(32): Xaa is C or S

SEQ ID NO: 67701 - protein, 24 aa, Artificial Sequence
  Cyclic GFR-binding peptide
KVVMNSLQEVKPTRGVYYVIPLPE

SEQ ID NO: 67702 - protein, 36 aa, Artificial Sequence
  Cyclic GFR-binding peptide
  MOD_RES (2)..(33)..(34): Xaa is C or S
KXSRVIMVQVEKVKPKRGVVKAIKVSRLAQPVXXPA

SEQ ID NO: 67703 - protein, 34 aa, Artificial Sequence
  Cyclic GFR-binding peptide
  MOD_RES (32)..(33): Xaa is C or S
ARVVMNSMEGIIVNSSDDMIQVTINSLQTPAXXP

SEQ ID NO: 67704 - protein, 22 aa, Artificial Sequence
  Cyclic GFR-binding peptide
NSLQEVVKENEDYYVMPLPELE

SEQ ID NO: 67705 - protein, 32 aa, Artificial Sequence; identical to SEQ ID NO: 49305
  Cyclic GFR-binding peptide
  MOD_RES (30)..(31): Xaa is C or S

SEQ ID NO: 67706 - protein, 36 aa, Artificial Sequence
  Cyclic GFR-binding peptide
  MOD_RES (1)..(33)..(34): Xaa is C or S
XSRVVMNSMEGIIVNSSDDMIQVTINSLKTPAXXPK

SEQ ID NO: 67707 - protein, 25 aa, Artificial Sequence
  Cyclic GFR-binding peptide
MESMEGIVVKDYEDMIQMTINSLET

SEQ ID NO: 67708 - protein, 31 aa, Artificial Sequence
  Cyclic GFR-binding peptide
  MOD_RES (26)..(27): Xaa is C or S
VTAKKVVKDYEDIKRMQVPRLETPVXXAKPI

SEQ ID NO: 67709 - protein, 26 aa, Artificial Sequence
  Cyclic GFR-binding peptide
NSMEGIIVNSSDDMIQVTINSLKTPA

SEQ ID NO: 67710 - protein, 31 aa, Artificial Sequence
  Cyclic GFR-binding peptide
  MOD_RES (2)..(2): Xaa is C or S
GXARVVMNVQVEKIVNSSDDVKAVKVSRLQT

SEQ ID NO: 67711 - protein, 36 aa, Artificial Sequence; identical to SEQ ID NO: 22259
  Cyclic GFR-binding peptide

SEQ ID NO: 67712 - protein, 31 aa, Artificial Sequence
  Cyclic GFR-binding peptide
  MOD_RES (27)..(28): Xaa is C or S
NSMEGIIVNSSDDMIQVTINSLQTPAXXPKP

SEQ ID NO: 67713 - protein, 38 aa, Artificial Sequence
  Cyclic GFR-binding peptide
  MOD_RES (2)..(4)..(36)..(37): Xaa is C or S
RXGXGEVVMDVTAKKVVKENEDIKRMQVPRLETPVXXA

SEQ ID NO: 67714 - protein, 25 aa, Artificial Sequence
  Cyclic GFR-binding peptide
NSLQEIVNSSDDYYVVPLPELKTPA

SEQ ID NO: 67715 - protein, 27 aa, Artificial Sequence
  Cyclic GFR-binding peptide
  MOD_RES (27)..(27): Xaa is C or S
NNSLQEIVNSSDDYYLVTLPELKTPAX

SEQ ID NO: 67716 - protein, 29 aa, Artificial Sequence
  Cyclic GFR-binding peptide
  MOD_RES (27)..(28): Xaa is C or S
MNSLQEVKPTRGVYYVIPLPELDQPVXXP

SEQ ID NO: 67717 - protein, 30 aa, Artificial Sequence; identical to SEQ ID NO: 22266
  Cyclic GFR-binding peptide
  MOD_RES (1)..(1): Xaa is C or S

SEQ ID NO: 67718 - protein, 40 aa, Artificial Sequence; identical to SEQ ID NO: 22268
  Cyclic GFR-binding peptide
  MOD_RES (2)..(4)..(38): Xaa is C or S

SEQ ID NO: 67719 - protein, 39 aa, Artificial Sequence
  Cyclic GFR-binding peptide
  MOD_RES (2)..(33)..(34): Xaa is C or S
KXSKVVMVTAKKVKPTRGVIKRIQVPRLDQPVXXPSASA

SEQ ID NO: 67720 - protein, 29 aa, Artificial Sequence
  Cyclic GFR-binding peptide
  MOD_RES (1)..(1): Xaa is C or S
XARVVMNSMEGIIVNSSDDMIQVTINSLQ

SEQ ID NO: 67721 - protein, 28 aa, Artificial Sequence
  Cyclic GFR-binding peptide
VMDNSLQEVVKENEDYYLMTLPELETPV

SEQ ID NO: 67722 - protein, 29 aa, Artificial Sequence
  Cyclic GFR-binding peptide
EVVMESMEGIVVKDYEDMIQMTINSLETP

SEQ ID NO: 67723 - protein, 36 aa, Artificial Sequence
  Cyclic GFR-binding peptide
  MOD_RES (2)..(4)..(36): Xaa is C or S
HXGXARVVMNVTAKKIVNSSDDIKRVQVPRLQTPAX

SEQ ID NO: 67724 - protein, 33 aa, Artificial Sequence; identical to SEQ ID NO: 15314
  Cyclic GFR-binding peptide
  MOD_RES (1)..(33): Xaa is C or S

SEQ ID NO: 67725 - protein, 32 aa, Artificial Sequence
  Cyclic GFR-binding peptide
  MOD_RES (28)..(29): Xaa is C or S
MNVQVEKIVNSSDDVKAVKVSRLKTPAXXPKP

SEQ ID NO: 67726 - protein, 29 aa, Artificial Sequence
  Cyclic GFR-binding peptide
  MOD_RES (28)..(29): Xaa is C or S
IMVQVEKIKPTKGIVKAIKVSRLDQSVXX

SEQ ID NO: 67727 - protein, 27 aa, Artificial Sequence
  Cyclic GFR-binding peptide
VMNVQVEKIVNSSDDVKAVKVSRLKTP

SEQ ID NO: 67728 - protein, 27 aa, Artificial Sequence
  Cyclic GFR-binding peptide
  MOD_RES (2)..(2): Xaa is C or S
KXSKVIMNSLQEIKPTKGIYYLITLPE

SEQ ID NO: 67729 - protein, 37 aa, Artificial Sequence; identical to SEQ ID NO: 22272
  Cyclic GFR-binding peptide
  MOD_RES (36)..(36): Xaa is C or S

SEQ ID NO: 67730 - protein, 37 aa, Artificial Sequence; identical to SEQ ID NO: 22273
  Cyclic GFR-binding peptide
  MOD_RES (2)..(2): Xaa is C or S

SEQ ID NO: 67731 - protein, 38 aa, Artificial Sequence; identical to SEQ ID NO: 15326
  Cyclic GFR-binding peptide
  MOD_RES (2)..(34)..(35): Xaa is C or S

SEQ ID NO: 67732 - protein, 27 aa, Artificial Sequence
  Cyclic GFR-binding peptide
EVVMESMEGIVVKDYEDMIQMTINSLE

SEQ ID NO: 67733 - protein, 28 aa, Artificial Sequence
  Cyclic GFR-binding peptide
VMDVTAKKVVKENEDIKRMQVPRLETPV

SEQ ID NO: 67734 - protein, 30 aa, Artificial Sequence; identical to SEQ ID NO: 15334
  Cyclic GFR-binding peptide
  MOD_RES (2)..(2): Xaa is C or S

SEQ ID NO: 67735 - protein, 32 aa, Artificial Sequence
  Cyclic GFR-binding peptide
  MOD_RES (28)..(29): Xaa is C or S
VMSMEGIVKPTRGVMIQITINSLDQPVXXPSA

SEQ ID NO: 67736 - protein, 38 aa, Artificial Sequence; identical to SEQ ID NO: 15335
  Cyclic GFR-binding peptide
  MOD_RES (1)..(33)..(34): Xaa is C or S

SEQ ID NO: 67737 - protein, 28 aa, Artificial Sequence
  Cyclic GFR-binding peptide
DELTSMEGIFIPKKRVIEMIQVTINSLQ

SEQ ID NO: 67738 - protein, 37 aa, Artificial Sequence; identical to SEQ ID NO: 15336
  Cyclic GFR-binding peptide
  MOD_RES (2)..(4)..(36)..(37): Xaa is C or S

SEQ ID NO: 67739 - protein, 30 aa, Artificial Sequence; identical to SEQ ID NO: 15338
  Cyclic GFR-binding peptide
  MOD_RES (2)..(4): Xaa is C or S

SEQ ID NO: 67740 - protein, 27 aa, Artificial Sequence
  Cyclic GFR-binding peptide
EVVMDNSLQEVVKENEDYYLMTLPELE

SEQ ID NO: 67741 - protein, 38 aa, Artificial Sequence
  Cyclic GFR-binding peptide
  MOD_RES (1)..(32)..(33): Xaa is C or S
XSRVIMVTAKKVKPKRGVIKRIQVPRLAQPVXXPAASA

SEQ ID NO: 67742 - protein, 30 aa, Artificial Sequence
  Cyclic GFR-binding peptide
  MOD_RES (2)..(4): Xaa is C or S
HXGXARVVMNVQVEKIVNSSDDVKAVKVSR

SEQ ID NO: 67743 - protein, 27 aa, Artificial Sequence
  Cyclic GFR-binding peptide
  MOD_RES (27)..(27): Xaa is C or S
ESMEGIVVKDYEDMIQMTINSLETPVX

SEQ ID NO: 67744 - protein, 36 aa, Artificial Sequence
  Cyclic GFR-binding peptide
  MOD_RES (1)..(1): Xaa is C or S
XELHEELRNSLQELKPKKRVYEYYVVPLPEHHVRSP

SEQ ID NO: 67745 - protein, 41 aa, Artificial Sequence
  Cyclic GFR-binding peptide
  MOD_RES (2)..(36): Xaa is C or S
EXKNHQLFNSLQEHQGQHPKIRYYLMTLPEEETPVXELGED

SEQ ID NO: 67746 - protein, 28 aa, Artificial Sequence
  Cyclic GFR-binding peptide
  MOD_RES (27)..(28): Xaa is C or S
DSMEGIVVKENEDMIQMTINSLETPVXX

SEQ ID NO: 67747 - protein, 31 aa, Artificial Sequence; identical to SEQ ID NO: 15353
  Cyclic GFR-binding peptide
  MOD_RES (2)..(2): Xaa is C or S

SEQ ID NO: 67748 - protein, 34 aa, Artificial Sequence; identical to SEQ ID NO: 22290
  Cyclic GFR-binding peptide
  MOD_RES (2)..(2): Xaa is C or S

SEQ ID NO: 67749 - protein, 35 aa, Artificial Sequence; identical to SEQ ID NO: 15357
  Cyclic GFR-binding peptide
  MOD_RES (1)..(33)..(34): Xaa is C or S

SEQ ID NO: 67750 - protein, 38 aa, Artificial Sequence
  Cyclic GFR-binding peptide
  MOD_RES (37)..(37): Xaa is C or S
ALHDELTNSLQEFIPKKRVIEYYVVPLPELQVQTPRXQ

SEQ ID NO: 67751 - protein, 29 aa, Artificial Sequence
  Cyclic GFR-binding peptide
GEVVMDNSLQEVVKENEDYYLMTLPELET

SEQ ID NO: 67752 - protein, 30 aa, Artificial Sequence; identical to SEQ ID NO: 15361
  Cyclic GFR-binding peptide
  MOD_RES (1)..(1): Xaa is C or S

SEQ ID NO: 67753 - protein, 44 aa, Artificial Sequence
  Cyclic GFR-binding peptide
  MOD_RES (1)..(3)..(40): Xaa is C or S
XKXALHDELTNSLQEFIPKKRVIEYYVVPLPELQVQTPRXQVNR

SEQ ID NO: 67754 - protein, 27 aa, Artificial Sequence
  Cyclic GFR-binding peptide
VMNVTAKKIVNSSDDIKRVQVPRLQTP

SEQ ID NO: 67755 - protein, 26 aa, Artificial Sequence
  Cyclic GFR-binding peptide
SRVVMNNSLQEIVNSSDDYYVVPLPE

SEQ ID NO: 67756 - protein, 30 aa, Artificial Sequence
  Cyclic GFR-binding peptide
  MOD_RES (30)..(30): Xaa is C or S
VVMNVQVEKIVNSSDDVKAVKVSRLKTPAX

SEQ ID NO: 67757 - protein, 38 aa, Artificial Sequence
  Cyclic GFR-binding peptide
  MOD_RES (1)..(33)..(34): Xaa is C or S
XGEVVMDVQVEKVVKENEDVKAMKVSRLETPVXXAKPI

SEQ ID NO: 67758 - protein, 29 aa, Artificial Sequence
  Cyclic GFR-binding peptide
VVMDSMEGIVVKENEDMIQMTINSLETPV

SEQ ID NO: 67759 - protein, 29 aa, Artificial Sequence
  Cyclic GFR-binding peptide
NHQLFNSLQEHQGQHPKIRYYLMTLPEEE

SEQ ID NO: 67760 - protein, 27 aa, Artificial Sequence
  Cyclic GFR-binding peptide
VVMNVTAKKIVNSSDDIKRVQVPRLKT

SEQ ID NO: 67761 - protein, 28 aa, Artificial Sequence
  Cyclic GFR-binding peptide
RVIMVTAKKVKPKRGVIKRIQVPRLAQP

SEQ ID NO: 67762 - protein, 28 aa, Artificial Sequence
  Cyclic GFR-binding peptide
  MOD_RES (26)..(27): Xaa is C or S
NSLQEVKPKRGVYYLITLPELAQPVXXP

SEQ ID NO: 67763 - protein, 24 aa, Artificial Sequence
  Cyclic GFR-binding peptide
VMNVQVEKIVNSSDDVKAVKVSRL

SEQ ID NO: 67764 - protein, 23 aa, Artificial Sequence
  Cyclic GFR-binding peptide
TNSLQEFIPKKRVIEYYVVPLPE

SEQ ID NO: 67765 - protein, 26 aa, Artificial Sequence
  Cyclic GFR-binding peptide
MNSMEGIIVNSSDDMIQVTINSLQTP

SEQ ID NO: 67766 - protein, 29 aa, Artificial Sequence
  Cyclic GFR-binding peptide
  MOD_RES (27)..(27): Xaa is C or S
NNSLQEIVNSSDDYYVVPLPELKTPAXTP

SEQ ID NO: 67767 - protein, 34 aa, Artificial Sequence; identical to SEQ ID NO: 15377
  Cyclic GFR-binding peptide
  MOD_RES (29)..(30): Xaa is C or S

SEQ ID NO: 67768 - protein, 33 aa, Artificial Sequence
  Cyclic GFR-binding peptide
  MOD_RES (29)..(30): Xaa is C or S
VIMSMEGIVKPKRGVMIQITINSLAQPVXXPAA

SEQ ID NO: 67769 - protein, 31 aa, Artificial Sequence
  Cyclic GFR-binding peptide
  MOD_RES (2)..(2): Xaa is C or S
GXSRVVMNVQVEKIVNSSDDVKAVKVSRLKT

SEQ ID NO: 67770 - protein, 38 aa, Artificial Sequence; identical to SEQ ID NO: 15389
  Cyclic GFR-binding peptide
  MOD_RES (1)..(3)..(35): Xaa is C or S

SEQ ID NO: 67771 - protein, 29 aa, Artificial Sequence
  Cyclic GFR-binding peptide
  MOD_RES (1)..(1): Xaa is C or S
XGEVVMDSMEGIVVKENEDMIQMTINSLE

SEQ ID NO: 67772 - protein, 32 aa, Artificial Sequence
  Cyclic GFR-binding peptide
  MOD_RES (31)..(31): Xaa is C or S
TNSLQEFIPKKRVIEYYVVPLPELQVQTPRXQ

SEQ ID NO: 67773 - protein, 34 aa, Artificial Sequence
  Cyclic GFR-binding peptide
  MOD_RES (30)..(31): Xaa is C or S
VVMDSMEGIVVKENEDMIQMTINSLETPVXXAKP

SEQ ID NO: 67774 - protein, 28 aa, Artificial Sequence
  Cyclic GFR-binding peptide
HDELTNSLQEFIPKKRVIEYYVVPLPEL

SEQ ID NO: 67775 - protein, 32 aa, Artificial Sequence; identical to SEQ ID NO: 49390
  Cyclic GFR-binding peptide
  MOD_RES (28)..(29): Xaa is C or S

SEQ ID NO: 67776 - protein, 31 aa, Artificial Sequence
  Cyclic GFR-binding peptide
  MOD_RES (29)..(30): Xaa is C or S
VIMVTAKKIKPTKGIIKRIQVPRLDQSVXXP

SEQ ID NO: 67777 - protein, 27 aa, Artificial Sequence
  Cyclic GFR-binding peptide
SKVVMVTAKKVKPTRGVIKRIQVPRLD

SEQ ID NO: 67778 - protein, 36 aa, Artificial Sequence; identical to SEQ ID NO: 15417
  Cyclic GFR-binding peptide
  MOD_RES (30)..(30): Xaa is C or S

SEQ ID NO: 67779 - protein, 32 aa, Artificial Sequence; identical to SEQ ID NO: 15419
  Cyclic GFR-binding peptide
  MOD_RES (27)..(28): Xaa is C or S

SEQ ID NO: 67780 - protein, 26 aa, Artificial Sequence
  Cyclic GFR-binding peptide
ARVVMNNSLQEIVNSSDDYYVVPLPE

SEQ ID NO: 67781 - protein, 24 aa, Artificial Sequence
  Cyclic GFR-binding peptide
NNSLQEIVNSSDDYYLVTLPELKT

SEQ ID NO: 67782 - protein, 40 aa, Artificial Sequence
  Cyclic GFR-binding peptide
  MOD_RES (2)..(34)..(35): Xaa is C or S
GXSRVVMNVQVEKIVNSSDDVKAVKVSRLKTPAXXPKPVY

SEQ ID NO: 67783 - protein, 27 aa, Artificial Sequence
  Cyclic GFR-binding peptide
VVMSMEGIVKPTRGVMIQITINSLDQP

SEQ ID NO: 67784 - protein, 31 aa, Artificial Sequence; identical to SEQ ID NO: 22332
  Cyclic GFR-binding peptide

SEQ ID NO: 67785 - protein, 28 aa, Artificial Sequence
  Cyclic GFR-binding peptide
EVVMDNSLQEVVKENEDYYLMTLPELET

SEQ ID NO: 67786 - protein, 23 aa, Artificial Sequence
  Cyclic GFR-binding peptide
VQVEKVVKDYEDVKAMKVSRLET

SEQ ID NO: 67787 - protein, 33 aa, Artificial Sequence
  Cyclic GFR-binding peptide
  MOD_RES (31)..(32): Xaa is C or S
EVVMDSMEGIVVKENEDMIQMTINSLETPVXXA

SEQ ID NO: 67788 - protein, 38 aa, Artificial Sequence
  Cyclic GFR-binding peptide
  MOD_RES (1)..(33)..(34): Xaa is C or S
XGEVVMEVQVEKVVKDYEDVKAMKVSRLETPVXXAKPI

SEQ ID NO: 67789 - protein, 26 aa, Artificial Sequence
  Cyclic GFR-binding peptide
MNNSLQEIVNSSDDYYLVTLPELQTP

SEQ ID NO: 67790 - protein, 23 aa, Artificial Sequence
  Cyclic GFR-binding peptide
VVMNSLQEVKPTRGVYYVIPLPE

SEQ ID NO: 67791 - protein, 30 aa, Artificial Sequence; identical to SEQ ID NO: 49419
  Cyclic GFR-binding peptide
  MOD_RES (1)..(3): Xaa is C or S

SEQ ID NO: 67792 - protein, 35 aa, Artificial Sequence
  Cyclic GFR-binding peptide
  MOD_RES (29)..(30): Xaa is C or S
VMDSMEGIVVKENEDMIQMTINSLETPVXXAKPIK

SEQ ID NO: 67793 - protein, 34 aa, Artificial Sequence
  Cyclic GFR-binding peptide
  MOD_RES (28)..(29): Xaa is C or S
MDSMEGIVVKENEDMIQMTINSLETPVXXAKPIK

SEQ ID NO: 67794 - protein, 30 aa, Artificial Sequence; identical to SEQ ID NO: 15444
  Cyclic GFR-binding peptide
  MOD_RES (1)..(1): Xaa is C or S

SEQ ID NO: 67795 - protein, 26 aa, Artificial Sequence
  Cyclic GFR-binding peptide
QLFNSLQEHQGQHPKIRYYLMTLPEE

SEQ ID NO: 67796 - protein, 41 aa, Artificial Sequence
  Cyclic GFR-binding peptide
  MOD_RES (2)..(4)..(35)..(36): Xaa is C or S
SXKXSKVVMVQVEKVKPTRGVVKAIKVSRLDQPVXXPSASA

SEQ ID NO: 67797 - protein, 21 aa, Artificial Sequence
  Cyclic GFR-binding peptide
VTAKKVVKENEDIKRMQVPRL

SEQ ID NO: 67798 - protein, 30 aa, Artificial Sequence
  Cyclic GFR-binding peptide
  MOD_RES (26)..(26): Xaa is C or S
SMEGIIVNSSDDMIQVTINSLKTPAXTPKT

SEQ ID NO: 67799 - protein, 41 aa, Artificial Sequence
  Cyclic GFR-binding peptide
  MOD_RES (2)..(4)..(36)..(37): Xaa is C or S
RXGXGEVVMEVQVEKVVKDYEDVKAMKVSRLETPVXXAKPI

SEQ ID NO: 67800 - protein, 29 aa, Artificial Sequence
  Cyclic GFR-binding peptide
ELHEELRVTAKKLKPKKRVYEIKRVQVPR

SEQ ID NO: 67801 - protein, 25 aa, Artificial Sequence
  Cyclic GFR-binding peptide
VMNSMEGIIVNSSDDMIQVTINSLK

SEQ ID NO: 67802 - protein, 30 aa, Artificial Sequence; identical to SEQ ID NO: 15453
  Cyclic GFR-binding peptide
  MOD_RES (2)..(2): Xaa is C or S

SEQ ID NO: 67803 - protein, 39 aa, Artificial Sequence
  Cyclic GFR-binding peptide
  MOD_RES (2)..(4)..(36)..(37): Xaa is C or S
RXGXGEVVMESMEGIVVKDYEDMIQMTINSLETPVXXAK

SEQ ID NO: 67804 - protein, 41 aa, Artificial Sequence
  Cyclic GFR-binding peptide
  MOD_RES (2)..(4)..(41): Xaa is C or S
EXKXALHDELTNSLQEFIPKKRVIEYYLVTLPELQVQTPRX

SEQ ID NO: 67805 - protein, 34 aa, Artificial Sequence
  Cyclic GFR-binding peptide
  MOD_RES (1)..(3): Xaa is C or S
XGXARVVMNSMEGIIVNSSDDMIQVTINSLQTPA

SEQ ID NO: 67806 - protein, 32 aa, Artificial Sequence
  Cyclic GFR-binding peptide
  MOD_RES (31)..(32): Xaa is C or S
EVVMESMEGIVVKDYEDMIQMTINSLETPVXX

SEQ ID NO: 67807 - protein, 28 aa, Artificial Sequence
  Cyclic GFR-binding peptide
  MOD_RES (26)..(27): Xaa is C or S
VQVEKIVNSSDDVKAVKVSRLQTPAXXP

SEQ ID NO: 67808 - protein, 37 aa, Artificial Sequence
  Cyclic GFR-binding peptide
  MOD_RES (37)..(37): Xaa is C or S
ELHEELRNSLQELKPKKRVYEYYLVTLPEHHVRSPQX

SEQ ID NO: 67809 - protein, 36 aa, Artificial Sequence; identical to SEQ ID NO: 15463
  Cyclic GFR-binding peptide
  MOD_RES (1)..(32)..(33): Xaa is C or S

SEQ ID NO: 67810 - protein, 40 aa, Artificial Sequence
  Cyclic GFR-binding peptide
  MOD_RES (1)..(3)..(34)..(35): Xaa is C or S
XKXSKVIMSMEGIIKPTKGIMIQITINSLDQSVXXPSASA

SEQ ID NO: 67811 - protein, 31 aa, Artificial Sequence; identical to SEQ ID NO: 15474
  Cyclic GFR-binding peptide
  MOD_RES (2)..(4): Xaa is C or S

SEQ ID NO: 67812 - protein, 28 aa, Artificial Sequence
  Cyclic GFR-binding peptide
  MOD_RES (28)..(28): Xaa is C or S
IMVQVEKIKPTKGIVKAIKVSRLDQSVX

SEQ ID NO: 67813 - protein, 31 aa, Artificial Sequence
  Cyclic GFR-binding peptide
  MOD_RES (28)..(28): Xaa is C or S
NSLQEHQGQHPKIRYYLMTLPEEETPVXELG

SEQ ID NO: 67814 - protein, 28 aa, Artificial Sequence
  Cyclic GFR-binding peptide
HEELRSMEGILKPKKRVYEMIQVTINSH

SEQ ID NO: 67815 - protein, 31 aa, Artificial Sequence; identical to SEQ ID NO: 15478
  Cyclic GFR-binding peptide

SEQ ID NO: 67816 - protein, 38 aa, Artificial Sequence
  Cyclic GFR-binding peptide
  MOD_RES (1)..(3)..(35)..(36): Xaa is C or S
XGXGEVVMDVTAKKVVKENEDIKRMQVPRLETPVXXAK

SEQ ID NO: 67817 - protein, 30 aa, Artificial Sequence
  Cyclic GFR-binding peptide
  MOD_RES (30)..(30): Xaa is C or S
VVMNVTAKKIVNSSDDIKRVQVPRLQTPAX

SEQ ID NO: 67818 - protein, 35 aa, Artificial Sequence; identical to SEQ ID NO: 22370
  Cyclic GFR-binding peptide
  MOD_RES (31)..(31): Xaa is C or S

SEQ ID NO: 67819 - protein, 29 aa, Artificial Sequence
  Cyclic GFR-binding peptide
  MOD_RES (28)..(29): Xaa is C or S
VMVQVEKVKPTRGVVKAIKVSRLDQPVXX

SEQ ID NO: 67820 - protein, 42 aa, Artificial Sequence; identical to SEQ ID NO: 22371
  Cyclic GFR-binding peptide
  MOD_RES (1)..(38): Xaa is C or S

SEQ ID NO: 67821 - protein, 35 aa, Artificial Sequence
  Cyclic GFR-binding peptide
  MOD_RES (34)..(34): Xaa is C or S
KNHQLFNSLQEHQGQHPKIRYYVMPLPEEETPVXE

SEQ ID NO: 67822 - protein, 35 aa, Artificial Sequence; identical to SEQ ID NO: 22374
  Cyclic GFR-binding peptide
  MOD_RES (2)..(4): Xaa is C or S

SEQ ID NO: 67823 - protein, 27 aa, Artificial Sequence
  Cyclic GFR-binding peptide
RVIMVTAKKVKPKRGVIKRIQVPRLAQ

SEQ ID NO: 67824 - protein, 34 aa, Artificial Sequence; identical to SEQ ID NO: 15479
  Cyclic GFR-binding peptide
  MOD_RES (1)..(3): Xaa is C or S

SEQ ID NO: 67825 - protein, 34 aa, Artificial Sequence
  Cyclic GFR-binding peptide
  MOD_RES (2)..(33)..(34): Xaa is C or S
KXSKVVMVQVEKVKPTRGVVKAIKVSRLDQPVXX

SEQ ID NO: 67826 - protein, 30 aa, Artificial Sequence; identical to SEQ ID NO: 15483
  Cyclic GFR-binding peptide
  MOD_RES (30)..(30): Xaa is C or S

SEQ ID NO: 67827 - protein, 39 aa, Artificial Sequence
  Cyclic GFR-binding peptide
  MOD_RES (1)..(33): Xaa is C or S
XSRVVMNVQVEKIVNSSDDVKAVKVSRLKTPAXTPKTVH

SEQ ID NO: 67828 - protein, 36 aa, Artificial Sequence; identical to SEQ ID NO: 22378
  Cyclic GFR-binding peptide
  MOD_RES (35)..(35): Xaa is C or S

SEQ ID NO: 67829 - protein, 35 aa, Artificial Sequence
  Cyclic GFR-binding peptide
  MOD_RES (1)..(32)..(33): Xaa is C or S
XSKVVMVQVEKVKPTRGVVKAIKVSRLDQPVXXPS

SEQ ID NO: 67830 - protein, 24 aa, Artificial Sequence
  Cyclic GFR-binding peptide
MENSLQEVVKDYEDYYVMPLPELE

SEQ ID NO: 67831 - protein, 26 aa, Artificial Sequence
  Cyclic GFR-binding peptide
ELRNSLQELKPKKRVYEYYVVPLPEH

SEQ ID NO: 67832 - protein, 35 aa, Artificial Sequence; identical to SEQ ID NO: 22383
  Cyclic GFR-binding peptide

SEQ ID NO: 67833 - protein, 33 aa, Artificial Sequence
  Cyclic GFR-binding peptide
  MOD_RES (1)..(32)..(33): Xaa is C or S
XSRVIMVTAKKVKPKRGVIKRIQVPRLAQPVXX

SEQ ID NO: 67834 - protein, 21 aa, Artificial Sequence
  Cyclic GFR-binding peptide
NSLQEVVKENEDYYVMPLPEL

SEQ ID NO: 67835 - protein, 37 aa, Artificial Sequence; identical to SEQ ID NO: 22387
  Cyclic GFR-binding peptide
  MOD_RES (1)..(3): Xaa is C or S

SEQ ID NO: 67836 - protein, 34 aa, Artificial Sequence
  Cyclic GFR-binding peptide
  MOD_RES (2)..(2): Xaa is C or S
AXELHEELRNSLQELKPKKRVYEYYVVPLPEHHV

SEQ ID NO: 67837 - protein, 34 aa, Artificial Sequence
  Cyclic GFR-binding peptide
  MOD_RES (28)..(29): Xaa is C or S
IMVQVEKVKPKRGVVKAIKVSRLAQPVXXPAASA

SEQ ID NO: 67838 - protein, 39 aa, Artificial Sequence; identical to SEQ ID NO: 22393
  Cyclic GFR-binding peptide
  MOD_RES (1)..(38): Xaa is C or S

SEQ ID NO: 67839 - protein, 30 aa, Artificial Sequence
  Cyclic GFR-binding peptide
  MOD_RES (1)..(1): Xaa is C or S
XSKVVMVQVEKVKPTRGVVKAIKVSRLDQP

SEQ ID NO: 67840 - protein, 34 aa, Artificial Sequence
  Cyclic GFR-binding peptide
  MOD_RES (1)..(3)..(34): Xaa is C or S
XKXSKVIMVQVEKIKPTKGIVKAIKVSRLDQSVX

SEQ ID NO: 67841 - protein, 32 aa, Artificial Sequence
  Cyclic GFR-binding peptide
  MOD_RES (1)..(32): Xaa is C or S
XSRVIMVTAKKVKPKRGVIKRIQVPRLAQPVX

SEQ ID NO: 67842 - protein, 25 aa, Artificial Sequence
  Cyclic GFR-binding peptide
VQVEKVKPTRGVVKAIKVSRLDQPV

SEQ ID NO: 67843 - protein, 28 aa, Artificial Sequence
  Cyclic GFR-binding peptide
SRVIMSMEGIVKPKRGVMIQITINSLAQ

SEQ ID NO: 67844 - protein, 33 aa, Artificial Sequence; identical to SEQ ID NO: 49473
  Cyclic GFR-binding peptide
  MOD_RES (31)..(32): Xaa is C or S

SEQ ID NO: 67845 - protein, 39 aa, Artificial Sequence
  Cyclic GFR-binding peptide
  MOD_RES (2)..(34)..(35): Xaa is C or S
GXSRVVMNVQVEKIVNSSDDVKAVKVSRLKTPAXXPKPV

SEQ ID NO: 67846 - protein, 43 aa, Artificial Sequence; identical to SEQ ID NO: 22407
  Cyclic GFR-binding peptide
  MOD_RES (2)..(39): Xaa is C or S

SEQ ID NO: 67847 - protein, 40 aa, Artificial Sequence
  Cyclic GFR-binding peptide
  MOD_RES (2)..(34): Xaa is C or S
GXSRVVMNSMEGIIVNSSDDMIQVTINSLKTPAXTPKTVH

SEQ ID NO: 67848 - protein, 33 aa, Artificial Sequence; identical to SEQ ID NO: 15515
  Cyclic GFR-binding peptide
  MOD_RES (31)..(32): Xaa is C or S

SEQ ID NO: 67849 - protein, 26 aa, Artificial Sequence
  Cyclic GFR-binding peptide
LTSMEGIFIPKKRVIEMIQVTINSLQ

SEQ ID NO: 67850 - protein, 31 aa, Artificial Sequence
  Cyclic GFR-binding peptide
  MOD_RES (27)..(27): Xaa is C or S
NSMEGIIVNSSDDMIQVTINSLKTPAXTPKT

SEQ ID NO: 67851 - protein, 32 aa, Artificial Sequence
  Cyclic GFR-binding peptide
  MOD_RES (31)..(31): Xaa is C or S
RNSLQELKPKKRVYEYYLVTLPEHHVRSPQXK

SEQ ID NO: 67852 - protein, 41 aa, Artificial Sequence
  Cyclic GFR-binding peptide
  MOD_RES (1)..(38): Xaa is C or S
XELHEELRNSLQELKPKKRVYEYYVVPLPEHHVRSPQXKVS

SEQ ID NO: 67853 - protein, 42 aa, Artificial Sequence; identical to SEQ ID NO: 15526
  Cyclic GFR-binding peptide
  MOD_RES (2)..(4)..(36)..(37): Xaa is C or S

SEQ ID NO: 67854 - protein, 30 aa, Artificial Sequence
  Cyclic GFR-binding peptide
  MOD_RES (28)..(29): Xaa is C or S
MDVTAKKVVKENEDIKRMQVPRLETPVXXA

SEQ ID NO: 67855 - protein, 30 aa, Artificial Sequence
  Cyclic GFR-binding peptide
  MOD_RES (2)..(4): Xaa is C or S
SXKXSRVIMVTAKKVKPKRGVIKRIQVPRL

SEQ ID NO: 67856 - protein, 37 aa, Artificial Sequence
  Cyclic GFR-binding peptide
  MOD_RES (33)..(33): Xaa is C or S
ELTNSLQEFIPKKRVIEYYLVTLPELQVQTPRXQVNR

SEQ ID NO: 67857 - protein, 30 aa, Artificial Sequence
  Cyclic GFR-binding peptide
  MOD_RES (27)..(28): Xaa is C or S
MVTAKKIKPTKGIIKRIQVPRLDQSVXXPS

SEQ ID NO: 67858 - protein, 36 aa, Artificial Sequence
  Cyclic GFR-binding peptide
  MOD_RES (1)..(32)..(33): Xaa is C or S
XSRVIMVTAKKVKPKRGVIKRIQVPRLAQPVXXPAA

SEQ ID NO: 67859 - protein, 27 aa, Artificial Sequence
  Cyclic GFR-binding peptide
  MOD_RES (26)..(27): Xaa is C or S
VQVEKVVKENEDVKAMKVSRLETPVXX

SEQ ID NO: 67860 - protein, 29 aa, Artificial Sequence
  Cyclic GFR-binding peptide
NHQLFVTAKKHQGQHPKIRIKRMQVPREE

SEQ ID NO: 67861 - protein, 39 aa, Artificial Sequence; identical to SEQ ID NO: 15543
  Cyclic GFR-binding peptide
  MOD_RES (2)..(4)..(36)..(37): Xaa is C or S

SEQ ID NO: 67862 - protein, 27 aa, Artificial Sequence
  Cyclic GFR-binding peptide
  MOD_RES (1)..(1): Xaa is C or S
XGEVVMDVQVEKVVKENEDVKAMKVSR

SEQ ID NO: 67863 - protein, 38 aa, Artificial Sequence; identical to SEQ ID NO: 15553
  Cyclic GFR-binding peptide
  MOD_RES (1)..(32)..(33): Xaa is C or S

SEQ ID NO: 67864 - protein, 23 aa, Artificial Sequence
  Cyclic GFR-binding peptide
MVQVEKVKPTRGVVKAIKVSRLD

SEQ ID NO: 67865 - protein, 35 aa, Artificial Sequence
  Cyclic GFR-binding peptide
  MOD_RES (2)..(4)..(35): Xaa is C or S
SXKXSRVIMSMEGIVKPKRGVMIQITINSLAQPVX

SEQ ID NO: 67866 - protein, 34 aa, Artificial Sequence
  Cyclic GFR-binding peptide
  MOD_RES (1)..(3)..(34): Xaa is C or S
XKXSKVVMVTAKKVKPTRGVIKRIQVPRLDQPVX

SEQ ID NO: 67867 - protein, 43 aa, Artificial Sequence
  Cyclic GFR-binding peptide
  MOD_RES (2)..(4)..(41): Xaa is C or S
AXAXELHEELRNSLQELKPKKRVYEYYVVPLPEHHVRSPQXKV

SEQ ID NO: 67868 - protein, 34 aa, Artificial Sequence; identical to SEQ ID NO: 22440
  Cyclic GFR-binding peptide
  MOD_RES (32)..(32): Xaa is C or S

SEQ ID NO: 67869 - protein, 23 aa, Artificial Sequence
  Cyclic GFR-binding peptide
IMVQVEKIKPTKGIVKAIKVSRL

SEQ ID NO: 67870 - protein, 40 aa, Artificial Sequence
  Cyclic GFR-binding peptide
  MOD_RES (2)..(4)..(36)..(37): Xaa is C or S
RXGXGEVVMDVQVEKVVKENEDVKAMKVSRLETPVXXAKP

SEQ ID NO: 67871 - protein, 34 aa, Artificial Sequence; identical to SEQ ID NO: 15572
  Cyclic GFR-binding peptide
  MOD_RES (2)..(4): Xaa is C or S

SEQ ID NO: 67872 - protein, 35 aa, Artificial Sequence
  Cyclic GFR-binding peptide
  MOD_RES (34)..(34): Xaa is C or S
DELTNSLQEFIPKKRVIEYYLVTLPELQVQTPRXQ

SEQ ID NO: 67873 - protein, 30 aa, Artificial Sequence
  Cyclic GFR-binding peptide
  MOD_RES (1)..(1): Xaa is C or S
XGEVVMDVTAKKVVKENEDIKRMQVPRLET

SEQ ID NO: 67874 - protein, 33 aa, Artificial Sequence
  Cyclic GFR-binding peptide
  MOD_RES (32)..(33): Xaa is C or S
GEVVMEVQVEKVVKDYEDVKAMKVSRLETPVXX

SEQ ID NO: 67875 - protein, 30 aa, Artificial Sequence
  Cyclic GFR-binding peptide
LHDELTNSLQEFIPKKRVIEYYVVPLPELQ

SEQ ID NO: 67876 - protein, 41 aa, Artificial Sequence; identical to SEQ ID NO: 15578
  Cyclic GFR-binding peptide
  MOD_RES (1)..(3)..(35)..(36): Xaa is C or S

SEQ ID NO: 67877 - protein, 33 aa, Artificial Sequence
  Cyclic GFR-binding peptide
  MOD_RES (30)..(31): Xaa is C or S
VVMEVQVEKVVKDYEDVKAMKVSRLETPVXXAK

SEQ ID NO: 67878 - protein, 26 aa, Artificial Sequence
  Cyclic GFR-binding peptide
  MOD_RES (1)..(1): Xaa is C or S
XSKVIMNSLQEIKPTKGIYYVIPLPE

SEQ ID NO: 67879 - protein, 23 aa, Artificial Sequence
  Cyclic GFR-binding peptide
VVMNSLQEVKPTRGVYYLITLPE

SEQ ID NO: 67880 - protein, 44 aa, Artificial Sequence
  Cyclic GFR-binding peptide
  MOD_RES (2)..(4)..(41): Xaa is C or S
AXAXELHEELRNSLQELKPKKRVYEYYVVPLPEHHVRSPQXKVS

SEQ ID NO: 67881 - protein, 33 aa, Artificial Sequence
  Cyclic GFR-binding peptide
  MOD_RES (30)..(30): Xaa is C or S
VVMNSMEGIIVNSSDDMIQVTINSLKTPAXTPK

SEQ ID NO: 67882 - protein, 23 aa, Artificial Sequence
  Cyclic GFR-binding peptide
DVTAKKVVKENEDIKRMQVPRLE

SEQ ID NO: 67883 - protein, 34 aa, Artificial Sequence
  Cyclic GFR-binding peptide
  MOD_RES (29)..(30): Xaa is C or S
VMDSMEGIVVKENEDMIQMTINSLETPVXXAKPI

SEQ ID NO: 67884 - protein, 30 aa, Artificial Sequence; identical to SEQ ID NO: 15589
  Cyclic GFR-binding peptide
  MOD_RES (1)..(3): Xaa is C or S

SEQ ID NO: 67885 - protein, 36 aa, Artificial Sequence
  Cyclic GFR-binding peptide
  MOD_RES (34)..(34): Xaa is C or S
KNHQLFNSLQEHQGQHPKIRYYLMTLPEEETPVXEL

SEQ ID NO: 67886 - protein, 40 aa, Artificial Sequence
  Cyclic GFR-binding peptide
  MOD_RES (1)..(3)..(35)..(36): Xaa is C or S
XGXSRVVMNVTAKKIVNSSDDIKRVQVPRLKTPAXXPKPV

SEQ ID NO: 67887 - protein, 20 aa, Artificial Sequence
  Cyclic GFR-binding peptide
VQVEKIKPTKGIVKAIKVSR

SEQ ID NO: 67888 - protein, 34 aa, Artificial Sequence
  Cyclic GFR-binding peptide
  MOD_RES (33)..(33): Xaa is C or S
ELRNSLQELKPKKRVYEYYVVPLPEHHVRSPQXK

SEQ ID NO: 67889 - protein, 41 aa, Artificial Sequence; identical to SEQ ID NO: 22466
  Cyclic GFR-binding peptide
  MOD_RES (37)..(37): Xaa is C or S

SEQ ID NO: 67890 - protein, 24 aa, Artificial Sequence
  Cyclic GFR-binding peptide
MSMEGIVKPKRGVMIQITINSLAQ

SEQ ID NO: 67891 - protein, 28 aa, Artificial Sequence
  Cyclic GFR-binding peptide
RVIMVQVEKVKPKRGVVKAIKVSRLAQP

SEQ ID NO: 67892 - protein, 25 aa, Artificial Sequence
  Cyclic GFR-binding peptide
RVTAKKLKPKKRVYEIKRVQVPRHH

SEQ ID NO: 67893 - protein, 32 aa, Artificial Sequence; identical to SEQ ID NO: 15602
  Cyclic GFR-binding peptide
  MOD_RES (2)..(4): Xaa is C or S

SEQ ID NO: 67894 - protein, 29 aa, Artificial Sequence
  Cyclic GFR-binding peptide
  MOD_RES (27)..(28): Xaa is C or S
MSMEGIIKPTKGIMIQITINSLDQSVXXP

SEQ ID NO: 67895 - protein, 23 aa, Artificial Sequence
  Cyclic GFR-binding peptide
MNNSLQEIVNSSDDYYVVPLPEL

SEQ ID NO: 67896 - protein, 28 aa, Artificial Sequence
  Cyclic GFR-binding peptide
  MOD_RES (28)..(28): Xaa is C or S
MENSLQEVVKDYEDYYLMTLPELETPVX

SEQ ID NO: 67897 - protein, 30 aa, Artificial Sequence
  Cyclic GFR-binding peptide
  MOD_RES (2)..(4): Xaa is C or S
SXKXSRVIMVQVEKVKPKRGVVKAIKVSRL

SEQ ID NO: 67898 - protein, 38 aa, Artificial Sequence
  Cyclic GFR-binding peptide
  MOD_RES (1)..(38): Xaa is C or S
XALHDELTNSLQEFIPKKRVIEYYVVPLPELQVQTPRX

SEQ ID NO: 67899 - protein, 30 aa, Artificial Sequence
  Cyclic GFR-binding peptide
RNSLQELKPKKRVYEYYVVPLPEHHVRSPQ

SEQ ID NO: 67900 - protein, 35 aa, Artificial Sequence
  Cyclic GFR-binding peptide
  MOD_RES (2)..(34)..(35): Xaa is C or S
GXSRVVMNVTAKKIVNSSDDIKRVQVPRLKTPAXX

SEQ ID NO: 67901 - protein, 29 aa, Artificial Sequence
  Cyclic GFR-binding peptide
VVMNVTAKKIVNSSDDIKRVQVPRLQTPA

SEQ ID NO: 67902 - protein, 32 aa, Artificial Sequence; identical to SEQ ID NO: 22482
  Cyclic GFR-binding peptide
  MOD_RES (1)..(1): Xaa is C or S

SEQ ID NO: 67903 - protein, 37 aa, Artificial Sequence; identical to SEQ ID NO: 22483
  Cyclic GFR-binding peptide
  MOD_RES (31)..(31): Xaa is C or S

SEQ ID NO: 67904 - protein, 35 aa, Artificial Sequence
  Cyclic GFR-binding peptide
  MOD_RES (32)..(32): Xaa is C or S
SRVVMNSMEGIIVNSSDDMIQVTINSLKTPAXTPK

SEQ ID NO: 67905 - protein, 31 aa, Artificial Sequence
  Cyclic GFR-binding peptide
  MOD_RES (29)..(30): Xaa is C or S
VIMSMEGIIKPTKGIMIQITINSLDQSVXXP

SEQ ID NO: 67906 - protein, 31 aa, Artificial Sequence
  Cyclic GFR-binding peptide
  MOD_RES (29)..(29): Xaa is C or S
VMNSMEGIIVNSSDDMIQVTINSLKTPAXTP

SEQ ID NO: 67907 - protein, 30 aa, Artificial Sequence; identical to SEQ ID NO: 15612
  Cyclic GFR-binding peptide
  MOD_RES (28)..(29): Xaa is C or S

SEQ ID NO: 67908 - protein, 30 aa, Artificial Sequence
  Cyclic GFR-binding peptide
  MOD_RES (27)..(27): Xaa is C or S
NVTAKKIVNSSDDIKRVQVPRLKTPAXTPK

SEQ ID NO: 67909 - protein, 38 aa, Artificial Sequence
  Cyclic GFR-binding peptide
  MOD_RES (32)..(33): Xaa is C or S
GEVVMEVTAKKVVKDYEDIKRMQVPRLETPVXXAKPIS

SEQ ID NO: 67910 - protein, 37 aa, Artificial Sequence; identical to SEQ ID NO: 15617
  Cyclic GFR-binding peptide
  MOD_RES (31)..(32): Xaa is C or S

SEQ ID NO: 67911 - protein, 34 aa, Artificial Sequence; identical to SEQ ID NO: 22494
  Cyclic GFR-binding peptide
  MOD_RES (32)..(32): Xaa is C or S

SEQ ID NO: 67912 - protein, 36 aa, Artificial Sequence; identical to SEQ ID NO: 22498
  Cyclic GFR-binding peptide
  MOD_RES (1)..(3): Xaa is C or S

SEQ ID NO: 67913 - protein, 33 aa, Artificial Sequence; identical to SEQ ID NO: 22499
  Cyclic GFR-binding peptide
  MOD_RES (1)..(3): Xaa is C or S

SEQ ID NO: 67914 - protein, 32 aa, Artificial Sequence; identical to SEQ ID NO: 22500
  Cyclic GFR-binding peptide
  MOD_RES (2)..(2): Xaa is C or S

SEQ ID NO: 67915 - protein, 37 aa, Artificial Sequence
  Cyclic GFR-binding peptide
  MOD_RES (2)..(4)..(36)..(37): Xaa is C or S
HXGXSRVVMNVTAKKIVNSSDDIKRVQVPRLKTPAXX

SEQ ID NO: 67916 - protein, 36 aa, Artificial Sequence; identical to SEQ ID NO: 15633
  Cyclic GFR-binding peptide
  MOD_RES (2)..(4)..(35)..(36): Xaa is C or S

SEQ ID NO: 67917 - protein, 27 aa, Artificial Sequence
  Cyclic GFR-binding peptide
  MOD_RES (1)..(1): Xaa is C or S
XSKVIMVQVEKIKPTKGIVKAIKVSRL

SEQ ID NO: 67918 - protein, 30 aa, Artificial Sequence
  Cyclic GFR-binding peptide
  MOD_RES (28)..(28): Xaa is C or S
NSLQEHQGQHPKIRYYLMTLPEEETPVXEL

SEQ ID NO: 67919 - protein, 33 aa, Artificial Sequence; identical to SEQ ID NO: 15637
  Cyclic GFR-binding peptide
  MOD_RES (1)..(33): Xaa is C or S

SEQ ID NO: 67920 - protein, 28 aa, Artificial Sequence
  Cyclic GFR-binding peptide
ARVVMNVTAKKIVNSSDDIKRVQVPRLQ

SEQ ID NO: 67921 - protein, 39 aa, Artificial Sequence; identical to SEQ ID NO: 15638
  Cyclic GFR-binding peptide
  MOD_RES (1)..(33): Xaa is C or S

SEQ ID NO: 67922 - protein, 36 aa, Artificial Sequence
  Cyclic GFR-binding peptide
  MOD_RES (2)..(4)..(35)..(36): Xaa is C or S
SXKXSKVIMVTAKKIKPTKGIIKRIQVPRLDQSVXX

SEQ ID NO: 67923 - protein, 24 aa, Artificial Sequence
  Cyclic GFR-binding peptide
RVIMSMEGIVKPKRGVMIQITINS

SEQ ID NO: 67924 - protein, 36 aa, Artificial Sequence; identical to SEQ ID NO: 15642
  Cyclic GFR-binding peptide
  MOD_RES (31)..(32): Xaa is C or S

SEQ ID NO: 67925 - protein, 32 aa, Artificial Sequence
  Cyclic GFR-binding peptide
  MOD_RES (2)..(2): Xaa is C or S
EXKNHQLFNSLQEHQGQHPKIRYYLMTLPEEE

SEQ ID NO: 67926 - protein, 38 aa, Artificial Sequence; identical to SEQ ID NO: 15648
  Cyclic GFR-binding peptide
  MOD_RES (32)..(33): Xaa is C or S

SEQ ID NO: 67927 - protein, 32 aa, Artificial Sequence; identical to SEQ ID NO: 15649
  Cyclic GFR-binding peptide
  MOD_RES (30)..(31): Xaa is C or S

SEQ ID NO: 67928 - protein, 37 aa, Artificial Sequence
  Cyclic GFR-binding peptide
  MOD_RES (1)..(33)..(34): Xaa is C or S
XARVVMNVQVEKIVNSSDDVKAVKVSRLQTPAXXPKP

SEQ ID NO: 67929 - protein, 25 aa, Artificial Sequence
  Cyclic GFR-binding peptide
EVVMDSMEGIVVKENEDMIQMTINS

SEQ ID NO: 67930 - protein, 40 aa, Artificial Sequence; identical to SEQ ID NO: 49583
  Cyclic GFR-binding peptide
  MOD_RES (2)..(4)..(35)..(36): Xaa is C or S

SEQ ID NO: 67931 - protein, 29 aa, Artificial Sequence
  Cyclic GFR-binding peptide
  MOD_RES (29)..(29): Xaa is C or S
FVQVEKHQGQHPKIRVKAMKVSREETPVX

SEQ ID NO: 67932 - protein, 30 aa, Artificial Sequence
  Cyclic GFR-binding peptide
  MOD_RES (1)..(3): Xaa is C or S
XKXSRVIMVTAKKVKPKRGVIKRIQVPRLA

SEQ ID NO: 67933 - protein, 37 aa, Artificial Sequence; identical to SEQ ID NO: 15657
  Cyclic GFR-binding peptide
  MOD_RES (1)..(3)..(34)..(35): Xaa is C or S

SEQ ID NO: 67934 - protein, 44 aa, Artificial Sequence; identical to SEQ ID NO: 22517
  Cyclic GFR-binding peptide
  MOD_RES (1)..(3)..(40): Xaa is C or S

SEQ ID NO: 67935 - protein, 33 aa, Artificial Sequence; identical to SEQ ID NO: 15659
  Cyclic GFR-binding peptide
  MOD_RES (29)..(30): Xaa is C or S

SEQ ID NO: 67936 - protein, 35 aa, Artificial Sequence
  Cyclic GFR-binding peptide
  MOD_RES (2)..(4): Xaa is C or S
EXKXALHDELTNSLQEFIPKKRVIEYYVVPLPELQ

SEQ ID NO: 67937 - protein, 32 aa, Artificial Sequence; identical to SEQ ID NO: 22525
  Cyclic GFR-binding peptide

SEQ ID NO: 67938 - protein, 28 aa, Artificial Sequence
  Cyclic GFR-binding peptide
VVMDNSLQEVVKENEDYYVMPLPELETP

SEQ ID NO: 67939 - protein, 33 aa, Artificial Sequence
  Cyclic GFR-binding peptide
  MOD_RES (32)..(33): Xaa is C or S
ARVVMNVQVEKIVNSSDDVKAVKVSRLQTPAXX

SEQ ID NO: 67940 - protein, 28 aa, Artificial Sequence
  Cyclic GFR-binding peptide
HQLFNSLQEHQGQHPKIRYYVMPLPEEE

SEQ ID NO: 67941 - protein, 24 aa, Artificial Sequence
  Cyclic GFR-binding peptide
LTNSLQEFIPKKRVIEYYVVPLPE

SEQ ID NO: 67942 - protein, 32 aa, Artificial Sequence
  Cyclic GFR-binding peptide
  MOD_RES (27)..(28): Xaa is C or S
NVTAKKIVNSSDDIKRVQVPRLQTPAXXPKPV

SEQ ID NO: 67943 - protein, 30 aa, Artificial Sequence; identical to SEQ ID NO: 15670
  Cyclic GFR-binding peptide
  MOD_RES (29)..(29): Xaa is C or S

SEQ ID NO: 67944 - protein, 39 aa, Artificial Sequence; identical to SEQ ID NO: 15671
  Cyclic GFR-binding peptide
  MOD_RES (2)..(4)..(36): Xaa is C or S

SEQ ID NO: 67945 - protein, 28 aa, Artificial Sequence
  Cyclic GFR-binding peptide
  MOD_RES (1)..(1): Xaa is C or S
XSRVVMNVQVEKIVNSSDDVKAVKVSRL

SEQ ID NO: 67946 - protein, 25 aa, Artificial Sequence
  Cyclic GFR-binding peptide
SMEGILKPKKRVYEMIQVTINSHHV

SEQ ID NO: 67947 - protein, 28 aa, Artificial Sequence
  Cyclic GFR-binding peptide
KVIMVTAKKIKPTKGIIKRIQVPRLDQS

SEQ ID NO: 67948 - protein, 30 aa, Artificial Sequence; identical to SEQ ID NO: 15674
  Cyclic GFR-binding peptide
  MOD_RES (27)..(28): Xaa is C or S

SEQ ID NO: 67949 - protein, 37 aa, Artificial Sequence
  Cyclic GFR-binding peptide
  MOD_RES (2)..(33)..(34): Xaa is C or S
KXSKVVMVQVEKVKPTRGVVKAIKVSRLDQPVXXPSA

SEQ ID NO: 67950 - protein, 29 aa, Artificial Sequence
  Cyclic GFR-binding peptide
  MOD_RES (2)..(2): Xaa is C or S
GXGEVVMDVQVEKVVKENEDVKAMKVSRL

SEQ ID NO: 67951 - protein, 29 aa, Artificial Sequence
  Cyclic GFR-binding peptide
  MOD_RES (29)..(29): Xaa is C or S
VIMNSLQEVKPKRGVYYLITLPELAQPVX

SEQ ID NO: 67952 - protein, 27 aa, Artificial Sequence
  Cyclic GFR-binding peptide
VVMENSLQEVVKDYEDYYLMTLPELET

SEQ ID NO: 67953 - protein, 35 aa, Artificial Sequence; identical to SEQ ID NO: 22534
  Cyclic GFR-binding peptide
  MOD_RES (2)..(4): Xaa is C or S

SEQ ID NO: 67954 - protein, 31 aa, Artificial Sequence
  Cyclic GFR-binding peptide
ARVVMNVTAKKIVNSSDDIKRVQVPRLQTPA

SEQ ID NO: 67955 - protein, 31 aa, Artificial Sequence; identical to SEQ ID NO: 22536
  Cyclic GFR-binding peptide

SEQ ID NO: 67956 - protein, 33 aa, Artificial Sequence; identical to SEQ ID NO: 22537
  Cyclic GFR-binding peptide

SEQ ID NO: 67957 - protein, 29 aa, Artificial Sequence
  Cyclic GFR-binding peptide
VVMNNSLQEIVNSSDDYYLVTLPELKTPA

SEQ ID NO: 67958 - protein, 35 aa, Artificial Sequence
  Cyclic GFR-binding peptide
  MOD_RES (32)..(33): Xaa is C or S
GEVVMEVQVEKVVKDYEDVKAMKVSRLETPVXXAK

SEQ ID NO: 67959 - protein, 23 aa, Artificial Sequence
  Cyclic GFR-binding peptide
MVQVEKVKPKRGVVKAIKVSRLA

SEQ ID NO: 67960 - protein, 23 aa, Artificial Sequence
  Cyclic GFR-binding peptide
NSLQEVVKDYEDYYVMPLPELET

SEQ ID NO: 67961 - protein, 37 aa, Artificial Sequence
  Cyclic GFR-binding peptide
  MOD_RES (1)..(3)..(34)..(35): Xaa is C or S
XKXSRVIMSMEGIVKPKRGVMIQITINSLAQPVXXPA

SEQ ID NO: 67962 - protein, 39 aa, Artificial Sequence; identical to SEQ ID NO: 15688
  Cyclic GFR-binding peptide
  MOD_RES (2)..(4)..(36)..(37): Xaa is C or S

SEQ ID NO: 67963 - protein, 28 aa, Artificial Sequence
  Cyclic GFR-binding peptide
SRVVMNSMEGIIVNSSDDMIQVTINSLK

SEQ ID NO: 67964 - protein, 35 aa, Artificial Sequence; identical to SEQ ID NO: 15692
  Cyclic GFR-binding peptide
  MOD_RES (2)..(4): Xaa is C or S

SEQ ID NO: 67965 - protein, 45 aa, Artificial Sequence; identical to SEQ ID NO: 22556
  Cyclic GFR-binding peptide
  MOD_RES (2)..(4)..(41): Xaa is C or S

SEQ ID NO: 67966 - protein, 34 aa, Artificial Sequence
  Cyclic GFR-binding peptide
  MOD_RES (2)..(33)..(34): Xaa is C or S
KXSKVIMVQVEKIKPTKGIVKAIKVSRLDQSVXX

SEQ ID NO: 67967 - protein, 37 aa, Artificial Sequence
  Cyclic GFR-binding peptide
  MOD_RES (1)..(32)..(33): Xaa is C or S
XSRVIMVQVEKVKPKRGVVKAIKVSRLAQPVXXPAAS

SEQ ID NO: 67968 - protein, 27 aa, Artificial Sequence
  Cyclic GFR-binding peptide
VIMVQVEKVKPKRGVVKAIKVSRLAQP

SEQ ID NO: 67969 - protein, 36 aa, Artificial Sequence; identical to SEQ ID NO: 22558
  Cyclic GFR-binding peptide
  MOD_RES (30)..(30): Xaa is C or S

SEQ ID NO: 67970 - protein, 28 aa, Artificial Sequence
  Cyclic GFR-binding peptide
  MOD_RES (27)..(28): Xaa is C or S
MNSLQEIKPTKGIYYVIPLPELDQSVXX

SEQ ID NO: 67971 - protein, 40 aa, Artificial Sequence
  Cyclic GFR-binding peptide
  MOD_RES (2)..(4)..(35)..(36): Xaa is C or S
SXKXSRVIMSMEGIVKPKRGVMIQITINSLAQPVXXPAAS

SEQ ID NO: 67972 - protein, 37 aa, Artificial Sequence; identical to SEQ ID NO: 15706
  Cyclic GFR-binding peptide
  MOD_RES (1)..(32)..(33): Xaa is C or S

SEQ ID NO: 67973 - protein, 29 aa, Artificial Sequence
  Cyclic GFR-binding peptide
  MOD_RES (1)..(1): Xaa is C or S
XGEVVMENSLQEVVKDYEDYYLMTLPELE

SEQ ID NO: 67974 - protein, 31 aa, Artificial Sequence; identical to SEQ ID NO: 15709
  Cyclic GFR-binding peptide
  MOD_RES (31)..(31): Xaa is C or S

SEQ ID NO: 67975 - protein, 35 aa, Artificial Sequence; identical to SEQ ID NO: 15712
  Cyclic GFR-binding peptide
  MOD_RES (2)..(4): Xaa is C or S

SEQ ID NO: 67976 - protein, 28 aa, Artificial Sequence
  Cyclic GFR-binding peptide
  MOD_RES (1)..(1): Xaa is C or S
XGEVVMDNSLQEVVKENEDYYLMTLPEL

SEQ ID NO: 67977 - protein, 32 aa, Artificial Sequence; identical to SEQ ID NO: 15714
  Cyclic GFR-binding peptide
  MOD_RES (31)..(32): Xaa is C or S

SEQ ID NO: 67978 - protein, 27 aa, Artificial Sequence
  Cyclic GFR-binding peptide
ELRSMEGILKPKKRVYEMIQVTINSHH

SEQ ID NO: 67979 - protein, 31 aa, Artificial Sequence; identical to SEQ ID NO: 15716
  Cyclic GFR-binding peptide
  MOD_RES (30)..(31): Xaa is C or S

SEQ ID NO: 67980 - protein, 28 aa, Artificial Sequence
  Cyclic GFR-binding peptide
RVTAKKLKPKKRVYEIKRVQVPRHHVRS

SEQ ID NO: 67981 - protein, 25 aa, Artificial Sequence
  Cyclic GFR-binding peptide
KVIMVQVEKIKPTKGIVKAIKVSRL

SEQ ID NO: 67982 - protein, 31 aa, Artificial Sequence
  Cyclic GFR-binding peptide
  MOD_RES (31)..(31): Xaa is C or S
TNSLQEFIPKKRVIEYYVVPLPELQVQTPRX

SEQ ID NO: 67983 - protein, 33 aa, Artificial Sequence
  Cyclic GFR-binding peptide
  MOD_RES (1)..(3): Xaa is C or S
XGXGEVVMESMEGIVVKDYEDMIQMTINSLETP

SEQ ID NO: 67984 - protein, 32 aa, Artificial Sequence
  Cyclic GFR-binding peptide
  MOD_RES (30)..(31): Xaa is C or S
VVMNSMEGIIVNSSDDMIQVTINSLQTPAXXP

SEQ ID NO: 67985 - protein, 39 aa, Artificial Sequence; identical to SEQ ID NO: 15723
  Cyclic GFR-binding peptide
  MOD_RES (1)..(3)..(35)..(36): Xaa is C or S

SEQ ID NO: 67986 - protein, 32 aa, Artificial Sequence
  Cyclic GFR-binding peptide
  MOD_RES (2)..(4): Xaa is C or S
RXGXGEVVMEVQVEKVVKDYEDVKAMKVSRLE

SEQ ID NO: 67987 - protein, 36 aa, Artificial Sequence; identical to SEQ ID NO: 15725
  Cyclic GFR-binding peptide
  MOD_RES (32)..(32): Xaa is C or S

SEQ ID NO: 67988 - protein, 34 aa, Artificial Sequence
  Cyclic GFR-binding peptide
  MOD_RES (1)..(32)..(33): Xaa is C or S
XSKVVMVTAKKVKPTRGVIKRIQVPRLDQPVXXP

SEQ ID NO: 67989 - protein, 34 aa, Artificial Sequence; identical to SEQ ID NO: 22588
  Cyclic GFR-binding peptide
  MOD_RES (2)..(2): Xaa is C or S

SEQ ID NO: 67990 - protein, 23 aa, Artificial Sequence
  Cyclic GFR-binding peptide
VTAKKVVKDYEDIKRMQVPRLET

SEQ ID NO: 67991 - protein, 44 aa, Artificial Sequence; identical to SEQ ID NO: 22592
  Cyclic GFR-binding peptide
  MOD_RES (2)..(4)..(41): Xaa is C or S

SEQ ID NO: 67992 - protein, 32 aa, Artificial Sequence; identical to SEQ ID NO: 15732
  Cyclic GFR-binding peptide
  MOD_RES (2)..(4): Xaa is C or S

SEQ ID NO: 67993 - protein, 37 aa, Artificial Sequence
  Cyclic GFR-binding peptide
  MOD_RES (32)..(32): Xaa is C or S
HQLFNSLQEHQGQHPKIRYYVMPLPEEETPVXELGED

SEQ ID NO: 67994 - protein, 36 aa, Artificial Sequence
  Cyclic GFR-binding peptide
  MOD_RES (34)..(34): Xaa is C or S
EELRNSLQELKPKKRVYEYYLVTLPEHHVRSPQXKV

SEQ ID NO: 67995 - protein, 27 aa, Artificial Sequence
  Cyclic GFR-binding peptide
  MOD_RES (26)..(27): Xaa is C or S
SMEGIVKPTRGVMIQITINSLDQPVXX

SEQ ID NO: 67996 - protein, 30 aa, Artificial Sequence
  Cyclic GFR-binding peptide
  MOD_RES (28)..(29): Xaa is C or S
MESMEGIVVKDYEDMIQMTINSLETPVXXA

SEQ ID NO: 67997 - protein, 34 aa, Artificial Sequence; identical to SEQ ID NO: 15735
  Cyclic GFR-binding peptide
  MOD_RES (1)..(33): Xaa is C or S

SEQ ID NO: 67998 - protein, 27 aa, Artificial Sequence
  Cyclic GFR-binding peptide
NHQLFNSLQEHQGQHPKIRYYVMPLPE

SEQ ID NO: 67999 - protein, 27 aa, Artificial Sequence
  Cyclic GFR-binding peptide
KVIMVTAKKIKPTKGIIKRIQVPRLDQ

SEQ ID NO: 68000 - protein, 23 aa, Artificial Sequence
  Cyclic GFR-binding peptide
FVTAKKHQGQHPKIRIKRMQVPR

SEQ ID NO: 68001 - protein, 33 aa, Artificial Sequence
  Cyclic GFR-binding peptide
  MOD_RES (27)..(28): Xaa is C or S
DSMEGIVVKENEDMIQMTINSLETPVXXAKPIK

SEQ ID NO: 68002 - protein, 22 aa, Artificial Sequence
  Cyclic GFR-binding peptide
VMNSLQEVKPTRGVYYVIPLPE

SEQ ID NO: 68003 - protein, 26 aa, Artificial Sequence
  Cyclic GFR-binding peptide
ELTVQVEKFIPKKRVIEVKAVKVSRL

SEQ ID NO: 68004 - protein, 31 aa, Artificial Sequence
  Cyclic GFR-binding peptide
SRVVMNSMEGIIVNSSDDMIQVTINSLKTPA

SEQ ID NO: 68005 - protein, 24 aa, Artificial Sequence
  Cyclic GFR-binding peptide
MSMEGIVKPTRGVMIQITINSLDQ

SEQ ID NO: 68006 - protein, 37 aa, Artificial Sequence; identical to SEQ ID NO: 15751
  Cyclic GFR-binding peptide
  MOD_RES (2)..(4)..(35)..(36): Xaa is C or S

SEQ ID NO: 68007 - protein, 34 aa, Artificial Sequence
  Cyclic GFR-binding peptide
  MOD_RES (1)..(1): Xaa is C or S
XALHDELTNSLQEFIPKKRVIEYYVVPLPELQVQ

SEQ ID NO: 68008 - protein, 41 aa, Artificial Sequence
  Cyclic GFR-binding peptide
  MOD_RES (2)..(4)..(36): Xaa is C or S
HXGXSRVVMNVTAKKIVNSSDDIKRVQVPRLKTPAXTPKTV

SEQ ID NO: 68009 - protein, 31 aa, Artificial Sequence
  Cyclic GFR-binding peptide
  MOD_RES (30)..(31): Xaa is C or S
RVIMSMEGIVKPKRGVMIQITINSLAQPVXX

SEQ ID NO: 68010 - protein, 28 aa, Artificial Sequence
  Cyclic GFR-binding peptide
KNHQLFVTAKKHQGQHPKIRIKRMQVPR

SEQ ID NO: 68011 - protein, 35 aa, Artificial Sequence
  Cyclic GFR-binding peptide
  MOD_RES (1)..(3): Xaa is C or S
XEXKNHQLFNSLQEHQGQHPKIRYYLMTLPEEETP

SEQ ID NO: 68012 - protein, 25 aa, Artificial Sequence
  Cyclic GFR-binding peptide
VTAKKVKPTRGVIKRIQVPRLDQPV

SEQ ID NO: 68013 - protein, 31 aa, Artificial Sequence
  Cyclic GFR-binding peptide
  MOD_RES (29)..(29): Xaa is C or S
VMNVQVEKIVNSSDDVKAVKVSRLKTPAXTP

SEQ ID NO: 68014 - protein, 32 aa, Artificial Sequence
  Cyclic GFR-binding peptide
  MOD_RES (2)..(2): Xaa is C or S
KXSKVIMVQVEKIKPTKGIVKAIKVSRLDQSV

SEQ ID NO: 68015 - protein, 33 aa, Artificial Sequence
  Cyclic GFR-binding peptide
  MOD_RES (29)..(30): Xaa is C or S
VMDSMEGIVVKENEDMIQMTINSLETPVXXAKP

SEQ ID NO: 68016 - protein, 34 aa, Artificial Sequence
  Cyclic GFR-binding peptide
  MOD_RES (32)..(33): Xaa is C or S
GEVVMDVQVEKVVKENEDVKAMKVSRLETPVXXA

SEQ ID NO: 68017 - protein, 36 aa, Artificial Sequence; identical to SEQ ID NO: 15768
  Cyclic GFR-binding peptide
  MOD_RES (31)..(32): Xaa is C or S

SEQ ID NO: 68018 - protein, 39 aa, Artificial Sequence
  Cyclic GFR-binding peptide
  MOD_RES (2)..(4)..(36)..(37): Xaa is C or S
RXGXGEVVMDSMEGIVVKENEDMIQMTINSLETPVXXAK

SEQ ID NO: 68019 - protein, 33 aa, Artificial Sequence; identical to SEQ ID NO: 15769
  Cyclic GFR-binding peptide
  MOD_RES (32)..(32): Xaa is C or S

SEQ ID NO: 68020 - protein, 31 aa, Artificial Sequence
  Cyclic GFR-binding peptide
  MOD_RES (1)..(1): Xaa is C or S
XKNHQLFNSLQEHQGQHPKIRYYLMTLPEEE

SEQ ID NO: 68021 - protein, 35 aa, Artificial Sequence; identical to SEQ ID NO: 15770
  Cyclic GFR-binding peptide
  MOD_RES (30)..(30): Xaa is C or S

SEQ ID NO: 68022 - protein, 33 aa, Artificial Sequence
  Cyclic GFR-binding peptide
  MOD_RES (30)..(31): Xaa is C or S
VVMEVTAKKVVKDYEDIKRMQVPRLETPVXXAK

SEQ ID NO: 68023 - protein, 23 aa, Artificial Sequence
  Cyclic GFR-binding peptide
IMVTAKKVKPKRGVIKRIQVPRL

SEQ ID NO: 68024 - protein, 40 aa, Artificial Sequence; identical to SEQ ID NO: 22621
  Cyclic GFR-binding peptide
  MOD_RES (1)..(3)..(37): Xaa is C or S

SEQ ID NO: 68025 - protein, 26 aa, Artificial Sequence
  Cyclic GFR-binding peptide
MDVQVEKVVKENEDVKAMKVSRLETP

SEQ ID NO: 68026 - protein, 30 aa, Artificial Sequence; identical to SEQ ID NO: 22622
  Cyclic GFR-binding peptide

SEQ ID NO: 68027 - protein, 32 aa, Artificial Sequence
  Cyclic GFR-binding peptide
  MOD_RES (31)..(32): Xaa is C or S
EVVMEVQVEKVVKDYEDVKAMKVSRLETPVXX

SEQ ID NO: 68028 - protein, 27 aa, Artificial Sequence
  Cyclic GFR-binding peptide
  MOD_RES (26)..(27): Xaa is C or S
NSLQEVVKDYEDYYLMTLPELETPVXX

SEQ ID NO: 68029 - protein, 38 aa, Artificial Sequence; identical to SEQ ID NO: 22623
  Cyclic GFR-binding peptide
  MOD_RES (32)..(32): Xaa is C or S

SEQ ID NO: 68030 - protein, 32 aa, Artificial Sequence
  Cyclic GFR-binding peptide
  MOD_RES (2)..(4): Xaa is C or S
RXEXKNHQLFNSLQEHQGQHPKIRYYVMPLPE

SEQ ID NO: 68031 - protein, 30 aa, Artificial Sequence; identical to SEQ ID NO: 15781
  Cyclic GFR-binding peptide
  MOD_RES (26)..(27): Xaa is C or S

SEQ ID NO: 68032 - protein, 33 aa, Artificial Sequence
  Cyclic GFR-binding peptide
  MOD_RES (1)..(1): Xaa is C or S
XALHDELTNSLQEFIPKKRVIEYYVVPLPELQV

SEQ ID NO: 68033 - protein, 38 aa, Artificial Sequence; identical to SEQ ID NO: 15786
  Cyclic GFR-binding peptide
  MOD_RES (2)..(34): Xaa is C or S

SEQ ID NO: 68034 - protein, 33 aa, Artificial Sequence
  Cyclic GFR-binding peptide
  MOD_RES (31)..(32): Xaa is C or S
RVVMNVQVEKIVNSSDDVKAVKVSRLKTPAXXP

SEQ ID NO: 68035 - protein, 29 aa, Artificial Sequence
  Cyclic GFR-binding peptide
  MOD_RES (2)..(2): Xaa is C or S
GXARVVMNVTAKKIVNSSDDIKRVQVPRL

SEQ ID NO: 68036 - protein, 33 aa, Artificial Sequence
  Cyclic GFR-binding peptide
  MOD_RES (28)..(28): Xaa is C or S
NSLQEHQGQHPKIRYYVMPLPEEETPVXELGED

SEQ ID NO: 68037 - protein, 25 aa, Artificial Sequence
  Cyclic GFR-binding peptide
KVIMVTAKKIKPTKGIIKRIQVPRL

SEQ ID NO: 68038 - protein, 32 aa, Artificial Sequence; identical to SEQ ID NO: 15794
  Cyclic GFR-binding peptide
  MOD_RES (26)..(27): Xaa is C or S

SEQ ID NO: 68039 - protein, 28 aa, Artificial Sequence
  Cyclic GFR-binding peptide
  MOD_RES (26)..(27): Xaa is C or S
SMEGIIVNSSDDMIQVTINSLKTPAXXP

SEQ ID NO: 68040 - protein, 32 aa, Artificial Sequence
  Cyclic GFR-binding peptide
  MOD_RES (32)..(32): Xaa is C or S
LTNSLQEFIPKKRVIEYYLVTLPELQVQTPRX

SEQ ID NO: 68041 - protein, 37 aa, Artificial Sequence
  Cyclic GFR-binding peptide
  MOD_RES (31)..(32): Xaa is C or S
EVVMDSMEGIVVKENEDMIQMTINSLETPVXXAKPIK

SEQ ID NO: 68042 - protein, 29 aa, Artificial Sequence
  Cyclic GFR-binding peptide
  MOD_RES (28)..(29): Xaa is C or S
MENSLQEVVKDYEDYYLMTLPELETPVXX

SEQ ID NO: 68043 - protein, 25 aa, Artificial Sequence
  Cyclic GFR-binding peptide
NSLQEVKPTRGVYYVIPLPELDQPV

SEQ ID NO: 68044 - protein, 30 aa, Artificial Sequence; identical to SEQ ID NO: 15808
  Cyclic GFR-binding peptide
  MOD_RES (30)..(30): Xaa is C or S

SEQ ID NO: 68045 - protein, 30 aa, Artificial Sequence
  Cyclic GFR-binding peptide
  MOD_RES (30)..(30): Xaa is C or S
VVMNVQVEKIVNSSDDVKAVKVSRLQTPAX

SEQ ID NO: 68046 - protein, 38 aa, Artificial Sequence; identical to SEQ ID NO: 15810
  Cyclic GFR-binding peptide
  MOD_RES (1)..(3)..(34)..(35): Xaa is C or S

SEQ ID NO: 68047 - protein, 38 aa, Artificial Sequence
  Cyclic GFR-binding peptide
  MOD_RES (1)..(3)..(34)..(35): Xaa is C or S
XKXSKVIMVTAKKIKPTKGIIKRIQVPRLDQSVXXPSA

SEQ ID NO: 68048 - protein, 37 aa, Artificial Sequence; identical to SEQ ID NO: 15815
  Cyclic GFR-binding peptide
  MOD_RES (1)..(33)..(34): Xaa is C or S

SEQ ID NO: 68049 - protein, 25 aa, Artificial Sequence
  Cyclic GFR-binding peptide
QLFVTAKKHQGQHPKIRIKRMQVPR

SEQ ID NO: 68050 - protein, 32 aa, Artificial Sequence
  Cyclic GFR-binding peptide
  MOD_RES (1)..(1): Xaa is C or S
XKNHQLFNSLQEHQGQHPKIRYYVMPLPEEET

SEQ ID NO: 68051 - protein, 38 aa, Artificial Sequence; identical to SEQ ID NO: 15824
  Cyclic GFR-binding peptide
  MOD_RES (32)..(33): Xaa is C or S

SEQ ID NO: 68052 - protein, 31 aa, Artificial Sequence
  Cyclic GFR-binding peptide
  MOD_RES (1)..(1): Xaa is C or S
XARVVMNVTAKKIVNSSDDIKRVQVPRLQTP

SEQ ID NO: 68053 - protein, 33 aa, Artificial Sequence
  Cyclic GFR-binding peptide
  MOD_RES (33)..(33): Xaa is C or S
ELRNSLQELKPKKRVYEYYLVTLPEHHVRSPQX

SEQ ID NO: 68054 - protein, 30 aa, Artificial Sequence; identical to SEQ ID NO: 15827
  Cyclic GFR-binding peptide
  MOD_RES (2)..(4): Xaa is C or S

SEQ ID NO: 68055 - protein, 22 aa, Artificial Sequence
  Cyclic GFR-binding peptide
SMEGIVKPKRGVMIQITINSLA

SEQ ID NO: 68056 - protein, 26 aa, Artificial Sequence
  Cyclic GFR-binding peptide
NNSLQEIVNSSDDYYLVTLPELKTPA

SEQ ID NO: 68057 - protein, 30 aa, Artificial Sequence; identical to SEQ ID NO: 15830
  Cyclic GFR-binding peptide

SEQ ID NO: 68058 - protein, 23 aa, Artificial Sequence
  Cyclic GFR-binding peptide
VMNVTAKKIVNSSDDIKRVQVPR

SEQ ID NO: 68059 - protein, 34 aa, Artificial Sequence
  Cyclic GFR-binding peptide
  MOD_RES (30)..(31): Xaa is C or S
VVMNSMEGIIVNSSDDMIQVTINSLKTPAXXPKP

SEQ ID NO: 68060 - protein, 25 aa, Artificial Sequence
  Cyclic GFR-binding peptide
KVVMVQVEKVKPTRGVVKAIKVSRL

SEQ ID NO: 68061 - protein, 38 aa, Artificial Sequence; identical to SEQ ID NO: 15836
  Cyclic GFR-binding peptide
  MOD_RES (1)..(33)..(34): Xaa is C or S

SEQ ID NO: 68062 - protein, 25 aa, Artificial Sequence
  Cyclic GFR-binding peptide
MDVTAKKVVKENEDIKRMQVPRLET

SEQ ID NO: 68063 - protein, 27 aa, Artificial Sequence
  Cyclic GFR-binding peptide
EVVMEVTAKKVVKDYEDIKRMQVPRLE

SEQ ID NO: 68064 - protein, 26 aa, Artificial Sequence
  Cyclic GFR-binding peptide
GEVVMEVQVEKVVKDYEDVKAMKVSR

SEQ ID NO: 68065 - protein, 38 aa, Artificial Sequence; identical to SEQ ID NO: 22662
  Cyclic GFR-binding peptide
  MOD_RES (33)..(33): Xaa is C or S

SEQ ID NO: 68066 - protein, 35 aa, Artificial Sequence
  Cyclic GFR-binding peptide
  MOD_RES (1)..(3): Xaa is C or S
XAXELHEELRNSLQELKPKKRVYEYYVVPLPEHHV

SEQ ID NO: 68067 - protein, 23 aa, Artificial Sequence
  Cyclic GFR-binding peptide
NSLQEVVKENEDYYLMTLPELET

SEQ ID NO: 68068 - protein, 36 aa, Artificial Sequence; identical to SEQ ID NO: 15847
  Cyclic GFR-binding peptide
  MOD_RES (2)..(34)..(35): Xaa is C or S

SEQ ID NO: 68069 - protein, 32 aa, Artificial Sequence
  Cyclic GFR-binding peptide
  MOD_RES (26)..(27): Xaa is C or S
VTAKKVVKENEDIKRMQVPRLETPVXXAKPIK

SEQ ID NO: 68070 - protein, 29 aa, Artificial Sequence
  Cyclic GFR-binding peptide
SRVIMVQVEKVKPKRGVVKAIKVSRLAQP

SEQ ID NO: 68071 - protein, 34 aa, Artificial Sequence
  Cyclic GFR-binding peptide
  MOD_RES (1)..(3): Xaa is C or S
XGXGEVVMESMEGIVVKDYEDMIQMTINSLETPV

SEQ ID NO: 68072 - protein, 28 aa, Artificial Sequence
  Cyclic GFR-binding peptide
ARVVMNNSLQEIVNSSDDYYVVPLPELQ

SEQ ID NO: 68073 - protein, 40 aa, Artificial Sequence
  Cyclic GFR-binding peptide
  MOD_RES (2)..(4)..(36)..(37): Xaa is C or S
HXGXARVVMNVTAKKIVNSSDDIKRVQVPRLQTPAXXPKP

SEQ ID NO: 68074 - protein, 35 aa, Artificial Sequence
  Cyclic GFR-binding peptide
  MOD_RES (2)..(2): Xaa is C or S
KXALHDELTNSLQEFIPKKRVIEYYVVPLPELQVQ

SEQ ID NO: 68075 - protein, 29 aa, Artificial Sequence
  Cyclic GFR-binding peptide
HQLFNSLQEHQGQHPKIRYYVMPLPEEET

SEQ ID NO: 68076 - protein, 33 aa, Artificial Sequence; identical to SEQ ID NO: 15861
  Cyclic GFR-binding peptide
  MOD_RES (27)..(28): Xaa is C or S

SEQ ID NO: 68077 - protein, 32 aa, Artificial Sequence; identical to SEQ ID NO: 15862
  Cyclic GFR-binding peptide
  MOD_RES (29)..(29): Xaa is C or S

SEQ ID NO: 68078 - protein, 26 aa, Artificial Sequence
  Cyclic GFR-binding peptide
SKVIMVTAKKIKPTKGIIKRIQVPRL

SEQ ID NO: 68079 - protein, 31 aa, Artificial Sequence; identical to SEQ ID NO: 15866
  Cyclic GFR-binding peptide

SEQ ID NO: 68080 - protein, 28 aa, Artificial Sequence
  Cyclic GFR-binding peptide
ARVVMNVQVEKIVNSSDDVKAVKVSRLQ

SEQ ID NO: 68081 - protein, 30 aa, Artificial Sequence; identical to SEQ ID NO: 15869
  Cyclic GFR-binding peptide
  MOD_RES (27)..(28): Xaa is C or S

SEQ ID NO: 68082 - protein, 38 aa, Artificial Sequence
  Cyclic GFR-binding peptide
  MOD_RES (35)..(35): Xaa is C or S
HDELTNSLQEFIPKKRVIEYYLVTLPELQVQTPRXQVN

SEQ ID NO: 68083 - protein, 29 aa, Artificial Sequence
  Cyclic GFR-binding peptide
  MOD_RES (2)..(2): Xaa is C or S
KXSRVIMVTAKKVKPKRGVIKRIQVPRLA

SEQ ID NO: 68084 - protein, 32 aa, Artificial Sequence
  Cyclic GFR-binding peptide
  MOD_RES (29)..(30): Xaa is C or S
VIMSMEGIVKPKRGVMIQITINSLAQPVXXPA

SEQ ID NO: 68085 - protein, 35 aa, Artificial Sequence
  Cyclic GFR-binding peptide
  MOD_RES (31)..(32): Xaa is C or S
SKVVMVTAKKVKPTRGVIKRIQVPRLDQPVXXPSA

SEQ ID NO: 68086 - protein, 35 aa, Artificial Sequence
  Cyclic GFR-binding peptide
  MOD_RES (32)..(32): Xaa is C or S
LTNSLQEFIPKKRVIEYYVVPLPELQVQTPRXQVN

SEQ ID NO: 68087 - protein, 33 aa, Artificial Sequence
  Cyclic GFR-binding peptide
  MOD_RES (2)..(2): Xaa is C or S
AXELHEELRNSLQELKPKKRVYEYYVVPLPEHH

SEQ ID NO: 68088 - protein, 25 aa, Artificial Sequence
  Cyclic GFR-binding peptide
MNSLQEVKPTRGVYYVIPLPELDQP

SEQ ID NO: 68089 - protein, 27 aa, Artificial Sequence
  Cyclic GFR-binding peptide
VVMDSMEGIVVKENEDMIQMTINSLET

SEQ ID NO: 68090 - protein, 31 aa, Artificial Sequence; identical to SEQ ID NO: 15885
  Cyclic GFR-binding peptide
  MOD_RES (31)..(31): Xaa is C or S

SEQ ID NO: 68091 - protein, 32 aa, Artificial Sequence
  Cyclic GFR-binding peptide
  MOD_RES (31)..(31): Xaa is C or S
TNSLQEFIPKKRVIEYYLVTLPELQVQTPRXQ

SEQ ID NO: 68092 - protein, 26 aa, Artificial Sequence
  Cyclic GFR-binding peptide
MDNSLQEVVKENEDYYVMPLPELETP

SEQ ID NO: 68093 - protein, 27 aa, Artificial Sequence
  Cyclic GFR-binding peptide
SMEGILKPKKRVYEMIQVTINSHHVRS

SEQ ID NO: 68094 - protein, 30 aa, Artificial Sequence
  Cyclic GFR-binding peptide
  MOD_RES (1)..(3): Xaa is C or S
XKXSKVVMVQVEKVKPTRGVVKAIKVSRLD

SEQ ID NO: 68095 - protein, 36 aa, Artificial Sequence; identical to SEQ ID NO: 22689
  Cyclic GFR-binding peptide
  MOD_RES (34)..(34): Xaa is C or S

SEQ ID NO: 68096 - protein, 41 aa, Artificial Sequence
  Cyclic GFR-binding peptide
  MOD_RES (1)..(35): Xaa is C or S
XKNHQLFNSLQEHQGQHPKIRYYVMPLPEEETPVXELGEDN

SEQ ID NO: 68097 - protein, 26 aa, Artificial Sequence
  Cyclic GFR-binding peptide
LRNSLQELKPKKRVYEYYVVPLPEHH

SEQ ID NO: 68098 - protein, 44 aa, Artificial Sequence; identical to SEQ ID NO: 22690
  Cyclic GFR-binding peptide
  MOD_RES (2)..(4)..(38): Xaa is C or S

SEQ ID NO: 68099 - protein, 32 aa, Artificial Sequence
  Cyclic GFR-binding peptide
  MOD_RES (27)..(28): Xaa is C or S
MVQVEKVKPTRGVVKAIKVSRLDQPVXXPSAS

SEQ ID NO: 68100 - protein, 45 aa, Artificial Sequence
  Cyclic GFR-binding peptide
  MOD_RES (2)..(4)..(41): Xaa is C or S
AXAXELHEELRNSLQELKPKKRVYEYYVVPLPEHHVRSPQXKVSS

SEQ ID NO: 68101 - protein, 38 aa, Artificial Sequence
  Cyclic GFR-binding peptide
  MOD_RES (1)..(32)..(33): Xaa is C or S
XSKVVMSMEGIVKPTRGVMIQITINSLDQPVXXPSASA

SEQ ID NO: 68102 - protein, 32 aa, Artificial Sequence
  Cyclic GFR-binding peptide
  MOD_RES (32)..(32): Xaa is C or S
GEVVMESMEGIVVKDYEDMIQMTINSLETPVX

SEQ ID NO: 68103 - protein, 35 aa, Artificial Sequence; identical to SEQ ID NO: 15901
  Cyclic GFR-binding peptide
  MOD_RES (30)..(31): Xaa is C or S

SEQ ID NO: 68104 - protein, 27 aa, Artificial Sequence
  Cyclic GFR-binding peptide
SKVVMSMEGIVKPTRGVMIQITINSLD

SEQ ID NO: 68105 - protein, 34 aa, Artificial Sequence; identical to SEQ ID NO: 15903
  Cyclic GFR-binding peptide
  MOD_RES (1)..(32)..(33): Xaa is C or S

SEQ ID NO: 68106 - protein, 28 aa, Artificial Sequence
  Cyclic GFR-binding peptide
  MOD_RES (1)..(1): Xaa is C or S
XSRVIMSMEGIVKPKRGVMIQITINSLA

SEQ ID NO: 68107 - protein, 30 aa, Artificial Sequence
  Cyclic GFR-binding peptide
  MOD_RES (2)..(2): Xaa is C or S
GXGEVVMEVQVEKVVKDYEDVKAMKVSRLE

SEQ ID NO: 68108 - protein, 22 aa, Artificial Sequence
  Cyclic GFR-binding peptide
MENSLQEVVKDYEDYYVMPLPE

SEQ ID NO: 68109 - protein, 30 aa, Artificial Sequence
  Cyclic GFR-binding peptide
  MOD_RES (2)..(2): Xaa is C or S
KXSRVIMVTAKKVKPKRGVIKRIQVPRLAQ

SEQ ID NO: 68110 - protein, 27 aa, Artificial Sequence
  Cyclic GFR-binding peptide
  MOD_RES (27)..(27): Xaa is C or S
DNSLQEVVKENEDYYVMPLPELETPVX

SEQ ID NO: 68111 - protein, 28 aa, Artificial Sequence
  Cyclic GFR-binding peptide
LFNSLQEHQGQHPKIRYYVMPLPEEETP

SEQ ID NO: 68112 - protein, 24 aa, Artificial Sequence
  Cyclic GFR-binding peptide
TNSLQEFIPKKRVIEYYVVPLPEL

SEQ ID NO: 68113 - protein, 42 aa, Artificial Sequence
  Cyclic GFR-binding peptide
  MOD_RES (1)..(3)..(40): Xaa is C or S
XAXELHEELRNSLQELKPKKRVYEYYVVPLPEHHVRSPQXKV

SEQ ID NO: 68114 - protein, 32 aa, Artificial Sequence
  Cyclic GFR-binding peptide
  MOD_RES (2)..(2): Xaa is C or S
KXSKVIMSMEGIIKPTKGIMIQITINSLDQSV

SEQ ID NO: 68115 - protein, 34 aa, Artificial Sequence; identical to SEQ ID NO: 15922
  Cyclic GFR-binding peptide
  MOD_RES (2)..(34): Xaa is C or S

SEQ ID NO: 68116 - protein, 29 aa, Artificial Sequence
  Cyclic GFR-binding peptide
VVMENSLQEVVKDYEDYYVMPLPELETPV

SEQ ID NO: 68117 - protein, 26 aa, Artificial Sequence
  Cyclic GFR-binding peptide
DVQVEKVVKENEDVKAMKVSRLETPV

SEQ ID NO: 68118 - protein, 34 aa, Artificial Sequence
  Cyclic GFR-binding peptide
  MOD_RES (2)..(34): Xaa is C or S
GXGEVVMDVQVEKVVKENEDVKAMKVSRLETPVX

SEQ ID NO: 68119 - protein, 39 aa, Artificial Sequence
  Cyclic GFR-binding peptide
  MOD_RES (1)..(3)..(35): Xaa is C or S
XGXSRVVMNSMEGIIVNSSDDMIQVTINSLKTPAXTPKT

SEQ ID NO: 68120 - protein, 33 aa, Artificial Sequence; identical to SEQ ID NO: 15929
  Cyclic GFR-binding peptide
  MOD_RES (29)..(30): Xaa is C or S

SEQ ID NO: 68121 - protein, 37 aa, Artificial Sequence
  Cyclic GFR-binding peptide
  MOD_RES (1)..(32)..(33): Xaa is C or S
XSKVIMSMEGIIKPTKGIMIQITINSLDQSVXXPSAS

SEQ ID NO: 68122 - protein, 40 aa, Artificial Sequence
  Cyclic GFR-binding peptide
  MOD_RES (37)..(37): Xaa is C or S
ELHEELRNSLQELKPKKRVYEYYLVTLPEHHVRSPQXKVS

SEQ ID NO: 68123 - protein, 39 aa, Artificial Sequence; identical to SEQ ID NO: 22717
  Cyclic GFR-binding peptide
  MOD_RES (35)..(35): Xaa is C or S

SEQ ID NO: 68124 - protein, 38 aa, Artificial Sequence; identical to SEQ ID NO: 22718
  Cyclic GFR-binding peptide
  MOD_RES (2)..(2): Xaa is C or S

SEQ ID NO: 68125 - protein, 30 aa, Artificial Sequence; identical to SEQ ID NO: 22722
  Cyclic GFR-binding peptide
  MOD_RES (2)..(2): Xaa is C or S

SEQ ID NO: 68126 - protein, 39 aa, Artificial Sequence; identical to SEQ ID NO: 15935
  Cyclic GFR-binding peptide
  MOD_RES (2)..(34)..(35): Xaa is C or S

SEQ ID NO: 68127 - protein, 27 aa, Artificial Sequence
  Cyclic GFR-binding peptide
KVVMVQVEKVKPTRGVVKAIKVSRLDQ

SEQ ID NO: 68128 - protein, 23 aa, Artificial Sequence
  Cyclic GFR-binding peptide
VMNSMEGIIVNSSDDMIQVTINS

SEQ ID NO: 68129 - protein, 29 aa, Artificial Sequence
  Cyclic GFR-binding peptide
NSLQEFIPKKRVIEYYLVTLPELQVQTPR

SEQ ID NO: 68130 - protein, 31 aa, Artificial Sequence; identical to SEQ ID NO: 22729
  Cyclic GFR-binding peptide
  MOD_RES (30)..(30): Xaa is C or S

SEQ ID NO: 68131 - protein, 25 aa, Artificial Sequence
  Cyclic GFR-binding peptide
MSMEGIIKPTKGIMIQITINSLDQS

SEQ ID NO: 68132 - protein, 30 aa, Artificial Sequence
  Cyclic GFR-binding peptide
SKVVMSMEGIVKPTRGVMIQITINSLDQPV

SEQ ID NO: 68133 - protein, 31 aa, Artificial Sequence
  Cyclic GFR-binding peptide
  MOD_RES (2)..(2): Xaa is C or S
GXGEVVMDVQVEKVVKENEDVKAMKVSRLET

SEQ ID NO: 68134 - protein, 41 aa, Artificial Sequence
  Cyclic GFR-binding peptide
  MOD_RES (1)..(38): Xaa is C or S
XALHDELTNSLQEFIPKKRVIEYYVVPLPELQVQTPRXQVN

SEQ ID NO: 68135 - protein, 33 aa, Artificial Sequence
  Cyclic GFR-binding peptide
  MOD_RES (1)..(3): Xaa is C or S
XAXELHEELRNSLQELKPKKRVYEYYLVTLPEH

SEQ ID NO: 68136 - protein, 42 aa, Artificial Sequence; identical to SEQ ID NO: 22739
  Cyclic GFR-binding peptide
  MOD_RES (2)..(36): Xaa is C or S

SEQ ID NO: 68137 - protein, 31 aa, Artificial Sequence
  Cyclic GFR-binding peptide
  MOD_RES (1)..(3): Xaa is C or S
XKXSKVIMVTAKKIKPTKGIIKRIQVPRLDQ

SEQ ID NO: 68138 - protein, 24 aa, Artificial Sequence
  Cyclic GFR-binding peptide
VMESMEGIVVKDYEDMIQMTINSL

SEQ ID NO: 68139 - protein, 24 aa, Artificial Sequence
  Cyclic GFR-binding peptide
NNSLQEIVNSSDDYYVVPLPELQT

SEQ ID NO: 68140 - protein, 38 aa, Artificial Sequence
  Cyclic GFR-binding peptide
  MOD_RES (2)..(33)..(34): Xaa is C or S
KXSKVVMSMEGIVKPTRGVMIQITINSLDQPVXXPSAS

SEQ ID NO: 68141 - protein, 37 aa, Artificial Sequence; identical to SEQ ID NO: 22745
  Cyclic GFR-binding peptide
  MOD_RES (34)..(34): Xaa is C or S

SEQ ID NO: 68142 - protein, 23 aa, Artificial Sequence
  Cyclic GFR-binding peptide
MNVQVEKIVNSSDDVKAVKVSRL

SEQ ID NO: 68143 - protein, 35 aa, Artificial Sequence
  Cyclic GFR-binding peptide
  MOD_RES (32)..(33): Xaa is C or S
GEVVMEVTAKKVVKDYEDIKRMQVPRLETPVXXAK

SEQ ID NO: 68144 - protein, 31 aa, Artificial Sequence
  Cyclic GFR-binding peptide
  MOD_RES (2)..(2): Xaa is C or S
GXGEVVMESMEGIVVKDYEDMIQMTINSLET

SEQ ID NO: 68145 - protein, 41 aa, Artificial Sequence; identical to SEQ ID NO: 15965
  Cyclic GFR-binding peptide
  MOD_RES (1)..(3)..(35)..(36): Xaa is C or S

SEQ ID NO: 68146 - protein, 22 aa, Artificial Sequence
  Cyclic GFR-binding peptide
IMVTAKKIKPTKGIIKRIQVPR

SEQ ID NO: 68147 - protein, 41 aa, Artificial Sequence; identical to SEQ ID NO: 22747
  Cyclic GFR-binding peptide
  MOD_RES (1)..(3)..(40): Xaa is C or S

SEQ ID NO: 68148 - protein, 36 aa, Artificial Sequence
  Cyclic GFR-binding peptide
  MOD_RES (1)..(3): Xaa is C or S
XKXALHDELTNSLQEFIPKKRVIEYYVVPLPELQVQ

SEQ ID NO: 68149 - protein, 31 aa, Artificial Sequence; identical to SEQ ID NO: 22754
  Cyclic GFR-binding peptide
  MOD_RES (29)..(29): Xaa is C or S

SEQ ID NO: 68150 - protein, 29 aa, Artificial Sequence
  Cyclic GFR-binding peptide
  MOD_RES (2)..(2): Xaa is C or S
KXSKVIMNSLQEIKPTKGIYYVIPLPELD

SEQ ID NO: 68151 - protein, 38 aa, Artificial Sequence; identical to SEQ ID NO: 15972
  Cyclic GFR-binding peptide
  MOD_RES (1)..(33): Xaa is C or S

SEQ ID NO: 68152 - protein, 28 aa, Artificial Sequence
  Cyclic GFR-binding peptide
  MOD_RES (1)..(1): Xaa is C or S
XARVVMNSMEGIIVNSSDDMIQVTINSL

SEQ ID NO: 68153 - protein, 40 aa, Artificial Sequence
  Cyclic GFR-binding peptide
  MOD_RES (1)..(3)..(35)..(36): Xaa is C or S
XGXGEVVMEVTAKKVVKDYEDIKRMQVPRLETPVXXAKPI

SEQ ID NO: 68154 - protein, 20 aa, Artificial Sequence
  Cyclic GFR-binding peptide
NSLQEVVKDYEDYYLMTLPE

SEQ ID NO: 68155 - protein, 32 aa, Artificial Sequence
  Cyclic GFR-binding peptide
  MOD_RES (29)..(30): Xaa is C or S
VIMVTAKKVKPKRGVIKRIQVPRLAQPVXXPA

SEQ ID NO: 68156 - protein, 23 aa, Artificial Sequence
  Cyclic GFR-binding peptide
NSLQEIKPTKGIYYLITLPELDQ

SEQ ID NO: 68157 - protein, 28 aa, Artificial Sequence
  Cyclic GFR-binding peptide
  MOD_RES (2)..(2): Xaa is C or S
GXSRVVMNVTAKKIVNSSDDIKRVQVPR

SEQ ID NO: 68158 - protein, 38 aa, Artificial Sequence; identical to SEQ ID NO: 22762
  Cyclic GFR-binding peptide
  MOD_RES (1)..(38): Xaa is C or S

SEQ ID NO: 68159 - protein, 32 aa, Artificial Sequence
  Cyclic GFR-binding peptide
  MOD_RES (32)..(32): Xaa is C or S
ARVVMNSMEGIIVNSSDDMIQVTINSLQTPAX

SEQ ID NO: 68160 - protein, 24 aa, Artificial Sequence
  Cyclic GFR-binding peptide
VTAKKHQGQHPKIRIKRMQVPREE

SEQ ID NO: 68161 - protein, 28 aa, Artificial Sequence
  Cyclic GFR-binding peptide
KVIMVQVEKIKPTKGIVKAIKVSRLDQS

SEQ ID NO: 68162 - protein, 39 aa, Artificial Sequence; identical to SEQ ID NO: 22765
  Cyclic GFR-binding peptide
  MOD_RES (2)..(39): Xaa is C or S

SEQ ID NO: 68163 - protein, 28 aa, Artificial Sequence
  Cyclic GFR-binding peptide
  MOD_RES (2)..(2): Xaa is C or S
GXARVVMNSMEGIIVNSSDDMIQVTINS

SEQ ID NO: 68164 - protein, 22 aa, Artificial Sequence
  Cyclic GFR-binding peptide
VMVQVEKVKPTRGVVKAIKVSR

SEQ ID NO: 68165 - protein, 26 aa, Artificial Sequence
  Cyclic GFR-binding peptide
  MOD_RES (26)..(26): Xaa is C or S
NSLQEIVNSSDDYYLVTLPELKTPAX

SEQ ID NO: 68166 - protein, 31 aa, Artificial Sequence
  Cyclic GFR-binding peptide
  MOD_RES (31)..(31): Xaa is C or S
EVVMESMEGIVVKDYEDMIQMTINSLETPVX

SEQ ID NO: 68167 - protein, 32 aa, Artificial Sequence
  Cyclic GFR-binding peptide
EELRNSLQELKPKKRVYEYYVVPLPEHHVRSP

SEQ ID NO: 68168 - protein, 28 aa, Artificial Sequence
  Cyclic GFR-binding peptide
VMNVTAKKIVNSSDDIKRVQVPRLQTPA

SEQ ID NO: 68169 - protein, 33 aa, Artificial Sequence; identical to SEQ ID NO: 16004
  Cyclic GFR-binding peptide
  MOD_RES (1)..(3): Xaa is C or S

SEQ ID NO: 68170 - protein, 24 aa, Artificial Sequence
  Cyclic GFR-binding peptide
MDNSLQEVVKENEDYYLMTLPELE

SEQ ID NO: 68171 - protein, 31 aa, Artificial Sequence; identical to SEQ ID NO: 16008
  Cyclic GFR-binding peptide

SEQ ID NO: 68172 - protein, 38 aa, Artificial Sequence; identical to SEQ ID NO: 22783
  Cyclic GFR-binding peptide
  MOD_RES (1)..(3)..(37): Xaa is C or S

SEQ ID NO: 68173 - protein, 24 aa, Artificial Sequence
  Cyclic GFR-binding peptide
MDSMEGIVVKENEDMIQMTINSLE

SEQ ID NO: 68174 - protein, 30 aa, Artificial Sequence; identical to SEQ ID NO: 49850
  Cyclic GFR-binding peptide
  MOD_RES (2)..(2): Xaa is C or S

SEQ ID NO: 68175 - protein, 35 aa, Artificial Sequence
  Cyclic GFR-binding peptide
  MOD_RES (1)..(1): Xaa is C or S
XELHEELRNSLQELKPKKRVYEYYVVPLPEHHVRS

SEQ ID NO: 68176 - protein, 42 aa, Artificial Sequence; identical to SEQ ID NO: 22790
  Cyclic GFR-binding peptide
  MOD_RES (1)..(38): Xaa is C or S

SEQ ID NO: 68177 - protein, 30 aa, Artificial Sequence; identical to SEQ ID NO: 16021
  Cyclic GFR-binding peptide
  MOD_RES (28)..(28): Xaa is C or S

SEQ ID NO: 68178 - protein, 37 aa, Artificial Sequence; identical to SEQ ID NO: 16023
  Cyclic GFR-binding peptide
  MOD_RES (2)..(33)..(34): Xaa is C or S

SEQ ID NO: 68179 - protein, 30 aa, Artificial Sequence
  Cyclic GFR-binding peptide
  MOD_RES (2)..(4): Xaa is C or S
SXKXSKVIMSMEGIIKPTKGIMIQITINSL

SEQ ID NO: 68180 - protein, 37 aa, Artificial Sequence
  Cyclic GFR-binding peptide
  MOD_RES (31)..(32): Xaa is C or S
EVVMDVQVEKVVKENEDVKAMKVSRLETPVXXAKPIK

SEQ ID NO: 68181 - protein, 37 aa, Artificial Sequence
  Cyclic GFR-binding peptide
  MOD_RES (36)..(36): Xaa is C or S
LHEELRNSLQELKPKKRVYEYYLVTLPEHHVRSPQXK

SEQ ID NO: 68182 - protein, 23 aa, Artificial Sequence
  Cyclic GFR-binding peptide
TSMEGIFIPKKRVIEMIQVTINS

SEQ ID NO: 68183 - protein, 40 aa, Artificial Sequence; identical to SEQ ID NO: 16032
  Cyclic GFR-binding peptide
  MOD_RES (1)..(3)..(35)..(36): Xaa is C or S

SEQ ID NO: 68184 - protein, 26 aa, Artificial Sequence
  Cyclic GFR-binding peptide
NSLQELKPKKRVYEYYVVPLPEHHVR

SEQ ID NO: 68185 - protein, 38 aa, Artificial Sequence
  Cyclic GFR-binding peptide
  MOD_RES (2)..(2): Xaa is C or S
AXELHEELRNSLQELKPKKRVYEYYLVTLPEHHVRSPQ

SEQ ID NO: 68186 - protein, 27 aa, Artificial Sequence
  Cyclic GFR-binding peptide
SRVVMNVQVEKIVNSSDDVKAVKVSRL

SEQ ID NO: 68187 - protein, 28 aa, Artificial Sequence
  Cyclic GFR-binding peptide
LHDELTVQVEKFIPKKRVIEVKAVKVSR

SEQ ID NO: 68188 - protein, 37 aa, Artificial Sequence
  Cyclic GFR-binding peptide
  MOD_RES (1)..(3)..(34)..(35): Xaa is C or S
XKXSKVVMSMEGIVKPTRGVMIQITINSLDQPVXXPS

SEQ ID NO: 68189 - protein, 38 aa, Artificial Sequence
  Cyclic GFR-binding peptide
  MOD_RES (2)..(4)..(35)..(36): Xaa is C or S
SXKXSKVIMVTAKKIKPTKGIIKRIQVPRLDQSVXXPS

SEQ ID NO: 68190 - protein, 36 aa, Artificial Sequence
  Cyclic GFR-binding peptide
  MOD_RES (31)..(32): Xaa is C or S
SKVIMVTAKKIKPTKGIIKRIQVPRLDQSVXXPSAS

SEQ ID NO: 68191 - protein, 30 aa, Artificial Sequence
  Cyclic GFR-binding peptide
  MOD_RES (27)..(28): Xaa is C or S
MSMEGIVKPTRGVMIQITINSLDQPVXXPS

SEQ ID NO: 68192 - protein, 27 aa, Artificial Sequence
  Cyclic GFR-binding peptide
KVIMVQVEKIKPTKGIVKAIKVSRLDQ

SEQ ID NO: 68193 - protein, 35 aa, Artificial Sequence
  Cyclic GFR-binding peptide
  MOD_RES (31)..(32): Xaa is C or S
EVVMDVTAKKVVKENEDIKRMQVPRLETPVXXAKP

SEQ ID NO: 68194 - protein, 34 aa, Artificial Sequence
  Cyclic GFR-binding peptide
  MOD_RES (29)..(30): Xaa is C or S
VMNVQVEKIVNSSDDVKAVKVSRLKTPAXXPKPV

SEQ ID NO: 68195 - protein, 34 aa, Artificial Sequence
  Cyclic GFR-binding peptide
  MOD_RES (31)..(31): Xaa is C or S
QLFNSLQEHQGQHPKIRYYVMPLPEEETPVXELG

SEQ ID NO: 68196 - protein, 27 aa, Artificial Sequence
  Cyclic GFR-binding peptide
ARVVMNVQVEKIVNSSDDVKAVKVSRL

SEQ ID NO: 68197 - protein, 32 aa, Artificial Sequence
  Cyclic GFR-binding peptide
  MOD_RES (26)..(27): Xaa is C or S
VTAKKVKPKRGVIKRIQVPRLAQPVXXPAASA

SEQ ID NO: 68198 - protein, 25 aa, Artificial Sequence
  Cyclic GFR-binding peptide
LRVTAKKLKPKKRVYEIKRVQVPRH

SEQ ID NO: 68199 - protein, 29 aa, Artificial Sequence
  Cyclic GFR-binding peptide
  MOD_RES (27)..(28): Xaa is C or S
DVTAKKVVKENEDIKRMQVPRLETPVXXA

SEQ ID NO: 68200 - protein, 29 aa, Artificial Sequence
  Cyclic GFR-binding peptide
HQLFNSLQEHQGQHPKIRYYLMTLPEEET

SEQ ID NO: 68201 - protein, 27 aa, Artificial Sequence
  Cyclic GFR-binding peptide
FNSLQEHQGQHPKIRYYVMPLPEEETP

SEQ ID NO: 68202 - protein, 35 aa, Artificial Sequence; identical to SEQ ID NO: 22816
  Cyclic GFR-binding peptide
  MOD_RES (1)..(1): Xaa is C or S

SEQ ID NO: 68203 - protein, 36 aa, Artificial Sequence
  Cyclic GFR-binding peptide
  MOD_RES (1)..(32)..(33): Xaa is C or S
XSKVVMSMEGIVKPTRGVMIQITINSLDQPVXXPSA

SEQ ID NO: 68204 - protein, 36 aa, Artificial Sequence; identical to SEQ ID NO: 22823
  Cyclic GFR-binding peptide
  MOD_RES (32)..(32): Xaa is C or S

SEQ ID NO: 68205 - protein, 42 aa, Artificial Sequence
  Cyclic GFR-binding peptide
  MOD_RES (1)..(38): Xaa is C or S
XALHDELTNSLQEFIPKKRVIEYYLVTLPELQVQTPRXQVNR

SEQ ID NO: 68206 - protein, 33 aa, Artificial Sequence; identical to SEQ ID NO: 22824
  Cyclic GFR-binding peptide
  MOD_RES (1)..(1): Xaa is C or S

SEQ ID NO: 68207 - protein, 35 aa, Artificial Sequence; identical to SEQ ID NO: 22828
  Cyclic GFR-binding peptide
  MOD_RES (34)..(34): Xaa is C or S

SEQ ID NO: 68208 - protein, 32 aa, Artificial Sequence
  Cyclic GFR-binding peptide
  MOD_RES (1)..(1): Xaa is C or S
XELHEELRNSLQELKPKKRVYEYYVVPLPEHH

SEQ ID NO: 68209 - protein, 32 aa, Artificial Sequence
  Cyclic GFR-binding peptide
HEELRNSLQELKPKKRVYEYYLVTLPEHHVRS

SEQ ID NO: 68210 - protein, 31 aa, Artificial Sequence
  Cyclic GFR-binding peptide
KNHQLFNSLQEHQGQHPKIRYYVMPLPEEET

SEQ ID NO: 68211 - protein, 36 aa, Artificial Sequence
  Cyclic GFR-binding peptide
  MOD_RES (31)..(32): Xaa is C or S
EVVMEVTAKKVVKDYEDIKRMQVPRLETPVXXAKPI

SEQ ID NO: 68212 - protein, 31 aa, Artificial Sequence
  Cyclic GFR-binding peptide
  MOD_RES (2)..(2): Xaa is C or S
KXSRVIMVTAKKVKPKRGVIKRIQVPRLAQP

SEQ ID NO: 68213 - protein, 35 aa, Artificial Sequence
  Cyclic GFR-binding peptide
  MOD_RES (32)..(32): Xaa is C or S
HQLFNSLQEHQGQHPKIRYYVMPLPEEETPVXELG

SEQ ID NO: 68214 - protein, 40 aa, Artificial Sequence
  Cyclic GFR-binding peptide
  MOD_RES (1)..(38): Xaa is C or S
XELHEELRNSLQELKPKKRVYEYYVVPLPEHHVRSPQXKV

SEQ ID NO: 68215 - protein, 28 aa, Artificial Sequence
  Cyclic GFR-binding peptide
ELTSMEGIFIPKKRVIEMIQVTINSLQV

SEQ ID NO: 68216 - protein, 37 aa, Artificial Sequence
  Cyclic GFR-binding peptide
  MOD_RES (2)..(34): Xaa is C or S
GXSRVVMNVTAKKIVNSSDDIKRVQVPRLKTPAXTPK

SEQ ID NO: 68217 - protein, 28 aa, Artificial Sequence
  Cyclic GFR-binding peptide
VVMNVQVEKIVNSSDDVKAVKVSRLQTP

SEQ ID NO: 68218 - protein, 23 aa, Artificial Sequence
  Cyclic GFR-binding peptide
VMNVQVEKIVNSSDDVKAVKVSR

SEQ ID NO: 68219 - protein, 31 aa, Artificial Sequence
  Cyclic GFR-binding peptide
  MOD_RES (1)..(1): Xaa is C or S
XSRVVMNVTAKKIVNSSDDIKRVQVPRLKTP

SEQ ID NO: 68220 - protein, 35 aa, Artificial Sequence; identical to SEQ ID NO: 16085
  Cyclic GFR-binding peptide
  MOD_RES (29)..(30): Xaa is C or S

SEQ ID NO: 68221 - protein, 21 aa, Artificial Sequence
  Cyclic GFR-binding peptide
NNSLQEIVNSSDDYYLVTLPE

SEQ ID NO: 68222 - protein, 29 aa, Artificial Sequence
  Cyclic GFR-binding peptide
  MOD_RES (27)..(28): Xaa is C or S
DNSLQEVVKENEDYYVMPLPELETPVXXA

SEQ ID NO: 68223 - protein, 29 aa, Artificial Sequence
  Cyclic GFR-binding peptide
DELTNSLQEFIPKKRVIEYYLVTLPELQV

SEQ ID NO: 68224 - protein, 34 aa, Artificial Sequence
  Cyclic GFR-binding peptide
  MOD_RES (1)..(3): Xaa is C or S
XEXKNHQLFNSLQEHQGQHPKIRYYVMPLPEEET

SEQ ID NO: 68225 - protein, 26 aa, Artificial Sequence
  Cyclic GFR-binding peptide
LTNSLQEFIPKKRVIEYYVVPLPELQ

SEQ ID NO: 68226 - protein, 31 aa, Artificial Sequence
  Cyclic GFR-binding peptide
  MOD_RES (29)..(30): Xaa is C or S
VMNVQVEKIVNSSDDVKAVKVSRLQTPAXXP

SEQ ID NO: 68227 - protein, 30 aa, Artificial Sequence
  Cyclic GFR-binding peptide
  MOD_RES (1)..(1): Xaa is C or S
XELHEELRNSLQELKPKKRVYEYYLVTLPE

SEQ ID NO: 68228 - protein, 30 aa, Artificial Sequence
  Cyclic GFR-binding peptide
NHQLFNSLQEHQGQHPKIRYYLMTLPEEET

SEQ ID NO: 68229 - protein, 32 aa, Artificial Sequence
  Cyclic GFR-binding peptide
  MOD_RES (2)..(2): Xaa is C or S
GXGEVVMEVQVEKVVKDYEDVKAMKVSRLETP

SEQ ID NO: 68230 - protein, 39 aa, Artificial Sequence; identical to SEQ ID NO: 16097
  Cyclic GFR-binding peptide
  MOD_RES (2)..(4)..(36)..(37): Xaa is C or S

SEQ ID NO: 68231 - protein, 33 aa, Artificial Sequence; identical to SEQ ID NO: 16106
  Cyclic GFR-binding peptide
  MOD_RES (31)..(32): Xaa is C or S

SEQ ID NO: 68232 - protein, 32 aa, Artificial Sequence; identical to SEQ ID NO: 16108
  Cyclic GFR-binding peptide
  MOD_RES (2)..(4): Xaa is C or S

SEQ ID NO: 68233 - protein, 27 aa, Artificial Sequence
  Cyclic GFR-binding peptide
  MOD_RES (2)..(2): Xaa is C or S
KXSRVIMVQVEKVKPKRGVVKAIKVSR

SEQ ID NO: 68234 - protein, 30 aa, Artificial Sequence; identical to SEQ ID NO: 16110
  Cyclic GFR-binding peptide
  MOD_RES (26)..(26): Xaa is C or S

SEQ ID NO: 68235 - protein, 30 aa, Artificial Sequence
  Cyclic GFR-binding peptide
  MOD_RES (26)..(26): Xaa is C or S
VTAKKIVNSSDDIKRVQVPRLKTPAXTPKT

SEQ ID NO: 68236 - protein, 30 aa, Artificial Sequence; identical to SEQ ID NO: 22862
  Cyclic GFR-binding peptide

SEQ ID NO: 68237 - protein, 28 aa, Artificial Sequence
  Cyclic GFR-binding peptide
LHDELTNSLQEFIPKKRVIEYYLVTLPE

SEQ ID NO: 68238 - protein, 39 aa, Artificial Sequence; identical to SEQ ID NO: 16117
  Cyclic GFR-binding peptide
  MOD_RES (1)..(33)..(34): Xaa is C or S

SEQ ID NO: 68239 - protein, 31 aa, Artificial Sequence; identical to SEQ ID NO: 16118
  Cyclic GFR-binding peptide
  MOD_RES (30)..(31): Xaa is C or S

SEQ ID NO: 68240 - protein, 28 aa, Artificial Sequence
  Cyclic GFR-binding peptide
GEVVMDNSLQEVVKENEDYYLMTLPELE

SEQ ID NO: 68241 - protein, 21 aa, Artificial Sequence
  Cyclic GFR-binding peptide
NSLQEIKPTKGIYYLITLPEL

SEQ ID NO: 68242 - protein, 32 aa, Artificial Sequence
  Cyclic GFR-binding peptide
  MOD_RES (30)..(31): Xaa is C or S
RVIMVTAKKVKPKRGVIKRIQVPRLAQPVXXP

SEQ ID NO: 68243 - protein, 29 aa, Artificial Sequence
  Cyclic GFR-binding peptide
  MOD_RES (1)..(1): Xaa is C or S
XSRVVMNVQVEKIVNSSDDVKAVKVSRLK

SEQ ID NO: 68244 - protein, 38 aa, Artificial Sequence
  Cyclic GFR-binding peptide
  MOD_RES (1)..(3): Xaa is C or S
XKXALHDELTNSLQEFIPKKRVIEYYLVTLPELQVQTP

SEQ ID NO: 68245 - protein, 38 aa, Artificial Sequence
  Cyclic GFR-binding peptide
  MOD_RES (2)..(4)..(35)..(36): Xaa is C or S
SXKXSRVIMVTAKKVKPKRGVIKRIQVPRLAQPVXXPA

SEQ ID NO: 68246 - protein, 40 aa, Artificial Sequence
  Cyclic GFR-binding peptide
  MOD_RES (1)..(3)..(35): Xaa is C or S
XGXSRVVMNSMEGIIVNSSDDMIQVTINSLKTPAXTPKTV

SEQ ID NO: 68247 - protein, 23 aa, Artificial Sequence
  Cyclic GFR-binding peptide
RNSLQELKPKKRVYEYYLVTLPE

SEQ ID NO: 68248 - protein, 27 aa, Artificial Sequence
  Cyclic GFR-binding peptide
  MOD_RES (27)..(27): Xaa is C or S
DVTAKKVVKENEDIKRMQVPRLETPVX

SEQ ID NO: 68249 - protein, 32 aa, Artificial Sequence; identical to SEQ ID NO: 16135
  Cyclic GFR-binding peptide
  MOD_RES (30)..(31): Xaa is C or S

SEQ ID NO: 68250 - protein, 26 aa, Artificial Sequence
  Cyclic GFR-binding peptide
NSLQEHQGQHPKIRYYLMTLPEEETP

SEQ ID NO: 68251 - protein, 34 aa, Artificial Sequence
  Cyclic GFR-binding peptide
  MOD_RES (29)..(30): Xaa is C or S
VIMSMEGIVKPKRGVMIQITINSLAQPVXXPAAS

SEQ ID NO: 68252 - protein, 31 aa, Artificial Sequence
  Cyclic GFR-binding peptide
  MOD_RES (31)..(31): Xaa is C or S
SRVIMVTAKKVKPKRGVIKRIQVPRLAQPVX

SEQ ID NO: 68253 - protein, 25 aa, Artificial Sequence
  Cyclic GFR-binding peptide
KVVMNSLQEVKPTRGVYYLITLPEL

SEQ ID NO: 68254 - protein, 29 aa, Artificial Sequence
  Cyclic GFR-binding peptide
EVVMEVTAKKVVKDYEDIKRMQVPRLETP

SEQ ID NO: 68255 - protein, 33 aa, Artificial Sequence
  Cyclic GFR-binding peptide
  MOD_RES (2)..(2): Xaa is C or S
GXGEVVMDVQVEKVVKENEDVKAMKVSRLETPV

SEQ ID NO: 68256 - protein, 33 aa, Artificial Sequence; identical to SEQ ID NO: 16142
  Cyclic GFR-binding peptide
  MOD_RES (2)..(2): Xaa is C or S

SEQ ID NO: 68257 - protein, 25 aa, Artificial Sequence
  Cyclic GFR-binding peptide
NSLQEIVNSSDDYYVVPLPELQTPA

SEQ ID NO: 68258 - protein, 32 aa, Artificial Sequence; identical to SEQ ID NO: 16149
  Cyclic GFR-binding peptide
  MOD_RES (2)..(2): Xaa is C or S

SEQ ID NO: 68259 - protein, 27 aa, Artificial Sequence
  Cyclic GFR-binding peptide
  MOD_RES (2)..(2): Xaa is C or S
KXSKVVMNSLQEVKPTRGVYYVIPLPE

SEQ ID NO: 68260 - protein, 25 aa, Artificial Sequence
  Cyclic GFR-binding peptide
VTAKKIVNSSDDIKRVQVPRLQTPA

SEQ ID NO: 68261 - protein, 25 aa, Artificial Sequence
  Cyclic GFR-binding peptide
VVMVQVEKVKPTRGVVKAIKVSRLD

SEQ ID NO: 68262 - protein, 32 aa, Artificial Sequence; identical to SEQ ID NO: 16156
  Cyclic GFR-binding peptide
  MOD_RES (1)..(3): Xaa is C or S

SEQ ID NO: 68263 - protein, 28 aa, Artificial Sequence
  Cyclic GFR-binding peptide
QLFVQVEKHQGQHPKIRVKAMKVSREET

SEQ ID NO: 68264 - protein, 32 aa, Artificial Sequence
  Cyclic GFR-binding peptide
  MOD_RES (31)..(32): Xaa is C or S
SRVIMVQVEKVKPKRGVVKAIKVSRLAQPVXX

SEQ ID NO: 68265 - protein, 29 aa, Artificial Sequence
  Cyclic GFR-binding peptide
  MOD_RES (26)..(26): Xaa is C or S
NSLQEIVNSSDDYYLVTLPELKTPAXTPK

SEQ ID NO: 68266 - protein, 29 aa, Artificial Sequence
  Cyclic GFR-binding peptide
  MOD_RES (1)..(1): Xaa is C or S
XGEVVMEVTAKKVVKDYEDIKRMQVPRLE

SEQ ID NO: 68267 - protein, 28 aa, Artificial Sequence
  Cyclic GFR-binding peptide
  MOD_RES (1)..(1): Xaa is C or S
XARVVMNVQVEKIVNSSDDVKAVKVSRL

SEQ ID NO: 68268 - protein, 35 aa, Artificial Sequence
  Cyclic GFR-binding peptide
  MOD_RES (2)..(34)..(35): Xaa is C or S
GXARVVMNVTAKKIVNSSDDIKRVQVPRLQTPAXX

SEQ ID NO: 68269 - protein, 29 aa, Artificial Sequence
  Cyclic GFR-binding peptide
  MOD_RES (1)..(3): Xaa is C or S
XGXARVVMNSMEGIIVNSSDDMIQVTINS

SEQ ID NO: 68270 - protein, 33 aa, Artificial Sequence; identical to SEQ ID NO: 16177
  Cyclic GFR-binding peptide
  MOD_RES (29)..(30): Xaa is C or S

SEQ ID NO: 68271 - protein, 30 aa, Artificial Sequence
  Cyclic GFR-binding peptide
  MOD_RES (29)..(29): Xaa is C or S
VMNVQVEKIVNSSDDVKAVKVSRLKTPAXT

SEQ ID NO: 68272 - protein, 30 aa, Artificial Sequence
  Cyclic GFR-binding peptide
  MOD_RES (1)..(3): Xaa is C or S
XKXSKVIMSMEGIIKPTKGIMIQITINSLD

SEQ ID NO: 68273 - protein, 31 aa, Artificial Sequence
  Cyclic GFR-binding peptide
HDELTNSLQEFIPKKRVIEYYVVPLPELQVQ

SEQ ID NO: 68274 - protein, 24 aa, Artificial Sequence
  Cyclic GFR-binding peptide
EVTAKKVVKDYEDIKRMQVPRLET

SEQ ID NO: 68275 - protein, 36 aa, Artificial Sequence
  Cyclic GFR-binding peptide
  MOD_RES (2)..(4): Xaa is C or S
AXAXELHEELRNSLQELKPKKRVYEYYLVTLPEHHV

SEQ ID NO: 68276 - protein, 27 aa, Artificial Sequence
  Cyclic GFR-binding peptide
VIMSMEGIVKPKRGVMIQITINSLAQP

SEQ ID NO: 68277 - protein, 29 aa, Artificial Sequence
  Cyclic GFR-binding peptide
  MOD_RES (29)..(29): Xaa is C or S
VMNNSLQEIVNSSDDYYVVPLPELKTPAX

SEQ ID NO: 68278 - protein, 34 aa, Artificial Sequence
  Cyclic GFR-binding peptide
  MOD_RES (29)..(30): Xaa is C or S
VMNSMEGIIVNSSDDMIQVTINSLKTPAXXPKPV

SEQ ID NO: 68279 - protein, 30 aa, Artificial Sequence
  Cyclic GFR-binding peptide
  MOD_RES (1)..(1): Xaa is C or S
XARVVMNVTAKKIVNSSDDIKRVQVPRLQT

SEQ ID NO: 68280 - protein, 34 aa, Artificial Sequence
  Cyclic GFR-binding peptide
  MOD_RES (1)..(32)..(33): Xaa is C or S
XSKVIMSMEGIIKPTKGIMIQITINSLDQSVXXP

SEQ ID NO: 68281 - protein, 35 aa, Artificial Sequence
  Cyclic GFR-binding peptide
  MOD_RES (29)..(30): Xaa is C or S
VMDVTAKKVVKENEDIKRMQVPRLETPVXXAKPIK

SEQ ID NO: 68282 - protein, 35 aa, Artificial Sequence; identical to SEQ ID NO: 16191
  Cyclic GFR-binding peptide
  MOD_RES (32)..(33): Xaa is C or S

SEQ ID NO: 68283 - protein, 31 aa, Artificial Sequence; identical to SEQ ID NO: 22919
  Cyclic GFR-binding peptide
  MOD_RES (2)..(2): Xaa is C or S

SEQ ID NO: 68284 - protein, 33 aa, Artificial Sequence
  Cyclic GFR-binding peptide
  MOD_RES (2)..(2): Xaa is C or S
GXSRVVMNVTAKKIVNSSDDIKRVQVPRLKTPA

SEQ ID NO: 68285 - protein, 34 aa, Artificial Sequence; identical to SEQ ID NO: 22921
  Cyclic GFR-binding peptide
  MOD_RES (31)..(31): Xaa is C or S

SEQ ID NO: 68286 - protein, 28 aa, Artificial Sequence
  Cyclic GFR-binding peptide
SKVVMVTAKKVKPTRGVIKRIQVPRLDQ

SEQ ID NO: 68287 - protein, 25 aa, Artificial Sequence
  Cyclic GFR-binding peptide
QLFNSLQEHQGQHPKIRYYVMPLPE

SEQ ID NO: 68288 - protein, 32 aa, Artificial Sequence
  Cyclic GFR-binding peptide
  MOD_RES (2)..(4): Xaa is C or S
SXKXSKVVMVQVEKVKPTRGVVKAIKVSRLDQ

SEQ ID NO: 68289 - protein, 31 aa, Artificial Sequence
  Cyclic GFR-binding peptide
  MOD_RES (30)..(31): Xaa is C or S
VVMDVQVEKVVKENEDVKAMKVSRLETPVXX

SEQ ID NO: 68290 - protein, 34 aa, Artificial Sequence
  Cyclic GFR-binding peptide
  MOD_RES (28)..(29): Xaa is C or S
MNVQVEKIVNSSDDVKAVKVSRLKTPAXXPKPVY

SEQ ID NO: 68291 - protein, 36 aa, Artificial Sequence; identical to SEQ ID NO: 16208
  Cyclic GFR-binding peptide
  MOD_RES (30)..(31): Xaa is C or S

SEQ ID NO: 68292 - protein, 25 aa, Artificial Sequence
  Cyclic GFR-binding peptide
VIMNSLQEIKPTKGIYYVIPLPELD

SEQ ID NO: 68293 - protein, 39 aa, Artificial Sequence; identical to SEQ ID NO: 22930
  Cyclic GFR-binding peptide
  MOD_RES (37)..(37): Xaa is C or S

SEQ ID NO: 68294 - protein, 25 aa, Artificial Sequence
  Cyclic GFR-binding peptide
EVVMDNSLQEVVKENEDYYVMPLPE

SEQ ID NO: 68295 - protein, 31 aa, Artificial Sequence
  Cyclic GFR-binding peptide
EELRNSLQELKPKKRVYEYYVVPLPEHHVRS

SEQ ID NO: 68296 - protein, 28 aa, Artificial Sequence
  Cyclic GFR-binding peptide
  MOD_RES (27)..(27): Xaa is C or S
NSMEGIIVNSSDDMIQVTINSLKTPAXT

SEQ ID NO: 68297 - protein, 29 aa, Artificial Sequence
  Cyclic GFR-binding peptide
ALHDELTNSLQEFIPKKRVIEYYVVPLPE

SEQ ID NO: 68298 - protein, 37 aa, Artificial Sequence; identical to SEQ ID NO: 22935
  Cyclic GFR-binding peptide
  MOD_RES (1)..(1): Xaa is C or S

SEQ ID NO: 68299 - protein, 33 aa, Artificial Sequence
  Cyclic GFR-binding peptide
  MOD_RES (27)..(28): Xaa is C or S
MSMEGIIKPTKGIMIQITINSLDQSVXXPSASA

SEQ ID NO: 68300 - protein, 30 aa, Artificial Sequence; identical to SEQ ID NO: 22936
  Cyclic GFR-binding peptide

SEQ ID NO: 68301 - protein, 36 aa, Artificial Sequence; identical to SEQ ID NO: 22937
  Cyclic GFR-binding peptide
  MOD_RES (2)..(36): Xaa is C or S

SEQ ID NO: 68302 - protein, 36 aa, Artificial Sequence
  Cyclic GFR-binding peptide
  MOD_RES (1)..(3)..(35)..(36): Xaa is C or S
XGXARVVMNVTAKKIVNSSDDIKRVQVPRLQTPAXX

SEQ ID NO: 68303 - protein, 36 aa, Artificial Sequence
  Cyclic GFR-binding peptide
  MOD_RES (33)..(33): Xaa is C or S
ELRNSLQELKPKKRVYEYYLVTLPEHHVRSPQXKVS

SEQ ID NO: 68304 - protein, 28 aa, Artificial Sequence
  Cyclic GFR-binding peptide
  MOD_RES (1)..(1): Xaa is C or S
XGEVVMDVTAKKVVKENEDIKRMQVPRL

SEQ ID NO: 68305 - protein, 34 aa, Artificial Sequence
  Cyclic GFR-binding peptide
  MOD_RES (30)..(31): Xaa is C or S
RVIMSMEGIVKPKRGVMIQITINSLAQPVXXPAA

SEQ ID NO: 68306 - protein, 21 aa, Artificial Sequence
  Cyclic GFR-binding peptide
MNSLQEVKPKRGVYYLITLPE

SEQ ID NO: 68307 - protein, 34 aa, Artificial Sequence; identical to SEQ ID NO: 16229
  Cyclic GFR-binding peptide
  MOD_RES (1)..(33)..(34): Xaa is C or S

SEQ ID NO: 68308 - protein, 27 aa, Artificial Sequence
  Cyclic GFR-binding peptide
VMENSLQEVVKDYEDYYVMPLPELETP

SEQ ID NO: 68309 - protein, 37 aa, Artificial Sequence
  Cyclic GFR-binding peptide
  MOD_RES (35)..(35): Xaa is C or S
HEELRNSLQELKPKKRVYEYYLVTLPEHHVRSPQXKV

SEQ ID NO: 68310 - protein, 33 aa, Artificial Sequence
  Cyclic GFR-binding peptide
  MOD_RES (1)..(3): Xaa is C or S
XKXSKVVMVTAKKVKPTRGVIKRIQVPRLDQPV

SEQ ID NO: 68311 - protein, 36 aa, Artificial Sequence; identical to SEQ ID NO: 22952
  Cyclic GFR-binding peptide
  MOD_RES (36)..(36): Xaa is C or S

SEQ ID NO: 68312 - protein, 24 aa, Artificial Sequence
  Cyclic GFR-binding peptide
LRSMEGILKPKKRVYEMIQVTINS

SEQ ID NO: 68313 - protein, 23 aa, Artificial Sequence
  Cyclic GFR-binding peptide
MNVTAKKIVNSSDDIKRVQVPRL

SEQ ID NO: 68314 - protein, 31 aa, Artificial Sequence; identical to SEQ ID NO: 16240
  Cyclic GFR-binding peptide

SEQ ID NO: 68315 - protein, 38 aa, Artificial Sequence; identical to SEQ ID NO: 16242
  Cyclic GFR-binding peptide
  MOD_RES (32)..(33): Xaa is C or S

SEQ ID NO: 68316 - protein, 31 aa, Artificial Sequence; identical to SEQ ID NO: 16243
  Cyclic GFR-binding peptide
  MOD_RES (2)..(4): Xaa is C or S

SEQ ID NO: 68317 - protein, 28 aa, Artificial Sequence
  Cyclic GFR-binding peptide
  MOD_RES (1)..(1): Xaa is C or S
XSKVIMVTAKKIKPTKGIIKRIQVPRLD

SEQ ID NO: 68318 - protein, 32 aa, Artificial Sequence
  Cyclic GFR-binding peptide
  MOD_RES (2)..(2): Xaa is C or S
AXELHEELRNSLQELKPKKRVYEYYLVTLPEH

SEQ ID NO: 68319 - protein, 28 aa, Artificial Sequence
  Cyclic GFR-binding peptide
NSLQELKPKKRVYEYYLVTLPEHHVRSP

SEQ ID NO: 68320 - protein, 37 aa, Artificial Sequence
  Cyclic GFR-binding peptide
  MOD_RES (1)..(33)..(34): Xaa is C or S
XGEVVMDVTAKKVVKENEDIKRMQVPRLETPVXXAKP

SEQ ID NO: 68321 - protein, 27 aa, Artificial Sequence
  Cyclic GFR-binding peptide
  MOD_RES (2)..(2): Xaa is C or S
KXSKVIMVTAKKIKPTKGIIKRIQVPR

SEQ ID NO: 68322 - protein, 33 aa, Artificial Sequence; identical to SEQ ID NO: 16253
  Cyclic GFR-binding peptide
  MOD_RES (28)..(28): Xaa is C or S

SEQ ID NO: 68323 - protein, 36 aa, Artificial Sequence
  Cyclic GFR-binding peptide
  MOD_RES (1)..(3)..(35): Xaa is C or S
XGXSRVVMNVQVEKIVNSSDDVKAVKVSRLKTPAXT

SEQ ID NO: 68324 - protein, 28 aa, Artificial Sequence
  Cyclic GFR-binding peptide
  MOD_RES (2)..(2): Xaa is C or S
GXGEVVMEVQVEKVVKDYEDVKAMKVSR

SEQ ID NO: 68325 - protein, 39 aa, Artificial Sequence
  Cyclic GFR-binding peptide
  MOD_RES (1)..(3)..(34)..(35): Xaa is C or S
XKXSKVIMSMEGIIKPTKGIMIQITINSLDQSVXXPSAS

SEQ ID NO: 68326 - protein, 28 aa, Artificial Sequence
  Cyclic GFR-binding peptide
LHEELRNSLQELKPKKRVYEYYLVTLPE

SEQ ID NO: 68327 - protein, 35 aa, Artificial Sequence; identical to SEQ ID NO: 16257
  Cyclic GFR-binding peptide
  MOD_RES (30)..(31): Xaa is C or S

SEQ ID NO: 68328 - protein, 26 aa, Artificial Sequence
  Cyclic GFR-binding peptide
  MOD_RES (26)..(26): Xaa is C or S
NSLQEVKPTRGVYYVIPLPELDQPVX

SEQ ID NO: 68329 - protein, 31 aa, Artificial Sequence; identical to SEQ ID NO: 50043
  Cyclic GFR-binding peptide
  MOD_RES (29)..(30): Xaa is C or S

SEQ ID NO: 68330 - protein, 25 aa, Artificial Sequence
  Cyclic GFR-binding peptide
VMNVQVEKIVNSSDDVKAVKVSRLK

SEQ ID NO: 68331 - protein, 35 aa, Artificial Sequence
  Cyclic GFR-binding peptide
  MOD_RES (30)..(31): Xaa is C or S
VVMDVTAKKVVKENEDIKRMQVPRLETPVXXAKPI

SEQ ID NO: 68332 - protein, 39 aa, Artificial Sequence
  Cyclic GFR-binding peptide
  MOD_RES (34)..(34): Xaa is C or S
KNHQLFNSLQEHQGQHPKIRYYVMPLPEEETPVXELGED

SEQ ID NO: 68333 - protein, 36 aa, Artificial Sequence
  Cyclic GFR-binding peptide
  MOD_RES (32)..(32): Xaa is C or S
SRVVMNVTAKKIVNSSDDIKRVQVPRLKTPAXTPKT

SEQ ID NO: 68334 - protein, 33 aa, Artificial Sequence
  Cyclic GFR-binding peptide
  MOD_RES (1)..(3): Xaa is C or S
XGXGEVVMDVQVEKVVKENEDVKAMKVSRLETP

SEQ ID NO: 68335 - protein, 38 aa, Artificial Sequence; identical to SEQ ID NO: 16276
  Cyclic GFR-binding peptide
  MOD_RES (2)..(4)..(35)..(36): Xaa is C or S

SEQ ID NO: 68336 - protein, 31 aa, Artificial Sequence
  Cyclic GFR-binding peptide
  MOD_RES (30)..(30): Xaa is C or S
LFNSLQEHQGQHPKIRYYLMTLPEEETPVXE

SEQ ID NO: 68337 - protein, 34 aa, Artificial Sequence; identical to SEQ ID NO: 16285
  Cyclic GFR-binding peptide
  MOD_RES (31)..(32): Xaa is C or S

SEQ ID NO: 68338 - protein, 43 aa, Artificial Sequence; identical to SEQ ID NO: 22998
  Cyclic GFR-binding peptide
  MOD_RES (2)..(4)..(41): Xaa is C or S

SEQ ID NO: 68339 - protein, 21 aa, Artificial Sequence
  Cyclic GFR-binding peptide
NSLQEIVNSSDDYYVVPLPEL

SEQ ID NO: 68340 - protein, 40 aa, Artificial Sequence; identical to SEQ ID NO: 16298
  Cyclic GFR-binding peptide
  MOD_RES (1)..(3)..(35): Xaa is C or S

SEQ ID NO: 68341 - protein, 33 aa, Artificial Sequence; identical to SEQ ID NO: 23000
  Cyclic GFR-binding peptide

SEQ ID NO: 68342 - protein, 32 aa, Artificial Sequence
  Cyclic GFR-binding peptide
  MOD_RES (1)..(1): Xaa is C or S
XGEVVMEVTAKKVVKDYEDIKRMQVPRLETPV

SEQ ID NO: 68343 - protein, 26 aa, Artificial Sequence
  Cyclic GFR-binding peptide
  MOD_RES (26)..(26): Xaa is C or S
VTAKKVKPTRGVIKRIQVPRLDQPVX

SEQ ID NO: 68344 - protein, 37 aa, Artificial Sequence
  Cyclic GFR-binding peptide
  MOD_RES (1)..(3)..(34)..(35): Xaa is C or S
XKXSKVVMVTAKKVKPTRGVIKRIQVPRLDQPVXXPS

SEQ ID NO: 68345 - protein, 31 aa, Artificial Sequence
  Cyclic GFR-binding peptide
  MOD_RES (2)..(4): Xaa is C or S
HXGXARVVMNSMEGIIVNSSDDMIQVTINSL

SEQ ID NO: 68346 - protein, 32 aa, Artificial Sequence
  Cyclic GFR-binding peptide
  MOD_RES (2)..(4): Xaa is C or S
HXGXSRVVMNSMEGIIVNSSDDMIQVTINSLK

SEQ ID NO: 68347 - protein, 29 aa, Artificial Sequence
  Cyclic GFR-binding peptide
  MOD_RES (2)..(2): Xaa is C or S
GXGEVVMENSLQEVVKDYEDYYVMPLPEL

SEQ ID NO: 68348 - protein, 41 aa, Artificial Sequence; identical to SEQ ID NO: 23005
  Cyclic GFR-binding peptide
  MOD_RES (2)..(4)..(38): Xaa is C or S

SEQ ID NO: 68349 - protein, 29 aa, Artificial Sequence
  Cyclic GFR-binding peptide
SKVIMNSLQEIKPTKGIYYVIPLPELDQS

SEQ ID NO: 68350 - protein, 26 aa, Artificial Sequence
  Cyclic GFR-binding peptide
RVVMNNSLQEIVNSSDDYYLVTLPEL

SEQ ID NO: 68351 - protein, 31 aa, Artificial Sequence; identical to SEQ ID NO: 16308
  Cyclic GFR-binding peptide
  MOD_RES (30)..(30): Xaa is C or S

SEQ ID NO: 68352 - protein, 36 aa, Artificial Sequence
  Cyclic GFR-binding peptide
  MOD_RES (1)..(3)..(35)..(36): Xaa is C or S
XGXGEVVMEVTAKKVVKDYEDIKRMQVPRLETPVXX

SEQ ID NO: 68353 - protein, 30 aa, Artificial Sequence
  Cyclic GFR-binding peptide
GEVVMEVQVEKVVKDYEDVKAMKVSRLETP

SEQ ID NO: 68354 - protein, 27 aa, Artificial Sequence
  Cyclic GFR-binding peptide
EELRVTAKKLKPKKRVYEIKRVQVPRH

SEQ ID NO: 68355 - protein, 23 aa, Artificial Sequence
  Cyclic GFR-binding peptide
IMNSLQEIKPTKGIYYVIPLPEL

SEQ ID NO: 68356 - protein, 23 aa, Artificial Sequence
  Cyclic GFR-binding peptide
VMVQVEKVKPTRGVVKAIKVSRL

SEQ ID NO: 68357 - protein, 26 aa, Artificial Sequence
  Cyclic GFR-binding peptide
VMDNSLQEVVKENEDYYVMPLPELET

SEQ ID NO: 68358 - protein, 32 aa, Artificial Sequence
  Cyclic GFR-binding peptide
  MOD_RES (2)..(4): Xaa is C or S
RXGXGEVVMDVTAKKVVKENEDIKRMQVPRLE

SEQ ID NO: 68359 - protein, 25 aa, Artificial Sequence
  Cyclic GFR-binding peptide
VVMNNSLQEIVNSSDDYYLVTLPEL

SEQ ID NO: 68360 - protein, 24 aa, Artificial Sequence
  Cyclic GFR-binding peptide
LTSMEGIFIPKKRVIEMIQVTINS

SEQ ID NO: 68361 - protein, 33 aa, Artificial Sequence; identical to SEQ ID NO: 16330
  Cyclic GFR-binding peptide
  MOD_RES (2)..(4): Xaa is C or S

SEQ ID NO: 68362 - protein, 33 aa, Artificial Sequence
  Cyclic GFR-binding peptide
  MOD_RES (31)..(32): Xaa is C or S
SKVIMVTAKKIKPTKGIIKRIQVPRLDQSVXXP

SEQ ID NO: 68363 - protein, 30 aa, Artificial Sequence; identical to SEQ ID NO: 23025
  Cyclic GFR-binding peptide

SEQ ID NO: 68364 - protein, 35 aa, Artificial Sequence; identical to SEQ ID NO: 23027
  Cyclic GFR-binding peptide
  MOD_RES (2)..(4): Xaa is C or S

SEQ ID NO: 68365 - protein, 22 aa, Artificial Sequence
  Cyclic GFR-binding peptide
VQVEKVVKENEDVKAMKVSRLE

SEQ ID NO: 68366 - protein, 34 aa, Artificial Sequence; identical to SEQ ID NO: 23029
  Cyclic GFR-binding peptide
  MOD_RES (1)..(3): Xaa is C or S

SEQ ID NO: 68367 - protein, 36 aa, Artificial Sequence; identical to SEQ ID NO: 23030
  Cyclic GFR-binding peptide
  MOD_RES (1)..(35): Xaa is C or S

SEQ ID NO: 68368 - protein, 21 aa, Artificial Sequence
  Cyclic GFR-binding peptide
VTAKKIVNSSDDIKRVQVPRL

SEQ ID NO: 68369 - protein, 26 aa, Artificial Sequence
  Cyclic GFR-binding peptide
VVMENSLQEVVKDYEDYYVMPLPELE

SEQ ID NO: 68370 - protein, 33 aa, Artificial Sequence
  Cyclic GFR-binding peptide
  MOD_RES (2)..(33): Xaa is C or S
KXSKVVMVQVEKVKPTRGVVKAIKVSRLDQPVX

SEQ ID NO: 68371 - protein, 39 aa, Artificial Sequence
  Cyclic GFR-binding peptide
  MOD_RES (2)..(4)..(36): Xaa is C or S
HXGXSRVVMNSMEGIIVNSSDDMIQVTINSLKTPAXTPK

SEQ ID NO: 68372 - protein, 26 aa, Artificial Sequence
  Cyclic GFR-binding peptide
IMVQVEKVKPKRGVVKAIKVSRLAQP

SEQ ID NO: 68373 - protein, 33 aa, Artificial Sequence; identical to SEQ ID NO: 16342
  Cyclic GFR-binding peptide
  MOD_RES (2)..(4): Xaa is C or S

SEQ ID NO: 68374 - protein, 31 aa, Artificial Sequence
  Cyclic GFR-binding peptide
  MOD_RES (29)..(30): Xaa is C or S
VVMVTAKKVKPTRGVIKRIQVPRLDQPVXXP

SEQ ID NO: 68375 - protein, 22 aa, Artificial Sequence
  Cyclic GFR-binding peptide
MVQVEKVKPKRGVVKAIKVSRL

SEQ ID NO: 68376 - protein, 40 aa, Artificial Sequence; identical to SEQ ID NO: 23034
  Cyclic GFR-binding peptide
  MOD_RES (36)..(36): Xaa is C or S

SEQ ID NO: 68377 - protein, 32 aa, Artificial Sequence
  Cyclic GFR-binding peptide
  MOD_RES (27)..(28): Xaa is C or S
EVTAKKVVKDYEDIKRMQVPRLETPVXXAKPI

SEQ ID NO: 68378 - protein, 34 aa, Artificial Sequence
  Cyclic GFR-binding peptide
  MOD_RES (33)..(33): Xaa is C or S
ELTNSLQEFIPKKRVIEYYLVTLPELQVQTPRXQ

SEQ ID NO: 68379 - protein, 36 aa, Artificial Sequence
  Cyclic GFR-binding peptide
  MOD_RES (1)..(33)..(34): Xaa is C or S
XARVVMNVQVEKIVNSSDDVKAVKVSRLQTPAXXPK

SEQ ID NO: 68380 - protein, 32 aa, Artificial Sequence
  Cyclic GFR-binding peptide
  MOD_RES (30)..(30): Xaa is C or S
VVMNVTAKKIVNSSDDIKRVQVPRLKTPAXTP

SEQ ID NO: 68381 - protein, 41 aa, Artificial Sequence; identical to SEQ ID NO: 16346
  Cyclic GFR-binding peptide
  MOD_RES (1)..(3)..(35): Xaa is C or S

SEQ ID NO: 68382 - protein, 35 aa, Artificial Sequence
  Cyclic GFR-binding peptide
  MOD_RES (31)..(31): Xaa is C or S
RVVMNVQVEKIVNSSDDVKAVKVSRLKTPAXTPKT

SEQ ID NO: 68383 - protein, 37 aa, Artificial Sequence; identical to SEQ ID NO: 23040
  Cyclic GFR-binding peptide
  MOD_RES (1)..(3)..(37): Xaa is C or S

SEQ ID NO: 68384 - protein, 30 aa, Artificial Sequence; identical to SEQ ID NO: 16351
  Cyclic GFR-binding peptide
  MOD_RES (1)..(1): Xaa is C or S

SEQ ID NO: 68385 - protein, 37 aa, Artificial Sequence
  Cyclic GFR-binding peptide
  MOD_RES (1)..(3)..(35)..(36): Xaa is C or S
XGXGEVVMDVTAKKVVKENEDIKRMQVPRLETPVXXA

SEQ ID NO: 68386 - protein, 28 aa, Artificial Sequence
  Cyclic GFR-binding peptide
  MOD_RES (2)..(2): Xaa is C or S
KXSKVVMNSLQEVKPTRGVYYLITLPEL

SEQ ID NO: 68387 - protein, 28 aa, Artificial Sequence
  Cyclic GFR-binding peptide
RVVMNVQVEKIVNSSDDVKAVKVSRLQT

SEQ ID NO: 68388 - protein, 34 aa, Artificial Sequence; identical to SEQ ID NO: 23043
  Cyclic GFR-binding peptide
  MOD_RES (33)..(33): Xaa is C or S

SEQ ID NO: 68389 - protein, 36 aa, Artificial Sequence
  Cyclic GFR-binding peptide
  MOD_RES (31)..(32): Xaa is C or S
SKVIMVQVEKIKPTKGIVKAIKVSRLDQSVXXPSAS

SEQ ID NO: 68390 - protein, 30 aa, Artificial Sequence; identical to SEQ ID NO: 16353
  Cyclic GFR-binding peptide

SEQ ID NO: 68391 - protein, 38 aa, Artificial Sequence
  Cyclic GFR-binding peptide
  MOD_RES (1)..(3)..(34)..(35): Xaa is C or S
XKXSKVVMVQVEKVKPTRGVVKAIKVSRLDQPVXXPSA

SEQ ID NO: 68392 - protein, 32 aa, Artificial Sequence; identical to SEQ ID NO: 23048
  Cyclic GFR-binding peptide
  MOD_RES (1)..(1): Xaa is C or S

SEQ ID NO: 68393 - protein, 31 aa, Artificial Sequence; identical to SEQ ID NO: 23050
  Cyclic GFR-binding peptide
  MOD_RES (1)..(3): Xaa is C or S

SEQ ID NO: 68394 - protein, 29 aa, Artificial Sequence
  Cyclic GFR-binding peptide
ARVVMNVTAKKIVNSSDDIKRVQVPRLQT

SEQ ID NO: 68395 - protein, 29 aa, Artificial Sequence
  Cyclic GFR-binding peptide
ELRNSLQELKPKKRVYEYYLVTLPEHHVR

SEQ ID NO: 68396 - protein, 25 aa, Artificial Sequence
  Cyclic GFR-binding peptide
VIMVTAKKVKPKRGVIKRIQVPRLA

SEQ ID NO: 68397 - protein, 35 aa, Artificial Sequence; identical to SEQ ID NO: 23054
  Cyclic GFR-binding peptide
  MOD_RES (32)..(32): Xaa is C or S

SEQ ID NO: 68398 - protein, 31 aa, Artificial Sequence
  Cyclic GFR-binding peptide
NHQLFNSLQEHQGQHPKIRYYVMPLPEEETP

SEQ ID NO: 68399 - protein, 33 aa, Artificial Sequence
  Cyclic GFR-binding peptide
  MOD_RES (2)..(33): Xaa is C or S
KXSKVIMVQVEKIKPTKGIVKAIKVSRLDQSVX

SEQ ID NO: 68400 - protein, 33 aa, Artificial Sequence
  Cyclic GFR-binding peptide
  MOD_RES (2)..(4): Xaa is C or S
SXKXSRVIMSMEGIVKPKRGVMIQITINSLAQP

SEQ ID NO: 68401 - protein, 33 aa, Artificial Sequence; identical to SEQ ID NO: 16367
  Cyclic GFR-binding peptide
  MOD_RES (1)..(33): Xaa is C or S

SEQ ID NO: 68402 - protein, 29 aa, Artificial Sequence
  Cyclic GFR-binding peptide
  MOD_RES (2)..(2): Xaa is C or S
KXSKVVMNSLQEVKPTRGVYYLITLPELD

SEQ ID NO: 68403 - protein, 32 aa, Artificial Sequence
  Cyclic GFR-binding peptide
  MOD_RES (30)..(30): Xaa is C or S
NSLQELKPKKRVYEYYVVPLPEHHVRSPQXKV

SEQ ID NO: 68404 - protein, 35 aa, Artificial Sequence
  Cyclic GFR-binding peptide
  MOD_RES (2)..(4): Xaa is C or S
RXGXGEVVMDVTAKKVVKENEDIKRMQVPRLETPV

SEQ ID NO: 68405 - protein, 36 aa, Artificial Sequence
  Cyclic GFR-binding peptide
  MOD_RES (1)..(3)..(35)..(36): Xaa is C or S
XGXSRVVMNVTAKKIVNSSDDIKRVQVPRLKTPAXX

SEQ ID NO: 68406 - protein, 33 aa, Artificial Sequence
  Cyclic GFR-binding peptide
  MOD_RES (2)..(4): Xaa is C or S
SXKXSKVIMSMEGIIKPTKGIMIQITINSLDQS

SEQ ID NO: 68407 - protein, 31 aa, Artificial Sequence
  Cyclic GFR-binding peptide
  MOD_RES (30)..(30): Xaa is C or S
NSLQELKPKKRVYEYYLVTLPEHHVRSPQXK

SEQ ID NO: 68408 - protein, 33 aa, Artificial Sequence; identical to SEQ ID NO: 16385
  Cyclic GFR-binding peptide
  MOD_RES (2)..(4): Xaa is C or S

SEQ ID NO: 68409 - protein, 28 aa, Artificial Sequence
  Cyclic GFR-binding peptide
  MOD_RES (2)..(2): Xaa is C or S
GXGEVVMENSLQEVVKDYEDYYLMTLPE

SEQ ID NO: 68410 - protein, 29 aa, Artificial Sequence
  Cyclic GFR-binding peptide
ARVVMNNSLQEIVNSSDDYYLVTLPELQT

SEQ ID NO: 68411 - protein, 28 aa, Artificial Sequence
  Cyclic GFR-binding peptide
NHQLFVTAKKHQGQHPKIRIKRMQVPRE

SEQ ID NO: 68412 - protein, 30 aa, Artificial Sequence
  Cyclic GFR-binding peptide
ELRNSLQELKPKKRVYEYYVVPLPEHHVRS

SEQ ID NO: 68413 - protein, 37 aa, Artificial Sequence
  Cyclic GFR-binding peptide
  MOD_RES (1)..(33)..(34): Xaa is C or S
XARVVMNSMEGIIVNSSDDMIQVTINSLQTPAXXPKP

SEQ ID NO: 68414 - protein, 22 aa, Artificial Sequence
  Cyclic GFR-binding peptide
VMVTAKKVKPTRGVIKRIQVPR

SEQ ID NO: 68415 - protein, 31 aa, Artificial Sequence; identical to SEQ ID NO: 23077
  Cyclic GFR-binding peptide
  MOD_RES (1)..(1): Xaa is C or S

SEQ ID NO: 68416 - protein, 38 aa, Artificial Sequence
  Cyclic GFR-binding peptide
  MOD_RES (2)..(34): Xaa is C or S
GXSRVVMNVQVEKIVNSSDDVKAVKVSRLKTPAXTPKT

SEQ ID NO: 68417 - protein, 41 aa, Artificial Sequence
  Cyclic GFR-binding peptide
  MOD_RES (2)..(4)..(41): Xaa is C or S
AXAXELHEELRNSLQELKPKKRVYEYYLVTLPEHHVRSPQX

SEQ ID NO: 68418 - protein, 28 aa, Artificial Sequence
  Cyclic GFR-binding peptide
  MOD_RES (2)..(2): Xaa is C or S
GXGEVVMDVTAKKVVKENEDIKRMQVPR

SEQ ID NO: 68419 - protein, 26 aa, Artificial Sequence
  Cyclic GFR-binding peptide
LRSMEGILKPKKRVYEMIQVTINSHH

SEQ ID NO: 68420 - protein, 23 aa, Artificial Sequence
  Cyclic GFR-binding peptide
RSMEGILKPKKRVYEMIQVTINS

SEQ ID NO: 68421 - protein, 36 aa, Artificial Sequence; identical to SEQ ID NO: 23086
  Cyclic GFR-binding peptide
  MOD_RES (1)..(1): Xaa is C or S

SEQ ID NO: 68422 - protein, 25 aa, Artificial Sequence
  Cyclic GFR-binding peptide
KVIMNSLQEIKPTKGIYYLITLPEL

SEQ ID NO: 68423 - protein, 34 aa, Artificial Sequence
  Cyclic GFR-binding peptide
  MOD_RES (29)..(30): Xaa is C or S
VMDVQVEKVVKENEDVKAMKVSRLETPVXXAKPI

SEQ ID NO: 68424 - protein, 33 aa, Artificial Sequence; identical to SEQ ID NO: 16413
  Cyclic GFR-binding peptide
  MOD_RES (28)..(29): Xaa is C or S

SEQ ID NO: 68425 - protein, 35 aa, Artificial Sequence
  Cyclic GFR-binding peptide
  MOD_RES (2)..(34)..(35): Xaa is C or S
GXGEVVMESMEGIVVKDYEDMIQMTINSLETPVXX

SEQ ID NO: 68426 - protein, 34 aa, Artificial Sequence; identical to SEQ ID NO: 16414
  Cyclic GFR-binding peptide
  MOD_RES (29)..(30): Xaa is C or S

SEQ ID NO: 68427 - protein, 33 aa, Artificial Sequence; identical to SEQ ID NO: 16417
  Cyclic GFR-binding peptide
  MOD_RES (30)..(31): Xaa is C or S

SEQ ID NO: 68428 - protein, 34 aa, Artificial Sequence
  Cyclic GFR-binding peptide
  MOD_RES (2)..(4): Xaa is C or S
HXGXSRVVMNVQVEKIVNSSDDVKAVKVSRLKTP

SEQ ID NO: 68429 - protein, 35 aa, Artificial Sequence
  Cyclic GFR-binding peptide
  MOD_RES (30)..(31): Xaa is C or S
VVMNVQVEKIVNSSDDVKAVKVSRLKTPAXXPKPV

SEQ ID NO: 68430 - protein, 33 aa, Artificial Sequence; identical to SEQ ID NO: 16427
  Cyclic GFR-binding peptide
  MOD_RES (1)..(32)..(33): Xaa is C or S

SEQ ID NO: 68431 - protein, 41 aa, Artificial Sequence; identical to SEQ ID NO: 16428
  Cyclic GFR-binding peptide
  MOD_RES (1)..(3)..(35)..(36): Xaa is C or S

SEQ ID NO: 68432 - protein, 35 aa, Artificial Sequence
  Cyclic GFR-binding peptide
  MOD_RES (33)..(33): Xaa is C or S
ELTNSLQEFIPKKRVIEYYLVTLPELQVQTPRXQV

SEQ ID NO: 68433 - protein, 32 aa, Artificial Sequence
  Cyclic GFR-binding peptide
  MOD_RES (29)..(30): Xaa is C or S
VMNVTAKKIVNSSDDIKRVQVPRLKTPAXXPK

SEQ ID NO: 68434 - protein, 25 aa, Artificial Sequence
  Cyclic GFR-binding peptide
LFNSLQEHQGQHPKIRYYVMPLPEE

SEQ ID NO: 68435 - protein, 31 aa, Artificial Sequence; identical to SEQ ID NO: 16434
  Cyclic GFR-binding peptide
  MOD_RES (1)..(3): Xaa is C or S

SEQ ID NO: 68436 - protein, 34 aa, Artificial Sequence
  Cyclic GFR-binding peptide
  MOD_RES (1)..(3): Xaa is C or S
XEXKNHQLFNSLQEHQGQHPKIRYYLMTLPEEET

SEQ ID NO: 68437 - protein, 36 aa, Artificial Sequence; identical to SEQ ID NO: 16435
  Cyclic GFR-binding peptide
  MOD_RES (1)..(3)..(35)..(36): Xaa is C or S

SEQ ID NO: 68438 - protein, 32 aa, Artificial Sequence
  Cyclic GFR-binding peptide
  MOD_RES (2)..(2): Xaa is C or S
KXSKVVMSMEGIVKPTRGVMIQITINSLDQPV

SEQ ID NO: 68439 - protein, 33 aa, Artificial Sequence
  Cyclic GFR-binding peptide
  MOD_RES (2)..(2): Xaa is C or S
GXARVVMNVTAKKIVNSSDDIKRVQVPRLQTPA

SEQ ID NO: 68440 - protein, 26 aa, Artificial Sequence
  Cyclic GFR-binding peptide
SRVIMNSLQEVKPKRGVYYLITLPEL

SEQ ID NO: 68441 - protein, 22 aa, Artificial Sequence
  Cyclic GFR-binding peptide
VTAKKVKPKRGVIKRIQVPRLA

SEQ ID NO: 68442 - protein, 27 aa, Artificial Sequence
  Cyclic GFR-binding peptide
  MOD_RES (27)..(27): Xaa is C or S
DVQVEKVVKENEDVKAMKVSRLETPVX

SEQ ID NO: 68443 - protein, 22 aa, Artificial Sequence
  Cyclic GFR-binding peptide
ENSLQEVVKDYEDYYLMTLPEL

SEQ ID NO: 68444 - protein, 32 aa, Artificial Sequence; identical to SEQ ID NO: 23110
  Cyclic GFR-binding peptide
  MOD_RES (2)..(2): Xaa is C or S

SEQ ID NO: 68445 - protein, 33 aa, Artificial Sequence; identical to SEQ ID NO: 23112
  Cyclic GFR-binding peptide
  MOD_RES (2)..(4): Xaa is C or S

SEQ ID NO: 68446 - protein, 33 aa, Artificial Sequence; identical to SEQ ID NO: 23116
  Cyclic GFR-binding peptide
  MOD_RES (1)..(3): Xaa is C or S

SEQ ID NO: 68447 - protein, 34 aa, Artificial Sequence; identical to SEQ ID NO: 16453
  Cyclic GFR-binding peptide
  MOD_RES (29)..(30): Xaa is C or S

SEQ ID NO: 68448 - protein, 26 aa, Artificial Sequence
  Cyclic GFR-binding peptide
TVQVEKFIPKKRVIEVKAVKVSRLQV

SEQ ID NO: 68449 - protein, 37 aa, Artificial Sequence; identical to SEQ ID NO: 16457
  Cyclic GFR-binding peptide
  MOD_RES (32)..(33): Xaa is C or S

SEQ ID NO: 68450 - protein, 33 aa, Artificial Sequence
  Cyclic GFR-binding peptide
  MOD_RES (28)..(28): Xaa is C or S
MNSMEGIIVNSSDDMIQVTINSLKTPAXTPKTV

SEQ ID NO: 68451 - protein, 34 aa, Artificial Sequence; identical to SEQ ID NO: 23126
  Cyclic GFR-binding peptide
  MOD_RES (34)..(34): Xaa is C or S

SEQ ID NO: 68452 - protein, 33 aa, Artificial Sequence
  Cyclic GFR-binding peptide
  MOD_RES (28)..(29): Xaa is C or S
MNVQVEKIVNSSDDVKAVKVSRLQTPAXXPKPV

SEQ ID NO: 68453 - protein, 34 aa, Artificial Sequence
  Cyclic GFR-binding peptide
  MOD_RES (30)..(30): Xaa is C or S
NSLQEFIPKKRVIEYYLVTLPELQVQTPRXQVNR

SEQ ID NO: 68454 - protein, 34 aa, Artificial Sequence
  Cyclic GFR-binding peptide
  MOD_RES (30)..(30): Xaa is C or S
LFNSLQEHQGQHPKIRYYVMPLPEEETPVXELGE

SEQ ID NO: 68455 - protein, 28 aa, Artificial Sequence
  Cyclic GFR-binding peptide
VVMNNSLQEIVNSSDDYYLVTLPELQTP

SEQ ID NO: 68456 - protein, 33 aa, Artificial Sequence
  Cyclic GFR-binding peptide
  MOD_RES (2)..(33): Xaa is C or S
KXSKVIMSMEGIIKPTKGIMIQITINSLDQSVX

SEQ ID NO: 68457 - protein, 25 aa, Artificial Sequence
  Cyclic GFR-binding peptide
SMEGIVKPTRGVMIQITINSLDQPV

SEQ ID NO: 68458 - protein, 33 aa, Artificial Sequence; identical to SEQ ID NO: 23138
  Cyclic GFR-binding peptide

SEQ ID NO: 68459 - protein, 28 aa, Artificial Sequence
  Cyclic GFR-binding peptide
SKVVMVQVEKVKPTRGVVKAIKVSRLDQ

SEQ ID NO: 68460 - protein, 40 aa, Artificial Sequence
  Cyclic GFR-binding peptide
  MOD_RES (2)..(34)..(35): Xaa is C or S
GXGEVVMDSMEGIVVKENEDMIQMTINSLETPVXXAKPIK

SEQ ID NO: 68461 - protein, 33 aa, Artificial Sequence; identical to SEQ ID NO: 16476
  Cyclic GFR-binding peptide
  MOD_RES (1)..(3): Xaa is C or S

SEQ ID NO: 68462 - protein, 23 aa, Artificial Sequence
  Cyclic GFR-binding peptide
DNSLQEVVKENEDYYVMPLPELE

SEQ ID NO: 68463 - protein, 34 aa, Artificial Sequence
  Cyclic GFR-binding peptide
  MOD_RES (1)..(3): Xaa is C or S
XGXGEVVMDVQVEKVVKENEDVKAMKVSRLETPV

SEQ ID NO: 68464 - protein, 37 aa, Artificial Sequence
  Cyclic GFR-binding peptide
  MOD_RES (2)..(33)..(34): Xaa is C or S
KXSRVIMSMEGIVKPKRGVMIQITINSLAQPVXXPAA

SEQ ID NO: 68465 - protein, 28 aa, Artificial Sequence
  Cyclic GFR-binding peptide
RVVMNVTAKKIVNSSDDIKRVQVPRLKT

SEQ ID NO: 68466 - protein, 31 aa, Artificial Sequence
  Cyclic GFR-binding peptide
  MOD_RES (29)..(30): Xaa is C or S
VIMVQVEKIKPTKGIVKAIKVSRLDQSVXXP

SEQ ID NO: 68467 - protein, 37 aa, Artificial Sequence; identical to SEQ ID NO: 16481
  Cyclic GFR-binding peptide
  MOD_RES (1)..(3)..(35)..(36): Xaa is C or S

SEQ ID NO: 68468 - protein, 33 aa, Artificial Sequence; identical to SEQ ID NO: 16482
  Cyclic GFR-binding peptide
  MOD_RES (2)..(2): Xaa is C or S

SEQ ID NO: 68469 - protein, 35 aa, Artificial Sequence
  Cyclic GFR-binding peptide
  MOD_RES (31)..(32): Xaa is C or S
EVVMDVQVEKVVKENEDVKAMKVSRLETPVXXAKP

SEQ ID NO: 68470 - protein, 32 aa, Artificial Sequence
  Cyclic GFR-binding peptide
  MOD_RES (30)..(30): Xaa is C or S
LFNSLQEHQGQHPKIRYYVMPLPEEETPVXEL

SEQ ID NO: 68471 - protein, 24 aa, Artificial Sequence
  Cyclic GFR-binding peptide
MEVTAKKVVKDYEDIKRMQVPRLE

SEQ ID NO: 68472 - protein, 35 aa, Artificial Sequence
  Cyclic GFR-binding peptide
  MOD_RES (30)..(31): Xaa is C or S
VVMDVQVEKVVKENEDVKAMKVSRLETPVXXAKPI

SEQ ID NO: 68473 - protein, 26 aa, Artificial Sequence
  Cyclic GFR-binding peptide
SRVVMNVQVEKIVNSSDDVKAVKVSR

SEQ ID NO: 68474 - protein, 32 aa, Artificial Sequence; identical to SEQ ID NO: 16490
  Cyclic GFR-binding peptide
  MOD_RES (2)..(4): Xaa is C or S

SEQ ID NO: 68475 - protein, 42 aa, Artificial Sequence
  Cyclic GFR-binding peptide
  MOD_RES (2)..(4)..(36)..(37): Xaa is C or S
RXGXGEVVMEVTAKKVVKDYEDIKRMQVPRLETPVXXAKPIS

SEQ ID NO: 68476 - protein, 30 aa, Artificial Sequence
  Cyclic GFR-binding peptide
ELHEELRNSLQELKPKKRVYEYYVVPLPEH

SEQ ID NO: 68477 - protein, 35 aa, Artificial Sequence
  Cyclic GFR-binding peptide
  MOD_RES (30)..(31): Xaa is C or S
VVMNVQVEKIVNSSDDVKAVKVSRLQTPAXXPKPV

SEQ ID NO: 68478 - protein, 32 aa, Artificial Sequence; identical to SEQ ID NO: 16496
  Cyclic GFR-binding peptide
  MOD_RES (30)..(30): Xaa is C or S

SEQ ID NO: 68479 - protein, 38 aa, Artificial Sequence
  Cyclic GFR-binding peptide
  MOD_RES (2)..(34)..(35): Xaa is C or S
GXARVVMNSMEGIIVNSSDDMIQVTINSLQTPAXXPKP

SEQ ID NO: 68480 - protein, 36 aa, Artificial Sequence; identical to SEQ ID NO: 23158
  Cyclic GFR-binding peptide
  MOD_RES (33)..(33): Xaa is C or S

SEQ ID NO: 68481 - protein, 26 aa, Artificial Sequence
  Cyclic GFR-binding peptide
DVTAKKVVKENEDIKRMQVPRLETPV

SEQ ID NO: 68482 - protein, 36 aa, Artificial Sequence; identical to SEQ ID NO: 23161
  Cyclic GFR-binding peptide
  MOD_RES (2)..(2): Xaa is C or S

SEQ ID NO: 68483 - protein, 32 aa, Artificial Sequence; identical to SEQ ID NO: 16502
  Cyclic GFR-binding peptide
  MOD_RES (29)..(30): Xaa is C or S

SEQ ID NO: 68484 - protein, 36 aa, Artificial Sequence
  Cyclic GFR-binding peptide
  MOD_RES (2)..(4)..(35)..(36): Xaa is C or S
SXKXSRVIMVTAKKVKPKRGVIKRIQVPRLAQPVXX

SEQ ID NO: 68485 - protein, 31 aa, Artificial Sequence; identical to SEQ ID NO: 16504
  Cyclic GFR-binding peptide
  MOD_RES (1)..(3): Xaa is C or S

SEQ ID NO: 68486 - protein, 45 aa, Artificial Sequence; identical to SEQ ID NO: 23171
  Cyclic GFR-binding peptide
  MOD_RES (2)..(4)..(41): Xaa is C or S

SEQ ID NO: 68487 - protein, 24 aa, Artificial Sequence
  Cyclic GFR-binding peptide
NVTAKKIVNSSDDIKRVQVPRLQT

SEQ ID NO: 68488 - protein, 29 aa, Artificial Sequence
  Cyclic GFR-binding peptide
  MOD_RES (1)..(3): Xaa is C or S
XGXSRVVMNVQVEKIVNSSDDVKAVKVSR

SEQ ID NO: 68489 - protein, 38 aa, Artificial Sequence; identical to SEQ ID NO: 16509
  Cyclic GFR-binding peptide
  MOD_RES (1)..(3)..(35)..(36): Xaa is C or S

SEQ ID NO: 68490 - protein, 26 aa, Artificial Sequence
  Cyclic GFR-binding peptide
ARVVMNVQVEKIVNSSDDVKAVKVSR

SEQ ID NO: 68491 - protein, 29 aa, Artificial Sequence
  Cyclic GFR-binding peptide
  MOD_RES (1)..(3): Xaa is C or S
XGXARVVMNNSLQEIVNSSDDYYVVPLPE

SEQ ID NO: 68492 - protein, 24 aa, Artificial Sequence
  Cyclic GFR-binding peptide
VVMENSLQEVVKDYEDYYVMPLPE

SEQ ID NO: 68493 - protein, 32 aa, Artificial Sequence
  Cyclic GFR-binding peptide
  MOD_RES (30)..(30): Xaa is C or S
NSLQEFIPKKRVIEYYLVTLPELQVQTPRXQV

SEQ ID NO: 68494 - protein, 33 aa, Artificial Sequence; identical to SEQ ID NO: 16517
  Cyclic GFR-binding peptide
  MOD_RES (2)..(4): Xaa is C or S

SEQ ID NO: 68495 - protein, 25 aa, Artificial Sequence
  Cyclic GFR-binding peptide
NSLQEIKPTKGIYYVIPLPELDQSV

SEQ ID NO: 68496 - protein, 30 aa, Artificial Sequence
  Cyclic GFR-binding peptide
  MOD_RES (2)..(2): Xaa is C or S
GXGEVVMDVTAKKVVKENEDIKRMQVPRLE

SEQ ID NO: 68497 - protein, 26 aa, Artificial Sequence
  Cyclic GFR-binding peptide
  MOD_RES (1)..(1): Xaa is C or S
XSKVIMSMEGIIKPTKGIMIQITINS

SEQ ID NO: 68498 - protein, 27 aa, Artificial Sequence
  Cyclic GFR-binding peptide
HEELRVTAKKLKPKKRVYEIKRVQVPR

SEQ ID NO: 68499 - protein, 21 aa, Artificial Sequence
  Cyclic GFR-binding peptide
MSMEGIVKPKRGVMIQITINS

SEQ ID NO: 68500 - protein, 36 aa, Artificial Sequence; identical to SEQ ID NO: 16527
  Cyclic GFR-binding peptide
  MOD_RES (1)..(33): Xaa is C or S

SEQ ID NO: 68501 - protein, 24 aa, Artificial Sequence
  Cyclic GFR-binding peptide
ENSLQEVVKDYEDYYVMPLPELET

SEQ ID NO: 68502 - protein, 35 aa, Artificial Sequence
  Cyclic GFR-binding peptide
  MOD_RES (1)..(33)..(34): Xaa is C or S
XGEVVMEVTAKKVVKDYEDIKRMQVPRLETPVXXA

SEQ ID NO: 68503 - protein, 23 aa, Artificial Sequence
  Cyclic GFR-binding peptide
VMDNSLQEVVKENEDYYVMPLPE

SEQ ID NO: 68504 - protein, 37 aa, Artificial Sequence
  Cyclic GFR-binding peptide
  MOD_RES (1)..(3)..(35): Xaa is C or S
XGXSRVVMNVQVEKIVNSSDDVKAVKVSRLKTPAXTP

SEQ ID NO: 68505 - protein, 34 aa, Artificial Sequence
  Cyclic GFR-binding peptide
  MOD_RES (2)..(4): Xaa is C or S
SXKXSKVIMSMEGIIKPTKGIMIQITINSLDQSV

SEQ ID NO: 68506 - protein, 37 aa, Artificial Sequence
  Cyclic GFR-binding peptide
  MOD_RES (1)..(1): Xaa is C or S
XALHDELTNSLQEFIPKKRVIEYYLVTLPELQVQTPR

SEQ ID NO: 68507 - protein, 31 aa, Artificial Sequence
  Cyclic GFR-binding peptide
  MOD_RES (27)..(28): Xaa is C or S
ESMEGIVVKDYEDMIQMTINSLETPVXXAKP

SEQ ID NO: 68508 - protein, 36 aa, Artificial Sequence; identical to SEQ ID NO: 50249
  Cyclic GFR-binding peptide
  MOD_RES (31)..(32): Xaa is C or S

SEQ ID NO: 68509 - protein, 31 aa, Artificial Sequence; identical to SEQ ID NO: 50250
  Cyclic GFR-binding peptide
  MOD_RES (2)..(2): Xaa is C or S

SEQ ID NO: 68510 - protein, 30 aa, Artificial Sequence; identical to SEQ ID NO: 16538
  Cyclic GFR-binding peptide
  MOD_RES (1)..(3): Xaa is C or S

SEQ ID NO: 68511 - protein, 31 aa, Artificial Sequence; identical to SEQ ID NO: 23188
  Cyclic GFR-binding peptide

SEQ ID NO: 68512 - protein, 38 aa, Artificial Sequence
  Cyclic GFR-binding peptide
  MOD_RES (34)..(34): Xaa is C or S
KNHQLFNSLQEHQGQHPKIRYYLMTLPEEETPVXELGE

SEQ ID NO: 68513 - protein, 32 aa, Artificial Sequence
  Cyclic GFR-binding peptide
  MOD_RES (29)..(30): Xaa is C or S
VMDVTAKKVVKENEDIKRMQVPRLETPVXXAK

SEQ ID NO: 68514 - protein, 34 aa, Artificial Sequence; identical to SEQ ID NO: 16547
  Cyclic GFR-binding peptide
  MOD_RES (2)..(4): Xaa is C or S

SEQ ID NO: 68515 - protein, 32 aa, Artificial Sequence; identical to SEQ ID NO: 23192
  Cyclic GFR-binding peptide
  MOD_RES (32)..(32): Xaa is C or S

SEQ ID NO: 68516 - protein, 30 aa, Artificial Sequence; identical to SEQ ID NO: 16554
  Cyclic GFR-binding peptide
  MOD_RES (29)..(30): Xaa is C or S

SEQ ID NO: 68517 - protein, 30 aa, Artificial Sequence
  Cyclic GFR-binding peptide
ELTNSLQEFIPKKRVIEYYVVPLPELQVQT

SEQ ID NO: 68518 - protein, 29 aa, Artificial Sequence
  Cyclic GFR-binding peptide
  MOD_RES (26)..(27): Xaa is C or S
SMEGIIKPTKGIMIQITINSLDQSVXXPS

SEQ ID NO: 68519 - protein, 34 aa, Artificial Sequence
  Cyclic GFR-binding peptide
  MOD_RES (2)..(33)..(34): Xaa is C or S
KXSKVIMSMEGIIKPTKGIMIQITINSLDQSVXX

SEQ ID NO: 68520 - protein, 33 aa, Artificial Sequence
  Cyclic GFR-binding peptide
  MOD_RES (2)..(4): Xaa is C or S
HXGXSRVVMNVTAKKIVNSSDDIKRVQVPRLKT

SEQ ID NO: 68521 - protein, 32 aa, Artificial Sequence; identical to SEQ ID NO: 16557
  Cyclic GFR-binding peptide
  MOD_RES (29)..(30): Xaa is C or S

SEQ ID NO: 68522 - protein, 25 aa, Artificial Sequence
  Cyclic GFR-binding peptide
VMSMEGIVKPTRGVMIQITINSLDQ

SEQ ID NO: 68523 - protein, 26 aa, Artificial Sequence
  Cyclic GFR-binding peptide
TNSLQEFIPKKRVIEYYVVPLPELQV

SEQ ID NO: 68524 - protein, 28 aa, Artificial Sequence
  Cyclic GFR-binding peptide
  MOD_RES (27)..(27): Xaa is C or S
NNSLQEIVNSSDDYYLVTLPELKTPAXT

SEQ ID NO: 68525 - protein, 40 aa, Artificial Sequence; identical to SEQ ID NO: 23200
  Cyclic GFR-binding peptide
  MOD_RES (1)..(3)..(37): Xaa is C or S

SEQ ID NO: 68526 - protein, 34 aa, Artificial Sequence; identical to SEQ ID NO: 23201
  Cyclic GFR-binding peptide

SEQ ID NO: 68527 - protein, 23 aa, Artificial Sequence
  Cyclic GFR-binding peptide
VMNSLQEVKPTRGVYYVIPLPEL

SEQ ID NO: 68528 - protein, 34 aa, Artificial Sequence; identical to SEQ ID NO: 16568
  Cyclic GFR-binding peptide
  MOD_RES (32)..(33): Xaa is C or S

SEQ ID NO: 68529 - protein, 24 aa, Artificial Sequence
  Cyclic GFR-binding peptide
VMNNSLQEIVNSSDDYYLVTLPEL

SEQ ID NO: 68530 - protein, 41 aa, Artificial Sequence; identical to SEQ ID NO: 23212
  Cyclic GFR-binding peptide
  MOD_RES (1)..(35): Xaa is C or S

SEQ ID NO: 68531 - protein, 34 aa, Artificial Sequence; identical to SEQ ID NO: 16571
  Cyclic GFR-binding peptide
  MOD_RES (2)..(4): Xaa is C or S

SEQ ID NO: 68532 - protein, 29 aa, Artificial Sequence
  Cyclic GFR-binding peptide
EVVMEVQVEKVVKDYEDVKAMKVSRLETP

SEQ ID NO: 68533 - protein, 27 aa, Artificial Sequence
  Cyclic GFR-binding peptide
  MOD_RES (26)..(27): Xaa is C or S
VTAKKVKPTRGVIKRIQVPRLDQPVXX

SEQ ID NO: 68534 - protein, 30 aa, Artificial Sequence
  Cyclic GFR-binding peptide
  MOD_RES (1)..(3): Xaa is C or S
XGXSRVVMNSMEGIIVNSSDDMIQVTINSL

SEQ ID NO: 68535 - protein, 29 aa, Artificial Sequence
  Cyclic GFR-binding peptide
  MOD_RES (29)..(29): Xaa is C or S
VMENSLQEVVKDYEDYYVMPLPELETPVX

SEQ ID NO: 68536 - protein, 38 aa, Artificial Sequence
  Cyclic GFR-binding peptide
  MOD_RES (2)..(34)..(35): Xaa is C or S
GXSRVVMNSMEGIIVNSSDDMIQVTINSLKTPAXXPKP

SEQ ID NO: 68537 - protein, 32 aa, Artificial Sequence
  Cyclic GFR-binding peptide
  MOD_RES (2)..(2): Xaa is C or S
KXSKVVMVQVEKVKPTRGVVKAIKVSRLDQPV

SEQ ID NO: 68538 - protein, 27 aa, Artificial Sequence
  Cyclic GFR-binding peptide
  MOD_RES (26)..(27): Xaa is C or S
NSLQEVKPTRGVYYVIPLPELDQPVXX

SEQ ID NO: 68539 - protein, 37 aa, Artificial Sequence
  Cyclic GFR-binding peptide
  MOD_RES (1)..(32)..(33): Xaa is C or S
XSKVVMVTAKKVKPTRGVIKRIQVPRLDQPVXXPSAS

SEQ ID NO: 68540 - protein, 25 aa, Artificial Sequence
  Cyclic GFR-binding peptide
ENSLQEVVKDYEDYYLMTLPELETP

SEQ ID NO: 68541 - protein, 25 aa, Artificial Sequence
  Cyclic GFR-binding peptide
VTAKKIKPTKGIIKRIQVPRLDQSV

SEQ ID NO: 68542 - protein, 33 aa, Artificial Sequence; identical to SEQ ID NO: 23221
  Cyclic GFR-binding peptide
  MOD_RES (31)..(31): Xaa is C or S

SEQ ID NO: 68543 - protein, 33 aa, Artificial Sequence; identical to SEQ ID NO: 16589
  Cyclic GFR-binding peptide
  MOD_RES (27)..(28): Xaa is C or S

SEQ ID NO: 68544 - protein, 35 aa, Artificial Sequence
  Cyclic GFR-binding peptide
  MOD_RES (30)..(31): Xaa is C or S
VVMNVTAKKIVNSSDDIKRVQVPRLQTPAXXPKPV

SEQ ID NO: 68545 - protein, 33 aa, Artificial Sequence
  Cyclic GFR-binding peptide
  MOD_RES (27)..(28): Xaa is C or S
MVTAKKVKPKRGVIKRIQVPRLAQPVXXPAASA

SEQ ID NO: 68546 - protein, 37 aa, Artificial Sequence; identical to SEQ ID NO: 23227
  Cyclic GFR-binding peptide
  MOD_RES (2)..(4): Xaa is C or S

SEQ ID NO: 68547 - protein, 31 aa, Artificial Sequence
  Cyclic GFR-binding peptide
  MOD_RES (31)..(31): Xaa is C or S
SRVIMVQVEKVKPKRGVVKAIKVSRLAQPVX

SEQ ID NO: 68548 - protein, 40 aa, Artificial Sequence; identical to SEQ ID NO: 23230
  Cyclic GFR-binding peptide
  MOD_RES (1)..(3)..(40): Xaa is C or S

SEQ ID NO: 68549 - protein, 32 aa, Artificial Sequence
  Cyclic GFR-binding peptide
  MOD_RES (27)..(28): Xaa is C or S
MVTAKKVKPTRGVIKRIQVPRLDQPVXXPSAS

SEQ ID NO: 68550 - protein, 34 aa, Artificial Sequence; identical to SEQ ID NO: 16600
  Cyclic GFR-binding peptide
  MOD_RES (1)..(3)..(34): Xaa is C or S

SEQ ID NO: 68551 - protein, 25 aa, Artificial Sequence
  Cyclic GFR-binding peptide
VMNSLQEVKPTRGVYYLITLPELDQ

SEQ ID NO: 68552 - protein, 31 aa, Artificial Sequence; identical to SEQ ID NO: 23236
  Cyclic GFR-binding peptide

SEQ ID NO: 68553 - protein, 25 aa, Artificial Sequence
  Cyclic GFR-binding peptide
IMNSLQEIKPTKGIYYLITLPELDQ

SEQ ID NO: 68554 - protein, 24 aa, Artificial Sequence
  Cyclic GFR-binding peptide
IMVQVEKVKPKRGVVKAIKVSRLA

SEQ ID NO: 68555 - protein, 43 aa, Artificial Sequence
  Cyclic GFR-binding peptide
  MOD_RES (1)..(3)..(40): Xaa is C or S
XKXALHDELTNSLQEFIPKKRVIEYYLVTLPELQVQTPRXQVN

SEQ ID NO: 68556 - protein, 29 aa, Artificial Sequence
  Cyclic GFR-binding peptide
LHEELRVTAKKLKPKKRVYEIKRVQVPRH

SEQ ID NO: 68557 - protein, 27 aa, Artificial Sequence
  Cyclic GFR-binding peptide
VVMEVQVEKVVKDYEDVKAMKVSRLET

SEQ ID NO: 68558 - protein, 28 aa, Artificial Sequence
  Cyclic GFR-binding peptide
  MOD_RES (2)..(2): Xaa is C or S
KXSKVIMNSLQEIKPTKGIYYVIPLPEL

SEQ ID NO: 68559 - protein, 39 aa, Artificial Sequence
  Cyclic GFR-binding peptide
  MOD_RES (2)..(4)..(36)..(37): Xaa is C or S
HXGXSRVVMNVTAKKIVNSSDDIKRVQVPRLKTPAXXPK

SEQ ID NO: 68560 - protein, 32 aa, Artificial Sequence
  Cyclic GFR-binding peptide
  MOD_RES (30)..(30): Xaa is C or S
VVMNVQVEKIVNSSDDVKAVKVSRLKTPAXTP

SEQ ID NO: 68561 - protein, 34 aa, Artificial Sequence
  Cyclic GFR-binding peptide
  MOD_RES (31)..(32): Xaa is C or S
EVVMDVTAKKVVKENEDIKRMQVPRLETPVXXAK

SEQ ID NO: 68562 - protein, 34 aa, Artificial Sequence; identical to SEQ ID NO: 16628
  Cyclic GFR-binding peptide
  MOD_RES (1)..(3): Xaa is C or S

SEQ ID NO: 68563 - protein, 41 aa, Artificial Sequence
  Cyclic GFR-binding peptide
  MOD_RES (1)..(3)..(35)..(36): Xaa is C or S
XGXGEVVMESMEGIVVKDYEDMIQMTINSLETPVXXAKPIS

SEQ ID NO: 68564 - protein, 25 aa, Artificial Sequence
  Cyclic GFR-binding peptide
NSLQEVVKDYEDYYLMTLPELETPV

SEQ ID NO: 68565 - protein, 32 aa, Artificial Sequence
  Cyclic GFR-binding peptide
  MOD_RES (1)..(3): Xaa is C or S
XGXARVVMNVQVEKIVNSSDDVKAVKVSRLQT

SEQ ID NO: 68566 - protein, 33 aa, Artificial Sequence; identical to SEQ ID NO: 50328
  Cyclic GFR-binding peptide
  MOD_RES (1)..(32)..(33): Xaa is C or S

SEQ ID NO: 68567 - protein, 39 aa, Artificial Sequence; identical to SEQ ID NO: 23257
  Cyclic GFR-binding peptide
  MOD_RES (37)..(37): Xaa is C or S

SEQ ID NO: 68568 - protein, 31 aa, Artificial Sequence; identical to SEQ ID NO: 16650
  Cyclic GFR-binding peptide
  MOD_RES (29)..(30): Xaa is C or S

SEQ ID NO: 68569 - protein, 34 aa, Artificial Sequence
  Cyclic GFR-binding peptide
  MOD_RES (29)..(30): Xaa is C or S
VIMVQVEKVKPKRGVVKAIKVSRLAQPVXXPAAS

SEQ ID NO: 68570 - protein, 31 aa, Artificial Sequence
  Cyclic GFR-binding peptide
  MOD_RES (1)..(1): Xaa is C or S
XSRVIMVTAKKVKPKRGVIKRIQVPRLAQPV

SEQ ID NO: 68571 - protein, 31 aa, Artificial Sequence; identical to SEQ ID NO: 23263
  Cyclic GFR-binding peptide

SEQ ID NO: 68572 - protein, 35 aa, Artificial Sequence; identical to SEQ ID NO: 16657
  Cyclic GFR-binding peptide
  MOD_RES (30)..(31): Xaa is C or S

SEQ ID NO: 68573 - protein, 24 aa, Artificial Sequence
  Cyclic GFR-binding peptide
VMNVTAKKIVNSSDDIKRVQVPRL

SEQ ID NO: 68574 - protein, 35 aa, Artificial Sequence; identical to SEQ ID NO: 23265
  Cyclic GFR-binding peptide
  MOD_RES (34)..(34): Xaa is C or S

SEQ ID NO: 68575 - protein, 33 aa, Artificial Sequence
  Cyclic GFR-binding peptide
  MOD_RES (31)..(32): Xaa is C or S
SKVIMVQVEKIKPTKGIVKAIKVSRLDQSVXXP

SEQ ID NO: 68576 - protein, 38 aa, Artificial Sequence
  Cyclic GFR-binding peptide
  MOD_RES (2)..(33)..(34): Xaa is C or S
KXSKVIMSMEGIIKPTKGIMIQITINSLDQSVXXPSAS

SEQ ID NO: 68577 - protein, 35 aa, Artificial Sequence
  Cyclic GFR-binding peptide
  MOD_RES (31)..(31): Xaa is C or S
TNSLQEFIPKKRVIEYYVVPLPELQVQTPRXQVNR

SEQ ID NO: 68578 - protein, 34 aa, Artificial Sequence
  Cyclic GFR-binding peptide
  MOD_RES (2)..(4): Xaa is C or S
RXGXGEVVMESMEGIVVKDYEDMIQMTINSLETP

SEQ ID NO: 68579 - protein, 31 aa, Artificial Sequence
  Cyclic GFR-binding peptide
  MOD_RES (29)..(30): Xaa is C or S
VMEVTAKKVVKDYEDIKRMQVPRLETPVXXA

SEQ ID NO: 68580 - protein, 31 aa, Artificial Sequence; identical to SEQ ID NO: 16673
  Cyclic GFR-binding peptide
  MOD_RES (28)..(29): Xaa is C or S

SEQ ID NO: 68581 - protein, 30 aa, Artificial Sequence
  Cyclic GFR-binding peptide
  MOD_RES (2)..(4): Xaa is C or S
SXKXSKVVMVQVEKVKPTRGVVKAIKVSRL

SEQ ID NO: 68582 - protein, 37 aa, Artificial Sequence
  Cyclic GFR-binding peptide
  MOD_RES (2)..(4)..(36)..(37): Xaa is C or S
RXGXGEVVMESMEGIVVKDYEDMIQMTINSLETPVXX

SEQ ID NO: 68583 - protein, 25 aa, Artificial Sequence
  Cyclic GFR-binding peptide
VVMSMEGIVKPTRGVMIQITINSLD

SEQ ID NO: 68584 - protein, 31 aa, Artificial Sequence
  Cyclic GFR-binding peptide
  MOD_RES (26)..(27): Xaa is C or S
VQVEKIVNSSDDVKAVKVSRLKTPAXXPKPV

SEQ ID NO: 68585 - protein, 25 aa, Artificial Sequence
  Cyclic GFR-binding peptide
ELTVQVEKFIPKKRVIEVKAVKVSR

SEQ ID NO: 68586 - protein, 35 aa, Artificial Sequence
  Cyclic GFR-binding peptide
  MOD_RES (30)..(31): Xaa is C or S
VVMESMEGIVVKDYEDMIQMTINSLETPVXXAKPI

SEQ ID NO: 68587 - protein, 34 aa, Artificial Sequence
  Cyclic GFR-binding peptide
ELHEELRNSLQELKPKKRVYEYYLVTLPEHHVRS

SEQ ID NO: 68588 - protein, 36 aa, Artificial Sequence
  Cyclic GFR-binding peptide
  MOD_RES (32)..(33): Xaa is C or S
ARVVMNVQVEKIVNSSDDVKAVKVSRLQTPAXXPKP

SEQ ID NO: 68589 - protein, 39 aa, Artificial Sequence; identical to SEQ ID NO: 16689
  Cyclic GFR-binding peptide
  MOD_RES (1)..(33)..(34): Xaa is C or S

SEQ ID NO: 68590 - protein, 37 aa, Artificial Sequence
  Cyclic GFR-binding peptide
  MOD_RES (33)..(33): Xaa is C or S
ELRNSLQELKPKKRVYEYYVVPLPEHHVRSPQXKVSS

SEQ ID NO: 68591 - protein, 38 aa, Artificial Sequence
  Cyclic GFR-binding peptide
  MOD_RES (2)..(33)..(34): Xaa is C or S
KXSKVIMVQVEKIKPTKGIVKAIKVSRLDQSVXXPSAS

SEQ ID NO: 68592 - protein, 31 aa, Artificial Sequence
  Cyclic GFR-binding peptide
  MOD_RES (28)..(29): Xaa is C or S
IMSMEGIVKPKRGVMIQITINSLAQPVXXPA

SEQ ID NO: 68593 - protein, 37 aa, Artificial Sequence
  Cyclic GFR-binding peptide
  MOD_RES (32)..(33): Xaa is C or S
GEVVMESMEGIVVKDYEDMIQMTINSLETPVXXAKPI

SEQ ID NO: 68594 - protein, 37 aa, Artificial Sequence
  Cyclic GFR-binding peptide
  MOD_RES (2)..(34)..(35): Xaa is C or S
GXGEVVMDSMEGIVVKENEDMIQMTINSLETPVXXAK

SEQ ID NO: 68595 - protein, 39 aa, Artificial Sequence
  Cyclic GFR-binding peptide
  MOD_RES (2)..(34): Xaa is C or S
GXSRVVMNSMEGIIVNSSDDMIQVTINSLKTPAXTPKTV

SEQ ID NO: 68596 - protein, 31 aa, Artificial Sequence
  Cyclic GFR-binding peptide
  MOD_RES (29)..(30): Xaa is C or S
VMNSMEGIIVNSSDDMIQVTINSLQTPAXXP

SEQ ID NO: 68597 - protein, 26 aa, Artificial Sequence
  Cyclic GFR-binding peptide
ELRVTAKKLKPKKRVYEIKRVQVPRH

SEQ ID NO: 68598 - protein, 37 aa, Artificial Sequence
  Cyclic GFR-binding peptide
  MOD_RES (1)..(3)..(34)..(35): Xaa is C or S
XKXSKVIMVQVEKIKPTKGIVKAIKVSRLDQSVXXPS

SEQ ID NO: 68599 - protein, 35 aa, Artificial Sequence
  Cyclic GFR-binding peptide
  MOD_RES (2)..(33)..(34): Xaa is C or S
KXSKVIMVTAKKIKPTKGIIKRIQVPRLDQSVXXP

SEQ ID NO: 68600 - protein, 34 aa, Artificial Sequence
  Cyclic GFR-binding peptide
  MOD_RES (31)..(32): Xaa is C or S
SKVIMSMEGIIKPTKGIMIQITINSLDQSVXXPS

SEQ ID NO: 68601 - protein, 38 aa, Artificial Sequence
  Cyclic GFR-binding peptide
  MOD_RES (1)..(32)..(33): Xaa is C or S
XSKVIMVTAKKIKPTKGIIKRIQVPRLDQSVXXPSASA

SEQ ID NO: 68602 - protein, 30 aa, Artificial Sequence; identical to SEQ ID NO: 16711
  Cyclic GFR-binding peptide
  MOD_RES (29)..(30): Xaa is C or S

SEQ ID NO: 68603 - protein, 33 aa, Artificial Sequence
  Cyclic GFR-binding peptide
  MOD_RES (28)..(29): Xaa is C or S
MNVQVEKIVNSSDDVKAVKVSRLKTPAXXPKPV

SEQ ID NO: 68604 - protein, 32 aa, Artificial Sequence
  Cyclic GFR-binding peptide
ALHDELTNSLQEFIPKKRVIEYYLVTLPELQV

SEQ ID NO: 68605 - protein, 38 aa, Artificial Sequence
  Cyclic GFR-binding peptide
  MOD_RES (2)..(4)..(36)..(37): Xaa is C or S
RXGXGEVVMEVQVEKVVKDYEDVKAMKVSRLETPVXXA

SEQ ID NO: 68606 - protein, 37 aa, Artificial Sequence; identical to SEQ ID NO: 16716
  Cyclic GFR-binding peptide
  MOD_RES (2)..(4)..(36)..(37): Xaa is C or S

SEQ ID NO: 68607 - protein, 35 aa, Artificial Sequence; identical to SEQ ID NO: 23310
  Cyclic GFR-binding peptide
  MOD_RES (31)..(31): Xaa is C or S

SEQ ID NO: 68608 - protein, 37 aa, Artificial Sequence
  Cyclic GFR-binding peptide
  MOD_RES (2)..(33)..(34): Xaa is C or S
KXSRVIMVQVEKVKPKRGVVKAIKVSRLAQPVXXPAA

SEQ ID NO: 68609 - protein, 31 aa, Artificial Sequence
  Cyclic GFR-binding peptide
GEVVMEVTAKKVVKDYEDIKRMQVPRLETPV

SEQ ID NO: 68610 - protein, 30 aa, Artificial Sequence; identical to SEQ ID NO: 23318
  Cyclic GFR-binding peptide

SEQ ID NO: 68611 - protein, 38 aa, Artificial Sequence; identical to SEQ ID NO: 16729
  Cyclic GFR-binding peptide
  MOD_RES (1)..(3)..(35)..(36): Xaa is C or S

SEQ ID NO: 68612 - protein, 33 aa, Artificial Sequence; identical to SEQ ID NO: 23320
  Cyclic GFR-binding peptide
  MOD_RES (30)..(30): Xaa is C or S

SEQ ID NO: 68613 - protein, 41 aa, Artificial Sequence
  Cyclic GFR-binding peptide
  MOD_RES (3)..(40): Xaa is C or S
VKXQPSRVHHEPLTVLYYEYVRKKPKLEQLSNRLEEHLEXA

SEQ ID NO: 68614 - protein, 32 aa, Artificial Sequence
  Cyclic GFR-binding peptide
VHHEPLPVVYYEYVRKKPKLEQLSNRLEEHLE

SEQ ID NO: 68615 - protein, 34 aa, Artificial Sequence
  Cyclic GFR-binding peptide
  MOD_RES (32)..(34): Xaa is C or S
HHEPLTVLYYEYVRKKPKLEQLSNRLEEHLEXAX

SEQ ID NO: 68616 - protein, 27 aa, Artificial Sequence
  Cyclic GFR-binding peptide
  MOD_RES (1)..(2): Xaa is C or S
XXVPQALRPVQIRKIVGRKPKVKKATV

SEQ ID NO: 68617 - protein, 23 aa, Artificial Sequence
  Cyclic GFR-binding peptide
EPLTVLYYEIVRKKPIFEQLSNT

SEQ ID NO: 68618 - protein, 34 aa, Artificial Sequence; identical to SEQ ID NO: 16750
  Cyclic GFR-binding peptide
  MOD_RES (1)..(33): Xaa is C or S

SEQ ID NO: 68619 - protein, 35 aa, Artificial Sequence
  Cyclic GFR-binding peptide
  MOD_RES (32)..(34): Xaa is C or S
HHEPLTVLYYEYVRKKPKLEQLSNRLEEHLEXAXA

SEQ ID NO: 68620 - protein, 31 aa, Artificial Sequence
  Cyclic GFR-binding peptide
  MOD_RES (28)..(30): Xaa is C or S
ALRPVQIRKIVGRKPKVKKATVMIVRSXKXS

SEQ ID NO: 68621 - protein, 27 aa, Artificial Sequence
  Cyclic GFR-binding peptide
  MOD_RES (2)..(2): Xaa is C or S
TXAPTKLEPLTVLYYDDSSNVIEQLSN

SEQ ID NO: 68622 - protein, 28 aa, Artificial Sequence
  Cyclic GFR-binding peptide
  MOD_RES (28)..(28): Xaa is C or S
LSNITMQIMDENEKVVIGEMSDMVVEGX

SEQ ID NO: 68623 - protein, 28 aa, Artificial Sequence
  Cyclic GFR-binding peptide
PSRVHHEPLPVVYYEYVRKKPKLEQLSN

SEQ ID NO: 68624 - protein, 34 aa, Artificial Sequence; identical to SEQ ID NO: 16760
  Cyclic GFR-binding peptide
  MOD_RES (6)..(7): Xaa is C or S

SEQ ID NO: 68625 - protein, 40 aa, Artificial Sequence
  Cyclic GFR-binding peptide
  MOD_RES (6)..(7)..(39): Xaa is C or S
SIPKAXXVPTELRPVQMRKIDEYDKVVKKATVEMVVEGXG

SEQ ID NO: 68626 - protein, 32 aa, Artificial Sequence
  Cyclic GFR-binding peptide
  MOD_RES (29)..(31): Xaa is C or S
KLRSVKVAKVDDSSNVIKEVQVNMVVRSXGXH

SEQ ID NO: 68627 - protein, 28 aa, Artificial Sequence
  Cyclic GFR-binding peptide
APTKLSNITVQIMDDSSNVIIGEMSNMV

SEQ ID NO: 68628 - protein, 42 aa, Artificial Sequence; identical to SEQ ID NO: 23337
  Cyclic GFR-binding peptide
  MOD_RES (5)..(42): Xaa is C or S

SEQ ID NO: 68629 - protein, 30 aa, Artificial Sequence
  Cyclic GFR-binding peptide
VQLEPLTVLYYEIVRKKPIFEQLSNTLEDH

SEQ ID NO: 68630 - protein, 27 aa, Artificial Sequence
  Cyclic GFR-binding peptide
  MOD_RES (1)..(1): Xaa is C or S
XVPTELSNITMQIMDENEKVVIGEMSD

SEQ ID NO: 68631 - protein, 26 aa, Artificial Sequence
  Cyclic GFR-binding peptide
HSNITVQIMEYVRKKPKLIGEMSRLE

SEQ ID NO: 68632 - protein, 31 aa, Artificial Sequence; identical to SEQ ID NO: 23340
  Cyclic GFR-binding peptide
  MOD_RES (30)..(30): Xaa is C or S

SEQ ID NO: 68633 - protein, 35 aa, Artificial Sequence
  Cyclic GFR-binding peptide
  MOD_RES (32)..(34): Xaa is C or S
VPTELRSVKMAKVDENEKVVKEVQVDMVVEGXGXR

SEQ ID NO: 68634 - protein, 31 aa, Artificial Sequence; identical to SEQ ID NO: 23343
  Cyclic GFR-binding peptide
  MOD_RES (2)..(2): Xaa is C or S

SEQ ID NO: 68635 - protein, 27 aa, Artificial Sequence
  Cyclic GFR-binding peptide
TKLRSVKVAKVDDSSNVIKEVQVNMVV

SEQ ID NO: 68636 - protein, 30 aa, Artificial Sequence
  Cyclic GFR-binding peptide
VPQDLRPVQIRKIVGRTPKVKKATVMVVKS

SEQ ID NO: 68637 - protein, 30 aa, Artificial Sequence; identical to SEQ ID NO: 16773
  Cyclic GFR-binding peptide
  MOD_RES (3)..(4): Xaa is C or S

SEQ ID NO: 68638 - protein, 40 aa, Artificial Sequence
  Cyclic GFR-binding peptide
  MOD_RES (6)..(38)..(40): Xaa is C or S
VTKPTXAPTKLRPVQVRKIDDSSNVIKKATVNMVVRSXGX

SEQ ID NO: 68639 - protein, 22 aa, Artificial Sequence
  Cyclic GFR-binding peptide
LEPLPVVYYDDSSNVIEQLSNN

SEQ ID NO: 68640 - protein, 25 aa, Artificial Sequence
  Cyclic GFR-binding peptide
QLRSVKVAKVDDSSNVIKEVQVNMV

SEQ ID NO: 68641 - protein, 26 aa, Artificial Sequence
  Cyclic GFR-binding peptide
QDLRSVKIAKVIGKTPKIKEVQVMIV

SEQ ID NO: 68642 - protein, 22 aa, Artificial Sequence
  Cyclic GFR-binding peptide
LSNITMQIMDEYDKVVIGEMSE

SEQ ID NO: 68643 - protein, 25 aa, Artificial Sequence
  Cyclic GFR-binding peptide
PTELEPLPMVYYDENEKVVEQLSND

SEQ ID NO: 68644 - protein, 32 aa, Artificial Sequence
  Cyclic GFR-binding peptide
  MOD_RES (3)..(4): Xaa is C or S
SPXXVPQDLSNITIQIMVGRTPKVIGEMSMVV

SEQ ID NO: 68645 - protein, 30 aa, Artificial Sequence
  Cyclic GFR-binding peptide
  MOD_RES (27)..(29): Xaa is C or S
RSVKMAKVDENEKVVKEVQVDMVVEGXGXR

SEQ ID NO: 68646 - protein, 30 aa, Artificial Sequence
  Cyclic GFR-binding peptide
  MOD_RES (1)..(1): Xaa is C or S
XAPTKLRPVQVRKIDDSSNVIKKATVNMVV

SEQ ID NO: 68647 - protein, 24 aa, Artificial Sequence
  Cyclic GFR-binding peptide
PTKLEPLTVLYYDDSSNVIEQLSN

SEQ ID NO: 68648 - protein, 30 aa, Artificial Sequence; identical to SEQ ID NO: 16789
  Cyclic GFR-binding peptide
  MOD_RES (30)..(30): Xaa is C or S

SEQ ID NO: 68649 - protein, 31 aa, Artificial Sequence; identical to SEQ ID NO: 23355
  Cyclic GFR-binding peptide
  MOD_RES (31)..(31): Xaa is C or S

SEQ ID NO: 68650 - protein, 29 aa, Artificial Sequence
  Cyclic GFR-binding peptide
VHHSNITVQIMEYVRKKPKLIGEMSRLEE

SEQ ID NO: 68651 - protein, 36 aa, Artificial Sequence
  Cyclic GFR-binding peptide
  MOD_RES (2)..(3)..(35): Xaa is C or S
PXXAPTQLRPVQVRKIDDSSNVIKKATVNMVVRAXG

SEQ ID NO: 68652 - protein, 32 aa, Artificial Sequence
  Cyclic GFR-binding peptide
  MOD_RES (32)..(32): Xaa is C or S
VPTELRSVKMAKVDENEKVVKEVQVDMVVEGX

SEQ ID NO: 68653 - protein, 29 aa, Artificial Sequence
  Cyclic GFR-binding peptide
  MOD_RES (3)..(4): Xaa is C or S
SPXXVPQDLRSVKIAKVVGRTPKVKEVQV

SEQ ID NO: 68654 - protein, 35 aa, Artificial Sequence; identical to SEQ ID NO: 23359
  Cyclic GFR-binding peptide
  MOD_RES (1)..(1): Xaa is C or S

SEQ ID NO: 68655 - protein, 33 aa, Artificial Sequence
  Cyclic GFR-binding peptide
  MOD_RES (32)..(32): Xaa is C or S
VPTELSNITMQIMDEYDKVVIGEMSEMVVEGXG

SEQ ID NO: 68656 - protein, 34 aa, Artificial Sequence; identical to SEQ ID NO: 23361
  Cyclic GFR-binding peptide
  MOD_RES (1)..(1): Xaa is C or S

SEQ ID NO: 68657 - protein, 35 aa, Artificial Sequence
  Cyclic GFR-binding peptide
  MOD_RES (33)..(35): Xaa is C or S
VQLEPLTVLYYEIVRKKPIFEQLSNTLEDHLAXKX

SEQ ID NO: 68658 - protein, 41 aa, Artificial Sequence
  Cyclic GFR-binding peptide
  MOD_RES (5)..(5): Xaa is C or S
SSVKXQPSRVHHEPLPVVYYEYVRKKPKLEQLSNRLEEHLE

SEQ ID NO: 68659 - protein, 25 aa, Artificial Sequence
  Cyclic GFR-binding peptide
KLEPLTVLYYDDSSNVIEQLSNNMV

SEQ ID NO: 68660 - protein, 30 aa, Artificial Sequence
  Cyclic GFR-binding peptide
VPTEEEPLPMVYYRIKPHQGQHEQLSNFLQ

SEQ ID NO: 68661 - protein, 28 aa, Artificial Sequence
  Cyclic GFR-binding peptide
SQDLSNITIQIMIGKTPKIIGEMSMIVK

SEQ ID NO: 68662 - protein, 25 aa, Artificial Sequence
  Cyclic GFR-binding peptide
PQDLRSVKIAKVVGRTPKVKEVQVM

SEQ ID NO: 68663 - protein, 31 aa, Artificial Sequence; identical to SEQ ID NO: 16809
  Cyclic GFR-binding peptide

SEQ ID NO: 68664 - protein, 38 aa, Artificial Sequence
  Cyclic GFR-binding peptide
  MOD_RES (4)..(5)..(36)..(38): Xaa is C or S
ASPXXVSQDLSNITIQIMIGKTPKIIGEMSMIVKSXKX

SEQ ID NO: 68665 - protein, 28 aa, Artificial Sequence
  Cyclic GFR-binding peptide
RVHHRPVQVRKIEYVRKKPKLKKATVRL

SEQ ID NO: 68666 - protein, 32 aa, Artificial Sequence; identical to SEQ ID NO: 16812
  Cyclic GFR-binding peptide
  MOD_RES (32)..(32): Xaa is C or S

SEQ ID NO: 68667 - protein, 24 aa, Artificial Sequence
  Cyclic GFR-binding peptide
ELEPLPMVYYDENEKVVEQLSNDM

SEQ ID NO: 68668 - protein, 37 aa, Artificial Sequence
  Cyclic GFR-binding peptide
  MOD_RES (6)..(6): Xaa is C or S
VTKPTXAPTKLRPVQVRKIDDSSNVIKKATVNMVVRS

SEQ ID NO: 68669 - protein, 34 aa, Artificial Sequence
  Cyclic GFR-binding peptide
  MOD_RES (5)..(5): Xaa is C or S
EGLEXVPTEEEPLTMLYYRIKPHQGQHEQLSNFL

SEQ ID NO: 68670 - protein, 35 aa, Artificial Sequence; identical to SEQ ID NO: 16818
  Cyclic GFR-binding peptide
  MOD_RES (4)..(5): Xaa is C or S

SEQ ID NO: 68671 - protein, 42 aa, Artificial Sequence; identical to SEQ ID NO: 23375
  Cyclic GFR-binding peptide
  MOD_RES (6)..(40)..(42): Xaa is C or S

SEQ ID NO: 68672 - protein, 28 aa, Artificial Sequence
  Cyclic GFR-binding peptide
  MOD_RES (3)..(3): Xaa is C or S
PTXAPTKLEPLTVLYYDDSSNVIEQLSN

SEQ ID NO: 68673 - protein, 23 aa, Artificial Sequence
  Cyclic GFR-binding peptide
QALRSVKIAKVVGRKPKVKEVQV

SEQ ID NO: 68674 - protein, 35 aa, Artificial Sequence
  Cyclic GFR-binding peptide
  MOD_RES (6)..(6): Xaa is C or S
VTKPTXAPTKLRSVKVAKVDDSSNVIKEVQVNMVV

SEQ ID NO: 68675 - protein, 35 aa, Artificial Sequence
  Cyclic GFR-binding peptide
  MOD_RES (5)..(6): Xaa is C or S
VPKPXXAPTKLRPVQVRKIDDSSNVIKKATVNMVV

SEQ ID NO: 68676 - protein, 30 aa, Artificial Sequence; identical to SEQ ID NO: 23381
  Cyclic GFR-binding peptide
  MOD_RES (2)..(2): Xaa is C or S

SEQ ID NO: 68677 - protein, 27 aa, Artificial Sequence
  Cyclic GFR-binding peptide
DLEPLPIVYYIGKTPKIEQLSNMIVKS

SEQ ID NO: 68678 - protein, 21 aa, Artificial Sequence
  Cyclic GFR-binding peptide
LEPLPIVYYVGRTPKVEQLSN

SEQ ID NO: 68679 - protein, 39 aa, Artificial Sequence
  Cyclic GFR-binding peptide
  MOD_RES (4)..(5)..(37)..(39): Xaa is C or S
PKAXXVPTELRPVQMRKIDENEKVVKKATVDMVVEGXGX

SEQ ID NO: 68680 - protein, 36 aa, Artificial Sequence; identical to SEQ ID NO: 23385
  Cyclic GFR-binding peptide
  MOD_RES (3)..(3): Xaa is C or S

SEQ ID NO: 68681 - protein, 24 aa, Artificial Sequence
  Cyclic GFR-binding peptide
EPLPVVYYEYVRKKPKLEQLSNRL

SEQ ID NO: 68682 - protein, 24 aa, Artificial Sequence
  Cyclic GFR-binding peptide
TELSNITMQIMDEYDKVVIGEMSE

SEQ ID NO: 68683 - protein, 35 aa, Artificial Sequence; identical to SEQ ID NO: 23387
  Cyclic GFR-binding peptide
  MOD_RES (3)..(3): Xaa is C or S

SEQ ID NO: 68684 - protein, 29 aa, Artificial Sequence
  Cyclic GFR-binding peptide
PTKLRSVKVAKVDDSSNVIKEVQVNMVVR

SEQ ID NO: 68685 - protein, 32 aa, Artificial Sequence; identical to SEQ ID NO: 16840
  Cyclic GFR-binding peptide
  MOD_RES (3)..(3): Xaa is C or S

SEQ ID NO: 68686 - protein, 24 aa, Artificial Sequence
  Cyclic GFR-binding peptide
SNITIQIMVGRTPKVIGEMSMVVK

SEQ ID NO: 68687 - protein, 31 aa, Artificial Sequence; identical to SEQ ID NO: 23398
  Cyclic GFR-binding peptide
  MOD_RES (2)..(2): Xaa is C or S

SEQ ID NO: 68688 - protein, 28 aa, Artificial Sequence
  Cyclic GFR-binding peptide
  MOD_RES (1)..(2): Xaa is C or S
XXVPQALRPVQIRKIVGRKPKVKKATVM

SEQ ID NO: 68689 - protein, 29 aa, Artificial Sequence
  Cyclic GFR-binding peptide
  MOD_RES (1)..(1): Xaa is C or S
XVPTEEEPLPMVYYRIKPHQGQHEQLSNF

SEQ ID NO: 68690 - protein, 34 aa, Artificial Sequence
  Cyclic GFR-binding peptide
  MOD_RES (4)..(4): Xaa is C or S
KPTXAPTKLSNITVQIMDDSSNVIIGEMSNMVVR

SEQ ID NO: 68691 - protein, 30 aa, Artificial Sequence
  Cyclic GFR-binding peptide
  MOD_RES (4)..(5): Xaa is C or S
PKPXXAPTKLRSVKVAKVDDSSNVIKEVQV

SEQ ID NO: 68692 - protein, 32 aa, Artificial Sequence; identical to SEQ ID NO: 16855
  Cyclic GFR-binding peptide
  MOD_RES (1)..(1): Xaa is C or S

SEQ ID NO: 68693 - protein, 39 aa, Artificial Sequence; identical to SEQ ID NO: 16856
  Cyclic GFR-binding peptide
  MOD_RES (4)..(5)..(37)..(39): Xaa is C or S

SEQ ID NO: 68694 - protein, 40 aa, Artificial Sequence
  Cyclic GFR-binding peptide
  MOD_RES (6)..(7)..(38)..(40): Xaa is C or S
ASASPXXVPQDLRPVQIRKIVGRTPKVKKATVMVVKSXKX

SEQ ID NO: 68695 - protein, 38 aa, Artificial Sequence; identical to SEQ ID NO: 23405
  Cyclic GFR-binding peptide
  MOD_RES (5)..(5): Xaa is C or S

SEQ ID NO: 68696 - protein, 26 aa, Artificial Sequence
  Cyclic GFR-binding peptide
  MOD_RES (1)..(1): Xaa is C or S
XAPTQLEPLPVVYYDDSSNVIEQLSN

SEQ ID NO: 68697 - protein, 32 aa, Artificial Sequence; identical to SEQ ID NO: 16858
  Cyclic GFR-binding peptide
  MOD_RES (6)..(7): Xaa is C or S

SEQ ID NO: 68698 - protein, 25 aa, Artificial Sequence
  Cyclic GFR-binding peptide
TKLEPLTVLYYDDSSNVIEQLSNNM

SEQ ID NO: 68699 - protein, 32 aa, Artificial Sequence; identical to SEQ ID NO: 23410
  Cyclic GFR-binding peptide
  MOD_RES (30)..(32): Xaa is C or S

SEQ ID NO: 68700 - protein, 30 aa, Artificial Sequence
  Cyclic GFR-binding peptide
EEEPLTMLYYRIKPHQGQHEQLSNFLQHNK

SEQ ID NO: 68701 - protein, 27 aa, Artificial Sequence
  Cyclic GFR-binding peptide
TQVQLSNITVQIMEIVRKKPIFIGEMS

SEQ ID NO: 68702 - protein, 39 aa, Artificial Sequence
  Cyclic GFR-binding peptide
  MOD_RES (4)..(5)..(36)..(38): Xaa is C or S
ASPXXVPQDLRPVQIRKIVGRTPKVKKATVMVVKSXKXS

SEQ ID NO: 68703 - protein, 35 aa, Artificial Sequence
  Cyclic GFR-binding peptide
  MOD_RES (4)..(5): Xaa is C or S
PKAXXVPTELSNITMQIMDENEKVVIGEMSDMVVE

SEQ ID NO: 68704 - protein, 36 aa, Artificial Sequence; identical to SEQ ID NO: 23414
  Cyclic GFR-binding peptide
  MOD_RES (5)..(5): Xaa is C or S

SEQ ID NO: 68705 - protein, 31 aa, Artificial Sequence
  Cyclic GFR-binding peptide
PSRVHHEPLPVVYYEYVRKKPKLEQLSNRLE

SEQ ID NO: 68706 - protein, 25 aa, Artificial Sequence
  Cyclic GFR-binding peptide
LRSVKVAKVDDSSNVIKEVQVNMVV

SEQ ID NO: 68707 - protein, 23 aa, Artificial Sequence
  Cyclic GFR-binding peptide
DLSNITIQIMVGRTPKVIGEMSM

SEQ ID NO: 68708 - protein, 23 aa, Artificial Sequence
  Cyclic GFR-binding peptide
QLRSVKVAKVDDSSNVIKEVQVN

SEQ ID NO: 68709 - protein, 33 aa, Artificial Sequence
  Cyclic GFR-binding peptide
  MOD_RES (5)..(5): Xaa is C or S
EGLEXVPTEEEPLPMVYYRIKPHQGQHEQLSNF

SEQ ID NO: 68710 - protein, 34 aa, Artificial Sequence; identical to SEQ ID NO: 16872
  Cyclic GFR-binding peptide
  MOD_RES (4)..(4): Xaa is C or S

SEQ ID NO: 68711 - protein, 36 aa, Artificial Sequence
  Cyclic GFR-binding peptide
  MOD_RES (35)..(35): Xaa is C or S
TQVQLEPLTVLYYEIVRKKPIFEQLSNTLEDHLAXK

SEQ ID NO: 68712 - protein, 31 aa, Artificial Sequence
  Cyclic GFR-binding peptide
  MOD_RES (5)..(6): Xaa is C or S
SAAPXXVPQALRPVQIRKIVGRKPKVKKATV

SEQ ID NO: 68713 - protein, 35 aa, Artificial Sequence
  Cyclic GFR-binding peptide
  MOD_RES (2)..(3)..(35): Xaa is C or S
PXXAPTKLRPVQVRKIDDSSNVIKKATVNMVVRSX

SEQ ID NO: 68714 - protein, 35 aa, Artificial Sequence
  Cyclic GFR-binding peptide
  MOD_RES (4)..(4): Xaa is C or S
NVQXRPTQVQLEPLTVLYYEIVRKKPIFEQLSNTL

SEQ ID NO: 68715 - protein, 27 aa, Artificial Sequence
  Cyclic GFR-binding peptide
RPVQMRKIRIKPHQGQHKKATVFLQHN

SEQ ID NO: 68716 - protein, 32 aa, Artificial Sequence; identical to SEQ ID NO: 23426
  Cyclic GFR-binding peptide

SEQ ID NO: 68717 - protein, 27 aa, Artificial Sequence
  Cyclic GFR-binding peptide
QLEPLPVVYYEIVRKKPIFEQLSNTLE

SEQ ID NO: 68718 - protein, 29 aa, Artificial Sequence
  Cyclic GFR-binding peptide
  MOD_RES (29)..(29): Xaa is C or S
QALSNITIQIMVGRKPKVIGEMSMIVRSX

SEQ ID NO: 68719 - protein, 28 aa, Artificial Sequence
  Cyclic GFR-binding peptide
  MOD_RES (27)..(27): Xaa is C or S
EPLPVVYYDDSSNVIEQLSNNMVVRSXG

SEQ ID NO: 68720 - protein, 25 aa, Artificial Sequence
  Cyclic GFR-binding peptide
RPVQVRKIDDSSNVIKKATVNMVVR

SEQ ID NO: 68721 - protein, 28 aa, Artificial Sequence
  Cyclic GFR-binding peptide
TKLRSVKVAKVDDSSNVIKEVQVNMVVR

SEQ ID NO: 68722 - protein, 41 aa, Artificial Sequence; identical to SEQ ID NO: 23431
  Cyclic GFR-binding peptide
  MOD_RES (4)..(41): Xaa is C or S

SEQ ID NO: 68723 - protein, 32 aa, Artificial Sequence; identical to SEQ ID NO: 23433
  Cyclic GFR-binding peptide
  MOD_RES (2)..(2): Xaa is C or S

SEQ ID NO: 68724 - protein, 34 aa, Artificial Sequence
  Cyclic GFR-binding peptide
  MOD_RES (1)..(32)..(34): Xaa is C or S
XVSQDLSNITIQIMIGKTPKIIGEMSMIVKSXKX

SEQ ID NO: 68725 - protein, 36 aa, Artificial Sequence; identical to SEQ ID NO: 23435
  Cyclic GFR-binding peptide
  MOD_RES (2)..(36): Xaa is C or S

SEQ ID NO: 68726 - protein, 28 aa, Artificial Sequence
  Cyclic GFR-binding peptide
ELEPLPMVYYDEYDKVVEQLSNEMVVEG

SEQ ID NO: 68727 - protein, 34 aa, Artificial Sequence
  Cyclic GFR-binding peptide
  MOD_RES (4)..(5): Xaa is C or S
PKPXXAPTKLRSVKVAKVDDSSNVIKEVQVNMVV

SEQ ID NO: 68728 - protein, 31 aa, Artificial Sequence
  Cyclic GFR-binding peptide
QVQLEPLTVLYYEIVRKKPIFEQLSNTLEDH

SEQ ID NO: 68729 - protein, 30 aa, Artificial Sequence; identical to SEQ ID NO: 16891
  Cyclic GFR-binding peptide
  MOD_RES (1)..(2): Xaa is C or S

SEQ ID NO: 68730 - protein, 34 aa, Artificial Sequence
  Cyclic GFR-binding peptide
  MOD_RES (7)..(7): Xaa is C or S
NDEGLEXVPTEEEPLPMVYYRIKPHQGQHEQLSN

SEQ ID NO: 68731 - protein, 34 aa, Artificial Sequence; identical to SEQ ID NO: 16892
  Cyclic GFR-binding peptide
  MOD_RES (2)..(3): Xaa is C or S

SEQ ID NO: 68732 - protein, 31 aa, Artificial Sequence
  Cyclic GFR-binding peptide
  MOD_RES (5)..(6): Xaa is C or S
VPKPXXAPTKLRPVQVRKIDDSSNVIKKATV

SEQ ID NO: 68733 - protein, 32 aa, Artificial Sequence
  Cyclic GFR-binding peptide
  MOD_RES (3)..(4): Xaa is C or S
KPXXAPTQLRSVKVAKVDDSSNVIKEVQVNMV

SEQ ID NO: 68734 - protein, 32 aa, Artificial Sequence; identical to SEQ ID NO: 16894
  Cyclic GFR-binding peptide
  MOD_RES (4)..(5): Xaa is C or S

SEQ ID NO: 68735 - protein, 33 aa, Artificial Sequence; identical to SEQ ID NO: 16895
  Cyclic GFR-binding peptide
  MOD_RES (3)..(4): Xaa is C or S

SEQ ID NO: 68736 - protein, 35 aa, Artificial Sequence; identical to SEQ ID NO: 23442
  Cyclic GFR-binding peptide
  MOD_RES (2)..(2): Xaa is C or S

SEQ ID NO: 68737 - protein, 29 aa, Artificial Sequence
  Cyclic GFR-binding peptide
TELRSVKMAKVDEYDKVVKEVQVEMVVEG

SEQ ID NO: 68738 - protein, 40 aa, Artificial Sequence
  Cyclic GFR-binding peptide
  MOD_RES (6)..(7)..(38)..(40): Xaa is C or S
ASASPXXVSQDLRSVKIAKVIGKTPKIKEVQVMIVKSXKX

SEQ ID NO: 68739 - protein, 30 aa, Artificial Sequence; identical to SEQ ID NO: 16905
  Cyclic GFR-binding peptide

SEQ ID NO: 68740 - protein, 31 aa, Artificial Sequence
  Cyclic GFR-binding peptide
  MOD_RES (30)..(30): Xaa is C or S
TQLSNITVQIMDDSSNVIIGEMSNMVVRAXG

SEQ ID NO: 68741 - protein, 24 aa, Artificial Sequence
  Cyclic GFR-binding peptide
TELEPLPMVYYDENEKVVEQLSND

SEQ ID NO: 68742 - protein, 31 aa, Artificial Sequence
  Cyclic GFR-binding peptide
  MOD_RES (28)..(30): Xaa is C or S
DLSNITIQIMVGRTPKVIGEMSMVVKSXKXS

SEQ ID NO: 68743 - protein, 38 aa, Artificial Sequence; identical to SEQ ID NO: 16910
  Cyclic GFR-binding peptide
  MOD_RES (2)..(3)..(35)..(37): Xaa is C or S

SEQ ID NO: 68744 - protein, 32 aa, Artificial Sequence; identical to SEQ ID NO: 16911
  Cyclic GFR-binding peptide
  MOD_RES (30)..(32): Xaa is C or S

SEQ ID NO: 68745 - protein, 32 aa, Artificial Sequence
  Cyclic GFR-binding peptide
PTEEEPLTMLYYRIKPHQGQHEQLSNFLQHNK

SEQ ID NO: 68746 - protein, 31 aa, Artificial Sequence
  Cyclic GFR-binding peptide
  MOD_RES (31)..(31): Xaa is C or S
LEPLPVVYYEIVRKKPIFEQLSNTLEDHLAX

SEQ ID NO: 68747 - protein, 35 aa, Artificial Sequence
  Cyclic GFR-binding peptide
  MOD_RES (3)..(4)..(35): Xaa is C or S
APXXVPQALRSVKIAKVVGRKPKVKEVQVMIVRSX

SEQ ID NO: 68748 - protein, 32 aa, Artificial Sequence
  Cyclic GFR-binding peptide
  MOD_RES (6)..(6): Xaa is C or S
VTKPTXAPTKLRSVKVAKVDDSSNVIKEVQVN

SEQ ID NO: 68749 - protein, 22 aa, Artificial Sequence
  Cyclic GFR-binding peptide
LEPLPMVYYDENEKVVEQLSND

SEQ ID NO: 68750 - protein, 28 aa, Artificial Sequence
  Cyclic GFR-binding peptide
  MOD_RES (27)..(27): Xaa is C or S
RSVKVAKVDDSSNVIKEVQVNMVVRSXG

SEQ ID NO: 68751 - protein, 30 aa, Artificial Sequence
  Cyclic GFR-binding peptide
  MOD_RES (1)..(2): Xaa is C or S
XXVPQDLRPVQIRKIVGRTPKVKKATVMVV

SEQ ID NO: 68752 - protein, 38 aa, Artificial Sequence
  Cyclic GFR-binding peptide
  MOD_RES (1)..(38): Xaa is C or S
XQPSRVHHEPLPVVYYEYVRKKPKLEQLSNRLEEHLEX

SEQ ID NO: 68753 - protein, 28 aa, Artificial Sequence
  Cyclic GFR-binding peptide
  MOD_RES (2)..(3): Xaa is C or S
AXXVPTELRSVKMAKVDENEKVVKEVQV

SEQ ID NO: 68754 - protein, 31 aa, Artificial Sequence
  Cyclic GFR-binding peptide
  MOD_RES (2)..(3): Xaa is C or S
PXXAPTKLRSVKVAKVDDSSNVIKEVQVNMV

SEQ ID NO: 68755 - protein, 39 aa, Artificial Sequence
  Cyclic GFR-binding peptide
  MOD_RES (5)..(6)..(37)..(39): Xaa is C or S
SASPXXVPQDLRSVKIAKVVGRTPKVKEVQVMVVKSXKX

SEQ ID NO: 68756 - protein, 33 aa, Artificial Sequence; identical to SEQ ID NO: 16923
  Cyclic GFR-binding peptide
  MOD_RES (5)..(6): Xaa is C or S

SEQ ID NO: 68757 - protein, 33 aa, Artificial Sequence
  Cyclic GFR-binding peptide
  MOD_RES (5)..(6): Xaa is C or S
SASPXXVSQDLRSVKIAKVIGKTPKIKEVQVMI

SEQ ID NO: 68758 - protein, 34 aa, Artificial Sequence
  Cyclic GFR-binding peptide
  MOD_RES (4)..(4): Xaa is C or S
KPTXAPTKLRSVKVAKVDDSSNVIKEVQVNMVVR

SEQ ID NO: 68759 - protein, 25 aa, Artificial Sequence
  Cyclic GFR-binding peptide
PTELSNITMQIMDEYDKVVIGEMSE

SEQ ID NO: 68760 - protein, 38 aa, Artificial Sequence
  Cyclic GFR-binding peptide
  MOD_RES (3)..(4)..(36)..(38): Xaa is C or S
KPXXAPTQLRSVKVAKVDDSSNVIKEVQVNMVVRAXGX

SEQ ID NO: 68761 - protein, 34 aa, Artificial Sequence
  Cyclic GFR-binding peptide
  MOD_RES (33)..(33): Xaa is C or S
VQLEPLTVLYYEIVRKKPIFEQLSNTLEDHLAXK

SEQ ID NO: 68762 - protein, 33 aa, Artificial Sequence; identical to SEQ ID NO: 16934
  Cyclic GFR-binding peptide
  MOD_RES (4)..(5): Xaa is C or S

SEQ ID NO: 68763 - protein, 26 aa, Artificial Sequence
  Cyclic GFR-binding peptide
PTEEEPLPMVYYRIKPHQGQHEQLSN

SEQ ID NO: 68764 - protein, 33 aa, Artificial Sequence
  Cyclic GFR-binding peptide
SRVHHEPLPVVYYEYVRKKPKLEQLSNRLEEHL

SEQ ID NO: 68765 - protein, 28 aa, Artificial Sequence
  Cyclic GFR-binding peptide
QALRPVQIRKIVGRKPKVKKATVMIVRS

SEQ ID NO: 68766 - protein, 27 aa, Artificial Sequence
  Cyclic GFR-binding peptide
TELRPVQMRKIDEYDKVVKKATVEMVV

SEQ ID NO: 68767 - protein, 30 aa, Artificial Sequence; identical to SEQ ID NO: 16946
  Cyclic GFR-binding peptide
  MOD_RES (3)..(4): Xaa is C or S

SEQ ID NO: 68768 - protein, 22 aa, Artificial Sequence
  Cyclic GFR-binding peptide
LSNITIQIMVGRTPKVIGEMSM

SEQ ID NO: 68769 - protein, 28 aa, Artificial Sequence
  Cyclic GFR-binding peptide
TKLSNITVQIMDDSSNVIIGEMSNMVVR

SEQ ID NO: 68770 - protein, 35 aa, Artificial Sequence
  Cyclic GFR-binding peptide
  MOD_RES (4)..(5): Xaa is C or S
ASPXXVSQDLRPVQIRKIIGKTPKIKKATVMIVKS

SEQ ID NO: 68771 - protein, 26 aa, Artificial Sequence
  Cyclic GFR-binding peptide
ELRSVKMAKVDEYDKVVKEVQVEMVV

SEQ ID NO: 68772 - protein, 27 aa, Artificial Sequence
  Cyclic GFR-binding peptide
APTKLRPVQVRKIDDSSNVIKKATVNM

SEQ ID NO: 68773 - protein, 43 aa, Artificial Sequence; identical to SEQ ID NO: 23495
  Cyclic GFR-binding peptide
  MOD_RES (5)..(42): Xaa is C or S

SEQ ID NO: 68774 - protein, 22 aa, Artificial Sequence
  Cyclic GFR-binding peptide
RPVQVRKIEYVRKKPKLKKATV

SEQ ID NO: 68775 - protein, 34 aa, Artificial Sequence
  Cyclic GFR-binding peptide
  MOD_RES (32)..(34): Xaa is C or S
APTKLSNITVQIMDDSSNVIIGEMSNMVVRSXGX

SEQ ID NO: 68776 - protein, 28 aa, Artificial Sequence
  Cyclic GFR-binding peptide
QLEPLPVVYYEIVRKKPIFEQLSNTLED

SEQ ID NO: 68777 - protein, 33 aa, Artificial Sequence; identical to SEQ ID NO: 16975
  Cyclic GFR-binding peptide
  MOD_RES (31)..(33): Xaa is C or S

SEQ ID NO: 68778 - protein, 27 aa, Artificial Sequence
  Cyclic GFR-binding peptide
  MOD_RES (2)..(2): Xaa is C or S
TXAPTKLRPVQVRKIDDSSNVIKKATV

SEQ ID NO: 68779 - protein, 32 aa, Artificial Sequence
  Cyclic GFR-binding peptide
  MOD_RES (3)..(4): Xaa is C or S
KAXXVPTELSNITMQIMDENEKVVIGEMSDMV

SEQ ID NO: 68780 - protein, 32 aa, Artificial Sequence; identical to SEQ ID NO: 23504
  Cyclic GFR-binding peptide
  MOD_RES (1)..(1): Xaa is C or S

SEQ ID NO: 68781 - protein, 31 aa, Artificial Sequence
  Cyclic GFR-binding peptide
  MOD_RES (31)..(31): Xaa is C or S
VPQALRSVKIAKVVGRKPKVKEVQVMIVRSX

SEQ ID NO: 68782 - protein, 37 aa, Artificial Sequence
  Cyclic GFR-binding peptide
  MOD_RES (1)..(2)..(34)..(36): Xaa is C or S
XXVPTELRPVQMRKIDEYDKVVKKATVEMVVEGXGXR

SEQ ID NO: 68783 - protein, 20 aa, Artificial Sequence
  Cyclic GFR-binding peptide
RPVQVRKIDDSSNVIKKATV

SEQ ID NO: 68784 - protein, 29 aa, Artificial Sequence
  Cyclic GFR-binding peptide
PSRVHHEPLPVVYYEYVRKKPKLEQLSNR

SEQ ID NO: 68785 - protein, 34 aa, Artificial Sequence
  Cyclic GFR-binding peptide
  MOD_RES (3)..(4): Xaa is C or S
SPXXVPQDLRSVKIAKVVGRTPKVKEVQVMVVKS

SEQ ID NO: 68786 - protein, 34 aa, Artificial Sequence; identical to SEQ ID NO: 16989
  Cyclic GFR-binding peptide
  MOD_RES (3)..(3): Xaa is C or S

SEQ ID NO: 68787 - protein, 25 aa, Artificial Sequence
  Cyclic GFR-binding peptide
TELRPVQMRKIDEYDKVVKKATVEM

SEQ ID NO: 68788 - protein, 29 aa, Artificial Sequence
  Cyclic GFR-binding peptide
  MOD_RES (3)..(4): Xaa is C or S
SPXXVSQDLRPVQIRKIIGKTPKIKKATV

SEQ ID NO: 68789 - protein, 30 aa, Artificial Sequence; identical to SEQ ID NO: 23520
  Cyclic GFR-binding peptide

SEQ ID NO: 68790 - protein, 38 aa, Artificial Sequence
  Cyclic GFR-binding peptide
  MOD_RES (5)..(6)..(38): Xaa is C or S
IPKAXXVPTELRPVQMRKIDEYDKVVKKATVEMVVEGX

SEQ ID NO: 68791 - protein, 40 aa, Artificial Sequence
  Cyclic GFR-binding peptide
  MOD_RES (5)..(6)..(38)..(40): Xaa is C or S
VPKPXXAPTQLRPVQVRKIDDSSNVIKKATVNMVVRAXGX

SEQ ID NO: 68792 - protein, 32 aa, Artificial Sequence
  Cyclic GFR-binding peptide
  MOD_RES (4)..(5): Xaa is C or S
PKPXXAPTQLRSVKVAKVDDSSNVIKEVQVNM

SEQ ID NO: 68793 - protein, 30 aa, Artificial Sequence; identical to SEQ ID NO: 16994
  Cyclic GFR-binding peptide
  MOD_RES (27)..(29): Xaa is C or S

SEQ ID NO: 68794 - protein, 32 aa, Artificial Sequence; identical to SEQ ID NO: 16995
  Cyclic GFR-binding peptide
  MOD_RES (29)..(31): Xaa is C or S

SEQ ID NO: 68795 - protein, 33 aa, Artificial Sequence
  Cyclic GFR-binding peptide
  MOD_RES (2)..(3): Xaa is C or S
PXXAPTQLSNITVQIMDDSSNVIIGEMSNMVVR

SEQ ID NO: 68796 - protein, 33 aa, Artificial Sequence; identical to SEQ ID NO: 16999
  Cyclic GFR-binding peptide
  MOD_RES (6)..(7): Xaa is C or S

SEQ ID NO: 68797 - protein, 38 aa, Artificial Sequence; identical to SEQ ID NO: 23527
  Cyclic GFR-binding peptide
  MOD_RES (2)..(2): Xaa is C or S

SEQ ID NO: 68798 - protein, 35 aa, Artificial Sequence
  Cyclic GFR-binding peptide
  MOD_RES (3)..(4): Xaa is C or S
KAXXVPTELSNITMQIMDENEKVVIGEMSDMVVEG

SEQ ID NO: 68799 - protein, 30 aa, Artificial Sequence; identical to SEQ ID NO: 17002
  Cyclic GFR-binding peptide
  MOD_RES (28)..(30): Xaa is C or S

SEQ ID NO: 68800 - protein, 29 aa, Artificial Sequence
  Cyclic GFR-binding peptide
PTKLEPLTVLYYDDSSNVIEQLSNNMVVR

SEQ ID NO: 68801 - protein, 33 aa, Artificial Sequence
  Cyclic GFR-binding peptide
  MOD_RES (5)..(6): Xaa is C or S
SAAPXXVPQALRPVQIRKIVGRKPKVKKATVMI

SEQ ID NO: 68802 - protein, 30 aa, Artificial Sequence; identical to SEQ ID NO: 17007
  Cyclic GFR-binding peptide

SEQ ID NO: 68803 - protein, 27 aa, Artificial Sequence
  Cyclic GFR-binding peptide
  MOD_RES (1)..(2): Xaa is C or S
XXAPTKLSNITVQIMDDSSNVIIGEMS

SEQ ID NO: 68804 - protein, 35 aa, Artificial Sequence
  Cyclic GFR-binding peptide
  MOD_RES (2)..(3)..(34): Xaa is C or S
PXXVPQDLRSVKIAKVVGRTPKVKEVQVMVVKSXK

SEQ ID NO: 68805 - protein, 30 aa, Artificial Sequence
  Cyclic GFR-binding peptide
  MOD_RES (1)..(2): Xaa is C or S
XXAPTKLRPVQVRKIDDSSNVIKKATVNMV

SEQ ID NO: 68806 - protein, 24 aa, Artificial Sequence
  Cyclic GFR-binding peptide
KLRPVQVRKIDDSSNVIKKATVNM

SEQ ID NO: 68807 - protein, 41 aa, Artificial Sequence; identical to SEQ ID NO: 23539
  Cyclic GFR-binding peptide
  MOD_RES (3)..(40): Xaa is C or S

SEQ ID NO: 68808 - protein, 30 aa, Artificial Sequence
  Cyclic GFR-binding peptide
VSQDLRSVKIAKVIGKTPKIKEVQVMIVKS

SEQ ID NO: 68809 - protein, 36 aa, Artificial Sequence; identical to SEQ ID NO: 17010
  Cyclic GFR-binding peptide
  MOD_RES (6)..(7): Xaa is C or S

SEQ ID NO: 68810 - protein, 30 aa, Artificial Sequence
  Cyclic GFR-binding peptide
  MOD_RES (28)..(30): Xaa is C or S
LSNITMQIMDEYDKVVIGEMSEMVVEGXGX

SEQ ID NO: 68811 - protein, 26 aa, Artificial Sequence
  Cyclic GFR-binding peptide
APTKLEPLPVVYYDDSSNVIEQLSNN

SEQ ID NO: 68812 - protein, 34 aa, Artificial Sequence
  Cyclic GFR-binding peptide
  MOD_RES (31)..(33): Xaa is C or S
PTELRSVKMAKVDEYDKVVKEVQVEMVVEGXGXR

SEQ ID NO: 68813 - protein, 32 aa, Artificial Sequence
  Cyclic GFR-binding peptide
  MOD_RES (5)..(6): Xaa is C or S
SASPXXVSQDLSNITIQIMIGKTPKIIGEMSM

SEQ ID NO: 68814 - protein, 26 aa, Artificial Sequence
  Cyclic GFR-binding peptide
LEPLPMVYYDEYDKVVEQLSNEMVVE

SEQ ID NO: 68815 - protein, 27 aa, Artificial Sequence
  Cyclic GFR-binding peptide
EPLTVLYYEYVRKKPKLEQLSNRLEEH

SEQ ID NO: 68816 - protein, 35 aa, Artificial Sequence
  Cyclic GFR-binding peptide
  MOD_RES (5)..(6): Xaa is C or S
VPKPXXAPTQLSNITVQIMDDSSNVIIGEMSNMVV

SEQ ID NO: 68817 - protein, 25 aa, Artificial Sequence
  Cyclic GFR-binding peptide
LSNITMQIMDEYDKVVIGEMSEMVV

SEQ ID NO: 68818 - protein, 36 aa, Artificial Sequence; identical to SEQ ID NO: 17022
  Cyclic GFR-binding peptide
  MOD_RES (2)..(3)..(35): Xaa is C or S

SEQ ID NO: 68819 - protein, 34 aa, Artificial Sequence
  Cyclic GFR-binding peptide
  MOD_RES (1)..(32)..(34): Xaa is C or S
XVPQDLSNITIQIMVGRTPKVIGEMSMVVKSXKX

SEQ ID NO: 68820 - protein, 24 aa, Artificial Sequence
  Cyclic GFR-binding peptide
PQDLEPLPIVYYVGRTPKVEQLSN

SEQ ID NO: 68821 - protein, 24 aa, Artificial Sequence
  Cyclic GFR-binding peptide
QDLRSVKIAKVVGRTPKVKEVQVM

SEQ ID NO: 68822 - protein, 28 aa, Artificial Sequence
  Cyclic GFR-binding peptide
VPTEERPVQMRKIRIKPHQGQHKKATVF

SEQ ID NO: 68823 - protein, 28 aa, Artificial Sequence
  Cyclic GFR-binding peptide
PTKLEPLTVLYYDDSSNVIEQLSNNMVV

SEQ ID NO: 68824 - protein, 39 aa, Artificial Sequence; identical to SEQ ID NO: 17032
  Cyclic GFR-binding peptide
  MOD_RES (4)..(5)..(37)..(39): Xaa is C or S

SEQ ID NO: 68825 - protein, 37 aa, Artificial Sequence; identical to SEQ ID NO: 23557
  Cyclic GFR-binding peptide
  MOD_RES (4)..(4): Xaa is C or S

SEQ ID NO: 68826 - protein, 32 aa, Artificial Sequence
  Cyclic GFR-binding peptide
  MOD_RES (3)..(4): Xaa is C or S
KPXXAPTQLSNITVQIMDDSSNVIIGEMSNMV

SEQ ID NO: 68827 - protein, 32 aa, Artificial Sequence; identical to SEQ ID NO: 17043
  Cyclic GFR-binding peptide
  MOD_RES (32)..(32): Xaa is C or S

SEQ ID NO: 68828 - protein, 27 aa, Artificial Sequence
  Cyclic GFR-binding peptide
  MOD_RES (1)..(2): Xaa is C or S
XXAPTKLRPVQVRKIDDSSNVIKKATV

SEQ ID NO: 68829 - protein, 31 aa, Artificial Sequence
  Cyclic GFR-binding peptide
VHHEPLPVVYYEYVRKKPKLEQLSNRLEEHL

SEQ ID NO: 68830 - protein, 37 aa, Artificial Sequence
  Cyclic GFR-binding peptide
  MOD_RES (4)..(5)..(36): Xaa is C or S
ASPXXVPQDLSNITIQIMVGRTPKVIGEMSMVVKSXK

SEQ ID NO: 68831 - protein, 32 aa, Artificial Sequence
  Cyclic GFR-binding peptide
  MOD_RES (4)..(4): Xaa is C or S
KPTXAPTKLRPVQVRKIDDSSNVIKKATVNMV

SEQ ID NO: 68832 - protein, 30 aa, Artificial Sequence; identical to SEQ ID NO: 23563
  Cyclic GFR-binding peptide

SEQ ID NO: 68833 - protein, 35 aa, Artificial Sequence
  Cyclic GFR-binding peptide
  MOD_RES (35)..(35): Xaa is C or S
TQVQLEPLPVVYYEIVRKKPIFEQLSNTLEDHLAX

SEQ ID NO: 68834 - protein, 39 aa, Artificial Sequence
  Cyclic GFR-binding peptide
  MOD_RES (5)..(6)..(38): Xaa is C or S
IPKAXXVPTELSNITMQIMDENEKVVIGEMSDMVVEGXG

SEQ ID NO: 68835 - protein, 24 aa, Artificial Sequence
  Cyclic GFR-binding peptide
PTKLRPVQVRKIDDSSNVIKKATV

SEQ ID NO: 68836 - protein, 30 aa, Artificial Sequence; identical to SEQ ID NO: 23566
  Cyclic GFR-binding peptide

SEQ ID NO: 68837 - protein, 30 aa, Artificial Sequence
  Cyclic GFR-binding peptide
  MOD_RES (4)..(5): Xaa is C or S
ASPXXVPQDLSNITIQIMVGRTPKVIGEMS

SEQ ID NO: 68838 - protein, 40 aa, Artificial Sequence
  Cyclic GFR-binding peptide
  MOD_RES (37)..(39): Xaa is C or S
RPTQVQLEPLPVVYYEIVRKKPIFEQLSNTLEDHLAXKXE

SEQ ID NO: 68839 - protein, 33 aa, Artificial Sequence
  Cyclic GFR-binding peptide
  MOD_RES (1)..(2): Xaa is C or S
XXVPTELSNITMQIMDENEKVVIGEMSDMVVEG

SEQ ID NO: 68840 - protein, 34 aa, Artificial Sequence
  Cyclic GFR-binding peptide
  MOD_RES (2)..(3)..(34): Xaa is C or S
PXXVPQDLRSVKIAKVVGRTPKVKEVQVMVVKSX

SEQ ID NO: 68841 - protein, 41 aa, Artificial Sequence; identical to SEQ ID NO: 17062
  Cyclic GFR-binding peptide
  MOD_RES (6)..(38)..(40): Xaa is C or S

SEQ ID NO: 68842 - protein, 29 aa, Artificial Sequence
  Cyclic GFR-binding peptide
  MOD_RES (27)..(29): Xaa is C or S
RSVKMAKVDENEKVVKEVQVDMVVEGXGX

SEQ ID NO: 68843 - protein, 29 aa, Artificial Sequence
  Cyclic GFR-binding peptide
  MOD_RES (27)..(29): Xaa is C or S
LSNITIQIMVGRTPKVIGEMSMVVKSXKX

SEQ ID NO: 68844 - protein, 26 aa, Artificial Sequence
  Cyclic GFR-binding peptide
  MOD_RES (1)..(1): Xaa is C or S
XVSQDLSNITIQIMIGKTPKIIGEMS

SEQ ID NO: 68845 - protein, 26 aa, Artificial Sequence
  Cyclic GFR-binding peptide
SQDLEPLPIVYYIGKTPKIEQLSNMI

SEQ ID NO: 68846 - protein, 31 aa, Artificial Sequence
  Cyclic GFR-binding peptide
  MOD_RES (6)..(6): Xaa is C or S
VTKPTXAPTKLRSVKVAKVDDSSNVIKEVQV

SEQ ID NO: 68847 - protein, 23 aa, Artificial Sequence
  Cyclic GFR-binding peptide
RPVQMRKIDENEKVVKKATVDMV

SEQ ID NO: 68848 - protein, 29 aa, Artificial Sequence
  Cyclic GFR-binding peptide
  MOD_RES (1)..(2): Xaa is C or S
XXVPQDLRPVQIRKIVGRTPKVKKATVMV

SEQ ID NO: 68849 - protein, 29 aa, Artificial Sequence
  Cyclic GFR-binding peptide
PTKLEPLPVVYYDDSSNVIEQLSNNMVVR

SEQ ID NO: 68850 - protein, 28 aa, Artificial Sequence
  Cyclic GFR-binding peptide
TQVQLEPLTVLYYEIVRKKPIFEQLSNT

SEQ ID NO: 68851 - protein, 30 aa, Artificial Sequence
  Cyclic GFR-binding peptide
  MOD_RES (2)..(3): Xaa is C or S
AXXVPTELRSVKMAKVDENEKVVKEVQVDM

SEQ ID NO: 68852 - protein, 27 aa, Artificial Sequence
  Cyclic GFR-binding peptide
  MOD_RES (26)..(26): Xaa is C or S
EPLPIVYYIGKTPKIEQLSNMIVKSXK

SEQ ID NO: 68853 - protein, 25 aa, Artificial Sequence
  Cyclic GFR-binding peptide
QDLEPLPIVYYVGRTPKVEQLSNMV

SEQ ID NO: 68854 - protein, 28 aa, Artificial Sequence
  Cyclic GFR-binding peptide
  MOD_RES (3)..(3): Xaa is C or S
PTXAPTKLRPVQVRKIDDSSNVIKKATV

SEQ ID NO: 68855 - protein, 30 aa, Artificial Sequence
  Cyclic GFR-binding peptide
  MOD_RES (3)..(4): Xaa is C or S
KPXXAPTQLSNITVQIMDDSSNVIIGEMSN

SEQ ID NO: 68856 - protein, 34 aa, Artificial Sequence
  Cyclic GFR-binding peptide
  MOD_RES (4)..(5): Xaa is C or S
ASPXXVPQDLSNITIQIMVGRTPKVIGEMSMVVK

SEQ ID NO: 68857 - protein, 35 aa, Artificial Sequence
  Cyclic GFR-binding peptide
  MOD_RES (6)..(6): Xaa is C or S
DEGLEXVPTEEEPLPMVYYRIKPHQGQHEQLSNFL

SEQ ID NO: 68858 - protein, 42 aa, Artificial Sequence
  Cyclic GFR-binding peptide
  MOD_RES (7)..(39)..(41): Xaa is C or S
HVTKPTXAPTKLRSVKVAKVDDSSNVIKEVQVNMVVRSXGXH

SEQ ID NO: 68859 - protein, 33 aa, Artificial Sequence
  Cyclic GFR-binding peptide
  MOD_RES (5)..(6): Xaa is C or S
IPKAXXVPTELSNITMQIMDENEKVVIGEMSDM

SEQ ID NO: 68860 - protein, 33 aa, Artificial Sequence
  Cyclic GFR-binding peptide
  MOD_RES (5)..(6): Xaa is C or S
IPKAXXVPTELRSVKMAKVDENEKVVKEVQVDM

SEQ ID NO: 68861 - protein, 28 aa, Artificial Sequence
  Cyclic GFR-binding peptide
  MOD_RES (1)..(2): Xaa is C or S
XXVPTELEPLTMLYYDENEKVVEQLSND

SEQ ID NO: 68862 - protein, 39 aa, Artificial Sequence; identical to SEQ ID NO: 23589
  Cyclic GFR-binding peptide
  MOD_RES (2)..(39): Xaa is C or S

SEQ ID NO: 68863 - protein, 40 aa, Artificial Sequence; identical to SEQ ID NO: 17087
  Cyclic GFR-binding peptide
  MOD_RES (6)..(38)..(40): Xaa is C or S

SEQ ID NO: 68864 - protein, 42 aa, Artificial Sequence; identical to SEQ ID NO: 17090
  Cyclic GFR-binding peptide
  MOD_RES (6)..(7)..(39)..(41): Xaa is C or S

SEQ ID NO: 68865 - protein, 30 aa, Artificial Sequence; identical to SEQ ID NO: 17092
  Cyclic GFR-binding peptide
  MOD_RES (1)..(1): Xaa is C or S

SEQ ID NO: 68866 - protein, 28 aa, Artificial Sequence
  Cyclic GFR-binding peptide
PTQLRPVQVRKIDDSSNVIKKATVNMVV

SEQ ID NO: 68867 - protein, 36 aa, Artificial Sequence; identical to SEQ ID NO: 17094
  Cyclic GFR-binding peptide
  MOD_RES (1)..(2)..(33)..(35): Xaa is C or S

SEQ ID NO: 68868 - protein, 34 aa, Artificial Sequence
  Cyclic GFR-binding peptide
  MOD_RES (4)..(5): Xaa is C or S
ASPXXVSQDLRPVQIRKIIGKTPKIKKATVMIVK

SEQ ID NO: 68869 - protein, 42 aa, Artificial Sequence; identical to SEQ ID NO: 23595
  Cyclic GFR-binding peptide
  MOD_RES (4)..(41): Xaa is C or S

SEQ ID NO: 68870 - protein, 43 aa, Artificial Sequence; identical to SEQ ID NO: 23597
  Cyclic GFR-binding peptide
  MOD_RES (7)..(41)..(43): Xaa is C or S

SEQ ID NO: 68871 - protein, 40 aa, Artificial Sequence
  Cyclic GFR-binding peptide
  MOD_RES (4)..(4): Xaa is C or S
NVQXRPTQVQLEPLPVVYYEIVRKKPIFEQLSNTLEDHLA

SEQ ID NO: 68872 - protein, 33 aa, Artificial Sequence
  Cyclic GFR-binding peptide
  MOD_RES (6)..(7): Xaa is C or S
SIPKAXXVPTELRSVKMAKVDEYDKVVKEVQVE

SEQ ID NO: 68873 - protein, 34 aa, Artificial Sequence; identical to SEQ ID NO: 23601
  Cyclic GFR-binding peptide

SEQ ID NO: 68874 - protein, 33 aa, Artificial Sequence
  Cyclic GFR-binding peptide
  MOD_RES (1)..(2)..(33): Xaa is C or S
XXVPQALRSVKIAKVVGRKPKVKEVQVMIVRSX

SEQ ID NO: 68875 - protein, 27 aa, Artificial Sequence
  Cyclic GFR-binding peptide
DLRSVKIAKVIGKTPKIKEVQVMIVKS

SEQ ID NO: 68876 - protein, 38 aa, Artificial Sequence
  Cyclic GFR-binding peptide
  MOD_RES (3)..(4)..(35)..(37): Xaa is C or S
SPXXVPQDLSNITIQIMVGRTPKVIGEMSMVVKSXKXS

SEQ ID NO: 68877 - protein, 29 aa, Artificial Sequence
  Cyclic GFR-binding peptide
PQALRPVQIRKIVGRKPKVKKATVMIVRS

SEQ ID NO: 68878 - protein, 28 aa, Artificial Sequence
  Cyclic GFR-binding peptide
  MOD_RES (1)..(1): Xaa is C or S
XVSQDLRPVQIRKIIGKTPKIKKATVMI

SEQ ID NO: 68879 - protein, 39 aa, Artificial Sequence
  Cyclic GFR-binding peptide
  MOD_RES (3)..(37)..(39): Xaa is C or S
LEXVPTEEEPLTMLYYRIKPHQGQHEQLSNFLQHNKXEX

SEQ ID NO: 68880 - protein, 32 aa, Artificial Sequence
  Cyclic GFR-binding peptide
  MOD_RES (3)..(4): Xaa is C or S
SPXXVPQDLRSVKIAKVVGRTPKVKEVQVMVV

SEQ ID NO: 68881 - protein, 22 aa, Artificial Sequence
  Cyclic GFR-binding peptide
DLEPLPIVYYIGKTPKIEQLSN

SEQ ID NO: 68882 - protein, 33 aa, Artificial Sequence
  Cyclic GFR-binding peptide
  MOD_RES (2)..(2): Xaa is C or S
EXVPTEEEPLTMLYYRIKPHQGQHEQLSNFLQH

SEQ ID NO: 68883 - protein, 32 aa, Artificial Sequence
  Cyclic GFR-binding peptide
  MOD_RES (31)..(31): Xaa is C or S
HEPLPVVYYEYVRKKPKLEQLSNRLEEHLEXA

SEQ ID NO: 68884 - protein, 33 aa, Artificial Sequence; identical to SEQ ID NO: 17123
  Cyclic GFR-binding peptide
  MOD_RES (30)..(32): Xaa is C or S

SEQ ID NO: 68885 - protein, 27 aa, Artificial Sequence
  Cyclic GFR-binding peptide
SRVHHEPLTVLYYEYVRKKPKLEQLSN

SEQ ID NO: 68886 - protein, 27 aa, Artificial Sequence
  Cyclic GFR-binding peptide
ERSVKMAKVRIKPHQGQHKEVQVFLQH

SEQ ID NO: 68887 - protein, 31 aa, Artificial Sequence
  Cyclic GFR-binding peptide
  MOD_RES (3)..(4): Xaa is C or S
KAXXVPTELRPVQMRKIDENEKVVKKATVDM

SEQ ID NO: 68888 - protein, 29 aa, Artificial Sequence
  Cyclic GFR-binding peptide
PTQVQLEPLTVLYYEIVRKKPIFEQLSNT

SEQ ID NO: 68889 - protein, 26 aa, Artificial Sequence
  Cyclic GFR-binding peptide
LEPLTMLYYDEYDKVVEQLSNEMVVE

SEQ ID NO: 68890 - protein, 30 aa, Artificial Sequence; identical to SEQ ID NO: 17128
  Cyclic GFR-binding peptide

SEQ ID NO: 68891 - protein, 30 aa, Artificial Sequence
  Cyclic GFR-binding peptide
  MOD_RES (29)..(29): Xaa is C or S
QDLSNITIQIMVGRTPKVIGEMSMVVKSXK

SEQ ID NO: 68892 - protein, 37 aa, Artificial Sequence
  Cyclic GFR-binding peptide
  MOD_RES (4)..(4): Xaa is C or S
GLEXVPTEEEPLPMVYYRIKPHQGQHEQLSNFLQHNK

SEQ ID NO: 68893 - protein, 35 aa, Artificial Sequence; identical to SEQ ID NO: 17129
  Cyclic GFR-binding peptide
  MOD_RES (5)..(6): Xaa is C or S

SEQ ID NO: 68894 - protein, 31 aa, Artificial Sequence
  Cyclic GFR-binding peptide
  MOD_RES (1)..(2): Xaa is C or S
XXVPTELRPVQMRKIDENEKVVKKATVDMVV

SEQ ID NO: 68895 - protein, 31 aa, Artificial Sequence; identical to SEQ ID NO: 17130
  Cyclic GFR-binding peptide
  MOD_RES (5)..(6): Xaa is C or S

SEQ ID NO: 68896 - protein, 26 aa, Artificial Sequence
  Cyclic GFR-binding peptide
VPTELSNITMQIMDENEKVVIGEMSD

SEQ ID NO: 68897 - protein, 37 aa, Artificial Sequence; identical to SEQ ID NO: 17132
  Cyclic GFR-binding peptide
  MOD_RES (1)..(2)..(34)..(36): Xaa is C or S

SEQ ID NO: 68898 - protein, 32 aa, Artificial Sequence
  Cyclic GFR-binding peptide
  MOD_RES (32)..(32): Xaa is C or S
APTQLRSVKVAKVDDSSNVIKEVQVNMVVRAX

SEQ ID NO: 68899 - protein, 38 aa, Artificial Sequence
  Cyclic GFR-binding peptide
  MOD_RES (6)..(7): Xaa is C or S
KIPKAXXVPTELRSVKMAKVDENEKVVKEVQVDMVVEG

SEQ ID NO: 68900 - protein, 33 aa, Artificial Sequence; identical to SEQ ID NO: 17135
  Cyclic GFR-binding peptide
  MOD_RES (2)..(3): Xaa is C or S

SEQ ID NO: 68901 - protein, 21 aa, Artificial Sequence
  Cyclic GFR-binding peptide
SNITVQIMDDSSNVIIGEMSN

SEQ ID NO: 68902 - protein, 40 aa, Artificial Sequence
  Cyclic GFR-binding peptide
  MOD_RES (7)..(39): Xaa is C or S
HVTKPTXAPTKLRSVKVAKVDDSSNVIKEVQVNMVVRSXG

SEQ ID NO: 68903 - protein, 28 aa, Artificial Sequence
  Cyclic GFR-binding peptide
VPTELEPLPMVYYDENEKVVEQLSNDMV

SEQ ID NO: 68904 - protein, 36 aa, Artificial Sequence
  Cyclic GFR-binding peptide
  MOD_RES (1)..(2)..(34)..(36): Xaa is C or S
XXVPTELRSVKMAKVDEYDKVVKEVQVEMVVEGXGX

SEQ ID NO: 68905 - protein, 31 aa, Artificial Sequence
  Cyclic GFR-binding peptide
  MOD_RES (29)..(31): Xaa is C or S
ELSNITMQIMDEYDKVVIGEMSEMVVEGXGX

SEQ ID NO: 68906 - protein, 34 aa, Artificial Sequence
  Cyclic GFR-binding peptide
  MOD_RES (32)..(34): Xaa is C or S
HHEPLPVVYYEYVRKKPKLEQLSNRLEEHLEXAX

SEQ ID NO: 68907 - protein, 38 aa, Artificial Sequence; identical to SEQ ID NO: 17139
  Cyclic GFR-binding peptide
  MOD_RES (4)..(5)..(36)..(38): Xaa is C or S

SEQ ID NO: 68908 - protein, 38 aa, Artificial Sequence
  Cyclic GFR-binding peptide
  MOD_RES (6)..(7): Xaa is C or S
YVPKPXXAPTKLRPVQVRKIDDSSNVIKKATVNMVVRS

SEQ ID NO: 68909 - protein, 28 aa, Artificial Sequence
  Cyclic GFR-binding peptide
  MOD_RES (27)..(27): Xaa is C or S
LRSVKIAKVVGRKPKVKEVQVMIVRSXK

SEQ ID NO: 68910 - protein, 33 aa, Artificial Sequence; identical to SEQ ID NO: 17143
  Cyclic GFR-binding peptide
  MOD_RES (5)..(6): Xaa is C or S

SEQ ID NO: 68911 - protein, 36 aa, Artificial Sequence
  Cyclic GFR-binding peptide
  MOD_RES (2)..(3)..(35): Xaa is C or S
PXXAPTKLRSVKVAKVDDSSNVIKEVQVNMVVRSXG

SEQ ID NO: 68912 - protein, 26 aa, Artificial Sequence
  Cyclic GFR-binding peptide
PTQLRPVQVRKIDDSSNVIKKATVNM

SEQ ID NO: 68913 - protein, 35 aa, Artificial Sequence; identical to SEQ ID NO: 17151
  Cyclic GFR-binding peptide
  MOD_RES (6)..(7): Xaa is C or S

SEQ ID NO: 68914 - protein, 40 aa, Artificial Sequence; identical to SEQ ID NO: 17152
  Cyclic GFR-binding peptide
  MOD_RES (5)..(6)..(38)..(40): Xaa is C or S

SEQ ID NO: 68915 - protein, 30 aa, Artificial Sequence
  Cyclic GFR-binding peptide
  MOD_RES (2)..(3): Xaa is C or S
PXXVSQDLRPVQIRKIIGKTPKIKKATVMI

SEQ ID NO: 68916 - protein, 27 aa, Artificial Sequence
  Cyclic GFR-binding peptide
VQLRSVKVAKVEIVRKKPIFKEVQVTL

SEQ ID NO: 68917 - protein, 40 aa, Artificial Sequence; identical to SEQ ID NO: 17157
  Cyclic GFR-binding peptide
  MOD_RES (4)..(5)..(37)..(39): Xaa is C or S

SEQ ID NO: 68918 - protein, 30 aa, Artificial Sequence; identical to SEQ ID NO: 17158
  Cyclic GFR-binding peptide
  MOD_RES (2)..(3): Xaa is C or S

SEQ ID NO: 68919 - protein, 24 aa, Artificial Sequence
  Cyclic GFR-binding peptide
HSNITVQIMEYVRKKPKLIGEMSR

SEQ ID NO: 68920 - protein, 31 aa, Artificial Sequence; identical to SEQ ID NO: 17159
  Cyclic GFR-binding peptide
  MOD_RES (29)..(31): Xaa is C or S

SEQ ID NO: 68921 - protein, 24 aa, Artificial Sequence
  Cyclic GFR-binding peptide
EPLPMVYYRIKPHQGQHEQLSNFL

SEQ ID NO: 68922 - protein, 33 aa, Artificial Sequence; identical to SEQ ID NO: 23642
  Cyclic GFR-binding peptide
  MOD_RES (32)..(32): Xaa is C or S

SEQ ID NO: 68923 - protein, 30 aa, Artificial Sequence
  Cyclic GFR-binding peptide
  MOD_RES (27)..(29): Xaa is C or S
RSVKVAKVDDSSNVIKEVQVNMVVRSXGXH

SEQ ID NO: 68924 - protein, 34 aa, Artificial Sequence
  Cyclic GFR-binding peptide
  MOD_RES (33)..(33): Xaa is C or S
PTEEEPLPMVYYRIKPHQGQHEQLSNFLQHNKXE

SEQ ID NO: 68925 - protein, 36 aa, Artificial Sequence
  Cyclic GFR-binding peptide
  MOD_RES (4)..(5)..(36): Xaa is C or S
AAPXXVPQALSNITIQIMVGRKPKVIGEMSMIVRSX

SEQ ID NO: 68926 - protein, 35 aa, Artificial Sequence; identical to SEQ ID NO: 17170
  Cyclic GFR-binding peptide
  MOD_RES (1)..(33)..(35): Xaa is C or S

SEQ ID NO: 68927 - protein, 29 aa, Artificial Sequence
  Cyclic GFR-binding peptide
  MOD_RES (1)..(1): Xaa is C or S
XAPTQLRPVQVRKIDDSSNVIKKATVNMV

SEQ ID NO: 68928 - protein, 33 aa, Artificial Sequence
  Cyclic GFR-binding peptide
  MOD_RES (1)..(2)..(33): Xaa is C or S
XXVPQALSNITIQIMVGRKPKVIGEMSMIVRSX

SEQ ID NO: 68929 - protein, 33 aa, Artificial Sequence
  Cyclic GFR-binding peptide
  MOD_RES (4)..(5): Xaa is C or S
ASPXXVSQDLSNITIQIMIGKTPKIIGEMSMIV

SEQ ID NO: 68930 - protein, 29 aa, Artificial Sequence
  Cyclic GFR-binding peptide
  MOD_RES (28)..(28): Xaa is C or S
DLSNITIQIMVGRTPKVIGEMSMVVKSXK

SEQ ID NO: 68931 - protein, 33 aa, Artificial Sequence
  Cyclic GFR-binding peptide
  MOD_RES (2)..(3): Xaa is C or S
AXXVPTELRPVQMRKIDENEKVVKKATVDMVVE

SEQ ID NO: 68932 - protein, 32 aa, Artificial Sequence; identical to SEQ ID NO: 17181
  Cyclic GFR-binding peptide
  MOD_RES (31)..(31): Xaa is C or S

SEQ ID NO: 68933 - protein, 41 aa, Artificial Sequence
  Cyclic GFR-binding peptide
  MOD_RES (6)..(7)..(39)..(41): Xaa is C or S
TVPKPXXAPTQLSNITVQIMDDSSNVIIGEMSNMVVRAXGX

SEQ ID NO: 68934 - protein, 36 aa, Artificial Sequence
  Cyclic GFR-binding peptide
  MOD_RES (4)..(5)..(36): Xaa is C or S
AAPXXVPQALRSVKIAKVVGRKPKVKEVQVMIVRSX

SEQ ID NO: 68935 - protein, 32 aa, Artificial Sequence
  Cyclic GFR-binding peptide
  MOD_RES (5)..(6): Xaa is C or S
SASPXXVPQDLSNITIQIMVGRTPKVIGEMSM

SEQ ID NO: 68936 - protein, 33 aa, Artificial Sequence; identical to SEQ ID NO: 23671
  Cyclic GFR-binding peptide
  MOD_RES (4)..(4): Xaa is C or S

SEQ ID NO: 68937 - protein, 33 aa, Artificial Sequence
  Cyclic GFR-binding peptide
  MOD_RES (32)..(32): Xaa is C or S
APTKLRSVKVAKVDDSSNVIKEVQVNMVVRSXG

SEQ ID NO: 68938 - protein, 32 aa, Artificial Sequence; identical to SEQ ID NO: 17189
  Cyclic GFR-binding peptide
  MOD_RES (29)..(31): Xaa is C or S

SEQ ID NO: 68939 - protein, 29 aa, Artificial Sequence
  Cyclic GFR-binding peptide
  MOD_RES (28)..(28): Xaa is C or S
LSNITMQIMDENEKVVIGEMSDMVVEGXG

SEQ ID NO: 68940 - protein, 27 aa, Artificial Sequence
  Cyclic GFR-binding peptide
  MOD_RES (27)..(27): Xaa is C or S
LRSVKIAKVVGRTPKVKEVQVMVVKSX

SEQ ID NO: 68941 - protein, 28 aa, Artificial Sequence
  Cyclic GFR-binding peptide
SRVHHEPLPVVYYEYVRKKPKLEQLSNR

SEQ ID NO: 68942 - protein, 26 aa, Artificial Sequence
  Cyclic GFR-binding peptide
LRPVQMRKIDENEKVVKKATVDMVVE

SEQ ID NO: 68943 - protein, 40 aa, Artificial Sequence
  Cyclic GFR-binding peptide
  MOD_RES (6)..(40): Xaa is C or S
DEGLEXVPTEEEPLPMVYYRIKPHQGQHEQLSNFLQHNKX

SEQ ID NO: 68944 - protein, 35 aa, Artificial Sequence; identical to SEQ ID NO: 17199
  Cyclic GFR-binding peptide
  MOD_RES (1)..(32)..(34): Xaa is C or S

SEQ ID NO: 68945 - protein, 34 aa, Artificial Sequence
  Cyclic GFR-binding peptide
  MOD_RES (6)..(7): Xaa is C or S
SIPKAXXVPTELRSVKMAKVDEYDKVVKEVQVEM

SEQ ID NO: 68946 - protein, 21 aa, Artificial Sequence
  Cyclic GFR-binding peptide
LRSVKIAKVVGRKPKVKEVQV

SEQ ID NO: 68947 - protein, 34 aa, Artificial Sequence; identical to SEQ ID NO: 17206
  Cyclic GFR-binding peptide
  MOD_RES (4)..(5): Xaa is C or S

SEQ ID NO: 68948 - protein, 41 aa, Artificial Sequence
  Cyclic GFR-binding peptide
  MOD_RES (5)..(6)..(38)..(40): Xaa is C or S
VPKPXXAPTQLSNITVQIMDDSSNVIIGEMSNMVVRAXGXH

SEQ ID NO: 68949 - protein, 27 aa, Artificial Sequence
  Cyclic GFR-binding peptide
LSNITMQIMDEYDKVVIGEMSEMVVEG

SEQ ID NO: 68950 - protein, 36 aa, Artificial Sequence; identical to SEQ ID NO: 23684
  Cyclic GFR-binding peptide

SEQ ID NO: 68951 - protein, 33 aa, Artificial Sequence; identical to SEQ ID NO: 17209
  Cyclic GFR-binding peptide
  MOD_RES (2)..(3): Xaa is C or S

SEQ ID NO: 68952 - protein, 31 aa, Artificial Sequence
  Cyclic GFR-binding peptide
  MOD_RES (31)..(31): Xaa is C or S
VPQALSNITIQIMVGRKPKVIGEMSMIVRSX

SEQ ID NO: 68953 - protein, 32 aa, Artificial Sequence; identical to SEQ ID NO: 23685
  Cyclic GFR-binding peptide

SEQ ID NO: 68954 - protein, 36 aa, Artificial Sequence
  Cyclic GFR-binding peptide
  MOD_RES (3)..(4)..(35): Xaa is C or S
SPXXVPQDLRSVKIAKVVGRTPKVKEVQVMVVKSXK

SEQ ID NO: 68955 - protein, 35 aa, Artificial Sequence; identical to SEQ ID NO: 23688
  Cyclic GFR-binding peptide
  MOD_RES (35)..(35): Xaa is C or S

SEQ ID NO: 68956 - protein, 30 aa, Artificial Sequence
  Cyclic GFR-binding peptide
  MOD_RES (1)..(2): Xaa is C or S
XXVSQDLRSVKIAKVIGKTPKIKEVQVMIV

SEQ ID NO: 68957 - protein, 24 aa, Artificial Sequence
  Cyclic GFR-binding peptide
QLEPLPVVYYDDSSNVIEQLSNNM

SEQ ID NO: 68958 - protein, 28 aa, Artificial Sequence
  Cyclic GFR-binding peptide
  MOD_RES (27)..(27): Xaa is C or S
LEPLTILYYVGRKPKVEQLSNMIVRSXK

SEQ ID NO: 68959 - protein, 32 aa, Artificial Sequence; identical to SEQ ID NO: 17221
  Cyclic GFR-binding peptide
  MOD_RES (6)..(7): Xaa is C or S

SEQ ID NO: 68960 - protein, 27 aa, Artificial Sequence
  Cyclic GFR-binding peptide
APTQLEPLPVVYYDDSSNVIEQLSNNM

SEQ ID NO: 68961 - protein, 34 aa, Artificial Sequence
  Cyclic GFR-binding peptide
  MOD_RES (3)..(3): Xaa is C or S
VKXQPSRVHHEPLPVVYYEYVRKKPKLEQLSNRL

SEQ ID NO: 68962 - protein, 31 aa, Artificial Sequence; identical to SEQ ID NO: 17230
  Cyclic GFR-binding peptide
  MOD_RES (30)..(30): Xaa is C or S

SEQ ID NO: 68963 - protein, 31 aa, Artificial Sequence; identical to SEQ ID NO: 17232
  Cyclic GFR-binding peptide
  MOD_RES (1)..(1): Xaa is C or S

SEQ ID NO: 68964 - protein, 34 aa, Artificial Sequence
  Cyclic GFR-binding peptide
  MOD_RES (2)..(3): Xaa is C or S
AXXVPTELRPVQMRKIDENEKVVKKATVDMVVEG

SEQ ID NO: 68965 - protein, 21 aa, Artificial Sequence
  Cyclic GFR-binding peptide
RPVQIRKIVGRTPKVKKATVM

SEQ ID NO: 68966 - protein, 28 aa, Artificial Sequence
  Cyclic GFR-binding peptide
  MOD_RES (1)..(1): Xaa is C or S
XVPTEERSVKMAKVRIKPHQGQHKEVQV

SEQ ID NO: 68967 - protein, 31 aa, Artificial Sequence
  Cyclic GFR-binding peptide
  MOD_RES (28)..(30): Xaa is C or S
LRSVKVAKVDDSSNVIKEVQVNMVVRAXGXH

SEQ ID NO: 68968 - protein, 31 aa, Artificial Sequence
  Cyclic GFR-binding peptide
  MOD_RES (5)..(6): Xaa is C or S
VPKPXXAPTKLSNITVQIMDDSSNVIIGEMS

SEQ ID NO: 68969 - protein, 29 aa, Artificial Sequence
  Cyclic GFR-binding peptide
  MOD_RES (26)..(28): Xaa is C or S
RSVKIAKVIGKTPKIKEVQVMIVKSXKXS

SEQ ID NO: 68970 - protein, 32 aa, Artificial Sequence
  Cyclic GFR-binding peptide
  MOD_RES (30)..(32): Xaa is C or S
TQLSNITVQIMDDSSNVIIGEMSNMVVRAXGX

SEQ ID NO: 68971 - protein, 34 aa, Artificial Sequence
  Cyclic GFR-binding peptide
  MOD_RES (34)..(34): Xaa is C or S
RVHHEPLPVVYYEYVRKKPKLEQLSNRLEEHLEX

SEQ ID NO: 68972 - protein, 29 aa, Artificial Sequence
  Cyclic GFR-binding peptide
RPTQVQLRSVKVAKVEIVRKKPIFKEVQV

SEQ ID NO: 68973 - protein, 28 aa, Artificial Sequence
  Cyclic GFR-binding peptide
APTKLRSVKVAKVDDSSNVIKEVQVNMV

SEQ ID NO: 68974 - protein, 32 aa, Artificial Sequence
  Cyclic GFR-binding peptide
PSRVHHEPLTVLYYEYVRKKPKLEQLSNRLEE

SEQ ID NO: 68975 - protein, 30 aa, Artificial Sequence
  Cyclic GFR-binding peptide
  MOD_RES (2)..(3): Xaa is C or S
PXXVSQDLRSVKIAKVIGKTPKIKEVQVMI

SEQ ID NO: 68976 - protein, 28 aa, Artificial Sequence
  Cyclic GFR-binding peptide
  MOD_RES (28)..(28): Xaa is C or S
ALEPLTILYYVGRKPKVEQLSNMIVRSX

SEQ ID NO: 68977 - protein, 32 aa, Artificial Sequence
  Cyclic GFR-binding peptide
  MOD_RES (2)..(3): Xaa is C or S
PXXVPQALRSVKIAKVVGRKPKVKEVQVMIVR

SEQ ID NO: 68978 - protein, 30 aa, Artificial Sequence
  Cyclic GFR-binding peptide
  MOD_RES (1)..(1): Xaa is C or S
XVPTELRSVKMAKVDEYDKVVKEVQVEMVV

SEQ ID NO: 68979 - protein, 30 aa, Artificial Sequence
  Cyclic GFR-binding peptide
  MOD_RES (28)..(30): Xaa is C or S
ALSNITIQIMVGRKPKVIGEMSMIVRSXKX

SEQ ID NO: 68980 - protein, 34 aa, Artificial Sequence
  Cyclic GFR-binding peptide
  MOD_RES (1)..(33): Xaa is C or S
XVPTELRPVQMRKIDEYDKVVKKATVEMVVEGXG

SEQ ID NO: 68981 - protein, 27 aa, Artificial Sequence
  Cyclic GFR-binding peptide
PTEERSVKMAKVRIKPHQGQHKEVQVF

SEQ ID NO: 68982 - protein, 23 aa, Artificial Sequence
  Cyclic GFR-binding peptide
LRSVKMAKVDEYDKVVKEVQVEM

SEQ ID NO: 68983 - protein, 40 aa, Artificial Sequence
  Cyclic GFR-binding peptide
  MOD_RES (5)..(5): Xaa is C or S
RNVQXRPTQVQLEPLPVVYYEIVRKKPIFEQLSNTLEDHL

SEQ ID NO: 68984 - protein, 28 aa, Artificial Sequence
  Cyclic GFR-binding peptide
TKLEPLTVLYYDDSSNVIEQLSNNMVVR

SEQ ID NO: 68985 - protein, 37 aa, Artificial Sequence
  Cyclic GFR-binding peptide
  MOD_RES (4)..(4): Xaa is C or S
NVQXRPTQVQLEPLTVLYYEIVRKKPIFEQLSNTLED

SEQ ID NO: 68986 - protein, 35 aa, Artificial Sequence
  Cyclic GFR-binding peptide
  MOD_RES (1)..(2)..(33)..(35): Xaa is C or S
XXVSQDLSNITIQIMIGKTPKIIGEMSMIVKSXKX

SEQ ID NO: 68987 - protein, 34 aa, Artificial Sequence; identical to SEQ ID NO: 17264
  Cyclic GFR-binding peptide
  MOD_RES (4)..(4): Xaa is C or S

SEQ ID NO: 68988 - protein, 31 aa, Artificial Sequence; identical to SEQ ID NO: 17266
  Cyclic GFR-binding peptide
  MOD_RES (5)..(6): Xaa is C or S

SEQ ID NO: 68989 - protein, 37 aa, Artificial Sequence; identical to SEQ ID NO: 17269
  Cyclic GFR-binding peptide
  MOD_RES (7)..(7): Xaa is C or S

SEQ ID NO: 68990 - protein, 33 aa, Artificial Sequence
  Cyclic GFR-binding peptide
  MOD_RES (31)..(33): Xaa is C or S
EEEPLPMVYYRIKPHQGQHEQLSNFLQHNKXEX

SEQ ID NO: 68991 - protein, 30 aa, Artificial Sequence; identical to SEQ ID NO: 17276
  Cyclic GFR-binding peptide
  MOD_RES (27)..(29): Xaa is C or S

SEQ ID NO: 68992 - protein, 32 aa, Artificial Sequence
  Cyclic GFR-binding peptide
  MOD_RES (32)..(32): Xaa is C or S
VPTELRSVKMAKVDEYDKVVKEVQVEMVVEGX

SEQ ID NO: 68993 - protein, 36 aa, Artificial Sequence
  Cyclic GFR-binding peptide
  MOD_RES (3)..(4)..(36): Xaa is C or S
KAXXVPTELRSVKMAKVDENEKVVKEVQVDMVVEGX

SEQ ID NO: 68994 - protein, 28 aa, Artificial Sequence
  Cyclic GFR-binding peptide
KLEPLTVLYYDDSSNVIEQLSNNMVVRS

SEQ ID NO: 68995 - protein, 33 aa, Artificial Sequence
  Cyclic GFR-binding peptide
  MOD_RES (4)..(5): Xaa is C or S
ASPXXVSQDLRSVKIAKVIGKTPKIKEVQVMIV

SEQ ID NO: 68996 - protein, 35 aa, Artificial Sequence
  Cyclic GFR-binding peptide
  MOD_RES (1)..(2)..(33)..(35): Xaa is C or S
XXVPQDLSNITIQIMVGRTPKVIGEMSMVVKSXKX

SEQ ID NO: 68997 - protein, 25 aa, Artificial Sequence
  Cyclic GFR-binding peptide
EERSVKMAKVRIKPHQGQHKEVQVF

SEQ ID NO: 68998 - protein, 27 aa, Artificial Sequence
  Cyclic GFR-binding peptide
TQLEPLPVVYYDDSSNVIEQLSNNMVV

SEQ ID NO: 68999 - protein, 37 aa, Artificial Sequence
  Cyclic GFR-binding peptide
  MOD_RES (4)..(5)..(37): Xaa is C or S
PKAXXVPTELSNITMQIMDEYDKVVIGEMSEMVVEGX

SEQ ID NO: 69000 - protein, 34 aa, Artificial Sequence; identical to SEQ ID NO: 17284
  Cyclic GFR-binding peptide
  MOD_RES (2)..(34): Xaa is C or S

SEQ ID NO: 69001 - protein, 35 aa, Artificial Sequence
  Cyclic GFR-binding peptide
  MOD_RES (3)..(4)..(35): Xaa is C or S
APXXVPQALSNITIQIMVGRKPKVIGEMSMIVRSX

SEQ ID NO: 69002 - protein, 36 aa, Artificial Sequence; identical to SEQ ID NO: 17287
  Cyclic GFR-binding peptide
  MOD_RES (3)..(4)..(36): Xaa is C or S

SEQ ID NO: 69003 - protein, 36 aa, Artificial Sequence
  Cyclic GFR-binding peptide
  MOD_RES (1)..(33)..(35): Xaa is C or S
XVPTELRSVKMAKVDENEKVVKEVQVDMVVEGXGXR

SEQ ID NO: 69004 - protein, 29 aa, Artificial Sequence
  Cyclic GFR-binding peptide
PTKLSNITVQIMDDSSNVIIGEMSNMVVR

SEQ ID NO: 69005 - protein, 23 aa, Artificial Sequence
  Cyclic GFR-binding peptide
LSNITIQIMIGKTPKIIGEMSMI

SEQ ID NO: 69006 - protein, 32 aa, Artificial Sequence
  Cyclic GFR-binding peptide
  MOD_RES (31)..(31): Xaa is C or S
PTQLRSVKVAKVDDSSNVIKEVQVNMVVRAXG

SEQ ID NO: 69007 - protein, 34 aa, Artificial Sequence
  Cyclic GFR-binding peptide
  MOD_RES (6)..(7): Xaa is C or S
TVPKPXXAPTQLRPVQVRKIDDSSNVIKKATVNM

SEQ ID NO: 69008 - protein, 35 aa, Artificial Sequence
  Cyclic GFR-binding peptide
  MOD_RES (3)..(4): Xaa is C or S
KPXXAPTKLRSVKVAKVDDSSNVIKEVQVNMVVRS

SEQ ID NO: 69009 - protein, 25 aa, Artificial Sequence
  Cyclic GFR-binding peptide
SQDLRSVKIAKVIGKTPKIKEVQVM

SEQ ID NO: 69010 - protein, 33 aa, Artificial Sequence
  Cyclic GFR-binding peptide
  MOD_RES (3)..(4): Xaa is C or S
KAXXVPTELSNITMQIMDEYDKVVIGEMSEMVV

SEQ ID NO: 69011 - protein, 23 aa, Artificial Sequence
  Cyclic GFR-binding peptide
TQLEPLPVVYYDDSSNVIEQLSN

SEQ ID NO: 69012 - protein, 37 aa, Artificial Sequence; identical to SEQ ID NO: 23748
  Cyclic GFR-binding peptide
  MOD_RES (36)..(36): Xaa is C or S

SEQ ID NO: 69013 - protein, 40 aa, Artificial Sequence; identical to SEQ ID NO: 17304
  Cyclic GFR-binding peptide
  MOD_RES (7)..(39): Xaa is C or S

SEQ ID NO: 69014 - protein, 35 aa, Artificial Sequence
  Cyclic GFR-binding peptide
  MOD_RES (4)..(5): Xaa is C or S
AAPXXVPQALRPVQIRKIVGRKPKVKKATVMIVRS

SEQ ID NO: 69015 - protein, 30 aa, Artificial Sequence; identical to SEQ ID NO: 23751
  Cyclic GFR-binding peptide

SEQ ID NO: 69016 - protein, 37 aa, Artificial Sequence
  Cyclic GFR-binding peptide
  MOD_RES (4)..(5)..(37): Xaa is C or S
PKAXXVPTELSNITMQIMDENEKVVIGEMSDMVVEGX

SEQ ID NO: 69017 - protein, 33 aa, Artificial Sequence
  Cyclic GFR-binding peptide
  MOD_RES (30)..(32): Xaa is C or S
PQALRPVQIRKIVGRKPKVKKATVMIVRSXKXS

SEQ ID NO: 69018 - protein, 38 aa, Artificial Sequence
  Cyclic GFR-binding peptide
  MOD_RES (2)..(3)..(35)..(37): Xaa is C or S
PXXAPTKLRPVQVRKIDDSSNVIKKATVNMVVRSXGXH

SEQ ID NO: 69019 - protein, 33 aa, Artificial Sequence
  Cyclic GFR-binding peptide
  MOD_RES (31)..(33): Xaa is C or S
LEPLPVVYYEIVRKKPIFEQLSNTLEDHLAXKX

SEQ ID NO: 69020 - protein, 25 aa, Artificial Sequence
  Cyclic GFR-binding peptide
VHHRPVQVRKIEYVRKKPKLKKATV

SEQ ID NO: 69021 - protein, 30 aa, Artificial Sequence
  Cyclic GFR-binding peptide
  MOD_RES (3)..(3): Xaa is C or S
PTXAPTKLSNITVQIMDDSSNVIIGEMSNM

SEQ ID NO: 69022 - protein, 31 aa, Artificial Sequence
  Cyclic GFR-binding peptide
  MOD_RES (4)..(5): Xaa is C or S
ASPXXVPQDLSNITIQIMVGRTPKVIGEMSM

SEQ ID NO: 69023 - protein, 25 aa, Artificial Sequence
  Cyclic GFR-binding peptide
LEPLTMLYYDENEKVVEQLSNDMVV

SEQ ID NO: 69024 - protein, 40 aa, Artificial Sequence; identical to SEQ ID NO: 23760
  Cyclic GFR-binding peptide
  MOD_RES (3)..(40): Xaa is C or S

SEQ ID NO: 69025 - protein, 36 aa, Artificial Sequence; identical to SEQ ID NO: 17312
  Cyclic GFR-binding peptide
  MOD_RES (1)..(2)..(34)..(36): Xaa is C or S

SEQ ID NO: 69026 - protein, 30 aa, Artificial Sequence
  Cyclic GFR-binding peptide
  MOD_RES (1)..(1): Xaa is C or S
XVSQDLSNITIQIMIGKTPKIIGEMSMIVK

SEQ ID NO: 69027 - protein, 35 aa, Artificial Sequence; identical to SEQ ID NO: 23764
  Cyclic GFR-binding peptide
  MOD_RES (32)..(34): Xaa is C or S

SEQ ID NO: 69028 - protein, 22 aa, Artificial Sequence
  Cyclic GFR-binding peptide
RPVQVRKIDDSSNVIKKATVNM

SEQ ID NO: 69029 - protein, 31 aa, Artificial Sequence
  Cyclic GFR-binding peptide
  MOD_RES (30)..(30): Xaa is C or S
PQALSNITIQIMVGRKPKVIGEMSMIVRSXK

SEQ ID NO: 69030 - protein, 27 aa, Artificial Sequence
  Cyclic GFR-binding peptide
  MOD_RES (1)..(1): Xaa is C or S
XVPTELRPVQMRKIDEYDKVVKKATVE

SEQ ID NO: 69031 - protein, 41 aa, Artificial Sequence
  Cyclic GFR-binding peptide
  MOD_RES (3)..(40): Xaa is C or S
VKXQPSRVHHEPLPVVYYEYVRKKPKLEQLSNRLEEHLEXA

SEQ ID NO: 69032 - protein, 35 aa, Artificial Sequence
  Cyclic GFR-binding peptide
  MOD_RES (5)..(5): Xaa is C or S
TKPTXAPTKLRPVQVRKIDDSSNVIKKATVNMVVR

SEQ ID NO: 69033 - protein, 29 aa, Artificial Sequence
  Cyclic GFR-binding peptide
  MOD_RES (2)..(2): Xaa is C or S
TXAPTKLRPVQVRKIDDSSNVIKKATVNM

SEQ ID NO: 69034 - protein, 27 aa, Artificial Sequence
  Cyclic GFR-binding peptide
VPQDLEPLPIVYYVGRTPKVEQLSNMV

SEQ ID NO: 69035 - protein, 32 aa, Artificial Sequence
  Cyclic GFR-binding peptide
  MOD_RES (6)..(7): Xaa is C or S
TVPKPXXAPTQLSNITVQIMDDSSNVIIGEMS

SEQ ID NO: 69036 - protein, 28 aa, Artificial Sequence
  Cyclic GFR-binding peptide
  MOD_RES (28)..(28): Xaa is C or S
LEPLPMVYYDENEKVVEQLSNDMVVEGX

SEQ ID NO: 69037 - protein, 38 aa, Artificial Sequence
  Cyclic GFR-binding peptide
  MOD_RES (7)..(7): Xaa is C or S
HVTKPTXAPTKLRPVQVRKIDDSSNVIKKATVNMVVRS

SEQ ID NO: 69038 - protein, 28 aa, Artificial Sequence
  Cyclic GFR-binding peptide
TKLEPLPVVYYDDSSNVIEQLSNNMVVR

SEQ ID NO: 69039 - protein, 32 aa, Artificial Sequence
  Cyclic GFR-binding peptide
  MOD_RES (31)..(31): Xaa is C or S
PTKLRSVKVAKVDDSSNVIKEVQVNMVVRSXG

SEQ ID NO: 69040 - protein, 29 aa, Artificial Sequence
  Cyclic GFR-binding peptide
LSNITVQIMEIVRKKPIFIGEMSTLEDHL

SEQ ID NO: 69041 - protein, 29 aa, Artificial Sequence
  Cyclic GFR-binding peptide
VPTEEEPLTMLYYRIKPHQGQHEQLSNFL

SEQ ID NO: 69042 - protein, 36 aa, Artificial Sequence; identical to SEQ ID NO: 17329
  Cyclic GFR-binding peptide
  MOD_RES (5)..(5): Xaa is C or S

SEQ ID NO: 69043 - protein, 30 aa, Artificial Sequence; identical to SEQ ID NO: 23789
  Cyclic GFR-binding peptide

SEQ ID NO: 69044 - protein, 27 aa, Artificial Sequence
  Cyclic GFR-binding peptide
VPTELRPVQMRKIDEYDKVVKKATVEM

SEQ ID NO: 69045 - protein, 23 aa, Artificial Sequence
  Cyclic GFR-binding peptide
TELEPLPMVYYDENEKVVEQLSN

SEQ ID NO: 69046 - protein, 38 aa, Artificial Sequence
  Cyclic GFR-binding peptide
  MOD_RES (3)..(3): Xaa is C or S
VQXRPTQVQLEPLTVLYYEIVRKKPIFEQLSNTLEDHL

SEQ ID NO: 69047 - protein, 36 aa, Artificial Sequence
  Cyclic GFR-binding peptide
  MOD_RES (6)..(6): Xaa is C or S
DEGLEXVPTEEEPLTMLYYRIKPHQGQHEQLSNFLQ

SEQ ID NO: 69048 - protein, 33 aa, Artificial Sequence
  Cyclic GFR-binding peptide
  MOD_RES (5)..(6): Xaa is C or S
SAAPXXVPQALRSVKIAKVVGRKPKVKEVQVMI

SEQ ID NO: 69049 - protein, 36 aa, Artificial Sequence; identical to SEQ ID NO: 23795
  Cyclic GFR-binding peptide
  MOD_RES (33)..(35): Xaa is C or S

SEQ ID NO: 69050 - protein, 28 aa, Artificial Sequence
  Cyclic GFR-binding peptide
  MOD_RES (28)..(28): Xaa is C or S
DLEPLPIVYYIGKTPKIEQLSNMIVKSX

SEQ ID NO: 69051 - protein, 31 aa, Artificial Sequence
  Cyclic GFR-binding peptide
  MOD_RES (5)..(6): Xaa is C or S
SAAPXXVPQALSNITIQIMVGRKPKVIGEMS

SEQ ID NO: 69052 - protein, 40 aa, Artificial Sequence
  Cyclic GFR-binding peptide
  MOD_RES (6)..(7)..(38)..(40): Xaa is C or S
ASASPXXVPQDLRSVKIAKVVGRTPKVKEVQVMVVKSXKX

SEQ ID NO: 69053 - protein, 27 aa, Artificial Sequence
  Cyclic GFR-binding peptide
DLSNITIQIMIGKTPKIIGEMSMIVKS

SEQ ID NO: 69054 - protein, 23 aa, Artificial Sequence
  Cyclic GFR-binding peptide
QLEPLPVVYYDDSSNVIEQLSNN

SEQ ID NO: 69055 - protein, 26 aa, Artificial Sequence
  Cyclic GFR-binding peptide
RPVQMRKIRIKPHQGQHKKATVFLQH

SEQ ID NO: 69056 - protein, 31 aa, Artificial Sequence; identical to SEQ ID NO: 17341
  Cyclic GFR-binding peptide
  MOD_RES (3)..(3): Xaa is C or S

SEQ ID NO: 69057 - protein, 35 aa, Artificial Sequence
  Cyclic GFR-binding peptide
  MOD_RES (1)..(32)..(34): Xaa is C or S
XVPQDLSNITIQIMVGRTPKVIGEMSMVVKSXKXS

SEQ ID NO: 69058 - protein, 30 aa, Artificial Sequence
  Cyclic GFR-binding peptide
  MOD_RES (3)..(4): Xaa is C or S
SPXXVPQDLRSVKIAKVVGRTPKVKEVQVM

SEQ ID NO: 69059 - protein, 23 aa, Artificial Sequence
  Cyclic GFR-binding peptide
HSNITVQIMEYVRKKPKLIGEMS

SEQ ID NO: 69060 - protein, 34 aa, Artificial Sequence
  Cyclic GFR-binding peptide
  MOD_RES (6)..(7): Xaa is C or S
ASAAPXXVPQALSNITIQIMVGRKPKVIGEMSMI

SEQ ID NO: 69061 - protein, 34 aa, Artificial Sequence; identical to SEQ ID NO: 17348
  Cyclic GFR-binding peptide
  MOD_RES (5)..(6): Xaa is C or S

SEQ ID NO: 69062 - protein, 27 aa, Artificial Sequence
  Cyclic GFR-binding peptide
  MOD_RES (1)..(2): Xaa is C or S
XXAPTQLEPLTVLYYDDSSNVIEQLSN

SEQ ID NO: 69063 - protein, 32 aa, Artificial Sequence; identical to SEQ ID NO: 17351
  Cyclic GFR-binding peptide
  MOD_RES (31)..(31): Xaa is C or S

SEQ ID NO: 69064 - protein, 25 aa, Artificial Sequence
  Cyclic GFR-binding peptide
ELRSVKMAKVDEYDKVVKEVQVEMV

SEQ ID NO: 69065 - protein, 37 aa, Artificial Sequence
  Cyclic GFR-binding peptide
  MOD_RES (1)..(1): Xaa is C or S
XRPTQVQLEPLTVLYYEIVRKKPIFEQLSNTLEDHLA

SEQ ID NO: 69066 - protein, 32 aa, Artificial Sequence
  Cyclic GFR-binding peptide
RPTQVQLEPLTVLYYEIVRKKPIFEQLSNTLE

SEQ ID NO: 69067 - protein, 27 aa, Artificial Sequence
  Cyclic GFR-binding peptide
PQALEPLTILYYVGRKPKVEQLSNMIV

SEQ ID NO: 69068 - protein, 35 aa, Artificial Sequence
  Cyclic GFR-binding peptide
  MOD_RES (4)..(5): Xaa is C or S
PKPXXAPTKLRPVQVRKIDDSSNVIKKATVNMVVR

SEQ ID NO: 69069 - protein, 26 aa, Artificial Sequence
  Cyclic GFR-binding peptide
ERSVKMAKVRIKPHQGQHKEVQVFLQ

SEQ ID NO: 69070 - protein, 31 aa, Artificial Sequence; identical to SEQ ID NO: 23814
  Cyclic GFR-binding peptide
  MOD_RES (4)..(4): Xaa is C or S

SEQ ID NO: 69071 - protein, 27 aa, Artificial Sequence
  Cyclic GFR-binding peptide
  MOD_RES (1)..(1): Xaa is C or S
XVSQDLSNITIQIMIGKTPKIIGEMSM

SEQ ID NO: 69072 - protein, 37 aa, Artificial Sequence; identical to SEQ ID NO: 17366
  Cyclic GFR-binding peptide
  MOD_RES (5)..(37): Xaa is C or S

SEQ ID NO: 69073 - protein, 28 aa, Artificial Sequence
  Cyclic GFR-binding peptide
  MOD_RES (28)..(28): Xaa is C or S
ALRPVQIRKIVGRKPKVKKATVMIVRSX

SEQ ID NO: 69074 - protein, 20 aa, Artificial Sequence
  Cyclic GFR-binding peptide
SNITVQIMDDSSNVIIGEMS

SEQ ID NO: 69075 - protein, 24 aa, Artificial Sequence
  Cyclic GFR-binding peptide
KLRSVKVAKVDDSSNVIKEVQVNM

SEQ ID NO: 69076 - protein, 29 aa, Artificial Sequence
  Cyclic GFR-binding peptide
  MOD_RES (3)..(3): Xaa is C or S
PTXAPTKLRPVQVRKIDDSSNVIKKATVN

SEQ ID NO: 69077 - protein, 32 aa, Artificial Sequence; identical to SEQ ID NO: 17375
  Cyclic GFR-binding peptide
  MOD_RES (2)..(2): Xaa is C or S

SEQ ID NO: 69078 - protein, 28 aa, Artificial Sequence
  Cyclic GFR-binding peptide
  MOD_RES (26)..(28): Xaa is C or S
SNITIQIMVGRTPKVIGEMSMVVKSXKX

SEQ ID NO: 69079 - protein, 28 aa, Artificial Sequence
  Cyclic GFR-binding peptide
  MOD_RES (1)..(2): Xaa is C or S
XXAPTKLRPVQVRKIDDSSNVIKKATVN

SEQ ID NO: 69080 - protein, 27 aa, Artificial Sequence
  Cyclic GFR-binding peptide
LEPLPVVYYDDSSNVIEQLSNNMVVRA

SEQ ID NO: 69081 - protein, 34 aa, Artificial Sequence; identical to SEQ ID NO: 17382
  Cyclic GFR-binding peptide
  MOD_RES (31)..(33): Xaa is C or S

SEQ ID NO: 69082 - protein, 37 aa, Artificial Sequence
  Cyclic GFR-binding peptide
  MOD_RES (34)..(36): Xaa is C or S
RVHHEPLTVLYYEYVRKKPKLEQLSNRLEEHLEXAXA

SEQ ID NO: 69083 - protein, 32 aa, Artificial Sequence; identical to SEQ ID NO: 17384
  Cyclic GFR-binding peptide
  MOD_RES (31)..(31): Xaa is C or S

SEQ ID NO: 69084 - protein, 21 aa, Artificial Sequence
  Cyclic GFR-binding peptide
LRSVKMAKVDEYDKVVKEVQV

SEQ ID NO: 69085 - protein, 25 aa, Artificial Sequence
  Cyclic GFR-binding peptide
LRPVQIRKIVGRTPKVKKATVMVVK

SEQ ID NO: 69086 - protein, 27 aa, Artificial Sequence
  Cyclic GFR-binding peptide
LEPLPVVYYDDSSNVIEQLSNNMVVRS

SEQ ID NO: 69087 - protein, 37 aa, Artificial Sequence; identical to SEQ ID NO: 17388
  Cyclic GFR-binding peptide
  MOD_RES (4)..(5)..(37): Xaa is C or S

SEQ ID NO: 69088 - protein, 29 aa, Artificial Sequence
  Cyclic GFR-binding peptide
SNITVQIMEIVRKKPIFIGEMSTLEDHLA

SEQ ID NO: 69089 - protein, 37 aa, Artificial Sequence; identical to SEQ ID NO: 17389
  Cyclic GFR-binding peptide
  MOD_RES (2)..(3)..(35)..(37): Xaa is C or S

SEQ ID NO: 69090 - protein, 32 aa, Artificial Sequence; identical to SEQ ID NO: 17391
  Cyclic GFR-binding peptide
  MOD_RES (2)..(3): Xaa is C or S

SEQ ID NO: 69091 - protein, 27 aa, Artificial Sequence
  Cyclic GFR-binding peptide
  MOD_RES (26)..(26): Xaa is C or S
RPVQIRKIVGRKPKVKKATVMIVRSXK

SEQ ID NO: 69092 - protein, 39 aa, Artificial Sequence; identical to SEQ ID NO: 23838
  Cyclic GFR-binding peptide
  MOD_RES (4)..(38): Xaa is C or S

SEQ ID NO: 69093 - protein, 25 aa, Artificial Sequence
  Cyclic GFR-binding peptide
PTKLRPVQVRKIDDSSNVIKKATVN

SEQ ID NO: 69094 - protein, 29 aa, Artificial Sequence
  Cyclic GFR-binding peptide
APTQLRSVKVAKVDDSSNVIKEVQVNMVV

SEQ ID NO: 69095 - protein, 38 aa, Artificial Sequence
  Cyclic GFR-binding peptide
  MOD_RES (36)..(38): Xaa is C or S
PSRVHHEPLTVLYYEYVRKKPKLEQLSNRLEEHLEXAX

SEQ ID NO: 69096 - protein, 33 aa, Artificial Sequence; identical to SEQ ID NO: 17401
  Cyclic GFR-binding peptide
  MOD_RES (2)..(3): Xaa is C or S

SEQ ID NO: 69097 - protein, 30 aa, Artificial Sequence
  Cyclic GFR-binding peptide
  MOD_RES (29)..(29): Xaa is C or S
ELRPVQMRKIDEYDKVVKKATVEMVVEGXG

SEQ ID NO: 69098 - protein, 33 aa, Artificial Sequence; identical to SEQ ID NO: 17406
  Cyclic GFR-binding peptide
  MOD_RES (32)..(32): Xaa is C or S

SEQ ID NO: 69099 - protein, 35 aa, Artificial Sequence; identical to SEQ ID NO: 17410
  Cyclic GFR-binding peptide
  MOD_RES (4)..(5): Xaa is C or S

SEQ ID NO: 69100 - protein, 31 aa, Artificial Sequence
  Cyclic GFR-binding peptide
  MOD_RES (4)..(5): Xaa is C or S
ASPXXVSQDLRSVKIAKVIGKTPKIKEVQVM

SEQ ID NO: 69101 - protein, 36 aa, Artificial Sequence
  Cyclic GFR-binding peptide
  MOD_RES (33)..(35): Xaa is C or S
VQLEPLPVVYYEIVRKKPIFEQLSNTLEDHLAXKXE

SEQ ID NO: 69102 - protein, 27 aa, Artificial Sequence
  Cyclic GFR-binding peptide
  MOD_RES (1)..(2): Xaa is C or S
XXAPTKLEPLTVLYYDDSSNVIEQLSN

SEQ ID NO: 69103 - protein, 39 aa, Artificial Sequence
  Cyclic GFR-binding peptide
  MOD_RES (3)..(3): Xaa is C or S
VQXRPTQVQLEPLPVVYYEIVRKKPIFEQLSNTLEDHLA

SEQ ID NO: 69104 - protein, 31 aa, Artificial Sequence
  Cyclic GFR-binding peptide
  MOD_RES (2)..(3): Xaa is C or S
PXXAPTKLSNITVQIMDDSSNVIIGEMSNMV

SEQ ID NO: 69105 - protein, 43 aa, Artificial Sequence; identical to SEQ ID NO: 23861
  Cyclic GFR-binding peptide
  MOD_RES (4)..(41)..(43): Xaa is C or S

SEQ ID NO: 69106 - protein, 27 aa, Artificial Sequence
  Cyclic GFR-binding peptide
  MOD_RES (27)..(27): Xaa is C or S
LRPVQIRKIVGRKPKVKKATVMIVRSX

SEQ ID NO: 69107 - protein, 35 aa, Artificial Sequence
  Cyclic GFR-binding peptide
  MOD_RES (3)..(4): Xaa is C or S
KPXXAPTQLRPVQVRKIDDSSNVIKKATVNMVVRA

SEQ ID NO: 69108 - protein, 32 aa, Artificial Sequence
  Cyclic GFR-binding peptide
  MOD_RES (3)..(4): Xaa is C or S
KAXXVPTELRSVKMAKVDENEKVVKEVQVDMV

SEQ ID NO: 69109 - protein, 36 aa, Artificial Sequence
  Cyclic GFR-binding peptide
QPSRVHHEPLPVVYYEYVRKKPKLEQLSNRLEEHLE

SEQ ID NO: 69110 - protein, 38 aa, Artificial Sequence; identical to SEQ ID NO: 17420
  Cyclic GFR-binding peptide
  MOD_RES (5)..(6)..(38): Xaa is C or S

SEQ ID NO: 69111 - protein, 29 aa, Artificial Sequence
  Cyclic GFR-binding peptide
  MOD_RES (28)..(28): Xaa is C or S
DLSNITIQIMIGKTPKIIGEMSMIVKSXK

SEQ ID NO: 69112 - protein, 33 aa, Artificial Sequence
  Cyclic GFR-binding peptide
RPTQVQLEPLTVLYYEIVRKKPIFEQLSNTLED

SEQ ID NO: 69113 - protein, 30 aa, Artificial Sequence; identical to SEQ ID NO: 17426
  Cyclic GFR-binding peptide
  MOD_RES (1)..(2): Xaa is C or S

SEQ ID NO: 69114 - protein, 35 aa, Artificial Sequence; identical to SEQ ID NO: 23867
  Cyclic GFR-binding peptide
  MOD_RES (1)..(35): Xaa is C or S

SEQ ID NO: 69115 - protein, 30 aa, Artificial Sequence
  Cyclic GFR-binding peptide
  MOD_RES (29)..(29): Xaa is C or S
KLRPVQVRKIDDSSNVIKKATVNMVVRSXG

SEQ ID NO: 69116 - protein, 34 aa, Artificial Sequence; identical to SEQ ID NO: 23868
  Cyclic GFR-binding peptide
  MOD_RES (32)..(34): Xaa is C or S

SEQ ID NO: 69117 - protein, 38 aa, Artificial Sequence
  Cyclic GFR-binding peptide
  MOD_RES (4)..(5)..(36)..(38): Xaa is C or S
AAPXXVPQALRPVQIRKIVGRKPKVKKATVMIVRSXKX

SEQ ID NO: 69118 - protein, 39 aa, Artificial Sequence
  Cyclic GFR-binding peptide
  MOD_RES (3)..(4)..(36)..(38): Xaa is C or S
KAXXVPTELRSVKMAKVDENEKVVKEVQVDMVVEGXGXR

SEQ ID NO: 69119 - protein, 20 aa, Artificial Sequence
  Cyclic GFR-binding peptide
EPLTILYYVGRKPKVEQLSN

SEQ ID NO: 69120 - protein, 27 aa, Artificial Sequence
  Cyclic GFR-binding peptide
  MOD_RES (1)..(2): Xaa is C or S
XXVPQALSNITIQIMVGRKPKVIGEMS

SEQ ID NO: 69121 - protein, 31 aa, Artificial Sequence
  Cyclic GFR-binding peptide
  MOD_RES (31)..(31): Xaa is C or S
PTKLRSVKVAKVDDSSNVIKEVQVNMVVRSX

SEQ ID NO: 69122 - protein, 42 aa, Artificial Sequence
  Cyclic GFR-binding peptide
  MOD_RES (2)..(39)..(41): Xaa is C or S
KXQPSRVHHEPLTVLYYEYVRKKPKLEQLSNRLEEHLEXAXA

SEQ ID NO: 69123 - protein, 34 aa, Artificial Sequence
  Cyclic GFR-binding peptide
  MOD_RES (6)..(7): Xaa is C or S
KIPKAXXVPTELRPVQMRKIDENEKVVKKATVDM

SEQ ID NO: 69124 - protein, 37 aa, Artificial Sequence
  Cyclic GFR-binding peptide
  MOD_RES (6)..(6): Xaa is C or S
VTKPTXAPTKLRSVKVAKVDDSSNVIKEVQVNMVVRS

SEQ ID NO: 69125 - protein, 38 aa, Artificial Sequence; identical to SEQ ID NO: 17435
  Cyclic GFR-binding peptide
  MOD_RES (2)..(3)..(35)..(37): Xaa is C or S

SEQ ID NO: 69126 - protein, 30 aa, Artificial Sequence
  Cyclic GFR-binding peptide
RPTQVQLEPLTVLYYEIVRKKPIFEQLSNT

SEQ ID NO: 69127 - protein, 27 aa, Artificial Sequence
  Cyclic GFR-binding peptide
  MOD_RES (1)..(1): Xaa is C or S
XVPQDLSNITIQIMVGRTPKVIGEMSM

SEQ ID NO: 69128 - protein, 32 aa, Artificial Sequence; identical to SEQ ID NO: 17436
  Cyclic GFR-binding peptide
  MOD_RES (4)..(5): Xaa is C or S

SEQ ID NO: 69129 - protein, 33 aa, Artificial Sequence
  Cyclic GFR-binding peptide
  MOD_RES (3)..(4): Xaa is C or S
KPXXAPTQLSNITVQIMDDSSNVIIGEMSNMVV

SEQ ID NO: 69130 - protein, 39 aa, Artificial Sequence
  Cyclic GFR-binding peptide
  MOD_RES (6)..(7)..(39): Xaa is C or S
TVPKPXXAPTQLRSVKVAKVDDSSNVIKEVQVNMVVRAX

SEQ ID NO: 69131 - protein, 26 aa, Artificial Sequence
  Cyclic GFR-binding peptide
PTELRPVQMRKIDENEKVVKKATVDM

SEQ ID NO: 69132 - protein, 32 aa, Artificial Sequence
  Cyclic GFR-binding peptide
  MOD_RES (32)..(32): Xaa is C or S
APTKLRSVKVAKVDDSSNVIKEVQVNMVVRSX

SEQ ID NO: 69133 - protein, 30 aa, Artificial Sequence
  Cyclic GFR-binding peptide
  MOD_RES (3)..(4): Xaa is C or S
KAXXVPTELSNITMQIMDEYDKVVIGEMSE

SEQ ID NO: 69134 - protein, 39 aa, Artificial Sequence
  Cyclic GFR-binding peptide
  MOD_RES (6)..(7)..(39): Xaa is C or S
SIPKAXXVPTELRSVKMAKVDEYDKVVKEVQVEMVVEGX

SEQ ID NO: 69135 - protein, 39 aa, Artificial Sequence
  Cyclic GFR-binding peptide
  MOD_RES (7)..(7): Xaa is C or S
NDEGLEXVPTEEEPLTMLYYRIKPHQGQHEQLSNFLQHN

SEQ ID NO: 69136 - protein, 33 aa, Artificial Sequence
  Cyclic GFR-binding peptide
  MOD_RES (5)..(6): Xaa is C or S
SASPXXVSQDLRPVQIRKIIGKTPKIKKATVMI

SEQ ID NO: 69137 - protein, 34 aa, Artificial Sequence
  Cyclic GFR-binding peptide
  MOD_RES (6)..(7): Xaa is C or S
SIPKAXXVPTELSNITMQIMDEYDKVVIGEMSEM

SEQ ID NO: 69138 - protein, 39 aa, Artificial Sequence; identical to SEQ ID NO: 23886
  Cyclic GFR-binding peptide
  MOD_RES (3)..(3): Xaa is C or S

SEQ ID NO: 69139 - protein, 36 aa, Artificial Sequence
  Cyclic GFR-binding peptide
  MOD_RES (2)..(3)..(35): Xaa is C or S
AXXVPTELRSVKMAKVDENEKVVKEVQVDMVVEGXG

SEQ ID NO: 69140 - protein, 29 aa, Artificial Sequence
  Cyclic GFR-binding peptide
  MOD_RES (1)..(1): Xaa is C or S
XAPTQLEPLTVLYYDDSSNVIEQLSNNMV

SEQ ID NO: 69141 - protein, 35 aa, Artificial Sequence
  Cyclic GFR-binding peptide
  MOD_RES (6)..(7): Xaa is C or S
ASASPXXVSQDLRPVQIRKIIGKTPKIKKATVMIV

SEQ ID NO: 69142 - protein, 37 aa, Artificial Sequence; identical to SEQ ID NO: 17449
  Cyclic GFR-binding peptide
  MOD_RES (2)..(3)..(34)..(36): Xaa is C or S

SEQ ID NO: 69143 - protein, 33 aa, Artificial Sequence
  Cyclic GFR-binding peptide
  MOD_RES (30)..(32): Xaa is C or S
TELRSVKMAKVDENEKVVKEVQVDMVVEGXGXR

SEQ ID NO: 69144 - protein, 40 aa, Artificial Sequence
  Cyclic GFR-binding peptide
  MOD_RES (5)..(6)..(37)..(39): Xaa is C or S
SASPXXVSQDLRSVKIAKVIGKTPKIKEVQVMIVKSXKXS

SEQ ID NO: 69145 - protein, 34 aa, Artificial Sequence
  Cyclic GFR-binding peptide
  MOD_RES (33)..(33): Xaa is C or S
VQLEPLPVVYYEIVRKKPIFEQLSNTLEDHLAXK

SEQ ID NO: 69146 - protein, 36 aa, Artificial Sequence
  Cyclic GFR-binding peptide
  MOD_RES (5)..(6): Xaa is C or S
VPKPXXAPTQLRPVQVRKIDDSSNVIKKATVNMVVR

SEQ ID NO: 69147 - protein, 33 aa, Artificial Sequence; identical to SEQ ID NO: 17454
  Cyclic GFR-binding peptide
  MOD_RES (5)..(6): Xaa is C or S

SEQ ID NO: 69148 - protein, 31 aa, Artificial Sequence; identical to SEQ ID NO: 23892
  Cyclic GFR-binding peptide

SEQ ID NO: 69149 - protein, 32 aa, Artificial Sequence
  Cyclic GFR-binding peptide
  MOD_RES (1)..(2): Xaa is C or S
XXVPTELSNITMQIMDENEKVVIGEMSDMVVE

SEQ ID NO: 69150 - protein, 37 aa, Artificial Sequence; identical to SEQ ID NO: 23893
  Cyclic GFR-binding peptide
  MOD_RES (1)..(35)..(37): Xaa is C or S

SEQ ID NO: 69151 - protein, 28 aa, Artificial Sequence
  Cyclic GFR-binding peptide
  MOD_RES (28)..(28): Xaa is C or S
LSNITMQIMDEYDKVVIGEMSEMVVEGX

SEQ ID NO: 69152 - protein, 32 aa, Artificial Sequence; identical to SEQ ID NO: 17458
  Cyclic GFR-binding peptide
  MOD_RES (1)..(2): Xaa is C or S

SEQ ID NO: 69153 - protein, 25 aa, Artificial Sequence
  Cyclic GFR-binding peptide
RSVKMAKVDENEKVVKEVQVDMVVE

SEQ ID NO: 69154 - protein, 36 aa, Artificial Sequence
  Cyclic GFR-binding peptide
  MOD_RES (4)..(5): Xaa is C or S
PKPXXAPTKLRPVQVRKIDDSSNVIKKATVNMVVRS

SEQ ID NO: 69155 - protein, 29 aa, Artificial Sequence
  Cyclic GFR-binding peptide
APTKLSNITVQIMDDSSNVIIGEMSNMVV

SEQ ID NO: 69156 - protein, 23 aa, Artificial Sequence
  Cyclic GFR-binding peptide
KLEPLTVLYYDDSSNVIEQLSNN

SEQ ID NO: 69157 - protein, 32 aa, Artificial Sequence
  Cyclic GFR-binding peptide
  MOD_RES (6)..(7): Xaa is C or S
ASAAPXXVPQALSNITIQIMVGRKPKVIGEMS

SEQ ID NO: 69158 - protein, 26 aa, Artificial Sequence
  Cyclic GFR-binding peptide
KLEPLTVLYYDDSSNVIEQLSNNMVV

SEQ ID NO: 69159 - protein, 42 aa, Artificial Sequence
  Cyclic GFR-binding peptide
  MOD_RES (5)..(42): Xaa is C or S
SSVKXQPSRVHHEPLTVLYYEYVRKKPKLEQLSNRLEEHLEX

SEQ ID NO: 69160 - protein, 31 aa, Artificial Sequence
  Cyclic GFR-binding peptide
  MOD_RES (5)..(6): Xaa is C or S
IPKAXXVPTELSNITMQIMDENEKVVIGEMS

SEQ ID NO: 69161 - protein, 31 aa, Artificial Sequence; identical to SEQ ID NO: 23903
  Cyclic GFR-binding peptide

SEQ ID NO: 69162 - protein, 27 aa, Artificial Sequence
  Cyclic GFR-binding peptide
EEPLPMVYYRIKPHQGQHEQLSNFLQH

SEQ ID NO: 69163 - protein, 43 aa, Artificial Sequence; identical to SEQ ID NO: 23905
  Cyclic GFR-binding peptide
  MOD_RES (5)..(42): Xaa is C or S

SEQ ID NO: 69164 - protein, 37 aa, Artificial Sequence
  Cyclic GFR-binding peptide
  MOD_RES (6)..(6): Xaa is C or S
DEGLEXVPTEEEPLTMLYYRIKPHQGQHEQLSNFLQH

SEQ ID NO: 69165 - protein, 30 aa, Artificial Sequence
  Cyclic GFR-binding peptide
  MOD_RES (3)..(4): Xaa is C or S
SPXXVSQDLRSVKIAKVIGKTPKIKEVQVM

SEQ ID NO: 69166 - protein, 36 aa, Artificial Sequence
  Cyclic GFR-binding peptide
  MOD_RES (7)..(7): Xaa is C or S
HVTKPTXAPTKLRPVQVRKIDDSSNVIKKATVNMVV

SEQ ID NO: 69167 - protein, 24 aa, Artificial Sequence
  Cyclic GFR-binding peptide
PTELEPLTMLYYDEYDKVVEQLSN

SEQ ID NO: 69168 - protein, 32 aa, Artificial Sequence
  Cyclic GFR-binding peptide
  MOD_RES (2)..(3): Xaa is C or S
PXXVPQDLRSVKIAKVVGRTPKVKEVQVMVVK

SEQ ID NO: 69169 - protein, 35 aa, Artificial Sequence
  Cyclic GFR-binding peptide
  MOD_RES (3)..(4): Xaa is C or S
KPXXAPTKLRPVQVRKIDDSSNVIKKATVNMVVRS

SEQ ID NO: 69170 - protein, 35 aa, Artificial Sequence
  Cyclic GFR-binding peptide
  MOD_RES (35)..(35): Xaa is C or S
SRVHHEPLTVLYYEYVRKKPKLEQLSNRLEEHLEX

SEQ ID NO: 69171 - protein, 33 aa, Artificial Sequence; identical to SEQ ID NO: 23918
  Cyclic GFR-binding peptide
  MOD_RES (1)..(1): Xaa is C or S

SEQ ID NO: 69172 - protein, 24 aa, Artificial Sequence
  Cyclic GFR-binding peptide
EPLPVVYYDDSSNVIEQLSNNMVV

SEQ ID NO: 69173 - protein, 38 aa, Artificial Sequence; identical to SEQ ID NO: 17490
  Cyclic GFR-binding peptide
  MOD_RES (3)..(4)..(36)..(38): Xaa is C or S

SEQ ID NO: 69174 - protein, 37 aa, Artificial Sequence; identical to SEQ ID NO: 23924
  Cyclic GFR-binding peptide
  MOD_RES (37)..(37): Xaa is C or S

SEQ ID NO: 69175 - protein, 31 aa, Artificial Sequence
  Cyclic GFR-binding peptide
  MOD_RES (1)..(1): Xaa is C or S
XAPTKLRPVQVRKIDDSSNVIKKATVNMVVR

SEQ ID NO: 69176 - protein, 22 aa, Artificial Sequence
  Cyclic GFR-binding peptide
RSVKVAKVDDSSNVIKEVQVNM

SEQ ID NO: 69177 - protein, 25 aa, Artificial Sequence
  Cyclic GFR-binding peptide
VPQALEPLTILYYVGRKPKVEQLSN

SEQ ID NO: 69178 - protein, 39 aa, Artificial Sequence
  Cyclic GFR-binding peptide
  MOD_RES (3)..(4)..(36)..(38): Xaa is C or S
KPXXAPTQLRPVQVRKIDDSSNVIKKATVNMVVRAXGXH

SEQ ID NO: 69179 - protein, 30 aa, Artificial Sequence; identical to SEQ ID NO: 17504
  Cyclic GFR-binding peptide
  MOD_RES (30)..(30): Xaa is C or S

SEQ ID NO: 69180 - protein, 28 aa, Artificial Sequence
  Cyclic GFR-binding peptide
VPTELRPVQMRKIDEYDKVVKKATVEMV

SEQ ID NO: 69181 - protein, 31 aa, Artificial Sequence
  Cyclic GFR-binding peptide
  MOD_RES (4)..(5): Xaa is C or S
PKPXXAPTKLRPVQVRKIDDSSNVIKKATVN

SEQ ID NO: 69182 - protein, 36 aa, Artificial Sequence
  Cyclic GFR-binding peptide
  MOD_RES (5)..(5): Xaa is C or S
EGLEXVPTEEEPLTMLYYRIKPHQGQHEQLSNFLQH

SEQ ID NO: 69183 - protein, 38 aa, Artificial Sequence
  Cyclic GFR-binding peptide
  MOD_RES (6)..(38): Xaa is C or S
VTKPTXAPTKLRPVQVRKIDDSSNVIKKATVNMVVRSX

SEQ ID NO: 69184 - protein, 41 aa, Artificial Sequence
  Cyclic GFR-binding peptide
  MOD_RES (6)..(7)..(38)..(40): Xaa is C or S
ASASPXXVSQDLRPVQIRKIIGKTPKIKKATVMIVKSXKXS

SEQ ID NO: 69185 - protein, 37 aa, Artificial Sequence
  Cyclic GFR-binding peptide
  MOD_RES (2)..(3)..(35)..(37): Xaa is C or S
PXXAPTKLRSVKVAKVDDSSNVIKEVQVNMVVRSXGX

SEQ ID NO: 69186 - protein, 33 aa, Artificial Sequence
  Cyclic GFR-binding peptide
  MOD_RES (31)..(33): Xaa is C or S
VPQDLSNITIQIMVGRTPKVIGEMSMVVKSXKX

SEQ ID NO: 69187 - protein, 35 aa, Artificial Sequence
  Cyclic GFR-binding peptide
  MOD_RES (1)..(1): Xaa is C or S
XQPSRVHHEPLTVLYYEYVRKKPKLEQLSNRLEEH

SEQ ID NO: 69188 - protein, 33 aa, Artificial Sequence; identical to SEQ ID NO: 17508
  Cyclic GFR-binding peptide
  MOD_RES (32)..(32): Xaa is C or S

SEQ ID NO: 69189 - protein, 34 aa, Artificial Sequence
  Cyclic GFR-binding peptide
  MOD_RES (31)..(33): Xaa is C or S
PTELRPVQMRKIDENEKVVKKATVDMVVEGXGXR

SEQ ID NO: 69190 - protein, 33 aa, Artificial Sequence
  Cyclic GFR-binding peptide
  MOD_RES (33)..(33): Xaa is C or S
PTEEEPLTMLYYRIKPHQGQHEQLSNFLQHNKX

SEQ ID NO: 69191 - protein, 27 aa, Artificial Sequence
  Cyclic GFR-binding peptide
  MOD_RES (27)..(27): Xaa is C or S
LSNITIQIMVGRTPKVIGEMSMVVKSX

SEQ ID NO: 69192 - protein, 31 aa, Artificial Sequence
  Cyclic GFR-binding peptide
  MOD_RES (1)..(1): Xaa is C or S
XVPQALSNITIQIMVGRKPKVIGEMSMIVRS

SEQ ID NO: 69193 - protein, 26 aa, Artificial Sequence
  Cyclic GFR-binding peptide
PTELEPLTMLYYDEYDKVVEQLSNEM

SEQ ID NO: 69194 - protein, 28 aa, Artificial Sequence
  Cyclic GFR-binding peptide
PQALEPLTILYYVGRKPKVEQLSNMIVR

SEQ ID NO: 69195 - protein, 34 aa, Artificial Sequence; identical to SEQ ID NO: 17516
  Cyclic GFR-binding peptide
  MOD_RES (1)..(33): Xaa is C or S

SEQ ID NO: 69196 - protein, 25 aa, Artificial Sequence
  Cyclic GFR-binding peptide
LRPVQIRKIVGRKPKVKKATVMIVR

SEQ ID NO: 69197 - protein, 32 aa, Artificial Sequence; identical to SEQ ID NO: 23945
  Cyclic GFR-binding peptide
  MOD_RES (4)..(4): Xaa is C or S

SEQ ID NO: 69198 - protein, 39 aa, Artificial Sequence; identical to SEQ ID NO: 23949
  Cyclic GFR-binding peptide
  MOD_RES (2)..(39): Xaa is C or S

SEQ ID NO: 69199 - protein, 30 aa, Artificial Sequence
  Cyclic GFR-binding peptide
  MOD_RES (27)..(29): Xaa is C or S
SNITMQIMDENEKVVIGEMSDMVVEGXGXR

SEQ ID NO: 69200 - protein, 40 aa, Artificial Sequence
  Cyclic GFR-binding peptide
  MOD_RES (6)..(7)..(39): Xaa is C or S
TVPKPXXAPTQLRPVQVRKIDDSSNVIKKATVNMVVRAXG

SEQ ID NO: 69201 - protein, 22 aa, Artificial Sequence
  Cyclic GFR-binding peptide
LRSVKVAKVDDSSNVIKEVQVN

SEQ ID NO: 69202 - protein, 38 aa, Artificial Sequence; identical to SEQ ID NO: 23955
  Cyclic GFR-binding peptide
  MOD_RES (4)..(4): Xaa is C or S

SEQ ID NO: 69203 - protein, 27 aa, Artificial Sequence
  Cyclic GFR-binding peptide
SQDLEPLPIVYYIGKTPKIEQLSNMIV

SEQ ID NO: 69204 - protein, 37 aa, Artificial Sequence
  Cyclic GFR-binding peptide
  MOD_RES (5)..(37): Xaa is C or S
TKPTXAPTKLSNITVQIMDDSSNVIIGEMSNMVVRSX

SEQ ID NO: 69205 - protein, 22 aa, Artificial Sequence
  Cyclic GFR-binding peptide
ALRSVKIAKVVGRKPKVKEVQV

SEQ ID NO: 69206 - protein, 29 aa, Artificial Sequence
  Cyclic GFR-binding peptide
  MOD_RES (2)..(2): Xaa is C or S
TXAPTKLRSVKVAKVDDSSNVIKEVQVNM

SEQ ID NO: 69207 - protein, 29 aa, Artificial Sequence
  Cyclic GFR-binding peptide
  MOD_RES (29)..(29): Xaa is C or S
RPVQMRKIRIKPHQGQHKKATVFLQHNKX

SEQ ID NO: 69208 - protein, 26 aa, Artificial Sequence
  Cyclic GFR-binding peptide
QDLEPLPIVYYVGRTPKVEQLSNMVV

SEQ ID NO: 69209 - protein, 39 aa, Artificial Sequence; identical to SEQ ID NO: 17542
  Cyclic GFR-binding peptide
  MOD_RES (6)..(7)..(39): Xaa is C or S

SEQ ID NO: 69210 - protein, 36 aa, Artificial Sequence; identical to SEQ ID NO: 17543
  Cyclic GFR-binding peptide
  MOD_RES (4)..(5): Xaa is C or S

SEQ ID NO: 69211 - protein, 27 aa, Artificial Sequence
  Cyclic GFR-binding peptide
RVHHEPLTVLYYEYVRKKPKLEQLSNR

SEQ ID NO: 69212 - protein, 32 aa, Artificial Sequence
  Cyclic GFR-binding peptide
  MOD_RES (6)..(6): Xaa is C or S
VTKPTXAPTKLSNITVQIMDDSSNVIIGEMSN

SEQ ID NO: 69213 - protein, 32 aa, Artificial Sequence; identical to SEQ ID NO: 23966
  Cyclic GFR-binding peptide

SEQ ID NO: 69214 - protein, 25 aa, Artificial Sequence
  Cyclic GFR-binding peptide
QALEPLTILYYVGRKPKVEQLSNMI

SEQ ID NO: 69215 - protein, 20 aa, Artificial Sequence
  Cyclic GFR-binding peptide
RPVQIRKIVGRKPKVKKATV

SEQ ID NO: 69216 - protein, 40 aa, Artificial Sequence
  Cyclic GFR-binding peptide
  MOD_RES (1)..(38)..(40): Xaa is C or S
XRPTQVQLEPLTVLYYEIVRKKPIFEQLSNTLEDHLAXKX

SEQ ID NO: 69217 - protein, 23 aa, Artificial Sequence
  Cyclic GFR-binding peptide
LSNITMQIMDEYDKVVIGEMSEM

SEQ ID NO: 69218 - protein, 40 aa, Artificial Sequence; identical to SEQ ID NO: 17548
  Cyclic GFR-binding peptide
  MOD_RES (4)..(5)..(37)..(39): Xaa is C or S

SEQ ID NO: 69219 - protein, 37 aa, Artificial Sequence
  Cyclic GFR-binding peptide
  MOD_RES (6)..(7): Xaa is C or S
TVPKPXXAPTQLSNITVQIMDDSSNVIIGEMSNMVVR

SEQ ID NO: 69220 - protein, 33 aa, Artificial Sequence
  Cyclic GFR-binding peptide
  MOD_RES (3)..(4): Xaa is C or S
KPXXAPTKLRPVQVRKIDDSSNVIKKATVNMVV

SEQ ID NO: 69221 - protein, 26 aa, Artificial Sequence
  Cyclic GFR-binding peptide
LRSVKIAKVIGKTPKIKEVQVMIVKS

SEQ ID NO: 69222 - protein, 28 aa, Artificial Sequence
  Cyclic GFR-binding peptide
  MOD_RES (1)..(1): Xaa is C or S
XAPTKLEPLTVLYYDDSSNVIEQLSNNM

SEQ ID NO: 69223 - protein, 26 aa, Artificial Sequence
  Cyclic GFR-binding peptide
ELRPVQMRKIDENEKVVKKATVDMVV

SEQ ID NO: 69224 - protein, 30 aa, Artificial Sequence; identical to SEQ ID NO: 23976
  Cyclic GFR-binding peptide

SEQ ID NO: 69225 - protein, 29 aa, Artificial Sequence
  Cyclic GFR-binding peptide
QPSRVHHEPLPVVYYEYVRKKPKLEQLSN

SEQ ID NO: 69226 - protein, 32 aa, Artificial Sequence; identical to SEQ ID NO: 23980
  Cyclic GFR-binding peptide
  MOD_RES (5)..(5): Xaa is C or S

SEQ ID NO: 69227 - protein, 34 aa, Artificial Sequence
  Cyclic GFR-binding peptide
  MOD_RES (4)..(4): Xaa is C or S
NVQXRPTQVQLEPLPVVYYEIVRKKPIFEQLSNT

SEQ ID NO: 69228 - protein, 27 aa, Artificial Sequence
  Cyclic GFR-binding peptide
  MOD_RES (1)..(2): Xaa is C or S
XXAPTQLRPVQVRKIDDSSNVIKKATV

SEQ ID NO: 69229 - protein, 28 aa, Artificial Sequence
  Cyclic GFR-binding peptide
VPTELEPLTMLYYDEYDKVVEQLSNEMV

SEQ ID NO: 69230 - protein, 37 aa, Artificial Sequence; identical to SEQ ID NO: 23984
  Cyclic GFR-binding peptide
  MOD_RES (35)..(37): Xaa is C or S

SEQ ID NO: 69231 - protein, 32 aa, Artificial Sequence
  Cyclic GFR-binding peptide
  MOD_RES (5)..(5): Xaa is C or S
TKPTXAPTKLRSVKVAKVDDSSNVIKEVQVNM

SEQ ID NO: 69232 - protein, 31 aa, Artificial Sequence
  Cyclic GFR-binding peptide
  MOD_RES (2)..(3): Xaa is C or S
PXXVPQDLRSVKIAKVVGRTPKVKEVQVMVV

SEQ ID NO: 69233 - protein, 27 aa, Artificial Sequence
  Cyclic GFR-binding peptide
QDLRPVQIRKIVGRTPKVKKATVMVVK

SEQ ID NO: 69234 - protein, 38 aa, Artificial Sequence
  Cyclic GFR-binding peptide
  MOD_RES (3)..(37): Xaa is C or S
LEXVPTEEEPLTMLYYRIKPHQGQHEQLSNFLQHNKXE

SEQ ID NO: 69235 - protein, 26 aa, Artificial Sequence
  Cyclic GFR-binding peptide
VPQALRSVKIAKVVGRKPKVKEVQVM

SEQ ID NO: 69236 - protein, 35 aa, Artificial Sequence
  Cyclic GFR-binding peptide
  MOD_RES (33)..(35): Xaa is C or S
VQLEPLPVVYYEIVRKKPIFEQLSNTLEDHLAXKX

SEQ ID NO: 69237 - protein, 25 aa, Artificial Sequence
  Cyclic GFR-binding peptide
APTKLEPLTVLYYDDSSNVIEQLSN

SEQ ID NO: 69238 - protein, 23 aa, Artificial Sequence
  Cyclic GFR-binding peptide
HRPVQVRKIEYVRKKPKLKKATV

SEQ ID NO: 69239 - protein, 39 aa, Artificial Sequence
  Cyclic GFR-binding peptide
  MOD_RES (5)..(6)..(37)..(39): Xaa is C or S
SASPXXVSQDLRSVKIAKVIGKTPKIKEVQVMIVKSXKX

SEQ ID NO: 69240 - protein, 24 aa, Artificial Sequence
  Cyclic GFR-binding peptide
PTKLSNITVQIMDDSSNVIIGEMS

SEQ ID NO: 69241 - protein, 41 aa, Artificial Sequence
  Cyclic GFR-binding peptide
  MOD_RES (5)..(39)..(41): Xaa is C or S
EGLEXVPTEEEPLTMLYYRIKPHQGQHEQLSNFLQHNKXEX

SEQ ID NO: 69242 - protein, 35 aa, Artificial Sequence
  Cyclic GFR-binding peptide
  MOD_RES (3)..(4): Xaa is C or S
KAXXVPTELRSVKMAKVDENEKVVKEVQVDMVVEG

SEQ ID NO: 69243 - protein, 35 aa, Artificial Sequence; identical to SEQ ID NO: 17579
  Cyclic GFR-binding peptide
  MOD_RES (6)..(7): Xaa is C or S

SEQ ID NO: 69244 - protein, 36 aa, Artificial Sequence
  Cyclic GFR-binding peptide
  MOD_RES (1)..(35): Xaa is C or S
XVPTEEEPLPMVYYRIKPHQGQHEQLSNFLQHNKXE

SEQ ID NO: 69245 - protein, 25 aa, Artificial Sequence
  Cyclic GFR-binding peptide
ALRSVKIAKVVGRKPKVKEVQVMIV

SEQ ID NO: 69246 - protein, 36 aa, Artificial Sequence; identical to SEQ ID NO: 23999
  Cyclic GFR-binding peptide
  MOD_RES (34)..(36): Xaa is C or S

SEQ ID NO: 69247 - protein, 27 aa, Artificial Sequence
  Cyclic GFR-binding peptide
  MOD_RES (27)..(27): Xaa is C or S
EPLPVVYYDDSSNVIEQLSNNMVVRAX

SEQ ID NO: 69248 - protein, 34 aa, Artificial Sequence; identical to SEQ ID NO: 24003
  Cyclic GFR-binding peptide
  MOD_RES (5)..(5): Xaa is C or S

SEQ ID NO: 69249 - protein, 36 aa, Artificial Sequence
  Cyclic GFR-binding peptide
  MOD_RES (33)..(35): Xaa is C or S
VHHEPLPVVYYEYVRKKPKLEQLSNRLEEHLEXAXA

SEQ ID NO: 69250 - protein, 21 aa, Artificial Sequence
  Cyclic GFR-binding peptide
SNITMQIMDENEKVVIGEMSD

SEQ ID NO: 69251 - protein, 37 aa, Artificial Sequence
  Cyclic GFR-binding peptide
  MOD_RES (36)..(36): Xaa is C or S
PTQVQLEPLPVVYYEIVRKKPIFEQLSNTLEDHLAXK

SEQ ID NO: 69252 - protein, 42 aa, Artificial Sequence; identical to SEQ ID NO: 17598
  Cyclic GFR-binding peptide
  MOD_RES (6)..(7)..(39)..(41): Xaa is C or S

SEQ ID NO: 69253 - protein, 24 aa, Artificial Sequence
  Cyclic GFR-binding peptide
TKLRPVQVRKIDDSSNVIKKATVN

SEQ ID NO: 69254 - protein, 29 aa, Artificial Sequence
  Cyclic GFR-binding peptide
  MOD_RES (1)..(2): Xaa is C or S
XXVPTELSNITMQIMDEYDKVVIGEMSEM

SEQ ID NO: 69255 - protein, 32 aa, Artificial Sequence; identical to SEQ ID NO: 24016
  Cyclic GFR-binding peptide

SEQ ID NO: 69256 - protein, 28 aa, Artificial Sequence
  Cyclic GFR-binding peptide
QDLRPVQIRKIIGKTPKIKKATVMIVKS

SEQ ID NO: 69257 - protein, 38 aa, Artificial Sequence
  Cyclic GFR-binding peptide
  MOD_RES (4)..(36)..(38): Xaa is C or S
KPTXAPTKLSNITVQIMDDSSNVIIGEMSNMVVRSXGX

SEQ ID NO: 69258 - protein, 26 aa, Artificial Sequence
  Cyclic GFR-binding peptide
LEPLPVVYYDDSSNVIEQLSNNMVVR

SEQ ID NO: 69259 - protein, 27 aa, Artificial Sequence
  Cyclic GFR-binding peptide
  MOD_RES (27)..(27): Xaa is C or S
SNITVQIMDDSSNVIIGEMSNMVVRAX

SEQ ID NO: 69260 - protein, 24 aa, Artificial Sequence
  Cyclic GFR-binding peptide
TELRSVKMAKVDEYDKVVKEVQVE

SEQ ID NO: 69261 - protein, 41 aa, Artificial Sequence; identical to SEQ ID NO: 24018
  Cyclic GFR-binding peptide
  MOD_RES (1)..(38)..(40): Xaa is C or S

SEQ ID NO: 69262 - protein, 37 aa, Artificial Sequence; identical to SEQ ID NO: 17610
  Cyclic GFR-binding peptide
  MOD_RES (6)..(7): Xaa is C or S

SEQ ID NO: 69263 - protein, 31 aa, Artificial Sequence; identical to SEQ ID NO: 17611
  Cyclic GFR-binding peptide
  MOD_RES (31)..(31): Xaa is C or S

SEQ ID NO: 69264 - protein, 26 aa, Artificial Sequence
  Cyclic GFR-binding peptide
DLSNITIQIMIGKTPKIIGEMSMIVK

SEQ ID NO: 69265 - protein, 32 aa, Artificial Sequence
  Cyclic GFR-binding peptide
TQVQLEPLPVVYYEIVRKKPIFEQLSNTLEDH

SEQ ID NO: 69266 - protein, 30 aa, Artificial Sequence; identical to SEQ ID NO: 17614
  Cyclic GFR-binding peptide
  MOD_RES (29)..(29): Xaa is C or S

SEQ ID NO: 69267 - protein, 31 aa, Artificial Sequence
  Cyclic GFR-binding peptide
  MOD_RES (3)..(4): Xaa is C or S
SPXXVPQDLSNITIQIMVGRTPKVIGEMSMV

SEQ ID NO: 69268 - protein, 42 aa, Artificial Sequence; identical to SEQ ID NO: 24021
  Cyclic GFR-binding peptide
  MOD_RES (2)..(39)..(41): Xaa is C or S

SEQ ID NO: 69269 - protein, 32 aa, Artificial Sequence
  Cyclic GFR-binding peptide
  MOD_RES (1)..(2): Xaa is C or S
XXAPTQLRSVKVAKVDDSSNVIKEVQVNMVVR

SEQ ID NO: 69270 - protein, 41 aa, Artificial Sequence
  Cyclic GFR-binding peptide
  MOD_RES (4)..(41): Xaa is C or S
SVKXQPSRVHHEPLTVLYYEYVRKKPKLEQLSNRLEEHLEX

SEQ ID NO: 69271 - protein, 33 aa, Artificial Sequence
  Cyclic GFR-binding peptide
  MOD_RES (1)..(2): Xaa is C or S
XXAPTKLRSVKVAKVDDSSNVIKEVQVNMVVRS

SEQ ID NO: 69272 - protein, 24 aa, Artificial Sequence
  Cyclic GFR-binding peptide
LRPVQIRKIVGRTPKVKKATVMVV

SEQ ID NO: 69273 - protein, 29 aa, Artificial Sequence
  Cyclic GFR-binding peptide
TEERSVKMAKVRIKPHQGQHKEVQVFLQH

SEQ ID NO: 69274 - protein, 31 aa, Artificial Sequence
  Cyclic GFR-binding peptide
PSRVHHEPLTVLYYEYVRKKPKLEQLSNRLE

SEQ ID NO: 69275 - protein, 31 aa, Artificial Sequence; identical to SEQ ID NO: 24026
  Cyclic GFR-binding peptide
  MOD_RES (1)..(1): Xaa is C or S

SEQ ID NO: 69276 - protein, 26 aa, Artificial Sequence
  Cyclic GFR-binding peptide
TEEEPLPMVYYRIKPHQGQHEQLSNF

SEQ ID NO: 69277 - protein, 38 aa, Artificial Sequence
  Cyclic GFR-binding peptide
  MOD_RES (6)..(7)..(38): Xaa is C or S
ASASPXXVPQDLRSVKIAKVVGRTPKVKEVQVMVVKSX

SEQ ID NO: 69278 - protein, 23 aa, Artificial Sequence
  Cyclic GFR-binding peptide
RSVKMAKVDEYDKVVKEVQVEMV

SEQ ID NO: 69279 - protein, 29 aa, Artificial Sequence
  Cyclic GFR-binding peptide
  MOD_RES (3)..(4): Xaa is C or S
KPXXAPTKLEPLTVLYYDDSSNVIEQLSN

SEQ ID NO: 69280 - protein, 35 aa, Artificial Sequence
  Cyclic GFR-binding peptide
  MOD_RES (1)..(2)..(34): Xaa is C or S
XXVPTELRSVKMAKVDENEKVVKEVQVDMVVEGXG

SEQ ID NO: 69281 - protein, 27 aa, Artificial Sequence
  Cyclic GFR-binding peptide
VPTELSNITMQIMDEYDKVVIGEMSEM

SEQ ID NO: 69282 - protein, 26 aa, Artificial Sequence
  Cyclic GFR-binding peptide
ALEPLTILYYVGRKPKVEQLSNMIVR

SEQ ID NO: 69283 - protein, 37 aa, Artificial Sequence; identical to SEQ ID NO: 17630
  Cyclic GFR-binding peptide
  MOD_RES (4)..(36): Xaa is C or S

SEQ ID NO: 69284 - protein, 40 aa, Artificial Sequence; identical to SEQ ID NO: 24033
  Cyclic GFR-binding peptide
  MOD_RES (2)..(39): Xaa is C or S

SEQ ID NO: 69285 - protein, 33 aa, Artificial Sequence; identical to SEQ ID NO: 24035
  Cyclic GFR-binding peptide
  MOD_RES (33)..(33): Xaa is C or S

SEQ ID NO: 69286 - protein, 26 aa, Artificial Sequence
  Cyclic GFR-binding peptide
LSNITIQIMVGRKPKVIGEMSMIVRS

SEQ ID NO: 69287 - protein, 27 aa, Artificial Sequence
  Cyclic GFR-binding peptide
HSNITVQIMEYVRKKPKLIGEMSRLEE

SEQ ID NO: 69288 - protein, 32 aa, Artificial Sequence
  Cyclic GFR-binding peptide
  MOD_RES (29)..(31): Xaa is C or S
QLSNITVQIMDDSSNVIIGEMSNMVVRAXGXH

SEQ ID NO: 69289 - protein, 33 aa, Artificial Sequence
  Cyclic GFR-binding peptide
  MOD_RES (1)..(2): Xaa is C or S
XXVPTELRSVKMAKVDENEKVVKEVQVDMVVEG

SEQ ID NO: 69290 - protein, 37 aa, Artificial Sequence; identical to SEQ ID NO: 17634
  Cyclic GFR-binding peptide
  MOD_RES (5)..(6): Xaa is C or S

SEQ ID NO: 69291 - protein, 33 aa, Artificial Sequence
  Cyclic GFR-binding peptide
  MOD_RES (31)..(33): Xaa is C or S
VSQDLSNITIQIMIGKTPKIIGEMSMIVKSXKX

SEQ ID NO: 69292 - protein, 40 aa, Artificial Sequence
  Cyclic GFR-binding peptide
  MOD_RES (6)..(7)..(38)..(40): Xaa is C or S
ASASPXXVSQDLRPVQIRKIIGKTPKIKKATVMIVKSXKX

SEQ ID NO: 69293 - protein, 26 aa, Artificial Sequence
  Cyclic GFR-binding peptide
PTKLSNITVQIMDDSSNVIIGEMSNM

SEQ ID NO: 69294 - protein, 41 aa, Artificial Sequence
  Cyclic GFR-binding peptide
  MOD_RES (5)..(6)..(38)..(40): Xaa is C or S
VPKPXXAPTQLRSVKVAKVDDSSNVIKEVQVNMVVRAXGXH

SEQ ID NO: 69295 - protein, 39 aa, Artificial Sequence
  Cyclic GFR-binding peptide
  MOD_RES (37)..(39): Xaa is C or S
RPTQVQLEPLPVVYYEIVRKKPIFEQLSNTLEDHLAXKX

SEQ ID NO: 69296 - protein, 33 aa, Artificial Sequence; identical to SEQ ID NO: 24042
  Cyclic GFR-binding peptide
  MOD_RES (33)..(33): Xaa is C or S

SEQ ID NO: 69297 - protein, 35 aa, Artificial Sequence
  Cyclic GFR-binding peptide
  MOD_RES (1)..(1): Xaa is C or S
XQPSRVHHEPLPVVYYEYVRKKPKLEQLSNRLEEH

SEQ ID NO: 69298 - protein, 38 aa, Artificial Sequence
  Cyclic GFR-binding peptide
  MOD_RES (2)..(3)..(35)..(37): Xaa is C or S
AXXVPTELSNITMQIMDENEKVVIGEMSDMVVEGXGXR

SEQ ID NO: 69299 - protein, 27 aa, Artificial Sequence
  Cyclic GFR-binding peptide
  MOD_RES (27)..(27): Xaa is C or S
EPLPVVYYDDSSNVIEQLSNNMVVRSX

SEQ ID NO: 69300 - protein, 28 aa, Artificial Sequence
  Cyclic GFR-binding peptide
  MOD_RES (26)..(28): Xaa is C or S
RPVQIRKIVGRKPKVKKATVMIVRSXKX

SEQ ID NO: 69301 - protein, 39 aa, Artificial Sequence; identical to SEQ ID NO: 17651
  Cyclic GFR-binding peptide
  MOD_RES (5)..(6)..(37)..(39): Xaa is C or S

SEQ ID NO: 69302 - protein, 30 aa, Artificial Sequence
  Cyclic GFR-binding peptide
VQLEPLPVVYYEIVRKKPIFEQLSNTLEDH

SEQ ID NO: 69303 - protein, 22 aa, Artificial Sequence
  Cyclic GFR-binding peptide
LRSVKMAKVDEYDKVVKEVQVE

SEQ ID NO: 69304 - protein, 30 aa, Artificial Sequence
  Cyclic GFR-binding peptide
  MOD_RES (4)..(5): Xaa is C or S
ASPXXVPQDLRPVQIRKIVGRTPKVKKATV

SEQ ID NO: 69305 - protein, 30 aa, Artificial Sequence
  Cyclic GFR-binding peptide
  MOD_RES (28)..(30): Xaa is C or S
LRSVKVAKVDDSSNVIKEVQVNMVVRAXGX

SEQ ID NO: 69306 - protein, 23 aa, Artificial Sequence
  Cyclic GFR-binding peptide
RPVQIRKIIGKTPKIKKATVMIV

SEQ ID NO: 69307 - protein, 35 aa, Artificial Sequence; identical to SEQ ID NO: 24057
  Cyclic GFR-binding peptide
  MOD_RES (3)..(3): Xaa is C or S

SEQ ID NO: 69308 - protein, 24 aa, Artificial Sequence
  Cyclic GFR-binding peptide
TELRSVKMAKVDENEKVVKEVQVD

SEQ ID NO: 69309 - protein, 33 aa, Artificial Sequence; identical to SEQ ID NO: 24061
  Cyclic GFR-binding peptide
  MOD_RES (30)..(32): Xaa is C or S

SEQ ID NO: 69310 - protein, 27 aa, Artificial Sequence
  Cyclic GFR-binding peptide
PTKLSNITVQIMDDSSNVIIGEMSNMV

SEQ ID NO: 69311 - protein, 22 aa, Artificial Sequence
  Cyclic GFR-binding peptide
RSVKMAKVDEYDKVVKEVQVEM

SEQ ID NO: 69312 - protein, 38 aa, Artificial Sequence
  Cyclic GFR-binding peptide
  MOD_RES (5)..(6)..(37): Xaa is C or S
SAAPXXVPQALRSVKIAKVVGRKPKVKEVQVMIVRSXK

SEQ ID NO: 69313 - protein, 32 aa, Artificial Sequence; identical to SEQ ID NO: 17666
  Cyclic GFR-binding peptide
  MOD_RES (6)..(6): Xaa is C or S

SEQ ID NO: 69314 - protein, 22 aa, Artificial Sequence
  Cyclic GFR-binding peptide
LRSVKMAKVDENEKVVKEVQVD

SEQ ID NO: 69315 - protein, 31 aa, Artificial Sequence
  Cyclic GFR-binding peptide
  MOD_RES (1)..(1): Xaa is C or S
XVPTELRPVQMRKIDEYDKVVKKATVEMVVE

SEQ ID NO: 69316 - protein, 32 aa, Artificial Sequence; identical to SEQ ID NO: 17673
  Cyclic GFR-binding peptide
  MOD_RES (1)..(32): Xaa is C or S

SEQ ID NO: 69317 - protein, 42 aa, Artificial Sequence
  Cyclic GFR-binding peptide
  MOD_RES (7)..(41): Xaa is C or S
NDEGLEXVPTEEEPLTMLYYRIKPHQGQHEQLSNFLQHNKXE

SEQ ID NO: 69318 - protein, 29 aa, Artificial Sequence
  Cyclic GFR-binding peptide
  MOD_RES (1)..(2): Xaa is C or S
XXAPTKLSNITVQIMDDSSNVIIGEMSNM

SEQ ID NO: 69319 - protein, 29 aa, Artificial Sequence
  Cyclic GFR-binding peptide
  MOD_RES (27)..(29): Xaa is C or S
SNITMQIMDEYDKVVIGEMSEMVVEGXGX

SEQ ID NO: 69320 - protein, 32 aa, Artificial Sequence; identical to SEQ ID NO: 17683
  Cyclic GFR-binding peptide
  MOD_RES (32)..(32): Xaa is C or S

SEQ ID NO: 69321 - protein, 30 aa, Artificial Sequence
  Cyclic GFR-binding peptide
  MOD_RES (27)..(29): Xaa is C or S
SNITVQIMDDSSNVIIGEMSNMVVRSXGXH

SEQ ID NO: 69322 - protein, 41 aa, Artificial Sequence
  Cyclic GFR-binding peptide
  MOD_RES (6)..(7)..(38)..(40): Xaa is C or S
ASASPXXVPQDLSNITIQIMVGRTPKVIGEMSMVVKSXKXS

SEQ ID NO: 69323 - protein, 38 aa, Artificial Sequence
  Cyclic GFR-binding peptide
  MOD_RES (2)..(3)..(35)..(37): Xaa is C or S
PXXAPTQLRPVQVRKIDDSSNVIKKATVNMVVRAXGXH

SEQ ID NO: 69324 - protein, 30 aa, Artificial Sequence
  Cyclic GFR-binding peptide
HHEPLPVVYYEYVRKKPKLEQLSNRLEEHL

SEQ ID NO: 69325 - protein, 27 aa, Artificial Sequence
  Cyclic GFR-binding peptide
QALRSVKIAKVVGRKPKVKEVQVMIVR

SEQ ID NO: 69326 - protein, 40 aa, Artificial Sequence
  Cyclic GFR-binding peptide
  MOD_RES (5)..(39): Xaa is C or S
EGLEXVPTEEEPLTMLYYRIKPHQGQHEQLSNFLQHNKXE

SEQ ID NO: 69327 - protein, 30 aa, Artificial Sequence
  Cyclic GFR-binding peptide
  MOD_RES (1)..(1): Xaa is C or S
XAPTQLSNITVQIMDDSSNVIIGEMSNMVV

SEQ ID NO: 69328 - protein, 27 aa, Artificial Sequence
  Cyclic GFR-binding peptide
  MOD_RES (26)..(26): Xaa is C or S
SNITIQIMIGKTPKIIGEMSMIVKSXK

SEQ ID NO: 69329 - protein, 32 aa, Artificial Sequence
  Cyclic GFR-binding peptide
  MOD_RES (6)..(7): Xaa is C or S
TVPKPXXAPTQLRPVQVRKIDDSSNVIKKATV

SEQ ID NO: 69330 - protein, 30 aa, Artificial Sequence; identical to SEQ ID NO: 24076
  Cyclic GFR-binding peptide
  MOD_RES (30)..(30): Xaa is C or S

SEQ ID NO: 69331 - protein, 24 aa, Artificial Sequence
  Cyclic GFR-binding peptide
ALEPLTILYYVGRKPKVEQLSNMI

SEQ ID NO: 69332 - protein, 30 aa, Artificial Sequence; identical to SEQ ID NO: 17698
  Cyclic GFR-binding peptide
  MOD_RES (4)..(5): Xaa is C or S

SEQ ID NO: 69333 - protein, 38 aa, Artificial Sequence
  Cyclic GFR-binding peptide
  MOD_RES (6)..(7): Xaa is C or S
KIPKAXXVPTELSNITMQIMDENEKVVIGEMSDMVVEG

SEQ ID NO: 69334 - protein, 34 aa, Artificial Sequence
  Cyclic GFR-binding peptide
  MOD_RES (3)..(3): Xaa is C or S
VQXRPTQVQLEPLTVLYYEIVRKKPIFEQLSNTL

SEQ ID NO: 69335 - protein, 31 aa, Artificial Sequence; identical to SEQ ID NO: 17701
  Cyclic GFR-binding peptide
  MOD_RES (28)..(30): Xaa is C or S

SEQ ID NO: 69336 - protein, 31 aa, Artificial Sequence; identical to SEQ ID NO: 24080
  Cyclic GFR-binding peptide

SEQ ID NO: 69337 - protein, 39 aa, Artificial Sequence
  Cyclic GFR-binding peptide
  MOD_RES (7)..(7): Xaa is C or S
NDEGLEXVPTEEEPLPMVYYRIKPHQGQHEQLSNFLQHN

SEQ ID NO: 69338 - protein, 37 aa, Artificial Sequence
  Cyclic GFR-binding peptide
  MOD_RES (1)..(35)..(37): Xaa is C or S
XVPTEEEPLTMLYYRIKPHQGQHEQLSNFLQHNKXEX

SEQ ID NO: 69339 - protein, 31 aa, Artificial Sequence
  Cyclic GFR-binding peptide
  MOD_RES (1)..(2): Xaa is C or S
XXAPTKLRPVQVRKIDDSSNVIKKATVNMVV

SEQ ID NO: 69340 - protein, 29 aa, Artificial Sequence
  Cyclic GFR-binding peptide
  MOD_RES (2)..(3): Xaa is C or S
PXXAPTQLEPLPVVYYDDSSNVIEQLSNN

SEQ ID NO: 69341 - protein, 30 aa, Artificial Sequence; identical to SEQ ID NO: 17712
  Cyclic GFR-binding peptide

SEQ ID NO: 69342 - protein, 28 aa, Artificial Sequence
  Cyclic GFR-binding peptide
ELSNITMQIMDENEKVVIGEMSDMVVEG

SEQ ID NO: 69343 - protein, 33 aa, Artificial Sequence
  Cyclic GFR-binding peptide
  MOD_RES (30)..(32): Xaa is C or S
TELSNITMQIMDENEKVVIGEMSDMVVEGXGXR

SEQ ID NO: 69344 - protein, 36 aa, Artificial Sequence; identical to SEQ ID NO: 24083
  Cyclic GFR-binding peptide
  MOD_RES (1)..(35): Xaa is C or S

SEQ ID NO: 69345 - protein, 29 aa, Artificial Sequence
  Cyclic GFR-binding peptide
  MOD_RES (29)..(29): Xaa is C or S
QLRSVKVAKVDDSSNVIKEVQVNMVVRAX

SEQ ID NO: 69346 - protein, 35 aa, Artificial Sequence; identical to SEQ ID NO: 24084
  Cyclic GFR-binding peptide

SEQ ID NO: 69347 - protein, 31 aa, Artificial Sequence; identical to SEQ ID NO: 17714
  Cyclic GFR-binding peptide
  MOD_RES (5)..(5): Xaa is C or S

SEQ ID NO: 69348 - protein, 40 aa, Artificial Sequence
  Cyclic GFR-binding peptide
  MOD_RES (5)..(6)..(37)..(39): Xaa is C or S
SASPXXVSQDLSNITIQIMIGKTPKIIGEMSMIVKSXKXS

SEQ ID NO: 69349 - protein, 33 aa, Artificial Sequence
  Cyclic GFR-binding peptide
  MOD_RES (2)..(3): Xaa is C or S
PXXAPTQLRSVKVAKVDDSSNVIKEVQVNMVVR

SEQ ID NO: 69350 - protein, 33 aa, Artificial Sequence; identical to SEQ ID NO: 17717
  Cyclic GFR-binding peptide
  MOD_RES (30)..(32): Xaa is C or S

SEQ ID NO: 69351 - protein, 32 aa, Artificial Sequence; identical to SEQ ID NO: 24090
  Cyclic GFR-binding peptide
  MOD_RES (3)..(3): Xaa is C or S

SEQ ID NO: 69352 - protein, 33 aa, Artificial Sequence; identical to SEQ ID NO: 24091
  Cyclic GFR-binding peptide
  MOD_RES (4)..(4): Xaa is C or S

SEQ ID NO: 69353 - protein, 26 aa, Artificial Sequence
  Cyclic GFR-binding peptide
PQALSNITIQIMVGRKPKVIGEMSMI

SEQ ID NO: 69354 - protein, 34 aa, Artificial Sequence; identical to SEQ ID NO: 24093
  Cyclic GFR-binding peptide

SEQ ID NO: 69355 - protein, 28 aa, Artificial Sequence
  Cyclic GFR-binding peptide
QVQLEPLPVVYYEIVRKKPIFEQLSNTL

SEQ ID NO: 69356 - protein, 26 aa, Artificial Sequence
  Cyclic GFR-binding peptide
  MOD_RES (1)..(1): Xaa is C or S
XVSQDLRPVQIRKIIGKTPKIKKATV

SEQ ID NO: 69357 - protein, 23 aa, Artificial Sequence
  Cyclic GFR-binding peptide
QLSNITVQIMDDSSNVIIGEMSN

SEQ ID NO: 69358 - protein, 43 aa, Artificial Sequence
  Cyclic GFR-binding peptide
  MOD_RES (6)..(40)..(42): Xaa is C or S
DEGLEXVPTEEEPLPMVYYRIKPHQGQHEQLSNFLQHNKXEXR

SEQ ID NO: 69359 - protein, 42 aa, Artificial Sequence; identical to SEQ ID NO: 24103
  Cyclic GFR-binding peptide
  MOD_RES (3)..(40)..(42): Xaa is C or S

SEQ ID NO: 69360 - protein, 28 aa, Artificial Sequence
  Cyclic GFR-binding peptide
VPQDLRSVKIAKVVGRTPKVKEVQVMVV

SEQ ID NO: 69361 - protein, 36 aa, Artificial Sequence
  Cyclic GFR-binding peptide
  MOD_RES (2)..(3)..(35): Xaa is C or S
AXXVPTELRPVQMRKIDENEKVVKKATVDMVVEGXG

SEQ ID NO: 69362 - protein, 41 aa, Artificial Sequence; identical to SEQ ID NO: 24106
  Cyclic GFR-binding peptide
  MOD_RES (5)..(5): Xaa is C or S

SEQ ID NO: 69363 - protein, 24 aa, Artificial Sequence
  Cyclic GFR-binding peptide
EPLTILYYVGRKPKVEQLSNMIVR

SEQ ID NO: 69364 - protein, 38 aa, Artificial Sequence
  Cyclic GFR-binding peptide
  MOD_RES (2)..(3)..(35)..(37): Xaa is C or S
AXXVPTELRSVKMAKVDENEKVVKEVQVDMVVEGXGXR

SEQ ID NO: 69365 - protein, 36 aa, Artificial Sequence
  Cyclic GFR-binding peptide
  MOD_RES (2)..(3)..(35): Xaa is C or S
PXXAPTKLRPVQVRKIDDSSNVIKKATVNMVVRSXG

SEQ ID NO: 69366 - protein, 33 aa, Artificial Sequence
  Cyclic GFR-binding peptide
  MOD_RES (2)..(3): Xaa is C or S
AXXVPTELRSVKMAKVDEYDKVVKEVQVEMVVE

SEQ ID NO: 69367 - protein, 32 aa, Artificial Sequence
  Cyclic GFR-binding peptide
  MOD_RES (1)..(2): Xaa is C or S
XXVSQDLSNITIQIMIGKTPKIIGEMSMIVKS

SEQ ID NO: 69368 - protein, 42 aa, Artificial Sequence; identical to SEQ ID NO: 17747
  Cyclic GFR-binding peptide
  MOD_RES (6)..(7)..(39)..(41): Xaa is C or S

SEQ ID NO: 69369 - protein, 25 aa, Artificial Sequence
  Cyclic GFR-binding peptide
APTKLRPVQVRKIDDSSNVIKKATV

SEQ ID NO: 69370 - protein, 39 aa, Artificial Sequence
  Cyclic GFR-binding peptide
  MOD_RES (4)..(38): Xaa is C or S
GLEXVPTEEEPLPMVYYRIKPHQGQHEQLSNFLQHNKXE

SEQ ID NO: 69371 - protein, 36 aa, Artificial Sequence; identical to SEQ ID NO: 17753
  Cyclic GFR-binding peptide
  MOD_RES (6)..(7): Xaa is C or S

SEQ ID NO: 69372 - protein, 33 aa, Artificial Sequence
  Cyclic GFR-binding peptide
  MOD_RES (33)..(33): Xaa is C or S
VHHEPLPVVYYEYVRKKPKLEQLSNRLEEHLEX

SEQ ID NO: 69373 - protein, 23 aa, Artificial Sequence
  Cyclic GFR-binding peptide
SNITMQIMDEYDKVVIGEMSEMV

SEQ ID NO: 69374 - protein, 28 aa, Artificial Sequence
  Cyclic GFR-binding peptide
TELEPLPMVYYDEYDKVVEQLSNEMVVE

SEQ ID NO: 69375 - protein, 30 aa, Artificial Sequence; identical to SEQ ID NO: 17763
  Cyclic GFR-binding peptide
  MOD_RES (27)..(29): Xaa is C or S

SEQ ID NO: 69376 - protein, 29 aa, Artificial Sequence
  Cyclic GFR-binding peptide
VPQDLEPLPIVYYVGRTPKVEQLSNMVVK

SEQ ID NO: 69377 - protein, 35 aa, Artificial Sequence; identical to SEQ ID NO: 17769
  Cyclic GFR-binding peptide
  MOD_RES (1)..(33)..(35): Xaa is C or S

SEQ ID NO: 69378 - protein, 38 aa, Artificial Sequence
  Cyclic GFR-binding peptide
  MOD_RES (5)..(6)..(38): Xaa is C or S
VPKPXXAPTKLRSVKVAKVDDSSNVIKEVQVNMVVRSX

SEQ ID NO: 69379 - protein, 32 aa, Artificial Sequence
  Cyclic GFR-binding peptide
  MOD_RES (32)..(32): Xaa is C or S
APTKLSNITVQIMDDSSNVIIGEMSNMVVRSX

SEQ ID NO: 69380 - protein, 40 aa, Artificial Sequence; identical to SEQ ID NO: 17772
  Cyclic GFR-binding peptide
  MOD_RES (6)..(7)..(39): Xaa is C or S

SEQ ID NO: 69381 - protein, 31 aa, Artificial Sequence
  Cyclic GFR-binding peptide
  MOD_RES (29)..(31): Xaa is C or S
ELRSVKMAKVDENEKVVKEVQVDMVVEGXGX

SEQ ID NO: 69382 - protein, 32 aa, Artificial Sequence
  Cyclic GFR-binding peptide
VQLEPLPVVYYEIVRKKPIFEQLSNTLEDHLA

SEQ ID NO: 69383 - protein, 37 aa, Artificial Sequence; identical to SEQ ID NO: 17775
  Cyclic GFR-binding peptide
  MOD_RES (4)..(5)..(37): Xaa is C or S

SEQ ID NO: 69384 - protein, 27 aa, Artificial Sequence
  Cyclic GFR-binding peptide
PTELEPLTMLYYDENEKVVEQLSNDMV

SEQ ID NO: 69385 - protein, 31 aa, Artificial Sequence
  Cyclic GFR-binding peptide
  MOD_RES (4)..(5): Xaa is C or S
AAPXXVPQALSNITIQIMVGRKPKVIGEMSM

SEQ ID NO: 69386 - protein, 30 aa, Artificial Sequence
  Cyclic GFR-binding peptide
  MOD_RES (1)..(1): Xaa is C or S
XVPTELRPVQMRKIDENEKVVKKATVDMVV

SEQ ID NO: 69387 - protein, 40 aa, Artificial Sequence; identical to SEQ ID NO: 17778
  Cyclic GFR-binding peptide
  MOD_RES (6)..(7)..(38)..(40): Xaa is C or S

SEQ ID NO: 69388 - protein, 27 aa, Artificial Sequence
  Cyclic GFR-binding peptide
TQVQLRSVKVAKVEIVRKKPIFKEVQV

SEQ ID NO: 69389 - protein, 30 aa, Artificial Sequence
  Cyclic GFR-binding peptide
  MOD_RES (3)..(4): Xaa is C or S
APXXVPQALSNITIQIMVGRKPKVIGEMSM

SEQ ID NO: 69390 - protein, 34 aa, Artificial Sequence; identical to SEQ ID NO: 24135
  Cyclic GFR-binding peptide
  MOD_RES (34)..(34): Xaa is C or S

SEQ ID NO: 69391 - protein, 32 aa, Artificial Sequence; identical to SEQ ID NO: 24137
  Cyclic GFR-binding peptide
  MOD_RES (2)..(2): Xaa is C or S

SEQ ID NO: 69392 - protein, 37 aa, Artificial Sequence; identical to SEQ ID NO: 24138
  Cyclic GFR-binding peptide
  MOD_RES (2)..(2): Xaa is C or S

SEQ ID NO: 69393 - protein, 29 aa, Artificial Sequence
  Cyclic GFR-binding peptide
  MOD_RES (28)..(28): Xaa is C or S
LEPLTMLYYDEYDKVVEQLSNEMVVEGXG

SEQ ID NO: 69394 - protein, 39 aa, Artificial Sequence
  Cyclic GFR-binding peptide
  MOD_RES (6)..(7)..(39): Xaa is C or S
SIPKAXXVPTELSNITMQIMDEYDKVVIGEMSEMVVEGX

SEQ ID NO: 69395 - protein, 33 aa, Artificial Sequence
  Cyclic GFR-binding peptide
  MOD_RES (32)..(32): Xaa is C or S
HHEPLTVLYYEYVRKKPKLEQLSNRLEEHLEXA

SEQ ID NO: 69396 - protein, 29 aa, Artificial Sequence
  Cyclic GFR-binding peptide
  MOD_RES (29)..(29): Xaa is C or S
QALRSVKIAKVVGRKPKVKEVQVMIVRSX

SEQ ID NO: 69397 - protein, 38 aa, Artificial Sequence; identical to SEQ ID NO: 17792
  Cyclic GFR-binding peptide
  MOD_RES (5)..(6)..(37): Xaa is C or S

SEQ ID NO: 69398 - protein, 31 aa, Artificial Sequence; identical to SEQ ID NO: 17794
  Cyclic GFR-binding peptide
  MOD_RES (3)..(4): Xaa is C or S

SEQ ID NO: 69399 - protein, 27 aa, Artificial Sequence
  Cyclic GFR-binding peptide
LRSVKMAKVDEYDKVVKEVQVEMVVEG

SEQ ID NO: 69400 - protein, 21 aa, Artificial Sequence
  Cyclic GFR-binding peptide
EPLPIVYYIGKTPKIEQLSNM

SEQ ID NO: 69401 - protein, 39 aa, Artificial Sequence
  Cyclic GFR-binding peptide
  MOD_RES (5)..(6)..(37)..(39): Xaa is C or S
SASPXXVSQDLRPVQIRKIIGKTPKIKKATVMIVKSXKX

SEQ ID NO: 69402 - protein, 41 aa, Artificial Sequence
  Cyclic GFR-binding peptide
  MOD_RES (6)..(7)..(39)..(41): Xaa is C or S
TVPKPXXAPTQLRSVKVAKVDDSSNVIKEVQVNMVVRAXGX

SEQ ID NO: 69403 - protein, 24 aa, Artificial Sequence
  Cyclic GFR-binding peptide
LRSVKIAKVVGRKPKVKEVQVMIV

SEQ ID NO: 69404 - protein, 26 aa, Artificial Sequence
  Cyclic GFR-binding peptide
  MOD_RES (1)..(1): Xaa is C or S
XVPTELEPLPMVYYDEYDKVVEQLSN

SEQ ID NO: 69405 - protein, 24 aa, Artificial Sequence
  Cyclic GFR-binding peptide
EPLPIVYYIGKTPKIEQLSNMIVK

SEQ ID NO: 69406 - protein, 26 aa, Artificial Sequence
  Cyclic GFR-binding peptide
LSNITVQIMDDSSNVIIGEMSNMVVR

SEQ ID NO: 69407 - protein, 35 aa, Artificial Sequence
  Cyclic GFR-binding peptide
  MOD_RES (4)..(4): Xaa is C or S
GLEXVPTEEEPLTMLYYRIKPHQGQHEQLSNFLQH

SEQ ID NO: 69408 - protein, 27 aa, Artificial Sequence
  Cyclic GFR-binding peptide
HHEPLPVVYYEYVRKKPKLEQLSNRLE

SEQ ID NO: 69409 - protein, 28 aa, Artificial Sequence
  Cyclic GFR-binding peptide
  MOD_RES (2)..(3): Xaa is C or S
PXXVSQDLRSVKIAKVIGKTPKIKEVQV

SEQ ID NO: 69410 - protein, 24 aa, Artificial Sequence
  Cyclic GFR-binding peptide
LSNITIQIMVGRKPKVIGEMSMIV

SEQ ID NO: 69411 - protein, 33 aa, Artificial Sequence; identical to SEQ ID NO: 17816
  Cyclic GFR-binding peptide
  MOD_RES (3)..(4): Xaa is C or S

SEQ ID NO: 69412 - protein, 35 aa, Artificial Sequence
  Cyclic GFR-binding peptide
  MOD_RES (1)..(33)..(35): Xaa is C or S
XAPTQLRPVQVRKIDDSSNVIKKATVNMVVRAXGX

SEQ ID NO: 69413 - protein, 25 aa, Artificial Sequence
  Cyclic GFR-binding peptide
QLSNITVQIMDDSSNVIIGEMSNMV

SEQ ID NO: 69414 - protein, 29 aa, Artificial Sequence
  Cyclic GFR-binding peptide
  MOD_RES (1)..(2): Xaa is C or S
XXVPQALRPVQIRKIVGRKPKVKKATVMI

SEQ ID NO: 69415 - protein, 24 aa, Artificial Sequence
  Cyclic GFR-binding peptide
PTELRPVQMRKIDEYDKVVKKATV

SEQ ID NO: 69416 - protein, 26 aa, Artificial Sequence
  Cyclic GFR-binding peptide
  MOD_RES (1)..(1): Xaa is C or S
XAPTKLRSVKVAKVDDSSNVIKEVQV

SEQ ID NO: 69417 - protein, 37 aa, Artificial Sequence; identical to SEQ ID NO: 17821
  Cyclic GFR-binding peptide
  MOD_RES (4)..(5)..(36): Xaa is C or S

SEQ ID NO: 69418 - protein, 26 aa, Artificial Sequence
  Cyclic GFR-binding peptide
VSQDLSNITIQIMIGKTPKIIGEMSM

SEQ ID NO: 69419 - protein, 26 aa, Artificial Sequence
  Cyclic GFR-binding peptide
QLRPVQVRKIDDSSNVIKKATVNMVV

SEQ ID NO: 69420 - protein, 30 aa, Artificial Sequence
  Cyclic GFR-binding peptide
VPTEEEPLTMLYYRIKPHQGQHEQLSNFLQ

SEQ ID NO: 69421 - protein, 31 aa, Artificial Sequence; identical to SEQ ID NO: 17824
  Cyclic GFR-binding peptide
  MOD_RES (1)..(2): Xaa is C or S

SEQ ID NO: 69422 - protein, 24 aa, Artificial Sequence
  Cyclic GFR-binding peptide
LEPLPMVYYDEYDKVVEQLSNEMV

SEQ ID NO: 69423 - protein, 36 aa, Artificial Sequence
  Cyclic GFR-binding peptide
  MOD_RES (1)..(2)..(34)..(36): Xaa is C or S
XXAPTKLRSVKVAKVDDSSNVIKEVQVNMVVRSXGX

SEQ ID NO: 69424 - protein, 34 aa, Artificial Sequence; identical to SEQ ID NO: 17828
  Cyclic GFR-binding peptide
  MOD_RES (4)..(5): Xaa is C or S

SEQ ID NO: 69425 - protein, 39 aa, Artificial Sequence
  Cyclic GFR-binding peptide
  MOD_RES (2)..(39): Xaa is C or S
QXRPTQVQLEPLPVVYYEIVRKKPIFEQLSNTLEDHLAX

SEQ ID NO: 69426 - protein, 31 aa, Artificial Sequence; identical to SEQ ID NO: 17832
  Cyclic GFR-binding peptide
  MOD_RES (5)..(6): Xaa is C or S

SEQ ID NO: 69427 - protein, 27 aa, Artificial Sequence
  Cyclic GFR-binding peptide
  MOD_RES (1)..(1): Xaa is C or S
XAPTKLEPLPVVYYDDSSNVIEQLSNN

SEQ ID NO: 69428 - protein, 25 aa, Artificial Sequence
  Cyclic GFR-binding peptide
LSNITVQIMEIVRKKPIFIGEMSTL

SEQ ID NO: 69429 - protein, 36 aa, Artificial Sequence; identical to SEQ ID NO: 17835
  Cyclic GFR-binding peptide
  MOD_RES (3)..(4)..(36): Xaa is C or S

SEQ ID NO: 69430 - protein, 44 aa, Artificial Sequence
  Cyclic GFR-binding peptide
  MOD_RES (4)..(41)..(43): Xaa is C or S
NVQXRPTQVQLEPLPVVYYEIVRKKPIFEQLSNTLEDHLAXKXE

SEQ ID NO: 69431 - protein, 25 aa, Artificial Sequence
  Cyclic GFR-binding peptide
PTELRSVKMAKVDENEKVVKEVQVD

SEQ ID NO: 69432 - protein, 39 aa, Artificial Sequence; identical to SEQ ID NO: 17836
  Cyclic GFR-binding peptide
  MOD_RES (6)..(7)..(39): Xaa is C or S

SEQ ID NO: 69433 - protein, 29 aa, Artificial Sequence
  Cyclic GFR-binding peptide
  MOD_RES (28)..(28): Xaa is C or S
LEPLTVLYYDDSSNVIEQLSNNMVVRSXG

SEQ ID NO: 69434 - protein, 25 aa, Artificial Sequence
  Cyclic GFR-binding peptide
EPLTMLYYDENEKVVEQLSNDMVVE

SEQ ID NO: 69435 - protein, 32 aa, Artificial Sequence
  Cyclic GFR-binding peptide
  MOD_RES (2)..(2): Xaa is C or S
TXAPTKLRSVKVAKVDDSSNVIKEVQVNMVVR

SEQ ID NO: 69436 - protein, 39 aa, Artificial Sequence
  Cyclic GFR-binding peptide
  MOD_RES (5)..(6)..(37)..(39): Xaa is C or S
SASPXXVPQDLRPVQIRKIVGRTPKVKKATVMVVKSXKX

SEQ ID NO: 69437 - protein, 27 aa, Artificial Sequence
  Cyclic GFR-binding peptide
PTELRPVQMRKIDENEKVVKKATVDMV

SEQ ID NO: 69438 - protein, 31 aa, Artificial Sequence
  Cyclic GFR-binding peptide
  MOD_RES (30)..(30): Xaa is C or S
PQDLRPVQIRKIVGRTPKVKKATVMVVKSXK

SEQ ID NO: 69439 - protein, 32 aa, Artificial Sequence; identical to SEQ ID NO: 24173
  Cyclic GFR-binding peptide

SEQ ID NO: 69440 - protein, 35 aa, Artificial Sequence; identical to SEQ ID NO: 17843
  Cyclic GFR-binding peptide
  MOD_RES (6)..(7): Xaa is C or S

SEQ ID NO: 69441 - protein, 39 aa, Artificial Sequence; identical to SEQ ID NO: 17847
  Cyclic GFR-binding peptide
  MOD_RES (5)..(6)..(38): Xaa is C or S

SEQ ID NO: 69442 - protein, 27 aa, Artificial Sequence
  Cyclic GFR-binding peptide
  MOD_RES (1)..(1): Xaa is C or S
XVPQALRSVKIAKVVGRKPKVKEVQVM

SEQ ID NO: 69443 - protein, 28 aa, Artificial Sequence
  Cyclic GFR-binding peptide
  MOD_RES (1)..(1): Xaa is C or S
XVPTELRSVKMAKVDENEKVVKEVQVDM

SEQ ID NO: 69444 - protein, 30 aa, Artificial Sequence
  Cyclic GFR-binding peptide
  MOD_RES (4)..(5): Xaa is C or S
PKPXXAPTQLRSVKVAKVDDSSNVIKEVQV

SEQ ID NO: 69445 - protein, 37 aa, Artificial Sequence
  Cyclic GFR-binding peptide
  MOD_RES (5)..(5): Xaa is C or S
SSVKXQPSRVHHEPLTVLYYEYVRKKPKLEQLSNRLE

SEQ ID NO: 69446 - protein, 38 aa, Artificial Sequence; identical to SEQ ID NO: 24179
  Cyclic GFR-binding peptide
  MOD_RES (1)..(35)..(37): Xaa is C or S

SEQ ID NO: 69447 - protein, 34 aa, Artificial Sequence; identical to SEQ ID NO: 24180
  Cyclic GFR-binding peptide
  MOD_RES (2)..(2): Xaa is C or S

SEQ ID NO: 69448 - protein, 43 aa, Artificial Sequence; identical to SEQ ID NO: 24181
  Cyclic GFR-binding peptide
  MOD_RES (3)..(40)..(42): Xaa is C or S

SEQ ID NO: 69449 - protein, 33 aa, Artificial Sequence
  Cyclic GFR-binding peptide
  MOD_RES (31)..(33): Xaa is C or S
PTKLRPVQVRKIDDSSNVIKKATVNMVVRSXGX

SEQ ID NO: 69450 - protein, 37 aa, Artificial Sequence
  Cyclic GFR-binding peptide
  MOD_RES (4)..(5)..(37): Xaa is C or S
PKPXXAPTKLSNITVQIMDDSSNVIIGEMSNMVVRSX

SEQ ID NO: 69451 - protein, 35 aa, Artificial Sequence
  Cyclic GFR-binding peptide
  MOD_RES (1)..(2)..(34): Xaa is C or S
XXVPTELRPVQMRKIDENEKVVKKATVDMVVEGXG

SEQ ID NO: 69452 - protein, 22 aa, Artificial Sequence
  Cyclic GFR-binding peptide
RPVQMRKIRIKPHQGQHKKATV

SEQ ID NO: 69453 - protein, 37 aa, Artificial Sequence; identical to SEQ ID NO: 17856
  Cyclic GFR-binding peptide
  MOD_RES (1)..(2)..(34)..(36): Xaa is C or S

SEQ ID NO: 69454 - protein, 39 aa, Artificial Sequence; identical to SEQ ID NO: 24190
  Cyclic GFR-binding peptide
  MOD_RES (1)..(38): Xaa is C or S

SEQ ID NO: 69455 - protein, 30 aa, Artificial Sequence; identical to SEQ ID NO: 17861
  Cyclic GFR-binding peptide
  MOD_RES (27)..(29): Xaa is C or S

SEQ ID NO: 69456 - protein, 32 aa, Artificial Sequence
  Cyclic GFR-binding peptide
  MOD_RES (30)..(32): Xaa is C or S
TKLRPVQVRKIDDSSNVIKKATVNMVVRSXGX

SEQ ID NO: 69457 - protein, 36 aa, Artificial Sequence
  Cyclic GFR-binding peptide
  MOD_RES (4)..(5): Xaa is C or S
PKAXXVPTELRPVQMRKIDENEKVVKKATVDMVVEG

SEQ ID NO: 69458 - protein, 34 aa, Artificial Sequence; identical to SEQ ID NO: 17865
  Cyclic GFR-binding peptide
  MOD_RES (31)..(33): Xaa is C or S

SEQ ID NO: 69459 - protein, 38 aa, Artificial Sequence
  Cyclic GFR-binding peptide
  MOD_RES (36)..(38): Xaa is C or S
PTQVQLEPLPVVYYEIVRKKPIFEQLSNTLEDHLAXKX

SEQ ID NO: 69460 - protein, 24 aa, Artificial Sequence
  Cyclic GFR-binding peptide
PQALSNITIQIMVGRKPKVIGEMS

SEQ ID NO: 69461 - protein, 30 aa, Artificial Sequence
  Cyclic GFR-binding peptide
  MOD_RES (4)..(5): Xaa is C or S
ASPXXVSQDLRSVKIAKVIGKTPKIKEVQV

SEQ ID NO: 69462 - protein, 30 aa, Artificial Sequence
  Cyclic GFR-binding peptide
  MOD_RES (1)..(1): Xaa is C or S
XVPQDLRSVKIAKVVGRTPKVKEVQVMVVK

SEQ ID NO: 69463 - protein, 31 aa, Artificial Sequence; identical to SEQ ID NO: 17869
  Cyclic GFR-binding peptide
  MOD_RES (28)..(30): Xaa is C or S

SEQ ID NO: 69464 - protein, 30 aa, Artificial Sequence
  Cyclic GFR-binding peptide
  MOD_RES (27)..(29): Xaa is C or S
RPVQVRKIDDSSNVIKKATVNMVVRAXGXH

SEQ ID NO: 69465 - protein, 36 aa, Artificial Sequence
  Cyclic GFR-binding peptide
  MOD_RES (6)..(7): Xaa is C or S
ASASPXXVSQDLRPVQIRKIIGKTPKIKKATVMIVK

SEQ ID NO: 69466 - protein, 22 aa, Artificial Sequence
  Cyclic GFR-binding peptide
EPLTMLYYDENEKVVEQLSNDM

SEQ ID NO: 69467 - protein, 36 aa, Artificial Sequence
  Cyclic GFR-binding peptide
  MOD_RES (3)..(4)..(36): Xaa is C or S
KPXXAPTKLRSVKVAKVDDSSNVIKEVQVNMVVRSX

SEQ ID NO: 69468 - protein, 37 aa, Artificial Sequence; identical to SEQ ID NO: 24200
  Cyclic GFR-binding peptide
  MOD_RES (37)..(37): Xaa is C or S

SEQ ID NO: 69469 - protein, 40 aa, Artificial Sequence; identical to SEQ ID NO: 17882
  Cyclic GFR-binding peptide
  MOD_RES (6)..(7)..(38)..(40): Xaa is C or S

SEQ ID NO: 69470 - protein, 36 aa, Artificial Sequence; identical to SEQ ID NO: 24201
  Cyclic GFR-binding peptide
  MOD_RES (5)..(5): Xaa is C or S

SEQ ID NO: 69471 - protein, 34 aa, Artificial Sequence
  Cyclic GFR-binding peptide
  MOD_RES (1)..(1): Xaa is C or S
XVPTEEEPLPMVYYRIKPHQGQHEQLSNFLQHNK

SEQ ID NO: 69472 - protein, 32 aa, Artificial Sequence
  Cyclic GFR-binding peptide
TQVQLEPLTVLYYEIVRKKPIFEQLSNTLEDH

SEQ ID NO: 69473 - protein, 30 aa, Artificial Sequence
  Cyclic GFR-binding peptide
VPTELRSVKMAKVDENEKVVKEVQVDMVVE

SEQ ID NO: 69474 - protein, 28 aa, Artificial Sequence
  Cyclic GFR-binding peptide
VPQDLSNITIQIMVGRTPKVIGEMSMVV

SEQ ID NO: 69475 - protein, 22 aa, Artificial Sequence
  Cyclic GFR-binding peptide
LEPLTILYYVGRKPKVEQLSNM

SEQ ID NO: 69476 - protein, 33 aa, Artificial Sequence
  Cyclic GFR-binding peptide
  MOD_RES (3)..(3): Xaa is C or S
VQXRPTQVQLEPLTVLYYEIVRKKPIFEQLSNT

SEQ ID NO: 69477 - protein, 38 aa, Artificial Sequence
  Cyclic GFR-binding peptide
  MOD_RES (4)..(5)..(36)..(38): Xaa is C or S
AAPXXVPQALRSVKIAKVVGRKPKVKEVQVMIVRSXKX

SEQ ID NO: 69478 - protein, 29 aa, Artificial Sequence
  Cyclic GFR-binding peptide
  MOD_RES (28)..(28): Xaa is C or S
LRSVKVAKVDDSSNVIKEVQVNMVVRSXG

SEQ ID NO: 69479 - protein, 26 aa, Artificial Sequence
  Cyclic GFR-binding peptide
LRSVKMAKVDEYDKVVKEVQVEMVVE

SEQ ID NO: 69480 - protein, 27 aa, Artificial Sequence
  Cyclic GFR-binding peptide
LEPLTVLYYEIVRKKPIFEQLSNTLED

SEQ ID NO: 69481 - protein, 31 aa, Artificial Sequence
  Cyclic GFR-binding peptide
  MOD_RES (1)..(2): Xaa is C or S
XXAPTQLSNITVQIMDDSSNVIIGEMSNMVV

SEQ ID NO: 69482 - protein, 32 aa, Artificial Sequence
  Cyclic GFR-binding peptide
  MOD_RES (5)..(6): Xaa is C or S
SAAPXXVPQALSNITIQIMVGRKPKVIGEMSM

SEQ ID NO: 69483 - protein, 31 aa, Artificial Sequence
  Cyclic GFR-binding peptide
  MOD_RES (29)..(31): Xaa is C or S
ELRSVKMAKVDEYDKVVKEVQVEMVVEGXGX

SEQ ID NO: 69484 - protein, 24 aa, Artificial Sequence
  Cyclic GFR-binding peptide
KLSNITVQIMDDSSNVIIGEMSNM

SEQ ID NO: 69485 - protein, 24 aa, Artificial Sequence
  Cyclic GFR-binding peptide
RPVQIRKIIGKTPKIKKATVMIVK

SEQ ID NO: 69486 - protein, 30 aa, Artificial Sequence
  Cyclic GFR-binding peptide
  MOD_RES (1)..(1): Xaa is C or S
XVPTEEEPLPMVYYRIKPHQGQHEQLSNFL

SEQ ID NO: 69487 - protein, 31 aa, Artificial Sequence; identical to SEQ ID NO: 24214
  Cyclic GFR-binding peptide

SEQ ID NO: 69488 - protein, 28 aa, Artificial Sequence
  Cyclic GFR-binding peptide
APTKLEPLTVLYYDDSSNVIEQLSNNMV

SEQ ID NO: 69489 - protein, 37 aa, Artificial Sequence
  Cyclic GFR-binding peptide
  MOD_RES (36)..(36): Xaa is C or S
PTQVQLEPLTVLYYEIVRKKPIFEQLSNTLEDHLAXK

SEQ ID NO: 69490 - protein, 34 aa, Artificial Sequence
  Cyclic GFR-binding peptide
  MOD_RES (1)..(2)..(34): Xaa is C or S
XXAPTKLRPVQVRKIDDSSNVIKKATVNMVVRSX

SEQ ID NO: 69491 - protein, 31 aa, Artificial Sequence
  Cyclic GFR-binding peptide
  MOD_RES (2)..(2): Xaa is C or S
TXAPTKLRSVKVAKVDDSSNVIKEVQVNMVV

SEQ ID NO: 69492 - protein, 34 aa, Artificial Sequence; identical to SEQ ID NO: 24217
  Cyclic GFR-binding peptide
  MOD_RES (7)..(7): Xaa is C or S

SEQ ID NO: 69493 - protein, 31 aa, Artificial Sequence
  Cyclic GFR-binding peptide
VQLEPLPVVYYEIVRKKPIFEQLSNTLEDHL

SEQ ID NO: 69494 - protein, 30 aa, Artificial Sequence; identical to SEQ ID NO: 17919
  Cyclic GFR-binding peptide
  MOD_RES (3)..(4): Xaa is C or S

SEQ ID NO: 69495 - protein, 25 aa, Artificial Sequence
  Cyclic GFR-binding peptide
ERSVKMAKVRIKPHQGQHKEVQVFL

SEQ ID NO: 69496 - protein, 36 aa, Artificial Sequence
  Cyclic GFR-binding peptide
  MOD_RES (6)..(7): Xaa is C or S
SIPKAXXVPTELSNITMQIMDEYDKVVIGEMSEMVV

SEQ ID NO: 69497 - protein, 30 aa, Artificial Sequence
  Cyclic GFR-binding peptide
PTKLRPVQVRKIDDSSNVIKKATVNMVVRS

SEQ ID NO: 69498 - protein, 38 aa, Artificial Sequence
  Cyclic GFR-binding peptide
  MOD_RES (37)..(37): Xaa is C or S
QPSRVHHEPLPVVYYEYVRKKPKLEQLSNRLEEHLEXA

SEQ ID NO: 69499 - protein, 26 aa, Artificial Sequence
  Cyclic GFR-binding peptide
  MOD_RES (1)..(1): Xaa is C or S
XAPTKLEPLPVVYYDDSSNVIEQLSN

SEQ ID NO: 69500 - protein, 31 aa, Artificial Sequence; identical to SEQ ID NO: 17930
  Cyclic GFR-binding peptide
  MOD_RES (31)..(31): Xaa is C or S

SEQ ID NO: 69501 - protein, 27 aa, Artificial Sequence
  Cyclic GFR-binding peptide
QVQLEPLPVVYYEIVRKKPIFEQLSNT

SEQ ID NO: 69502 - protein, 35 aa, Artificial Sequence
  Cyclic GFR-binding peptide
  MOD_RES (5)..(6): Xaa is C or S
SAAPXXVPQALSNITIQIMVGRKPKVIGEMSMIVR

SEQ ID NO: 69503 - protein, 40 aa, Artificial Sequence
  Cyclic GFR-binding peptide
  MOD_RES (7)..(39): Xaa is C or S
HVTKPTXAPTKLRPVQVRKIDDSSNVIKKATVNMVVRSXG

SEQ ID NO: 69504 - protein, 32 aa, Artificial Sequence
  Cyclic GFR-binding peptide
  MOD_RES (1)..(2): Xaa is C or S
XXAPTQLSNITVQIMDDSSNVIIGEMSNMVVR

SEQ ID NO: 69505 - protein, 39 aa, Artificial Sequence
  Cyclic GFR-binding peptide
  MOD_RES (1)..(38): Xaa is C or S
XRPTQVQLEPLTVLYYEIVRKKPIFEQLSNTLEDHLAXK

SEQ ID NO: 69506 - protein, 28 aa, Artificial Sequence
  Cyclic GFR-binding peptide
  MOD_RES (28)..(28): Xaa is C or S
DLEPLPIVYYVGRTPKVEQLSNMVVKSX

SEQ ID NO: 69507 - protein, 31 aa, Artificial Sequence; identical to SEQ ID NO: 17948
  Cyclic GFR-binding peptide
  MOD_RES (4)..(5): Xaa is C or S

SEQ ID NO: 69508 - protein, 40 aa, Artificial Sequence; identical to SEQ ID NO: 24239
  Cyclic GFR-binding peptide
  MOD_RES (5)..(5): Xaa is C or S

SEQ ID NO: 69509 - protein, 27 aa, Artificial Sequence
  Cyclic GFR-binding peptide
RVHHRPVQVRKIEYVRKKPKLKKATVR

SEQ ID NO: 69510 - protein, 37 aa, Artificial Sequence; identical to SEQ ID NO: 17952
  Cyclic GFR-binding peptide
  MOD_RES (4)..(5)..(37): Xaa is C or S

SEQ ID NO: 69511 - protein, 35 aa, Artificial Sequence; identical to SEQ ID NO: 24243
  Cyclic GFR-binding peptide

SEQ ID NO: 69512 - protein, 31 aa, Artificial Sequence
  Cyclic GFR-binding peptide
  MOD_RES (3)..(3): Xaa is C or S
PTXAPTKLRPVQVRKIDDSSNVIKKATVNMV

SEQ ID NO: 69513 - protein, 38 aa, Artificial Sequence
  Cyclic GFR-binding peptide
  MOD_RES (3)..(4)..(35)..(37): Xaa is C or S
APXXVPQALSNITIQIMVGRKPKVIGEMSMIVRSXKXS

SEQ ID NO: 69514 - protein, 29 aa, Artificial Sequence
  Cyclic GFR-binding peptide
  MOD_RES (2)..(3): Xaa is C or S
AXXVPTELEPLPMVYYDEYDKVVEQLSNE

SEQ ID NO: 69515 - protein, 32 aa, Artificial Sequence; identical to SEQ ID NO: 17956
  Cyclic GFR-binding peptide
  MOD_RES (6)..(7): Xaa is C or S

SEQ ID NO: 69516 - protein, 26 aa, Artificial Sequence
  Cyclic GFR-binding peptide
PTEERSVKMAKVRIKPHQGQHKEVQV

SEQ ID NO: 69517 - protein, 33 aa, Artificial Sequence
  Cyclic GFR-binding peptide
  MOD_RES (5)..(6): Xaa is C or S
SAAPXXVPQALSNITIQIMVGRKPKVIGEMSMI

SEQ ID NO: 69518 - protein, 28 aa, Artificial Sequence
  Cyclic GFR-binding peptide
TELRSVKMAKVDEYDKVVKEVQVEMVVE

SEQ ID NO: 69519 - protein, 30 aa, Artificial Sequence
  Cyclic GFR-binding peptide
  MOD_RES (1)..(1): Xaa is C or S
XVPQALRSVKIAKVVGRKPKVKEVQVMIVR

SEQ ID NO: 69520 - protein, 28 aa, Artificial Sequence
  Cyclic GFR-binding peptide
  MOD_RES (1)..(2): Xaa is C or S
XXAPTKLSNITVQIMDDSSNVIIGEMSN

SEQ ID NO: 69521 - protein, 33 aa, Artificial Sequence; identical to SEQ ID NO: 24252
  Cyclic GFR-binding peptide

SEQ ID NO: 69522 - protein, 30 aa, Artificial Sequence
  Cyclic GFR-binding peptide
QVQLEPLPVVYYEIVRKKPIFEQLSNTLED

SEQ ID NO: 69523 - protein, 33 aa, Artificial Sequence
  Cyclic GFR-binding peptide
  MOD_RES (30)..(32): Xaa is C or S
TELSNITMQIMDEYDKVVIGEMSEMVVEGXGXR

SEQ ID NO: 69524 - protein, 31 aa, Artificial Sequence; identical to SEQ ID NO: 17961
  Cyclic GFR-binding peptide
  MOD_RES (29)..(31): Xaa is C or S

SEQ ID NO: 69525 - protein, 38 aa, Artificial Sequence
  Cyclic GFR-binding peptide
  MOD_RES (4)..(5)..(37): Xaa is C or S
PKAXXVPTELRPVQMRKIDENEKVVKKATVDMVVEGXG

SEQ ID NO: 69526 - protein, 28 aa, Artificial Sequence
  Cyclic GFR-binding peptide
EPLTMLYYRIKPHQGQHEQLSNFLQHNK

SEQ ID NO: 69527 - protein, 29 aa, Artificial Sequence
  Cyclic GFR-binding peptide
  MOD_RES (3)..(3): Xaa is C or S
PTXAPTKLSNITVQIMDDSSNVIIGEMSN

SEQ ID NO: 69528 - protein, 22 aa, Artificial Sequence
  Cyclic GFR-binding peptide
SNITVQIMEYVRKKPKLIGEMS

SEQ ID NO: 69529 - protein, 29 aa, Artificial Sequence
  Cyclic GFR-binding peptide
  MOD_RES (27)..(29): Xaa is C or S
SNITMQIMDENEKVVIGEMSDMVVEGXGX

SEQ ID NO: 69530 - protein, 26 aa, Artificial Sequence
  Cyclic GFR-binding peptide
QDLRPVQIRKIVGRTPKVKKATVMVV

SEQ ID NO: 69531 - protein, 37 aa, Artificial Sequence; identical to SEQ ID NO: 24264
  Cyclic GFR-binding peptide
  MOD_RES (1)..(1): Xaa is C or S

SEQ ID NO: 69532 - protein, 35 aa, Artificial Sequence
  Cyclic GFR-binding peptide
  MOD_RES (5)..(5): Xaa is C or S
SSVKXQPSRVHHEPLPVVYYEYVRKKPKLEQLSNR

SEQ ID NO: 69533 - protein, 29 aa, Artificial Sequence
  Cyclic GFR-binding peptide
  MOD_RES (2)..(3): Xaa is C or S
PXXAPTKLRPVQVRKIDDSSNVIKKATVN

SEQ ID NO: 69534 - protein, 42 aa, Artificial Sequence
  Cyclic GFR-binding peptide
  MOD_RES (6)..(7)..(39)..(41): Xaa is C or S
YVPKPXXAPTKLRSVKVAKVDDSSNVIKEVQVNMVVRSXGXH

SEQ ID NO: 69535 - protein, 24 aa, Artificial Sequence
  Cyclic GFR-binding peptide
PTQLEPLTVLYYDDSSNVIEQLSN

SEQ ID NO: 69536 - protein, 43 aa, Artificial Sequence
  Cyclic GFR-binding peptide
  MOD_RES (3)..(40)..(42): Xaa is C or S
VKXQPSRVHHEPLTVLYYEYVRKKPKLEQLSNRLEEHLEXAXA

SEQ ID NO: 69537 - protein, 34 aa, Artificial Sequence
  Cyclic GFR-binding peptide
  MOD_RES (3)..(4): Xaa is C or S
KPXXAPTQLRSVKVAKVDDSSNVIKEVQVNMVVR

SEQ ID NO: 69538 - protein, 33 aa, Artificial Sequence
  Cyclic GFR-binding peptide
  MOD_RES (6)..(7): Xaa is C or S
TVPKPXXAPTQLRSVKVAKVDDSSNVIKEVQVN

SEQ ID NO: 69539 - protein, 33 aa, Artificial Sequence
  Cyclic GFR-binding peptide
  MOD_RES (7)..(7): Xaa is C or S
HVTKPTXAPTKLRSVKVAKVDDSSNVIKEVQVN

SEQ ID NO: 69540 - protein, 32 aa, Artificial Sequence
  Cyclic GFR-binding peptide
  MOD_RES (29)..(31): Xaa is C or S
QLRSVKVAKVDDSSNVIKEVQVNMVVRAXGXH

SEQ ID NO: 69541 - protein, 28 aa, Artificial Sequence
  Cyclic GFR-binding peptide
  MOD_RES (28)..(28): Xaa is C or S
LRPVQVRKIDDSSNVIKKATVNMVVRSX

SEQ ID NO: 69542 - protein, 29 aa, Artificial Sequence
  Cyclic GFR-binding peptide
  MOD_RES (1)..(2): Xaa is C or S
XXAPTQLEPLPVVYYDDSSNVIEQLSNNM

SEQ ID NO: 69543 - protein, 33 aa, Artificial Sequence
  Cyclic GFR-binding peptide
  MOD_RES (5)..(6): Xaa is C or S
IPKAXXVPTELRPVQMRKIDENEKVVKKATVDM

SEQ ID NO: 69544 - protein, 37 aa, Artificial Sequence
  Cyclic GFR-binding peptide
  MOD_RES (4)..(5)..(37): Xaa is C or S
PKAXXVPTELRSVKMAKVDEYDKVVKEVQVEMVVEGX

SEQ ID NO: 69545 - protein, 34 aa, Artificial Sequence
  Cyclic GFR-binding peptide
  MOD_RES (2)..(3): Xaa is C or S
PXXAPTKLRPVQVRKIDDSSNVIKKATVNMVVRS

SEQ ID NO: 69546 - protein, 31 aa, Artificial Sequence
  Cyclic GFR-binding peptide
  MOD_RES (29)..(31): Xaa is C or S
QLSNITVQIMDDSSNVIIGEMSNMVVRAXGX

SEQ ID NO: 69547 - protein, 32 aa, Artificial Sequence
  Cyclic GFR-binding peptide
VHHEPLTVLYYEYVRKKPKLEQLSNRLEEHLE

SEQ ID NO: 69548 - protein, 29 aa, Artificial Sequence
  Cyclic GFR-binding peptide
  MOD_RES (29)..(29): Xaa is C or S
EPLPMVYYRIKPHQGQHEQLSNFLQHNKX

SEQ ID NO: 69549 - protein, 33 aa, Artificial Sequence
  Cyclic GFR-binding peptide
  MOD_RES (1)..(1): Xaa is C or S
XVPTEEEPLPMVYYRIKPHQGQHEQLSNFLQHN

SEQ ID NO: 69550 - protein, 32 aa, Artificial Sequence
  Cyclic GFR-binding peptide
  MOD_RES (2)..(2): Xaa is C or S
EXVPTEEEPLPMVYYRIKPHQGQHEQLSNFLQ

SEQ ID NO: 69551 - protein, 26 aa, Artificial Sequence
  Cyclic GFR-binding peptide
VPQDLSNITIQIMVGRTPKVIGEMSM

SEQ ID NO: 69552 - protein, 33 aa, Artificial Sequence
  Cyclic GFR-binding peptide
TQVQLEPLTVLYYEIVRKKPIFEQLSNTLEDHL

SEQ ID NO: 69553 - protein, 26 aa, Artificial Sequence
  Cyclic GFR-binding peptide
  MOD_RES (1)..(1): Xaa is C or S
XVPQALRSVKIAKVVGRKPKVKEVQV

SEQ ID NO: 69554 - protein, 29 aa, Artificial Sequence
  Cyclic GFR-binding peptide
  MOD_RES (29)..(29): Xaa is C or S
QDLRSVKIAKVIGKTPKIKEVQVMIVKSX

SEQ ID NO: 69555 - protein, 27 aa, Artificial Sequence
  Cyclic GFR-binding peptide
  MOD_RES (26)..(26): Xaa is C or S
SNITIQIMVGRTPKVIGEMSMVVKSXK

SEQ ID NO: 69556 - protein, 40 aa, Artificial Sequence; identical to SEQ ID NO: 24282
  Cyclic GFR-binding peptide
  MOD_RES (5)..(39): Xaa is C or S

SEQ ID NO: 69557 - protein, 39 aa, Artificial Sequence
  Cyclic GFR-binding peptide
  MOD_RES (4)..(5)..(37)..(39): Xaa is C or S
PKPXXAPTQLRSVKVAKVDDSSNVIKEVQVNMVVRAXGX

SEQ ID NO: 69558 - protein, 38 aa, Artificial Sequence; identical to SEQ ID NO: 17999
  Cyclic GFR-binding peptide
  MOD_RES (6)..(7): Xaa is C or S

SEQ ID NO: 69559 - protein, 34 aa, Artificial Sequence
  Cyclic GFR-binding peptide
  MOD_RES (1)..(2)..(33): Xaa is C or S
XXVPQDLRPVQIRKIVGRTPKVKKATVMVVKSXK

SEQ ID NO: 69560 - protein, 30 aa, Artificial Sequence
  Cyclic GFR-binding peptide
  MOD_RES (30)..(30): Xaa is C or S
SQDLRPVQIRKIIGKTPKIKKATVMIVKSX

SEQ ID NO: 69561 - protein, 31 aa, Artificial Sequence
  Cyclic GFR-binding peptide
  MOD_RES (1)..(2): Xaa is C or S
XXVSQDLSNITIQIMIGKTPKIIGEMSMIVK

SEQ ID NO: 69562 - protein, 35 aa, Artificial Sequence
  Cyclic GFR-binding peptide
  MOD_RES (3)..(4)..(35): Xaa is C or S
SPXXVPQDLSNITIQIMVGRTPKVIGEMSMVVKSX

SEQ ID NO: 69563 - protein, 37 aa, Artificial Sequence
  Cyclic GFR-binding peptide
  MOD_RES (4)..(5)..(37): Xaa is C or S
PKPXXAPTKLRSVKVAKVDDSSNVIKEVQVNMVVRSX

SEQ ID NO: 69564 - protein, 28 aa, Artificial Sequence
  Cyclic GFR-binding peptide
  MOD_RES (1)..(1): Xaa is C or S
XAPTKLEPLPVVYYDDSSNVIEQLSNNM

SEQ ID NO: 69565 - protein, 21 aa, Artificial Sequence
  Cyclic GFR-binding peptide
SNITMQIMDEYDKVVIGEMSE

SEQ ID NO: 69566 - protein, 36 aa, Artificial Sequence
  Cyclic GFR-binding peptide
  MOD_RES (4)..(5): Xaa is C or S
PKPXXAPTKLRSVKVAKVDDSSNVIKEVQVNMVVRS

SEQ ID NO: 69567 - protein, 39 aa, Artificial Sequence; identical to SEQ ID NO: 24294
  Cyclic GFR-binding peptide
  MOD_RES (3)..(37)..(39): Xaa is C or S

SEQ ID NO: 69568 - protein, 32 aa, Artificial Sequence
  Cyclic GFR-binding peptide
  MOD_RES (2)..(3): Xaa is C or S
PXXVPQDLRPVQIRKIVGRTPKVKKATVMVVK

SEQ ID NO: 69569 - protein, 31 aa, Artificial Sequence; identical to SEQ ID NO: 18012
  Cyclic GFR-binding peptide

SEQ ID NO: 69570 - protein, 44 aa, Artificial Sequence
  Cyclic GFR-binding peptide
  MOD_RES (4)..(41)..(43): Xaa is C or S
NVQXRPTQVQLEPLTVLYYEIVRKKPIFEQLSNTLEDHLAXKXE

SEQ ID NO: 69571 - protein, 26 aa, Artificial Sequence
  Cyclic GFR-binding peptide
  MOD_RES (1)..(1): Xaa is C or S
XVPTELSNITMQIMDENEKVVIGEMS

SEQ ID NO: 69572 - protein, 30 aa, Artificial Sequence
  Cyclic GFR-binding peptide
  MOD_RES (1)..(2): Xaa is C or S
XXAPTQLRSVKVAKVDDSSNVIKEVQVNMV

SEQ ID NO: 69573 - protein, 27 aa, Artificial Sequence
  Cyclic GFR-binding peptide
  MOD_RES (1)..(1): Xaa is C or S
XVPQDLRPVQIRKIVGRTPKVKKATVM

SEQ ID NO: 69574 - protein, 32 aa, Artificial Sequence
  Cyclic GFR-binding peptide
RPTQVQLEPLPVVYYEIVRKKPIFEQLSNTLE

SEQ ID NO: 69575 - protein, 33 aa, Artificial Sequence
  Cyclic GFR-binding peptide
  MOD_RES (3)..(4): Xaa is C or S
APXXVPQALSNITIQIMVGRKPKVIGEMSMIVR

SEQ ID NO: 69576 - protein, 39 aa, Artificial Sequence
  Cyclic GFR-binding peptide
  MOD_RES (4)..(4): Xaa is C or S
NVQXRPTQVQLEPLPVVYYEIVRKKPIFEQLSNTLEDHL

SEQ ID NO: 69577 - protein, 36 aa, Artificial Sequence
  Cyclic GFR-binding peptide
  MOD_RES (2)..(3)..(35): Xaa is C or S
AXXVPTELSNITMQIMDEYDKVVIGEMSEMVVEGXG

SEQ ID NO: 69578 - protein, 25 aa, Artificial Sequence
  Cyclic GFR-binding peptide
QLRSVKVAKVEIVRKKPIFKEVQVT

SEQ ID NO: 69579 - protein, 34 aa, Artificial Sequence
  Cyclic GFR-binding peptide
  MOD_RES (3)..(4): Xaa is C or S
SPXXVSQDLRPVQIRKIIGKTPKIKKATVMIVKS

SEQ ID NO: 69580 - protein, 27 aa, Artificial Sequence
  Cyclic GFR-binding peptide
  MOD_RES (27)..(27): Xaa is C or S
LSNITIQIMIGKTPKIIGEMSMIVKSX

SEQ ID NO: 69581 - protein, 27 aa, Artificial Sequence
  Cyclic GFR-binding peptide
PTELSNITMQIMDENEKVVIGEMSDMV

SEQ ID NO: 69582 - protein, 32 aa, Artificial Sequence; identical to SEQ ID NO: 18046
  Cyclic GFR-binding peptide
  MOD_RES (4)..(5): Xaa is C or S

SEQ ID NO: 69583 - protein, 32 aa, Artificial Sequence
  Cyclic GFR-binding peptide
  MOD_RES (2)..(3): Xaa is C or S
PXXVSQDLSNITIQIMIGKTPKIIGEMSMIVK

SEQ ID NO: 69584 - protein, 28 aa, Artificial Sequence
  Cyclic GFR-binding peptide
  MOD_RES (2)..(3): Xaa is C or S
PXXVPQDLRPVQIRKIVGRTPKVKKATV

SEQ ID NO: 69585 - protein, 42 aa, Artificial Sequence
  Cyclic GFR-binding peptide
  MOD_RES (4)..(41): Xaa is C or S
SVKXQPSRVHHEPLTVLYYEYVRKKPKLEQLSNRLEEHLEXA

SEQ ID NO: 69586 - protein, 28 aa, Artificial Sequence
  Cyclic GFR-binding peptide
TELRPVQMRKIDENEKVVKKATVDMVVE

SEQ ID NO: 69587 - protein, 35 aa, Artificial Sequence; identical to SEQ ID NO: 18054
  Cyclic GFR-binding peptide
  MOD_RES (1)..(32)..(34): Xaa is C or S

SEQ ID NO: 69588 - protein, 30 aa, Artificial Sequence; identical to SEQ ID NO: 24326
  Cyclic GFR-binding peptide
  MOD_RES (30)..(30): Xaa is C or S

SEQ ID NO: 69589 - protein, 34 aa, Artificial Sequence
  Cyclic GFR-binding peptide
  MOD_RES (1)..(33): Xaa is C or S
XAPTQLRSVKVAKVDDSSNVIKEVQVNMVVRAXG

SEQ ID NO: 69590 - protein, 26 aa, Artificial Sequence
  Cyclic GFR-binding peptide
ALSNITIQIMVGRKPKVIGEMSMIVR

SEQ ID NO: 69591 - protein, 32 aa, Artificial Sequence; identical to SEQ ID NO: 18060
  Cyclic GFR-binding peptide
  MOD_RES (30)..(32): Xaa is C or S

SEQ ID NO: 69592 - protein, 36 aa, Artificial Sequence
  Cyclic GFR-binding peptide
  MOD_RES (6)..(6): Xaa is C or S
DEGLEXVPTEEEPLPMVYYRIKPHQGQHEQLSNFLQ

SEQ ID NO: 69593 - protein, 35 aa, Artificial Sequence; identical to SEQ ID NO: 24333
  Cyclic GFR-binding peptide
  MOD_RES (7)..(7): Xaa is C or S

SEQ ID NO: 69594 - protein, 34 aa, Artificial Sequence
  Cyclic GFR-binding peptide
  MOD_RES (1)..(32)..(34): Xaa is C or S
XVPQALSNITIQIMVGRKPKVIGEMSMIVRSXKX

SEQ ID NO: 69595 - protein, 29 aa, Artificial Sequence
  Cyclic GFR-binding peptide
SQDLRPVQIRKIIGKTPKIKKATVMIVKS

SEQ ID NO: 69596 - protein, 30 aa, Artificial Sequence; identical to SEQ ID NO: 24341
  Cyclic GFR-binding peptide

SEQ ID NO: 69597 - protein, 37 aa, Artificial Sequence; identical to SEQ ID NO: 18072
  Cyclic GFR-binding peptide
  MOD_RES (4)..(5)..(37): Xaa is C or S

SEQ ID NO: 69598 - protein, 30 aa, Artificial Sequence; identical to SEQ ID NO: 18073
  Cyclic GFR-binding peptide
  MOD_RES (28)..(30): Xaa is C or S

SEQ ID NO: 69599 - protein, 30 aa, Artificial Sequence
  Cyclic GFR-binding peptide
  MOD_RES (3)..(3): Xaa is C or S
PTXAPTKLRSVKVAKVDDSSNVIKEVQVNM

SEQ ID NO: 69600 - protein, 40 aa, Artificial Sequence
  Cyclic GFR-binding peptide
  MOD_RES (5)..(6)..(38)..(40): Xaa is C or S
IPKAXXVPTELRSVKMAKVDEYDKVVKEVQVEMVVEGXGX

SEQ ID NO: 69601 - protein, 30 aa, Artificial Sequence
  Cyclic GFR-binding peptide
  MOD_RES (2)..(3): Xaa is C or S
PXXVSQDLSNITIQIMIGKTPKIIGEMSMI

SEQ ID NO: 69602 - protein, 22 aa, Artificial Sequence
  Cyclic GFR-binding peptide
ELRSVKMAKVDEYDKVVKEVQV

SEQ ID NO: 69603 - protein, 26 aa, Artificial Sequence
  Cyclic GFR-binding peptide
VPQALSNITIQIMVGRKPKVIGEMSM

SEQ ID NO: 69604 - protein, 37 aa, Artificial Sequence; identical to SEQ ID NO: 18078
  Cyclic GFR-binding peptide
  MOD_RES (5)..(37): Xaa is C or S

SEQ ID NO: 69605 - protein, 41 aa, Artificial Sequence; identical to SEQ ID NO: 24349
  Cyclic GFR-binding peptide
  MOD_RES (5)..(39)..(41): Xaa is C or S

SEQ ID NO: 69606 - protein, 34 aa, Artificial Sequence
  Cyclic GFR-binding peptide
  MOD_RES (1)..(1): Xaa is C or S
XRPTQVQLEPLPVVYYEIVRKKPIFEQLSNTLED

SEQ ID NO: 69607 - protein, 24 aa, Artificial Sequence
  Cyclic GFR-binding peptide
QLEPLTVLYYEIVRKKPIFEQLSN

SEQ ID NO: 69608 - protein, 35 aa, Artificial Sequence
  Cyclic GFR-binding peptide
  MOD_RES (1)..(33)..(35): Xaa is C or S
XVPTELRPVQMRKIDENEKVVKKATVDMVVEGXGX

SEQ ID NO: 69609 - protein, 35 aa, Artificial Sequence; identical to SEQ ID NO: 18084
  Cyclic GFR-binding peptide
  MOD_RES (4)..(5): Xaa is C or S

SEQ ID NO: 69610 - protein, 32 aa, Artificial Sequence; identical to SEQ ID NO: 18085
  Cyclic GFR-binding peptide
  MOD_RES (6)..(7): Xaa is C or S

SEQ ID NO: 69611 - protein, 27 aa, Artificial Sequence
  Cyclic GFR-binding peptide
VPQALEPLTILYYVGRKPKVEQLSNMI

SEQ ID NO: 69612 - protein, 26 aa, Artificial Sequence
  Cyclic GFR-binding peptide
TELRSVKMAKVDENEKVVKEVQVDMV

SEQ ID NO: 69613 - protein, 24 aa, Artificial Sequence
  Cyclic GFR-binding peptide
EEPLPMVYYRIKPHQGQHEQLSNF

SEQ ID NO: 69614 - protein, 35 aa, Artificial Sequence
  Cyclic GFR-binding peptide
  MOD_RES (1)..(2)..(34): Xaa is C or S
XXAPTKLSNITVQIMDDSSNVIIGEMSNMVVRSXG

SEQ ID NO: 69615 - protein, 31 aa, Artificial Sequence
  Cyclic GFR-binding peptide
  MOD_RES (28)..(30): Xaa is C or S
LSNITMQIMDENEKVVIGEMSDMVVEGXGXR

SEQ ID NO: 69616 - protein, 31 aa, Artificial Sequence; identical to SEQ ID NO: 18098
  Cyclic GFR-binding peptide
  MOD_RES (4)..(5): Xaa is C or S

SEQ ID NO: 69617 - protein, 32 aa, Artificial Sequence
  Cyclic GFR-binding peptide
  MOD_RES (6)..(7): Xaa is C or S
KIPKAXXVPTELRSVKMAKVDENEKVVKEVQV

SEQ ID NO: 69618 - protein, 35 aa, Artificial Sequence
  Cyclic GFR-binding peptide
  MOD_RES (3)..(35): Xaa is C or S
PTXAPTKLRSVKVAKVDDSSNVIKEVQVNMVVRSX

SEQ ID NO: 69619 - protein, 33 aa, Artificial Sequence; identical to SEQ ID NO: 18102
  Cyclic GFR-binding peptide
  MOD_RES (30)..(32): Xaa is C or S

SEQ ID NO: 69620 - protein, 25 aa, Artificial Sequence
  Cyclic GFR-binding peptide
KLRPVQVRKIDDSSNVIKKATVNMV

SEQ ID NO: 69621 - protein, 37 aa, Artificial Sequence; identical to SEQ ID NO: 18103
  Cyclic GFR-binding peptide
  MOD_RES (1)..(2)..(34)..(36): Xaa is C or S

SEQ ID NO: 69622 - protein, 24 aa, Artificial Sequence
  Cyclic GFR-binding peptide
LSNITIQIMVGRTPKVIGEMSMVV

SEQ ID NO: 69623 - protein, 25 aa, Artificial Sequence
  Cyclic GFR-binding peptide
RPVQIRKIIGKTPKIKKATVMIVKS

SEQ ID NO: 69624 - protein, 30 aa, Artificial Sequence
  Cyclic GFR-binding peptide
  MOD_RES (29)..(29): Xaa is C or S
QLRPVQVRKIDDSSNVIKKATVNMVVRAXG

SEQ ID NO: 69625 - protein, 22 aa, Artificial Sequence
  Cyclic GFR-binding peptide
LRSVKIAKVVGRTPKVKEVQVM

SEQ ID NO: 69626 - protein, 36 aa, Artificial Sequence
  Cyclic GFR-binding peptide
  MOD_RES (6)..(7): Xaa is C or S
ASAAPXXVPQALSNITIQIMVGRKPKVIGEMSMIVR

SEQ ID NO: 69627 - protein, 33 aa, Artificial Sequence
  Cyclic GFR-binding peptide
  MOD_RES (4)..(5): Xaa is C or S
PKPXXAPTQLRPVQVRKIDDSSNVIKKATVNMV

SEQ ID NO: 69628 - protein, 33 aa, Artificial Sequence
  Cyclic GFR-binding peptide
  MOD_RES (1)..(33): Xaa is C or S
XAPTQLRPVQVRKIDDSSNVIKKATVNMVVRAX

SEQ ID NO: 69629 - protein, 38 aa, Artificial Sequence; identical to SEQ ID NO: 18115
  Cyclic GFR-binding peptide
  MOD_RES (2)..(3)..(35)..(37): Xaa is C or S

SEQ ID NO: 69630 - protein, 33 aa, Artificial Sequence; identical to SEQ ID NO: 18116
  Cyclic GFR-binding peptide
  MOD_RES (3)..(3): Xaa is C or S

SEQ ID NO: 69631 - protein, 34 aa, Artificial Sequence; identical to SEQ ID NO: 24388
  Cyclic GFR-binding peptide
  MOD_RES (3)..(3): Xaa is C or S

SEQ ID NO: 69632 - protein, 36 aa, Artificial Sequence
  Cyclic GFR-binding peptide
  MOD_RES (2)..(3)..(35): Xaa is C or S
PXXAPTQLRSVKVAKVDDSSNVIKEVQVNMVVRAXG

SEQ ID NO: 69633 - protein, 28 aa, Artificial Sequence
  Cyclic GFR-binding peptide
TQVQLSNITVQIMEIVRKKPIFIGEMST

SEQ ID NO: 69634 - protein, 29 aa, Artificial Sequence
  Cyclic GFR-binding peptide
  MOD_RES (29)..(29): Xaa is C or S
QLEPLTVLYYDDSSNVIEQLSNNMVVRAX

SEQ ID NO: 69635 - protein, 22 aa, Artificial Sequence
  Cyclic GFR-binding peptide
DLRSVKIAKVVGRTPKVKEVQV

SEQ ID NO: 69636 - protein, 26 aa, Artificial Sequence
  Cyclic GFR-binding peptide
VQLSNITVQIMEIVRKKPIFIGEMST

SEQ ID NO: 69637 - protein, 33 aa, Artificial Sequence
  Cyclic GFR-binding peptide
  MOD_RES (4)..(5): Xaa is C or S
PKPXXAPTQLRSVKVAKVDDSSNVIKEVQVNMV

SEQ ID NO: 69638 - protein, 30 aa, Artificial Sequence; identical to SEQ ID NO: 24397
  Cyclic GFR-binding peptide

SEQ ID NO: 69639 - protein, 29 aa, Artificial Sequence
  Cyclic GFR-binding peptide
  MOD_RES (3)..(4): Xaa is C or S
KPXXAPTKLRPVQVRKIDDSSNVIKKATV

SEQ ID NO: 69640 - protein, 40 aa, Artificial Sequence; identical to SEQ ID NO: 24399
  Cyclic GFR-binding peptide
  MOD_RES (37)..(39): Xaa is C or S

SEQ ID NO: 69641 - protein, 33 aa, Artificial Sequence
  Cyclic GFR-binding peptide
  MOD_RES (2)..(2): Xaa is C or S
KXQPSRVHHEPLTVLYYEYVRKKPKLEQLSNRL

SEQ ID NO: 69642 - protein, 34 aa, Artificial Sequence
  Cyclic GFR-binding peptide
  MOD_RES (6)..(7): Xaa is C or S
SIPKAXXVPTELRPVQMRKIDEYDKVVKKATVEM

SEQ ID NO: 69643 - protein, 37 aa, Artificial Sequence
  Cyclic GFR-binding peptide
  MOD_RES (3)..(4)..(36): Xaa is C or S
KPXXAPTKLRPVQVRKIDDSSNVIKKATVNMVVRSXG

SEQ ID NO: 69644 - protein, 31 aa, Artificial Sequence; identical to SEQ ID NO: 18134
  Cyclic GFR-binding peptide
  MOD_RES (2)..(3): Xaa is C or S

SEQ ID NO: 69645 - protein, 39 aa, Artificial Sequence; identical to SEQ ID NO: 18135
  Cyclic GFR-binding peptide
  MOD_RES (4)..(5)..(36)..(38): Xaa is C or S

SEQ ID NO: 69646 - protein, 34 aa, Artificial Sequence; identical to SEQ ID NO: 18136
  Cyclic GFR-binding peptide
  MOD_RES (3)..(4): Xaa is C or S

SEQ ID NO: 69647 - protein, 31 aa, Artificial Sequence
  Cyclic GFR-binding peptide
  MOD_RES (29)..(31): Xaa is C or S
QDLSNITIQIMVGRTPKVIGEMSMVVKSXKX

SEQ ID NO: 69648 - protein, 27 aa, Artificial Sequence
  Cyclic GFR-binding peptide
  MOD_RES (1)..(2): Xaa is C or S
XXVPTELRPVQMRKIDEYDKVVKKATV

SEQ ID NO: 69649 - protein, 29 aa, Artificial Sequence
  Cyclic GFR-binding peptide
  MOD_RES (27)..(29): Xaa is C or S
EPLTVLYYDDSSNVIEQLSNNMVVRSXGX

SEQ ID NO: 69650 - protein, 34 aa, Artificial Sequence; identical to SEQ ID NO: 18140
  Cyclic GFR-binding peptide
  MOD_RES (3)..(4): Xaa is C or S

SEQ ID NO: 69651 - protein, 34 aa, Artificial Sequence; identical to SEQ ID NO: 24413
  Cyclic GFR-binding peptide
  MOD_RES (34)..(34): Xaa is C or S

SEQ ID NO: 69652 - protein, 33 aa, Artificial Sequence; identical to SEQ ID NO: 18141
  Cyclic GFR-binding peptide
  MOD_RES (3)..(4): Xaa is C or S

SEQ ID NO: 69653 - protein, 31 aa, Artificial Sequence
  Cyclic GFR-binding peptide
  MOD_RES (5)..(6): Xaa is C or S
IPKAXXVPTELSNITMQIMDEYDKVVIGEMS

SEQ ID NO: 69654 - protein, 41 aa, Artificial Sequence
  Cyclic GFR-binding peptide
  MOD_RES (5)..(6)..(38)..(40): Xaa is C or S
VPKPXXAPTKLRSVKVAKVDDSSNVIKEVQVNMVVRSXGXH

SEQ ID NO: 69655 - protein, 29 aa, Artificial Sequence
  Cyclic GFR-binding peptide
  MOD_RES (28)..(28): Xaa is C or S
DLRSVKIAKVIGKTPKIKEVQVMIVKSXK

SEQ ID NO: 69656 - protein, 27 aa, Artificial Sequence
  Cyclic GFR-binding peptide
  MOD_RES (1)..(1): Xaa is C or S
XVSQDLRPVQIRKIIGKTPKIKKATVM

SEQ ID NO: 69657 - protein, 34 aa, Artificial Sequence
  Cyclic GFR-binding peptide
  MOD_RES (4)..(5): Xaa is C or S
PKAXXVPTELSNITMQIMDEYDKVVIGEMSEMVV

SEQ ID NO: 69658 - protein, 34 aa, Artificial Sequence
  Cyclic GFR-binding peptide
  MOD_RES (2)..(2): Xaa is C or S
QXRPTQVQLEPLPVVYYEIVRKKPIFEQLSNTLE

SEQ ID NO: 69659 - protein, 36 aa, Artificial Sequence; identical to SEQ ID NO: 18151
  Cyclic GFR-binding peptide
  MOD_RES (3)..(4)..(36): Xaa is C or S

SEQ ID NO: 69660 - protein, 36 aa, Artificial Sequence; identical to SEQ ID NO: 18159
  Cyclic GFR-binding peptide
  MOD_RES (2)..(3)..(35): Xaa is C or S

SEQ ID NO: 69661 - protein, 32 aa, Artificial Sequence; identical to SEQ ID NO: 24430
  Cyclic GFR-binding peptide

SEQ ID NO: 69662 - protein, 30 aa, Artificial Sequence; identical to SEQ ID NO: 24433
  Cyclic GFR-binding peptide
  MOD_RES (1)..(1): Xaa is C or S

SEQ ID NO: 69663 - protein, 25 aa, Artificial Sequence
  Cyclic GFR-binding peptide
EPLTVLYYEYVRKKPKLEQLSNRLE

SEQ ID NO: 69664 - protein, 33 aa, Artificial Sequence; identical to SEQ ID NO: 18164
  Cyclic GFR-binding peptide
  MOD_RES (32)..(32): Xaa is C or S

SEQ ID NO: 69665 - protein, 23 aa, Artificial Sequence
  Cyclic GFR-binding peptide
EPLTMLYYDEYDKVVEQLSNEMV

SEQ ID NO: 69666 - protein, 40 aa, Artificial Sequence; identical to SEQ ID NO: 18171
  Cyclic GFR-binding peptide
  MOD_RES (6)..(7)..(39): Xaa is C or S

SEQ ID NO: 69667 - protein, 30 aa, Artificial Sequence; identical to SEQ ID NO: 18175
  Cyclic GFR-binding peptide
  MOD_RES (1)..(2): Xaa is C or S

SEQ ID NO: 69668 - protein, 32 aa, Artificial Sequence
  Cyclic GFR-binding peptide
  MOD_RES (2)..(3): Xaa is C or S
AXXVPTELRPVQMRKIDENEKVVKKATVDMVV

SEQ ID NO: 69669 - protein, 31 aa, Artificial Sequence
  Cyclic GFR-binding peptide
  MOD_RES (5)..(6): Xaa is C or S
SASPXXVSQDLSNITIQIMIGKTPKIIGEMS

SEQ ID NO: 69670 - protein, 34 aa, Artificial Sequence; identical to SEQ ID NO: 24442
  Cyclic GFR-binding peptide
  MOD_RES (32)..(34): Xaa is C or S

SEQ ID NO: 69671 - protein, 32 aa, Artificial Sequence
  Cyclic GFR-binding peptide
  MOD_RES (32)..(32): Xaa is C or S
APTQLSNITVQIMDDSSNVIIGEMSNMVVRAX

SEQ ID NO: 69672 - protein, 32 aa, Artificial Sequence; identical to SEQ ID NO: 18177
  Cyclic GFR-binding peptide
  MOD_RES (2)..(2): Xaa is C or S

SEQ ID NO: 69673 - protein, 27 aa, Artificial Sequence
  Cyclic GFR-binding peptide
PTELRSVKMAKVDEYDKVVKEVQVEMV

SEQ ID NO: 69674 - protein, 31 aa, Artificial Sequence
  Cyclic GFR-binding peptide
  MOD_RES (30)..(30): Xaa is C or S
TKLSNITVQIMDDSSNVIIGEMSNMVVRSXG

SEQ ID NO: 69675 - protein, 31 aa, Artificial Sequence
  Cyclic GFR-binding peptide
  MOD_RES (30)..(30): Xaa is C or S
SQDLSNITIQIMIGKTPKIIGEMSMIVKSXK

SEQ ID NO: 69676 - protein, 34 aa, Artificial Sequence
  Cyclic GFR-binding peptide
TQVQLEPLTVLYYEIVRKKPIFEQLSNTLEDHLA

SEQ ID NO: 69677 - protein, 24 aa, Artificial Sequence
  Cyclic GFR-binding peptide
RPVQMRKIDEYDKVVKKATVEMVV

SEQ ID NO: 69678 - protein, 30 aa, Artificial Sequence
  Cyclic GFR-binding peptide
  MOD_RES (28)..(30): Xaa is C or S
LRSVKMAKVDEYDKVVKEVQVEMVVEGXGX

SEQ ID NO: 69679 - protein, 32 aa, Artificial Sequence
  Cyclic GFR-binding peptide
  MOD_RES (29)..(31): Xaa is C or S
ELRPVQMRKIDEYDKVVKKATVEMVVEGXGXR

SEQ ID NO: 69680 - protein, 29 aa, Artificial Sequence
  Cyclic GFR-binding peptide
PTELEPLPMVYYDEYDKVVEQLSNEMVVE

SEQ ID NO: 69681 - protein, 32 aa, Artificial Sequence
  Cyclic GFR-binding peptide
  MOD_RES (3)..(4): Xaa is C or S
KPXXAPTKLSNITVQIMDDSSNVIIGEMSNMV

SEQ ID NO: 69682 - protein, 29 aa, Artificial Sequence
  Cyclic GFR-binding peptide
  MOD_RES (28)..(28): Xaa is C or S
LRPVQVRKIDDSSNVIKKATVNMVVRSXG

SEQ ID NO: 69683 - protein, 29 aa, Artificial Sequence
  Cyclic GFR-binding peptide
VPTELSNITMQIMDEYDKVVIGEMSEMVV

SEQ ID NO: 69684 - protein, 30 aa, Artificial Sequence; identical to SEQ ID NO: 24461
  Cyclic GFR-binding peptide
  MOD_RES (3)..(3): Xaa is C or S

SEQ ID NO: 69685 - protein, 30 aa, Artificial Sequence
  Cyclic GFR-binding peptide
  MOD_RES (29)..(29): Xaa is C or S
KLRSVKVAKVDDSSNVIKEVQVNMVVRSXG

SEQ ID NO: 69686 - protein, 39 aa, Artificial Sequence; identical to SEQ ID NO: 18200
  Cyclic GFR-binding peptide
  MOD_RES (3)..(4)..(36)..(38): Xaa is C or S

SEQ ID NO: 69687 - protein, 32 aa, Artificial Sequence
  Cyclic GFR-binding peptide
  MOD_RES (30)..(32): Xaa is C or S
SQDLRPVQIRKIIGKTPKIKKATVMIVKSXKX

SEQ ID NO: 69688 - protein, 33 aa, Artificial Sequence
  Cyclic GFR-binding peptide
  MOD_RES (1)..(2): Xaa is C or S
XXAPTKLSNITVQIMDDSSNVIIGEMSNMVVRS

SEQ ID NO: 69689 - protein, 33 aa, Artificial Sequence; identical to SEQ ID NO: 24464
  Cyclic GFR-binding peptide
  MOD_RES (30)..(32): Xaa is C or S

SEQ ID NO: 69690 - protein, 28 aa, Artificial Sequence
  Cyclic GFR-binding peptide
  MOD_RES (28)..(28): Xaa is C or S
LEPLTMLYYDEYDKVVEQLSNEMVVEGX

SEQ ID NO: 69691 - protein, 20 aa, Artificial Sequence
  Cyclic GFR-binding peptide
EPLPIVYYIGKTPKIEQLSN

SEQ ID NO: 69692 - protein, 41 aa, Artificial Sequence; identical to SEQ ID NO: 24466
  Cyclic GFR-binding peptide
  MOD_RES (4)..(41): Xaa is C or S

SEQ ID NO: 69693 - protein, 33 aa, Artificial Sequence
  Cyclic GFR-binding peptide
  MOD_RES (1)..(1): Xaa is C or S
XVPTEEEPLTMLYYRIKPHQGQHEQLSNFLQHN

SEQ ID NO: 69694 - protein, 31 aa, Artificial Sequence
  Cyclic GFR-binding peptide
  MOD_RES (2)..(2): Xaa is C or S
EXVPTEEEPLPMVYYRIKPHQGQHEQLSNFL

SEQ ID NO: 69695 - protein, 21 aa, Artificial Sequence
  Cyclic GFR-binding peptide
LRSVKVAKVDDSSNVIKEVQV

SEQ ID NO: 69696 - protein, 34 aa, Artificial Sequence
  Cyclic GFR-binding peptide
  MOD_RES (3)..(4): Xaa is C or S
KPXXAPTQLSNITVQIMDDSSNVIIGEMSNMVVR

SEQ ID NO: 69697 - protein, 36 aa, Artificial Sequence
  Cyclic GFR-binding peptide
  MOD_RES (4)..(5)..(36): Xaa is C or S
ASPXXVPQDLRSVKIAKVVGRTPKVKEVQVMVVKSX

SEQ ID NO: 69698 - protein, 40 aa, Artificial Sequence
  Cyclic GFR-binding peptide
  MOD_RES (5)..(5): Xaa is C or S
SSVKXQPSRVHHEPLTVLYYEYVRKKPKLEQLSNRLEEHL

SEQ ID NO: 69699 - protein, 23 aa, Artificial Sequence
  Cyclic GFR-binding peptide
EPLPIVYYIGKTPKIEQLSNMIV

SEQ ID NO: 69700 - protein, 30 aa, Artificial Sequence
  Cyclic GFR-binding peptide
  MOD_RES (30)..(30): Xaa is C or S
TKLSNITVQIMDDSSNVIIGEMSNMVVRSX

SEQ ID NO: 69701 - protein, 32 aa, Artificial Sequence; identical to SEQ ID NO: 18217
  Cyclic GFR-binding peptide
  MOD_RES (30)..(32): Xaa is C or S

SEQ ID NO: 69702 - protein, 38 aa, Artificial Sequence
  Cyclic GFR-binding peptide
  MOD_RES (6)..(7): Xaa is C or S
YVPKPXXAPTKLRSVKVAKVDDSSNVIKEVQVNMVVRS

SEQ ID NO: 69703 - protein, 27 aa, Artificial Sequence
  Cyclic GFR-binding peptide
  MOD_RES (1)..(1): Xaa is C or S
XVSQDLRSVKIAKVIGKTPKIKEVQVM

SEQ ID NO: 69704 - protein, 30 aa, Artificial Sequence
  Cyclic GFR-binding peptide
  MOD_RES (1)..(2): Xaa is C or S
XXVSQDLSNITIQIMIGKTPKIIGEMSMIV

SEQ ID NO: 69705 - protein, 33 aa, Artificial Sequence
  Cyclic GFR-binding peptide
  MOD_RES (6)..(7): Xaa is C or S
ASASPXXVPQDLRPVQIRKIVGRTPKVKKATVM

SEQ ID NO: 69706 - protein, 34 aa, Artificial Sequence
  Cyclic GFR-binding peptide
  MOD_RES (6)..(6): Xaa is C or S
VTKPTXAPTKLRSVKVAKVDDSSNVIKEVQVNMV

SEQ ID NO: 69707 - protein, 34 aa, Artificial Sequence
  Cyclic GFR-binding peptide
  MOD_RES (1)..(2)..(34): Xaa is C or S
XXAPTQLRPVQVRKIDDSSNVIKKATVNMVVRAX

SEQ ID NO: 69708 - protein, 36 aa, Artificial Sequence; identical to SEQ ID NO: 18235
  Cyclic GFR-binding peptide
  MOD_RES (1)..(33)..(35): Xaa is C or S

SEQ ID NO: 69709 - protein, 35 aa, Artificial Sequence
  Cyclic GFR-binding peptide
  MOD_RES (32)..(34): Xaa is C or S
QLEPLTVLYYEIVRKKPIFEQLSNTLEDHLAXKXE

SEQ ID NO: 69710 - protein, 27 aa, Artificial Sequence
  Cyclic GFR-binding peptide
APTKLRSVKVAKVDDSSNVIKEVQVNM

SEQ ID NO: 69711 - protein, 36 aa, Artificial Sequence
  Cyclic GFR-binding peptide
  MOD_RES (6)..(7): Xaa is C or S
TVPKPXXAPTQLSNITVQIMDDSSNVIIGEMSNMVV

SEQ ID NO: 69712 - protein, 36 aa, Artificial Sequence; identical to SEQ ID NO: 24487
  Cyclic GFR-binding peptide

SEQ ID NO: 69713 - protein, 33 aa, Artificial Sequence
  Cyclic GFR-binding peptide
  MOD_RES (31)..(33): Xaa is C or S
VPQALSNITIQIMVGRKPKVIGEMSMIVRSXKX

SEQ ID NO: 69714 - protein, 36 aa, Artificial Sequence; identical to SEQ ID NO: 24488
  Cyclic GFR-binding peptide
  MOD_RES (36)..(36): Xaa is C or S

SEQ ID NO: 69715 - protein, 32 aa, Artificial Sequence; identical to SEQ ID NO: 18241
  Cyclic GFR-binding peptide
  MOD_RES (2)..(3): Xaa is C or S

SEQ ID NO: 69716 - protein, 31 aa, Artificial Sequence
  Cyclic GFR-binding peptide
  MOD_RES (3)..(4): Xaa is C or S
SPXXVPQDLRSVKIAKVVGRTPKVKEVQVMV

SEQ ID NO: 69717 - protein, 32 aa, Artificial Sequence; identical to SEQ ID NO: 18243
  Cyclic GFR-binding peptide
  MOD_RES (32)..(32): Xaa is C or S

SEQ ID NO: 69718 - protein, 34 aa, Artificial Sequence; identical to SEQ ID NO: 18249
  Cyclic GFR-binding peptide
  MOD_RES (4)..(5): Xaa is C or S

SEQ ID NO: 69719 - protein, 38 aa, Artificial Sequence
  Cyclic GFR-binding peptide
  MOD_RES (7)..(7): Xaa is C or S
HVTKPTXAPTKLRSVKVAKVDDSSNVIKEVQVNMVVRS

SEQ ID NO: 69720 - protein, 31 aa, Artificial Sequence; identical to SEQ ID NO: 18257
  Cyclic GFR-binding peptide
  MOD_RES (1)..(1): Xaa is C or S

SEQ ID NO: 69721 - protein, 34 aa, Artificial Sequence; identical to SEQ ID NO: 24494
  Cyclic GFR-binding peptide
  MOD_RES (1)..(1): Xaa is C or S

SEQ ID NO: 69722 - protein, 28 aa, Artificial Sequence
  Cyclic GFR-binding peptide
QLEPLTVLYYDDSSNVIEQLSNNMVVRA

SEQ ID NO: 69723 - protein, 44 aa, Artificial Sequence; identical to SEQ ID NO: 24496
  Cyclic GFR-binding peptide
  MOD_RES (4)..(41)..(43): Xaa is C or S

SEQ ID NO: 69724 - protein, 32 aa, Artificial Sequence
  Cyclic GFR-binding peptide
  MOD_RES (29)..(31): Xaa is C or S
QDLRPVQIRKIVGRTPKVKKATVMVVKSXKXS

SEQ ID NO: 69725 - protein, 36 aa, Artificial Sequence
  Cyclic GFR-binding peptide
  MOD_RES (34)..(36): Xaa is C or S
VPTEEEPLTMLYYRIKPHQGQHEQLSNFLQHNKXEX

SEQ ID NO: 69726 - protein, 33 aa, Artificial Sequence
  Cyclic GFR-binding peptide
QVQLEPLTVLYYEIVRKKPIFEQLSNTLEDHLA

SEQ ID NO: 69727 - protein, 41 aa, Artificial Sequence; identical to SEQ ID NO: 18263
  Cyclic GFR-binding peptide
  MOD_RES (6)..(7)..(39)..(41): Xaa is C or S

SEQ ID NO: 69728 - protein, 31 aa, Artificial Sequence
  Cyclic GFR-binding peptide
  MOD_RES (5)..(6): Xaa is C or S
VPKPXXAPTQLSNITVQIMDDSSNVIIGEMS

SEQ ID NO: 69729 - protein, 34 aa, Artificial Sequence
  Cyclic GFR-binding peptide
  MOD_RES (2)..(2): Xaa is C or S
KXQPSRVHHEPLTVLYYEYVRKKPKLEQLSNRLE

SEQ ID NO: 69730 - protein, 40 aa, Artificial Sequence; identical to SEQ ID NO: 24504
  Cyclic GFR-binding peptide
  MOD_RES (4)..(4): Xaa is C or S

SEQ ID NO: 69731 - protein, 32 aa, Artificial Sequence
  Cyclic GFR-binding peptide
  MOD_RES (1)..(32): Xaa is C or S
XVSQDLRPVQIRKIIGKTPKIKKATVMIVKSX

SEQ ID NO: 69732 - protein, 34 aa, Artificial Sequence
  Cyclic GFR-binding peptide
  MOD_RES (2)..(34): Xaa is C or S
TXAPTKLSNITVQIMDDSSNVIIGEMSNMVVRSX

SEQ ID NO: 69733 - protein, 34 aa, Artificial Sequence
  Cyclic GFR-binding peptide
  MOD_RES (5)..(6): Xaa is C or S
SASPXXVSQDLRPVQIRKIIGKTPKIKKATVMIV

SEQ ID NO: 69734 - protein, 36 aa, Artificial Sequence; identical to SEQ ID NO: 18272
  Cyclic GFR-binding peptide
  MOD_RES (3)..(35): Xaa is C or S

SEQ ID NO: 69735 - protein, 29 aa, Artificial Sequence
  Cyclic GFR-binding peptide
  MOD_RES (2)..(3): Xaa is C or S
PXXAPTKLEPLTVLYYDDSSNVIEQLSNN

SEQ ID NO: 69736 - protein, 32 aa, Artificial Sequence; identical to SEQ ID NO: 18277
  Cyclic GFR-binding peptide
  MOD_RES (29)..(31): Xaa is C or S

SEQ ID NO: 69737 - protein, 28 aa, Artificial Sequence
  Cyclic GFR-binding peptide
RVHHEPLTVLYYEYVRKKPKLEQLSNRL

SEQ ID NO: 69738 - protein, 23 aa, Artificial Sequence
  Cyclic GFR-binding peptide
TKLRSVKVAKVDDSSNVIKEVQV

SEQ ID NO: 69739 - protein, 24 aa, Artificial Sequence
  Cyclic GFR-binding peptide
LRPVQMRKIDEYDKVVKKATVEMV

SEQ ID NO: 69740 - protein, 32 aa, Artificial Sequence; identical to SEQ ID NO: 18279
  Cyclic GFR-binding peptide
  MOD_RES (30)..(32): Xaa is C or S

SEQ ID NO: 69741 - protein, 35 aa, Artificial Sequence; identical to SEQ ID NO: 18280
  Cyclic GFR-binding peptide
  MOD_RES (1)..(33)..(35): Xaa is C or S

SEQ ID NO: 69742 - protein, 30 aa, Artificial Sequence; identical to SEQ ID NO: 24512
  Cyclic GFR-binding peptide

SEQ ID NO: 69743 - protein, 36 aa, Artificial Sequence; identical to SEQ ID NO: 18284
  Cyclic GFR-binding peptide
  MOD_RES (2)..(3)..(35): Xaa is C or S

SEQ ID NO: 69744 - protein, 26 aa, Artificial Sequence
  Cyclic GFR-binding peptide
  MOD_RES (26)..(26): Xaa is C or S
EPLTILYYVGRKPKVEQLSNMIVRSX

SEQ ID NO: 69745 - protein, 26 aa, Artificial Sequence
  Cyclic GFR-binding peptide
KLSNITVQIMDDSSNVIIGEMSNMVV

SEQ ID NO: 69746 - protein, 27 aa, Artificial Sequence
  Cyclic GFR-binding peptide
TELEPLPMVYYDENEKVVEQLSNDMVV

SEQ ID NO: 69747 - protein, 30 aa, Artificial Sequence; identical to SEQ ID NO: 18287
  Cyclic GFR-binding peptide
  MOD_RES (27)..(29): Xaa is C or S

SEQ ID NO: 69748 - protein, 40 aa, Artificial Sequence; identical to SEQ ID NO: 18289
  Cyclic GFR-binding peptide
  MOD_RES (6)..(7)..(39): Xaa is C or S

SEQ ID NO: 69749 - protein, 29 aa, Artificial Sequence
  Cyclic GFR-binding peptide
  MOD_RES (1)..(2): Xaa is C or S
XXAPTQLRPVQVRKIDDSSNVIKKATVNM

SEQ ID NO: 69750 - protein, 40 aa, Artificial Sequence
  Cyclic GFR-binding peptide
  MOD_RES (6)..(7)..(39): Xaa is C or S
SIPKAXXVPTELRSVKMAKVDEYDKVVKEVQVEMVVEGXG

SEQ ID NO: 69751 - protein, 31 aa, Artificial Sequence
  Cyclic GFR-binding peptide
  MOD_RES (1)..(1): Xaa is C or S
XVPTELSNITMQIMDENEKVVIGEMSDMVVE

SEQ ID NO: 69752 - protein, 32 aa, Artificial Sequence; identical to SEQ ID NO: 18292
  Cyclic GFR-binding peptide
  MOD_RES (31)..(31): Xaa is C or S

SEQ ID NO: 69753 - protein, 28 aa, Artificial Sequence
  Cyclic GFR-binding peptide
VPTELSNITMQIMDEYDKVVIGEMSEMV

SEQ ID NO: 69754 - protein, 33 aa, Artificial Sequence; identical to SEQ ID NO: 24515
  Cyclic GFR-binding peptide
  MOD_RES (3)..(3): Xaa is C or S

SEQ ID NO: 69755 - protein, 28 aa, Artificial Sequence
  Cyclic GFR-binding peptide
  MOD_RES (27)..(27): Xaa is C or S
LRPVQIRKIVGRTPKVKKATVMVVKSXK

SEQ ID NO: 69756 - protein, 34 aa, Artificial Sequence; identical to SEQ ID NO: 24516
  Cyclic GFR-binding peptide
  MOD_RES (4)..(4): Xaa is C or S

SEQ ID NO: 69757 - protein, 37 aa, Artificial Sequence; identical to SEQ ID NO: 18296
  Cyclic GFR-binding peptide
  MOD_RES (7)..(7): Xaa is C or S

SEQ ID NO: 69758 - protein, 33 aa, Artificial Sequence
  Cyclic GFR-binding peptide
  MOD_RES (31)..(33): Xaa is C or S
PTELRPVQMRKIDENEKVVKKATVDMVVEGXGX

SEQ ID NO: 69759 - protein, 33 aa, Artificial Sequence
  Cyclic GFR-binding peptide
  MOD_RES (4)..(5): Xaa is C or S
PKPXXAPTQLSNITVQIMDDSSNVIIGEMSNMV

SEQ ID NO: 69760 - protein, 36 aa, Artificial Sequence
  Cyclic GFR-binding peptide
  MOD_RES (6)..(7): Xaa is C or S
YVPKPXXAPTKLSNITVQIMDDSSNVIIGEMSNMVV

SEQ ID NO: 69761 - protein, 37 aa, Artificial Sequence; identical to SEQ ID NO: 24519
  Cyclic GFR-binding peptide
  MOD_RES (35)..(37): Xaa is C or S

SEQ ID NO: 69762 - protein, 27 aa, Artificial Sequence
  Cyclic GFR-binding peptide
TKLEPLTVLYYDDSSNVIEQLSNNMVV

SEQ ID NO: 69763 - protein, 27 aa, Artificial Sequence
  Cyclic GFR-binding peptide
  MOD_RES (27)..(27): Xaa is C or S
RPVQMRKIDEYDKVVKKATVEMVVEGX

SEQ ID NO: 69764 - protein, 28 aa, Artificial Sequence
  Cyclic GFR-binding peptide
PTELRPVQMRKIDENEKVVKKATVDMVV

SEQ ID NO: 69765 - protein, 37 aa, Artificial Sequence
  Cyclic GFR-binding peptide
  MOD_RES (1)..(2)..(34)..(36): Xaa is C or S
XXAPTQLSNITVQIMDDSSNVIIGEMSNMVVRAXGXH

SEQ ID NO: 69766 - protein, 30 aa, Artificial Sequence
  Cyclic GFR-binding peptide
  MOD_RES (30)..(30): Xaa is C or S
EPLPVVYYEYVRKKPKLEQLSNRLEEHLEX

SEQ ID NO: 69767 - protein, 27 aa, Artificial Sequence
  Cyclic GFR-binding peptide
HHRPVQVRKIEYVRKKPKLKKATVRLE

SEQ ID NO: 69768 - protein, 27 aa, Artificial Sequence
  Cyclic GFR-binding peptide
  MOD_RES (1)..(2): Xaa is C or S
XXAPTQLSNITVQIMDDSSNVIIGEMS

SEQ ID NO: 69769 - protein, 28 aa, Artificial Sequence
  Cyclic GFR-binding peptide
  MOD_RES (27)..(27): Xaa is C or S
RPVQVRKIDDSSNVIKKATVNMVVRAXG

SEQ ID NO: 69770 - protein, 41 aa, Artificial Sequence
  Cyclic GFR-binding peptide
  MOD_RES (5)..(6)..(38)..(40): Xaa is C or S
IPKAXXVPTELRPVQMRKIDEYDKVVKKATVEMVVEGXGXR

SEQ ID NO: 69771 - protein, 24 aa, Artificial Sequence
  Cyclic GFR-binding peptide
PTELSNITMQIMDENEKVVIGEMS

SEQ ID NO: 69772 - protein, 34 aa, Artificial Sequence
  Cyclic GFR-binding peptide
  MOD_RES (2)..(34): Xaa is C or S
TXAPTKLRSVKVAKVDDSSNVIKEVQVNMVVRSX

SEQ ID NO: 69773 - protein, 40 aa, Artificial Sequence; identical to SEQ ID NO: 18321
  Cyclic GFR-binding peptide
  MOD_RES (7)..(39): Xaa is C or S

SEQ ID NO: 69774 - protein, 25 aa, Artificial Sequence
  Cyclic GFR-binding peptide
VSQDLRSVKIAKVIGKTPKIKEVQV

SEQ ID NO: 69775 - protein, 33 aa, Artificial Sequence
  Cyclic GFR-binding peptide
  MOD_RES (2)..(2): Xaa is C or S
QXRPTQVQLEPLPVVYYEIVRKKPIFEQLSNTL

SEQ ID NO: 69776 - protein, 25 aa, Artificial Sequence
  Cyclic GFR-binding peptide
DLSNITIQIMIGKTPKIIGEMSMIV

SEQ ID NO: 69777 - protein, 21 aa, Artificial Sequence
  Cyclic GFR-binding peptide
LRPVQIRKIIGKTPKIKKATV

SEQ ID NO: 69778 - protein, 39 aa, Artificial Sequence
  Cyclic GFR-binding peptide
  MOD_RES (5)..(5): Xaa is C or S
SSVKXQPSRVHHEPLTVLYYEYVRKKPKLEQLSNRLEEH

SEQ ID NO: 69779 - protein, 31 aa, Artificial Sequence
  Cyclic GFR-binding peptide
  MOD_RES (2)..(3): Xaa is C or S
PXXVPQDLSNITIQIMVGRTPKVIGEMSMVV

SEQ ID NO: 69780 - protein, 31 aa, Artificial Sequence; identical to SEQ ID NO: 18333
  Cyclic GFR-binding peptide
  MOD_RES (30)..(30): Xaa is C or S

SEQ ID NO: 69781 - protein, 27 aa, Artificial Sequence
  Cyclic GFR-binding peptide
PTELSNITMQIMDEYDKVVIGEMSEMV

SEQ ID NO: 69782 - protein, 37 aa, Artificial Sequence; identical to SEQ ID NO: 18335
  Cyclic GFR-binding peptide
  MOD_RES (1)..(2)..(34)..(36): Xaa is C or S

SEQ ID NO: 69783 - protein, 27 aa, Artificial Sequence
  Cyclic GFR-binding peptide
  MOD_RES (1)..(1): Xaa is C or S
XAPTQLSNITVQIMDDSSNVIIGEMSN

SEQ ID NO: 69784 - protein, 29 aa, Artificial Sequence
  Cyclic GFR-binding peptide
  MOD_RES (29)..(29): Xaa is C or S
QLRPVQVRKIDDSSNVIKKATVNMVVRAX

SEQ ID NO: 69785 - protein, 33 aa, Artificial Sequence
  Cyclic GFR-binding peptide
  MOD_RES (32)..(32): Xaa is C or S
TEEEPLPMVYYRIKPHQGQHEQLSNFLQHNKXE

SEQ ID NO: 69786 - protein, 26 aa, Artificial Sequence
  Cyclic GFR-binding peptide
LRPVQIRKIVGRTPKVKKATVMVVKS

SEQ ID NO: 69787 - protein, 31 aa, Artificial Sequence
  Cyclic GFR-binding peptide
  MOD_RES (1)..(2): Xaa is C or S
XXAPTKLRSVKVAKVDDSSNVIKEVQVNMVV

SEQ ID NO: 69788 - protein, 39 aa, Artificial Sequence; identical to SEQ ID NO: 18346
  Cyclic GFR-binding peptide
  MOD_RES (3)..(4)..(36)..(38): Xaa is C or S

SEQ ID NO: 69789 - protein, 34 aa, Artificial Sequence
  Cyclic GFR-binding peptide
  MOD_RES (1)..(2)..(33): Xaa is C or S
XXVPQALSNITIQIMVGRKPKVIGEMSMIVRSXK

SEQ ID NO: 69790 - protein, 27 aa, Artificial Sequence
  Cyclic GFR-binding peptide
APTKLSNITVQIMDDSSNVIIGEMSNM

SEQ ID NO: 69791 - protein, 29 aa, Artificial Sequence
  Cyclic GFR-binding peptide
  MOD_RES (28)..(28): Xaa is C or S
LSNITVQIMDDSSNVIIGEMSNMVVRAXG

SEQ ID NO: 69792 - protein, 32 aa, Artificial Sequence
  Cyclic GFR-binding peptide
  MOD_RES (30)..(32): Xaa is C or S
EEPLPMVYYRIKPHQGQHEQLSNFLQHNKXEX

SEQ ID NO: 69793 - protein, 25 aa, Artificial Sequence
  Cyclic GFR-binding peptide
ALSNITIQIMVGRKPKVIGEMSMIV

SEQ ID NO: 69794 - protein, 27 aa, Artificial Sequence
  Cyclic GFR-binding peptide
  MOD_RES (27)..(27): Xaa is C or S
SNITVQIMDDSSNVIIGEMSNMVVRSX

SEQ ID NO: 69795 - protein, 29 aa, Artificial Sequence
  Cyclic GFR-binding peptide
  MOD_RES (27)..(29): Xaa is C or S
LRSVKIAKVVGRKPKVKEVQVMIVRSXKX

SEQ ID NO: 69796 - protein, 37 aa, Artificial Sequence
  Cyclic GFR-binding peptide
  MOD_RES (6)..(7): Xaa is C or S
ASASPXXVSQDLRPVQIRKIIGKTPKIKKATVMIVKS

SEQ ID NO: 69797 - protein, 27 aa, Artificial Sequence
  Cyclic GFR-binding peptide
VHHRPVQVRKIEYVRKKPKLKKATVRL

SEQ ID NO: 69798 - protein, 28 aa, Artificial Sequence
  Cyclic GFR-binding peptide
QLRSVKVAKVEIVRKKPIFKEVQVTLED

SEQ ID NO: 69799 - protein, 34 aa, Artificial Sequence; identical to SEQ ID NO: 18360
  Cyclic GFR-binding peptide
  MOD_RES (1)..(2)..(33): Xaa is C or S

SEQ ID NO: 69800 - protein, 34 aa, Artificial Sequence
  Cyclic GFR-binding peptide
  MOD_RES (5)..(5): Xaa is C or S
TKPTXAPTKLSNITVQIMDDSSNVIIGEMSNMVV

SEQ ID NO: 69801 - protein, 38 aa, Artificial Sequence; identical to SEQ ID NO: 18362
  Cyclic GFR-binding peptide
  MOD_RES (5)..(6)..(37): Xaa is C or S

SEQ ID NO: 69802 - protein, 40 aa, Artificial Sequence
  Cyclic GFR-binding peptide
  MOD_RES (4)..(5)..(37)..(39): Xaa is C or S
PKAXXVPTELRSVKMAKVDEYDKVVKEVQVEMVVEGXGXR

SEQ ID NO: 69803 - protein, 34 aa, Artificial Sequence
  Cyclic GFR-binding peptide
  MOD_RES (6)..(6): Xaa is C or S
VTKPTXAPTKLSNITVQIMDDSSNVIIGEMSNMV

SEQ ID NO: 69804 - protein, 37 aa, Artificial Sequence
  Cyclic GFR-binding peptide
  MOD_RES (2)..(3)..(35)..(37): Xaa is C or S
AXXVPTELRSVKMAKVDEYDKVVKEVQVEMVVEGXGX

SEQ ID NO: 69805 - protein, 32 aa, Artificial Sequence; identical to SEQ ID NO: 18366
  Cyclic GFR-binding peptide
  MOD_RES (29)..(31): Xaa is C or S

SEQ ID NO: 69806 - protein, 38 aa, Artificial Sequence; identical to SEQ ID NO: 24554
  Cyclic GFR-binding peptide
  MOD_RES (4)..(4): Xaa is C or S

SEQ ID NO: 69807 - protein, 25 aa, Artificial Sequence
  Cyclic GFR-binding peptide
LRSVKMAKVDENEKVVKEVQVDMVV

SEQ ID NO: 69808 - protein, 37 aa, Artificial Sequence; identical to SEQ ID NO: 18369
  Cyclic GFR-binding peptide
  MOD_RES (4)..(5)..(37): Xaa is C or S

SEQ ID NO: 69809 - protein, 23 aa, Artificial Sequence
  Cyclic GFR-binding peptide
TKLEPLPVVYYDDSSNVIEQLSN

SEQ ID NO: 69810 - protein, 42 aa, Artificial Sequence; identical to SEQ ID NO: 18374
  Cyclic GFR-binding peptide
  MOD_RES (7)..(39)..(41): Xaa is C or S

SEQ ID NO: 69811 - protein, 34 aa, Artificial Sequence
  Cyclic GFR-binding peptide
  MOD_RES (5)..(5): Xaa is C or S
RNVQXRPTQVQLEPLPVVYYEIVRKKPIFEQLSN

SEQ ID NO: 69812 - protein, 30 aa, Artificial Sequence; identical to SEQ ID NO: 24561
  Cyclic GFR-binding peptide

SEQ ID NO: 69813 - protein, 38 aa, Artificial Sequence
  Cyclic GFR-binding peptide
  MOD_RES (6)..(7): Xaa is C or S
TVPKPXXAPTQLRPVQVRKIDDSSNVIKKATVNMVVRA

SEQ ID NO: 69814 - protein, 33 aa, Artificial Sequence
  Cyclic GFR-binding peptide
  MOD_RES (3)..(3): Xaa is C or S
PTXAPTKLRSVKVAKVDDSSNVIKEVQVNMVVR

SEQ ID NO: 69815 - protein, 33 aa, Artificial Sequence; identical to SEQ ID NO: 18378
  Cyclic GFR-binding peptide
  MOD_RES (1)..(2): Xaa is C or S

SEQ ID NO: 69816 - protein, 24 aa, Artificial Sequence
  Cyclic GFR-binding peptide
SNITVQIMDDSSNVIIGEMSNMVV

SEQ ID NO: 69817 - protein, 40 aa, Artificial Sequence; identical to SEQ ID NO: 18381
  Cyclic GFR-binding peptide
  MOD_RES (5)..(6)..(38)..(40): Xaa is C or S

SEQ ID NO: 69818 - protein, 31 aa, Artificial Sequence
  Cyclic GFR-binding peptide
  MOD_RES (4)..(5): Xaa is C or S
AAPXXVPQALRPVQIRKIVGRKPKVKKATVM

SEQ ID NO: 69819 - protein, 33 aa, Artificial Sequence
  Cyclic GFR-binding peptide
  MOD_RES (1)..(32): Xaa is C or S
XVPQALSNITIQIMVGRKPKVIGEMSMIVRSXK

SEQ ID NO: 69820 - protein, 40 aa, Artificial Sequence
  Cyclic GFR-binding peptide
  MOD_RES (4)..(5)..(37)..(39): Xaa is C or S
PKAXXVPTELRPVQMRKIDENEKVVKKATVDMVVEGXGXR

SEQ ID NO: 69821 - protein, 25 aa, Artificial Sequence
  Cyclic GFR-binding peptide
DLRPVQIRKIIGKTPKIKKATVMIV

SEQ ID NO: 69822 - protein, 39 aa, Artificial Sequence
  Cyclic GFR-binding peptide
  MOD_RES (4)..(5)..(36)..(38): Xaa is C or S
AAPXXVPQALRPVQIRKIVGRKPKVKKATVMIVRSXKXS

SEQ ID NO: 69823 - protein, 39 aa, Artificial Sequence
  Cyclic GFR-binding peptide
  MOD_RES (37)..(39): Xaa is C or S
RPTQVQLEPLTVLYYEIVRKKPIFEQLSNTLEDHLAXKX

SEQ ID NO: 69824 - protein, 30 aa, Artificial Sequence; identical to SEQ ID NO: 18392
  Cyclic GFR-binding peptide

SEQ ID NO: 69825 - protein, 27 aa, Artificial Sequence
  Cyclic GFR-binding peptide
  MOD_RES (27)..(27): Xaa is C or S
RSVKMAKVDEYDKVVKEVQVEMVVEGX

SEQ ID NO: 69826 - protein, 43 aa, Artificial Sequence
  Cyclic GFR-binding peptide
  MOD_RES (6)..(40)..(42): Xaa is C or S
DEGLEXVPTEEEPLTMLYYRIKPHQGQHEQLSNFLQHNKXEXR

SEQ ID NO: 69827 - protein, 40 aa, Artificial Sequence; identical to SEQ ID NO: 18397
  Cyclic GFR-binding peptide
  MOD_RES (5)..(6)..(37)..(39): Xaa is C or S

SEQ ID NO: 69828 - protein, 34 aa, Artificial Sequence; identical to SEQ ID NO: 18400
  Cyclic GFR-binding peptide
  MOD_RES (6)..(7): Xaa is C or S

SEQ ID NO: 69829 - protein, 33 aa, Artificial Sequence; identical to SEQ ID NO: 18401
  Cyclic GFR-binding peptide
  MOD_RES (31)..(33): Xaa is C or S

SEQ ID NO: 69830 - protein, 25 aa, Artificial Sequence
  Cyclic GFR-binding peptide
APTKLSNITVQIMDDSSNVIIGEMS

SEQ ID NO: 69831 - protein, 34 aa, Artificial Sequence
  Cyclic GFR-binding peptide
  MOD_RES (31)..(33): Xaa is C or S
HEPLTVLYYEYVRKKPKLEQLSNRLEEHLEXAXA

SEQ ID NO: 69832 - protein, 31 aa, Artificial Sequence; identical to SEQ ID NO: 18406
  Cyclic GFR-binding peptide
  MOD_RES (28)..(30): Xaa is C or S

SEQ ID NO: 69833 - protein, 27 aa, Artificial Sequence
  Cyclic GFR-binding peptide
ALRSVKIAKVVGRKPKVKEVQVMIVRS

SEQ ID NO: 69834 - protein, 32 aa, Artificial Sequence; identical to SEQ ID NO: 18411
  Cyclic GFR-binding peptide
  MOD_RES (32)..(32): Xaa is C or S

SEQ ID NO: 69835 - protein, 38 aa, Artificial Sequence
  Cyclic GFR-binding peptide
  MOD_RES (2)..(2): Xaa is C or S
KXQPSRVHHEPLTVLYYEYVRKKPKLEQLSNRLEEHLE

SEQ ID NO: 69836 - protein, 33 aa, Artificial Sequence
  Cyclic GFR-binding peptide
  MOD_RES (1)..(33): Xaa is C or S
XVPTELRPVQMRKIDENEKVVKKATVDMVVEGX

SEQ ID NO: 69837 - protein, 30 aa, Artificial Sequence
  Cyclic GFR-binding peptide
  MOD_RES (3)..(4): Xaa is C or S
KPXXAPTQLRSVKVAKVDDSSNVIKEVQVN

SEQ ID NO: 69838 - protein, 32 aa, Artificial Sequence; identical to SEQ ID NO: 18414
  Cyclic GFR-binding peptide
  MOD_RES (1)..(2): Xaa is C or S

SEQ ID NO: 69839 - protein, 35 aa, Artificial Sequence; identical to SEQ ID NO: 18417
  Cyclic GFR-binding peptide
  MOD_RES (7)..(7): Xaa is C or S

SEQ ID NO: 69840 - protein, 29 aa, Artificial Sequence
  Cyclic GFR-binding peptide
VPQALRPVQIRKIVGRKPKVKKATVMIVR

SEQ ID NO: 69841 - protein, 32 aa, Artificial Sequence
  Cyclic GFR-binding peptide
  MOD_RES (5)..(5): Xaa is C or S
TKPTXAPTKLSNITVQIMDDSSNVIIGEMSNM

SEQ ID NO: 69842 - protein, 26 aa, Artificial Sequence
  Cyclic GFR-binding peptide
  MOD_RES (1)..(1): Xaa is C or S
XVPQDLRSVKIAKVVGRTPKVKEVQV

SEQ ID NO: 69843 - protein, 35 aa, Artificial Sequence; identical to SEQ ID NO: 24608
  Cyclic GFR-binding peptide
  MOD_RES (33)..(35): Xaa is C or S

SEQ ID NO: 69844 - protein, 33 aa, Artificial Sequence
  Cyclic GFR-binding peptide
  MOD_RES (5)..(6): Xaa is C or S
SASPXXVSQDLSNITIQIMIGKTPKIIGEMSMI

SEQ ID NO: 69845 - protein, 31 aa, Artificial Sequence
  Cyclic GFR-binding peptide
  MOD_RES (2)..(3): Xaa is C or S
PXXVPQALRPVQIRKIVGRKPKVKKATVMIV

SEQ ID NO: 69846 - protein, 32 aa, Artificial Sequence; identical to SEQ ID NO: 18433
  Cyclic GFR-binding peptide
  MOD_RES (30)..(32): Xaa is C or S

SEQ ID NO: 69847 - protein, 28 aa, Artificial Sequence
  Cyclic GFR-binding peptide
PSRVHHSNITVQIMEYVRKKPKLIGEMS

SEQ ID NO: 69848 - protein, 32 aa, Artificial Sequence; identical to SEQ ID NO: 18442
  Cyclic GFR-binding peptide
  MOD_RES (31)..(31): Xaa is C or S

SEQ ID NO: 69849 - protein, 26 aa, Artificial Sequence
  Cyclic GFR-binding peptide
VPTELEPLTMLYYDEYDKVVEQLSNE

SEQ ID NO: 69850 - protein, 28 aa, Artificial Sequence
  Cyclic GFR-binding peptide
  MOD_RES (28)..(28): Xaa is C or S
LEPLPMVYYDEYDKVVEQLSNEMVVEGX

SEQ ID NO: 69851 - protein, 25 aa, Artificial Sequence
  Cyclic GFR-binding peptide
DLEPLPIVYYVGRTPKVEQLSNMVV

SEQ ID NO: 69852 - protein, 35 aa, Artificial Sequence
  Cyclic GFR-binding peptide
  MOD_RES (3)..(4): Xaa is C or S
KAXXVPTELRPVQMRKIDENEKVVKKATVDMVVEG

SEQ ID NO: 69853 - protein, 41 aa, Artificial Sequence
  Cyclic GFR-binding peptide
  MOD_RES (4)..(41): Xaa is C or S
NVQXRPTQVQLEPLTVLYYEIVRKKPIFEQLSNTLEDHLAX

SEQ ID NO: 69854 - protein, 38 aa, Artificial Sequence
  Cyclic GFR-binding peptide
  MOD_RES (5)..(6)..(38): Xaa is C or S
VPKPXXAPTQLRPVQVRKIDDSSNVIKKATVNMVVRAX

SEQ ID NO: 69855 - protein, 26 aa, Artificial Sequence
  Cyclic GFR-binding peptide
EPLPMVYYDEYDKVVEQLSNEMVVEG

SEQ ID NO: 69856 - protein, 36 aa, Artificial Sequence
  Cyclic GFR-binding peptide
  MOD_RES (34)..(36): Xaa is C or S
VPTEEEPLPMVYYRIKPHQGQHEQLSNFLQHNKXEX

SEQ ID NO: 69857 - protein, 39 aa, Artificial Sequence; identical to SEQ ID NO: 18461
  Cyclic GFR-binding peptide
  MOD_RES (4)..(5)..(36)..(38): Xaa is C or S

SEQ ID NO: 69858 - protein, 32 aa, Artificial Sequence
  Cyclic GFR-binding peptide
  MOD_RES (1)..(1): Xaa is C or S
XVPTEEEPLPMVYYRIKPHQGQHEQLSNFLQH

SEQ ID NO: 69859 - protein, 26 aa, Artificial Sequence
  Cyclic GFR-binding peptide
VSQDLRPVQIRKIIGKTPKIKKATVM

SEQ ID NO: 69860 - protein, 27 aa, Artificial Sequence
  Cyclic GFR-binding peptide
  MOD_RES (27)..(27): Xaa is C or S
EPLTMLYYDENEKVVEQLSNDMVVEGX

SEQ ID NO: 69861 - protein, 28 aa, Artificial Sequence
  Cyclic GFR-binding peptide
APTQLRSVKVAKVDDSSNVIKEVQVNMV

SEQ ID NO: 69862 - protein, 32 aa, Artificial Sequence; identical to SEQ ID NO: 18465
  Cyclic GFR-binding peptide
  MOD_RES (1)..(2): Xaa is C or S

SEQ ID NO: 69863 - protein, 29 aa, Artificial Sequence
  Cyclic GFR-binding peptide
  MOD_RES (1)..(1): Xaa is C or S
XAPTKLRPVQVRKIDDSSNVIKKATVNMV

SEQ ID NO: 69864 - protein, 34 aa, Artificial Sequence; identical to SEQ ID NO: 18468
  Cyclic GFR-binding peptide
  MOD_RES (2)..(3): Xaa is C or S

SEQ ID NO: 69865 - protein, 23 aa, Artificial Sequence
  Cyclic GFR-binding peptide
EPLTMLYYDENEKVVEQLSNDMV

SEQ ID NO: 69866 - protein, 32 aa, Artificial Sequence; identical to SEQ ID NO: 18472
  Cyclic GFR-binding peptide
  MOD_RES (4)..(5): Xaa is C or S

SEQ ID NO: 69867 - protein, 27 aa, Artificial Sequence
  Cyclic GFR-binding peptide
SNITVQIMEIVRKKPIFIGEMSTLEDH

SEQ ID NO: 69868 - protein, 40 aa, Artificial Sequence
  Cyclic GFR-binding peptide
  MOD_RES (6)..(7)..(39): Xaa is C or S
TVPKPXXAPTQLRSVKVAKVDDSSNVIKEVQVNMVVRAXG

SEQ ID NO: 69869 - protein, 24 aa, Artificial Sequence
  Cyclic GFR-binding peptide
RPVQMRKIDENEKVVKKATVDMVV

SEQ ID NO: 69870 - protein, 31 aa, Artificial Sequence; identical to SEQ ID NO: 18479
  Cyclic GFR-binding peptide
  MOD_RES (3)..(4): Xaa is C or S

SEQ ID NO: 69871 - protein, 29 aa, Artificial Sequence
  Cyclic GFR-binding peptide
  MOD_RES (1)..(2): Xaa is C or S
XXAPTKLRPVQVRKIDDSSNVIKKATVNM

SEQ ID NO: 69872 - protein, 34 aa, Artificial Sequence; identical to SEQ ID NO: 18481
  Cyclic GFR-binding peptide
  MOD_RES (31)..(33): Xaa is C or S

SEQ ID NO: 69873 - protein, 28 aa, Artificial Sequence
  Cyclic GFR-binding peptide
  MOD_RES (26)..(28): Xaa is C or S
RSVKIAKVVGRKPKVKEVQVMIVRSXKX

SEQ ID NO: 69874 - protein, 29 aa, Artificial Sequence
  Cyclic GFR-binding peptide
EPLPVVYYEYVRKKPKLEQLSNRLEEHLE

SEQ ID NO: 69875 - protein, 25 aa, Artificial Sequence
  Cyclic GFR-binding peptide
RPVQMRKIDEYDKVVKKATVEMVVE

SEQ ID NO: 69876 - protein, 28 aa, Artificial Sequence
  Cyclic GFR-binding peptide
  MOD_RES (1)..(2): Xaa is C or S
XXAPTQLEPLTVLYYDDSSNVIEQLSNN

SEQ ID NO: 69877 - protein, 35 aa, Artificial Sequence; identical to SEQ ID NO: 24643
  Cyclic GFR-binding peptide
  MOD_RES (7)..(7): Xaa is C or S

SEQ ID NO: 69878 - protein, 36 aa, Artificial Sequence; identical to SEQ ID NO: 18488
  Cyclic GFR-binding peptide
  MOD_RES (1)..(2)..(34)..(36): Xaa is C or S

SEQ ID NO: 69879 - protein, 39 aa, Artificial Sequence; identical to SEQ ID NO: 18490
  Cyclic GFR-binding peptide
  MOD_RES (6)..(7)..(39): Xaa is C or S

SEQ ID NO: 69880 - protein, 32 aa, Artificial Sequence; identical to SEQ ID NO: 18491
  Cyclic GFR-binding peptide
  MOD_RES (31)..(31): Xaa is C or S

SEQ ID NO: 69881 - protein, 32 aa, Artificial Sequence
  Cyclic GFR-binding peptide
  MOD_RES (2)..(3): Xaa is C or S
AXXVPTELRSVKMAKVDENEKVVKEVQVDMVV

SEQ ID NO: 69882 - protein, 29 aa, Artificial Sequence
  Cyclic GFR-binding peptide
TKLEPLPVVYYDDSSNVIEQLSNNMVVRS

SEQ ID NO: 69883 - protein, 27 aa, Artificial Sequence
  Cyclic GFR-binding peptide
VPQDLRPVQIRKIVGRTPKVKKATVMV

SEQ ID NO: 69884 - protein, 29 aa, Artificial Sequence
  Cyclic GFR-binding peptide
VPTELEPLTMLYYDENEKVVEQLSNDMVV

SEQ ID NO: 69885 - protein, 36 aa, Artificial Sequence
  Cyclic GFR-binding peptide
  MOD_RES (3)..(3): Xaa is C or S
VQXRPTQVQLEPLPVVYYEIVRKKPIFEQLSNTLED

SEQ ID NO: 69886 - protein, 39 aa, Artificial Sequence; identical to SEQ ID NO: 18497
  Cyclic GFR-binding peptide
  MOD_RES (4)..(5)..(37)..(39): Xaa is C or S

SEQ ID NO: 69887 - protein, 31 aa, Artificial Sequence
  Cyclic GFR-binding peptide
  MOD_RES (30)..(30): Xaa is C or S
TELRPVQMRKIDEYDKVVKKATVEMVVEGXG

SEQ ID NO: 69888 - protein, 30 aa, Artificial Sequence
  Cyclic GFR-binding peptide
  MOD_RES (1)..(2): Xaa is C or S
XXAPTQLSNITVQIMDDSSNVIIGEMSNMV

SEQ ID NO: 69889 - protein, 32 aa, Artificial Sequence
  Cyclic GFR-binding peptide
  MOD_RES (1)..(2): Xaa is C or S
XXVPQDLRPVQIRKIVGRTPKVKKATVMVVKS

SEQ ID NO: 69890 - protein, 40 aa, Artificial Sequence; identical to SEQ ID NO: 24660
  Cyclic GFR-binding peptide
  MOD_RES (7)..(7): Xaa is C or S

SEQ ID NO: 69891 - protein, 27 aa, Artificial Sequence
  Cyclic GFR-binding peptide
TEEEPLPMVYYRIKPHQGQHEQLSNFL

SEQ ID NO: 69892 - protein, 31 aa, Artificial Sequence
  Cyclic GFR-binding peptide
  MOD_RES (1)..(1): Xaa is C or S
XVPQDLRPVQIRKIVGRTPKVKKATVMVVKS

SEQ ID NO: 69893 - protein, 36 aa, Artificial Sequence
  Cyclic GFR-binding peptide
  MOD_RES (3)..(4)..(36): Xaa is C or S
KAXXVPTELRSVKMAKVDEYDKVVKEVQVEMVVEGX

SEQ ID NO: 69894 - protein, 30 aa, Artificial Sequence; identical to SEQ ID NO: 18508
  Cyclic GFR-binding peptide
  MOD_RES (29)..(29): Xaa is C or S

SEQ ID NO: 69895 - protein, 25 aa, Artificial Sequence
  Cyclic GFR-binding peptide
DLRSVKIAKVIGKTPKIKEVQVMIV

SEQ ID NO: 69896 - protein, 31 aa, Artificial Sequence; identical to SEQ ID NO: 18512
  Cyclic GFR-binding peptide
  MOD_RES (2)..(3): Xaa is C or S

SEQ ID NO: 69897 - protein, 38 aa, Artificial Sequence; identical to SEQ ID NO: 24666
  Cyclic GFR-binding peptide
  MOD_RES (4)..(38): Xaa is C or S

SEQ ID NO: 69898 - protein, 28 aa, Artificial Sequence
  Cyclic GFR-binding peptide
VPTEEEPLTMLYYRIKPHQGQHEQLSNF

SEQ ID NO: 69899 - protein, 24 aa, Artificial Sequence
  Cyclic GFR-binding peptide
TELSNITMQIMDENEKVVIGEMSD

SEQ ID NO: 69900 - protein, 33 aa, Artificial Sequence; identical to SEQ ID NO: 18516
  Cyclic GFR-binding peptide
  MOD_RES (31)..(33): Xaa is C or S

SEQ ID NO: 69901 - protein, 26 aa, Artificial Sequence
  Cyclic GFR-binding peptide
  MOD_RES (1)..(1): Xaa is C or S
XVPTELRPVQMRKIDENEKVVKKATV

SEQ ID NO: 69902 - protein, 23 aa, Artificial Sequence
  Cyclic GFR-binding peptide
DLEPLPIVYYVGRTPKVEQLSNM

SEQ ID NO: 69903 - protein, 37 aa, Artificial Sequence
  Cyclic GFR-binding peptide
  MOD_RES (3)..(4)..(36): Xaa is C or S
KPXXAPTQLRPVQVRKIDDSSNVIKKATVNMVVRAXG

SEQ ID NO: 69904 - protein, 34 aa, Artificial Sequence; identical to SEQ ID NO: 24674
  Cyclic GFR-binding peptide
  MOD_RES (5)..(5): Xaa is C or S

SEQ ID NO: 69905 - protein, 32 aa, Artificial Sequence
  Cyclic GFR-binding peptide
  MOD_RES (5)..(6): Xaa is C or S
SAAPXXVPQALRPVQIRKIVGRKPKVKKATVM

SEQ ID NO: 69906 - protein, 31 aa, Artificial Sequence
  Cyclic GFR-binding peptide
  MOD_RES (5)..(6): Xaa is C or S
SASPXXVSQDLRPVQIRKIIGKTPKIKKATV

SEQ ID NO: 69907 - protein, 28 aa, Artificial Sequence
  Cyclic GFR-binding peptide
  MOD_RES (2)..(3): Xaa is C or S
PXXVSQDLEPLPIVYYIGKTPKIEQLSN

SEQ ID NO: 69908 - protein, 34 aa, Artificial Sequence; identical to SEQ ID NO: 24677
  Cyclic GFR-binding peptide
  MOD_RES (6)..(6): Xaa is C or S

SEQ ID NO: 69909 - protein, 38 aa, Artificial Sequence; identical to SEQ ID NO: 18524
  Cyclic GFR-binding peptide
  MOD_RES (3)..(4)..(36)..(38): Xaa is C or S

SEQ ID NO: 69910 - protein, 41 aa, Artificial Sequence
  Cyclic GFR-binding peptide
  MOD_RES (7)..(39)..(41): Xaa is C or S
HVTKPTXAPTKLSNITVQIMDDSSNVIIGEMSNMVVRSXGX

SEQ ID NO: 69911 - protein, 33 aa, Artificial Sequence
  Cyclic GFR-binding peptide
  MOD_RES (30)..(32): Xaa is C or S
PQDLRSVKIAKVVGRTPKVKEVQVMVVKSXKXS

SEQ ID NO: 69912 - protein, 37 aa, Artificial Sequence
  Cyclic GFR-binding peptide
  MOD_RES (2)..(3)..(35)..(37): Xaa is C or S
AXXVPTELRSVKMAKVDENEKVVKEVQVDMVVEGXGX

SEQ ID NO: 69913 - protein, 36 aa, Artificial Sequence
  Cyclic GFR-binding peptide
  MOD_RES (3)..(4)..(35): Xaa is C or S
SPXXVPQDLSNITIQIMVGRTPKVIGEMSMVVKSXK

SEQ ID NO: 69914 - protein, 31 aa, Artificial Sequence
  Cyclic GFR-binding peptide
  MOD_RES (3)..(4): Xaa is C or S
SPXXVPQDLRPVQIRKIVGRTPKVKKATVMV

SEQ ID NO: 69915 - protein, 41 aa, Artificial Sequence; identical to SEQ ID NO: 24683
  Cyclic GFR-binding peptide
  MOD_RES (5)..(5): Xaa is C or S

SEQ ID NO: 69916 - protein, 27 aa, Artificial Sequence
  Cyclic GFR-binding peptide
  MOD_RES (1)..(1): Xaa is C or S
XVPQALSNITIQIMVGRKPKVIGEMSM

SEQ ID NO: 69917 - protein, 36 aa, Artificial Sequence; identical to SEQ ID NO: 24685
  Cyclic GFR-binding peptide
  MOD_RES (1)..(1): Xaa is C or S

SEQ ID NO: 69918 - protein, 27 aa, Artificial Sequence
  Cyclic GFR-binding peptide
QLRPVQVRKIDDSSNVIKKATVNMVVR

SEQ ID NO: 69919 - protein, 35 aa, Artificial Sequence; identical to SEQ ID NO: 24686
  Cyclic GFR-binding peptide
  MOD_RES (32)..(34): Xaa is C or S

SEQ ID NO: 69920 - protein, 26 aa, Artificial Sequence
  Cyclic GFR-binding peptide
APTQLEPLTVLYYDDSSNVIEQLSNN

SEQ ID NO: 69921 - protein, 32 aa, Artificial Sequence; identical to SEQ ID NO: 18536
  Cyclic GFR-binding peptide
  MOD_RES (30)..(32): Xaa is C or S

SEQ ID NO: 69922 - protein, 28 aa, Artificial Sequence
  Cyclic GFR-binding peptide
  MOD_RES (1)..(2): Xaa is C or S
XXVPQALSNITIQIMVGRKPKVIGEMSM

SEQ ID NO: 69923 - protein, 35 aa, Artificial Sequence; identical to SEQ ID NO: 24688
  Cyclic GFR-binding peptide
  MOD_RES (4)..(4): Xaa is C or S

SEQ ID NO: 69924 - protein, 29 aa, Artificial Sequence
  Cyclic GFR-binding peptide
  MOD_RES (27)..(29): Xaa is C or S
LRPVQIRKIVGRKPKVKKATVMIVRSXKX

SEQ ID NO: 69925 - protein, 36 aa, Artificial Sequence; identical to SEQ ID NO: 18543
  Cyclic GFR-binding peptide
  MOD_RES (2)..(3)..(35): Xaa is C or S

SEQ ID NO: 69926 - protein, 27 aa, Artificial Sequence
  Cyclic GFR-binding peptide
TELEPLPMVYYDEYDKVVEQLSNEMVV

SEQ ID NO: 69927 - protein, 35 aa, Artificial Sequence
  Cyclic GFR-binding peptide
  MOD_RES (3)..(4): Xaa is C or S
KPXXAPTQLSNITVQIMDDSSNVIIGEMSNMVVRA

SEQ ID NO: 69928 - protein, 35 aa, Artificial Sequence; identical to SEQ ID NO: 18549
  Cyclic GFR-binding peptide
  MOD_RES (32)..(34): Xaa is C or S

SEQ ID NO: 69929 - protein, 40 aa, Artificial Sequence; identical to SEQ ID NO: 18550
  Cyclic GFR-binding peptide
  MOD_RES (5)..(6)..(38)..(40): Xaa is C or S

SEQ ID NO: 69930 - protein, 31 aa, Artificial Sequence; identical to SEQ ID NO: 18552
  Cyclic GFR-binding peptide
  MOD_RES (2)..(3): Xaa is C or S

SEQ ID NO: 69931 - protein, 26 aa, Artificial Sequence
  Cyclic GFR-binding peptide
EPLPVVYYEYVRKKPKLEQLSNRLEE

SEQ ID NO: 69932 - protein, 31 aa, Artificial Sequence; identical to SEQ ID NO: 18553
  Cyclic GFR-binding peptide
  MOD_RES (3)..(4): Xaa is C or S

SEQ ID NO: 69933 - protein, 31 aa, Artificial Sequence; identical to SEQ ID NO: 18554
  Cyclic GFR-binding peptide
  MOD_RES (5)..(6): Xaa is C or S

SEQ ID NO: 69934 - protein, 28 aa, Artificial Sequence
  Cyclic GFR-binding peptide
SQDLEPLPIVYYIGKTPKIEQLSNMIVK

SEQ ID NO: 69935 - protein, 33 aa, Artificial Sequence; identical to SEQ ID NO: 18558
  Cyclic GFR-binding peptide
  MOD_RES (6)..(7): Xaa is C or S

SEQ ID NO: 69936 - protein, 37 aa, Artificial Sequence
  Cyclic GFR-binding peptide
  MOD_RES (6)..(7): Xaa is C or S
YVPKPXXAPTKLRPVQVRKIDDSSNVIKKATVNMVVR

SEQ ID NO: 69937 - protein, 26 aa, Artificial Sequence
  Cyclic GFR-binding peptide
PQDLSNITIQIMVGRTPKVIGEMSMV

SEQ ID NO: 69938 - protein, 31 aa, Artificial Sequence
  Cyclic GFR-binding peptide
  MOD_RES (3)..(4): Xaa is C or S
KPXXAPTQLSNITVQIMDDSSNVIIGEMSNM

SEQ ID NO: 69939 - protein, 37 aa, Artificial Sequence
  Cyclic GFR-binding peptide
  MOD_RES (5)..(5): Xaa is C or S
RNVQXRPTQVQLEPLPVVYYEIVRKKPIFEQLSNTLE

SEQ ID NO: 69940 - protein, 40 aa, Artificial Sequence
  Cyclic GFR-binding peptide
  MOD_RES (37)..(39): Xaa is C or S
QPSRVHHEPLTVLYYEYVRKKPKLEQLSNRLEEHLEXAXA

SEQ ID NO: 69941 - protein, 26 aa, Artificial Sequence
  Cyclic GFR-binding peptide
  MOD_RES (1)..(1): Xaa is C or S
XVPTELEPLPMVYYDENEKVVEQLSN

SEQ ID NO: 69942 - protein, 36 aa, Artificial Sequence; identical to SEQ ID NO: 24704
  Cyclic GFR-binding peptide
  MOD_RES (2)..(2): Xaa is C or S

SEQ ID NO: 69943 - protein, 33 aa, Artificial Sequence
  Cyclic GFR-binding peptide
  MOD_RES (3)..(3): Xaa is C or S
LEXVPTEEEPLPMVYYRIKPHQGQHEQLSNFLQ

SEQ ID NO: 69944 - protein, 28 aa, Artificial Sequence
  Cyclic GFR-binding peptide
  MOD_RES (1)..(1): Xaa is C or S
XVPTELEPLPMVYYDEYDKVVEQLSNEM

SEQ ID NO: 69945 - protein, 40 aa, Artificial Sequence
  Cyclic GFR-binding peptide
  MOD_RES (3)..(37)..(39): Xaa is C or S
LEXVPTEEEPLTMLYYRIKPHQGQHEQLSNFLQHNKXEXR

SEQ ID NO: 69946 - protein, 26 aa, Artificial Sequence
  Cyclic GFR-binding peptide
RPVQVRKIEYVRKKPKLKKATVRLEE

SEQ ID NO: 69947 - protein, 24 aa, Artificial Sequence
  Cyclic GFR-binding peptide
LRSVKIAKVVGRTPKVKEVQVMVV

SEQ ID NO: 69948 - protein, 29 aa, Artificial Sequence
  Cyclic GFR-binding peptide
  MOD_RES (1)..(2): Xaa is C or S
XXVPQDLSNITIQIMVGRTPKVIGEMSMV

SEQ ID NO: 69949 - protein, 31 aa, Artificial Sequence
  Cyclic GFR-binding peptide
  MOD_RES (31)..(31): Xaa is C or S
VSQDLRPVQIRKIIGKTPKIKKATVMIVKSX

SEQ ID NO: 69950 - protein, 29 aa, Artificial Sequence
  Cyclic GFR-binding peptide
  MOD_RES (27)..(29): Xaa is C or S
LEPLPIVYYIGKTPKIEQLSNMIVKSXKX

SEQ ID NO: 69951 - protein, 35 aa, Artificial Sequence; identical to SEQ ID NO: 18576
  Cyclic GFR-binding peptide
  MOD_RES (5)..(6): Xaa is C or S

SEQ ID NO: 69952 - protein, 30 aa, Artificial Sequence; identical to SEQ ID NO: 18580
  Cyclic GFR-binding peptide
  MOD_RES (1)..(1): Xaa is C or S

SEQ ID NO: 69953 - protein, 30 aa, Artificial Sequence
  Cyclic GFR-binding peptide
APTQLRSVKVAKVDDSSNVIKEVQVNMVVR

SEQ ID NO: 69954 - protein, 26 aa, Artificial Sequence
  Cyclic GFR-binding peptide
VPQDLRPVQIRKIVGRTPKVKKATVM

SEQ ID NO: 69955 - protein, 30 aa, Artificial Sequence
  Cyclic GFR-binding peptide
  MOD_RES (29)..(29): Xaa is C or S
QDLSNITIQIMIGKTPKIIGEMSMIVKSXK

SEQ ID NO: 69956 - protein, 43 aa, Artificial Sequence; identical to SEQ ID NO: 24718
  Cyclic GFR-binding peptide
  MOD_RES (3)..(40)..(42): Xaa is C or S

SEQ ID NO: 69957 - protein, 28 aa, Artificial Sequence
  Cyclic GFR-binding peptide
  MOD_RES (1)..(1): Xaa is C or S
XVPTELSNITMQIMDENEKVVIGEMSDM

SEQ ID NO: 69958 - protein, 32 aa, Artificial Sequence; identical to SEQ ID NO: 18585
  Cyclic GFR-binding peptide
  MOD_RES (1)..(2): Xaa is C or S

SEQ ID NO: 69959 - protein, 39 aa, Artificial Sequence
  Cyclic GFR-binding peptide
  MOD_RES (6)..(7)..(39): Xaa is C or S
TVPKPXXAPTQLRPVQVRKIDDSSNVIKKATVNMVVRAX

SEQ ID NO: 69960 - protein, 36 aa, Artificial Sequence
  Cyclic GFR-binding peptide
  MOD_RES (6)..(7): Xaa is C or S
ASASPXXVPQDLSNITIQIMVGRTPKVIGEMSMVVK

SEQ ID NO: 69961 - protein, 33 aa, Artificial Sequence; identical to SEQ ID NO: 24724
  Cyclic GFR-binding peptide
  MOD_RES (4)..(4): Xaa is C or S

SEQ ID NO: 69962 - protein, 37 aa, Artificial Sequence
  Cyclic GFR-binding peptide
  MOD_RES (6)..(7): Xaa is C or S
TVPKPXXAPTQLRSVKVAKVDDSSNVIKEVQVNMVVR

SEQ ID NO: 69963 - protein, 28 aa, Artificial Sequence
  Cyclic GFR-binding peptide
PQDLRSVKIAKVVGRTPKVKEVQVMVVK

SEQ ID NO: 69964 - protein, 29 aa, Artificial Sequence
  Cyclic GFR-binding peptide
  MOD_RES (2)..(3): Xaa is C or S
PXXAPTQLRSVKVAKVDDSSNVIKEVQVN

SEQ ID NO: 69965 - protein, 34 aa, Artificial Sequence
  Cyclic GFR-binding peptide
  MOD_RES (6)..(7): Xaa is C or S
TVPKPXXAPTQLSNITVQIMDDSSNVIIGEMSNM

SEQ ID NO: 69966 - protein, 44 aa, Artificial Sequence; identical to SEQ ID NO: 24728
  Cyclic GFR-binding peptide
  MOD_RES (7)..(41)..(43): Xaa is C or S

SEQ ID NO: 69967 - protein, 33 aa, Artificial Sequence; identical to SEQ ID NO: 18595
  Cyclic GFR-binding peptide
  MOD_RES (4)..(4): Xaa is C or S

SEQ ID NO: 69968 - protein, 30 aa, Artificial Sequence
  Cyclic GFR-binding peptide
  MOD_RES (29)..(29): Xaa is C or S
QDLRSVKIAKVVGRTPKVKEVQVMVVKSXK

SEQ ID NO: 69969 - protein, 28 aa, Artificial Sequence
  Cyclic GFR-binding peptide
EEEPLTMLYYRIKPHQGQHEQLSNFLQH

SEQ ID NO: 69970 - protein, 40 aa, Artificial Sequence; identical to SEQ ID NO: 18604
  Cyclic GFR-binding peptide
  MOD_RES (6)..(7)..(39): Xaa is C or S

SEQ ID NO: 69971 - protein, 36 aa, Artificial Sequence
  Cyclic GFR-binding peptide
  MOD_RES (6)..(6): Xaa is C or S
VTKPTXAPTKLSNITVQIMDDSSNVIIGEMSNMVVR

SEQ ID NO: 69972 - protein, 25 aa, Artificial Sequence
  Cyclic GFR-binding peptide
EEPLTMLYYRIKPHQGQHEQLSNFL

SEQ ID NO: 69973 - protein, 24 aa, Artificial Sequence
  Cyclic GFR-binding peptide
PQALEPLTILYYVGRKPKVEQLSN

SEQ ID NO: 69974 - protein, 33 aa, Artificial Sequence
  Cyclic GFR-binding peptide
  MOD_RES (4)..(5): Xaa is C or S
ASPXXVPQDLRPVQIRKIVGRTPKVKKATVMVV

SEQ ID NO: 69975 - protein, 30 aa, Artificial Sequence
  Cyclic GFR-binding peptide
  MOD_RES (30)..(30): Xaa is C or S
TELRPVQMRKIDEYDKVVKKATVEMVVEGX

SEQ ID NO: 69976 - protein, 36 aa, Artificial Sequence
  Cyclic GFR-binding peptide
  MOD_RES (4)..(5)..(36): Xaa is C or S
ASPXXVSQDLRSVKIAKVIGKTPKIKEVQVMIVKSX

SEQ ID NO: 69977 - protein, 34 aa, Artificial Sequence
  Cyclic GFR-binding peptide
  MOD_RES (32)..(34): Xaa is C or S
QLEPLTVLYYEIVRKKPIFEQLSNTLEDHLAXKX

SEQ ID NO: 69978 - protein, 36 aa, Artificial Sequence
  Cyclic GFR-binding peptide
  MOD_RES (1)..(2)..(33)..(35): Xaa is C or S
XXVPQDLRPVQIRKIVGRTPKVKKATVMVVKSXKXS

SEQ ID NO: 69979 - protein, 27 aa, Artificial Sequence
  Cyclic GFR-binding peptide
LRPVQMRKIDEYDKVVKKATVEMVVEG

SEQ ID NO: 69980 - protein, 29 aa, Artificial Sequence
  Cyclic GFR-binding peptide
SRVHHEPLTVLYYEYVRKKPKLEQLSNRL

SEQ ID NO: 69981 - protein, 25 aa, Artificial Sequence
  Cyclic GFR-binding peptide
ELRPVQMRKIDENEKVVKKATVDMV

SEQ ID NO: 69982 - protein, 35 aa, Artificial Sequence
  Cyclic GFR-binding peptide
  MOD_RES (1)..(32)..(34): Xaa is C or S
XVPQALRPVQIRKIVGRKPKVKKATVMIVRSXKXS

SEQ ID NO: 69983 - protein, 21 aa, Artificial Sequence
  Cyclic GFR-binding peptide
RPVQMRKIDEYDKVVKKATVE

SEQ ID NO: 69984 - protein, 28 aa, Artificial Sequence
  Cyclic GFR-binding peptide
APTQLSNITVQIMDDSSNVIIGEMSNMV

SEQ ID NO: 69985 - protein, 33 aa, Artificial Sequence
  Cyclic GFR-binding peptide
TQVQLEPLPVVYYEIVRKKPIFEQLSNTLEDHL

SEQ ID NO: 69986 - protein, 31 aa, Artificial Sequence
  Cyclic GFR-binding peptide
QPSRVHHEPLPVVYYEYVRKKPKLEQLSNRL

SEQ ID NO: 69987 - protein, 29 aa, Artificial Sequence
  Cyclic GFR-binding peptide
  MOD_RES (1)..(2): Xaa is C or S
XXAPTQLRSVKVAKVDDSSNVIKEVQVNM

SEQ ID NO: 69988 - protein, 25 aa, Artificial Sequence
  Cyclic GFR-binding peptide
ELEPLTMLYYDENEKVVEQLSNDMV

SEQ ID NO: 69989 - protein, 42 aa, Artificial Sequence; identical to SEQ ID NO: 18644
  Cyclic GFR-binding peptide
  MOD_RES (6)..(7)..(39)..(41): Xaa is C or S

SEQ ID NO: 69990 - protein, 32 aa, Artificial Sequence; identical to SEQ ID NO: 18649
  Cyclic GFR-binding peptide
  MOD_RES (5)..(6): Xaa is C or S

SEQ ID NO: 69991 - protein, 22 aa, Artificial Sequence
  Cyclic GFR-binding peptide
RPVQMRKIDEYDKVVKKATVEM

SEQ ID NO: 69992 - protein, 30 aa, Artificial Sequence
  Cyclic GFR-binding peptide
  MOD_RES (3)..(4): Xaa is C or S
KAXXVPTELRSVKMAKVDEYDKVVKEVQVE

SEQ ID NO: 69993 - protein, 42 aa, Artificial Sequence
  Cyclic GFR-binding peptide
  MOD_RES (6)..(7)..(39)..(41): Xaa is C or S
KIPKAXXVPTELRPVQMRKIDENEKVVKKATVDMVVEGXGXR

SEQ ID NO: 69994 - protein, 22 aa, Artificial Sequence
  Cyclic GFR-binding peptide
LSNITMQIMDENEKVVIGEMSD

SEQ ID NO: 69995 - protein, 40 aa, Artificial Sequence; identical to SEQ ID NO: 24767
  Cyclic GFR-binding peptide
  MOD_RES (3)..(40): Xaa is C or S

SEQ ID NO: 69996 - protein, 23 aa, Artificial Sequence
  Cyclic GFR-binding peptide
LRPVQMRKIDEYDKVVKKATVEM

SEQ ID NO: 69997 - protein, 32 aa, Artificial Sequence
  Cyclic GFR-binding peptide
  MOD_RES (32)..(32): Xaa is C or S
VPTELSNITMQIMDENEKVVIGEMSDMVVEGX

SEQ ID NO: 69998 - protein, 36 aa, Artificial Sequence; identical to SEQ ID NO: 18662
  Cyclic GFR-binding peptide
  MOD_RES (6)..(7): Xaa is C or S

SEQ ID NO: 69999 - protein, 29 aa, Artificial Sequence
  Cyclic GFR-binding peptide
  MOD_RES (3)..(4): Xaa is C or S
KPXXAPTKLSNITVQIMDDSSNVIIGEMS

SEQ ID NO: 70000 - protein, 27 aa, Artificial Sequence
  Cyclic GFR-binding peptide
HHEPLTVLYYEYVRKKPKLEQLSNRLE

SEQ ID NO: 70001 - protein, 32 aa, Artificial Sequence
  Cyclic GFR-binding peptide
  MOD_RES (4)..(5): Xaa is C or S
PKPXXAPTQLSNITVQIMDDSSNVIIGEMSNM

SEQ ID NO: 70002 - protein, 28 aa, Artificial Sequence
  Cyclic GFR-binding peptide
  MOD_RES (27)..(27): Xaa is C or S
SNITMQIMDENEKVVIGEMSDMVVEGXG

SEQ ID NO: 70003 - protein, 38 aa, Artificial Sequence
  Cyclic GFR-binding peptide
  MOD_RES (6)..(7): Xaa is C or S
KIPKAXXVPTELRPVQMRKIDENEKVVKKATVDMVVEG

SEQ ID NO: 70004 - protein, 31 aa, Artificial Sequence
  Cyclic GFR-binding peptide
  MOD_RES (30)..(30): Xaa is C or S
PQDLRSVKIAKVVGRTPKVKEVQVMVVKSXK

SEQ ID NO: 70005 - protein, 36 aa, Artificial Sequence
  Cyclic GFR-binding peptide
QPSRVHHEPLTVLYYEYVRKKPKLEQLSNRLEEHLE

SEQ ID NO: 70006 - protein, 30 aa, Artificial Sequence
  Cyclic GFR-binding peptide
PTELRSVKMAKVDENEKVVKEVQVDMVVEG

SEQ ID NO: 70007 - protein, 29 aa, Artificial Sequence
  Cyclic GFR-binding peptide
  MOD_RES (1)..(1): Xaa is C or S
XVSQDLRSVKIAKVIGKTPKIKEVQVMIV

SEQ ID NO: 70008 - protein, 33 aa, Artificial Sequence; identical to SEQ ID NO: 24782
  Cyclic GFR-binding peptide
  MOD_RES (33)..(33): Xaa is C or S

SEQ ID NO: 70009 - protein, 39 aa, Artificial Sequence
  Cyclic GFR-binding peptide
  MOD_RES (4)..(5)..(37)..(39): Xaa is C or S
PKPXXAPTQLSNITVQIMDDSSNVIIGEMSNMVVRAXGX

SEQ ID NO: 70010 - protein, 38 aa, Artificial Sequence
  Cyclic GFR-binding peptide
  MOD_RES (3)..(3): Xaa is C or S
VKXQPSRVHHEPLTVLYYEYVRKKPKLEQLSNRLEEHL

SEQ ID NO: 70011 - protein, 38 aa, Artificial Sequence
  Cyclic GFR-binding peptide
  MOD_RES (3)..(4)..(36)..(38): Xaa is C or S
KPXXAPTQLSNITVQIMDDSSNVIIGEMSNMVVRAXGX

SEQ ID NO: 70012 - protein, 27 aa, Artificial Sequence
  Cyclic GFR-binding peptide
EERSVKMAKVRIKPHQGQHKEVQVFLQ

SEQ ID NO: 70013 - protein, 29 aa, Artificial Sequence
  Cyclic GFR-binding peptide
  MOD_RES (1)..(2): Xaa is C or S
XXVPTELEPLTMLYYDENEKVVEQLSNDM

SEQ ID NO: 70014 - protein, 30 aa, Artificial Sequence
  Cyclic GFR-binding peptide
  MOD_RES (28)..(30): Xaa is C or S
LRPVQVRKIDDSSNVIKKATVNMVVRSXGX

SEQ ID NO: 70015 - protein, 23 aa, Artificial Sequence
  Cyclic GFR-binding peptide
TQLRSVKVAKVDDSSNVIKEVQV

SEQ ID NO: 70016 - protein, 35 aa, Artificial Sequence
  Cyclic GFR-binding peptide
  MOD_RES (6)..(7): Xaa is C or S
ASAAPXXVPQALRSVKIAKVVGRKPKVKEVQVMIV

SEQ ID NO: 70017 - protein, 31 aa, Artificial Sequence
  Cyclic GFR-binding peptide
  MOD_RES (4)..(5): Xaa is C or S
ASPXXVSQDLSNITIQIMIGKTPKIIGEMSM

SEQ ID NO: 70018 - protein, 32 aa, Artificial Sequence
  Cyclic GFR-binding peptide
  MOD_RES (4)..(5): Xaa is C or S
PKPXXAPTKLSNITVQIMDDSSNVIIGEMSNM

SEQ ID NO: 70019 - protein, 27 aa, Artificial Sequence
  Cyclic GFR-binding peptide
  MOD_RES (1)..(1): Xaa is C or S
XVPQDLRSVKIAKVVGRTPKVKEVQVM

SEQ ID NO: 70020 - protein, 30 aa, Artificial Sequence
  Cyclic GFR-binding peptide
  MOD_RES (4)..(5): Xaa is C or S
PKAXXVPTELRSVKMAKVDEYDKVVKEVQV

SEQ ID NO: 70021 - protein, 33 aa, Artificial Sequence; identical to SEQ ID NO: 24794
  Cyclic GFR-binding peptide
  MOD_RES (33)..(33): Xaa is C or S

SEQ ID NO: 70022 - protein, 38 aa, Artificial Sequence
  Cyclic GFR-binding peptide
  MOD_RES (4)..(5)..(37): Xaa is C or S
PKPXXAPTKLRSVKVAKVDDSSNVIKEVQVNMVVRSXG

SEQ ID NO: 70023 - protein, 34 aa, Artificial Sequence; identical to SEQ ID NO: 24795
  Cyclic GFR-binding peptide
  MOD_RES (1)..(1): Xaa is C or S

SEQ ID NO: 70024 - protein, 32 aa, Artificial Sequence
  Cyclic GFR-binding peptide
  MOD_RES (2)..(2): Xaa is C or S
KXQPSRVHHEPLPVVYYEYVRKKPKLEQLSNR

SEQ ID NO: 70025 - protein, 33 aa, Artificial Sequence
  Cyclic GFR-binding peptide
  MOD_RES (2)..(3): Xaa is C or S
AXXVPTELSNITMQIMDEYDKVVIGEMSEMVVE

SEQ ID NO: 70026 - protein, 22 aa, Artificial Sequence
  Cyclic GFR-binding peptide
LSNITVQIMDDSSNVIIGEMSN

SEQ ID NO: 70027 - protein, 28 aa, Artificial Sequence
  Cyclic GFR-binding peptide
  MOD_RES (2)..(3): Xaa is C or S
PXXVPQDLSNITIQIMVGRTPKVIGEMS

SEQ ID NO: 70028 - protein, 37 aa, Artificial Sequence
  Cyclic GFR-binding peptide
  MOD_RES (2)..(34)..(36): Xaa is C or S
TXAPTKLRPVQVRKIDDSSNVIKKATVNMVVRSXGXH

SEQ ID NO: 70029 - protein, 28 aa, Artificial Sequence
  Cyclic GFR-binding peptide
ELRSVKMAKVDENEKVVKEVQVDMVVEG

SEQ ID NO: 70030 - protein, 38 aa, Artificial Sequence
  Cyclic GFR-binding peptide
  MOD_RES (5)..(6)..(38): Xaa is C or S
VPKPXXAPTQLRSVKVAKVDDSSNVIKEVQVNMVVRAX

SEQ ID NO: 70031 - protein, 39 aa, Artificial Sequence
  Cyclic GFR-binding peptide
  MOD_RES (4)..(5)..(36)..(38): Xaa is C or S
ASPXXVSQDLRSVKIAKVIGKTPKIKEVQVMIVKSXKXS

SEQ ID NO: 70032 - protein, 39 aa, Artificial Sequence
  Cyclic GFR-binding peptide
  MOD_RES (3)..(37)..(39): Xaa is C or S
LEXVPTEEEPLPMVYYRIKPHQGQHEQLSNFLQHNKXEX

SEQ ID NO: 70033 - protein, 33 aa, Artificial Sequence; identical to SEQ ID NO: 18702
  Cyclic GFR-binding peptide
  MOD_RES (3)..(4): Xaa is C or S

SEQ ID NO: 70034 - protein, 35 aa, Artificial Sequence; identical to SEQ ID NO: 18703
  Cyclic GFR-binding peptide
  MOD_RES (5)..(6): Xaa is C or S

SEQ ID NO: 70035 - protein, 31 aa, Artificial Sequence
  Cyclic GFR-binding peptide
  MOD_RES (4)..(4): Xaa is C or S
GLEXVPTEEEPLPMVYYRIKPHQGQHEQLSN

SEQ ID NO: 70036 - protein, 35 aa, Artificial Sequence
  Cyclic GFR-binding peptide
  MOD_RES (1)..(2)..(34): Xaa is C or S
XXAPTQLSNITVQIMDDSSNVIIGEMSNMVVRAXG

SEQ ID NO: 70037 - protein, 38 aa, Artificial Sequence; identical to SEQ ID NO: 24807
  Cyclic GFR-binding peptide
  MOD_RES (3)..(3): Xaa is C or S

SEQ ID NO: 70038 - protein, 32 aa, Artificial Sequence
  Cyclic GFR-binding peptide
  MOD_RES (30)..(32): Xaa is C or S
PQALRSVKIAKVVGRKPKVKEVQVMIVRSXKX

SEQ ID NO: 70039 - protein, 21 aa, Artificial Sequence
  Cyclic GFR-binding peptide
LEPLPMVYYDEYDKVVEQLSN

SEQ ID NO: 70040 - protein, 31 aa, Artificial Sequence; identical to SEQ ID NO: 24812
  Cyclic GFR-binding peptide

SEQ ID NO: 70041 - protein, 37 aa, Artificial Sequence
  Cyclic GFR-binding peptide
  MOD_RES (2)..(3)..(34)..(36): Xaa is C or S
PXXVPQDLRPVQIRKIVGRTPKVKKATVMVVKSXKXS

SEQ ID NO: 70042 - protein, 32 aa, Artificial Sequence
  Cyclic GFR-binding peptide
  MOD_RES (30)..(32): Xaa is C or S
SQDLRSVKIAKVIGKTPKIKEVQVMIVKSXKX

SEQ ID NO: 70043 - protein, 27 aa, Artificial Sequence
  Cyclic GFR-binding peptide
  MOD_RES (27)..(27): Xaa is C or S
LEPLPIVYYIGKTPKIEQLSNMIVKSX

SEQ ID NO: 70044 - protein, 27 aa, Artificial Sequence
  Cyclic GFR-binding peptide
PTQLSNITVQIMDDSSNVIIGEMSNMV

SEQ ID NO: 70045 - protein, 29 aa, Artificial Sequence
  Cyclic GFR-binding peptide
  MOD_RES (3)..(4): Xaa is C or S
KPXXAPTQLEPLTVLYYDDSSNVIEQLSN

SEQ ID NO: 70046 - protein, 31 aa, Artificial Sequence
  Cyclic GFR-binding peptide
  MOD_RES (5)..(6): Xaa is C or S
SASPXXVPQDLRSVKIAKVVGRTPKVKEVQV

SEQ ID NO: 70047 - protein, 29 aa, Artificial Sequence
  Cyclic GFR-binding peptide
  MOD_RES (1)..(2): Xaa is C or S
XXAPTKLRSVKVAKVDDSSNVIKEVQVNM

SEQ ID NO: 70048 - protein, 23 aa, Artificial Sequence
  Cyclic GFR-binding peptide
ELRPVQMRKIDEYDKVVKKATVE

SEQ ID NO: 70049 - protein, 31 aa, Artificial Sequence
  Cyclic GFR-binding peptide
VQLEPLTVLYYEIVRKKPIFEQLSNTLEDHL

SEQ ID NO: 70050 - protein, 37 aa, Artificial Sequence
  Cyclic GFR-binding peptide
  MOD_RES (3)..(3): Xaa is C or S
VQXRPTQVQLEPLPVVYYEIVRKKPIFEQLSNTLEDH

SEQ ID NO: 70051 - protein, 29 aa, Artificial Sequence
  Cyclic GFR-binding peptide
PTEERSVKMAKVRIKPHQGQHKEVQVFLQ

SEQ ID NO: 70052 - protein, 30 aa, Artificial Sequence; identical to SEQ ID NO: 18724
  Cyclic GFR-binding peptide

SEQ ID NO: 70053 - protein, 27 aa, Artificial Sequence
  Cyclic GFR-binding peptide
QLEPLTVLYYEIVRKKPIFEQLSNTLE

SEQ ID NO: 70054 - protein, 30 aa, Artificial Sequence
  Cyclic GFR-binding peptide
PTKLRSVKVAKVDDSSNVIKEVQVNMVVRS

SEQ ID NO: 70055 - protein, 35 aa, Artificial Sequence; identical to SEQ ID NO: 24830
  Cyclic GFR-binding peptide
  MOD_RES (34)..(34): Xaa is C or S

SEQ ID NO: 70056 - protein, 29 aa, Artificial Sequence
  Cyclic GFR-binding peptide
  MOD_RES (4)..(4): Xaa is C or S
KPTXAPTKLEPLPVVYYDDSSNVIEQLSN

SEQ ID NO: 70057 - protein, 28 aa, Artificial Sequence
  Cyclic GFR-binding peptide
PTELEPLTMLYYDEYDKVVEQLSNEMVV

SEQ ID NO: 70058 - protein, 29 aa, Artificial Sequence
  Cyclic GFR-binding peptide
  MOD_RES (28)..(28): Xaa is C or S
DLRSVKIAKVVGRTPKVKEVQVMVVKSXK

SEQ ID NO: 70059 - protein, 36 aa, Artificial Sequence; identical to SEQ ID NO: 24838
  Cyclic GFR-binding peptide
  MOD_RES (6)..(6): Xaa is C or S

SEQ ID NO: 70060 - protein, 33 aa, Artificial Sequence; identical to SEQ ID NO: 24839
  Cyclic GFR-binding peptide
  MOD_RES (2)..(2): Xaa is C or S

SEQ ID NO: 70061 - protein, 31 aa, Artificial Sequence
  Cyclic GFR-binding peptide
  MOD_RES (1)..(1): Xaa is C or S
XVPTEEEPLTMLYYRIKPHQGQHEQLSNFLQ

SEQ ID NO: 70062 - protein, 37 aa, Artificial Sequence; identical to SEQ ID NO: 18734
  Cyclic GFR-binding peptide
  MOD_RES (5)..(6): Xaa is C or S

SEQ ID NO: 70063 - protein, 33 aa, Artificial Sequence
  Cyclic GFR-binding peptide
  MOD_RES (33)..(33): Xaa is C or S
VQLEPLTVLYYEIVRKKPIFEQLSNTLEDHLAX

SEQ ID NO: 70064 - protein, 23 aa, Artificial Sequence
  Cyclic GFR-binding peptide
QDLEPLPIVYYIGKTPKIEQLSN

SEQ ID NO: 70065 - protein, 38 aa, Artificial Sequence
  Cyclic GFR-binding peptide
  MOD_RES (5)..(6)..(38): Xaa is C or S
VPKPXXAPTKLRPVQVRKIDDSSNVIKKATVNMVVRSX

SEQ ID NO: 70066 - protein, 26 aa, Artificial Sequence
  Cyclic GFR-binding peptide
QDLSNITIQIMIGKTPKIIGEMSMIV

SEQ ID NO: 70067 - protein, 31 aa, Artificial Sequence; identical to SEQ ID NO: 24848
  Cyclic GFR-binding peptide
  MOD_RES (4)..(4): Xaa is C or S

SEQ ID NO: 70068 - protein, 21 aa, Artificial Sequence
  Cyclic GFR-binding peptide
LSNITIQIMVGRTPKVIGEMS

SEQ ID NO: 70069 - protein, 34 aa, Artificial Sequence; identical to SEQ ID NO: 18743
  Cyclic GFR-binding peptide
  MOD_RES (31)..(33): Xaa is C or S

SEQ ID NO: 70070 - protein, 32 aa, Artificial Sequence
  Cyclic GFR-binding peptide
  MOD_RES (31)..(31): Xaa is C or S
PTQLRPVQVRKIDDSSNVIKKATVNMVVRAXG

SEQ ID NO: 70071 - protein, 26 aa, Artificial Sequence
  Cyclic GFR-binding peptide
LSNITIQIMIGKTPKIIGEMSMIVKS

SEQ ID NO: 70072 - protein, 37 aa, Artificial Sequence
  Cyclic GFR-binding peptide
  MOD_RES (37)..(37): Xaa is C or S
QPSRVHHEPLPVVYYEYVRKKPKLEQLSNRLEEHLEX

SEQ ID NO: 70073 - protein, 38 aa, Artificial Sequence
  Cyclic GFR-binding peptide
  MOD_RES (35)..(37): Xaa is C or S
TQVQLEPLTVLYYEIVRKKPIFEQLSNTLEDHLAXKXE

SEQ ID NO: 70074 - protein, 34 aa, Artificial Sequence
  Cyclic GFR-binding peptide
  MOD_RES (4)..(4): Xaa is C or S
SVKXQPSRVHHEPLTVLYYEYVRKKPKLEQLSNR

SEQ ID NO: 70075 - protein, 29 aa, Artificial Sequence
  Cyclic GFR-binding peptide
  MOD_RES (1)..(1): Xaa is C or S
XAPTQLSNITVQIMDDSSNVIIGEMSNMV

SEQ ID NO: 70076 - protein, 31 aa, Artificial Sequence; identical to SEQ ID NO: 18754
  Cyclic GFR-binding peptide
  MOD_RES (4)..(5): Xaa is C or S

SEQ ID NO: 70077 - protein, 31 aa, Artificial Sequence; identical to SEQ ID NO: 24856
  Cyclic GFR-binding peptide
  MOD_RES (1)..(1): Xaa is C or S

SEQ ID NO: 70078 - protein, 28 aa, Artificial Sequence
  Cyclic GFR-binding peptide
KLRSVKVAKVDDSSNVIKEVQVNMVVRS

SEQ ID NO: 70079 - protein, 37 aa, Artificial Sequence
  Cyclic GFR-binding peptide
  MOD_RES (35)..(37): Xaa is C or S
SRVHHEPLPVVYYEYVRKKPKLEQLSNRLEEHLEXAX

SEQ ID NO: 70080 - protein, 29 aa, Artificial Sequence
  Cyclic GFR-binding peptide
PTQLEPLTVLYYDDSSNVIEQLSNNMVVR

SEQ ID NO: 70081 - protein, 36 aa, Artificial Sequence
  Cyclic GFR-binding peptide
  MOD_RES (3)..(4)..(36): Xaa is C or S
KAXXVPTELRPVQMRKIDEYDKVVKKATVEMVVEGX

SEQ ID NO: 70082 - protein, 29 aa, Artificial Sequence
  Cyclic GFR-binding peptide
HHEPLTVLYYEYVRKKPKLEQLSNRLEEH

SEQ ID NO: 70083 - protein, 23 aa, Artificial Sequence
  Cyclic GFR-binding peptide
QDLRSVKIAKVVGRTPKVKEVQV

SEQ ID NO: 70084 - protein, 29 aa, Artificial Sequence
  Cyclic GFR-binding peptide
  MOD_RES (1)..(1): Xaa is C or S
XVPTELSNITMQIMDENEKVVIGEMSDMV

SEQ ID NO: 70085 - protein, 40 aa, Artificial Sequence
  Cyclic GFR-binding peptide
  MOD_RES (4)..(5)..(37)..(39): Xaa is C or S
PKAXXVPTELSNITMQIMDEYDKVVIGEMSEMVVEGXGXR

SEQ ID NO: 70086 - protein, 34 aa, Artificial Sequence; identical to SEQ ID NO: 24870
  Cyclic GFR-binding peptide
  MOD_RES (33)..(33): Xaa is C or S

SEQ ID NO: 70087 - protein, 29 aa, Artificial Sequence
  Cyclic GFR-binding peptide
TELSNITMQIMDEYDKVVIGEMSEMVVEG

SEQ ID NO: 70088 - protein, 32 aa, Artificial Sequence
  Cyclic GFR-binding peptide
  MOD_RES (2)..(3): Xaa is C or S
AXXVPTELRSVKMAKVDEYDKVVKEVQVEMVV

SEQ ID NO: 70089 - protein, 36 aa, Artificial Sequence
  Cyclic GFR-binding peptide
  MOD_RES (4)..(4): Xaa is C or S
NVQXRPTQVQLEPLTVLYYEIVRKKPIFEQLSNTLE

SEQ ID NO: 70090 - protein, 32 aa, Artificial Sequence
  Cyclic GFR-binding peptide
  MOD_RES (30)..(32): Xaa is C or S
TELRSVKMAKVDEYDKVVKEVQVEMVVEGXGX

SEQ ID NO: 70091 - protein, 28 aa, Artificial Sequence
  Cyclic GFR-binding peptide
  MOD_RES (1)..(1): Xaa is C or S
XVPTELRPVQMRKIDENEKVVKKATVDM

SEQ ID NO: 70092 - protein, 26 aa, Artificial Sequence
  Cyclic GFR-binding peptide
VPTELRPVQMRKIDEYDKVVKKATVE

SEQ ID NO: 70093 - protein, 41 aa, Artificial Sequence
  Cyclic GFR-binding peptide
  MOD_RES (6)..(38)..(40): Xaa is C or S
VTKPTXAPTKLRSVKVAKVDDSSNVIKEVQVNMVVRSXGXH

SEQ ID NO: 70094 - protein, 36 aa, Artificial Sequence
  Cyclic GFR-binding peptide
  MOD_RES (34)..(36): Xaa is C or S
QVQLEPLTVLYYEIVRKKPIFEQLSNTLEDHLAXKX

SEQ ID NO: 70095 - protein, 23 aa, Artificial Sequence
  Cyclic GFR-binding peptide
LEPLTMLYYDENEKVVEQLSNDM

SEQ ID NO: 70096 - protein, 33 aa, Artificial Sequence; identical to SEQ ID NO: 18783
  Cyclic GFR-binding peptide
  MOD_RES (1)..(2): Xaa is C or S

SEQ ID NO: 70097 - protein, 25 aa, Artificial Sequence
  Cyclic GFR-binding peptide
TKLEPLPVVYYDDSSNVIEQLSNNM

SEQ ID NO: 70098 - protein, 34 aa, Artificial Sequence; identical to SEQ ID NO: 18787
  Cyclic GFR-binding peptide
  MOD_RES (4)..(5): Xaa is C or S

SEQ ID NO: 70099 - protein, 29 aa, Artificial Sequence
  Cyclic GFR-binding peptide
  MOD_RES (2)..(3): Xaa is C or S
PXXVPQALEPLTILYYVGRKPKVEQLSNM

SEQ ID NO: 70100 - protein, 33 aa, Artificial Sequence; identical to SEQ ID NO: 18797
  Cyclic GFR-binding peptide
  MOD_RES (3)..(3): Xaa is C or S

SEQ ID NO: 70101 - protein, 20 aa, Artificial Sequence
  Cyclic GFR-binding peptide
RPVQMRKIDEYDKVVKKATV

SEQ ID NO: 70102 - protein, 37 aa, Artificial Sequence
  Cyclic GFR-binding peptide
  MOD_RES (7)..(7): Xaa is C or S
HVTKPTXAPTKLRSVKVAKVDDSSNVIKEVQVNMVVR

SEQ ID NO: 70103 - protein, 37 aa, Artificial Sequence
  Cyclic GFR-binding peptide
  MOD_RES (37)..(37): Xaa is C or S
RPTQVQLEPLPVVYYEIVRKKPIFEQLSNTLEDHLAX

SEQ ID NO: 70104 - protein, 32 aa, Artificial Sequence
  Cyclic GFR-binding peptide
  MOD_RES (31)..(31): Xaa is C or S
PTKLRPVQVRKIDDSSNVIKKATVNMVVRSXG

SEQ ID NO: 70105 - protein, 28 aa, Artificial Sequence
  Cyclic GFR-binding peptide
VPTELRSVKMAKVDEYDKVVKEVQVEMV

SEQ ID NO: 70106 - protein, 26 aa, Artificial Sequence
  Cyclic GFR-binding peptide
LSNITMQIMDEYDKVVIGEMSEMVVE

SEQ ID NO: 70107 - protein, 32 aa, Artificial Sequence
  Cyclic GFR-binding peptide
  MOD_RES (30)..(32): Xaa is C or S
PQALRPVQIRKIVGRKPKVKKATVMIVRSXKX

SEQ ID NO: 70108 - protein, 31 aa, Artificial Sequence; identical to SEQ ID NO: 18810
  Cyclic GFR-binding peptide
  MOD_RES (3)..(4): Xaa is C or S

SEQ ID NO: 70109 - protein, 27 aa, Artificial Sequence
  Cyclic GFR-binding peptide
  MOD_RES (1)..(2): Xaa is C or S
XXVPTELRPVQMRKIDENEKVVKKATV

SEQ ID NO: 70110 - protein, 34 aa, Artificial Sequence
  Cyclic GFR-binding peptide
  MOD_RES (2)..(3)..(34): Xaa is C or S
PXXVPQALSNITIQIMVGRKPKVIGEMSMIVRSX

SEQ ID NO: 70111 - protein, 35 aa, Artificial Sequence
  Cyclic GFR-binding peptide
  MOD_RES (6)..(7): Xaa is C or S
ASAAPXXVPQALSNITIQIMVGRKPKVIGEMSMIV

SEQ ID NO: 70112 - protein, 30 aa, Artificial Sequence; identical to SEQ ID NO: 18814
  Cyclic GFR-binding peptide

SEQ ID NO: 70113 - protein, 29 aa, Artificial Sequence
  Cyclic GFR-binding peptide
  MOD_RES (3)..(4): Xaa is C or S
KAXXVPTELRSVKMAKVDENEKVVKEVQV

SEQ ID NO: 70114 - protein, 29 aa, Artificial Sequence
  Cyclic GFR-binding peptide
VPTEERPVQMRKIRIKPHQGQHKKATVFL

SEQ ID NO: 70115 - protein, 28 aa, Artificial Sequence
  Cyclic GFR-binding peptide
  MOD_RES (3)..(3): Xaa is C or S
PTXAPTKLSNITVQIMDDSSNVIIGEMS

SEQ ID NO: 70116 - protein, 29 aa, Artificial Sequence
  Cyclic GFR-binding peptide
  MOD_RES (1)..(1): Xaa is C or S
XVSQDLSNITIQIMIGKTPKIIGEMSMIV

SEQ ID NO: 70117 - protein, 27 aa, Artificial Sequence
  Cyclic GFR-binding peptide
PTKLEPLTVLYYDDSSNVIEQLSNNMV

SEQ ID NO: 70118 - protein, 28 aa, Artificial Sequence
  Cyclic GFR-binding peptide
  MOD_RES (1)..(2): Xaa is C or S
XXVPQALEPLTILYYVGRKPKVEQLSNM

SEQ ID NO: 70119 - protein, 32 aa, Artificial Sequence; identical to SEQ ID NO: 18819
  Cyclic GFR-binding peptide
  MOD_RES (2)..(3): Xaa is C or S

SEQ ID NO: 70120 - protein, 29 aa, Artificial Sequence
  Cyclic GFR-binding peptide
HHEPLPVVYYEYVRKKPKLEQLSNRLEEH

SEQ ID NO: 70121 - protein, 28 aa, Artificial Sequence
  Cyclic GFR-binding peptide
TELEPLTMLYYDEYDKVVEQLSNEMVVE

SEQ ID NO: 70122 - protein, 31 aa, Artificial Sequence; identical to SEQ ID NO: 24907
  Cyclic GFR-binding peptide
  MOD_RES (3)..(3): Xaa is C or S

SEQ ID NO: 70123 - protein, 32 aa, Artificial Sequence
  Cyclic GFR-binding peptide
  MOD_RES (4)..(5): Xaa is C or S
PKPXXAPTQLRPVQVRKIDDSSNVIKKATVNM

SEQ ID NO: 70124 - protein, 33 aa, Artificial Sequence
  Cyclic GFR-binding peptide
  MOD_RES (1)..(2): Xaa is C or S
XXAPTQLRPVQVRKIDDSSNVIKKATVNMVVRA

SEQ ID NO: 70125 - protein, 33 aa, Artificial Sequence; identical to SEQ ID NO: 24909
  Cyclic GFR-binding peptide
  MOD_RES (3)..(3): Xaa is C or S

SEQ ID NO: 70126 - protein, 35 aa, Artificial Sequence
  Cyclic GFR-binding peptide
  MOD_RES (2)..(3)..(35): Xaa is C or S
PXXAPTQLRPVQVRKIDDSSNVIKKATVNMVVRAX

SEQ ID NO: 70127 - protein, 33 aa, Artificial Sequence
  Cyclic GFR-binding peptide
  MOD_RES (7)..(7): Xaa is C or S
HVTKPTXAPTKLSNITVQIMDDSSNVIIGEMSN

SEQ ID NO: 70128 - protein, 23 aa, Artificial Sequence
  Cyclic GFR-binding peptide
EPLPVVYYDDSSNVIEQLSNNMV

SEQ ID NO: 70129 - protein, 33 aa, Artificial Sequence; identical to SEQ ID NO: 18837
  Cyclic GFR-binding peptide
  MOD_RES (4)..(5): Xaa is C or S

SEQ ID NO: 70130 - protein, 36 aa, Artificial Sequence; identical to SEQ ID NO: 24914
  Cyclic GFR-binding peptide
  MOD_RES (33)..(35): Xaa is C or S

SEQ ID NO: 70131 - protein, 22 aa, Artificial Sequence
  Cyclic GFR-binding peptide
SNITMQIMDEYDKVVIGEMSEM

SEQ ID NO: 70132 - protein, 29 aa, Artificial Sequence
  Cyclic GFR-binding peptide
  MOD_RES (27)..(29): Xaa is C or S
LEPLTILYYVGRKPKVEQLSNMIVRSXKX

SEQ ID NO: 70133 - protein, 35 aa, Artificial Sequence
  Cyclic GFR-binding peptide
  MOD_RES (2)..(3)..(35): Xaa is C or S
AXXVPTELRPVQMRKIDENEKVVKKATVDMVVEGX

SEQ ID NO: 70134 - protein, 27 aa, Artificial Sequence
  Cyclic GFR-binding peptide
LSNITVQIMEIVRKKPIFIGEMSTLED

SEQ ID NO: 70135 - protein, 28 aa, Artificial Sequence
  Cyclic GFR-binding peptide
HRPVQVRKIEYVRKKPKLKKATVRLEEH

SEQ ID NO: 70136 - protein, 30 aa, Artificial Sequence
  Cyclic GFR-binding peptide
  MOD_RES (28)..(30): Xaa is C or S
LRSVKMAKVDENEKVVKEVQVDMVVEGXGX

SEQ ID NO: 70137 - protein, 32 aa, Artificial Sequence; identical to SEQ ID NO: 18853
  Cyclic GFR-binding peptide
  MOD_RES (5)..(6): Xaa is C or S

SEQ ID NO: 70138 - protein, 28 aa, Artificial Sequence
  Cyclic GFR-binding peptide
  MOD_RES (2)..(3): Xaa is C or S
AXXVPTELEPLPMVYYDENEKVVEQLSN

SEQ ID NO: 70139 - protein, 33 aa, Artificial Sequence
  Cyclic GFR-binding peptide
  MOD_RES (30)..(32): Xaa is C or S
PQDLSNITIQIMVGRTPKVIGEMSMVVKSXKXS

SEQ ID NO: 70140 - protein, 24 aa, Artificial Sequence
  Cyclic GFR-binding peptide
HRPVQVRKIEYVRKKPKLKKATVR

SEQ ID NO: 70141 - protein, 26 aa, Artificial Sequence
  Cyclic GFR-binding peptide
RPVQMRKIDEYDKVVKKATVEMVVEG

SEQ ID NO: 70142 - protein, 37 aa, Artificial Sequence
  Cyclic GFR-binding peptide
  MOD_RES (3)..(3): Xaa is C or S
VQXRPTQVQLEPLTVLYYEIVRKKPIFEQLSNTLEDH

SEQ ID NO: 70143 - protein, 35 aa, Artificial Sequence; identical to SEQ ID NO: 24937
  Cyclic GFR-binding peptide
  MOD_RES (2)..(2): Xaa is C or S

SEQ ID NO: 70144 - protein, 35 aa, Artificial Sequence; identical to SEQ ID NO: 24940
  Cyclic GFR-binding peptide
  MOD_RES (35)..(35): Xaa is C or S

SEQ ID NO: 70145 - protein, 40 aa, Artificial Sequence
  Cyclic GFR-binding peptide
  MOD_RES (4)..(4): Xaa is C or S
NVQXRPTQVQLEPLTVLYYEIVRKKPIFEQLSNTLEDHLA

SEQ ID NO: 70146 - protein, 33 aa, Artificial Sequence
  Cyclic GFR-binding peptide
  MOD_RES (3)..(4): Xaa is C or S
SPXXVPQDLSNITIQIMVGRTPKVIGEMSMVVK

SEQ ID NO: 70147 - protein, 34 aa, Artificial Sequence; identical to SEQ ID NO: 24949
  Cyclic GFR-binding peptide
  MOD_RES (5)..(5): Xaa is C or S

SEQ ID NO: 70148 - protein, 28 aa, Artificial Sequence
  Cyclic GFR-binding peptide
PTELRSVKMAKVDEYDKVVKEVQVEMVV

SEQ ID NO: 70149 - protein, 26 aa, Artificial Sequence
  Cyclic GFR-binding peptide
ELEPLTMLYYDEYDKVVEQLSNEMVV

SEQ ID NO: 70150 - protein, 26 aa, Artificial Sequence
  Cyclic GFR-binding peptide
VHHSNITVQIMEYVRKKPKLIGEMSR

SEQ ID NO: 70151 - protein, 33 aa, Artificial Sequence
  Cyclic GFR-binding peptide
  MOD_RES (1)..(2)..(33): Xaa is C or S
XXVPQDLRSVKIAKVVGRTPKVKEVQVMVVKSX

SEQ ID NO: 70152 - protein, 35 aa, Artificial Sequence; identical to SEQ ID NO: 18878
  Cyclic GFR-binding peptide
  MOD_RES (3)..(4)..(35): Xaa is C or S

SEQ ID NO: 70153 - protein, 38 aa, Artificial Sequence
  Cyclic GFR-binding peptide
  MOD_RES (4)..(5)..(37): Xaa is C or S
PKAXXVPTELRSVKMAKVDENEKVVKEVQVDMVVEGXG

SEQ ID NO: 70154 - protein, 34 aa, Artificial Sequence; identical to SEQ ID NO: 18884
  Cyclic GFR-binding peptide
  MOD_RES (1)..(33): Xaa is C or S

SEQ ID NO: 70155 - protein, 32 aa, Artificial Sequence
  Cyclic GFR-binding peptide
  MOD_RES (31)..(31): Xaa is C or S
VPQALRPVQIRKIVGRKPKVKKATVMIVRSXK

SEQ ID NO: 70156 - protein, 33 aa, Artificial Sequence
  Cyclic GFR-binding peptide
  MOD_RES (3)..(3): Xaa is C or S
VKXQPSRVHHEPLTVLYYEYVRKKPKLEQLSNR

SEQ ID NO: 70157 - protein, 36 aa, Artificial Sequence; identical to SEQ ID NO: 18886
  Cyclic GFR-binding peptide
  MOD_RES (1)..(2)..(34)..(36): Xaa is C or S

SEQ ID NO: 70158 - protein, 33 aa, Artificial Sequence
  Cyclic GFR-binding peptide
  MOD_RES (2)..(3): Xaa is C or S
PXXVPQALRPVQIRKIVGRKPKVKKATVMIVRS

SEQ ID NO: 70159 - protein, 24 aa, Artificial Sequence
  Cyclic GFR-binding peptide
HEPLTVLYYEYVRKKPKLEQLSNR

SEQ ID NO: 70160 - protein, 27 aa, Artificial Sequence
  Cyclic GFR-binding peptide
PTKLRPVQVRKIDDSSNVIKKATVNMV

SEQ ID NO: 70161 - protein, 30 aa, Artificial Sequence
  Cyclic GFR-binding peptide
VPTELSNITMQIMDENEKVVIGEMSDMVVE

SEQ ID NO: 70162 - protein, 33 aa, Artificial Sequence
  Cyclic GFR-binding peptide
QPSRVHHEPLPVVYYEYVRKKPKLEQLSNRLEE

SEQ ID NO: 70163 - protein, 33 aa, Artificial Sequence
  Cyclic GFR-binding peptide
  MOD_RES (4)..(5): Xaa is C or S
PKPXXAPTKLRPVQVRKIDDSSNVIKKATVNMV

SEQ ID NO: 70164 - protein, 26 aa, Artificial Sequence
  Cyclic GFR-binding peptide
APTQLRPVQVRKIDDSSNVIKKATVN

SEQ ID NO: 70165 - protein, 30 aa, Artificial Sequence; identical to SEQ ID NO: 18894
  Cyclic GFR-binding peptide
  MOD_RES (1)..(1): Xaa is C or S

SEQ ID NO: 70166 - protein, 26 aa, Artificial Sequence
  Cyclic GFR-binding peptide
EPLTVLYYDDSSNVIEQLSNNMVVRA

SEQ ID NO: 70167 - protein, 36 aa, Artificial Sequence; identical to SEQ ID NO: 18896
  Cyclic GFR-binding peptide
  MOD_RES (6)..(7): Xaa is C or S

SEQ ID NO: 70168 - protein, 28 aa, Artificial Sequence
  Cyclic GFR-binding peptide
SNITVQIMEIVRKKPIFIGEMSTLEDHL

SEQ ID NO: 70169 - protein, 42 aa, Artificial Sequence
  Cyclic GFR-binding peptide
  MOD_RES (3)..(40)..(42): Xaa is C or S
VKXQPSRVHHEPLTVLYYEYVRKKPKLEQLSNRLEEHLEXAX

SEQ ID NO: 70170 - protein, 36 aa, Artificial Sequence
  Cyclic GFR-binding peptide
  MOD_RES (4)..(5): Xaa is C or S
PKAXXVPTELRSVKMAKVDENEKVVKEVQVDMVVEG

SEQ ID NO: 70171 - protein, 26 aa, Artificial Sequence
  Cyclic GFR-binding peptide
VHHRPVQVRKIEYVRKKPKLKKATVR

SEQ ID NO: 70172 - protein, 31 aa, Artificial Sequence
  Cyclic GFR-binding peptide
  MOD_RES (2)..(2): Xaa is C or S
TXAPTKLRPVQVRKIDDSSNVIKKATVNMVV

SEQ ID NO: 70173 - protein, 40 aa, Artificial Sequence
  Cyclic GFR-binding peptide
  MOD_RES (7)..(7): Xaa is C or S
NDEGLEXVPTEEEPLPMVYYRIKPHQGQHEQLSNFLQHNK

SEQ ID NO: 70174 - protein, 40 aa, Artificial Sequence; identical to SEQ ID NO: 24967
  Cyclic GFR-binding peptide
  MOD_RES (37)..(39): Xaa is C or S

SEQ ID NO: 70175 - protein, 33 aa, Artificial Sequence
  Cyclic GFR-binding peptide
  MOD_RES (32)..(32): Xaa is C or S
APTQLSNITVQIMDDSSNVIIGEMSNMVVRAXG

SEQ ID NO: 70176 - protein, 35 aa, Artificial Sequence; identical to SEQ ID NO: 24969
  Cyclic GFR-binding peptide
  MOD_RES (3)..(3): Xaa is C or S

SEQ ID NO: 70177 - protein, 33 aa, Artificial Sequence; identical to SEQ ID NO: 24971
  Cyclic GFR-binding peptide

SEQ ID NO: 70178 - protein, 27 aa, Artificial Sequence
  Cyclic GFR-binding peptide
ALEPLTILYYVGRKPKVEQLSNMIVRS

SEQ ID NO: 70179 - protein, 21 aa, Artificial Sequence
  Cyclic GFR-binding peptide
RSVKMAKVDEYDKVVKEVQVE

SEQ ID NO: 70180 - protein, 33 aa, Artificial Sequence
  Cyclic GFR-binding peptide
  MOD_RES (31)..(33): Xaa is C or S
LEPLTVLYYEIVRKKPIFEQLSNTLEDHLAXKX

SEQ ID NO: 70181 - protein, 32 aa, Artificial Sequence
  Cyclic GFR-binding peptide
  MOD_RES (5)..(5): Xaa is C or S
TKPTXAPTKLRPVQVRKIDDSSNVIKKATVNM

SEQ ID NO: 70182 - protein, 31 aa, Artificial Sequence; identical to SEQ ID NO: 24982
  Cyclic GFR-binding peptide
  MOD_RES (31)..(31): Xaa is C or S

SEQ ID NO: 70183 - protein, 32 aa, Artificial Sequence
  Cyclic GFR-binding peptide
  MOD_RES (7)..(7): Xaa is C or S
HVTKPTXAPTKLRSVKVAKVDDSSNVIKEVQV

SEQ ID NO: 70184 - protein, 31 aa, Artificial Sequence
  Cyclic GFR-binding peptide
  MOD_RES (5)..(6): Xaa is C or S
VPKPXXAPTQLRPVQVRKIDDSSNVIKKATV

SEQ ID NO: 70185 - protein, 35 aa, Artificial Sequence
  Cyclic GFR-binding peptide
  MOD_RES (34)..(34): Xaa is C or S
VPTEEEPLTMLYYRIKPHQGQHEQLSNFLQHNKXE

SEQ ID NO: 70186 - protein, 26 aa, Artificial Sequence
  Cyclic GFR-binding peptide
  MOD_RES (26)..(26): Xaa is C or S
RSVKIAKVIGKTPKIKEVQVMIVKSX

SEQ ID NO: 70187 - protein, 24 aa, Artificial Sequence
  Cyclic GFR-binding peptide
EPLTVLYYEIVRKKPIFEQLSNTL

SEQ ID NO: 70188 - protein, 21 aa, Artificial Sequence
  Cyclic GFR-binding peptide
LRSVKMAKVDENEKVVKEVQV

SEQ ID NO: 70189 - protein, 28 aa, Artificial Sequence
  Cyclic GFR-binding peptide
QLSNITVQIMDDSSNVIIGEMSNMVVRA

SEQ ID NO: 70190 - protein, 30 aa, Artificial Sequence; identical to SEQ ID NO: 18918
  Cyclic GFR-binding peptide
  MOD_RES (3)..(4): Xaa is C or S

SEQ ID NO: 70191 - protein, 28 aa, Artificial Sequence
  Cyclic GFR-binding peptide
  MOD_RES (28)..(28): Xaa is C or S
DLSNITIQIMVGRTPKVIGEMSMVVKSX

SEQ ID NO: 70192 - protein, 31 aa, Artificial Sequence
  Cyclic GFR-binding peptide
  MOD_RES (30)..(30): Xaa is C or S
EPLTVLYYEIVRKKPIFEQLSNTLEDHLAXK

SEQ ID NO: 70193 - protein, 33 aa, Artificial Sequence; identical to SEQ ID NO: 18920
  Cyclic GFR-binding peptide
  MOD_RES (4)..(5): Xaa is C or S

SEQ ID NO: 70194 - protein, 29 aa, Artificial Sequence
  Cyclic GFR-binding peptide
TELEPLPMVYYDENEKVVEQLSNDMVVEG

SEQ ID NO: 70195 - protein, 33 aa, Artificial Sequence
  Cyclic GFR-binding peptide
  MOD_RES (4)..(5): Xaa is C or S
PKAXXVPTELRPVQMRKIDENEKVVKKATVDMV

SEQ ID NO: 70196 - protein, 38 aa, Artificial Sequence
  Cyclic GFR-binding peptide
  MOD_RES (4)..(5)..(37): Xaa is C or S
PKPXXAPTQLRPVQVRKIDDSSNVIKKATVNMVVRAXG

SEQ ID NO: 70197 - protein, 34 aa, Artificial Sequence
  Cyclic GFR-binding peptide
TQVQLEPLPVVYYEIVRKKPIFEQLSNTLEDHLA

SEQ ID NO: 70198 - protein, 37 aa, Artificial Sequence
  Cyclic GFR-binding peptide
  MOD_RES (34)..(36): Xaa is C or S
RVHHEPLPVVYYEYVRKKPKLEQLSNRLEEHLEXAXA

SEQ ID NO: 70199 - protein, 38 aa, Artificial Sequence
  Cyclic GFR-binding peptide
  MOD_RES (5)..(5): Xaa is C or S
SSVKXQPSRVHHEPLTVLYYEYVRKKPKLEQLSNRLEE

SEQ ID NO: 70200 - protein, 28 aa, Artificial Sequence
  Cyclic GFR-binding peptide
HHEPLTVLYYEYVRKKPKLEQLSNRLEE

SEQ ID NO: 70201 - protein, 41 aa, Artificial Sequence; identical to SEQ ID NO: 18933
  Cyclic GFR-binding peptide
  MOD_RES (5)..(6)..(38)..(40): Xaa is C or S

SEQ ID NO: 70202 - protein, 35 aa, Artificial Sequence; identical to SEQ ID NO: 18936
  Cyclic GFR-binding peptide
  MOD_RES (5)..(6): Xaa is C or S

SEQ ID NO: 70203 - protein, 27 aa, Artificial Sequence
  Cyclic GFR-binding peptide
  MOD_RES (1)..(1): Xaa is C or S
XAPTQLRPVQVRKIDDSSNVIKKATVN

SEQ ID NO: 70204 - protein, 39 aa, Artificial Sequence; identical to SEQ ID NO: 18938
  Cyclic GFR-binding peptide
  MOD_RES (5)..(6)..(38): Xaa is C or S

SEQ ID NO: 70205 - protein, 26 aa, Artificial Sequence
  Cyclic GFR-binding peptide
EPLTVLYYDDSSNVIEQLSNNMVVRS

SEQ ID NO: 70206 - protein, 27 aa, Artificial Sequence
  Cyclic GFR-binding peptide
VSQDLSNITIQIMIGKTPKIIGEMSMI

SEQ ID NO: 70207 - protein, 34 aa, Artificial Sequence; identical to SEQ ID NO: 18942
  Cyclic GFR-binding peptide
  MOD_RES (5)..(6): Xaa is C or S

SEQ ID NO: 70208 - protein, 39 aa, Artificial Sequence; identical to SEQ ID NO: 24992
  Cyclic GFR-binding peptide
  MOD_RES (1)..(38): Xaa is C or S

SEQ ID NO: 70209 - protein, 27 aa, Artificial Sequence
  Cyclic GFR-binding peptide
VPTELRSVKMAKVDEYDKVVKEVQVEM

SEQ ID NO: 70210 - protein, 25 aa, Artificial Sequence
  Cyclic GFR-binding peptide
VPTELRPVQMRKIDEYDKVVKKATV

SEQ ID NO: 70211 - protein, 26 aa, Artificial Sequence
  Cyclic GFR-binding peptide
  MOD_RES (1)..(1): Xaa is C or S
XAPTQLRSVKVAKVDDSSNVIKEVQV

SEQ ID NO: 70212 - protein, 26 aa, Artificial Sequence
  Cyclic GFR-binding peptide
HHEPLTVLYYEYVRKKPKLEQLSNRL

SEQ ID NO: 70213 - protein, 29 aa, Artificial Sequence
  Cyclic GFR-binding peptide
RPTQVQLSNITVQIMEIVRKKPIFIGEMS

SEQ ID NO: 70214 - protein, 31 aa, Artificial Sequence; identical to SEQ ID NO: 18950
  Cyclic GFR-binding peptide
  MOD_RES (5)..(6): Xaa is C or S

SEQ ID NO: 70215 - protein, 38 aa, Artificial Sequence
  Cyclic GFR-binding peptide
  MOD_RES (3)..(4)..(36)..(38): Xaa is C or S
KPXXAPTKLSNITVQIMDDSSNVIIGEMSNMVVRSXGX

SEQ ID NO: 70216 - protein, 25 aa, Artificial Sequence
  Cyclic GFR-binding peptide
APTQLEPLTVLYYDDSSNVIEQLSN

SEQ ID NO: 70217 - protein, 25 aa, Artificial Sequence
  Cyclic GFR-binding peptide
ELEPLTMLYYDEYDKVVEQLSNEMV

SEQ ID NO: 70218 - protein, 31 aa, Artificial Sequence
  Cyclic GFR-binding peptide
  MOD_RES (3)..(3): Xaa is C or S
LEXVPTEEEPLTMLYYRIKPHQGQHEQLSNF

SEQ ID NO: 70219 - protein, 33 aa, Artificial Sequence; identical to SEQ ID NO: 18954
  Cyclic GFR-binding peptide
  MOD_RES (7)..(7): Xaa is C or S

SEQ ID NO: 70220 - protein, 29 aa, Artificial Sequence
  Cyclic GFR-binding peptide
PTQLRSVKVAKVDDSSNVIKEVQVNMVVR

SEQ ID NO: 70221 - protein, 37 aa, Artificial Sequence
  Cyclic GFR-binding peptide
  MOD_RES (4)..(4): Xaa is C or S
GLEXVPTEEEPLTMLYYRIKPHQGQHEQLSNFLQHNK

SEQ ID NO: 70222 - protein, 27 aa, Artificial Sequence
  Cyclic GFR-binding peptide
ERPVQMRKIRIKPHQGQHKKATVFLQH

SEQ ID NO: 70223 - protein, 36 aa, Artificial Sequence; identical to SEQ ID NO: 25009
  Cyclic GFR-binding peptide
  MOD_RES (7)..(7): Xaa is C or S

SEQ ID NO: 70224 - protein, 42 aa, Artificial Sequence; identical to SEQ ID NO: 25013
  Cyclic GFR-binding peptide
  MOD_RES (3)..(40)..(42): Xaa is C or S

SEQ ID NO: 70225 - protein, 24 aa, Artificial Sequence
  Cyclic GFR-binding peptide
PTELRPVQMRKIDENEKVVKKATV

SEQ ID NO: 70226 - protein, 33 aa, Artificial Sequence
  Cyclic GFR-binding peptide
  MOD_RES (30)..(32): Xaa is C or S
TELRSVKMAKVDEYDKVVKEVQVEMVVEGXGXR

SEQ ID NO: 70227 - protein, 30 aa, Artificial Sequence; identical to SEQ ID NO: 18969
  Cyclic GFR-binding peptide
  MOD_RES (2)..(3): Xaa is C or S

SEQ ID NO: 70228 - protein, 37 aa, Artificial Sequence; identical to SEQ ID NO: 25017
  Cyclic GFR-binding peptide
  MOD_RES (34)..(36): Xaa is C or S

SEQ ID NO: 70229 - protein, 30 aa, Artificial Sequence
  Cyclic GFR-binding peptide
VPQALSNITIQIMVGRKPKVIGEMSMIVRS

SEQ ID NO: 70230 - protein, 25 aa, Artificial Sequence
  Cyclic GFR-binding peptide
QLEPLTVLYYDDSSNVIEQLSNNMV

SEQ ID NO: 70231 - protein, 37 aa, Artificial Sequence
  Cyclic GFR-binding peptide
  MOD_RES (5)..(6): Xaa is C or S
IPKAXXVPTELSNITMQIMDENEKVVIGEMSDMVVEG

SEQ ID NO: 70232 - protein, 30 aa, Artificial Sequence
  Cyclic GFR-binding peptide
EEEPLPMVYYRIKPHQGQHEQLSNFLQHNK

SEQ ID NO: 70233 - protein, 29 aa, Artificial Sequence
  Cyclic GFR-binding peptide
  MOD_RES (1)..(1): Xaa is C or S
XVPTELRSVKMAKVDENEKVVKEVQVDMV

SEQ ID NO: 70234 - protein, 29 aa, Artificial Sequence
  Cyclic GFR-binding peptide
  MOD_RES (1)..(2): Xaa is C or S
XXVPTELRSVKMAKVDEYDKVVKEVQVEM

SEQ ID NO: 70235 - protein, 38 aa, Artificial Sequence
  Cyclic GFR-binding peptide
  MOD_RES (4)..(38): Xaa is C or S
GLEXVPTEEEPLTMLYYRIKPHQGQHEQLSNFLQHNKX

SEQ ID NO: 70236 - protein, 32 aa, Artificial Sequence
  Cyclic GFR-binding peptide
  MOD_RES (1)..(2): Xaa is C or S
XXVSQDLRSVKIAKVIGKTPKIKEVQVMIVKS

SEQ ID NO: 70237 - protein, 34 aa, Artificial Sequence; identical to SEQ ID NO: 25026
  Cyclic GFR-binding peptide
  MOD_RES (4)..(4): Xaa is C or S

SEQ ID NO: 70238 - protein, 34 aa, Artificial Sequence; identical to SEQ ID NO: 18989
  Cyclic GFR-binding peptide
  MOD_RES (2)..(3)..(34): Xaa is C or S

SEQ ID NO: 70239 - protein, 38 aa, Artificial Sequence
  Cyclic GFR-binding peptide
  MOD_RES (36)..(38): Xaa is C or S
PSRVHHEPLPVVYYEYVRKKPKLEQLSNRLEEHLEXAX

SEQ ID NO: 70240 - protein, 37 aa, Artificial Sequence; identical to SEQ ID NO: 18994
  Cyclic GFR-binding peptide
  MOD_RES (6)..(7): Xaa is C or S

SEQ ID NO: 70241 - protein, 37 aa, Artificial Sequence; identical to SEQ ID NO: 18996
  Cyclic GFR-binding peptide
  MOD_RES (5)..(6): Xaa is C or S

SEQ ID NO: 70242 - protein, 33 aa, Artificial Sequence
  Cyclic GFR-binding peptide
  MOD_RES (1)..(33): Xaa is C or S
XAPTKLRPVQVRKIDDSSNVIKKATVNMVVRSX

SEQ ID NO: 70243 - protein, 44 aa, Artificial Sequence; identical to SEQ ID NO: 25032
  Cyclic GFR-binding peptide
  MOD_RES (5)..(42)..(44): Xaa is C or S

SEQ ID NO: 70244 - protein, 22 aa, Artificial Sequence
  Cyclic GFR-binding peptide
EPLPVVYYEIVRKKPIFEQLSN

SEQ ID NO: 70245 - protein, 29 aa, Artificial Sequence
  Cyclic GFR-binding peptide
QVQLEPLTVLYYEIVRKKPIFEQLSNTLE

SEQ ID NO: 70246 - protein, 35 aa, Artificial Sequence
  Cyclic GFR-binding peptide
PSRVHHEPLTVLYYEYVRKKPKLEQLSNRLEEHLE

SEQ ID NO: 70247 - protein, 29 aa, Artificial Sequence
  Cyclic GFR-binding peptide
  MOD_RES (3)..(4): Xaa is C or S
APXXVPQALEPLTILYYVGRKPKVEQLSN

SEQ ID NO: 70248 - protein, 28 aa, Artificial Sequence
  Cyclic GFR-binding peptide
PTELRPVQMRKIDEYDKVVKKATVEMVV

SEQ ID NO: 70249 - protein, 29 aa, Artificial Sequence
  Cyclic GFR-binding peptide
  MOD_RES (1)..(1): Xaa is C or S
XVPQDLRPVQIRKIVGRTPKVKKATVMVV

SEQ ID NO: 70250 - protein, 37 aa, Artificial Sequence; identical to SEQ ID NO: 25040
  Cyclic GFR-binding peptide
  MOD_RES (3)..(3): Xaa is C or S

SEQ ID NO: 70251 - protein, 38 aa, Artificial Sequence
  Cyclic GFR-binding peptide
  MOD_RES (4)..(5)..(37): Xaa is C or S
PKPXXAPTKLRPVQVRKIDDSSNVIKKATVNMVVRSXG

SEQ ID NO: 70252 - protein, 38 aa, Artificial Sequence
  Cyclic GFR-binding peptide
  MOD_RES (5)..(6)..(37): Xaa is C or S
SAAPXXVPQALRPVQIRKIVGRKPKVKKATVMIVRSXK

SEQ ID NO: 70253 - protein, 37 aa, Artificial Sequence; identical to SEQ ID NO: 19008
  Cyclic GFR-binding peptide
  MOD_RES (2)..(3)..(35)..(37): Xaa is C or S

SEQ ID NO: 70254 - protein, 26 aa, Artificial Sequence
  Cyclic GFR-binding peptide
VSQDLRSVKIAKVIGKTPKIKEVQVM

SEQ ID NO: 70255 - protein, 36 aa, Artificial Sequence
  Cyclic GFR-binding peptide
  MOD_RES (2)..(2): Xaa is C or S
KXQPSRVHHEPLTVLYYEYVRKKPKLEQLSNRLEEH

SEQ ID NO: 70256 - protein, 31 aa, Artificial Sequence
  Cyclic GFR-binding peptide
  MOD_RES (1)..(1): Xaa is C or S
XRPTQVQLEPLTVLYYEIVRKKPIFEQLSNT

SEQ ID NO: 70257 - protein, 21 aa, Artificial Sequence
  Cyclic GFR-binding peptide
SNITIQIMVGRTPKVIGEMSM

SEQ ID NO: 70258 - protein, 20 aa, Artificial Sequence
  Cyclic GFR-binding peptide
EPLTVLYYDDSSNVIEQLSN

SEQ ID NO: 70259 - protein, 23 aa, Artificial Sequence
  Cyclic GFR-binding peptide
ELEPLTMLYYDEYDKVVEQLSNE

SEQ ID NO: 70260 - protein, 36 aa, Artificial Sequence
  Cyclic GFR-binding peptide
  MOD_RES (1)..(2)..(34)..(36): Xaa is C or S
XXVPTELSNITMQIMDEYDKVVIGEMSEMVVEGXGX

SEQ ID NO: 70261 - protein, 20 aa, Artificial Sequence
  Cyclic GFR-binding peptide
SNITIQIMVGRKPKVIGEMS

SEQ ID NO: 70262 - protein, 37 aa, Artificial Sequence
  Cyclic GFR-binding peptide
  MOD_RES (1)..(2)..(34)..(36): Xaa is C or S
XXAPTQLRSVKVAKVDDSSNVIKEVQVNMVVRAXGXH

SEQ ID NO: 70263 - protein, 25 aa, Artificial Sequence
  Cyclic GFR-binding peptide
EPLPVVYYEIVRKKPIFEQLSNTLE

SEQ ID NO: 70264 - protein, 30 aa, Artificial Sequence
  Cyclic GFR-binding peptide
  MOD_RES (1)..(2): Xaa is C or S
XXVPTELRPVQMRKIDEYDKVVKKATVEMV

SEQ ID NO: 70265 - protein, 22 aa, Artificial Sequence
  Cyclic GFR-binding peptide
DLRSVKIAKVIGKTPKIKEVQV

SEQ ID NO: 70266 - protein, 35 aa, Artificial Sequence
  Cyclic GFR-binding peptide
  MOD_RES (33)..(35): Xaa is C or S
VHHEPLTVLYYEYVRKKPKLEQLSNRLEEHLEXAX

SEQ ID NO: 70267 - protein, 41 aa, Artificial Sequence
  Cyclic GFR-binding peptide
  MOD_RES (5)..(6)..(38)..(40): Xaa is C or S
VPKPXXAPTKLSNITVQIMDDSSNVIIGEMSNMVVRSXGXH

SEQ ID NO: 70268 - protein, 38 aa, Artificial Sequence; identical to SEQ ID NO: 25059
  Cyclic GFR-binding peptide
  MOD_RES (3)..(37): Xaa is C or S

SEQ ID NO: 70269 - protein, 35 aa, Artificial Sequence
  Cyclic GFR-binding peptide
  MOD_RES (3)..(35): Xaa is C or S
PTXAPTKLRPVQVRKIDDSSNVIKKATVNMVVRSX

SEQ ID NO: 70270 - protein, 37 aa, Artificial Sequence
  Cyclic GFR-binding peptide
  MOD_RES (2)..(2): Xaa is C or S
QXRPTQVQLEPLTVLYYEIVRKKPIFEQLSNTLEDHL

SEQ ID NO: 70271 - protein, 30 aa, Artificial Sequence
  Cyclic GFR-binding peptide
  MOD_RES (29)..(29): Xaa is C or S
QDLRSVKIAKVIGKTPKIKEVQVMIVKSXK

SEQ ID NO: 70272 - protein, 39 aa, Artificial Sequence; identical to SEQ ID NO: 19030
  Cyclic GFR-binding peptide
  MOD_RES (4)..(36)..(38): Xaa is C or S

SEQ ID NO: 70273 - protein, 37 aa, Artificial Sequence
  Cyclic GFR-binding peptide
  MOD_RES (2)..(3)..(35)..(37): Xaa is C or S
AXXVPTELSNITMQIMDEYDKVVIGEMSEMVVEGXGX

SEQ ID NO: 70274 - protein, 27 aa, Artificial Sequence
  Cyclic GFR-binding peptide
PTQLRSVKVAKVDDSSNVIKEVQVNMV

SEQ ID NO: 70275 - protein, 33 aa, Artificial Sequence
  Cyclic GFR-binding peptide
  MOD_RES (31)..(33): Xaa is C or S
PTQLRSVKVAKVDDSSNVIKEVQVNMVVRAXGX

SEQ ID NO: 70276 - protein, 41 aa, Artificial Sequence; identical to SEQ ID NO: 19036
  Cyclic GFR-binding peptide
  MOD_RES (6)..(38)..(40): Xaa is C or S

SEQ ID NO: 70277 - protein, 39 aa, Artificial Sequence
  Cyclic GFR-binding peptide
  MOD_RES (4)..(36)..(38): Xaa is C or S
KPTXAPTKLRPVQVRKIDDSSNVIKKATVNMVVRSXGXH

SEQ ID NO: 70278 - protein, 32 aa, Artificial Sequence
  Cyclic GFR-binding peptide
  MOD_RES (2)..(2): Xaa is C or S
TXAPTKLSNITVQIMDDSSNVIIGEMSNMVVR

SEQ ID NO: 70279 - protein, 43 aa, Artificial Sequence
  Cyclic GFR-binding peptide
  MOD_RES (7)..(41)..(43): Xaa is C or S
NDEGLEXVPTEEEPLTMLYYRIKPHQGQHEQLSNFLQHNKXEX

SEQ ID NO: 70280 - protein, 37 aa, Artificial Sequence; identical to SEQ ID NO: 25071
  Cyclic GFR-binding peptide
  MOD_RES (36)..(36): Xaa is C or S

SEQ ID NO: 70281 - protein, 24 aa, Artificial Sequence
  Cyclic GFR-binding peptide
EEEPLTMLYYRIKPHQGQHEQLSN

SEQ ID NO: 70282 - protein, 24 aa, Artificial Sequence
  Cyclic GFR-binding peptide
DLSNITIQIMIGKTPKIIGEMSMI

SEQ ID NO: 70283 - protein, 39 aa, Artificial Sequence
  Cyclic GFR-binding peptide
  MOD_RES (36)..(38): Xaa is C or S
PTQVQLEPLTVLYYEIVRKKPIFEQLSNTLEDHLAXKXE

SEQ ID NO: 70284 - protein, 31 aa, Artificial Sequence
  Cyclic GFR-binding peptide
  MOD_RES (3)..(4): Xaa is C or S
KAXXVPTELSNITMQIMDENEKVVIGEMSDM

SEQ ID NO: 70285 - protein, 37 aa, Artificial Sequence
  Cyclic GFR-binding peptide
  MOD_RES (2)..(3)..(35)..(37): Xaa is C or S
AXXVPTELSNITMQIMDENEKVVIGEMSDMVVEGXGX

SEQ ID NO: 70286 - protein, 41 aa, Artificial Sequence; identical to SEQ ID NO: 25080
  Cyclic GFR-binding peptide
  MOD_RES (4)..(41): Xaa is C or S

SEQ ID NO: 70287 - protein, 31 aa, Artificial Sequence
  Cyclic GFR-binding peptide
  MOD_RES (4)..(5): Xaa is C or S
AAPXXVPQALRSVKIAKVVGRKPKVKEVQVM

SEQ ID NO: 70288 - protein, 33 aa, Artificial Sequence; identical to SEQ ID NO: 19050
  Cyclic GFR-binding peptide
  MOD_RES (5)..(5): Xaa is C or S

SEQ ID NO: 70289 - protein, 35 aa, Artificial Sequence
  Cyclic GFR-binding peptide
  MOD_RES (4)..(5): Xaa is C or S
ASPXXVPQDLSNITIQIMVGRTPKVIGEMSMVVKS

SEQ ID NO: 70290 - protein, 27 aa, Artificial Sequence
  Cyclic GFR-binding peptide
VPTELEPLTMLYYDENEKVVEQLSNDM

SEQ ID NO: 70291 - protein, 27 aa, Artificial Sequence
  Cyclic GFR-binding peptide
KLRPVQVRKIDDSSNVIKKATVNMVVR

SEQ ID NO: 70292 - protein, 36 aa, Artificial Sequence; identical to SEQ ID NO: 19056
  Cyclic GFR-binding peptide
  MOD_RES (1)..(2)..(34)..(36): Xaa is C or S

SEQ ID NO: 70293 - protein, 34 aa, Artificial Sequence; identical to SEQ ID NO: 19057
  Cyclic GFR-binding peptide
  MOD_RES (1)..(33): Xaa is C or S

SEQ ID NO: 70294 - protein, 31 aa, Artificial Sequence
  Cyclic GFR-binding peptide
  MOD_RES (1)..(1): Xaa is C or S
XVSQDLRSVKIAKVIGKTPKIKEVQVMIVKS

SEQ ID NO: 70295 - protein, 25 aa, Artificial Sequence
  Cyclic GFR-binding peptide
PTELSNITMQIMDENEKVVIGEMSD

SEQ ID NO: 70296 - protein, 27 aa, Artificial Sequence
  Cyclic GFR-binding peptide
VQLEPLTVLYYEIVRKKPIFEQLSNTL

SEQ ID NO: 70297 - protein, 26 aa, Artificial Sequence
  Cyclic GFR-binding peptide
LEPLPIVYYIGKTPKIEQLSNMIVKS

SEQ ID NO: 70298 - protein, 24 aa, Artificial Sequence
  Cyclic GFR-binding peptide
RSVKMAKVDEYDKVVKEVQVEMVV

SEQ ID NO: 70299 - protein, 29 aa, Artificial Sequence
  Cyclic GFR-binding peptide
  MOD_RES (2)..(3): Xaa is C or S
PXXVPQALRPVQIRKIVGRKPKVKKATVM

SEQ ID NO: 70300 - protein, 38 aa, Artificial Sequence; identical to SEQ ID NO: 25092
  Cyclic GFR-binding peptide
  MOD_RES (7)..(7): Xaa is C or S

SEQ ID NO: 70301 - protein, 38 aa, Artificial Sequence
  Cyclic GFR-binding peptide
  MOD_RES (3)..(3): Xaa is C or S
VKXQPSRVHHEPLPVVYYEYVRKKPKLEQLSNRLEEHL

SEQ ID NO: 70302 - protein, 31 aa, Artificial Sequence
  Cyclic GFR-binding peptide
VPTELRPVQMRKIDENEKVVKKATVDMVVEG

SEQ ID NO: 70303 - protein, 30 aa, Artificial Sequence; identical to SEQ ID NO: 19070
  Cyclic GFR-binding peptide
  MOD_RES (2)..(3): Xaa is C or S

SEQ ID NO: 70304 - protein, 27 aa, Artificial Sequence
  Cyclic GFR-binding peptide
  MOD_RES (1)..(2): Xaa is C or S
XXVPQALEPLTILYYVGRKPKVEQLSN

SEQ ID NO: 70305 - protein, 37 aa, Artificial Sequence
  Cyclic GFR-binding peptide
  MOD_RES (3)..(4)..(36): Xaa is C or S
KAXXVPTELRPVQMRKIDENEKVVKKATVDMVVEGXG

SEQ ID NO: 70306 - protein, 41 aa, Artificial Sequence
  Cyclic GFR-binding peptide
  MOD_RES (6)..(38)..(40): Xaa is C or S
VTKPTXAPTKLSNITVQIMDDSSNVIIGEMSNMVVRSXGXH

SEQ ID NO: 70307 - protein, 33 aa, Artificial Sequence
  Cyclic GFR-binding peptide
  MOD_RES (30)..(32): Xaa is C or S
SQDLRPVQIRKIIGKTPKIKKATVMIVKSXKXS

SEQ ID NO: 70308 - protein, 35 aa, Artificial Sequence
  Cyclic GFR-binding peptide
  MOD_RES (32)..(34): Xaa is C or S
VPTELSNITMQIMDENEKVVIGEMSDMVVEGXGXR

SEQ ID NO: 70309 - protein, 29 aa, Artificial Sequence
  Cyclic GFR-binding peptide
  MOD_RES (29)..(29): Xaa is C or S
KLEPLTVLYYDDSSNVIEQLSNNMVVRSX

SEQ ID NO: 70310 - protein, 26 aa, Artificial Sequence
  Cyclic GFR-binding peptide
VHHEPLTVLYYEYVRKKPKLEQLSNR

SEQ ID NO: 70311 - protein, 30 aa, Artificial Sequence
  Cyclic GFR-binding peptide
APTKLRPVQVRKIDDSSNVIKKATVNMVVR

SEQ ID NO: 70312 - protein, 36 aa, Artificial Sequence
  Cyclic GFR-binding peptide
  MOD_RES (4)..(36): Xaa is C or S
KPTXAPTKLSNITVQIMDDSSNVIIGEMSNMVVRSX

SEQ ID NO: 70313 - protein, 28 aa, Artificial Sequence
  Cyclic GFR-binding peptide
HHRPVQVRKIEYVRKKPKLKKATVRLEE

SEQ ID NO: 70314 - protein, 22 aa, Artificial Sequence
  Cyclic GFR-binding peptide
QLRSVKVAKVDDSSNVIKEVQV

SEQ ID NO: 70315 - protein, 27 aa, Artificial Sequence
  Cyclic GFR-binding peptide
PTELRSVKMAKVDENEKVVKEVQVDMV

SEQ ID NO: 70316 - protein, 28 aa, Artificial Sequence
  Cyclic GFR-binding peptide
  MOD_RES (1)..(1): Xaa is C or S
XVSQDLSNITIQIMIGKTPKIIGEMSMI

SEQ ID NO: 70317 - protein, 31 aa, Artificial Sequence
  Cyclic GFR-binding peptide
  MOD_RES (4)..(5): Xaa is C or S
PKAXXVPTELRSVKMAKVDEYDKVVKEVQVE

SEQ ID NO: 70318 - protein, 24 aa, Artificial Sequence
  Cyclic GFR-binding peptide
TQLEPLTVLYYDDSSNVIEQLSNN

SEQ ID NO: 70319 - protein, 37 aa, Artificial Sequence
  Cyclic GFR-binding peptide
  MOD_RES (6)..(7): Xaa is C or S
ASASPXXVSQDLSNITIQIMIGKTPKIIGEMSMIVKS

SEQ ID NO: 70320 - protein, 28 aa, Artificial Sequence
  Cyclic GFR-binding peptide
KLRPVQVRKIDDSSNVIKKATVNMVVRS

SEQ ID NO: 70321 - protein, 23 aa, Artificial Sequence
  Cyclic GFR-binding peptide
RPVQVRKIEYVRKKPKLKKATVR

SEQ ID NO: 70322 - protein, 26 aa, Artificial Sequence
  Cyclic GFR-binding peptide
  MOD_RES (1)..(1): Xaa is C or S
XVPTELRSVKMAKVDEYDKVVKEVQV

SEQ ID NO: 70323 - protein, 37 aa, Artificial Sequence
  Cyclic GFR-binding peptide
  MOD_RES (1)..(35)..(37): Xaa is C or S
XVPTEEEPLPMVYYRIKPHQGQHEQLSNFLQHNKXEX

SEQ ID NO: 70324 - protein, 29 aa, Artificial Sequence
  Cyclic GFR-binding peptide
  MOD_RES (29)..(29): Xaa is C or S
ELEPLPMVYYDENEKVVEQLSNDMVVEGX

SEQ ID NO: 70325 - protein, 27 aa, Artificial Sequence
  Cyclic GFR-binding peptide
LEPLTMLYYDENEKVVEQLSNDMVVEG

SEQ ID NO: 70326 - protein, 26 aa, Artificial Sequence
  Cyclic GFR-binding peptide
EERSVKMAKVRIKPHQGQHKEVQVFL

SEQ ID NO: 70327 - protein, 41 aa, Artificial Sequence
  Cyclic GFR-binding peptide
  MOD_RES (7)..(39)..(41): Xaa is C or S
HVTKPTXAPTKLRPVQVRKIDDSSNVIKKATVNMVVRSXGX

SEQ ID NO: 70328 - protein, 36 aa, Artificial Sequence
  Cyclic GFR-binding peptide
  MOD_RES (5)..(6): Xaa is C or S
VPKPXXAPTKLRPVQVRKIDDSSNVIKKATVNMVVR

SEQ ID NO: 70329 - protein, 26 aa, Artificial Sequence
  Cyclic GFR-binding peptide
PQDLRSVKIAKVVGRTPKVKEVQVMV

SEQ ID NO: 70330 - protein, 28 aa, Artificial Sequence
  Cyclic GFR-binding peptide
VHHEPLTVLYYEYVRKKPKLEQLSNRLE

SEQ ID NO: 70331 - protein, 40 aa, Artificial Sequence
  Cyclic GFR-binding peptide
  MOD_RES (5)..(5): Xaa is C or S
RNVQXRPTQVQLEPLTVLYYEIVRKKPIFEQLSNTLEDHL

SEQ ID NO: 70332 - protein, 23 aa, Artificial Sequence
  Cyclic GFR-binding peptide
TELSNITMQIMDENEKVVIGEMS

SEQ ID NO: 70333 - protein, 35 aa, Artificial Sequence; identical to SEQ ID NO: 19107
  Cyclic GFR-binding peptide
  MOD_RES (6)..(7): Xaa is C or S

SEQ ID NO: 70334 - protein, 33 aa, Artificial Sequence
  Cyclic GFR-binding peptide
  MOD_RES (4)..(4): Xaa is C or S
SVKXQPSRVHHEPLPVVYYEYVRKKPKLEQLSN

SEQ ID NO: 70335 - protein, 37 aa, Artificial Sequence
  Cyclic GFR-binding peptide
  MOD_RES (35)..(37): Xaa is C or S
SRVHHEPLTVLYYEYVRKKPKLEQLSNRLEEHLEXAX

SEQ ID NO: 70336 - protein, 34 aa, Artificial Sequence; identical to SEQ ID NO: 19113
  Cyclic GFR-binding peptide
  MOD_RES (2)..(3)..(34): Xaa is C or S

SEQ ID NO: 70337 - protein, 34 aa, Artificial Sequence
  Cyclic GFR-binding peptide
  MOD_RES (2)..(3): Xaa is C or S
PXXAPTKLSNITVQIMDDSSNVIIGEMSNMVVRS

SEQ ID NO: 70338 - protein, 32 aa, Artificial Sequence
  Cyclic GFR-binding peptide
  MOD_RES (1)..(1): Xaa is C or S
XVPTELRPVQMRKIDENEKVVKKATVDMVVEG

SEQ ID NO: 70339 - protein, 34 aa, Artificial Sequence
  Cyclic GFR-binding peptide
  MOD_RES (2)..(3): Xaa is C or S
PXXAPTQLRPVQVRKIDDSSNVIKKATVNMVVRA

SEQ ID NO: 70340 - protein, 28 aa, Artificial Sequence
  Cyclic GFR-binding peptide
RVHHEPLPVVYYEYVRKKPKLEQLSNRL

SEQ ID NO: 70341 - protein, 27 aa, Artificial Sequence
  Cyclic GFR-binding peptide
VPQALRPVQIRKIVGRKPKVKKATVMI

SEQ ID NO: 70342 - protein, 24 aa, Artificial Sequence
  Cyclic GFR-binding peptide
ELSNITMQIMDEYDKVVIGEMSEM

SEQ ID NO: 70343 - protein, 35 aa, Artificial Sequence
  Cyclic GFR-binding peptide
  MOD_RES (1)..(32)..(34): Xaa is C or S
XVPQDLRPVQIRKIVGRTPKVKKATVMVVKSXKXS

SEQ ID NO: 70344 - protein, 25 aa, Artificial Sequence
  Cyclic GFR-binding peptide
EPLTMLYYRIKPHQGQHEQLSNFLQ

SEQ ID NO: 70345 - protein, 36 aa, Artificial Sequence; identical to SEQ ID NO: 23350
  Cyclic GFR-binding peptide
  MOD_RES (34)..(36): Xaa is C or S

SEQ ID NO: 70346 - protein, 32 aa, Artificial Sequence
  Cyclic GFR-binding peptide
  MOD_RES (6)..(7): Xaa is C or S
ASASPXXVPQDLRPVQIRKIVGRTPKVKKATV

SEQ ID NO: 70347 - protein, 35 aa, Artificial Sequence
  Cyclic GFR-binding peptide
  MOD_RES (6)..(7): Xaa is C or S
ASASPXXVPQDLRPVQIRKIVGRTPKVKKATVMVV

SEQ ID NO: 70348 - protein, 37 aa, Artificial Sequence; identical to SEQ ID NO: 19132
  Cyclic GFR-binding peptide
  MOD_RES (6)..(6): Xaa is C or S

SEQ ID NO: 70349 - protein, 29 aa, Artificial Sequence
  Cyclic GFR-binding peptide
  MOD_RES (27)..(29): Xaa is C or S
EPLTMLYYDEYDKVVEQLSNEMVVEGXGX

SEQ ID NO: 70350 - protein, 36 aa, Artificial Sequence; identical to SEQ ID NO: 23353
  Cyclic GFR-binding peptide
  MOD_RES (1)..(1): Xaa is C or S

SEQ ID NO: 70351 - protein, 36 aa, Artificial Sequence
  Cyclic GFR-binding peptide
  MOD_RES (3)..(4)..(36): Xaa is C or S
KAXXVPTELSNITMQIMDEYDKVVIGEMSEMVVEGX

SEQ ID NO: 70352 - protein, 22 aa, Artificial Sequence
  Cyclic GFR-binding peptide
LEPLPIVYYIGKTPKIEQLSNM

SEQ ID NO: 70353 - protein, 39 aa, Artificial Sequence
  Cyclic GFR-binding peptide
  MOD_RES (4)..(5)..(36)..(38): Xaa is C or S
ASPXXVSQDLSNITIQIMIGKTPKIIGEMSMIVKSXKXS

SEQ ID NO: 70354 - protein, 40 aa, Artificial Sequence; identical to SEQ ID NO: 19145
  Cyclic GFR-binding peptide
  MOD_RES (4)..(5)..(37)..(39): Xaa is C or S

SEQ ID NO: 70355 - protein, 29 aa, Artificial Sequence
  Cyclic GFR-binding peptide
  MOD_RES (29)..(29): Xaa is C or S
ELSNITMQIMDEYDKVVIGEMSEMVVEGX

SEQ ID NO: 70356 - protein, 44 aa, Artificial Sequence; identical to SEQ ID NO: 23363
  Cyclic GFR-binding peptide
  MOD_RES (4)..(41)..(43): Xaa is C or S

SEQ ID NO: 70357 - protein, 27 aa, Artificial Sequence
  Cyclic GFR-binding peptide
ELEPLTMLYYDEYDKVVEQLSNEMVVE

SEQ ID NO: 70358 - protein, 39 aa, Artificial Sequence; identical to SEQ ID NO: 19159
  Cyclic GFR-binding peptide
  MOD_RES (6)..(7)..(38): Xaa is C or S

SEQ ID NO: 70359 - protein, 34 aa, Artificial Sequence; identical to SEQ ID NO: 23364
  Cyclic GFR-binding peptide
  MOD_RES (32)..(34): Xaa is C or S

SEQ ID NO: 70360 - protein, 36 aa, Artificial Sequence
  Cyclic GFR-binding peptide
  MOD_RES (3)..(4)..(35): Xaa is C or S
SPXXVSQDLRPVQIRKIIGKTPKIKKATVMIVKSXK

SEQ ID NO: 70361 - protein, 25 aa, Artificial Sequence
  Cyclic GFR-binding peptide
PQALEPLTILYYVGRKPKVEQLSNM

SEQ ID NO: 70362 - protein, 35 aa, Artificial Sequence
  Cyclic GFR-binding peptide
  MOD_RES (1)..(33)..(35): Xaa is C or S
XAPTKLRSVKVAKVDDSSNVIKEVQVNMVVRSXGX

SEQ ID NO: 70363 - protein, 36 aa, Artificial Sequence; identical to SEQ ID NO: 19167
  Cyclic GFR-binding peptide
  MOD_RES (3)..(4)..(36): Xaa is C or S

SEQ ID NO: 70364 - protein, 38 aa, Artificial Sequence
  Cyclic GFR-binding peptide
  MOD_RES (4)..(5)..(37): Xaa is C or S
PKPXXAPTQLRSVKVAKVDDSSNVIKEVQVNMVVRAXG

SEQ ID NO: 70365 - protein, 37 aa, Artificial Sequence
  Cyclic GFR-binding peptide
  MOD_RES (5)..(6): Xaa is C or S
IPKAXXVPTELRPVQMRKIDENEKVVKKATVDMVVEG

SEQ ID NO: 70366 - protein, 31 aa, Artificial Sequence; identical to SEQ ID NO: 19176
  Cyclic GFR-binding peptide
  MOD_RES (31)..(31): Xaa is C or S

SEQ ID NO: 70367 - protein, 39 aa, Artificial Sequence
  Cyclic GFR-binding peptide
  MOD_RES (5)..(37)..(39): Xaa is C or S
TKPTXAPTKLRSVKVAKVDDSSNVIKEVQVNMVVRSXGX

SEQ ID NO: 70368 - protein, 27 aa, Artificial Sequence
  Cyclic GFR-binding peptide
QDLSNITIQIMIGKTPKIIGEMSMIVK

SEQ ID NO: 70369 - protein, 35 aa, Artificial Sequence
  Cyclic GFR-binding peptide
  MOD_RES (2)..(3)..(35): Xaa is C or S
PXXAPTKLRSVKVAKVDDSSNVIKEVQVNMVVRSX

SEQ ID NO: 70370 - protein, 33 aa, Artificial Sequence; identical to SEQ ID NO: 23374
  Cyclic GFR-binding peptide
  MOD_RES (2)..(2): Xaa is C or S

SEQ ID NO: 70371 - protein, 35 aa, Artificial Sequence
  Cyclic GFR-binding peptide
  MOD_RES (35)..(35): Xaa is C or S
TQVQLEPLTVLYYEIVRKKPIFEQLSNTLEDHLAX

SEQ ID NO: 70372 - protein, 29 aa, Artificial Sequence
  Cyclic GFR-binding peptide
  MOD_RES (28)..(28): Xaa is C or S
LRSVKVAKVDDSSNVIKEVQVNMVVRAXG

SEQ ID NO: 70373 - protein, 41 aa, Artificial Sequence; identical to SEQ ID NO: 23376
  Cyclic GFR-binding peptide
  MOD_RES (4)..(41): Xaa is C or S

SEQ ID NO: 70374 - protein, 28 aa, Artificial Sequence
  Cyclic GFR-binding peptide
APTKLRPVQVRKIDDSSNVIKKATVNMV

SEQ ID NO: 70375 - protein, 29 aa, Artificial Sequence
  Cyclic GFR-binding peptide
  MOD_RES (26)..(28): Xaa is C or S
RPVQIRKIVGRKPKVKKATVMIVRSXKXS

SEQ ID NO: 70376 - protein, 34 aa, Artificial Sequence
  Cyclic GFR-binding peptide
  MOD_RES (4)..(5): Xaa is C or S
PKAXXVPTELRSVKMAKVDENEKVVKEVQVDMVV

SEQ ID NO: 70377 - protein, 35 aa, Artificial Sequence; identical to SEQ ID NO: 19179
  Cyclic GFR-binding peptide
  MOD_RES (1)..(33)..(35): Xaa is C or S

SEQ ID NO: 70378 - protein, 37 aa, Artificial Sequence
  Cyclic GFR-binding peptide
  MOD_RES (5)..(6)..(37): Xaa is C or S
SASPXXVPQDLRSVKIAKVVGRTPKVKEVQVMVVKSX

SEQ ID NO: 70379 - protein, 38 aa, Artificial Sequence; identical to SEQ ID NO: 23377
  Cyclic GFR-binding peptide
  MOD_RES (4)..(4): Xaa is C or S

SEQ ID NO: 70380 - protein, 37 aa, Artificial Sequence; identical to SEQ ID NO: 23378
  Cyclic GFR-binding peptide
  MOD_RES (5)..(5): Xaa is C or S

SEQ ID NO: 70381 - protein, 25 aa, Artificial Sequence
  Cyclic GFR-binding peptide
PTKLSNITVQIMDDSSNVIIGEMSN

SEQ ID NO: 70382 - protein, 32 aa, Artificial Sequence
  Cyclic GFR-binding peptide
  MOD_RES (1)..(32): Xaa is C or S
XVSQDLRSVKIAKVIGKTPKIKEVQVMIVKSX

SEQ ID NO: 70383 - protein, 37 aa, Artificial Sequence
  Cyclic GFR-binding peptide
  MOD_RES (34)..(36): Xaa is C or S
VPTEEEPLTMLYYRIKPHQGQHEQLSNFLQHNKXEXR

SEQ ID NO: 70384 - protein, 37 aa, Artificial Sequence
  Cyclic GFR-binding peptide
  MOD_RES (1)..(2)..(34)..(36): Xaa is C or S
XXAPTQLRPVQVRKIDDSSNVIKKATVNMVVRAXGXH

SEQ ID NO: 70385 - protein, 32 aa, Artificial Sequence; identical to SEQ ID NO: 19191
  Cyclic GFR-binding peptide
  MOD_RES (5)..(5): Xaa is C or S

SEQ ID NO: 70386 - protein, 30 aa, Artificial Sequence
  Cyclic GFR-binding peptide
  MOD_RES (29)..(29): Xaa is C or S
ELRSVKMAKVDENEKVVKEVQVDMVVEGXG

SEQ ID NO: 70387 - protein, 42 aa, Artificial Sequence
  Cyclic GFR-binding peptide
  MOD_RES (5)..(42): Xaa is C or S
SSVKXQPSRVHHEPLPVVYYEYVRKKPKLEQLSNRLEEHLEX

SEQ ID NO: 70388 - protein, 34 aa, Artificial Sequence; identical to SEQ ID NO: 23394
  Cyclic GFR-binding peptide
  MOD_RES (34)..(34): Xaa is C or S

SEQ ID NO: 70389 - protein, 26 aa, Artificial Sequence
  Cyclic GFR-binding peptide
  MOD_RES (26)..(26): Xaa is C or S
SNITIQIMVGRKPKVIGEMSMIVRSX

SEQ ID NO: 70390 - protein, 29 aa, Artificial Sequence
  Cyclic GFR-binding peptide
  MOD_RES (1)..(1): Xaa is C or S
XAPTQLRSVKVAKVDDSSNVIKEVQVNMV

SEQ ID NO: 70391 - protein, 28 aa, Artificial Sequence
  Cyclic GFR-binding peptide
TEEEPLTMLYYRIKPHQGQHEQLSNFLQ

SEQ ID NO: 70392 - protein, 28 aa, Artificial Sequence
  Cyclic GFR-binding peptide
  MOD_RES (2)..(3): Xaa is C or S
AXXVPTELEPLPMVYYDEYDKVVEQLSN

SEQ ID NO: 70393 - protein, 32 aa, Artificial Sequence; identical to SEQ ID NO: 19200
  Cyclic GFR-binding peptide
  MOD_RES (2)..(3): Xaa is C or S

SEQ ID NO: 70394 - protein, 42 aa, Artificial Sequence; identical to SEQ ID NO: 23403
  Cyclic GFR-binding peptide
  MOD_RES (5)..(42): Xaa is C or S

SEQ ID NO: 70395 - protein, 33 aa, Artificial Sequence
  Cyclic GFR-binding peptide
  MOD_RES (30)..(32): Xaa is C or S
TELRPVQMRKIDENEKVVKKATVDMVVEGXGXR

SEQ ID NO: 70396 - protein, 24 aa, Artificial Sequence
  Cyclic GFR-binding peptide
DLRPVQIRKIIGKTPKIKKATVMI

SEQ ID NO: 70397 - protein, 36 aa, Artificial Sequence; identical to SEQ ID NO: 19205
  Cyclic GFR-binding peptide
  MOD_RES (1)..(2)..(34)..(36): Xaa is C or S

SEQ ID NO: 70398 - protein, 33 aa, Artificial Sequence
  Cyclic GFR-binding peptide
  MOD_RES (30)..(32): Xaa is C or S
EEPLPMVYYRIKPHQGQHEQLSNFLQHNKXEXR

SEQ ID NO: 70399 - protein, 29 aa, Artificial Sequence
  Cyclic GFR-binding peptide
QLEPLPVVYYEIVRKKPIFEQLSNTLEDH

SEQ ID NO: 70400 - protein, 33 aa, Artificial Sequence; identical to SEQ ID NO: 19208
  Cyclic GFR-binding peptide
  MOD_RES (4)..(5): Xaa is C or S

SEQ ID NO: 70401 - protein, 28 aa, Artificial Sequence
  Cyclic GFR-binding peptide
VPTELEPLPMVYYDEYDKVVEQLSNEMV

SEQ ID NO: 70402 - protein, 29 aa, Artificial Sequence
  Cyclic GFR-binding peptide
VHHEPLTVLYYEYVRKKPKLEQLSNRLEE

SEQ ID NO: 70403 - protein, 34 aa, Artificial Sequence
  Cyclic GFR-binding peptide
  MOD_RES (6)..(6): Xaa is C or S
DEGLEXVPTEEEPLTMLYYRIKPHQGQHEQLSNF

SEQ ID NO: 70404 - protein, 37 aa, Artificial Sequence
  Cyclic GFR-binding peptide
  MOD_RES (2)..(3)..(34)..(36): Xaa is C or S
PXXVPQALRPVQIRKIVGRKPKVKKATVMIVRSXKXS

SEQ ID NO: 70405 - protein, 35 aa, Artificial Sequence; identical to SEQ ID NO: 23416
  Cyclic GFR-binding peptide

SEQ ID NO: 70406 - protein, 21 aa, Artificial Sequence
  Cyclic GFR-binding peptide
LRPVQIRKIVGRTPKVKKATV

SEQ ID NO: 70407 - protein, 33 aa, Artificial Sequence
  Cyclic GFR-binding peptide
  MOD_RES (4)..(4): Xaa is C or S
GLEXVPTEEEPLPMVYYRIKPHQGQHEQLSNFL

SEQ ID NO: 70408 - protein, 34 aa, Artificial Sequence; identical to SEQ ID NO: 19218
  Cyclic GFR-binding peptide
  MOD_RES (6)..(6): Xaa is C or S

SEQ ID NO: 70409 - protein, 30 aa, Artificial Sequence
  Cyclic GFR-binding peptide
  MOD_RES (2)..(3): Xaa is C or S
AXXVPTELRPVQMRKIDEYDKVVKKATVEM

SEQ ID NO: 70410 - protein, 32 aa, Artificial Sequence
  Cyclic GFR-binding peptide
  MOD_RES (6)..(7): Xaa is C or S
ASASPXXVSQDLSNITIQIMIGKTPKIIGEMS

SEQ ID NO: 70411 - protein, 33 aa, Artificial Sequence; identical to SEQ ID NO: 19221
  Cyclic GFR-binding peptide
  MOD_RES (32)..(32): Xaa is C or S

SEQ ID NO: 70412 - protein, 24 aa, Artificial Sequence
  Cyclic GFR-binding peptide
EPLTMLYYDEYDKVVEQLSNEMVV

SEQ ID NO: 70413 - protein, 31 aa, Artificial Sequence
  Cyclic GFR-binding peptide
  MOD_RES (1)..(1): Xaa is C or S
XVPQDLSNITIQIMVGRTPKVIGEMSMVVKS

SEQ ID NO: 70414 - protein, 28 aa, Artificial Sequence
  Cyclic GFR-binding peptide
  MOD_RES (2)..(2): Xaa is C or S
TXAPTKLRPVQVRKIDDSSNVIKKATVN

SEQ ID NO: 70415 - protein, 37 aa, Artificial Sequence
  Cyclic GFR-binding peptide
  MOD_RES (5)..(6)..(37): Xaa is C or S
SASPXXVPQDLSNITIQIMVGRTPKVIGEMSMVVKSX

SEQ ID NO: 70416 - protein, 30 aa, Artificial Sequence; identical to SEQ ID NO: 19227
  Cyclic GFR-binding peptide
  MOD_RES (4)..(5): Xaa is C or S

SEQ ID NO: 70417 - protein, 32 aa, Artificial Sequence
  Cyclic GFR-binding peptide
  MOD_RES (6)..(7): Xaa is C or S
SIPKAXXVPTELRPVQMRKIDEYDKVVKKATV

SEQ ID NO: 70418 - protein, 31 aa, Artificial Sequence; identical to SEQ ID NO: 19230
  Cyclic GFR-binding peptide
  MOD_RES (30)..(30): Xaa is C or S

SEQ ID NO: 70419 - protein, 29 aa, Artificial Sequence
  Cyclic GFR-binding peptide
  MOD_RES (27)..(29): Xaa is C or S
RSVKMAKVDEYDKVVKEVQVEMVVEGXGX

SEQ ID NO: 70420 - protein, 32 aa, Artificial Sequence
  Cyclic GFR-binding peptide
  MOD_RES (4)..(5): Xaa is C or S
ASPXXVSQDLRPVQIRKIIGKTPKIKKATVMI

SEQ ID NO: 70421 - protein, 36 aa, Artificial Sequence
  Cyclic GFR-binding peptide
  MOD_RES (4)..(4): Xaa is C or S
SVKXQPSRVHHEPLPVVYYEYVRKKPKLEQLSNRLE

SEQ ID NO: 70422 - protein, 44 aa, Artificial Sequence
  Cyclic GFR-binding peptide
  MOD_RES (5)..(42)..(44): Xaa is C or S
RNVQXRPTQVQLEPLTVLYYEIVRKKPIFEQLSNTLEDHLAXKX

SEQ ID NO: 70423 - protein, 29 aa, Artificial Sequence
  Cyclic GFR-binding peptide
  MOD_RES (3)..(4): Xaa is C or S
KPXXAPTQLRPVQVRKIDDSSNVIKKATV

SEQ ID NO: 70424 - protein, 30 aa, Artificial Sequence
  Cyclic GFR-binding peptide
  MOD_RES (1)..(2): Xaa is C or S
XXVPTELRSVKMAKVDENEKVVKEVQVDMV

SEQ ID NO: 70425 - protein, 39 aa, Artificial Sequence
  Cyclic GFR-binding peptide
  MOD_RES (3)..(4)..(36)..(38): Xaa is C or S
KAXXVPTELRPVQMRKIDENEKVVKKATVDMVVEGXGXR

SEQ ID NO: 70426 - protein, 28 aa, Artificial Sequence
  Cyclic GFR-binding peptide
EPLPVVYYEIVRKKPIFEQLSNTLEDHL

SEQ ID NO: 70427 - protein, 30 aa, Artificial Sequence
  Cyclic GFR-binding peptide
  MOD_RES (1)..(2): Xaa is C or S
XXVPQDLRSVKIAKVVGRTPKVKEVQVMVV

SEQ ID NO: 70428 - protein, 40 aa, Artificial Sequence; identical to SEQ ID NO: 23441
  Cyclic GFR-binding peptide
  MOD_RES (2)..(39): Xaa is C or S

SEQ ID NO: 70429 - protein, 23 aa, Artificial Sequence
  Cyclic GFR-binding peptide
LEPLTILYYVGRKPKVEQLSNMI

SEQ ID NO: 70430 - protein, 28 aa, Artificial Sequence
  Cyclic GFR-binding peptide
PQDLRPVQIRKIVGRTPKVKKATVMVVK

SEQ ID NO: 70431 - protein, 34 aa, Artificial Sequence; identical to SEQ ID NO: 23445
  Cyclic GFR-binding peptide
  MOD_RES (7)..(7): Xaa is C or S

SEQ ID NO: 70432 - protein, 34 aa, Artificial Sequence; identical to SEQ ID NO: 19246
  Cyclic GFR-binding peptide
  MOD_RES (32)..(34): Xaa is C or S

SEQ ID NO: 70433 - protein, 37 aa, Artificial Sequence; identical to SEQ ID NO: 19247
  Cyclic GFR-binding peptide
  MOD_RES (6)..(7): Xaa is C or S

SEQ ID NO: 70434 - protein, 32 aa, Artificial Sequence
  Cyclic GFR-binding peptide
  MOD_RES (1)..(32): Xaa is C or S
XVPQALRSVKIAKVVGRKPKVKEVQVMIVRSX

SEQ ID NO: 70435 - protein, 40 aa, Artificial Sequence
  Cyclic GFR-binding peptide
  MOD_RES (2)..(39): Xaa is C or S
KXQPSRVHHEPLTVLYYEYVRKKPKLEQLSNRLEEHLEXA

SEQ ID NO: 70436 - protein, 25 aa, Artificial Sequence
  Cyclic GFR-binding peptide
VPTELRPVQMRKIDENEKVVKKATV

SEQ ID NO: 70437 - protein, 31 aa, Artificial Sequence
  Cyclic GFR-binding peptide
VPTEEEPLPMVYYRIKPHQGQHEQLSNFLQH

SEQ ID NO: 70438 - protein, 30 aa, Artificial Sequence
  Cyclic GFR-binding peptide
HHEPLTVLYYEYVRKKPKLEQLSNRLEEHL

SEQ ID NO: 70439 - protein, 30 aa, Artificial Sequence
  Cyclic GFR-binding peptide
PTEEEPLPMVYYRIKPHQGQHEQLSNFLQH

SEQ ID NO: 70440 - protein, 29 aa, Artificial Sequence
  Cyclic GFR-binding peptide
RVHHRPVQVRKIEYVRKKPKLKKATVRLE

SEQ ID NO: 70441 - protein, 38 aa, Artificial Sequence; identical to SEQ ID NO: 19253
  Cyclic GFR-binding peptide
  MOD_RES (3)..(4)..(35)..(37): Xaa is C or S

SEQ ID NO: 70442 - protein, 38 aa, Artificial Sequence
  Cyclic GFR-binding peptide
  MOD_RES (6)..(7)..(38): Xaa is C or S
ASAAPXXVPQALRSVKIAKVVGRKPKVKEVQVMIVRSX

SEQ ID NO: 70443 - protein, 24 aa, Artificial Sequence
  Cyclic GFR-binding peptide
RPVQVRKIEYVRKKPKLKKATVRL

SEQ ID NO: 70444 - protein, 33 aa, Artificial Sequence; identical to SEQ ID NO: 23456
  Cyclic GFR-binding peptide
  MOD_RES (31)..(33): Xaa is C or S

SEQ ID NO: 70445 - protein, 31 aa, Artificial Sequence
  Cyclic GFR-binding peptide
  MOD_RES (31)..(31): Xaa is C or S
LEPLTVLYYEIVRKKPIFEQLSNTLEDHLAX

SEQ ID NO: 70446 - protein, 43 aa, Artificial Sequence; identical to SEQ ID NO: 23460
  Cyclic GFR-binding peptide
  MOD_RES (5)..(42): Xaa is C or S

SEQ ID NO: 70447 - protein, 31 aa, Artificial Sequence
  Cyclic GFR-binding peptide
VHHEPLTVLYYEYVRKKPKLEQLSNRLEEHL

SEQ ID NO: 70448 - protein, 32 aa, Artificial Sequence
  Cyclic GFR-binding peptide
  MOD_RES (3)..(4): Xaa is C or S
KPXXAPTQLRPVQVRKIDDSSNVIKKATVNMV

SEQ ID NO: 70449 - protein, 36 aa, Artificial Sequence; identical to SEQ ID NO: 19264
  Cyclic GFR-binding peptide
  MOD_RES (5)..(6): Xaa is C or S

SEQ ID NO: 70450 - protein, 37 aa, Artificial Sequence
  Cyclic GFR-binding peptide
  MOD_RES (4)..(4): Xaa is C or S
SVKXQPSRVHHEPLPVVYYEYVRKKPKLEQLSNRLEE

SEQ ID NO: 70451 - protein, 36 aa, Artificial Sequence
  Cyclic GFR-binding peptide
  MOD_RES (3)..(4)..(35): Xaa is C or S
SPXXVPQDLRPVQIRKIVGRTPKVKKATVMVVKSXK

SEQ ID NO: 70452 - protein, 29 aa, Artificial Sequence
  Cyclic GFR-binding peptide
  MOD_RES (29)..(29): Xaa is C or S
ELRPVQMRKIDENEKVVKKATVDMVVEGX

SEQ ID NO: 70453 - protein, 31 aa, Artificial Sequence; identical to SEQ ID NO: 23465
  Cyclic GFR-binding peptide

SEQ ID NO: 70454 - protein, 29 aa, Artificial Sequence
  Cyclic GFR-binding peptide
TQVQLRSVKVAKVEIVRKKPIFKEVQVTL

SEQ ID NO: 70455 - protein, 31 aa, Artificial Sequence
  Cyclic GFR-binding peptide
  MOD_RES (4)..(5): Xaa is C or S
PKPXXAPTKLSNITVQIMDDSSNVIIGEMSN

SEQ ID NO: 70456 - protein, 30 aa, Artificial Sequence
  Cyclic GFR-binding peptide
PTKLSNITVQIMDDSSNVIIGEMSNMVVRS

SEQ ID NO: 70457 - protein, 33 aa, Artificial Sequence; identical to SEQ ID NO: 19273
  Cyclic GFR-binding peptide
  MOD_RES (5)..(5): Xaa is C or S

SEQ ID NO: 70458 - protein, 32 aa, Artificial Sequence; identical to SEQ ID NO: 23474
  Cyclic GFR-binding peptide
  MOD_RES (1)..(1): Xaa is C or S

SEQ ID NO: 70459 - protein, 31 aa, Artificial Sequence
  Cyclic GFR-binding peptide
VPTELSNITMQIMDEYDKVVIGEMSEMVVEG

SEQ ID NO: 70460 - protein, 30 aa, Artificial Sequence
  Cyclic GFR-binding peptide
  MOD_RES (4)..(5): Xaa is C or S
PKAXXVPTELRSVKMAKVDENEKVVKEVQV

SEQ ID NO: 70461 - protein, 34 aa, Artificial Sequence; identical to SEQ ID NO: 23483
  Cyclic GFR-binding peptide

SEQ ID NO: 70462 - protein, 28 aa, Artificial Sequence
  Cyclic GFR-binding peptide
  MOD_RES (28)..(28): Xaa is C or S
DLSNITIQIMIGKTPKIIGEMSMIVKSX

SEQ ID NO: 70463 - protein, 32 aa, Artificial Sequence
  Cyclic GFR-binding peptide
  MOD_RES (2)..(3): Xaa is C or S
PXXAPTQLRSVKVAKVDDSSNVIKEVQVNMVV

SEQ ID NO: 70464 - protein, 28 aa, Artificial Sequence
  Cyclic GFR-binding peptide
TQVQLEPLPVVYYEIVRKKPIFEQLSNT

SEQ ID NO: 70465 - protein, 32 aa, Artificial Sequence
  Cyclic GFR-binding peptide
  MOD_RES (6)..(7): Xaa is C or S
YVPKPXXAPTKLRSVKVAKVDDSSNVIKEVQV

SEQ ID NO: 70466 - protein, 39 aa, Artificial Sequence; identical to SEQ ID NO: 19278
  Cyclic GFR-binding peptide
  MOD_RES (6)..(7)..(38): Xaa is C or S

SEQ ID NO: 70467 - protein, 37 aa, Artificial Sequence
  Cyclic GFR-binding peptide
  MOD_RES (1)..(2)..(34)..(36): Xaa is C or S
XXVPTELRSVKMAKVDEYDKVVKEVQVEMVVEGXGXR

SEQ ID NO: 70468 - protein, 28 aa, Artificial Sequence
  Cyclic GFR-binding peptide
VPQALEPLTILYYVGRKPKVEQLSNMIV

SEQ ID NO: 70469 - protein, 40 aa, Artificial Sequence
  Cyclic GFR-binding peptide
  MOD_RES (2)..(39): Xaa is C or S
QXRPTQVQLEPLTVLYYEIVRKKPIFEQLSNTLEDHLAXK

SEQ ID NO: 70470 - protein, 24 aa, Artificial Sequence
  Cyclic GFR-binding peptide
RPVQVRKIDDSSNVIKKATVNMVV

SEQ ID NO: 70471 - protein, 40 aa, Artificial Sequence
  Cyclic GFR-binding peptide
  MOD_RES (6)..(7)..(39): Xaa is C or S
YVPKPXXAPTKLRPVQVRKIDDSSNVIKKATVNMVVRSXG

SEQ ID NO: 70472 - protein, 38 aa, Artificial Sequence
  Cyclic GFR-binding peptide
  MOD_RES (2)..(3)..(35)..(37): Xaa is C or S
AXXVPTELSNITMQIMDEYDKVVIGEMSEMVVEGXGXR

SEQ ID NO: 70473 - protein, 28 aa, Artificial Sequence
  Cyclic GFR-binding peptide
  MOD_RES (1)..(2): Xaa is C or S
XXVPQDLRPVQIRKIVGRTPKVKKATVM

SEQ ID NO: 70474 - protein, 26 aa, Artificial Sequence
  Cyclic GFR-binding peptide
LSNITIQIMVGRTPKVIGEMSMVVKS

SEQ ID NO: 70475 - protein, 36 aa, Artificial Sequence; identical to SEQ ID NO: 19294
  Cyclic GFR-binding peptide
  MOD_RES (7)..(7): Xaa is C or S

SEQ ID NO: 70476 - protein, 32 aa, Artificial Sequence
  Cyclic GFR-binding peptide
  MOD_RES (5)..(5): Xaa is C or S
EGLEXVPTEEEPLPMVYYRIKPHQGQHEQLSN

SEQ ID NO: 70477 - protein, 35 aa, Artificial Sequence
  Cyclic GFR-binding peptide
  MOD_RES (1)..(32)..(34): Xaa is C or S
XVPQDLRSVKIAKVVGRTPKVKEVQVMVVKSXKXS

SEQ ID NO: 70478 - protein, 35 aa, Artificial Sequence
  Cyclic GFR-binding peptide
  MOD_RES (7)..(7): Xaa is C or S
HVTKPTXAPTKLRPVQVRKIDDSSNVIKKATVNMV

SEQ ID NO: 70479 - protein, 25 aa, Artificial Sequence
  Cyclic GFR-binding peptide
LSNITIQIMIGKTPKIIGEMSMIVK

SEQ ID NO: 70480 - protein, 31 aa, Artificial Sequence
  Cyclic GFR-binding peptide
  MOD_RES (3)..(4): Xaa is C or S
KPXXAPTQLRSVKVAKVDDSSNVIKEVQVNM

SEQ ID NO: 70481 - protein, 32 aa, Artificial Sequence
  Cyclic GFR-binding peptide
  MOD_RES (3)..(4): Xaa is C or S
SPXXVPQDLRPVQIRKIVGRTPKVKKATVMVV

SEQ ID NO: 70482 - protein, 22 aa, Artificial Sequence
  Cyclic GFR-binding peptide
QLEPLPVVYYDDSSNVIEQLSN

SEQ ID NO: 70483 - protein, 32 aa, Artificial Sequence; identical to SEQ ID NO: 19309
  Cyclic GFR-binding peptide
  MOD_RES (32)..(32): Xaa is C or S

SEQ ID NO: 70484 - protein, 32 aa, Artificial Sequence; identical to SEQ ID NO: 23510
  Cyclic GFR-binding peptide

SEQ ID NO: 70485 - protein, 37 aa, Artificial Sequence
  Cyclic GFR-binding peptide
  MOD_RES (4)..(5)..(36): Xaa is C or S
AAPXXVPQALRPVQIRKIVGRKPKVKKATVMIVRSXK

SEQ ID NO: 70486 - protein, 29 aa, Artificial Sequence
  Cyclic GFR-binding peptide
PTQLEPLPVVYYDDSSNVIEQLSNNMVVR

SEQ ID NO: 70487 - protein, 39 aa, Artificial Sequence; identical to SEQ ID NO: 19315
  Cyclic GFR-binding peptide
  MOD_RES (3)..(4)..(36)..(38): Xaa is C or S

SEQ ID NO: 70488 - protein, 27 aa, Artificial Sequence
  Cyclic GFR-binding peptide
QVQLRSVKVAKVEIVRKKPIFKEVQVT

SEQ ID NO: 70489 - protein, 33 aa, Artificial Sequence
  Cyclic GFR-binding peptide
  MOD_RES (4)..(4): Xaa is C or S
KPTXAPTKLRSVKVAKVDDSSNVIKEVQVNMVV

SEQ ID NO: 70490 - protein, 31 aa, Artificial Sequence
  Cyclic GFR-binding peptide
  MOD_RES (30)..(30): Xaa is C or S
TELRPVQMRKIDENEKVVKKATVDMVVEGXG

SEQ ID NO: 70491 - protein, 45 aa, Artificial Sequence; identical to SEQ ID NO: 23524
  Cyclic GFR-binding peptide
  MOD_RES (5)..(42)..(44): Xaa is C or S

SEQ ID NO: 70492 - protein, 43 aa, Artificial Sequence
  Cyclic GFR-binding peptide
  MOD_RES (4)..(41)..(43): Xaa is C or S
NVQXRPTQVQLEPLPVVYYEIVRKKPIFEQLSNTLEDHLAXKX

SEQ ID NO: 70493 - protein, 23 aa, Artificial Sequence
  Cyclic GFR-binding peptide
RPVQMRKIDEYDKVVKKATVEMV

SEQ ID NO: 70494 - protein, 36 aa, Artificial Sequence; identical to SEQ ID NO: 19330
  Cyclic GFR-binding peptide
  MOD_RES (2)..(3)..(34)..(36): Xaa is C or S

SEQ ID NO: 70495 - protein, 42 aa, Artificial Sequence; identical to SEQ ID NO: 19332
  Cyclic GFR-binding peptide
  MOD_RES (6)..(7)..(39)..(41): Xaa is C or S

SEQ ID NO: 70496 - protein, 31 aa, Artificial Sequence
  Cyclic GFR-binding peptide
PTQVQLEPLPVVYYEIVRKKPIFEQLSNTLE

SEQ ID NO: 70497 - protein, 38 aa, Artificial Sequence
  Cyclic GFR-binding peptide
  MOD_RES (5)..(6)..(38): Xaa is C or S
VPKPXXAPTQLSNITVQIMDDSSNVIIGEMSNMVVRAX

SEQ ID NO: 70498 - protein, 34 aa, Artificial Sequence; identical to SEQ ID NO: 23530
  Cyclic GFR-binding peptide
  MOD_RES (32)..(34): Xaa is C or S

SEQ ID NO: 70499 - protein, 35 aa, Artificial Sequence; identical to SEQ ID NO: 23531
  Cyclic GFR-binding peptide
  MOD_RES (4)..(4): Xaa is C or S

SEQ ID NO: 70500 - protein, 20 aa, Artificial Sequence
  Cyclic GFR-binding peptide
EPLPVVYYDDSSNVIEQLSN

SEQ ID NO: 70501 - protein, 39 aa, Artificial Sequence
  Cyclic GFR-binding peptide
  MOD_RES (4)..(5)..(37)..(39): Xaa is C or S
PKAXXVPTELRPVQMRKIDEYDKVVKKATVEMVVEGXGX

SEQ ID NO: 70502 - protein, 38 aa, Artificial Sequence; identical to SEQ ID NO: 19340
  Cyclic GFR-binding peptide
  MOD_RES (2)..(3)..(35)..(37): Xaa is C or S

SEQ ID NO: 70503 - protein, 29 aa, Artificial Sequence
  Cyclic GFR-binding peptide
  MOD_RES (1)..(1): Xaa is C or S
XAPTQLEPLPVVYYDDSSNVIEQLSNNMV

SEQ ID NO: 70504 - protein, 31 aa, Artificial Sequence
  Cyclic GFR-binding peptide
  MOD_RES (31)..(31): Xaa is C or S
PTQLSNITVQIMDDSSNVIIGEMSNMVVRAX

SEQ ID NO: 70505 - protein, 27 aa, Artificial Sequence
  Cyclic GFR-binding peptide
  MOD_RES (2)..(2): Xaa is C or S
TXAPTKLEPLPVVYYDDSSNVIEQLSN

SEQ ID NO: 70506 - protein, 30 aa, Artificial Sequence; identical to SEQ ID NO: 23535
  Cyclic GFR-binding peptide
  MOD_RES (30)..(30): Xaa is C or S

SEQ ID NO: 70507 - protein, 30 aa, Artificial Sequence
  Cyclic GFR-binding peptide
  MOD_RES (27)..(29): Xaa is C or S
SNITVQIMDDSSNVIIGEMSNMVVRAXGXH

SEQ ID NO: 70508 - protein, 26 aa, Artificial Sequence
  Cyclic GFR-binding peptide
PTELSNITMQIMDENEKVVIGEMSDM

SEQ ID NO: 70509 - protein, 31 aa, Artificial Sequence
  Cyclic GFR-binding peptide
  MOD_RES (31)..(31): Xaa is C or S
PTELSNITMQIMDEYDKVVIGEMSEMVVEGX

SEQ ID NO: 70510 - protein, 34 aa, Artificial Sequence; identical to SEQ ID NO: 23538
  Cyclic GFR-binding peptide
  MOD_RES (31)..(33): Xaa is C or S

SEQ ID NO: 70511 - protein, 29 aa, Artificial Sequence
  Cyclic GFR-binding peptide
  MOD_RES (27)..(29): Xaa is C or S
LRPVQIRKIIGKTPKIKKATVMIVKSXKX

SEQ ID NO: 70512 - protein, 37 aa, Artificial Sequence; identical to SEQ ID NO: 23540
  Cyclic GFR-binding peptide
  MOD_RES (34)..(36): Xaa is C or S

SEQ ID NO: 70513 - protein, 32 aa, Artificial Sequence
  Cyclic GFR-binding peptide
  MOD_RES (30)..(32): Xaa is C or S
TELSNITMQIMDEYDKVVIGEMSEMVVEGXGX

SEQ ID NO: 70514 - protein, 37 aa, Artificial Sequence
  Cyclic GFR-binding peptide
  MOD_RES (3)..(4)..(36): Xaa is C or S
KAXXVPTELRSVKMAKVDENEKVVKEVQVDMVVEGXG

SEQ ID NO: 70515 - protein, 39 aa, Artificial Sequence
  Cyclic GFR-binding peptide
  MOD_RES (5)..(6)..(37)..(39): Xaa is C or S
SAAPXXVPQALRPVQIRKIVGRKPKVKKATVMIVRSXKX

SEQ ID NO: 70516 - protein, 32 aa, Artificial Sequence
  Cyclic GFR-binding peptide
  MOD_RES (30)..(32): Xaa is C or S
PQDLRSVKIAKVVGRTPKVKEVQVMVVKSXKX

SEQ ID NO: 70517 - protein, 21 aa, Artificial Sequence
  Cyclic GFR-binding peptide
RPVQMRKIDENEKVVKKATVD

SEQ ID NO: 70518 - protein, 32 aa, Artificial Sequence
  Cyclic GFR-binding peptide
  MOD_RES (4)..(5): Xaa is C or S
AAPXXVPQALRPVQIRKIVGRKPKVKKATVMI

SEQ ID NO: 70519 - protein, 30 aa, Artificial Sequence
  Cyclic GFR-binding peptide
PTQLRPVQVRKIDDSSNVIKKATVNMVVRA

SEQ ID NO: 70520 - protein, 36 aa, Artificial Sequence
  Cyclic GFR-binding peptide
  MOD_RES (6)..(7): Xaa is C or S
TVPKPXXAPTQLRSVKVAKVDDSSNVIKEVQVNMVV

SEQ ID NO: 70521 - protein, 38 aa, Artificial Sequence
  Cyclic GFR-binding peptide
  MOD_RES (7)..(7): Xaa is C or S
NDEGLEXVPTEEEPLPMVYYRIKPHQGQHEQLSNFLQH

SEQ ID NO: 70522 - protein, 36 aa, Artificial Sequence; identical to SEQ ID NO: 19355
  Cyclic GFR-binding peptide
  MOD_RES (2)..(34)..(36): Xaa is C or S

SEQ ID NO: 70523 - protein, 23 aa, Artificial Sequence
  Cyclic GFR-binding peptide
ERPVQMRKIRIKPHQGQHKKATV

SEQ ID NO: 70524 - protein, 24 aa, Artificial Sequence
  Cyclic GFR-binding peptide
RSVKIAKVVGRKPKVKEVQVMIVR

SEQ ID NO: 70525 - protein, 24 aa, Artificial Sequence
  Cyclic GFR-binding peptide
KLEPLPVVYYDDSSNVIEQLSNNM

SEQ ID NO: 70526 - protein, 31 aa, Artificial Sequence; identical to SEQ ID NO: 23548
  Cyclic GFR-binding peptide

SEQ ID NO: 70527 - protein, 33 aa, Artificial Sequence; identical to SEQ ID NO: 19358
  Cyclic GFR-binding peptide
  MOD_RES (4)..(5): Xaa is C or S

SEQ ID NO: 70528 - protein, 36 aa, Artificial Sequence
  Cyclic GFR-binding peptide
  MOD_RES (6)..(6): Xaa is C or S
VTKPTXAPTKLRSVKVAKVDDSSNVIKEVQVNMVVR

SEQ ID NO: 70529 - protein, 24 aa, Artificial Sequence
  Cyclic GFR-binding peptide
LSNITIQIMIGKTPKIIGEMSMIV

SEQ ID NO: 70530 - protein, 33 aa, Artificial Sequence
  Cyclic GFR-binding peptide
  MOD_RES (6)..(7): Xaa is C or S
KIPKAXXVPTELRSVKMAKVDENEKVVKEVQVD

SEQ ID NO: 70531 - protein, 23 aa, Artificial Sequence
  Cyclic GFR-binding peptide
DLEPLPIVYYIGKTPKIEQLSNM

SEQ ID NO: 70532 - protein, 23 aa, Artificial Sequence
  Cyclic GFR-binding peptide
ALSNITIQIMVGRKPKVIGEMSM

SEQ ID NO: 70533 - protein, 31 aa, Artificial Sequence
  Cyclic GFR-binding peptide
  MOD_RES (30)..(30): Xaa is C or S
TELRSVKMAKVDEYDKVVKEVQVEMVVEGXG

SEQ ID NO: 70534 - protein, 36 aa, Artificial Sequence
  Cyclic GFR-binding peptide
  MOD_RES (5)..(6): Xaa is C or S
IPKAXXVPTELRPVQMRKIDENEKVVKKATVDMVVE

SEQ ID NO: 70535 - protein, 28 aa, Artificial Sequence
  Cyclic GFR-binding peptide
TELSNITMQIMDENEKVVIGEMSDMVVE

SEQ ID NO: 70536 - protein, 25 aa, Artificial Sequence
  Cyclic GFR-binding peptide
PTQLRSVKVAKVDDSSNVIKEVQVN

SEQ ID NO: 70537 - protein, 35 aa, Artificial Sequence
  Cyclic GFR-binding peptide
  MOD_RES (1)..(35): Xaa is C or S
XVPTEEEPLPMVYYRIKPHQGQHEQLSNFLQHNKX

SEQ ID NO: 70538 - protein, 35 aa, Artificial Sequence
  Cyclic GFR-binding peptide
  MOD_RES (6)..(7): Xaa is C or S
ASASPXXVSQDLRSVKIAKVIGKTPKIKEVQVMIV

SEQ ID NO: 70539 - protein, 37 aa, Artificial Sequence; identical to SEQ ID NO: 19374
  Cyclic GFR-binding peptide
  MOD_RES (3)..(4)..(36): Xaa is C or S

SEQ ID NO: 70540 - protein, 35 aa, Artificial Sequence
  Cyclic GFR-binding peptide
  MOD_RES (7)..(7): Xaa is C or S
NDEGLEXVPTEEEPLTMLYYRIKPHQGQHEQLSNF

SEQ ID NO: 70541 - protein, 37 aa, Artificial Sequence; identical to SEQ ID NO: 19379
  Cyclic GFR-binding peptide
  MOD_RES (3)..(4)..(36): Xaa is C or S

SEQ ID NO: 70542 - protein, 40 aa, Artificial Sequence
  Cyclic GFR-binding peptide
  MOD_RES (5)..(6)..(37)..(39): Xaa is C or S
SAAPXXVPQALRSVKIAKVVGRKPKVKEVQVMIVRSXKXS

SEQ ID NO: 70543 - protein, 38 aa, Artificial Sequence; identical to SEQ ID NO: 19381
  Cyclic GFR-binding peptide
  MOD_RES (6)..(7)..(38): Xaa is C or S

SEQ ID NO: 70544 - protein, 34 aa, Artificial Sequence; identical to SEQ ID NO: 23562
  Cyclic GFR-binding peptide

SEQ ID NO: 70545 - protein, 27 aa, Artificial Sequence
  Cyclic GFR-binding peptide
  MOD_RES (27)..(27): Xaa is C or S
LRPVQIRKIIGKTPKIKKATVMIVKSX

SEQ ID NO: 70546 - protein, 42 aa, Artificial Sequence
  Cyclic GFR-binding peptide
  MOD_RES (2)..(39)..(41): Xaa is C or S
KXQPSRVHHEPLPVVYYEYVRKKPKLEQLSNRLEEHLEXAXA

SEQ ID NO: 70547 - protein, 27 aa, Artificial Sequence
  Cyclic GFR-binding peptide
ELRPVQMRKIDENEKVVKKATVDMVVE

SEQ ID NO: 70548 - protein, 33 aa, Artificial Sequence
  Cyclic GFR-binding peptide
  MOD_RES (31)..(33): Xaa is C or S
VPQDLRSVKIAKVVGRTPKVKEVQVMVVKSXKX

SEQ ID NO: 70549 - protein, 26 aa, Artificial Sequence
  Cyclic GFR-binding peptide
VPQDLRSVKIAKVVGRTPKVKEVQVM

SEQ ID NO: 70550 - protein, 35 aa, Artificial Sequence; identical to SEQ ID NO: 19399
  Cyclic GFR-binding peptide
  MOD_RES (5)..(6): Xaa is C or S

SEQ ID NO: 70551 - protein, 35 aa, Artificial Sequence
  Cyclic GFR-binding peptide
  MOD_RES (3)..(35): Xaa is C or S
PTXAPTKLSNITVQIMDDSSNVIIGEMSNMVVRSX

SEQ ID NO: 70552 - protein, 34 aa, Artificial Sequence
  Cyclic GFR-binding peptide
  MOD_RES (2)..(2): Xaa is C or S
EXVPTEEEPLPMVYYRIKPHQGQHEQLSNFLQHN

SEQ ID NO: 70553 - protein, 29 aa, Artificial Sequence
  Cyclic GFR-binding peptide
PTEEEPLPMVYYRIKPHQGQHEQLSNFLQ

SEQ ID NO: 70554 - protein, 33 aa, Artificial Sequence; identical to SEQ ID NO: 19407
  Cyclic GFR-binding peptide
  MOD_RES (3)..(4): Xaa is C or S

SEQ ID NO: 70555 - protein, 34 aa, Artificial Sequence
  Cyclic GFR-binding peptide
  MOD_RES (4)..(4): Xaa is C or S
GLEXVPTEEEPLTMLYYRIKPHQGQHEQLSNFLQ

SEQ ID NO: 70556 - protein, 35 aa, Artificial Sequence; identical to SEQ ID NO: 19412
  Cyclic GFR-binding peptide
  MOD_RES (2)..(3)..(35): Xaa is C or S

SEQ ID NO: 70557 - protein, 33 aa, Artificial Sequence
  Cyclic GFR-binding peptide
  MOD_RES (30)..(32): Xaa is C or S
PQDLRPVQIRKIVGRTPKVKKATVMVVKSXKXS

SEQ ID NO: 70558 - protein, 26 aa, Artificial Sequence
  Cyclic GFR-binding peptide
SQDLRSVKIAKVIGKTPKIKEVQVMI

SEQ ID NO: 70559 - protein, 29 aa, Artificial Sequence
  Cyclic GFR-binding peptide
LEPLTVLYYEIVRKKPIFEQLSNTLEDHL

SEQ ID NO: 70560 - protein, 20 aa, Artificial Sequence
  Cyclic GFR-binding peptide
SNITMQIMDEYDKVVIGEMS

SEQ ID NO: 70561 - protein, 30 aa, Artificial Sequence
  Cyclic GFR-binding peptide
SRVHHEPLTVLYYEYVRKKPKLEQLSNRLE

SEQ ID NO: 70562 - protein, 33 aa, Artificial Sequence
  Cyclic GFR-binding peptide
  MOD_RES (30)..(32): Xaa is C or S
EEPLTMLYYRIKPHQGQHEQLSNFLQHNKXEXR

SEQ ID NO: 70563 - protein, 35 aa, Artificial Sequence; identical to SEQ ID NO: 23586
  Cyclic GFR-binding peptide
  MOD_RES (34)..(34): Xaa is C or S

SEQ ID NO: 70564 - protein, 32 aa, Artificial Sequence
  Cyclic GFR-binding peptide
  MOD_RES (1)..(1): Xaa is C or S
XVPTELRPVQMRKIDEYDKVVKKATVEMVVEG

SEQ ID NO: 70565 - protein, 32 aa, Artificial Sequence
  Cyclic GFR-binding peptide
  MOD_RES (3)..(4): Xaa is C or S
KAXXVPTELRSVKMAKVDEYDKVVKEVQVEMV

SEQ ID NO: 70566 - protein, 31 aa, Artificial Sequence
  Cyclic GFR-binding peptide
QLEPLPVVYYEIVRKKPIFEQLSNTLEDHLA

SEQ ID NO: 70567 - protein, 33 aa, Artificial Sequence; identical to SEQ ID NO: 19418
  Cyclic GFR-binding peptide
  MOD_RES (1)..(2): Xaa is C or S

SEQ ID NO: 70568 - protein, 32 aa, Artificial Sequence
  Cyclic GFR-binding peptide
  MOD_RES (29)..(31): Xaa is C or S
KLRPVQVRKIDDSSNVIKKATVNMVVRSXGXH

SEQ ID NO: 70569 - protein, 29 aa, Artificial Sequence
  Cyclic GFR-binding peptide
  MOD_RES (2)..(3): Xaa is C or S
PXXVSQDLEPLPIVYYIGKTPKIEQLSNM

SEQ ID NO: 70570 - protein, 27 aa, Artificial Sequence
  Cyclic GFR-binding peptide
LEPLTMLYYDEYDKVVEQLSNEMVVEG

SEQ ID NO: 70571 - protein, 31 aa, Artificial Sequence
  Cyclic GFR-binding peptide
  MOD_RES (28)..(30): Xaa is C or S
LRPVQVRKIDDSSNVIKKATVNMVVRAXGXH

SEQ ID NO: 70572 - protein, 37 aa, Artificial Sequence
  Cyclic GFR-binding peptide
  MOD_RES (4)..(4): Xaa is C or S
SVKXQPSRVHHEPLTVLYYEYVRKKPKLEQLSNRLEE

SEQ ID NO: 70573 - protein, 30 aa, Artificial Sequence
  Cyclic GFR-binding peptide
PTQLRSVKVAKVDDSSNVIKEVQVNMVVRA

SEQ ID NO: 70574 - protein, 35 aa, Artificial Sequence
  Cyclic GFR-binding peptide
  MOD_RES (5)..(6): Xaa is C or S
SASPXXVPQDLRSVKIAKVVGRTPKVKEVQVMVVK

SEQ ID NO: 70575 - protein, 31 aa, Artificial Sequence
  Cyclic GFR-binding peptide
  MOD_RES (30)..(30): Xaa is C or S
TQLRPVQVRKIDDSSNVIKKATVNMVVRAXG

SEQ ID NO: 70576 - protein, 34 aa, Artificial Sequence; identical to SEQ ID NO: 19434
  Cyclic GFR-binding peptide
  MOD_RES (1)..(2)..(34): Xaa is C or S

SEQ ID NO: 70577 - protein, 29 aa, Artificial Sequence
  Cyclic GFR-binding peptide
PQDLRSVKIAKVVGRTPKVKEVQVMVVKS

SEQ ID NO: 70578 - protein, 33 aa, Artificial Sequence; identical to SEQ ID NO: 19438
  Cyclic GFR-binding peptide
  MOD_RES (31)..(33): Xaa is C or S

SEQ ID NO: 70579 - protein, 34 aa, Artificial Sequence; identical to SEQ ID NO: 23604
  Cyclic GFR-binding peptide

SEQ ID NO: 70580 - protein, 32 aa, Artificial Sequence
  Cyclic GFR-binding peptide
  MOD_RES (1)..(2): Xaa is C or S
XXAPTKLRSVKVAKVDDSSNVIKEVQVNMVVR

SEQ ID NO: 70581 - protein, 39 aa, Artificial Sequence
  Cyclic GFR-binding peptide
  MOD_RES (5)..(6)..(38): Xaa is C or S
VPKPXXAPTKLSNITVQIMDDSSNVIIGEMSNMVVRSXG

SEQ ID NO: 70582 - protein, 33 aa, Artificial Sequence; identical to SEQ ID NO: 23608
  Cyclic GFR-binding peptide

SEQ ID NO: 70583 - protein, 23 aa, Artificial Sequence
  Cyclic GFR-binding peptide
QDLSNITIQIMIGKTPKIIGEMS

SEQ ID NO: 70584 - protein, 29 aa, Artificial Sequence
  Cyclic GFR-binding peptide
TKLEPLTVLYYDDSSNVIEQLSNNMVVRS

SEQ ID NO: 70585 - protein, 29 aa, Artificial Sequence
  Cyclic GFR-binding peptide
VPTELRSVKMAKVDENEKVVKEVQVDMVV

SEQ ID NO: 70586 - protein, 38 aa, Artificial Sequence; identical to SEQ ID NO: 19447
  Cyclic GFR-binding peptide
  MOD_RES (6)..(7): Xaa is C or S

SEQ ID NO: 70587 - protein, 24 aa, Artificial Sequence
  Cyclic GFR-binding peptide
QLRSVKVAKVDDSSNVIKEVQVNM

SEQ ID NO: 70588 - protein, 32 aa, Artificial Sequence; identical to SEQ ID NO: 19449
  Cyclic GFR-binding peptide
  MOD_RES (1)..(1): Xaa is C or S

SEQ ID NO: 70589 - protein, 26 aa, Artificial Sequence
  Cyclic GFR-binding peptide
SNITVQIMEYVRKKPKLIGEMSRLEE

SEQ ID NO: 70590 - protein, 26 aa, Artificial Sequence
  Cyclic GFR-binding peptide
PTELEPLPMVYYDEYDKVVEQLSNEM

SEQ ID NO: 70591 - protein, 27 aa, Artificial Sequence
  Cyclic GFR-binding peptide
PTELEPLPMVYYDENEKVVEQLSNDMV

SEQ ID NO: 70592 - protein, 37 aa, Artificial Sequence
  Cyclic GFR-binding peptide
  MOD_RES (6)..(7): Xaa is C or S
ASASPXXVPQDLRPVQIRKIVGRTPKVKKATVMVVKS

SEQ ID NO: 70593 - protein, 21 aa, Artificial Sequence
  Cyclic GFR-binding peptide
EPLTMLYYDEYDKVVEQLSNE

SEQ ID NO: 70594 - protein, 35 aa, Artificial Sequence
  Cyclic GFR-binding peptide
  MOD_RES (5)..(5): Xaa is C or S
EGLEXVPTEEEPLTMLYYRIKPHQGQHEQLSNFLQ

SEQ ID NO: 70595 - protein, 32 aa, Artificial Sequence
  Cyclic GFR-binding peptide
  MOD_RES (6)..(7): Xaa is C or S
SIPKAXXVPTELRSVKMAKVDEYDKVVKEVQV

SEQ ID NO: 70596 - protein, 34 aa, Artificial Sequence
  Cyclic GFR-binding peptide
  MOD_RES (31)..(33): Xaa is C or S
PTQLRSVKVAKVDDSSNVIKEVQVNMVVRAXGXH

SEQ ID NO: 70597 - protein, 32 aa, Artificial Sequence
  Cyclic GFR-binding peptide
  MOD_RES (4)..(5): Xaa is C or S
ASPXXVPQDLRPVQIRKIVGRTPKVKKATVMV

SEQ ID NO: 70598 - protein, 37 aa, Artificial Sequence
  Cyclic GFR-binding peptide
  MOD_RES (6)..(7): Xaa is C or S
ASASPXXVPQDLRSVKIAKVVGRTPKVKEVQVMVVKS

SEQ ID NO: 70599 - protein, 32 aa, Artificial Sequence
  Cyclic GFR-binding peptide
  MOD_RES (32)..(32): Xaa is C or S
VPTELSNITMQIMDEYDKVVIGEMSEMVVEGX

SEQ ID NO: 70600 - protein, 30 aa, Artificial Sequence; identical to SEQ ID NO: 23627
  Cyclic GFR-binding peptide
  MOD_RES (2)..(2): Xaa is C or S

SEQ ID NO: 70601 - protein, 32 aa, Artificial Sequence
  Cyclic GFR-binding peptide
  MOD_RES (1)..(32): Xaa is C or S
XVPQALSNITIQIMVGRKPKVIGEMSMIVRSX

SEQ ID NO: 70602 - protein, 38 aa, Artificial Sequence; identical to SEQ ID NO: 19473
  Cyclic GFR-binding peptide
  MOD_RES (3)..(4)..(36)..(38): Xaa is C or S

SEQ ID NO: 70603 - protein, 29 aa, Artificial Sequence
  Cyclic GFR-binding peptide
  MOD_RES (3)..(4): Xaa is C or S
KPXXAPTQLRSVKVAKVDDSSNVIKEVQV

SEQ ID NO: 70604 - protein, 42 aa, Artificial Sequence
  Cyclic GFR-binding peptide
  MOD_RES (3)..(40)..(42): Xaa is C or S
VQXRPTQVQLEPLPVVYYEIVRKKPIFEQLSNTLEDHLAXKX

SEQ ID NO: 70605 - protein, 24 aa, Artificial Sequence
  Cyclic GFR-binding peptide
PTKLEPLPVVYYDDSSNVIEQLSN

SEQ ID NO: 70606 - protein, 24 aa, Artificial Sequence
  Cyclic GFR-binding peptide
LRSVKIAKVIGKTPKIKEVQVMIV

SEQ ID NO: 70607 - protein, 34 aa, Artificial Sequence; identical to SEQ ID NO: 23636
  Cyclic GFR-binding peptide
  MOD_RES (2)..(2): Xaa is C or S

SEQ ID NO: 70608 - protein, 35 aa, Artificial Sequence; identical to SEQ ID NO: 19485
  Cyclic GFR-binding peptide
  MOD_RES (2)..(3)..(34): Xaa is C or S

SEQ ID NO: 70609 - protein, 22 aa, Artificial Sequence
  Cyclic GFR-binding peptide
EPLPMVYYDENEKVVEQLSNDM

SEQ ID NO: 70610 - protein, 30 aa, Artificial Sequence; identical to SEQ ID NO: 19487
  Cyclic GFR-binding peptide
  MOD_RES (29)..(29): Xaa is C or S

SEQ ID NO: 70611 - protein, 36 aa, Artificial Sequence
  Cyclic GFR-binding peptide
  MOD_RES (5)..(6): Xaa is C or S
SASPXXVPQDLSNITIQIMVGRTPKVIGEMSMVVKS

SEQ ID NO: 70612 - protein, 33 aa, Artificial Sequence; identical to SEQ ID NO: 23641
  Cyclic GFR-binding peptide
  MOD_RES (1)..(1): Xaa is C or S

SEQ ID NO: 70613 - protein, 35 aa, Artificial Sequence
  Cyclic GFR-binding peptide
  MOD_RES (2)..(3)..(35): Xaa is C or S
PXXAPTQLRSVKVAKVDDSSNVIKEVQVNMVVRAX

SEQ ID NO: 70614 - protein, 40 aa, Artificial Sequence; identical to SEQ ID NO: 23644
  Cyclic GFR-binding peptide
  MOD_RES (37)..(39): Xaa is C or S

SEQ ID NO: 70615 - protein, 37 aa, Artificial Sequence; identical to SEQ ID NO: 23645
  Cyclic GFR-binding peptide
  MOD_RES (36)..(36): Xaa is C or S

SEQ ID NO: 70616 - protein, 32 aa, Artificial Sequence; identical to SEQ ID NO: 23657
  Cyclic GFR-binding peptide

SEQ ID NO: 70617 - protein, 30 aa, Artificial Sequence
  Cyclic GFR-binding peptide
  MOD_RES (30)..(30): Xaa is C or S
SQDLSNITIQIMIGKTPKIIGEMSMIVKSX

SEQ ID NO: 70618 - protein, 34 aa, Artificial Sequence
  Cyclic GFR-binding peptide
  MOD_RES (3)..(4): Xaa is C or S
KAXXVPTELRSVKMAKVDEYDKVVKEVQVEMVVE

SEQ ID NO: 70619 - protein, 28 aa, Artificial Sequence
  Cyclic GFR-binding peptide
  MOD_RES (27)..(27): Xaa is C or S
EPLPMVYYDEYDKVVEQLSNEMVVEGXG

SEQ ID NO: 70620 - protein, 23 aa, Artificial Sequence
  Cyclic GFR-binding peptide
SNITMQIMDENEKVVIGEMSDMV

SEQ ID NO: 70621 - protein, 29 aa, Artificial Sequence
  Cyclic GFR-binding peptide
TEERPVQMRKIRIKPHQGQHKKATVFLQH

SEQ ID NO: 70622 - protein, 33 aa, Artificial Sequence
  Cyclic GFR-binding peptide
  MOD_RES (30)..(32): Xaa is C or S
TKLSNITVQIMDDSSNVIIGEMSNMVVRSXGXH

SEQ ID NO: 70623 - protein, 22 aa, Artificial Sequence
  Cyclic GFR-binding peptide
SNITVQIMEIVRKKPIFIGEMS

SEQ ID NO: 70624 - protein, 29 aa, Artificial Sequence
  Cyclic GFR-binding peptide
QPSRVHHSNITVQIMEYVRKKPKLIGEMS

SEQ ID NO: 70625 - protein, 27 aa, Artificial Sequence
  Cyclic GFR-binding peptide
QDLEPLPIVYYVGRTPKVEQLSNMVVK

SEQ ID NO: 70626 - protein, 36 aa, Artificial Sequence
  Cyclic GFR-binding peptide
  MOD_RES (5)..(6): Xaa is C or S
SAAPXXVPQALRSVKIAKVVGRKPKVKEVQVMIVRS

SEQ ID NO: 70627 - protein, 40 aa, Artificial Sequence; identical to SEQ ID NO: 19508
  Cyclic GFR-binding peptide
  MOD_RES (6)..(7)..(39): Xaa is C or S

SEQ ID NO: 70628 - protein, 28 aa, Artificial Sequence
  Cyclic GFR-binding peptide
VPTEERSVKMAKVRIKPHQGQHKEVQVF

SEQ ID NO: 70629 - protein, 33 aa, Artificial Sequence; identical to SEQ ID NO: 19511
  Cyclic GFR-binding peptide
  MOD_RES (1)..(2): Xaa is C or S

SEQ ID NO: 70630 - protein, 31 aa, Artificial Sequence; identical to SEQ ID NO: 19512
  Cyclic GFR-binding peptide
  MOD_RES (3)..(4): Xaa is C or S

SEQ ID NO: 70631 - protein, 39 aa, Artificial Sequence; identical to SEQ ID NO: 23670
  Cyclic GFR-binding peptide
  MOD_RES (37)..(39): Xaa is C or S

SEQ ID NO: 70632 - protein, 33 aa, Artificial Sequence
  Cyclic GFR-binding peptide
  MOD_RES (1)..(32): Xaa is C or S
XVSQDLRPVQIRKIIGKTPKIKKATVMIVKSXK

SEQ ID NO: 70633 - protein, 31 aa, Artificial Sequence
  Cyclic GFR-binding peptide
  MOD_RES (1)..(1): Xaa is C or S
XQPSRVHHEPLPVVYYEYVRKKPKLEQLSNR

SEQ ID NO: 70634 - protein, 35 aa, Artificial Sequence
  Cyclic GFR-binding peptide
  MOD_RES (3)..(4)..(35): Xaa is C or S
SPXXVSQDLSNITIQIMIGKTPKIIGEMSMIVKSX

SEQ ID NO: 70635 - protein, 34 aa, Artificial Sequence
  Cyclic GFR-binding peptide
  MOD_RES (2)..(3)..(34): Xaa is C or S
PXXVSQDLRPVQIRKIIGKTPKIKKATVMIVKSX

SEQ ID NO: 70636 - protein, 28 aa, Artificial Sequence
  Cyclic GFR-binding peptide
PTQLEPLPVVYYDDSSNVIEQLSNNMVV

SEQ ID NO: 70637 - protein, 34 aa, Artificial Sequence
  Cyclic GFR-binding peptide
  MOD_RES (2)..(3): Xaa is C or S
PXXAPTQLRSVKVAKVDDSSNVIKEVQVNMVVRA

SEQ ID NO: 70638 - protein, 36 aa, Artificial Sequence
  Cyclic GFR-binding peptide
  MOD_RES (1)..(2)..(34)..(36): Xaa is C or S
XXAPTKLSNITVQIMDDSSNVIIGEMSNMVVRSXGX

SEQ ID NO: 70639 - protein, 39 aa, Artificial Sequence
  Cyclic GFR-binding peptide
  MOD_RES (3)..(3): Xaa is C or S
VKXQPSRVHHEPLPVVYYEYVRKKPKLEQLSNRLEEHLE

SEQ ID NO: 70640 - protein, 27 aa, Artificial Sequence
  Cyclic GFR-binding peptide
VHHEPLTVLYYEYVRKKPKLEQLSNRL

SEQ ID NO: 70641 - protein, 25 aa, Artificial Sequence
  Cyclic GFR-binding peptide
LEPLPIVYYVGRTPKVEQLSNMVVK

SEQ ID NO: 70642 - protein, 40 aa, Artificial Sequence
  Cyclic GFR-binding peptide
  MOD_RES (2)..(39): Xaa is C or S
QXRPTQVQLEPLPVVYYEIVRKKPIFEQLSNTLEDHLAXK

SEQ ID NO: 70643 - protein, 23 aa, Artificial Sequence
  Cyclic GFR-binding peptide
LSNITVQIMDDSSNVIIGEMSNM

SEQ ID NO: 70644 - protein, 32 aa, Artificial Sequence
  Cyclic GFR-binding peptide
  MOD_RES (6)..(7): Xaa is C or S
ASASPXXVSQDLRPVQIRKIIGKTPKIKKATV

SEQ ID NO: 70645 - protein, 25 aa, Artificial Sequence
  Cyclic GFR-binding peptide
SNITIQIMVGRTPKVIGEMSMVVKS

SEQ ID NO: 70646 - protein, 26 aa, Artificial Sequence
  Cyclic GFR-binding peptide
ELRSVKMAKVDENEKVVKEVQVDMVV

SEQ ID NO: 70647 - protein, 26 aa, Artificial Sequence
  Cyclic GFR-binding peptide
  MOD_RES (26)..(26): Xaa is C or S
RSVKIAKVVGRKPKVKEVQVMIVRSX

SEQ ID NO: 70648 - protein, 29 aa, Artificial Sequence
  Cyclic GFR-binding peptide
PQDLEPLPIVYYVGRTPKVEQLSNMVVKS

SEQ ID NO: 70649 - protein, 25 aa, Artificial Sequence
  Cyclic GFR-binding peptide
RSVKIAKVVGRTPKVKEVQVMVVKS

SEQ ID NO: 70650 - protein, 24 aa, Artificial Sequence
  Cyclic GFR-binding peptide
PTQLSNITVQIMDDSSNVIIGEMS

SEQ ID NO: 70651 - protein, 27 aa, Artificial Sequence
  Cyclic GFR-binding peptide
TELRPVQMRKIDENEKVVKKATVDMVV

SEQ ID NO: 70652 - protein, 37 aa, Artificial Sequence
  Cyclic GFR-binding peptide
  MOD_RES (5)..(6): Xaa is C or S
IPKAXXVPTELRSVKMAKVDENEKVVKEVQVDMVVEG

SEQ ID NO: 70653 - protein, 28 aa, Artificial Sequence
  Cyclic GFR-binding peptide
  MOD_RES (27)..(27): Xaa is C or S
RPVQMRKIDEYDKVVKKATVEMVVEGXG

SEQ ID NO: 70654 - protein, 32 aa, Artificial Sequence; identical to SEQ ID NO: 19535
  Cyclic GFR-binding peptide
  MOD_RES (4)..(5): Xaa is C or S

SEQ ID NO: 70655 - protein, 35 aa, Artificial Sequence; identical to SEQ ID NO: 19537
  Cyclic GFR-binding peptide
  MOD_RES (4)..(4): Xaa is C or S

SEQ ID NO: 70656 - protein, 30 aa, Artificial Sequence; identical to SEQ ID NO: 19539
  Cyclic GFR-binding peptide
  MOD_RES (29)..(29): Xaa is C or S

SEQ ID NO: 70657 - protein, 38 aa, Artificial Sequence
  Cyclic GFR-binding peptide
  MOD_RES (1)..(38): Xaa is C or S
XQPSRVHHEPLTVLYYEYVRKKPKLEQLSNRLEEHLEX

SEQ ID NO: 70658 - protein, 26 aa, Artificial Sequence
  Cyclic GFR-binding peptide
DLRSVKIAKVVGRTPKVKEVQVMVVK

SEQ ID NO: 70659 - protein, 25 aa, Artificial Sequence
  Cyclic GFR-binding peptide
VPTELRSVKMAKVDEYDKVVKEVQV

SEQ ID NO: 70660 - protein, 34 aa, Artificial Sequence
  Cyclic GFR-binding peptide
  MOD_RES (1)..(1): Xaa is C or S
XQPSRVHHEPLPVVYYEYVRKKPKLEQLSNRLEE

SEQ ID NO: 70661 - protein, 34 aa, Artificial Sequence; identical to SEQ ID NO: 19543
  Cyclic GFR-binding peptide
  MOD_RES (4)..(5): Xaa is C or S

SEQ ID NO: 70662 - protein, 37 aa, Artificial Sequence
  Cyclic GFR-binding peptide
  MOD_RES (6)..(7): Xaa is C or S
SIPKAXXVPTELRPVQMRKIDEYDKVVKKATVEMVVE

SEQ ID NO: 70663 - protein, 37 aa, Artificial Sequence
  Cyclic GFR-binding peptide
  MOD_RES (2)..(3)..(34)..(36): Xaa is C or S
PXXVPQDLSNITIQIMVGRTPKVIGEMSMVVKSXKXS

SEQ ID NO: 70664 - protein, 34 aa, Artificial Sequence
  Cyclic GFR-binding peptide
  MOD_RES (34)..(34): Xaa is C or S
RVHHEPLTVLYYEYVRKKPKLEQLSNRLEEHLEX

SEQ ID NO: 70665 - protein, 38 aa, Artificial Sequence
  Cyclic GFR-binding peptide
  MOD_RES (1)..(35)..(37): Xaa is C or S
XVPTEEEPLPMVYYRIKPHQGQHEQLSNFLQHNKXEXR

SEQ ID NO: 70666 - protein, 25 aa, Artificial Sequence
  Cyclic GFR-binding peptide
KLEPLPVVYYDDSSNVIEQLSNNMV

SEQ ID NO: 70667 - protein, 36 aa, Artificial Sequence; identical to SEQ ID NO: 19553
  Cyclic GFR-binding peptide
  MOD_RES (3)..(35): Xaa is C or S

SEQ ID NO: 70668 - protein, 33 aa, Artificial Sequence
  Cyclic GFR-binding peptide
PTQVQLEPLTVLYYEIVRKKPIFEQLSNTLEDH

SEQ ID NO: 70669 - protein, 39 aa, Artificial Sequence; identical to SEQ ID NO: 19556
  Cyclic GFR-binding peptide
  MOD_RES (5)..(37)..(39): Xaa is C or S

SEQ ID NO: 70670 - protein, 34 aa, Artificial Sequence; identical to SEQ ID NO: 19557
  Cyclic GFR-binding peptide
  MOD_RES (3)..(4): Xaa is C or S

SEQ ID NO: 70671 - protein, 20 aa, Artificial Sequence
  Cyclic GFR-binding peptide
SNITMQIMDENEKVVIGEMS

SEQ ID NO: 70672 - protein, 24 aa, Artificial Sequence
  Cyclic GFR-binding peptide
ELEPLTMLYYDEYDKVVEQLSNEM

SEQ ID NO: 70673 - protein, 29 aa, Artificial Sequence
  Cyclic GFR-binding peptide
  MOD_RES (28)..(28): Xaa is C or S
LRPVQMRKIDENEKVVKKATVDMVVEGXG

SEQ ID NO: 70674 - protein, 34 aa, Artificial Sequence
  Cyclic GFR-binding peptide
  MOD_RES (32)..(34): Xaa is C or S
APTKLRPVQVRKIDDSSNVIKKATVNMVVRSXGX

SEQ ID NO: 70675 - protein, 30 aa, Artificial Sequence
  Cyclic GFR-binding peptide
  MOD_RES (29)..(29): Xaa is C or S
QLRSVKVAKVDDSSNVIKEVQVNMVVRAXG

SEQ ID NO: 70676 - protein, 34 aa, Artificial Sequence; identical to SEQ ID NO: 23714
  Cyclic GFR-binding peptide
  MOD_RES (2)..(2): Xaa is C or S

SEQ ID NO: 70677 - protein, 31 aa, Artificial Sequence
  Cyclic GFR-binding peptide
  MOD_RES (29)..(31): Xaa is C or S
ELSNITMQIMDENEKVVIGEMSDMVVEGXGX

SEQ ID NO: 70678 - protein, 36 aa, Artificial Sequence
  Cyclic GFR-binding peptide
  MOD_RES (5)..(6): Xaa is C or S
SASPXXVPQDLRSVKIAKVVGRTPKVKEVQVMVVKS

SEQ ID NO: 70679 - protein, 43 aa, Artificial Sequence; identical to SEQ ID NO: 23715
  Cyclic GFR-binding peptide
  MOD_RES (6)..(40)..(42): Xaa is C or S

SEQ ID NO: 70680 - protein, 29 aa, Artificial Sequence
  Cyclic GFR-binding peptide
  MOD_RES (29)..(29): Xaa is C or S
QDLRSVKIAKVVGRTPKVKEVQVMVVKSX

SEQ ID NO: 70681 - protein, 28 aa, Artificial Sequence
  Cyclic GFR-binding peptide
  MOD_RES (2)..(3): Xaa is C or S
PXXAPTKLEPLTVLYYDDSSNVIEQLSN

SEQ ID NO: 70682 - protein, 36 aa, Artificial Sequence; identical to SEQ ID NO: 19586
  Cyclic GFR-binding peptide
  MOD_RES (4)..(5): Xaa is C or S

SEQ ID NO: 70683 - protein, 31 aa, Artificial Sequence; identical to SEQ ID NO: 19587
  Cyclic GFR-binding peptide
  MOD_RES (2)..(2): Xaa is C or S

SEQ ID NO: 70684 - protein, 34 aa, Artificial Sequence
  Cyclic GFR-binding peptide
  MOD_RES (32)..(34): Xaa is C or S
APTQLRSVKVAKVDDSSNVIKEVQVNMVVRAXGX

SEQ ID NO: 70685 - protein, 38 aa, Artificial Sequence
  Cyclic GFR-binding peptide
  MOD_RES (6)..(38): Xaa is C or S
VTKPTXAPTKLRSVKVAKVDDSSNVIKEVQVNMVVRSX

SEQ ID NO: 70686 - protein, 41 aa, Artificial Sequence; identical to SEQ ID NO: 19594
  Cyclic GFR-binding peptide
  MOD_RES (6)..(7)..(38)..(40): Xaa is C or S

SEQ ID NO: 70687 - protein, 34 aa, Artificial Sequence; identical to SEQ ID NO: 19595
  Cyclic GFR-binding peptide
  MOD_RES (6)..(7): Xaa is C or S

SEQ ID NO: 70688 - protein, 36 aa, Artificial Sequence
  Cyclic GFR-binding peptide
  MOD_RES (6)..(6): Xaa is C or S
VTKPTXAPTKLRPVQVRKIDDSSNVIKKATVNMVVR

SEQ ID NO: 70689 - protein, 31 aa, Artificial Sequence; identical to SEQ ID NO: 23733
  Cyclic GFR-binding peptide

SEQ ID NO: 70690 - protein, 32 aa, Artificial Sequence; identical to SEQ ID NO: 19614
  Cyclic GFR-binding peptide
  MOD_RES (30)..(32): Xaa is C or S

SEQ ID NO: 70691 - protein, 34 aa, Artificial Sequence
  Cyclic GFR-binding peptide
  MOD_RES (3)..(4): Xaa is C or S
KAXXVPTELSNITMQIMDEYDKVVIGEMSEMVVE

SEQ ID NO: 70692 - protein, 36 aa, Artificial Sequence; identical to SEQ ID NO: 19617
  Cyclic GFR-binding peptide
  MOD_RES (5)..(6): Xaa is C or S

SEQ ID NO: 70693 - protein, 29 aa, Artificial Sequence
  Cyclic GFR-binding peptide
VQLSNITVQIMEIVRKKPIFIGEMSTLED

SEQ ID NO: 70694 - protein, 30 aa, Artificial Sequence
  Cyclic GFR-binding peptide
  MOD_RES (3)..(4): Xaa is C or S
APXXVPQALRPVQIRKIVGRKPKVKKATVM

SEQ ID NO: 70695 - protein, 28 aa, Artificial Sequence
  Cyclic GFR-binding peptide
ELRPVQMRKIDEYDKVVKKATVEMVVEG

SEQ ID NO: 70696 - protein, 40 aa, Artificial Sequence
  Cyclic GFR-binding peptide
  MOD_RES (5)..(6)..(38)..(40): Xaa is C or S
VPKPXXAPTQLSNITVQIMDDSSNVIIGEMSNMVVRAXGX

SEQ ID NO: 70697 - protein, 39 aa, Artificial Sequence; identical to SEQ ID NO: 23740
  Cyclic GFR-binding peptide
  MOD_RES (7)..(7): Xaa is C or S

SEQ ID NO: 70698 - protein, 39 aa, Artificial Sequence; identical to SEQ ID NO: 23742
  Cyclic GFR-binding peptide
  MOD_RES (37)..(39): Xaa is C or S

SEQ ID NO: 70699 - protein, 31 aa, Artificial Sequence; identical to SEQ ID NO: 19621
  Cyclic GFR-binding peptide
  MOD_RES (31)..(31): Xaa is C or S

SEQ ID NO: 70700 - protein, 36 aa, Artificial Sequence
  Cyclic GFR-binding peptide
  MOD_RES (2)..(3)..(34)..(36): Xaa is C or S
PXXVSQDLRPVQIRKIIGKTPKIKKATVMIVKSXKX

SEQ ID NO: 70701 - protein, 32 aa, Artificial Sequence
  Cyclic GFR-binding peptide
  MOD_RES (3)..(4): Xaa is C or S
KAXXVPTELSNITMQIMDEYDKVVIGEMSEMV

SEQ ID NO: 70702 - protein, 33 aa, Artificial Sequence
  Cyclic GFR-binding peptide
  MOD_RES (30)..(32): Xaa is C or S
TQLRPVQVRKIDDSSNVIKKATVNMVVRAXGXH

SEQ ID NO: 70703 - protein, 32 aa, Artificial Sequence; identical to SEQ ID NO: 19626
  Cyclic GFR-binding peptide
  MOD_RES (5)..(6): Xaa is C or S

SEQ ID NO: 70704 - protein, 25 aa, Artificial Sequence
  Cyclic GFR-binding peptide
QDLRPVQIRKIVGRTPKVKKATVMV

SEQ ID NO: 70705 - protein, 27 aa, Artificial Sequence
  Cyclic GFR-binding peptide
  MOD_RES (27)..(27): Xaa is C or S
EPLTVLYYDDSSNVIEQLSNNMVVRSX

SEQ ID NO: 70706 - protein, 38 aa, Artificial Sequence
  Cyclic GFR-binding peptide
  MOD_RES (6)..(7)..(38): Xaa is C or S
ASAAPXXVPQALSNITIQIMVGRKPKVIGEMSMIVRSX

SEQ ID NO: 70707 - protein, 30 aa, Artificial Sequence; identical to SEQ ID NO: 23759
  Cyclic GFR-binding peptide
  MOD_RES (1)..(1): Xaa is C or S

SEQ ID NO: 70708 - protein, 30 aa, Artificial Sequence; identical to SEQ ID NO: 23761
  Cyclic GFR-binding peptide

SEQ ID NO: 70709 - protein, 39 aa, Artificial Sequence; identical to SEQ ID NO: 19639
  Cyclic GFR-binding peptide
  MOD_RES (5)..(6)..(38): Xaa is C or S

SEQ ID NO: 70710 - protein, 36 aa, Artificial Sequence
  Cyclic GFR-binding peptide
  MOD_RES (1)..(2)..(34)..(36): Xaa is C or S
XXVPTELRSVKMAKVDENEKVVKEVQVDMVVEGXGX

SEQ ID NO: 70711 - protein, 28 aa, Artificial Sequence
  Cyclic GFR-binding peptide
PTELSNITMQIMDENEKVVIGEMSDMVV

SEQ ID NO: 70712 - protein, 32 aa, Artificial Sequence
  Cyclic GFR-binding peptide
  MOD_RES (4)..(5): Xaa is C or S
PKAXXVPTELSNITMQIMDEYDKVVIGEMSEM

SEQ ID NO: 70713 - protein, 33 aa, Artificial Sequence
  Cyclic GFR-binding peptide
  MOD_RES (2)..(3): Xaa is C or S
PXXVPQDLRPVQIRKIVGRTPKVKKATVMVVKS

SEQ ID NO: 70714 - protein, 33 aa, Artificial Sequence; identical to SEQ ID NO: 23769
  Cyclic GFR-binding peptide
  MOD_RES (2)..(2): Xaa is C or S

SEQ ID NO: 70715 - protein, 34 aa, Artificial Sequence
  Cyclic GFR-binding peptide
  MOD_RES (3)..(3): Xaa is C or S
PTXAPTKLSNITVQIMDDSSNVIIGEMSNMVVRS

SEQ ID NO: 70716 - protein, 23 aa, Artificial Sequence
  Cyclic GFR-binding peptide
RSVKMAKVDENEKVVKEVQVDMV

SEQ ID NO: 70717 - protein, 35 aa, Artificial Sequence; identical to SEQ ID NO: 19651
  Cyclic GFR-binding peptide
  MOD_RES (5)..(6): Xaa is C or S

SEQ ID NO: 70718 - protein, 31 aa, Artificial Sequence; identical to SEQ ID NO: 19652
  Cyclic GFR-binding peptide
  MOD_RES (1)..(2): Xaa is C or S

SEQ ID NO: 70719 - protein, 29 aa, Artificial Sequence
  Cyclic GFR-binding peptide
  MOD_RES (29)..(29): Xaa is C or S
ELEPLPMVYYDEYDKVVEQLSNEMVVEGX

SEQ ID NO: 70720 - protein, 27 aa, Artificial Sequence
  Cyclic GFR-binding peptide
  MOD_RES (27)..(27): Xaa is C or S
LEPLPIVYYVGRTPKVEQLSNMVVKSX

SEQ ID NO: 70721 - protein, 33 aa, Artificial Sequence
  Cyclic GFR-binding peptide
  MOD_RES (1)..(1): Xaa is C or S
XQPSRVHHEPLPVVYYEYVRKKPKLEQLSNRLE

SEQ ID NO: 70722 - protein, 39 aa, Artificial Sequence; identical to SEQ ID NO: 23776
  Cyclic GFR-binding peptide
  MOD_RES (5)..(39): Xaa is C or S

SEQ ID NO: 70723 - protein, 25 aa, Artificial Sequence
  Cyclic GFR-binding peptide
ELEPLPMVYYDENEKVVEQLSNDMV

SEQ ID NO: 70724 - protein, 28 aa, Artificial Sequence
  Cyclic GFR-binding peptide
  MOD_RES (2)..(3): Xaa is C or S
PXXVPQALRSVKIAKVVGRKPKVKEVQV

SEQ ID NO: 70725 - protein, 33 aa, Artificial Sequence
  Cyclic GFR-binding peptide
  MOD_RES (3)..(3): Xaa is C or S
PTXAPTKLSNITVQIMDDSSNVIIGEMSNMVVR

SEQ ID NO: 70726 - protein, 27 aa, Artificial Sequence
  Cyclic GFR-binding peptide
PQDLEPLPIVYYVGRTPKVEQLSNMVV

SEQ ID NO: 70727 - protein, 38 aa, Artificial Sequence; identical to SEQ ID NO: 23784
  Cyclic GFR-binding peptide
  MOD_RES (36)..(38): Xaa is C or S

SEQ ID NO: 70728 - protein, 38 aa, Artificial Sequence; identical to SEQ ID NO: 19667
  Cyclic GFR-binding peptide
  MOD_RES (3)..(35)..(37): Xaa is C or S

SEQ ID NO: 70729 - protein, 35 aa, Artificial Sequence; identical to SEQ ID NO: 19668
  Cyclic GFR-binding peptide
  MOD_RES (4)..(4): Xaa is C or S

SEQ ID NO: 70730 - protein, 35 aa, Artificial Sequence; identical to SEQ ID NO: 23786
  Cyclic GFR-binding peptide
  MOD_RES (4)..(4): Xaa is C or S

SEQ ID NO: 70731 - protein, 24 aa, Artificial Sequence
  Cyclic GFR-binding peptide
QLEPLTVLYYDDSSNVIEQLSNNM

SEQ ID NO: 70732 - protein, 35 aa, Artificial Sequence; identical to SEQ ID NO: 19670
  Cyclic GFR-binding peptide
  MOD_RES (1)..(33)..(35): Xaa is C or S

SEQ ID NO: 70733 - protein, 32 aa, Artificial Sequence
  Cyclic GFR-binding peptide
  MOD_RES (31)..(31): Xaa is C or S
PTELSNITMQIMDENEKVVIGEMSDMVVEGXG

SEQ ID NO: 70734 - protein, 30 aa, Artificial Sequence
  Cyclic GFR-binding peptide
  MOD_RES (29)..(29): Xaa is C or S
KLSNITVQIMDDSSNVIIGEMSNMVVRSXG

SEQ ID NO: 70735 - protein, 40 aa, Artificial Sequence; identical to SEQ ID NO: 23791
  Cyclic GFR-binding peptide
  MOD_RES (6)..(40): Xaa is C or S

SEQ ID NO: 70736 - protein, 28 aa, Artificial Sequence
  Cyclic GFR-binding peptide
  MOD_RES (28)..(28): Xaa is C or S
LRPVQVRKIDDSSNVIKKATVNMVVRAX

SEQ ID NO: 70737 - protein, 28 aa, Artificial Sequence
  Cyclic GFR-binding peptide
HEPLPVVYYEYVRKKPKLEQLSNRLEEH

SEQ ID NO: 70738 - protein, 32 aa, Artificial Sequence
  Cyclic GFR-binding peptide
  MOD_RES (6)..(7): Xaa is C or S
ASASPXXVPQDLSNITIQIMVGRTPKVIGEMS

SEQ ID NO: 70739 - protein, 34 aa, Artificial Sequence
  Cyclic GFR-binding peptide
  MOD_RES (7)..(7): Xaa is C or S
NDEGLEXVPTEEEPLTMLYYRIKPHQGQHEQLSN

SEQ ID NO: 70740 - protein, 23 aa, Artificial Sequence
  Cyclic GFR-binding peptide
LEPLTVLYYDDSSNVIEQLSNNM

SEQ ID NO: 70741 - protein, 30 aa, Artificial Sequence
  Cyclic GFR-binding peptide
VPQALRPVQIRKIVGRKPKVKKATVMIVRS

SEQ ID NO: 70742 - protein, 30 aa, Artificial Sequence; identical to SEQ ID NO: 19678
  Cyclic GFR-binding peptide
  MOD_RES (27)..(29): Xaa is C or S

SEQ ID NO: 70743 - protein, 24 aa, Artificial Sequence
  Cyclic GFR-binding peptide
QLEPLPVVYYEIVRKKPIFEQLSN

SEQ ID NO: 70744 - protein, 30 aa, Artificial Sequence
  Cyclic GFR-binding peptide
  MOD_RES (29)..(29): Xaa is C or S
ELSNITMQIMDEYDKVVIGEMSEMVVEGXG

SEQ ID NO: 70745 - protein, 33 aa, Artificial Sequence
  Cyclic GFR-binding peptide
  MOD_RES (1)..(32): Xaa is C or S
XVPQDLRPVQIRKIVGRTPKVKKATVMVVKSXK

SEQ ID NO: 70746 - protein, 37 aa, Artificial Sequence; identical to SEQ ID NO: 23799
  Cyclic GFR-binding peptide
  MOD_RES (4)..(4): Xaa is C or S

SEQ ID NO: 70747 - protein, 29 aa, Artificial Sequence
  Cyclic GFR-binding peptide
RPTQVQLEPLPVVYYEIVRKKPIFEQLSN

SEQ ID NO: 70748 - protein, 34 aa, Artificial Sequence
  Cyclic GFR-binding peptide
  MOD_RES (2)..(3): Xaa is C or S
PXXAPTKLRSVKVAKVDDSSNVIKEVQVNMVVRS

SEQ ID NO: 70749 - protein, 34 aa, Artificial Sequence
  Cyclic GFR-binding peptide
  MOD_RES (5)..(6): Xaa is C or S
VPKPXXAPTQLRSVKVAKVDDSSNVIKEVQVNMV

SEQ ID NO: 70750 - protein, 33 aa, Artificial Sequence; identical to SEQ ID NO: 19689
  Cyclic GFR-binding peptide
  MOD_RES (6)..(7): Xaa is C or S

SEQ ID NO: 70751 - protein, 33 aa, Artificial Sequence; identical to SEQ ID NO: 19699
  Cyclic GFR-binding peptide
  MOD_RES (5)..(6): Xaa is C or S

SEQ ID NO: 70752 - protein, 28 aa, Artificial Sequence
  Cyclic GFR-binding peptide
  MOD_RES (1)..(1): Xaa is C or S
XAPTQLEPLTVLYYDDSSNVIEQLSNNM

SEQ ID NO: 70753 - protein, 32 aa, Artificial Sequence
  Cyclic GFR-binding peptide
  MOD_RES (6)..(7): Xaa is C or S
SIPKAXXVPTELSNITMQIMDEYDKVVIGEMS

SEQ ID NO: 70754 - protein, 30 aa, Artificial Sequence
  Cyclic GFR-binding peptide
  MOD_RES (1)..(2): Xaa is C or S
XXVPTELSNITMQIMDENEKVVIGEMSDMV

SEQ ID NO: 70755 - protein, 36 aa, Artificial Sequence; identical to SEQ ID NO: 19706
  Cyclic GFR-binding peptide
  MOD_RES (4)..(5): Xaa is C or S

SEQ ID NO: 70756 - protein, 31 aa, Artificial Sequence
  Cyclic GFR-binding peptide
  MOD_RES (2)..(3): Xaa is C or S
PXXVPQALSNITIQIMVGRKPKVIGEMSMIV

SEQ ID NO: 70757 - protein, 38 aa, Artificial Sequence
  Cyclic GFR-binding peptide
  MOD_RES (2)..(2): Xaa is C or S
KXQPSRVHHEPLPVVYYEYVRKKPKLEQLSNRLEEHLE

SEQ ID NO: 70758 - protein, 39 aa, Artificial Sequence
  Cyclic GFR-binding peptide
  MOD_RES (5)..(6)..(38): Xaa is C or S
IPKAXXVPTELRPVQMRKIDEYDKVVKKATVEMVVEGXG

SEQ ID NO: 70759 - protein, 33 aa, Artificial Sequence
  Cyclic GFR-binding peptide
  MOD_RES (31)..(33): Xaa is C or S
PTQLSNITVQIMDDSSNVIIGEMSNMVVRAXGX

SEQ ID NO: 70760 - protein, 32 aa, Artificial Sequence; identical to SEQ ID NO: 19719
  Cyclic GFR-binding peptide
  MOD_RES (32)..(32): Xaa is C or S

SEQ ID NO: 70761 - protein, 32 aa, Artificial Sequence; identical to SEQ ID NO: 19720
  Cyclic GFR-binding peptide
  MOD_RES (30)..(32): Xaa is C or S

SEQ ID NO: 70762 - protein, 39 aa, Artificial Sequence; identical to SEQ ID NO: 23820
  Cyclic GFR-binding peptide
  MOD_RES (1)..(38): Xaa is C or S

SEQ ID NO: 70763 - protein, 30 aa, Artificial Sequence
  Cyclic GFR-binding peptide
  MOD_RES (30)..(30): Xaa is C or S
TELRSVKMAKVDEYDKVVKEVQVEMVVEGX

SEQ ID NO: 70764 - protein, 31 aa, Artificial Sequence
  Cyclic GFR-binding peptide
  MOD_RES (30)..(30): Xaa is C or S
PQALRSVKIAKVVGRKPKVKEVQVMIVRSXK

SEQ ID NO: 70765 - protein, 30 aa, Artificial Sequence
  Cyclic GFR-binding peptide
  MOD_RES (30)..(30): Xaa is C or S
TELSNITMQIMDENEKVVIGEMSDMVVEGX

SEQ ID NO: 70766 - protein, 25 aa, Artificial Sequence
  Cyclic GFR-binding peptide
LEPLPMVYYDEYDKVVEQLSNEMVV

SEQ ID NO: 70767 - protein, 36 aa, Artificial Sequence
  Cyclic GFR-binding peptide
  MOD_RES (1)..(33)..(35): Xaa is C or S
XVPTELSNITMQIMDEYDKVVIGEMSEMVVEGXGXR

SEQ ID NO: 70768 - protein, 32 aa, Artificial Sequence; identical to SEQ ID NO: 23826
  Cyclic GFR-binding peptide
  MOD_RES (31)..(31): Xaa is C or S

SEQ ID NO: 70769 - protein, 30 aa, Artificial Sequence
  Cyclic GFR-binding peptide
  MOD_RES (1)..(1): Xaa is C or S
XVPQDLSNITIQIMVGRTPKVIGEMSMVVK

SEQ ID NO: 70770 - protein, 39 aa, Artificial Sequence; identical to SEQ ID NO: 19728
  Cyclic GFR-binding peptide
  MOD_RES (3)..(4)..(36)..(38): Xaa is C or S

SEQ ID NO: 70771 - protein, 31 aa, Artificial Sequence; identical to SEQ ID NO: 19734
  Cyclic GFR-binding peptide
  MOD_RES (3)..(4): Xaa is C or S

SEQ ID NO: 70772 - protein, 31 aa, Artificial Sequence; identical to SEQ ID NO: 19738
  Cyclic GFR-binding peptide
  MOD_RES (1)..(1): Xaa is C or S

SEQ ID NO: 70773 - protein, 34 aa, Artificial Sequence
  Cyclic GFR-binding peptide
  MOD_RES (3)..(3): Xaa is C or S
PTXAPTKLRPVQVRKIDDSSNVIKKATVNMVVRS

SEQ ID NO: 70774 - protein, 35 aa, Artificial Sequence; identical to SEQ ID NO: 19744
  Cyclic GFR-binding peptide
  MOD_RES (2)..(3)..(35): Xaa is C or S

SEQ ID NO: 70775 - protein, 29 aa, Artificial Sequence
  Cyclic GFR-binding peptide
  MOD_RES (29)..(29): Xaa is C or S
KLRPVQVRKIDDSSNVIKKATVNMVVRSX

SEQ ID NO: 70776 - protein, 30 aa, Artificial Sequence
  Cyclic GFR-binding peptide
  MOD_RES (28)..(30): Xaa is C or S
LSNITVQIMDDSSNVIIGEMSNMVVRAXGX

SEQ ID NO: 70777 - protein, 32 aa, Artificial Sequence; identical to SEQ ID NO: 19749
  Cyclic GFR-binding peptide
  MOD_RES (2)..(3): Xaa is C or S

SEQ ID NO: 70778 - protein, 31 aa, Artificial Sequence
  Cyclic GFR-binding peptide
  MOD_RES (1)..(1): Xaa is C or S
XAPTQLRSVKVAKVDDSSNVIKEVQVNMVVR

SEQ ID NO: 70779 - protein, 32 aa, Artificial Sequence
  Cyclic GFR-binding peptide
  MOD_RES (2)..(3): Xaa is C or S
AXXVPTELSNITMQIMDEYDKVVIGEMSEMVV

SEQ ID NO: 70780 - protein, 34 aa, Artificial Sequence; identical to SEQ ID NO: 19753
  Cyclic GFR-binding peptide
  MOD_RES (4)..(5): Xaa is C or S

SEQ ID NO: 70781 - protein, 26 aa, Artificial Sequence
  Cyclic GFR-binding peptide
QLEPLTVLYYDDSSNVIEQLSNNMVV

SEQ ID NO: 70782 - protein, 31 aa, Artificial Sequence
  Cyclic GFR-binding peptide
  MOD_RES (5)..(5): Xaa is C or S
TKPTXAPTKLRPVQVRKIDDSSNVIKKATVN

SEQ ID NO: 70783 - protein, 37 aa, Artificial Sequence
  Cyclic GFR-binding peptide
  MOD_RES (1)..(2)..(34)..(36): Xaa is C or S
XXVPTELRPVQMRKIDENEKVVKKATVDMVVEGXGXR

SEQ ID NO: 70784 - protein, 29 aa, Artificial Sequence
  Cyclic GFR-binding peptide
PQDLSNITIQIMVGRTPKVIGEMSMVVKS

SEQ ID NO: 70785 - protein, 29 aa, Artificial Sequence
  Cyclic GFR-binding peptide
  MOD_RES (1)..(1): Xaa is C or S
XVPTELEPLTMLYYDENEKVVEQLSNDMV

SEQ ID NO: 70786 - protein, 34 aa, Artificial Sequence
  Cyclic GFR-binding peptide
  MOD_RES (4)..(5): Xaa is C or S
PKPXXAPTKLRPVQVRKIDDSSNVIKKATVNMVV

SEQ ID NO: 70787 - protein, 32 aa, Artificial Sequence; identical to SEQ ID NO: 23858
  Cyclic GFR-binding peptide
  MOD_RES (32)..(32): Xaa is C or S

SEQ ID NO: 70788 - protein, 23 aa, Artificial Sequence
  Cyclic GFR-binding peptide
EPLTMLYYRIKPHQGQHEQLSNF

SEQ ID NO: 70789 - protein, 39 aa, Artificial Sequence
  Cyclic GFR-binding peptide
  MOD_RES (6)..(7)..(38): Xaa is C or S
ASAAPXXVPQALSNITIQIMVGRKPKVIGEMSMIVRSXK

SEQ ID NO: 70790 - protein, 28 aa, Artificial Sequence
  Cyclic GFR-binding peptide
TELRSVKMAKVDENEKVVKEVQVDMVVE

SEQ ID NO: 70791 - protein, 25 aa, Artificial Sequence
  Cyclic GFR-binding peptide
QDLRSVKIAKVIGKTPKIKEVQVMI

SEQ ID NO: 70792 - protein, 31 aa, Artificial Sequence; identical to SEQ ID NO: 19771
  Cyclic GFR-binding peptide
  MOD_RES (29)..(31): Xaa is C or S

SEQ ID NO: 70793 - protein, 38 aa, Artificial Sequence
  Cyclic GFR-binding peptide
  MOD_RES (2)..(3)..(35)..(37): Xaa is C or S
PXXAPTQLRSVKVAKVDDSSNVIKEVQVNMVVRAXGXH

SEQ ID NO: 70794 - protein, 33 aa, Artificial Sequence
  Cyclic GFR-binding peptide
  MOD_RES (3)..(4): Xaa is C or S
SPXXVSQDLSNITIQIMIGKTPKIIGEMSMIVK

SEQ ID NO: 70795 - protein, 31 aa, Artificial Sequence
  Cyclic GFR-binding peptide
  MOD_RES (31)..(31): Xaa is C or S
VPQDLSNITIQIMVGRTPKVIGEMSMVVKSX

SEQ ID NO: 70796 - protein, 36 aa, Artificial Sequence; identical to SEQ ID NO: 19778
  Cyclic GFR-binding peptide
  MOD_RES (4)..(5): Xaa is C or S

SEQ ID NO: 70797 - protein, 39 aa, Artificial Sequence; identical to SEQ ID NO: 23870
  Cyclic GFR-binding peptide
  MOD_RES (36)..(38): Xaa is C or S

SEQ ID NO: 70798 - protein, 30 aa, Artificial Sequence; identical to SEQ ID NO: 19780
  Cyclic GFR-binding peptide
  MOD_RES (1)..(2): Xaa is C or S

SEQ ID NO: 70799 - protein, 34 aa, Artificial Sequence; identical to SEQ ID NO: 19781
  Cyclic GFR-binding peptide
  MOD_RES (3)..(4): Xaa is C or S

SEQ ID NO: 70800 - protein, 31 aa, Artificial Sequence
  Cyclic GFR-binding peptide
TQVQLEPLTVLYYEIVRKKPIFEQLSNTLED

SEQ ID NO: 70801 - protein, 20 aa, Artificial Sequence
  Cyclic GFR-binding peptide
EPLTMLYYDENEKVVEQLSN

SEQ ID NO: 70802 - protein, 41 aa, Artificial Sequence
  Cyclic GFR-binding peptide
  MOD_RES (6)..(7)..(38)..(40): Xaa is C or S
ASAAPXXVPQALRPVQIRKIVGRKPKVKKATVMIVRSXKXS

SEQ ID NO: 70803 - protein, 29 aa, Artificial Sequence
  Cyclic GFR-binding peptide
  MOD_RES (1)..(2): Xaa is C or S
XXVPTELRPVQMRKIDEYDKVVKKATVEM

SEQ ID NO: 70804 - protein, 32 aa, Artificial Sequence; identical to SEQ ID NO: 19785
  Cyclic GFR-binding peptide
  MOD_RES (29)..(31): Xaa is C or S

SEQ ID NO: 70805 - protein, 33 aa, Artificial Sequence; identical to SEQ ID NO: 19787
  Cyclic GFR-binding peptide
  MOD_RES (1)..(33): Xaa is C or S

SEQ ID NO: 70806 - protein, 34 aa, Artificial Sequence; identical to SEQ ID NO: 19789
  Cyclic GFR-binding peptide
  MOD_RES (3)..(4): Xaa is C or S

SEQ ID NO: 70807 - protein, 36 aa, Artificial Sequence
  Cyclic GFR-binding peptide
  MOD_RES (4)..(5)..(36): Xaa is C or S
ASPXXVSQDLSNITIQIMIGKTPKIIGEMSMIVKSX

SEQ ID NO: 70808 - protein, 39 aa, Artificial Sequence
  Cyclic GFR-binding peptide
  MOD_RES (4)..(5)..(36)..(38): Xaa is C or S
ASPXXVPQDLSNITIQIMVGRTPKVIGEMSMVVKSXKXS

SEQ ID NO: 70809 - protein, 36 aa, Artificial Sequence; identical to SEQ ID NO: 19791
  Cyclic GFR-binding peptide
  MOD_RES (5)..(6): Xaa is C or S

SEQ ID NO: 70810 - protein, 36 aa, Artificial Sequence; identical to SEQ ID NO: 19794
  Cyclic GFR-binding peptide
  MOD_RES (2)..(3)..(35): Xaa is C or S

SEQ ID NO: 70811 - protein, 32 aa, Artificial Sequence
  Cyclic GFR-binding peptide
  MOD_RES (1)..(1): Xaa is C or S
XVPTELRSVKMAKVDENEKVVKEVQVDMVVEG

SEQ ID NO: 70812 - protein, 33 aa, Artificial Sequence
  Cyclic GFR-binding peptide
  MOD_RES (3)..(4): Xaa is C or S
KAXXVPTELRPVQMRKIDENEKVVKKATVDMVV

SEQ ID NO: 70813 - protein, 41 aa, Artificial Sequence; identical to SEQ ID NO: 19796
  Cyclic GFR-binding peptide
  MOD_RES (6)..(7)..(38)..(40): Xaa is C or S

SEQ ID NO: 70814 - protein, 27 aa, Artificial Sequence
  Cyclic GFR-binding peptide
TEERPVQMRKIRIKPHQGQHKKATVFL

SEQ ID NO: 70815 - protein, 30 aa, Artificial Sequence
  Cyclic GFR-binding peptide
  MOD_RES (3)..(3): Xaa is C or S
PTXAPTKLRPVQVRKIDDSSNVIKKATVNM

SEQ ID NO: 70816 - protein, 21 aa, Artificial Sequence
  Cyclic GFR-binding peptide
RSVKIAKVVGRKPKVKEVQVM

SEQ ID NO: 70817 - protein, 20 aa, Artificial Sequence
  Cyclic GFR-binding peptide
RSVKIAKVVGRTPKVKEVQV

SEQ ID NO: 70818 - protein, 28 aa, Artificial Sequence
  Cyclic GFR-binding peptide
VQLEPLPVVYYEIVRKKPIFEQLSNTLE

SEQ ID NO: 70819 - protein, 39 aa, Artificial Sequence; identical to SEQ ID NO: 19799
  Cyclic GFR-binding peptide
  MOD_RES (4)..(5)..(36)..(38): Xaa is C or S

SEQ ID NO: 70820 - protein, 34 aa, Artificial Sequence
  Cyclic GFR-binding peptide
  MOD_RES (4)..(5): Xaa is C or S
PKPXXAPTQLRPVQVRKIDDSSNVIKKATVNMVV

SEQ ID NO: 70821 - protein, 26 aa, Artificial Sequence
  Cyclic GFR-binding peptide
RSVKMAKVDENEKVVKEVQVDMVVEG

SEQ ID NO: 70822 - protein, 37 aa, Artificial Sequence; identical to SEQ ID NO: 19804
  Cyclic GFR-binding peptide
  MOD_RES (3)..(4)..(36): Xaa is C or S

SEQ ID NO: 70823 - protein, 25 aa, Artificial Sequence
  Cyclic GFR-binding peptide
QLSNITVQIMEIVRKKPIFIGEMST

SEQ ID NO: 70824 - protein, 37 aa, Artificial Sequence; identical to SEQ ID NO: 19805
  Cyclic GFR-binding peptide
  MOD_RES (6)..(7): Xaa is C or S

SEQ ID NO: 70825 - protein, 29 aa, Artificial Sequence
  Cyclic GFR-binding peptide
  MOD_RES (29)..(29): Xaa is C or S
QDLSNITIQIMVGRTPKVIGEMSMVVKSX

SEQ ID NO: 70826 - protein, 22 aa, Artificial Sequence
  Cyclic GFR-binding peptide
SNITIQIMIGKTPKIIGEMSMI

SEQ ID NO: 70827 - protein, 26 aa, Artificial Sequence
  Cyclic GFR-binding peptide
TKLEPLTVLYYDDSSNVIEQLSNNMV

SEQ ID NO: 70828 - protein, 34 aa, Artificial Sequence
  Cyclic GFR-binding peptide
  MOD_RES (5)..(6): Xaa is C or S
SASPXXVSQDLSNITIQIMIGKTPKIIGEMSMIV

SEQ ID NO: 70829 - protein, 36 aa, Artificial Sequence; identical to SEQ ID NO: 23899
  Cyclic GFR-binding peptide
  MOD_RES (4)..(4): Xaa is C or S

SEQ ID NO: 70830 - protein, 34 aa, Artificial Sequence
  Cyclic GFR-binding peptide
  MOD_RES (31)..(33): Xaa is C or S
VPQDLRPVQIRKIVGRTPKVKKATVMVVKSXKXS

SEQ ID NO: 70831 - protein, 27 aa, Artificial Sequence
  Cyclic GFR-binding peptide
ELRSVKMAKVDENEKVVKEVQVDMVVE

SEQ ID NO: 70832 - protein, 35 aa, Artificial Sequence
  Cyclic GFR-binding peptide
  MOD_RES (34)..(34): Xaa is C or S
RVHHEPLTVLYYEYVRKKPKLEQLSNRLEEHLEXA

SEQ ID NO: 70833 - protein, 39 aa, Artificial Sequence
  Cyclic GFR-binding peptide
  MOD_RES (2)..(39): Xaa is C or S
QXRPTQVQLEPLTVLYYEIVRKKPIFEQLSNTLEDHLAX

SEQ ID NO: 70834 - protein, 35 aa, Artificial Sequence
  Cyclic GFR-binding peptide
  MOD_RES (4)..(4): Xaa is C or S
SVKXQPSRVHHEPLPVVYYEYVRKKPKLEQLSNRL

SEQ ID NO: 70835 - protein, 38 aa, Artificial Sequence
  Cyclic GFR-binding peptide
  MOD_RES (3)..(35)..(37): Xaa is C or S
PTXAPTKLRPVQVRKIDDSSNVIKKATVNMVVRSXGXH

SEQ ID NO: 70836 - protein, 29 aa, Artificial Sequence
  Cyclic GFR-binding peptide
PTELRSVKMAKVDENEKVVKEVQVDMVVE

SEQ ID NO: 70837 - protein, 39 aa, Artificial Sequence; identical to SEQ ID NO: 19837
  Cyclic GFR-binding peptide
  MOD_RES (6)..(7)..(38): Xaa is C or S

SEQ ID NO: 70838 - protein, 28 aa, Artificial Sequence
  Cyclic GFR-binding peptide
  MOD_RES (28)..(28): Xaa is C or S
LRSVKMAKVDENEKVVKEVQVDMVVEGX

SEQ ID NO: 70839 - protein, 41 aa, Artificial Sequence; identical to SEQ ID NO: 23914
  Cyclic GFR-binding peptide
  MOD_RES (1)..(38)..(40): Xaa is C or S

SEQ ID NO: 70840 - protein, 39 aa, Artificial Sequence
  Cyclic GFR-binding peptide
  MOD_RES (4)..(4): Xaa is C or S
NVQXRPTQVQLEPLTVLYYEIVRKKPIFEQLSNTLEDHL

SEQ ID NO: 70841 - protein, 28 aa, Artificial Sequence
  Cyclic GFR-binding peptide
PTQVQLRSVKVAKVEIVRKKPIFKEVQV

SEQ ID NO: 70842 - protein, 29 aa, Artificial Sequence
  Cyclic GFR-binding peptide
VPQDLSNITIQIMVGRTPKVIGEMSMVVK

SEQ ID NO: 70843 - protein, 29 aa, Artificial Sequence
  Cyclic GFR-binding peptide
LRSVKVAKVEIVRKKPIFKEVQVTLEDHL

SEQ ID NO: 70844 - protein, 36 aa, Artificial Sequence
  Cyclic GFR-binding peptide
  MOD_RES (4)..(4): Xaa is C or S
NVQXRPTQVQLEPLPVVYYEIVRKKPIFEQLSNTLE

SEQ ID NO: 70845 - protein, 30 aa, Artificial Sequence; identical to SEQ ID NO: 19851
  Cyclic GFR-binding peptide
  MOD_RES (1)..(1): Xaa is C or S

SEQ ID NO: 70846 - protein, 32 aa, Artificial Sequence
  Cyclic GFR-binding peptide
  MOD_RES (30)..(32): Xaa is C or S
TKLSNITVQIMDDSSNVIIGEMSNMVVRSXGX

SEQ ID NO: 70847 - protein, 33 aa, Artificial Sequence
  Cyclic GFR-binding peptide
  MOD_RES (6)..(6): Xaa is C or S
DEGLEXVPTEEEPLTMLYYRIKPHQGQHEQLSN

SEQ ID NO: 70848 - protein, 20 aa, Artificial Sequence
  Cyclic GFR-binding peptide
RPVQMRKIDENEKVVKKATV

SEQ ID NO: 70849 - protein, 30 aa, Artificial Sequence
  Cyclic GFR-binding peptide
  MOD_RES (1)..(1): Xaa is C or S
XVPTELRSVKMAKVDENEKVVKEVQVDMVV

SEQ ID NO: 70850 - protein, 40 aa, Artificial Sequence; identical to SEQ ID NO: 23927
  Cyclic GFR-binding peptide
  MOD_RES (1)..(38)..(40): Xaa is C or S

SEQ ID NO: 70851 - protein, 35 aa, Artificial Sequence
  Cyclic GFR-binding peptide
  MOD_RES (4)..(5): Xaa is C or S
PKAXXVPTELRPVQMRKIDEYDKVVKKATVEMVVE

SEQ ID NO: 70852 - protein, 24 aa, Artificial Sequence
  Cyclic GFR-binding peptide
LSNITMQIMDENEKVVIGEMSDMV

SEQ ID NO: 70853 - protein, 37 aa, Artificial Sequence
  Cyclic GFR-binding peptide
  MOD_RES (5)..(6): Xaa is C or S
IPKAXXVPTELRPVQMRKIDEYDKVVKKATVEMVVEG

SEQ ID NO: 70854 - protein, 30 aa, Artificial Sequence
  Cyclic GFR-binding peptide
LEPLPVVYYEIVRKKPIFEQLSNTLEDHLA

SEQ ID NO: 70855 - protein, 35 aa, Artificial Sequence; identical to SEQ ID NO: 19869
  Cyclic GFR-binding peptide
  MOD_RES (3)..(4)..(35): Xaa is C or S

SEQ ID NO: 70856 - protein, 32 aa, Artificial Sequence; identical to SEQ ID NO: 19872
  Cyclic GFR-binding peptide
  MOD_RES (1)..(32): Xaa is C or S

SEQ ID NO: 70857 - protein, 34 aa, Artificial Sequence; identical to SEQ ID NO: 19873
  Cyclic GFR-binding peptide
  MOD_RES (4)..(5): Xaa is C or S

SEQ ID NO: 70858 - protein, 35 aa, Artificial Sequence; identical to SEQ ID NO: 23930
  Cyclic GFR-binding peptide
  MOD_RES (33)..(35): Xaa is C or S

SEQ ID NO: 70859 - protein, 31 aa, Artificial Sequence
  Cyclic GFR-binding peptide
  MOD_RES (1)..(2): Xaa is C or S
XXVPQDLRSVKIAKVVGRTPKVKEVQVMVVK

SEQ ID NO: 70860 - protein, 38 aa, Artificial Sequence; identical to SEQ ID NO: 23934
  Cyclic GFR-binding peptide
  MOD_RES (4)..(4): Xaa is C or S

SEQ ID NO: 70861 - protein, 33 aa, Artificial Sequence
  Cyclic GFR-binding peptide
  MOD_RES (4)..(5): Xaa is C or S
ASPXXVPQDLSNITIQIMVGRTPKVIGEMSMVV

SEQ ID NO: 70862 - protein, 31 aa, Artificial Sequence; identical to SEQ ID NO: 19881
  Cyclic GFR-binding peptide
  MOD_RES (31)..(31): Xaa is C or S

SEQ ID NO: 70863 - protein, 40 aa, Artificial Sequence; identical to SEQ ID NO: 19883
  Cyclic GFR-binding peptide
  MOD_RES (4)..(5)..(37)..(39): Xaa is C or S

SEQ ID NO: 70864 - protein, 40 aa, Artificial Sequence; identical to SEQ ID NO: 23937
  Cyclic GFR-binding peptide
  MOD_RES (3)..(37)..(39): Xaa is C or S

SEQ ID NO: 70865 - protein, 32 aa, Artificial Sequence; identical to SEQ ID NO: 23938
  Cyclic GFR-binding peptide
  MOD_RES (30)..(32): Xaa is C or S

SEQ ID NO: 70866 - protein, 27 aa, Artificial Sequence
  Cyclic GFR-binding peptide
EERPVQMRKIRIKPHQGQHKKATVFLQ

SEQ ID NO: 70867 - protein, 24 aa, Artificial Sequence
  Cyclic GFR-binding peptide
DLRSVKIAKVIGKTPKIKEVQVMI

SEQ ID NO: 70868 - protein, 36 aa, Artificial Sequence; identical to SEQ ID NO: 23944
  Cyclic GFR-binding peptide
  MOD_RES (36)..(36): Xaa is C or S

SEQ ID NO: 70869 - protein, 39 aa, Artificial Sequence; identical to SEQ ID NO: 23946
  Cyclic GFR-binding peptide
  MOD_RES (36)..(38): Xaa is C or S

SEQ ID NO: 70870 - protein, 36 aa, Artificial Sequence
  Cyclic GFR-binding peptide
  MOD_RES (2)..(3)..(34)..(36): Xaa is C or S
PXXVSQDLSNITIQIMIGKTPKIIGEMSMIVKSXKX

SEQ ID NO: 70871 - protein, 34 aa, Artificial Sequence
  Cyclic GFR-binding peptide
  MOD_RES (31)..(33): Xaa is C or S
PTELRSVKMAKVDENEKVVKEVQVDMVVEGXGXR

SEQ ID NO: 70872 - protein, 33 aa, Artificial Sequence
  Cyclic GFR-binding peptide
  MOD_RES (2)..(3): Xaa is C or S
PXXVPQALSNITIQIMVGRKPKVIGEMSMIVRS

SEQ ID NO: 70873 - protein, 33 aa, Artificial Sequence
  Cyclic GFR-binding peptide
  MOD_RES (4)..(5): Xaa is C or S
ASPXXVPQDLRSVKIAKVVGRTPKVKEVQVMVV

SEQ ID NO: 70874 - protein, 26 aa, Artificial Sequence
  Cyclic GFR-binding peptide
PQDLRPVQIRKIVGRTPKVKKATVMV

SEQ ID NO: 70875 - protein, 29 aa, Artificial Sequence
  Cyclic GFR-binding peptide
  MOD_RES (3)..(4): Xaa is C or S
KAXXVPTELRSVKMAKVDEYDKVVKEVQV

SEQ ID NO: 70876 - protein, 34 aa, Artificial Sequence; identical to SEQ ID NO: 23952
  Cyclic GFR-binding peptide
  MOD_RES (3)..(3): Xaa is C or S

SEQ ID NO: 70877 - protein, 32 aa, Artificial Sequence
  Cyclic GFR-binding peptide
  MOD_RES (6)..(7): Xaa is C or S
ASASPXXVSQDLRSVKIAKVIGKTPKIKEVQV

SEQ ID NO: 70878 - protein, 32 aa, Artificial Sequence
  Cyclic GFR-binding peptide
  MOD_RES (1)..(2): Xaa is C or S
XXAPTKLRPVQVRKIDDSSNVIKKATVNMVVR

SEQ ID NO: 70879 - protein, 23 aa, Artificial Sequence
  Cyclic GFR-binding peptide
RPVQIRKIVGRKPKVKKATVMIV

SEQ ID NO: 70880 - protein, 26 aa, Artificial Sequence
  Cyclic GFR-binding peptide
DLRPVQIRKIIGKTPKIKKATVMIVK

SEQ ID NO: 70881 - protein, 25 aa, Artificial Sequence
  Cyclic GFR-binding peptide
EEEPLTMLYYRIKPHQGQHEQLSNF

SEQ ID NO: 70882 - protein, 34 aa, Artificial Sequence; identical to SEQ ID NO: 19907
  Cyclic GFR-binding peptide
  MOD_RES (6)..(7): Xaa is C or S

SEQ ID NO: 70883 - protein, 28 aa, Artificial Sequence
  Cyclic GFR-binding peptide
  MOD_RES (1)..(1): Xaa is C or S
XVPTELEPLPMVYYDENEKVVEQLSNDM

SEQ ID NO: 70884 - protein, 25 aa, Artificial Sequence
  Cyclic GFR-binding peptide
ERPVQMRKIRIKPHQGQHKKATVFL

SEQ ID NO: 70885 - protein, 34 aa, Artificial Sequence
  Cyclic GFR-binding peptide
  MOD_RES (34)..(34): Xaa is C or S
VPTEEEPLPMVYYRIKPHQGQHEQLSNFLQHNKX

SEQ ID NO: 70886 - protein, 32 aa, Artificial Sequence; identical to SEQ ID NO: 19919
  Cyclic GFR-binding peptide
  MOD_RES (30)..(32): Xaa is C or S

SEQ ID NO: 70887 - protein, 33 aa, Artificial Sequence
  Cyclic GFR-binding peptide
  MOD_RES (31)..(33): Xaa is C or S
PTKLSNITVQIMDDSSNVIIGEMSNMVVRSXGX

SEQ ID NO: 70888 - protein, 26 aa, Artificial Sequence
  Cyclic GFR-binding peptide
TEERSVKMAKVRIKPHQGQHKEVQVF

SEQ ID NO: 70889 - protein, 29 aa, Artificial Sequence
  Cyclic GFR-binding peptide
VHHEPLPVVYYEYVRKKPKLEQLSNRLEE

SEQ ID NO: 70890 - protein, 31 aa, Artificial Sequence
  Cyclic GFR-binding peptide
  MOD_RES (29)..(31): Xaa is C or S
KLRSVKVAKVDDSSNVIKEVQVNMVVRSXGX

SEQ ID NO: 70891 - protein, 34 aa, Artificial Sequence
  Cyclic GFR-binding peptide
  MOD_RES (7)..(7): Xaa is C or S
HVTKPTXAPTKLSNITVQIMDDSSNVIIGEMSNM

SEQ ID NO: 70892 - protein, 29 aa, Artificial Sequence
  Cyclic GFR-binding peptide
  MOD_RES (2)..(3): Xaa is C or S
PXXVSQDLRSVKIAKVIGKTPKIKEVQVM

SEQ ID NO: 70893 - protein, 27 aa, Artificial Sequence
  Cyclic GFR-binding peptide
APTKLEPLPVVYYDDSSNVIEQLSNNM

SEQ ID NO: 70894 - protein, 25 aa, Artificial Sequence
  Cyclic GFR-binding peptide
RPVQVRKIEYVRKKPKLKKATVRLE

SEQ ID NO: 70895 - protein, 40 aa, Artificial Sequence
  Cyclic GFR-binding peptide
  MOD_RES (4)..(38)..(40): Xaa is C or S
GLEXVPTEEEPLPMVYYRIKPHQGQHEQLSNFLQHNKXEX

SEQ ID NO: 70896 - protein, 32 aa, Artificial Sequence
  Cyclic GFR-binding peptide
  MOD_RES (3)..(3): Xaa is C or S
VQXRPTQVQLEPLPVVYYEIVRKKPIFEQLSN

SEQ ID NO: 70897 - protein, 38 aa, Artificial Sequence; identical to SEQ ID NO: 23982
  Cyclic GFR-binding peptide
  MOD_RES (35)..(37): Xaa is C or S

SEQ ID NO: 70898 - protein, 37 aa, Artificial Sequence
  Cyclic GFR-binding peptide
  MOD_RES (7)..(7): Xaa is C or S
NDEGLEXVPTEEEPLTMLYYRIKPHQGQHEQLSNFLQ

SEQ ID NO: 70899 - protein, 39 aa, Artificial Sequence; identical to SEQ ID NO: 19935
  Cyclic GFR-binding peptide
  MOD_RES (6)..(7)..(39): Xaa is C or S

SEQ ID NO: 70900 - protein, 23 aa, Artificial Sequence
  Cyclic GFR-binding peptide
LSNITIQIMVGRKPKVIGEMSMI

SEQ ID NO: 70901 - protein, 32 aa, Artificial Sequence
  Cyclic GFR-binding peptide
  MOD_RES (3)..(4): Xaa is C or S
SPXXVSQDLSNITIQIMIGKTPKIIGEMSMIV

SEQ ID NO: 70902 - protein, 37 aa, Artificial Sequence
  Cyclic GFR-binding peptide
  MOD_RES (2)..(2): Xaa is C or S
KXQPSRVHHEPLPVVYYEYVRKKPKLEQLSNRLEEHL

SEQ ID NO: 70903 - protein, 32 aa, Artificial Sequence
  Cyclic GFR-binding peptide
  MOD_RES (5)..(6): Xaa is C or S
SASPXXVSQDLRPVQIRKIIGKTPKIKKATVM

SEQ ID NO: 70904 - protein, 40 aa, Artificial Sequence
  Cyclic GFR-binding peptide
  MOD_RES (6)..(7)..(39): Xaa is C or S
TVPKPXXAPTQLSNITVQIMDDSSNVIIGEMSNMVVRAXG

SEQ ID NO: 70905 - protein, 34 aa, Artificial Sequence
  Cyclic GFR-binding peptide
  MOD_RES (5)..(6): Xaa is C or S
IPKAXXVPTELRPVQMRKIDEYDKVVKKATVEMV

SEQ ID NO: 70906 - protein, 36 aa, Artificial Sequence
  Cyclic GFR-binding peptide
  MOD_RES (5)..(6): Xaa is C or S
SASPXXVPQDLRPVQIRKIVGRTPKVKKATVMVVKS

SEQ ID NO: 70907 - protein, 26 aa, Artificial Sequence
  Cyclic GFR-binding peptide
SQDLRPVQIRKIIGKTPKIKKATVMI

SEQ ID NO: 70908 - protein, 29 aa, Artificial Sequence
  Cyclic GFR-binding peptide
  MOD_RES (1)..(1): Xaa is C or S
XVSQDLRPVQIRKIIGKTPKIKKATVMIV

SEQ ID NO: 70909 - protein, 26 aa, Artificial Sequence
  Cyclic GFR-binding peptide
VPQALRPVQIRKIVGRKPKVKKATVM

SEQ ID NO: 70910 - protein, 27 aa, Artificial Sequence
  Cyclic GFR-binding peptide
EPLTMLYYRIKPHQGQHEQLSNFLQHN

SEQ ID NO: 70911 - protein, 34 aa, Artificial Sequence
  Cyclic GFR-binding peptide
  MOD_RES (1)..(32)..(34): Xaa is C or S
XVPQDLRSVKIAKVVGRTPKVKEVQVMVVKSXKX

SEQ ID NO: 70912 - protein, 37 aa, Artificial Sequence
  Cyclic GFR-binding peptide
  MOD_RES (3)..(4)..(36): Xaa is C or S
KAXXVPTELSNITMQIMDEYDKVVIGEMSEMVVEGXG

SEQ ID NO: 70913 - protein, 38 aa, Artificial Sequence; identical to SEQ ID NO: 23998
  Cyclic GFR-binding peptide
  MOD_RES (2)..(2): Xaa is C or S

SEQ ID NO: 70914 - protein, 30 aa, Artificial Sequence
  Cyclic GFR-binding peptide
  MOD_RES (28)..(30): Xaa is C or S
DLRPVQIRKIVGRTPKVKKATVMVVKSXKX

SEQ ID NO: 70915 - protein, 23 aa, Artificial Sequence
  Cyclic GFR-binding peptide
TELRPVQMRKIDENEKVVKKATV

SEQ ID NO: 70916 - protein, 30 aa, Artificial Sequence
  Cyclic GFR-binding peptide
  MOD_RES (30)..(30): Xaa is C or S
PQALSNITIQIMVGRKPKVIGEMSMIVRSX

SEQ ID NO: 70917 - protein, 24 aa, Artificial Sequence
  Cyclic GFR-binding peptide
QDLRPVQIRKIVGRTPKVKKATVM

SEQ ID NO: 70918 - protein, 38 aa, Artificial Sequence
  Cyclic GFR-binding peptide
  MOD_RES (5)..(6)..(37): Xaa is C or S
SASPXXVPQDLRPVQIRKIVGRTPKVKKATVMVVKSXK

SEQ ID NO: 70919 - protein, 38 aa, Artificial Sequence
  Cyclic GFR-binding peptide
  MOD_RES (5)..(6)..(37): Xaa is C or S
SASPXXVSQDLRPVQIRKIIGKTPKIKKATVMIVKSXK

SEQ ID NO: 70920 - protein, 24 aa, Artificial Sequence
  Cyclic GFR-binding peptide
ERPVQMRKIRIKPHQGQHKKATVF

SEQ ID NO: 70921 - protein, 33 aa, Artificial Sequence
  Cyclic GFR-binding peptide
QVQLEPLPVVYYEIVRKKPIFEQLSNTLEDHLA

SEQ ID NO: 70922 - protein, 39 aa, Artificial Sequence
  Cyclic GFR-binding peptide
  MOD_RES (5)..(6)..(37)..(39): Xaa is C or S
SAAPXXVPQALSNITIQIMVGRKPKVIGEMSMIVRSXKX

SEQ ID NO: 70923 - protein, 30 aa, Artificial Sequence; identical to SEQ ID NO: 19973
  Cyclic GFR-binding peptide

SEQ ID NO: 70924 - protein, 33 aa, Artificial Sequence; identical to SEQ ID NO: 24020
  Cyclic GFR-binding peptide

SEQ ID NO: 70925 - protein, 34 aa, Artificial Sequence
  Cyclic GFR-binding peptide
SRVHHEPLPVVYYEYVRKKPKLEQLSNRLEEHLE

SEQ ID NO: 70926 - protein, 29 aa, Artificial Sequence
  Cyclic GFR-binding peptide
  MOD_RES (1)..(2): Xaa is C or S
XXVPTELEPLPMVYYDENEKVVEQLSNDM

SEQ ID NO: 70927 - protein, 39 aa, Artificial Sequence; identical to SEQ ID NO: 24023
  Cyclic GFR-binding peptide
  MOD_RES (6)..(6): Xaa is C or S

SEQ ID NO: 70928 - protein, 28 aa, Artificial Sequence
  Cyclic GFR-binding peptide
  MOD_RES (1)..(1): Xaa is C or S
XVPTELRPVQMRKIDEYDKVVKKATVEM

SEQ ID NO: 70929 - protein, 42 aa, Artificial Sequence
  Cyclic GFR-binding peptide
  MOD_RES (6)..(7)..(39)..(41): Xaa is C or S
YVPKPXXAPTKLRPVQVRKIDDSSNVIKKATVNMVVRSXGXH

SEQ ID NO: 70930 - protein, 38 aa, Artificial Sequence
  Cyclic GFR-binding peptide
  MOD_RES (5)..(6)..(38): Xaa is C or S
VPKPXXAPTKLSNITVQIMDDSSNVIIGEMSNMVVRSX

SEQ ID NO: 70931 - protein, 39 aa, Artificial Sequence; identical to SEQ ID NO: 19979
  Cyclic GFR-binding peptide
  MOD_RES (7)..(39): Xaa is C or S

SEQ ID NO: 70932 - protein, 36 aa, Artificial Sequence
  Cyclic GFR-binding peptide
  MOD_RES (5)..(6): Xaa is C or S
SAAPXXVPQALRPVQIRKIVGRKPKVKKATVMIVRS

SEQ ID NO: 70933 - protein, 29 aa, Artificial Sequence
  Cyclic GFR-binding peptide
  MOD_RES (27)..(29): Xaa is C or S
LSNITIQIMIGKTPKIIGEMSMIVKSXKX

SEQ ID NO: 70934 - protein, 37 aa, Artificial Sequence
  Cyclic GFR-binding peptide
  MOD_RES (5)..(6)..(37): Xaa is C or S
SAAPXXVPQALRPVQIRKIVGRKPKVKKATVMIVRSX

SEQ ID NO: 70935 - protein, 32 aa, Artificial Sequence; identical to SEQ ID NO: 19985
  Cyclic GFR-binding peptide
  MOD_RES (31)..(31): Xaa is C or S

SEQ ID NO: 70936 - protein, 32 aa, Artificial Sequence; identical to SEQ ID NO: 19986
  Cyclic GFR-binding peptide
  MOD_RES (32)..(32): Xaa is C or S

SEQ ID NO: 70937 - protein, 36 aa, Artificial Sequence
  Cyclic GFR-binding peptide
  MOD_RES (2)..(3)..(35): Xaa is C or S
AXXVPTELSNITMQIMDENEKVVIGEMSDMVVEGXG

SEQ ID NO: 70938 - protein, 31 aa, Artificial Sequence; identical to SEQ ID NO: 19989
  Cyclic GFR-binding peptide
  MOD_RES (4)..(4): Xaa is C or S

SEQ ID NO: 70939 - protein, 38 aa, Artificial Sequence
  Cyclic GFR-binding peptide
  MOD_RES (5)..(5): Xaa is C or S
RNVQXRPTQVQLEPLPVVYYEIVRKKPIFEQLSNTLED

SEQ ID NO: 70940 - protein, 39 aa, Artificial Sequence
  Cyclic GFR-binding peptide
  MOD_RES (6)..(7)..(39): Xaa is C or S
KIPKAXXVPTELRPVQMRKIDENEKVVKKATVDMVVEGX

SEQ ID NO: 70941 - protein, 26 aa, Artificial Sequence
  Cyclic GFR-binding peptide
  MOD_RES (1)..(1): Xaa is C or S
XVPQALSNITIQIMVGRKPKVIGEMS

SEQ ID NO: 70942 - protein, 33 aa, Artificial Sequence
  Cyclic GFR-binding peptide
  MOD_RES (6)..(7): Xaa is C or S
ASASPXXVPQDLSNITIQIMVGRTPKVIGEMSM

SEQ ID NO: 70943 - protein, 28 aa, Artificial Sequence
  Cyclic GFR-binding peptide
PQALSNITIQIMVGRKPKVIGEMSMIVR

SEQ ID NO: 70944 - protein, 38 aa, Artificial Sequence
  Cyclic GFR-binding peptide
  MOD_RES (6)..(7): Xaa is C or S
YVPKPXXAPTKLSNITVQIMDDSSNVIIGEMSNMVVRS

SEQ ID NO: 70945 - protein, 38 aa, Artificial Sequence
  Cyclic GFR-binding peptide
  MOD_RES (4)..(36)..(38): Xaa is C or S
KPTXAPTKLRPVQVRKIDDSSNVIKKATVNMVVRSXGX

SEQ ID NO: 70946 - protein, 33 aa, Artificial Sequence
  Cyclic GFR-binding peptide
  MOD_RES (32)..(32): Xaa is C or S
VPTELRSVKMAKVDEYDKVVKEVQVEMVVEGXG

SEQ ID NO: 70947 - protein, 29 aa, Artificial Sequence
  Cyclic GFR-binding peptide
EEEPLPMVYYRIKPHQGQHEQLSNFLQHN

SEQ ID NO: 70948 - protein, 32 aa, Artificial Sequence; identical to SEQ ID NO: 20003
  Cyclic GFR-binding peptide
  MOD_RES (3)..(4): Xaa is C or S

SEQ ID NO: 70949 - protein, 22 aa, Artificial Sequence
  Cyclic GFR-binding peptide
RSVKVAKVEIVRKKPIFKEVQV

SEQ ID NO: 70950 - protein, 29 aa, Artificial Sequence
  Cyclic GFR-binding peptide
  MOD_RES (29)..(29): Xaa is C or S
QALEPLTILYYVGRKPKVEQLSNMIVRSX

SEQ ID NO: 70951 - protein, 37 aa, Artificial Sequence
  Cyclic GFR-binding peptide
  MOD_RES (1)..(2)..(34)..(36): Xaa is C or S
XXAPTKLSNITVQIMDDSSNVIIGEMSNMVVRSXGXH

SEQ ID NO: 70952 - protein, 27 aa, Artificial Sequence
  Cyclic GFR-binding peptide
APTQLEPLTVLYYDDSSNVIEQLSNNM

SEQ ID NO: 70953 - protein, 32 aa, Artificial Sequence
  Cyclic GFR-binding peptide
  MOD_RES (6)..(6): Xaa is C or S
VTKPTXAPTKLRPVQVRKIDDSSNVIKKATVN

SEQ ID NO: 70954 - protein, 30 aa, Artificial Sequence; identical to SEQ ID NO: 20013
  Cyclic GFR-binding peptide
  MOD_RES (4)..(5): Xaa is C or S

SEQ ID NO: 70955 - protein, 33 aa, Artificial Sequence; identical to SEQ ID NO: 24047
  Cyclic GFR-binding peptide
  MOD_RES (1)..(1): Xaa is C or S

SEQ ID NO: 70956 - protein, 25 aa, Artificial Sequence
  Cyclic GFR-binding peptide
VPTELSNITMQIMDEYDKVVIGEMS

SEQ ID NO: 70957 - protein, 38 aa, Artificial Sequence; identical to SEQ ID NO: 20014
  Cyclic GFR-binding peptide
  MOD_RES (3)..(4)..(36)..(38): Xaa is C or S

SEQ ID NO: 70958 - protein, 24 aa, Artificial Sequence
  Cyclic GFR-binding peptide
LRSVKMAKVDENEKVVKEVQVDMV

SEQ ID NO: 70959 - protein, 28 aa, Artificial Sequence
  Cyclic GFR-binding peptide
  MOD_RES (26)..(28): Xaa is C or S
RPVQIRKIIGKTPKIKKATVMIVKSXKX

SEQ ID NO: 70960 - protein, 26 aa, Artificial Sequence
  Cyclic GFR-binding peptide
VSQDLEPLPIVYYIGKTPKIEQLSNM

SEQ ID NO: 70961 - protein, 32 aa, Artificial Sequence; identical to SEQ ID NO: 20019
  Cyclic GFR-binding peptide
  MOD_RES (1)..(1): Xaa is C or S

SEQ ID NO: 70962 - protein, 26 aa, Artificial Sequence
  Cyclic GFR-binding peptide
TELSNITMQIMDENEKVVIGEMSDMV

SEQ ID NO: 70963 - protein, 30 aa, Artificial Sequence
  Cyclic GFR-binding peptide
  MOD_RES (30)..(30): Xaa is C or S
PQDLRPVQIRKIVGRTPKVKKATVMVVKSX

SEQ ID NO: 70964 - protein, 34 aa, Artificial Sequence; identical to SEQ ID NO: 24055
  Cyclic GFR-binding peptide
  MOD_RES (5)..(5): Xaa is C or S

SEQ ID NO: 70965 - protein, 30 aa, Artificial Sequence; identical to SEQ ID NO: 24056
  Cyclic GFR-binding peptide

SEQ ID NO: 70966 - protein, 35 aa, Artificial Sequence
  Cyclic GFR-binding peptide
  MOD_RES (2)..(3)..(34): Xaa is C or S
PXXVPQALSNITIQIMVGRKPKVIGEMSMIVRSXK

SEQ ID NO: 70967 - protein, 33 aa, Artificial Sequence
  Cyclic GFR-binding peptide
  MOD_RES (3)..(4): Xaa is C or S
KPXXAPTQLRPVQVRKIDDSSNVIKKATVNMVV

SEQ ID NO: 70968 - protein, 45 aa, Artificial Sequence
  Cyclic GFR-binding peptide
  MOD_RES (5)..(42)..(44): Xaa is C or S
RNVQXRPTQVQLEPLTVLYYEIVRKKPIFEQLSNTLEDHLAXKXE

SEQ ID NO: 70969 - protein, 30 aa, Artificial Sequence
  Cyclic GFR-binding peptide
  MOD_RES (1)..(2): Xaa is C or S
XXVPQALRSVKIAKVVGRKPKVKEVQVMIV

SEQ ID NO: 70970 - protein, 24 aa, Artificial Sequence
  Cyclic GFR-binding peptide
ALSNITIQIMVGRKPKVIGEMSMI

SEQ ID NO: 70971 - protein, 33 aa, Artificial Sequence; identical to SEQ ID NO: 20032
  Cyclic GFR-binding peptide
  MOD_RES (2)..(3): Xaa is C or S

SEQ ID NO: 70972 - protein, 31 aa, Artificial Sequence
  Cyclic GFR-binding peptide
  MOD_RES (1)..(1): Xaa is C or S
XAPTQLRPVQVRKIDDSSNVIKKATVNMVVR

SEQ ID NO: 70973 - protein, 28 aa, Artificial Sequence
  Cyclic GFR-binding peptide
  MOD_RES (1)..(2): Xaa is C or S
XXAPTKLEPLTVLYYDDSSNVIEQLSNN

SEQ ID NO: 70974 - protein, 33 aa, Artificial Sequence; identical to SEQ ID NO: 24067
  Cyclic GFR-binding peptide
  MOD_RES (31)..(33): Xaa is C or S

SEQ ID NO: 70975 - protein, 29 aa, Artificial Sequence
  Cyclic GFR-binding peptide
  MOD_RES (26)..(28): Xaa is C or S
EPLPIVYYIGKTPKIEQLSNMIVKSXKXS

SEQ ID NO: 70976 - protein, 26 aa, Artificial Sequence
  Cyclic GFR-binding peptide
  MOD_RES (1)..(1): Xaa is C or S
XVPTELRPVQMRKIDEYDKVVKKATV

SEQ ID NO: 70977 - protein, 28 aa, Artificial Sequence
  Cyclic GFR-binding peptide
  MOD_RES (1)..(2): Xaa is C or S
XXVPTELEPLTMLYYDEYDKVVEQLSNE

SEQ ID NO: 70978 - protein, 35 aa, Artificial Sequence
  Cyclic GFR-binding peptide
PSRVHHEPLPVVYYEYVRKKPKLEQLSNRLEEHLE

SEQ ID NO: 70979 - protein, 32 aa, Artificial Sequence
  Cyclic GFR-binding peptide
  MOD_RES (3)..(4): Xaa is C or S
SPXXVSQDLRSVKIAKVIGKTPKIKEVQVMIV

SEQ ID NO: 70980 - protein, 29 aa, Artificial Sequence
  Cyclic GFR-binding peptide
  MOD_RES (3)..(3): Xaa is C or S
PTXAPTKLEPLTVLYYDDSSNVIEQLSNN

SEQ ID NO: 70981 - protein, 33 aa, Artificial Sequence; identical to SEQ ID NO: 20050
  Cyclic GFR-binding peptide
  MOD_RES (3)..(4): Xaa is C or S

SEQ ID NO: 70982 - protein, 24 aa, Artificial Sequence
  Cyclic GFR-binding peptide
ELRPVQMRKIDENEKVVKKATVDM

SEQ ID NO: 70983 - protein, 38 aa, Artificial Sequence
  Cyclic GFR-binding peptide
  MOD_RES (6)..(7): Xaa is C or S
SIPKAXXVPTELSNITMQIMDEYDKVVIGEMSEMVVEG

SEQ ID NO: 70984 - protein, 27 aa, Artificial Sequence
  Cyclic GFR-binding peptide
VPTELRSVKMAKVDENEKVVKEVQVDM

SEQ ID NO: 70985 - protein, 35 aa, Artificial Sequence
  Cyclic GFR-binding peptide
  MOD_RES (2)..(3)..(35): Xaa is C or S
AXXVPTELRSVKMAKVDEYDKVVKEVQVEMVVEGX

SEQ ID NO: 70986 - protein, 41 aa, Artificial Sequence
  Cyclic GFR-binding peptide
  MOD_RES (7)..(39)..(41): Xaa is C or S
HVTKPTXAPTKLRSVKVAKVDDSSNVIKEVQVNMVVRSXGX

SEQ ID NO: 70987 - protein, 31 aa, Artificial Sequence; identical to SEQ ID NO: 20054
  Cyclic GFR-binding peptide
  MOD_RES (28)..(30): Xaa is C or S

SEQ ID NO: 70988 - protein, 38 aa, Artificial Sequence; identical to SEQ ID NO: 20057
  Cyclic GFR-binding peptide
  MOD_RES (5)..(37): Xaa is C or S

SEQ ID NO: 70989 - protein, 39 aa, Artificial Sequence
  Cyclic GFR-binding peptide
  MOD_RES (6)..(7)..(38): Xaa is C or S
ASAAPXXVPQALRSVKIAKVVGRKPKVKEVQVMIVRSXK

SEQ ID NO: 70990 - protein, 34 aa, Artificial Sequence
  Cyclic GFR-binding peptide
  MOD_RES (1)..(33): Xaa is C or S
XAPTKLRSVKVAKVDDSSNVIKEVQVNMVVRSXG

SEQ ID NO: 70991 - protein, 37 aa, Artificial Sequence
  Cyclic GFR-binding peptide
  MOD_RES (2)..(3)..(34)..(36): Xaa is C or S
PXXVPQALRSVKIAKVVGRKPKVKEVQVMIVRSXKXS

SEQ ID NO: 70992 - protein, 29 aa, Artificial Sequence
  Cyclic GFR-binding peptide
  MOD_RES (26)..(28): Xaa is C or S
SNITIQIMIGKTPKIIGEMSMIVKSXKXS

SEQ ID NO: 70993 - protein, 38 aa, Artificial Sequence; identical to SEQ ID NO: 20069
  Cyclic GFR-binding peptide
  MOD_RES (4)..(5)..(37): Xaa is C or S

SEQ ID NO: 70994 - protein, 34 aa, Artificial Sequence
  Cyclic GFR-binding peptide
  MOD_RES (1)..(1): Xaa is C or S
XRPTQVQLEPLTVLYYEIVRKKPIFEQLSNTLED

SEQ ID NO: 70995 - protein, 29 aa, Artificial Sequence
  Cyclic GFR-binding peptide
VPTEEEPLPMVYYRIKPHQGQHEQLSNFL

SEQ ID NO: 70996 - protein, 37 aa, Artificial Sequence
  Cyclic GFR-binding peptide
  MOD_RES (6)..(7): Xaa is C or S
SIPKAXXVPTELRSVKMAKVDEYDKVVKEVQVEMVVE

SEQ ID NO: 70997 - protein, 27 aa, Artificial Sequence
  Cyclic GFR-binding peptide
TQLSNITVQIMDDSSNVIIGEMSNMVV

SEQ ID NO: 70998 - protein, 30 aa, Artificial Sequence; identical to SEQ ID NO: 24089
  Cyclic GFR-binding peptide
  MOD_RES (1)..(1): Xaa is C or S

SEQ ID NO: 70999 - protein, 35 aa, Artificial Sequence
  Cyclic GFR-binding peptide
  MOD_RES (1)..(33)..(35): Xaa is C or S
XVPTELRSVKMAKVDEYDKVVKEVQVEMVVEGXGX

SEQ ID NO: 71000 - protein, 33 aa, Artificial Sequence
  Cyclic GFR-binding peptide
RVHHEPLTVLYYEYVRKKPKLEQLSNRLEEHLE

SEQ ID NO: 71001 - protein, 26 aa, Artificial Sequence
  Cyclic GFR-binding peptide
QDLRPVQIRKIIGKTPKIKKATVMIV

SEQ ID NO: 71002 - protein, 38 aa, Artificial Sequence; identical to SEQ ID NO: 20078
  Cyclic GFR-binding peptide
  MOD_RES (7)..(7): Xaa is C or S

SEQ ID NO: 71003 - protein, 35 aa, Artificial Sequence
  Cyclic GFR-binding peptide
  MOD_RES (4)..(4): Xaa is C or S
SVKXQPSRVHHEPLTVLYYEYVRKKPKLEQLSNRL

SEQ ID NO: 71004 - protein, 35 aa, Artificial Sequence; identical to SEQ ID NO: 20082
  Cyclic GFR-binding peptide
  MOD_RES (3)..(4): Xaa is C or S

SEQ ID NO: 71005 - protein, 37 aa, Artificial Sequence
  Cyclic GFR-binding peptide
  MOD_RES (35)..(37): Xaa is C or S
TQVQLEPLPVVYYEIVRKKPIFEQLSNTLEDHLAXKX

SEQ ID NO: 71006 - protein, 37 aa, Artificial Sequence; identical to SEQ ID NO: 24094
  Cyclic GFR-binding peptide
  MOD_RES (6)..(6): Xaa is C or S

SEQ ID NO: 71007 - protein, 36 aa, Artificial Sequence; identical to SEQ ID NO: 24095
  Cyclic GFR-binding peptide
  MOD_RES (4)..(4): Xaa is C or S

SEQ ID NO: 71008 - protein, 36 aa, Artificial Sequence
  Cyclic GFR-binding peptide
  MOD_RES (2)..(3)..(34)..(36): Xaa is C or S
PXXVPQDLRSVKIAKVVGRTPKVKEVQVMVVKSXKX

SEQ ID NO: 71009 - protein, 34 aa, Artificial Sequence
  Cyclic GFR-binding peptide
  MOD_RES (32)..(34): Xaa is C or S
VPTELRPVQMRKIDEYDKVVKKATVEMVVEGXGX

SEQ ID NO: 71010 - protein, 35 aa, Artificial Sequence; identical to SEQ ID NO: 20086
  Cyclic GFR-binding peptide
  MOD_RES (2)..(3)..(34): Xaa is C or S

SEQ ID NO: 71011 - protein, 31 aa, Artificial Sequence; identical to SEQ ID NO: 20090
  Cyclic GFR-binding peptide
  MOD_RES (4)..(5): Xaa is C or S

SEQ ID NO: 71012 - protein, 28 aa, Artificial Sequence
  Cyclic GFR-binding peptide
  MOD_RES (28)..(28): Xaa is C or S
DLRSVKIAKVIGKTPKIKEVQVMIVKSX

SEQ ID NO: 71013 - protein, 36 aa, Artificial Sequence
  Cyclic GFR-binding peptide
  MOD_RES (6)..(7): Xaa is C or S
KIPKAXXVPTELRPVQMRKIDENEKVVKKATVDMVV

SEQ ID NO: 71014 - protein, 31 aa, Artificial Sequence
  Cyclic GFR-binding peptide
  MOD_RES (29)..(31): Xaa is C or S
QLRSVKVAKVDDSSNVIKEVQVNMVVRAXGX

SEQ ID NO: 71015 - protein, 35 aa, Artificial Sequence
  Cyclic GFR-binding peptide
  MOD_RES (3)..(4)..(35): Xaa is C or S
SPXXVPQDLRPVQIRKIVGRTPKVKKATVMVVKSX

SEQ ID NO: 71016 - protein, 31 aa, Artificial Sequence
  Cyclic GFR-binding peptide
  MOD_RES (4)..(4): Xaa is C or S
KPTXAPTKLSNITVQIMDDSSNVIIGEMSNM

SEQ ID NO: 71017 - protein, 40 aa, Artificial Sequence
  Cyclic GFR-binding peptide
  MOD_RES (4)..(5)..(37)..(39): Xaa is C or S
PKPXXAPTKLRPVQVRKIDDSSNVIKKATVNMVVRSXGXH

SEQ ID NO: 71018 - protein, 35 aa, Artificial Sequence; identical to SEQ ID NO: 20101
  Cyclic GFR-binding peptide
  MOD_RES (2)..(3)..(34): Xaa is C or S

SEQ ID NO: 71019 - protein, 33 aa, Artificial Sequence
  Cyclic GFR-binding peptide
  MOD_RES (3)..(4): Xaa is C or S
KPXXAPTKLRSVKVAKVDDSSNVIKEVQVNMVV

SEQ ID NO: 71020 - protein, 25 aa, Artificial Sequence
  Cyclic GFR-binding peptide
TEERPVQMRKIRIKPHQGQHKKATV

SEQ ID NO: 71021 - protein, 25 aa, Artificial Sequence
  Cyclic GFR-binding peptide
VQLEPLTVLYYEIVRKKPIFEQLSN

SEQ ID NO: 71022 - protein, 32 aa, Artificial Sequence; identical to SEQ ID NO: 24118
  Cyclic GFR-binding peptide
  MOD_RES (3)..(3): Xaa is C or S

SEQ ID NO: 71023 - protein, 32 aa, Artificial Sequence
  Cyclic GFR-binding peptide
  MOD_RES (2)..(3): Xaa is C or S
PXXAPTKLRSVKVAKVDDSSNVIKEVQVNMVV

SEQ ID NO: 71024 - protein, 30 aa, Artificial Sequence
  Cyclic GFR-binding peptide
  MOD_RES (2)..(2): Xaa is C or S
EXVPTEEEPLPMVYYRIKPHQGQHEQLSNF

SEQ ID NO: 71025 - protein, 29 aa, Artificial Sequence
  Cyclic GFR-binding peptide
QVQLRSVKVAKVEIVRKKPIFKEVQVTLE

SEQ ID NO: 71026 - protein, 27 aa, Artificial Sequence
  Cyclic GFR-binding peptide
  MOD_RES (27)..(27): Xaa is C or S
RSVKVAKVDDSSNVIKEVQVNMVVRAX

SEQ ID NO: 71027 - protein, 36 aa, Artificial Sequence
  Cyclic GFR-binding peptide
  MOD_RES (5)..(6): Xaa is C or S
IPKAXXVPTELRSVKMAKVDENEKVVKEVQVDMVVE

SEQ ID NO: 71028 - protein, 42 aa, Artificial Sequence
  Cyclic GFR-binding peptide
  MOD_RES (7)..(41): Xaa is C or S
NDEGLEXVPTEEEPLPMVYYRIKPHQGQHEQLSNFLQHNKXE

SEQ ID NO: 71029 - protein, 21 aa, Artificial Sequence
  Cyclic GFR-binding peptide
LSNITIQIMIGKTPKIIGEMS

SEQ ID NO: 71030 - protein, 29 aa, Artificial Sequence
  Cyclic GFR-binding peptide
  MOD_RES (27)..(29): Xaa is C or S
LRSVKIAKVVGRTPKVKEVQVMVVKSXKX

SEQ ID NO: 71031 - protein, 31 aa, Artificial Sequence
  Cyclic GFR-binding peptide
  MOD_RES (1)..(2): Xaa is C or S
XXVPQALRSVKIAKVVGRKPKVKEVQVMIVR

SEQ ID NO: 71032 - protein, 35 aa, Artificial Sequence
  Cyclic GFR-binding peptide
  MOD_RES (34)..(34): Xaa is C or S
QVQLEPLTVLYYEIVRKKPIFEQLSNTLEDHLAXK

SEQ ID NO: 71033 - protein, 29 aa, Artificial Sequence
  Cyclic GFR-binding peptide
  MOD_RES (28)..(28): Xaa is C or S
LRSVKMAKVDEYDKVVKEVQVEMVVEGXG

SEQ ID NO: 71034 - protein, 29 aa, Artificial Sequence
  Cyclic GFR-binding peptide
  MOD_RES (4)..(4): Xaa is C or S
KPTXAPTKLSNITVQIMDDSSNVIIGEMS

SEQ ID NO: 71035 - protein, 29 aa, Artificial Sequence
  Cyclic GFR-binding peptide
TQLSNITVQIMDDSSNVIIGEMSNMVVRA

SEQ ID NO: 71036 - protein, 31 aa, Artificial Sequence
  Cyclic GFR-binding peptide
  MOD_RES (28)..(30): Xaa is C or S
DLRPVQIRKIVGRTPKVKKATVMVVKSXKXS

SEQ ID NO: 71037 - protein, 29 aa, Artificial Sequence
  Cyclic GFR-binding peptide
  MOD_RES (26)..(28): Xaa is C or S
RSVKIAKVVGRKPKVKEVQVMIVRSXKXS

SEQ ID NO: 71038 - protein, 23 aa, Artificial Sequence
  Cyclic GFR-binding peptide
QDLRSVKIAKVIGKTPKIKEVQV

SEQ ID NO: 71039 - protein, 28 aa, Artificial Sequence
  Cyclic GFR-binding peptide
  MOD_RES (1)..(1): Xaa is C or S
XAPTQLSNITVQIMDDSSNVIIGEMSNM

SEQ ID NO: 71040 - protein, 32 aa, Artificial Sequence; identical to SEQ ID NO: 20133
  Cyclic GFR-binding peptide
  MOD_RES (5)..(6): Xaa is C or S

SEQ ID NO: 71041 - protein, 29 aa, Artificial Sequence
  Cyclic GFR-binding peptide
PTQLSNITVQIMDDSSNVIIGEMSNMVVR

SEQ ID NO: 71042 - protein, 31 aa, Artificial Sequence
  Cyclic GFR-binding peptide
  MOD_RES (5)..(6): Xaa is C or S
SASPXXVPQDLRPVQIRKIVGRTPKVKKATV

SEQ ID NO: 71043 - protein, 20 aa, Artificial Sequence
  Cyclic GFR-binding peptide
RSVKMAKVDEYDKVVKEVQV

SEQ ID NO: 71044 - protein, 27 aa, Artificial Sequence
  Cyclic GFR-binding peptide
  MOD_RES (27)..(27): Xaa is C or S
EPLTVLYYDDSSNVIEQLSNNMVVRAX

SEQ ID NO: 71045 - protein, 33 aa, Artificial Sequence; identical to SEQ ID NO: 24133
  Cyclic GFR-binding peptide
  MOD_RES (1)..(1): Xaa is C or S

SEQ ID NO: 71046 - protein, 30 aa, Artificial Sequence; identical to SEQ ID NO: 20140
  Cyclic GFR-binding peptide
  MOD_RES (28)..(30): Xaa is C or S

SEQ ID NO: 71047 - protein, 36 aa, Artificial Sequence
  Cyclic GFR-binding peptide
  MOD_RES (4)..(5)..(36): Xaa is C or S
ASPXXVPQDLRPVQIRKIVGRTPKVKKATVMVVKSX

SEQ ID NO: 71048 - protein, 30 aa, Artificial Sequence
  Cyclic GFR-binding peptide
  MOD_RES (30)..(30): Xaa is C or S
TQLRSVKVAKVDDSSNVIKEVQVNMVVRAX

SEQ ID NO: 71049 - protein, 35 aa, Artificial Sequence; identical to SEQ ID NO: 20141
  Cyclic GFR-binding peptide
  MOD_RES (6)..(7): Xaa is C or S

SEQ ID NO: 71050 - protein, 32 aa, Artificial Sequence; identical to SEQ ID NO: 24141
  Cyclic GFR-binding peptide
  MOD_RES (29)..(31): Xaa is C or S

SEQ ID NO: 71051 - protein, 27 aa, Artificial Sequence
  Cyclic GFR-binding peptide
  MOD_RES (1)..(1): Xaa is C or S
XVSQDLEPLPIVYYIGKTPKIEQLSNM

SEQ ID NO: 71052 - protein, 31 aa, Artificial Sequence
  Cyclic GFR-binding peptide
  MOD_RES (31)..(31): Xaa is C or S
PTKLSNITVQIMDDSSNVIIGEMSNMVVRSX

SEQ ID NO: 71053 - protein, 27 aa, Artificial Sequence
  Cyclic GFR-binding peptide
HEPLPVVYYEYVRKKPKLEQLSNRLEE

SEQ ID NO: 71054 - protein, 35 aa, Artificial Sequence
  Cyclic GFR-binding peptide
  MOD_RES (6)..(7): Xaa is C or S
SIPKAXXVPTELRPVQMRKIDEYDKVVKKATVEMV

SEQ ID NO: 71055 - protein, 29 aa, Artificial Sequence
  Cyclic GFR-binding peptide
APTKLEPLPVVYYDDSSNVIEQLSNNMVV

SEQ ID NO: 71056 - protein, 31 aa, Artificial Sequence
  Cyclic GFR-binding peptide
  MOD_RES (2)..(2): Xaa is C or S
QXRPTQVQLEPLPVVYYEIVRKKPIFEQLSN

SEQ ID NO: 71057 - protein, 26 aa, Artificial Sequence
  Cyclic GFR-binding peptide
EPLTMLYYRIKPHQGQHEQLSNFLQH

SEQ ID NO: 71058 - protein, 29 aa, Artificial Sequence
  Cyclic GFR-binding peptide
  MOD_RES (27)..(29): Xaa is C or S
EPLPMVYYDENEKVVEQLSNDMVVEGXGX

SEQ ID NO: 71059 - protein, 26 aa, Artificial Sequence
  Cyclic GFR-binding peptide
PQALEPLTILYYVGRKPKVEQLSNMI

SEQ ID NO: 71060 - protein, 30 aa, Artificial Sequence
  Cyclic GFR-binding peptide
APTQLSNITVQIMDDSSNVIIGEMSNMVVR

SEQ ID NO: 71061 - protein, 25 aa, Artificial Sequence
  Cyclic GFR-binding peptide
PTKLEPLTVLYYDDSSNVIEQLSNN

SEQ ID NO: 71062 - protein, 26 aa, Artificial Sequence
  Cyclic GFR-binding peptide
QALSNITIQIMVGRKPKVIGEMSMIV

SEQ ID NO: 71063 - protein, 31 aa, Artificial Sequence
  Cyclic GFR-binding peptide
  MOD_RES (2)..(3): Xaa is C or S
AXXVPTELSNITMQIMDENEKVVIGEMSDMV

SEQ ID NO: 71064 - protein, 26 aa, Artificial Sequence
  Cyclic GFR-binding peptide
QALRSVKIAKVVGRKPKVKEVQVMIV

SEQ ID NO: 71065 - protein, 42 aa, Artificial Sequence
  Cyclic GFR-binding peptide
  MOD_RES (3)..(40)..(42): Xaa is C or S
VQXRPTQVQLEPLTVLYYEIVRKKPIFEQLSNTLEDHLAXKX

SEQ ID NO: 71066 - protein, 26 aa, Artificial Sequence
  Cyclic GFR-binding peptide
LEPLPIVYYVGRTPKVEQLSNMVVKS

SEQ ID NO: 71067 - protein, 30 aa, Artificial Sequence; identical to SEQ ID NO: 20177
  Cyclic GFR-binding peptide
  MOD_RES (1)..(1): Xaa is C or S

SEQ ID NO: 71068 - protein, 39 aa, Artificial Sequence
  Cyclic GFR-binding peptide
  MOD_RES (6)..(7)..(39): Xaa is C or S
YVPKPXXAPTKLRPVQVRKIDDSSNVIKKATVNMVVRSX

SEQ ID NO: 71069 - protein, 35 aa, Artificial Sequence; identical to SEQ ID NO: 20179
  Cyclic GFR-binding peptide
  MOD_RES (1)..(33)..(35): Xaa is C or S

SEQ ID NO: 71070 - protein, 32 aa, Artificial Sequence
  Cyclic GFR-binding peptide
  MOD_RES (4)..(5): Xaa is C or S
AAPXXVPQALRSVKIAKVVGRKPKVKEVQVMI

SEQ ID NO: 71071 - protein, 29 aa, Artificial Sequence
  Cyclic GFR-binding peptide
  MOD_RES (3)..(4): Xaa is C or S
APXXVPQALSNITIQIMVGRKPKVIGEMS

SEQ ID NO: 71072 - protein, 35 aa, Artificial Sequence
  Cyclic GFR-binding peptide
  MOD_RES (32)..(34): Xaa is C or S
VPTELSNITMQIMDEYDKVVIGEMSEMVVEGXGXR

SEQ ID NO: 71073 - protein, 35 aa, Artificial Sequence
  Cyclic GFR-binding peptide
  MOD_RES (1)..(2)..(33)..(35): Xaa is C or S
XXVPQDLRSVKIAKVVGRTPKVKEVQVMVVKSXKX

SEQ ID NO: 71074 - protein, 23 aa, Artificial Sequence
  Cyclic GFR-binding peptide
ALEPLTILYYVGRKPKVEQLSNM

SEQ ID NO: 71075 - protein, 29 aa, Artificial Sequence
  Cyclic GFR-binding peptide
  MOD_RES (1)..(2): Xaa is C or S
XXAPTQLEPLTVLYYDDSSNVIEQLSNNM

SEQ ID NO: 71076 - protein, 37 aa, Artificial Sequence; identical to SEQ ID NO: 24162
  Cyclic GFR-binding peptide
  MOD_RES (37)..(37): Xaa is C or S

SEQ ID NO: 71077 - protein, 27 aa, Artificial Sequence
  Cyclic GFR-binding peptide
VPTEERPVQMRKIRIKPHQGQHKKATV

SEQ ID NO: 71078 - protein, 28 aa, Artificial Sequence
  Cyclic GFR-binding peptide
  MOD_RES (27)..(27): Xaa is C or S
LRPVQIRKIIGKTPKIKKATVMIVKSXK

SEQ ID NO: 71079 - protein, 28 aa, Artificial Sequence
  Cyclic GFR-binding peptide
PTKLSNITVQIMDDSSNVIIGEMSNMVV

SEQ ID NO: 71080 - protein, 24 aa, Artificial Sequence
  Cyclic GFR-binding peptide
RSVKIAKVIGKTPKIKEVQVMIVK

SEQ ID NO: 71081 - protein, 39 aa, Artificial Sequence
  Cyclic GFR-binding peptide
  MOD_RES (4)..(38): Xaa is C or S
GLEXVPTEEEPLTMLYYRIKPHQGQHEQLSNFLQHNKXE

SEQ ID NO: 71082 - protein, 22 aa, Artificial Sequence
  Cyclic GFR-binding peptide
EPLPMVYYRIKPHQGQHEQLSN

SEQ ID NO: 71083 - protein, 29 aa, Artificial Sequence
  Cyclic GFR-binding peptide
  MOD_RES (1)..(2): Xaa is C or S
XXAPTQLSNITVQIMDDSSNVIIGEMSNM

SEQ ID NO: 71084 - protein, 29 aa, Artificial Sequence
  Cyclic GFR-binding peptide
  MOD_RES (3)..(4): Xaa is C or S
KPXXAPTQLSNITVQIMDDSSNVIIGEMS

SEQ ID NO: 71085 - protein, 38 aa, Artificial Sequence; identical to SEQ ID NO: 20213
  Cyclic GFR-binding peptide
  MOD_RES (5)..(6)..(38): Xaa is C or S

SEQ ID NO: 71086 - protein, 23 aa, Artificial Sequence
  Cyclic GFR-binding peptide
KLRPVQVRKIDDSSNVIKKATVN

SEQ ID NO: 71087 - protein, 34 aa, Artificial Sequence; identical to SEQ ID NO: 20216
  Cyclic GFR-binding peptide
  MOD_RES (4)..(5): Xaa is C or S

SEQ ID NO: 71088 - protein, 32 aa, Artificial Sequence
  Cyclic GFR-binding peptide
  MOD_RES (32)..(32): Xaa is C or S
QLEPLPVVYYEIVRKKPIFEQLSNTLEDHLAX

SEQ ID NO: 71089 - protein, 34 aa, Artificial Sequence
  Cyclic GFR-binding peptide
  MOD_RES (3)..(4): Xaa is C or S
KPXXAPTKLSNITVQIMDDSSNVIIGEMSNMVVR

SEQ ID NO: 71090 - protein, 33 aa, Artificial Sequence
  Cyclic GFR-binding peptide
PSRVHHEPLTVLYYEYVRKKPKLEQLSNRLEEH

SEQ ID NO: 71091 - protein, 24 aa, Artificial Sequence
  Cyclic GFR-binding peptide
PTELEPLPMVYYDEYDKVVEQLSN

SEQ ID NO: 71092 - protein, 29 aa, Artificial Sequence
  Cyclic GFR-binding peptide
VPTEERSVKMAKVRIKPHQGQHKEVQVFL

SEQ ID NO: 71093 - protein, 32 aa, Artificial Sequence
  Cyclic GFR-binding peptide
QVQLEPLPVVYYEIVRKKPIFEQLSNTLEDHL

SEQ ID NO: 71094 - protein, 36 aa, Artificial Sequence
  Cyclic GFR-binding peptide
  MOD_RES (2)..(3)..(34)..(36): Xaa is C or S
PXXVPQALRPVQIRKIVGRKPKVKKATVMIVRSXKX

SEQ ID NO: 71095 - protein, 27 aa, Artificial Sequence
  Cyclic GFR-binding peptide
RVHHSNITVQIMEYVRKKPKLIGEMSR

SEQ ID NO: 71096 - protein, 25 aa, Artificial Sequence
  Cyclic GFR-binding peptide
HSNITVQIMEYVRKKPKLIGEMSRL

SEQ ID NO: 71097 - protein, 41 aa, Artificial Sequence; identical to SEQ ID NO: 24193
  Cyclic GFR-binding peptide
  MOD_RES (1)..(38)..(40): Xaa is C or S

SEQ ID NO: 71098 - protein, 35 aa, Artificial Sequence; identical to SEQ ID NO: 20237
  Cyclic GFR-binding peptide
  MOD_RES (3)..(4): Xaa is C or S

SEQ ID NO: 71099 - protein, 32 aa, Artificial Sequence; identical to SEQ ID NO: 20238
  Cyclic GFR-binding peptide
  MOD_RES (3)..(4): Xaa is C or S

SEQ ID NO: 71100 - protein, 29 aa, Artificial Sequence
  Cyclic GFR-binding peptide
TELEPLTMLYYDEYDKVVEQLSNEMVVEG

SEQ ID NO: 71101 - protein, 36 aa, Artificial Sequence; identical to SEQ ID NO: 20241
  Cyclic GFR-binding peptide
  MOD_RES (3)..(4)..(35): Xaa is C or S

SEQ ID NO: 71102 - protein, 26 aa, Artificial Sequence
  Cyclic GFR-binding peptide
KLRSVKVAKVDDSSNVIKEVQVNMVV

SEQ ID NO: 71103 - protein, 30 aa, Artificial Sequence; identical to SEQ ID NO: 20242
  Cyclic GFR-binding peptide
  MOD_RES (30)..(30): Xaa is C or S

SEQ ID NO: 71104 - protein, 23 aa, Artificial Sequence
  Cyclic GFR-binding peptide
QDLRPVQIRKIVGRTPKVKKATV

SEQ ID NO: 71105 - protein, 42 aa, Artificial Sequence; identical to SEQ ID NO: 24195
  Cyclic GFR-binding peptide
  MOD_RES (4)..(41): Xaa is C or S

SEQ ID NO: 71106 - protein, 25 aa, Artificial Sequence
  Cyclic GFR-binding peptide
VPTELEPLTMLYYDENEKVVEQLSN

SEQ ID NO: 71107 - protein, 27 aa, Artificial Sequence
  Cyclic GFR-binding peptide
  MOD_RES (26)..(26): Xaa is C or S
RSVKIAKVIGKTPKIKEVQVMIVKSXK

SEQ ID NO: 71108 - protein, 30 aa, Artificial Sequence
  Cyclic GFR-binding peptide
  MOD_RES (3)..(4): Xaa is C or S
SPXXVPQDLRPVQIRKIVGRTPKVKKATVM

SEQ ID NO: 71109 - protein, 31 aa, Artificial Sequence
  Cyclic GFR-binding peptide
  MOD_RES (4)..(5): Xaa is C or S
ASPXXVPQDLRPVQIRKIVGRTPKVKKATVM

SEQ ID NO: 71110 - protein, 32 aa, Artificial Sequence; identical to SEQ ID NO: 24202
  Cyclic GFR-binding peptide
  MOD_RES (31)..(31): Xaa is C or S

SEQ ID NO: 71111 - protein, 35 aa, Artificial Sequence
  Cyclic GFR-binding peptide
  MOD_RES (1)..(2)..(34): Xaa is C or S
XXVPTELSNITMQIMDENEKVVIGEMSDMVVEGXG

SEQ ID NO: 71112 - protein, 25 aa, Artificial Sequence
  Cyclic GFR-binding peptide
EPLTVLYYEIVRKKPIFEQLSNTLE

SEQ ID NO: 71113 - protein, 34 aa, Artificial Sequence
  Cyclic GFR-binding peptide
  MOD_RES (5)..(5): Xaa is C or S
SSVKXQPSRVHHEPLTVLYYEYVRKKPKLEQLSN

SEQ ID NO: 71114 - protein, 37 aa, Artificial Sequence
  Cyclic GFR-binding peptide
  MOD_RES (3)..(37): Xaa is C or S
LEXVPTEEEPLTMLYYRIKPHQGQHEQLSNFLQHNKX

SEQ ID NO: 71115 - protein, 25 aa, Artificial Sequence
  Cyclic GFR-binding peptide
LSNITIQIMVGRKPKVIGEMSMIVR

SEQ ID NO: 71116 - protein, 40 aa, Artificial Sequence
  Cyclic GFR-binding peptide
  MOD_RES (6)..(7)..(38)..(40): Xaa is C or S
ASAAPXXVPQALSNITIQIMVGRKPKVIGEMSMIVRSXKX

SEQ ID NO: 71117 - protein, 33 aa, Artificial Sequence
  Cyclic GFR-binding peptide
  MOD_RES (3)..(3): Xaa is C or S
LEXVPTEEEPLTMLYYRIKPHQGQHEQLSNFLQ

SEQ ID NO: 71118 - protein, 39 aa, Artificial Sequence
  Cyclic GFR-binding peptide
  MOD_RES (7)..(39): Xaa is C or S
HVTKPTXAPTKLRPVQVRKIDDSSNVIKKATVNMVVRSX

SEQ ID NO: 71119 - protein, 32 aa, Artificial Sequence; identical to SEQ ID NO: 24211
  Cyclic GFR-binding peptide

SEQ ID NO: 71120 - protein, 39 aa, Artificial Sequence; identical to SEQ ID NO: 20281
  Cyclic GFR-binding peptide
  MOD_RES (6)..(7)..(39): Xaa is C or S

SEQ ID NO: 71121 - protein, 32 aa, Artificial Sequence
  Cyclic GFR-binding peptide
RVHHEPLPVVYYEYVRKKPKLEQLSNRLEEHL

SEQ ID NO: 71122 - protein, 33 aa, Artificial Sequence
  Cyclic GFR-binding peptide
  MOD_RES (4)..(5): Xaa is C or S
PKAXXVPTELSNITMQIMDEYDKVVIGEMSEMV

SEQ ID NO: 71123 - protein, 38 aa, Artificial Sequence
  Cyclic GFR-binding peptide
  MOD_RES (4)..(5)..(37): Xaa is C or S
PKAXXVPTELSNITMQIMDENEKVVIGEMSDMVVEGXG

SEQ ID NO: 71124 - protein, 34 aa, Artificial Sequence
  Cyclic GFR-binding peptide
  MOD_RES (5)..(6): Xaa is C or S
IPKAXXVPTELRSVKMAKVDEYDKVVKEVQVEMV

SEQ ID NO: 71125 - protein, 36 aa, Artificial Sequence
  Cyclic GFR-binding peptide
  MOD_RES (2)..(3)..(35): Xaa is C or S
AXXVPTELRPVQMRKIDEYDKVVKKATVEMVVEGXG

SEQ ID NO: 71126 - protein, 34 aa, Artificial Sequence
  Cyclic GFR-binding peptide
  MOD_RES (2)..(3): Xaa is C or S
AXXVPTELSNITMQIMDEYDKVVIGEMSEMVVEG

SEQ ID NO: 71127 - protein, 30 aa, Artificial Sequence; identical to SEQ ID NO: 20284
  Cyclic GFR-binding peptide
  MOD_RES (4)..(5): Xaa is C or S

SEQ ID NO: 71128 - protein, 31 aa, Artificial Sequence
  Cyclic GFR-binding peptide
  MOD_RES (29)..(31): Xaa is C or S
EPLPMVYYRIKPHQGQHEQLSNFLQHNKXEX

SEQ ID NO: 71129 - protein, 30 aa, Artificial Sequence; identical to SEQ ID NO: 20287
  Cyclic GFR-binding peptide
  MOD_RES (1)..(1): Xaa is C or S

SEQ ID NO: 71130 - protein, 28 aa, Artificial Sequence
  Cyclic GFR-binding peptide
VPQALRPVQIRKIVGRKPKVKKATVMIV

SEQ ID NO: 71131 - protein, 30 aa, Artificial Sequence; identical to SEQ ID NO: 20289
  Cyclic GFR-binding peptide
  MOD_RES (29)..(29): Xaa is C or S

SEQ ID NO: 71132 - protein, 29 aa, Artificial Sequence
  Cyclic GFR-binding peptide
  MOD_RES (2)..(3): Xaa is C or S
PXXVPQDLSNITIQIMVGRTPKVIGEMSM

SEQ ID NO: 71133 - protein, 40 aa, Artificial Sequence; identical to SEQ ID NO: 20290
  Cyclic GFR-binding peptide
  MOD_RES (4)..(5)..(37)..(39): Xaa is C or S

SEQ ID NO: 71134 - protein, 32 aa, Artificial Sequence
  Cyclic GFR-binding peptide
  MOD_RES (1)..(1): Xaa is C or S
XAPTKLRPVQVRKIDDSSNVIKKATVNMVVRS

SEQ ID NO: 71135 - protein, 29 aa, Artificial Sequence
  Cyclic GFR-binding peptide
  MOD_RES (26)..(28): Xaa is C or S
RPVQIRKIVGRTPKVKKATVMVVKSXKXS

SEQ ID NO: 71136 - protein, 36 aa, Artificial Sequence; identical to SEQ ID NO: 24225
  Cyclic GFR-binding peptide
  MOD_RES (6)..(6): Xaa is C or S

SEQ ID NO: 71137 - protein, 23 aa, Artificial Sequence
  Cyclic GFR-binding peptide
RSVKIAKVIGKTPKIKEVQVMIV

SEQ ID NO: 71138 - protein, 40 aa, Artificial Sequence
  Cyclic GFR-binding peptide
  MOD_RES (5)..(39): Xaa is C or S
EGLEXVPTEEEPLPMVYYRIKPHQGQHEQLSNFLQHNKXE

SEQ ID NO: 71139 - protein, 21 aa, Artificial Sequence
  Cyclic GFR-binding peptide
EPLPMVYYDENEKVVEQLSND

SEQ ID NO: 71140 - protein, 29 aa, Artificial Sequence
  Cyclic GFR-binding peptide
PTELRPVQMRKIDENEKVVKKATVDMVVE

SEQ ID NO: 71141 - protein, 34 aa, Artificial Sequence
  Cyclic GFR-binding peptide
  MOD_RES (4)..(5): Xaa is C or S
ASPXXVPQDLRPVQIRKIVGRTPKVKKATVMVVK

SEQ ID NO: 71142 - protein, 29 aa, Artificial Sequence
  Cyclic GFR-binding peptide
PQALEPLTILYYVGRKPKVEQLSNMIVRS

SEQ ID NO: 71143 - protein, 36 aa, Artificial Sequence; identical to SEQ ID NO: 24232
  Cyclic GFR-binding peptide
  MOD_RES (33)..(35): Xaa is C or S

SEQ ID NO: 71144 - protein, 34 aa, Artificial Sequence
  Cyclic GFR-binding peptide
  MOD_RES (6)..(7): Xaa is C or S
ASASPXXVPQDLSNITIQIMVGRTPKVIGEMSMV

SEQ ID NO: 71145 - protein, 33 aa, Artificial Sequence
  Cyclic GFR-binding peptide
  MOD_RES (1)..(33): Xaa is C or S
XVPTELSNITMQIMDEYDKVVIGEMSEMVVEGX

SEQ ID NO: 71146 - protein, 36 aa, Artificial Sequence; identical to SEQ ID NO: 24238
  Cyclic GFR-binding peptide
  MOD_RES (3)..(3): Xaa is C or S

SEQ ID NO: 71147 - protein, 36 aa, Artificial Sequence; identical to SEQ ID NO: 24242
  Cyclic GFR-binding peptide
  MOD_RES (34)..(36): Xaa is C or S

SEQ ID NO: 71148 - protein, 34 aa, Artificial Sequence
  Cyclic GFR-binding peptide
  MOD_RES (1)..(1): Xaa is C or S
XVPTEEEPLTMLYYRIKPHQGQHEQLSNFLQHNK

SEQ ID NO: 71149 - protein, 28 aa, Artificial Sequence
  Cyclic GFR-binding peptide
  MOD_RES (26)..(28): Xaa is C or S
EPLTILYYVGRKPKVEQLSNMIVRSXKX

SEQ ID NO: 71150 - protein, 28 aa, Artificial Sequence
  Cyclic GFR-binding peptide
  MOD_RES (2)..(2): Xaa is C or S
TXAPTKLEPLPVVYYDDSSNVIEQLSNN

SEQ ID NO: 71151 - protein, 37 aa, Artificial Sequence
  Cyclic GFR-binding peptide
  MOD_RES (36)..(36): Xaa is C or S
PSRVHHEPLTVLYYEYVRKKPKLEQLSNRLEEHLEXA

SEQ ID NO: 71152 - protein, 28 aa, Artificial Sequence
  Cyclic GFR-binding peptide
  MOD_RES (2)..(3): Xaa is C or S
PXXAPTQLEPLTVLYYDDSSNVIEQLSN

SEQ ID NO: 71153 - protein, 35 aa, Artificial Sequence; identical to SEQ ID NO: 24256
  Cyclic GFR-binding peptide
  MOD_RES (2)..(2): Xaa is C or S

SEQ ID NO: 71154 - protein, 29 aa, Artificial Sequence
  Cyclic GFR-binding peptide
  MOD_RES (29)..(29): Xaa is C or S
QDLSNITIQIMIGKTPKIIGEMSMIVKSX

SEQ ID NO: 71155 - protein, 41 aa, Artificial Sequence
  Cyclic GFR-binding peptide
  MOD_RES (5)..(5): Xaa is C or S
SSVKXQPSRVHHEPLTVLYYEYVRKKPKLEQLSNRLEEHLE

SEQ ID NO: 71156 - protein, 26 aa, Artificial Sequence
  Cyclic GFR-binding peptide
PTQLRSVKVAKVDDSSNVIKEVQVNM

SEQ ID NO: 71157 - protein, 37 aa, Artificial Sequence; identical to SEQ ID NO: 24261
  Cyclic GFR-binding peptide
  MOD_RES (35)..(37): Xaa is C or S

SEQ ID NO: 71158 - protein, 33 aa, Artificial Sequence; identical to SEQ ID NO: 24262
  Cyclic GFR-binding peptide
  MOD_RES (5)..(5): Xaa is C or S

SEQ ID NO: 71159 - protein, 33 aa, Artificial Sequence; identical to SEQ ID NO: 24265
  Cyclic GFR-binding peptide
  MOD_RES (6)..(6): Xaa is C or S

SEQ ID NO: 71160 - protein, 27 aa, Artificial Sequence
  Cyclic GFR-binding peptide
  MOD_RES (27)..(27): Xaa is C or S
LEPLTILYYVGRKPKVEQLSNMIVRSX

SEQ ID NO: 71161 - protein, 39 aa, Artificial Sequence
  Cyclic GFR-binding peptide
  MOD_RES (5)..(6)..(37)..(39): Xaa is C or S
SASPXXVPQDLSNITIQIMVGRTPKVIGEMSMVVKSXKX

SEQ ID NO: 71162 - protein, 29 aa, Artificial Sequence
  Cyclic GFR-binding peptide
  MOD_RES (28)..(28): Xaa is C or S
DLRPVQIRKIIGKTPKIKKATVMIVKSXK

SEQ ID NO: 71163 - protein, 30 aa, Artificial Sequence; identical to SEQ ID NO: 24268
  Cyclic GFR-binding peptide

SEQ ID NO: 71164 - protein, 28 aa, Artificial Sequence
  Cyclic GFR-binding peptide
  MOD_RES (28)..(28): Xaa is C or S
LRSVKMAKVDEYDKVVKEVQVEMVVEGX

SEQ ID NO: 71165 - protein, 24 aa, Artificial Sequence
  Cyclic GFR-binding peptide
EPLTVLYYDDSSNVIEQLSNNMVV

SEQ ID NO: 71166 - protein, 33 aa, Artificial Sequence
  Cyclic GFR-binding peptide
  MOD_RES (31)..(33): Xaa is C or S
VSQDLRPVQIRKIIGKTPKIKKATVMIVKSXKX

SEQ ID NO: 71167 - protein, 33 aa, Artificial Sequence; identical to SEQ ID NO: 20334
  Cyclic GFR-binding peptide
  MOD_RES (1)..(33): Xaa is C or S

SEQ ID NO: 71168 - protein, 33 aa, Artificial Sequence; identical to SEQ ID NO: 20337
  Cyclic GFR-binding peptide
  MOD_RES (31)..(33): Xaa is C or S

SEQ ID NO: 71169 - protein, 30 aa, Artificial Sequence
  Cyclic GFR-binding peptide
  MOD_RES (1)..(1): Xaa is C or S
XVSQDLRPVQIRKIIGKTPKIKKATVMIVK

SEQ ID NO: 71170 - protein, 31 aa, Artificial Sequence
  Cyclic GFR-binding peptide
RPTQVQLEPLPVVYYEIVRKKPIFEQLSNTL

SEQ ID NO: 71171 - protein, 27 aa, Artificial Sequence
  Cyclic GFR-binding peptide
KLSNITVQIMDDSSNVIIGEMSNMVVR

SEQ ID NO: 71172 - protein, 28 aa, Artificial Sequence
  Cyclic GFR-binding peptide
PTELEPLPMVYYDEYDKVVEQLSNEMVV

SEQ ID NO: 71173 - protein, 25 aa, Artificial Sequence
  Cyclic GFR-binding peptide
VQLSNITVQIMEIVRKKPIFIGEMS

SEQ ID NO: 71174 - protein, 38 aa, Artificial Sequence; identical to SEQ ID NO: 24274
  Cyclic GFR-binding peptide
  MOD_RES (3)..(3): Xaa is C or S

SEQ ID NO: 71175 - protein, 33 aa, Artificial Sequence
  Cyclic GFR-binding peptide
  MOD_RES (32)..(32): Xaa is C or S
APTQLRSVKVAKVDDSSNVIKEVQVNMVVRAXG

SEQ ID NO: 71176 - protein, 31 aa, Artificial Sequence
  Cyclic GFR-binding peptide
  MOD_RES (1)..(1): Xaa is C or S
XVPTEEEPLPMVYYRIKPHQGQHEQLSNFLQ

SEQ ID NO: 71177 - protein, 26 aa, Artificial Sequence
  Cyclic GFR-binding peptide
RVHHRPVQVRKIEYVRKKPKLKKATV

SEQ ID NO: 71178 - protein, 38 aa, Artificial Sequence
  Cyclic GFR-binding peptide
  MOD_RES (3)..(4)..(35)..(37): Xaa is C or S
SPXXVPQDLRSVKIAKVVGRTPKVKEVQVMVVKSXKXS

SEQ ID NO: 71179 - protein, 28 aa, Artificial Sequence
  Cyclic GFR-binding peptide
  MOD_RES (1)..(1): Xaa is C or S
XVPTEERPVQMRKIRIKPHQGQHKKATV

SEQ ID NO: 71180 - protein, 31 aa, Artificial Sequence
  Cyclic GFR-binding peptide
  MOD_RES (2)..(3): Xaa is C or S
AXXVPTELRSVKMAKVDENEKVVKEVQVDMV

SEQ ID NO: 71181 - protein, 28 aa, Artificial Sequence
  Cyclic GFR-binding peptide
  MOD_RES (27)..(27): Xaa is C or S
EPLTVLYYDDSSNVIEQLSNNMVVRSXG

SEQ ID NO: 71182 - protein, 36 aa, Artificial Sequence; identical to SEQ ID NO: 20349
  Cyclic GFR-binding peptide
  MOD_RES (4)..(5): Xaa is C or S

SEQ ID NO: 71183 - protein, 28 aa, Artificial Sequence
  Cyclic GFR-binding peptide
EPLPVVYYEYVRKKPKLEQLSNRLEEHL

SEQ ID NO: 71184 - protein, 22 aa, Artificial Sequence
  Cyclic GFR-binding peptide
SNITVQIMDDSSNVIIGEMSNM

SEQ ID NO: 71185 - protein, 27 aa, Artificial Sequence
  Cyclic GFR-binding peptide
QLEPLPVVYYDDSSNVIEQLSNNMVVR

SEQ ID NO: 71186 - protein, 35 aa, Artificial Sequence; identical to SEQ ID NO: 20351
  Cyclic GFR-binding peptide
  MOD_RES (3)..(35): Xaa is C or S

SEQ ID NO: 71187 - protein, 37 aa, Artificial Sequence
  Cyclic GFR-binding peptide
  MOD_RES (2)..(3)..(34)..(36): Xaa is C or S
PXXVSQDLRSVKIAKVIGKTPKIKEVQVMIVKSXKXS

SEQ ID NO: 71188 - protein, 36 aa, Artificial Sequence
  Cyclic GFR-binding peptide
  MOD_RES (33)..(35): Xaa is C or S
PTEEEPLPMVYYRIKPHQGQHEQLSNFLQHNKXEXR

SEQ ID NO: 71189 - protein, 26 aa, Artificial Sequence
  Cyclic GFR-binding peptide
DLEPLPIVYYVGRTPKVEQLSNMVVK

SEQ ID NO: 71190 - protein, 26 aa, Artificial Sequence
  Cyclic GFR-binding peptide
TELEPLPMVYYDEYDKVVEQLSNEMV

SEQ ID NO: 71191 - protein, 34 aa, Artificial Sequence
  Cyclic GFR-binding peptide
  MOD_RES (3)..(4): Xaa is C or S
KAXXVPTELRPVQMRKIDEYDKVVKKATVEMVVE

SEQ ID NO: 71192 - protein, 36 aa, Artificial Sequence
  Cyclic GFR-binding peptide
  MOD_RES (3)..(35): Xaa is C or S
PTXAPTKLSNITVQIMDDSSNVIIGEMSNMVVRSXG

SEQ ID NO: 71193 - protein, 26 aa, Artificial Sequence
  Cyclic GFR-binding peptide
RPVQMRKIDENEKVVKKATVDMVVEG

SEQ ID NO: 71194 - protein, 27 aa, Artificial Sequence
  Cyclic GFR-binding peptide
TELSNITMQIMDEYDKVVIGEMSEMVV

SEQ ID NO: 71195 - protein, 29 aa, Artificial Sequence
  Cyclic GFR-binding peptide
  MOD_RES (28)..(28): Xaa is C or S
LEPLPMVYYDENEKVVEQLSNDMVVEGXG

SEQ ID NO: 71196 - protein, 41 aa, Artificial Sequence
  Cyclic GFR-binding peptide
  MOD_RES (6)..(7)..(38)..(40): Xaa is C or S
ASAAPXXVPQALSNITIQIMVGRKPKVIGEMSMIVRSXKXS

SEQ ID NO: 71197 - protein, 38 aa, Artificial Sequence; identical to SEQ ID NO: 24296
  Cyclic GFR-binding peptide
  MOD_RES (6)..(6): Xaa is C or S

SEQ ID NO: 71198 - protein, 33 aa, Artificial Sequence; identical to SEQ ID NO: 24297
  Cyclic GFR-binding peptide
  MOD_RES (33)..(33): Xaa is C or S

SEQ ID NO: 71199 - protein, 31 aa, Artificial Sequence
  Cyclic GFR-binding peptide
  MOD_RES (28)..(30): Xaa is C or S
DLSNITIQIMIGKTPKIIGEMSMIVKSXKXS

SEQ ID NO: 71200 - protein, 27 aa, Artificial Sequence
  Cyclic GFR-binding peptide
SQDLRPVQIRKIIGKTPKIKKATVMIV

SEQ ID NO: 71201 - protein, 24 aa, Artificial Sequence
  Cyclic GFR-binding peptide
PTELSNITMQIMDEYDKVVIGEMS

SEQ ID NO: 71202 - protein, 29 aa, Artificial Sequence
  Cyclic GFR-binding peptide
  MOD_RES (28)..(28): Xaa is C or S
LEPLTVLYYDDSSNVIEQLSNNMVVRAXG

SEQ ID NO: 71203 - protein, 29 aa, Artificial Sequence
  Cyclic GFR-binding peptide
  MOD_RES (2)..(2): Xaa is C or S
TXAPTKLSNITVQIMDDSSNVIIGEMSNM

SEQ ID NO: 71204 - protein, 38 aa, Artificial Sequence
  Cyclic GFR-binding peptide
  MOD_RES (3)..(37): Xaa is C or S
LEXVPTEEEPLPMVYYRIKPHQGQHEQLSNFLQHNKXE

SEQ ID NO: 71205 - protein, 33 aa, Artificial Sequence
  Cyclic GFR-binding peptide
  MOD_RES (6)..(7): Xaa is C or S
YVPKPXXAPTKLRPVQVRKIDDSSNVIKKATVN

SEQ ID NO: 71206 - protein, 33 aa, Artificial Sequence; identical to SEQ ID NO: 20380
  Cyclic GFR-binding peptide
  MOD_RES (4)..(4): Xaa is C or S

SEQ ID NO: 71207 - protein, 35 aa, Artificial Sequence
  Cyclic GFR-binding peptide
  MOD_RES (3)..(4): Xaa is C or S
KPXXAPTQLRSVKVAKVDDSSNVIKEVQVNMVVRA

SEQ ID NO: 71208 - protein, 27 aa, Artificial Sequence
  Cyclic GFR-binding peptide
QLSNITVQIMEIVRKKPIFIGEMSTLE

SEQ ID NO: 71209 - protein, 40 aa, Artificial Sequence; identical to SEQ ID NO: 20385
  Cyclic GFR-binding peptide
  MOD_RES (5)..(37)..(39): Xaa is C or S

SEQ ID NO: 71210 - protein, 27 aa, Artificial Sequence
  Cyclic GFR-binding peptide
TKLSNITVQIMDDSSNVIIGEMSNMVV

SEQ ID NO: 71211 - protein, 27 aa, Artificial Sequence
  Cyclic GFR-binding peptide
  MOD_RES (1)..(2): Xaa is C or S
XXVPTELEPLTMLYYDENEKVVEQLSN

SEQ ID NO: 71212 - protein, 37 aa, Artificial Sequence; identical to SEQ ID NO: 24310
  Cyclic GFR-binding peptide
  MOD_RES (2)..(2): Xaa is C or S

SEQ ID NO: 71213 - protein, 30 aa, Artificial Sequence
  Cyclic GFR-binding peptide
  MOD_RES (30)..(30): Xaa is C or S
TQLSNITVQIMDDSSNVIIGEMSNMVVRAX

SEQ ID NO: 71214 - protein, 31 aa, Artificial Sequence; identical to SEQ ID NO: 20390
  Cyclic GFR-binding peptide
  MOD_RES (28)..(30): Xaa is C or S

SEQ ID NO: 71215 - protein, 31 aa, Artificial Sequence; identical to SEQ ID NO: 24311
  Cyclic GFR-binding peptide
  MOD_RES (31)..(31): Xaa is C or S

SEQ ID NO: 71216 - protein, 30 aa, Artificial Sequence
  Cyclic GFR-binding peptide
PSRVHHEPLTVLYYEYVRKKPKLEQLSNRL

SEQ ID NO: 71217 - protein, 33 aa, Artificial Sequence
  Cyclic GFR-binding peptide
  MOD_RES (2)..(3): Xaa is C or S
PXXVPQDLSNITIQIMVGRTPKVIGEMSMVVKS

SEQ ID NO: 71218 - protein, 32 aa, Artificial Sequence; identical to SEQ ID NO: 20392
  Cyclic GFR-binding peptide
  MOD_RES (3)..(4): Xaa is C or S

SEQ ID NO: 71219 - protein, 42 aa, Artificial Sequence; identical to SEQ ID NO: 24315
  Cyclic GFR-binding peptide
  MOD_RES (4)..(41): Xaa is C or S

SEQ ID NO: 71220 - protein, 34 aa, Artificial Sequence
  Cyclic GFR-binding peptide
  MOD_RES (6)..(6): Xaa is C or S
VTKPTXAPTKLRPVQVRKIDDSSNVIKKATVNMV

SEQ ID NO: 71221 - protein, 40 aa, Artificial Sequence; identical to SEQ ID NO: 24317
  Cyclic GFR-binding peptide
  MOD_RES (5)..(39): Xaa is C or S

SEQ ID NO: 71222 - protein, 33 aa, Artificial Sequence
  Cyclic GFR-binding peptide
  MOD_RES (6)..(7): Xaa is C or S
ASASPXXVSQDLRPVQIRKIIGKTPKIKKATVM

SEQ ID NO: 71223 - protein, 31 aa, Artificial Sequence
  Cyclic GFR-binding peptide
TEEEPLTMLYYRIKPHQGQHEQLSNFLQHNK

SEQ ID NO: 71224 - protein, 27 aa, Artificial Sequence
  Cyclic GFR-binding peptide
VQLSNITVQIMEIVRKKPIFIGEMSTL

SEQ ID NO: 71225 - protein, 36 aa, Artificial Sequence
  Cyclic GFR-binding peptide
  MOD_RES (3)..(4)..(35): Xaa is C or S
APXXVPQALRPVQIRKIVGRKPKVKKATVMIVRSXK

SEQ ID NO: 71226 - protein, 31 aa, Artificial Sequence
  Cyclic GFR-binding peptide
  MOD_RES (3)..(4): Xaa is C or S
KAXXVPTELRSVKMAKVDENEKVVKEVQVDM

SEQ ID NO: 71227 - protein, 30 aa, Artificial Sequence
  Cyclic GFR-binding peptide
  MOD_RES (30)..(30): Xaa is C or S
TELRSVKMAKVDENEKVVKEVQVDMVVEGX

SEQ ID NO: 71228 - protein, 42 aa, Artificial Sequence; identical to SEQ ID NO: 24320
  Cyclic GFR-binding peptide
  MOD_RES (2)..(39)..(41): Xaa is C or S

SEQ ID NO: 71229 - protein, 37 aa, Artificial Sequence
  Cyclic GFR-binding peptide
  MOD_RES (6)..(6): Xaa is C or S
VTKPTXAPTKLSNITVQIMDDSSNVIIGEMSNMVVRS

SEQ ID NO: 71230 - protein, 27 aa, Artificial Sequence
  Cyclic GFR-binding peptide
  MOD_RES (27)..(27): Xaa is C or S
RPVQMRKIDENEKVVKKATVDMVVEGX

SEQ ID NO: 71231 - protein, 35 aa, Artificial Sequence
  Cyclic GFR-binding peptide
  MOD_RES (5)..(6): Xaa is C or S
IPKAXXVPTELRSVKMAKVDEYDKVVKEVQVEMVV

SEQ ID NO: 71232 - protein, 32 aa, Artificial Sequence
  Cyclic GFR-binding peptide
PTQVQLEPLPVVYYEIVRKKPIFEQLSNTLED

SEQ ID NO: 71233 - protein, 44 aa, Artificial Sequence; identical to SEQ ID NO: 24323
  Cyclic GFR-binding peptide
  MOD_RES (5)..(42)..(44): Xaa is C or S

SEQ ID NO: 71234 - protein, 31 aa, Artificial Sequence
  Cyclic GFR-binding peptide
  MOD_RES (3)..(4): Xaa is C or S
APXXVPQALRPVQIRKIVGRKPKVKKATVMI

SEQ ID NO: 71235 - protein, 34 aa, Artificial Sequence; identical to SEQ ID NO: 20406
  Cyclic GFR-binding peptide
  MOD_RES (5)..(5): Xaa is C or S

SEQ ID NO: 71236 - protein, 34 aa, Artificial Sequence
  Cyclic GFR-binding peptide
PTQVQLEPLTVLYYEIVRKKPIFEQLSNTLEDHL

SEQ ID NO: 71237 - protein, 39 aa, Artificial Sequence; identical to SEQ ID NO: 20409
  Cyclic GFR-binding peptide
  MOD_RES (5)..(6)..(37)..(39): Xaa is C or S

SEQ ID NO: 71238 - protein, 35 aa, Artificial Sequence
  Cyclic GFR-binding peptide
  MOD_RES (3)..(3): Xaa is C or S
VQXRPTQVQLEPLPVVYYEIVRKKPIFEQLSNTLE

SEQ ID NO: 71239 - protein, 25 aa, Artificial Sequence
  Cyclic GFR-binding peptide
LSNITVQIMDDSSNVIIGEMSNMVV

SEQ ID NO: 71240 - protein, 25 aa, Artificial Sequence
  Cyclic GFR-binding peptide
ELSNITMQIMDEYDKVVIGEMSEMV

SEQ ID NO: 71241 - protein, 31 aa, Artificial Sequence
  Cyclic GFR-binding peptide
  MOD_RES (30)..(30): Xaa is C or S
EPLPVVYYEYVRKKPKLEQLSNRLEEHLEXA

SEQ ID NO: 71242 - protein, 33 aa, Artificial Sequence
  Cyclic GFR-binding peptide
  MOD_RES (1)..(2)..(33): Xaa is C or S
XXVSQDLRPVQIRKIIGKTPKIKKATVMIVKSX

SEQ ID NO: 71243 - protein, 43 aa, Artificial Sequence; identical to SEQ ID NO: 24346
  Cyclic GFR-binding peptide
  MOD_RES (4)..(41)..(43): Xaa is C or S

SEQ ID NO: 71244 - protein, 26 aa, Artificial Sequence
  Cyclic GFR-binding peptide
QLRSVKVAKVDDSSNVIKEVQVNMVV

SEQ ID NO: 71245 - protein, 33 aa, Artificial Sequence; identical to SEQ ID NO: 20426
  Cyclic GFR-binding peptide
  MOD_RES (1)..(2): Xaa is C or S

SEQ ID NO: 71246 - protein, 38 aa, Artificial Sequence
  Cyclic GFR-binding peptide
  MOD_RES (3)..(4)..(36)..(38): Xaa is C or S
KAXXVPTELRPVQMRKIDEYDKVVKKATVEMVVEGXGX

SEQ ID NO: 71247 - protein, 30 aa, Artificial Sequence; identical to SEQ ID NO: 20429
  Cyclic GFR-binding peptide
  MOD_RES (2)..(3): Xaa is C or S

SEQ ID NO: 71248 - protein, 29 aa, Artificial Sequence
  Cyclic GFR-binding peptide
  MOD_RES (28)..(28): Xaa is C or S
LSNITVQIMDDSSNVIIGEMSNMVVRSXG

SEQ ID NO: 71249 - protein, 24 aa, Artificial Sequence
  Cyclic GFR-binding peptide
HEPLPVVYYEYVRKKPKLEQLSNR

SEQ ID NO: 71250 - protein, 34 aa, Artificial Sequence
  Cyclic GFR-binding peptide
  MOD_RES (6)..(7): Xaa is C or S
KIPKAXXVPTELRSVKMAKVDENEKVVKEVQVDM

SEQ ID NO: 71251 - protein, 30 aa, Artificial Sequence; identical to SEQ ID NO: 20434
  Cyclic GFR-binding peptide

SEQ ID NO: 71252 - protein, 29 aa, Artificial Sequence
  Cyclic GFR-binding peptide
  MOD_RES (1)..(1): Xaa is C or S
XVPTELEPLPMVYYDENEKVVEQLSNDMV

SEQ ID NO: 71253 - protein, 31 aa, Artificial Sequence
  Cyclic GFR-binding peptide
  MOD_RES (30)..(30): Xaa is C or S
TKLRPVQVRKIDDSSNVIKKATVNMVVRSXG

SEQ ID NO: 71254 - protein, 34 aa, Artificial Sequence
  Cyclic GFR-binding peptide
  MOD_RES (6)..(7): Xaa is C or S
TVPKPXXAPTQLRSVKVAKVDDSSNVIKEVQVNM

SEQ ID NO: 71255 - protein, 33 aa, Artificial Sequence; identical to SEQ ID NO: 24363
  Cyclic GFR-binding peptide

SEQ ID NO: 71256 - protein, 28 aa, Artificial Sequence
  Cyclic GFR-binding peptide
VPQALSNITIQIMVGRKPKVIGEMSMIV

SEQ ID NO: 71257 - protein, 34 aa, Artificial Sequence
  Cyclic GFR-binding peptide
  MOD_RES (31)..(33): Xaa is C or S
PTKLSNITVQIMDDSSNVIIGEMSNMVVRSXGXH

SEQ ID NO: 71258 - protein, 36 aa, Artificial Sequence; identical to SEQ ID NO: 20450
  Cyclic GFR-binding peptide
  MOD_RES (6)..(7): Xaa is C or S

SEQ ID NO: 71259 - protein, 27 aa, Artificial Sequence
  Cyclic GFR-binding peptide
  MOD_RES (1)..(1): Xaa is C or S
XAPTKLRSVKVAKVDDSSNVIKEVQVN

SEQ ID NO: 71260 - protein, 25 aa, Artificial Sequence
  Cyclic GFR-binding peptide
PTELRSVKMAKVDEYDKVVKEVQVE

SEQ ID NO: 71261 - protein, 37 aa, Artificial Sequence; identical to SEQ ID NO: 20457
  Cyclic GFR-binding peptide
  MOD_RES (4)..(5)..(37): Xaa is C or S

SEQ ID NO: 71262 - protein, 27 aa, Artificial Sequence
  Cyclic GFR-binding peptide
  MOD_RES (27)..(27): Xaa is C or S
EPLPMVYYDEYDKVVEQLSNEMVVEGX

SEQ ID NO: 71263 - protein, 33 aa, Artificial Sequence; identical to SEQ ID NO: 24374
  Cyclic GFR-binding peptide
  MOD_RES (3)..(3): Xaa is C or S

SEQ ID NO: 71264 - protein, 42 aa, Artificial Sequence
  Cyclic GFR-binding peptide
  MOD_RES (6)..(7)..(39)..(41): Xaa is C or S
TVPKPXXAPTQLRPVQVRKIDDSSNVIKKATVNMVVRAXGXH

SEQ ID NO: 71265 - protein, 34 aa, Artificial Sequence; identical to SEQ ID NO: 24375
  Cyclic GFR-binding peptide
  MOD_RES (2)..(2): Xaa is C or S

SEQ ID NO: 71266 - protein, 32 aa, Artificial Sequence; identical to SEQ ID NO: 24378
  Cyclic GFR-binding peptide
  MOD_RES (2)..(2): Xaa is C or S

SEQ ID NO: 71267 - protein, 38 aa, Artificial Sequence; identical to SEQ ID NO: 24379
  Cyclic GFR-binding peptide
  MOD_RES (3)..(3): Xaa is C or S

SEQ ID NO: 71268 - protein, 30 aa, Artificial Sequence
  Cyclic GFR-binding peptide
VPQALRSVKIAKVVGRKPKVKEVQVMIVRS

SEQ ID NO: 71269 - protein, 33 aa, Artificial Sequence; identical to SEQ ID NO: 24380
  Cyclic GFR-binding peptide
  MOD_RES (4)..(4): Xaa is C or S

SEQ ID NO: 71270 - protein, 34 aa, Artificial Sequence; identical to SEQ ID NO: 24381
  Cyclic GFR-binding peptide

SEQ ID NO: 71271 - protein, 26 aa, Artificial Sequence
  Cyclic GFR-binding peptide
VPTELEPLTMLYYDENEKVVEQLSND

SEQ ID NO: 71272 - protein, 37 aa, Artificial Sequence
  Cyclic GFR-binding peptide
  MOD_RES (4)..(5)..(37): Xaa is C or S
PKPXXAPTKLRPVQVRKIDDSSNVIKKATVNMVVRSX

SEQ ID NO: 71273 - protein, 33 aa, Artificial Sequence
  Cyclic GFR-binding peptide
  MOD_RES (2)..(3): Xaa is C or S
PXXVPQDLRSVKIAKVVGRTPKVKEVQVMVVKS

SEQ ID NO: 71274 - protein, 29 aa, Artificial Sequence
  Cyclic GFR-binding peptide
PTEERPVQMRKIRIKPHQGQHKKATVFLQ

SEQ ID NO: 71275 - protein, 36 aa, Artificial Sequence; identical to SEQ ID NO: 20477
  Cyclic GFR-binding peptide
  MOD_RES (5)..(6): Xaa is C or S

SEQ ID NO: 71276 - protein, 36 aa, Artificial Sequence
  Cyclic GFR-binding peptide
  MOD_RES (6)..(7): Xaa is C or S
ASASPXXVSQDLSNITIQIMIGKTPKIIGEMSMIVK

SEQ ID NO: 71277 - protein, 32 aa, Artificial Sequence; identical to SEQ ID NO: 24389
  Cyclic GFR-binding peptide
  MOD_RES (3)..(3): Xaa is C or S

SEQ ID NO: 71278 - protein, 29 aa, Artificial Sequence
  Cyclic GFR-binding peptide
RVHHEPLPVVYYEYVRKKPKLEQLSNRLE

SEQ ID NO: 71279 - protein, 23 aa, Artificial Sequence
  Cyclic GFR-binding peptide
HEPLTVLYYEYVRKKPKLEQLSN

SEQ ID NO: 71280 - protein, 33 aa, Artificial Sequence; identical to SEQ ID NO: 20484
  Cyclic GFR-binding peptide
  MOD_RES (4)..(5): Xaa is C or S

SEQ ID NO: 71281 - protein, 25 aa, Artificial Sequence
  Cyclic GFR-binding peptide
PQALSNITIQIMVGRKPKVIGEMSM

SEQ ID NO: 71282 - protein, 38 aa, Artificial Sequence
  Cyclic GFR-binding peptide
  MOD_RES (37)..(37): Xaa is C or S
RPTQVQLEPLTVLYYEIVRKKPIFEQLSNTLEDHLAXK

SEQ ID NO: 71283 - protein, 32 aa, Artificial Sequence; identical to SEQ ID NO: 20487
  Cyclic GFR-binding peptide
  MOD_RES (1)..(2): Xaa is C or S

SEQ ID NO: 71284 - protein, 29 aa, Artificial Sequence
  Cyclic GFR-binding peptide
QVQLSNITVQIMEIVRKKPIFIGEMSTLE

SEQ ID NO: 71285 - protein, 34 aa, Artificial Sequence
  Cyclic GFR-binding peptide
  MOD_RES (3)..(3): Xaa is C or S
VKXQPSRVHHEPLTVLYYEYVRKKPKLEQLSNRL

SEQ ID NO: 71286 - protein, 40 aa, Artificial Sequence
  Cyclic GFR-binding peptide
  MOD_RES (5)..(6)..(37)..(39): Xaa is C or S
SASPXXVPQDLRPVQIRKIVGRTPKVKKATVMVVKSXKXS

SEQ ID NO: 71287 - protein, 34 aa, Artificial Sequence; identical to SEQ ID NO: 20493
  Cyclic GFR-binding peptide
  MOD_RES (7)..(7): Xaa is C or S

SEQ ID NO: 71288 - protein, 38 aa, Artificial Sequence; identical to SEQ ID NO: 24405
  Cyclic GFR-binding peptide
  MOD_RES (1)..(35)..(37): Xaa is C or S

SEQ ID NO: 71289 - protein, 22 aa, Artificial Sequence
  Cyclic GFR-binding peptide
RSVKMAKVRIKPHQGQHKEVQV

SEQ ID NO: 71290 - protein, 45 aa, Artificial Sequence
  Cyclic GFR-binding peptide
  MOD_RES (5)..(42)..(44): Xaa is C or S
SSVKXQPSRVHHEPLTVLYYEYVRKKPKLEQLSNRLEEHLEXAXA

SEQ ID NO: 71291 - protein, 29 aa, Artificial Sequence
  Cyclic GFR-binding peptide
VSQDLRPVQIRKIIGKTPKIKKATVMIVK

SEQ ID NO: 71292 - protein, 33 aa, Artificial Sequence
  Cyclic GFR-binding peptide
  MOD_RES (4)..(4): Xaa is C or S
NVQXRPTQVQLEPLTVLYYEIVRKKPIFEQLSN

SEQ ID NO: 71293 - protein, 30 aa, Artificial Sequence
  Cyclic GFR-binding peptide
  MOD_RES (30)..(30): Xaa is C or S
EPLPVVYYEIVRKKPIFEQLSNTLEDHLAX

SEQ ID NO: 71294 - protein, 36 aa, Artificial Sequence; identical to SEQ ID NO: 20501
  Cyclic GFR-binding peptide
  MOD_RES (1)..(33)..(35): Xaa is C or S

SEQ ID NO: 71295 - protein, 30 aa, Artificial Sequence; identical to SEQ ID NO: 20502
  Cyclic GFR-binding peptide
  MOD_RES (29)..(29): Xaa is C or S

SEQ ID NO: 71296 - protein, 41 aa, Artificial Sequence
  Cyclic GFR-binding peptide
  MOD_RES (6)..(7)..(39)..(41): Xaa is C or S
KIPKAXXVPTELRSVKMAKVDENEKVVKEVQVDMVVEGXGX

SEQ ID NO: 71297 - protein, 31 aa, Artificial Sequence
  Cyclic GFR-binding peptide
  MOD_RES (1)..(1): Xaa is C or S
XVPTELRSVKMAKVDENEKVVKEVQVDMVVE

SEQ ID NO: 71298 - protein, 33 aa, Artificial Sequence
  Cyclic GFR-binding peptide
  MOD_RES (5)..(6): Xaa is C or S
IPKAXXVPTELSNITMQIMDEYDKVVIGEMSEM

SEQ ID NO: 71299 - protein, 34 aa, Artificial Sequence
  Cyclic GFR-binding peptide
  MOD_RES (32)..(34): Xaa is C or S
VPTELSNITMQIMDENEKVVIGEMSDMVVEGXGX

SEQ ID NO: 71300 - protein, 26 aa, Artificial Sequence
  Cyclic GFR-binding peptide
QDLSNITIQIMVGRTPKVIGEMSMVV

SEQ ID NO: 71301 - protein, 32 aa, Artificial Sequence
  Cyclic GFR-binding peptide
  MOD_RES (5)..(6): Xaa is C or S
IPKAXXVPTELSNITMQIMDEYDKVVIGEMSE

SEQ ID NO: 71302 - protein, 29 aa, Artificial Sequence
  Cyclic GFR-binding peptide
VPTELEPLPMVYYDENEKVVEQLSNDMVV

SEQ ID NO: 71303 - protein, 31 aa, Artificial Sequence
  Cyclic GFR-binding peptide
  MOD_RES (29)..(31): Xaa is C or S
QDLRSVKIAKVIGKTPKIKEVQVMIVKSXKX

SEQ ID NO: 71304 - protein, 31 aa, Artificial Sequence
  Cyclic GFR-binding peptide
PTEEEPLTMLYYRIKPHQGQHEQLSNFLQHN

SEQ ID NO: 71305 - protein, 35 aa, Artificial Sequence
  Cyclic GFR-binding peptide
  MOD_RES (3)..(3): Xaa is C or S
LEXVPTEEEPLPMVYYRIKPHQGQHEQLSNFLQHN

SEQ ID NO: 71306 - protein, 40 aa, Artificial Sequence; identical to SEQ ID NO: 24435
  Cyclic GFR-binding peptide
  MOD_RES (2)..(39): Xaa is C or S

SEQ ID NO: 71307 - protein, 28 aa, Artificial Sequence
  Cyclic GFR-binding peptide
TQVQLRSVKVAKVEIVRKKPIFKEVQVT

SEQ ID NO: 71308 - protein, 33 aa, Artificial Sequence
  Cyclic GFR-binding peptide
  MOD_RES (30)..(32): Xaa is C or S
SQDLRSVKIAKVIGKTPKIKEVQVMIVKSXKXS

SEQ ID NO: 71309 - protein, 36 aa, Artificial Sequence
  Cyclic GFR-binding peptide
  MOD_RES (2)..(34)..(36): Xaa is C or S
TXAPTKLSNITVQIMDDSSNVIIGEMSNMVVRSXGX

SEQ ID NO: 71310 - protein, 26 aa, Artificial Sequence
  Cyclic GFR-binding peptide
EPLPVVYYEIVRKKPIFEQLSNTLED

SEQ ID NO: 71311 - protein, 33 aa, Artificial Sequence; identical to SEQ ID NO: 20523
  Cyclic GFR-binding peptide
  MOD_RES (3)..(4): Xaa is C or S

SEQ ID NO: 71312 - protein, 26 aa, Artificial Sequence
  Cyclic GFR-binding peptide
EEEPLPMVYYRIKPHQGQHEQLSNFL

SEQ ID NO: 71313 - protein, 30 aa, Artificial Sequence
  Cyclic GFR-binding peptide
  MOD_RES (4)..(5): Xaa is C or S
PKPXXAPTQLRPVQVRKIDDSSNVIKKATV

SEQ ID NO: 71314 - protein, 42 aa, Artificial Sequence
  Cyclic GFR-binding peptide
  MOD_RES (4)..(41): Xaa is C or S
NVQXRPTQVQLEPLTVLYYEIVRKKPIFEQLSNTLEDHLAXK

SEQ ID NO: 71315 - protein, 31 aa, Artificial Sequence; identical to SEQ ID NO: 24445
  Cyclic GFR-binding peptide
  MOD_RES (30)..(30): Xaa is C or S

SEQ ID NO: 71316 - protein, 33 aa, Artificial Sequence; identical to SEQ ID NO: 20529
  Cyclic GFR-binding peptide
  MOD_RES (5)..(6): Xaa is C or S

SEQ ID NO: 71317 - protein, 27 aa, Artificial Sequence
  Cyclic GFR-binding peptide
TQVQLEPLPVVYYEIVRKKPIFEQLSN

SEQ ID NO: 71318 - protein, 25 aa, Artificial Sequence
  Cyclic GFR-binding peptide
RPVQIRKIVGRKPKVKKATVMIVRS

SEQ ID NO: 71319 - protein, 35 aa, Artificial Sequence; identical to SEQ ID NO: 24447
  Cyclic GFR-binding peptide
  MOD_RES (33)..(35): Xaa is C or S

SEQ ID NO: 71320 - protein, 35 aa, Artificial Sequence; identical to SEQ ID NO: 20531
  Cyclic GFR-binding peptide
  MOD_RES (4)..(5): Xaa is C or S

SEQ ID NO: 71321 - protein, 35 aa, Artificial Sequence; identical to SEQ ID NO: 24454
  Cyclic GFR-binding peptide
  MOD_RES (34)..(34): Xaa is C or S

SEQ ID NO: 71322 - protein, 24 aa, Artificial Sequence
  Cyclic GFR-binding peptide
PTQLEPLPVVYYDDSSNVIEQLSN

SEQ ID NO: 71323 - protein, 30 aa, Artificial Sequence; identical to SEQ ID NO: 20537
  Cyclic GFR-binding peptide
  MOD_RES (30)..(30): Xaa is C or S

SEQ ID NO: 71324 - protein, 31 aa, Artificial Sequence
  Cyclic GFR-binding peptide
  MOD_RES (30)..(30): Xaa is C or S
EEPLTMLYYRIKPHQGQHEQLSNFLQHNKXE

SEQ ID NO: 71325 - protein, 37 aa, Artificial Sequence
  Cyclic GFR-binding peptide
  MOD_RES (3)..(4)..(36): Xaa is C or S
KPXXAPTKLSNITVQIMDDSSNVIIGEMSNMVVRSXG

SEQ ID NO: 71326 - protein, 29 aa, Artificial Sequence
  Cyclic GFR-binding peptide
  MOD_RES (2)..(3): Xaa is C or S
AXXVPTELEPLTMLYYDENEKVVEQLSND

SEQ ID NO: 71327 - protein, 32 aa, Artificial Sequence
  Cyclic GFR-binding peptide
  MOD_RES (5)..(6): Xaa is C or S
SASPXXVSQDLRSVKIAKVIGKTPKIKEVQVM

SEQ ID NO: 71328 - protein, 24 aa, Artificial Sequence
  Cyclic GFR-binding peptide
PTQLRPVQVRKIDDSSNVIKKATV

SEQ ID NO: 71329 - protein, 32 aa, Artificial Sequence; identical to SEQ ID NO: 20546
  Cyclic GFR-binding peptide
  MOD_RES (2)..(3): Xaa is C or S

SEQ ID NO: 71330 - protein, 32 aa, Artificial Sequence
  Cyclic GFR-binding peptide
  MOD_RES (31)..(31): Xaa is C or S
LEPLTVLYYEIVRKKPIFEQLSNTLEDHLAXK

SEQ ID NO: 71331 - protein, 36 aa, Artificial Sequence
  Cyclic GFR-binding peptide
  MOD_RES (1)..(2)..(33)..(35): Xaa is C or S
XXVPQDLRSVKIAKVVGRTPKVKEVQVMVVKSXKXS

SEQ ID NO: 71332 - protein, 32 aa, Artificial Sequence
  Cyclic GFR-binding peptide
  MOD_RES (1)..(2): Xaa is C or S
XXVPTELRSVKMAKVDENEKVVKEVQVDMVVE

SEQ ID NO: 71333 - protein, 28 aa, Artificial Sequence
  Cyclic GFR-binding peptide
LSNITVQIMEIVRKKPIFIGEMSTLEDH

SEQ ID NO: 71334 - protein, 29 aa, Artificial Sequence
  Cyclic GFR-binding peptide
  MOD_RES (2)..(3): Xaa is C or S
PXXAPTKLRSVKVAKVDDSSNVIKEVQVN

SEQ ID NO: 71335 - protein, 37 aa, Artificial Sequence
  Cyclic GFR-binding peptide
  MOD_RES (7)..(7): Xaa is C or S
HVTKPTXAPTKLSNITVQIMDDSSNVIIGEMSNMVVR

SEQ ID NO: 71336 - protein, 36 aa, Artificial Sequence; identical to SEQ ID NO: 20562
  Cyclic GFR-binding peptide
  MOD_RES (4)..(36): Xaa is C or S

SEQ ID NO: 71337 - protein, 40 aa, Artificial Sequence
  Cyclic GFR-binding peptide
  MOD_RES (4)..(5)..(37)..(39): Xaa is C or S
PKAXXVPTELSNITMQIMDENEKVVIGEMSDMVVEGXGXR

SEQ ID NO: 71338 - protein, 23 aa, Artificial Sequence
  Cyclic GFR-binding peptide
LRSVKMAKVDENEKVVKEVQVDM

SEQ ID NO: 71339 - protein, 26 aa, Artificial Sequence
  Cyclic GFR-binding peptide
PTKLEPLPVVYYDDSSNVIEQLSNNM

SEQ ID NO: 71340 - protein, 31 aa, Artificial Sequence
  Cyclic GFR-binding peptide
  MOD_RES (31)..(31): Xaa is C or S
PTQLRSVKVAKVDDSSNVIKEVQVNMVVRAX

SEQ ID NO: 71341 - protein, 38 aa, Artificial Sequence; identical to SEQ ID NO: 24476
  Cyclic GFR-binding peptide
  MOD_RES (37)..(37): Xaa is C or S

SEQ ID NO: 71342 - protein, 34 aa, Artificial Sequence
  Cyclic GFR-binding peptide
  MOD_RES (3)..(4): Xaa is C or S
APXXVPQALRPVQIRKIVGRKPKVKKATVMIVRS

SEQ ID NO: 71343 - protein, 24 aa, Artificial Sequence
  Cyclic GFR-binding peptide
HHRPVQVRKIEYVRKKPKLKKATV

SEQ ID NO: 71344 - protein, 34 aa, Artificial Sequence; identical to SEQ ID NO: 24478
  Cyclic GFR-binding peptide
  MOD_RES (5)..(5): Xaa is C or S

SEQ ID NO: 71345 - protein, 22 aa, Artificial Sequence
  Cyclic GFR-binding peptide
EPLTVLYYEIVRKKPIFEQLSN

SEQ ID NO: 71346 - protein, 29 aa, Artificial Sequence
  Cyclic GFR-binding peptide
EERSVKMAKVRIKPHQGQHKEVQVFLQHN

SEQ ID NO: 71347 - protein, 34 aa, Artificial Sequence; identical to SEQ ID NO: 24483
  Cyclic GFR-binding peptide
  MOD_RES (2)..(2): Xaa is C or S

SEQ ID NO: 71348 - protein, 25 aa, Artificial Sequence
  Cyclic GFR-binding peptide
PTQLEPLPVVYYDDSSNVIEQLSNN

SEQ ID NO: 71349 - protein, 26 aa, Artificial Sequence
  Cyclic GFR-binding peptide
ELEPLPMVYYDENEKVVEQLSNDMVV

SEQ ID NO: 71350 - protein, 40 aa, Artificial Sequence; identical to SEQ ID NO: 20577
  Cyclic GFR-binding peptide
  MOD_RES (5)..(6)..(38)..(40): Xaa is C or S

SEQ ID NO: 71351 - protein, 25 aa, Artificial Sequence
  Cyclic GFR-binding peptide
QDLRPVQIRKIIGKTPKIKKATVMI

SEQ ID NO: 71352 - protein, 33 aa, Artificial Sequence; identical to SEQ ID NO: 24490
  Cyclic GFR-binding peptide

SEQ ID NO: 71353 - protein, 31 aa, Artificial Sequence; identical to SEQ ID NO: 20582
  Cyclic GFR-binding peptide
  MOD_RES (30)..(30): Xaa is C or S

SEQ ID NO: 71354 - protein, 32 aa, Artificial Sequence
  Cyclic GFR-binding peptide
  MOD_RES (31)..(31): Xaa is C or S
PTKLSNITVQIMDDSSNVIIGEMSNMVVRSXG

SEQ ID NO: 71355 - protein, 40 aa, Artificial Sequence
  Cyclic GFR-binding peptide
  MOD_RES (5)..(6)..(38)..(40): Xaa is C or S
IPKAXXVPTELRPVQMRKIDENEKVVKKATVDMVVEGXGX

SEQ ID NO: 71356 - protein, 36 aa, Artificial Sequence
  Cyclic GFR-binding peptide
  MOD_RES (36)..(36): Xaa is C or S
PTQVQLEPLPVVYYEIVRKKPIFEQLSNTLEDHLAX

SEQ ID NO: 71357 - protein, 34 aa, Artificial Sequence
  Cyclic GFR-binding peptide
  MOD_RES (1)..(2)..(33): Xaa is C or S
XXVSQDLRPVQIRKIIGKTPKIKKATVMIVKSXK

SEQ ID NO: 71358 - protein, 24 aa, Artificial Sequence
  Cyclic GFR-binding peptide
TQLSNITVQIMDDSSNVIIGEMSN

SEQ ID NO: 71359 - protein, 29 aa, Artificial Sequence
  Cyclic GFR-binding peptide
  MOD_RES (28)..(28): Xaa is C or S
ALRSVKIAKVVGRKPKVKEVQVMIVRSXK

SEQ ID NO: 71360 - protein, 27 aa, Artificial Sequence
  Cyclic GFR-binding peptide
  MOD_RES (1)..(1): Xaa is C or S
XVPTELEPLTMLYYDENEKVVEQLSND

SEQ ID NO: 71361 - protein, 32 aa, Artificial Sequence
  Cyclic GFR-binding peptide
  MOD_RES (31)..(31): Xaa is C or S
VSQDLRPVQIRKIIGKTPKIKKATVMIVKSXK

SEQ ID NO: 71362 - protein, 29 aa, Artificial Sequence
  Cyclic GFR-binding peptide
  MOD_RES (27)..(29): Xaa is C or S
EPLPVVYYDDSSNVIEQLSNNMVVRSXGX

SEQ ID NO: 71363 - protein, 34 aa, Artificial Sequence; identical to SEQ ID NO: 24501
  Cyclic GFR-binding peptide
  MOD_RES (3)..(3): Xaa is C or S

SEQ ID NO: 71364 - protein, 37 aa, Artificial Sequence
  Cyclic GFR-binding peptide
  MOD_RES (2)..(3)..(35)..(37): Xaa is C or S
PXXAPTQLRPVQVRKIDDSSNVIKKATVNMVVRAXGX

SEQ ID NO: 71365 - protein, 35 aa, Artificial Sequence
  Cyclic GFR-binding peptide
  MOD_RES (2)..(3)..(34): Xaa is C or S
PXXVSQDLSNITIQIMIGKTPKIIGEMSMIVKSXK

SEQ ID NO: 71366 - protein, 26 aa, Artificial Sequence
  Cyclic GFR-binding peptide
  MOD_RES (1)..(1): Xaa is C or S
XVPQALRPVQIRKIVGRKPKVKKATV

SEQ ID NO: 71367 - protein, 37 aa, Artificial Sequence; identical to SEQ ID NO: 20608
  Cyclic GFR-binding peptide
  MOD_RES (4)..(5)..(37): Xaa is C or S

SEQ ID NO: 71368 - protein, 31 aa, Artificial Sequence; identical to SEQ ID NO: 20609
  Cyclic GFR-binding peptide
  MOD_RES (29)..(31): Xaa is C or S

SEQ ID NO: 71369 - protein, 33 aa, Artificial Sequence
  Cyclic GFR-binding peptide
  MOD_RES (5)..(5): Xaa is C or S
TKPTXAPTKLRPVQVRKIDDSSNVIKKATVNMV

SEQ ID NO: 71370 - protein, 30 aa, Artificial Sequence
  Cyclic GFR-binding peptide
  MOD_RES (2)..(3): Xaa is C or S
AXXVPTELRSVKMAKVDEYDKVVKEVQVEM

SEQ ID NO: 71371 - protein, 36 aa, Artificial Sequence; identical to SEQ ID NO: 20616
  Cyclic GFR-binding peptide
  MOD_RES (6)..(7): Xaa is C or S

SEQ ID NO: 71372 - protein, 26 aa, Artificial Sequence
  Cyclic GFR-binding peptide
PTKLRSVKVAKVDDSSNVIKEVQVNM

SEQ ID NO: 71373 - protein, 30 aa, Artificial Sequence
  Cyclic GFR-binding peptide
  MOD_RES (29)..(29): Xaa is C or S
QLSNITVQIMDDSSNVIIGEMSNMVVRAXG

SEQ ID NO: 71374 - protein, 32 aa, Artificial Sequence; identical to SEQ ID NO: 20619
  Cyclic GFR-binding peptide
  MOD_RES (2)..(3): Xaa is C or S

SEQ ID NO: 71375 - protein, 29 aa, Artificial Sequence
  Cyclic GFR-binding peptide
PTELEPLTMLYYDEYDKVVEQLSNEMVVE

SEQ ID NO: 71376 - protein, 30 aa, Artificial Sequence
  Cyclic GFR-binding peptide
  MOD_RES (1)..(1): Xaa is C or S
XRPTQVQLEPLPVVYYEIVRKKPIFEQLSN

SEQ ID NO: 71377 - protein, 32 aa, Artificial Sequence
  Cyclic GFR-binding peptide
  MOD_RES (2)..(2): Xaa is C or S
TXAPTKLRPVQVRKIDDSSNVIKKATVNMVVR

SEQ ID NO: 71378 - protein, 32 aa, Artificial Sequence
  Cyclic GFR-binding peptide
  MOD_RES (2)..(3): Xaa is C or S
PXXAPTKLRPVQVRKIDDSSNVIKKATVNMVV

SEQ ID NO: 71379 - protein, 22 aa, Artificial Sequence
  Cyclic GFR-binding peptide
KLEPLTVLYYDDSSNVIEQLSN

SEQ ID NO: 71380 - protein, 36 aa, Artificial Sequence
  Cyclic GFR-binding peptide
  MOD_RES (5)..(5): Xaa is C or S
SSVKXQPSRVHHEPLPVVYYEYVRKKPKLEQLSNRL

SEQ ID NO: 71381 - protein, 26 aa, Artificial Sequence
  Cyclic GFR-binding peptide
EPLTVLYYEIVRKKPIFEQLSNTLED

SEQ ID NO: 71382 - protein, 38 aa, Artificial Sequence
  Cyclic GFR-binding peptide
  MOD_RES (4)..(5)..(36)..(38): Xaa is C or S
ASPXXVSQDLRSVKIAKVIGKTPKIKEVQVMIVKSXKX

SEQ ID NO: 71383 - protein, 39 aa, Artificial Sequence
  Cyclic GFR-binding peptide
  MOD_RES (5)..(6)..(38): Xaa is C or S
VPKPXXAPTQLRPVQVRKIDDSSNVIKKATVNMVVRAXG

SEQ ID NO: 71384 - protein, 33 aa, Artificial Sequence
  Cyclic GFR-binding peptide
  MOD_RES (31)..(33): Xaa is C or S
PTELSNITMQIMDENEKVVIGEMSDMVVEGXGX

SEQ ID NO: 71385 - protein, 24 aa, Artificial Sequence
  Cyclic GFR-binding peptide
EEEPLPMVYYRIKPHQGQHEQLSN

SEQ ID NO: 71386 - protein, 36 aa, Artificial Sequence
  Cyclic GFR-binding peptide
  MOD_RES (4)..(5): Xaa is C or S
PKAXXVPTELSNITMQIMDENEKVVIGEMSDMVVEG

SEQ ID NO: 71387 - protein, 36 aa, Artificial Sequence; identical to SEQ ID NO: 20639
  Cyclic GFR-binding peptide
  MOD_RES (6)..(7): Xaa is C or S

SEQ ID NO: 71388 - protein, 29 aa, Artificial Sequence
  Cyclic GFR-binding peptide
  MOD_RES (29)..(29): Xaa is C or S
QDLEPLPIVYYIGKTPKIEQLSNMIVKSX

SEQ ID NO: 71389 - protein, 30 aa, Artificial Sequence; identical to SEQ ID NO: 20643
  Cyclic GFR-binding peptide
  MOD_RES (28)..(30): Xaa is C or S

SEQ ID NO: 71390 - protein, 37 aa, Artificial Sequence
  Cyclic GFR-binding peptide
  MOD_RES (4)..(5)..(36): Xaa is C or S
ASPXXVSQDLRPVQIRKIIGKTPKIKKATVMIVKSXK

SEQ ID NO: 71391 - protein, 26 aa, Artificial Sequence
  Cyclic GFR-binding peptide
QDLRSVKIAKVVGRTPKVKEVQVMVV

SEQ ID NO: 71392 - protein, 34 aa, Artificial Sequence; identical to SEQ ID NO: 24527
  Cyclic GFR-binding peptide
  MOD_RES (6)..(6): Xaa is C or S

SEQ ID NO: 71393 - protein, 27 aa, Artificial Sequence
  Cyclic GFR-binding peptide
VPTELEPLPMVYYDENEKVVEQLSNDM

SEQ ID NO: 71394 - protein, 26 aa, Artificial Sequence
  Cyclic GFR-binding peptide
TKLRSVKVAKVDDSSNVIKEVQVNMV

SEQ ID NO: 71395 - protein, 39 aa, Artificial Sequence
  Cyclic GFR-binding peptide
  MOD_RES (3)..(4)..(36)..(38): Xaa is C or S
KAXXVPTELRSVKMAKVDEYDKVVKEVQVEMVVEGXGXR

SEQ ID NO: 71396 - protein, 26 aa, Artificial Sequence
  Cyclic GFR-binding peptide
DLEPLPIVYYIGKTPKIEQLSNMIVK

SEQ ID NO: 71397 - protein, 27 aa, Artificial Sequence
  Cyclic GFR-binding peptide
VHHEPLPVVYYEYVRKKPKLEQLSNRL

SEQ ID NO: 71398 - protein, 36 aa, Artificial Sequence; identical to SEQ ID NO: 20655
  Cyclic GFR-binding peptide
  MOD_RES (1)..(2)..(34)..(36): Xaa is C or S

SEQ ID NO: 71399 - protein, 31 aa, Artificial Sequence
  Cyclic GFR-binding peptide
  MOD_RES (28)..(30): Xaa is C or S
LSNITVQIMDDSSNVIIGEMSNMVVRSXGXH

SEQ ID NO: 71400 - protein, 39 aa, Artificial Sequence
  Cyclic GFR-binding peptide
  MOD_RES (1)..(38): Xaa is C or S
XQPSRVHHEPLTVLYYEYVRKKPKLEQLSNRLEEHLEXA

SEQ ID NO: 71401 - protein, 29 aa, Artificial Sequence
  Cyclic GFR-binding peptide
  MOD_RES (27)..(29): Xaa is C or S
RSVKVAKVDDSSNVIKEVQVNMVVRAXGX

SEQ ID NO: 71402 - protein, 23 aa, Artificial Sequence
  Cyclic GFR-binding peptide
LEPLPMVYYDENEKVVEQLSNDM

SEQ ID NO: 71403 - protein, 30 aa, Artificial Sequence
  Cyclic GFR-binding peptide
  MOD_RES (2)..(3): Xaa is C or S
PXXAPTQLSNITVQIMDDSSNVIIGEMSNM

SEQ ID NO: 71404 - protein, 33 aa, Artificial Sequence
  Cyclic GFR-binding peptide
  MOD_RES (3)..(4): Xaa is C or S
KAXXVPTELRSVKMAKVDENEKVVKEVQVDMVV

SEQ ID NO: 71405 - protein, 27 aa, Artificial Sequence
  Cyclic GFR-binding peptide
  MOD_RES (2)..(2): Xaa is C or S
TXAPTKLSNITVQIMDDSSNVIIGEMS

SEQ ID NO: 71406 - protein, 29 aa, Artificial Sequence
  Cyclic GFR-binding peptide
  MOD_RES (1)..(1): Xaa is C or S
XVPQDLEPLPIVYYVGRTPKVEQLSNMVV

SEQ ID NO: 71407 - protein, 37 aa, Artificial Sequence
  Cyclic GFR-binding peptide
  MOD_RES (3)..(4)..(35)..(37): Xaa is C or S
SPXXVSQDLRPVQIRKIIGKTPKIKKATVMIVKSXKX

SEQ ID NO: 71408 - protein, 34 aa, Artificial Sequence
  Cyclic GFR-binding peptide
  MOD_RES (5)..(6): Xaa is C or S
IPKAXXVPTELSNITMQIMDEYDKVVIGEMSEMV

SEQ ID NO: 71409 - protein, 37 aa, Artificial Sequence
  Cyclic GFR-binding peptide
  MOD_RES (5)..(37): Xaa is C or S
TKPTXAPTKLRSVKVAKVDDSSNVIKEVQVNMVVRSX

SEQ ID NO: 71410 - protein, 35 aa, Artificial Sequence; identical to SEQ ID NO: 24543
  Cyclic GFR-binding peptide
  MOD_RES (33)..(35): Xaa is C or S

SEQ ID NO: 71411 - protein, 36 aa, Artificial Sequence; identical to SEQ ID NO: 24545
  Cyclic GFR-binding peptide
  MOD_RES (33)..(35): Xaa is C or S

SEQ ID NO: 71412 - protein, 37 aa, Artificial Sequence; identical to SEQ ID NO: 20675
  Cyclic GFR-binding peptide
  MOD_RES (1)..(2)..(34)..(36): Xaa is C or S

SEQ ID NO: 71413 - protein, 30 aa, Artificial Sequence
  Cyclic GFR-binding peptide
APTKLSNITVQIMDDSSNVIIGEMSNMVVR

SEQ ID NO: 71414 - protein, 21 aa, Artificial Sequence
  Cyclic GFR-binding peptide
RPVQIRKIVGRKPKVKKATVM

SEQ ID NO: 71415 - protein, 26 aa, Artificial Sequence
  Cyclic GFR-binding peptide
EPLTMLYYDENEKVVEQLSNDMVVEG

SEQ ID NO: 71416 - protein, 36 aa, Artificial Sequence
  Cyclic GFR-binding peptide
  MOD_RES (5)..(6): Xaa is C or S
VPKPXXAPTKLRSVKVAKVDDSSNVIKEVQVNMVVR

SEQ ID NO: 71417 - protein, 38 aa, Artificial Sequence
  Cyclic GFR-binding peptide
  MOD_RES (4)..(5)..(36)..(38): Xaa is C or S
ASPXXVPQDLRPVQIRKIVGRTPKVKKATVMVVKSXKX

SEQ ID NO: 71418 - protein, 38 aa, Artificial Sequence; identical to SEQ ID NO: 20683
  Cyclic GFR-binding peptide
  MOD_RES (5)..(6)..(38): Xaa is C or S

SEQ ID NO: 71419 - protein, 41 aa, Artificial Sequence
  Cyclic GFR-binding peptide
  MOD_RES (6)..(7)..(39)..(41): Xaa is C or S
KIPKAXXVPTELRPVQMRKIDENEKVVKKATVDMVVEGXGX

SEQ ID NO: 71420 - protein, 37 aa, Artificial Sequence
  Cyclic GFR-binding peptide
  MOD_RES (3)..(37): Xaa is C or S
LEXVPTEEEPLPMVYYRIKPHQGQHEQLSNFLQHNKX

SEQ ID NO: 71421 - protein, 28 aa, Artificial Sequence
  Cyclic GFR-binding peptide
  MOD_RES (27)..(27): Xaa is C or S
RSVKMAKVDENEKVVKEVQVDMVVEGXG

SEQ ID NO: 71422 - protein, 37 aa, Artificial Sequence
  Cyclic GFR-binding peptide
  MOD_RES (2)..(3)..(34)..(36): Xaa is C or S
PXXVSQDLRPVQIRKIIGKTPKIKKATVMIVKSXKXS

SEQ ID NO: 71423 - protein, 28 aa, Artificial Sequence
  Cyclic GFR-binding peptide
RPVQVRKIEYVRKKPKLKKATVRLEEHL

SEQ ID NO: 71424 - protein, 28 aa, Artificial Sequence
  Cyclic GFR-binding peptide
QVQLSNITVQIMEIVRKKPIFIGEMSTL

SEQ ID NO: 71425 - protein, 33 aa, Artificial Sequence
  Cyclic GFR-binding peptide
  MOD_RES (6)..(7): Xaa is C or S
ASAAPXXVPQALSNITIQIMVGRKPKVIGEMSM

SEQ ID NO: 71426 - protein, 36 aa, Artificial Sequence
  Cyclic GFR-binding peptide
  MOD_RES (5)..(6): Xaa is C or S
VPKPXXAPTKLSNITVQIMDDSSNVIIGEMSNMVVR

SEQ ID NO: 71427 - protein, 29 aa, Artificial Sequence
  Cyclic GFR-binding peptide
HEPLTVLYYEYVRKKPKLEQLSNRLEEHL

SEQ ID NO: 71428 - protein, 37 aa, Artificial Sequence
  Cyclic GFR-binding peptide
  MOD_RES (4)..(5)..(37): Xaa is C or S
PKPXXAPTQLRPVQVRKIDDSSNVIKKATVNMVVRAX

SEQ ID NO: 71429 - protein, 30 aa, Artificial Sequence
  Cyclic GFR-binding peptide
  MOD_RES (2)..(3): Xaa is C or S
PXXAPTKLSNITVQIMDDSSNVIIGEMSNM

SEQ ID NO: 71430 - protein, 29 aa, Artificial Sequence
  Cyclic GFR-binding peptide
  MOD_RES (1)..(1): Xaa is C or S
XVSQDLEPLPIVYYIGKTPKIEQLSNMIV

SEQ ID NO: 71431 - protein, 25 aa, Artificial Sequence
  Cyclic GFR-binding peptide
VPQALRPVQIRKIVGRKPKVKKATV

SEQ ID NO: 71432 - protein, 29 aa, Artificial Sequence
  Cyclic GFR-binding peptide
PTQVQLSNITVQIMEIVRKKPIFIGEMST

SEQ ID NO: 71433 - protein, 35 aa, Artificial Sequence
  Cyclic GFR-binding peptide
  MOD_RES (6)..(7): Xaa is C or S
ASASPXXVSQDLSNITIQIMIGKTPKIIGEMSMIV

SEQ ID NO: 71434 - protein, 31 aa, Artificial Sequence; identical to SEQ ID NO: 20693
  Cyclic GFR-binding peptide
  MOD_RES (31)..(31): Xaa is C or S

SEQ ID NO: 71435 - protein, 33 aa, Artificial Sequence
  Cyclic GFR-binding peptide
  MOD_RES (4)..(5): Xaa is C or S
PKAXXVPTELRSVKMAKVDEYDKVVKEVQVEMV

SEQ ID NO: 71436 - protein, 31 aa, Artificial Sequence; identical to SEQ ID NO: 20696
  Cyclic GFR-binding peptide
  MOD_RES (4)..(5): Xaa is C or S

SEQ ID NO: 71437 - protein, 39 aa, Artificial Sequence; identical to SEQ ID NO: 24566
  Cyclic GFR-binding peptide
  MOD_RES (5)..(5): Xaa is C or S

SEQ ID NO: 71438 - protein, 34 aa, Artificial Sequence
  Cyclic GFR-binding peptide
  MOD_RES (31)..(33): Xaa is C or S
VSQDLRSVKIAKVIGKTPKIKEVQVMIVKSXKXS

SEQ ID NO: 71439 - protein, 30 aa, Artificial Sequence; identical to SEQ ID NO: 20698
  Cyclic GFR-binding peptide
  MOD_RES (27)..(29): Xaa is C or S

SEQ ID NO: 71440 - protein, 35 aa, Artificial Sequence
  Cyclic GFR-binding peptide
  MOD_RES (5)..(6): Xaa is C or S
VPKPXXAPTKLSNITVQIMDDSSNVIIGEMSNMVV

SEQ ID NO: 71441 - protein, 33 aa, Artificial Sequence
  Cyclic GFR-binding peptide
  MOD_RES (5)..(5): Xaa is C or S
TKPTXAPTKLSNITVQIMDDSSNVIIGEMSNMV

SEQ ID NO: 71442 - protein, 23 aa, Artificial Sequence
  Cyclic GFR-binding peptide
KLRSVKVAKVDDSSNVIKEVQVN

SEQ ID NO: 71443 - protein, 31 aa, Artificial Sequence; identical to SEQ ID NO: 24577
  Cyclic GFR-binding peptide

SEQ ID NO: 71444 - protein, 32 aa, Artificial Sequence; identical to SEQ ID NO: 20701
  Cyclic GFR-binding peptide
  MOD_RES (5)..(6): Xaa is C or S

SEQ ID NO: 71445 - protein, 27 aa, Artificial Sequence
  Cyclic GFR-binding peptide
  MOD_RES (1)..(2): Xaa is C or S
XXVPTELSNITMQIMDEYDKVVIGEMS

SEQ ID NO: 71446 - protein, 41 aa, Artificial Sequence
  Cyclic GFR-binding peptide
  MOD_RES (6)..(7)..(39)..(41): Xaa is C or S
SIPKAXXVPTELRSVKMAKVDEYDKVVKEVQVEMVVEGXGX

SEQ ID NO: 71447 - protein, 35 aa, Artificial Sequence; identical to SEQ ID NO: 20705
  Cyclic GFR-binding peptide
  MOD_RES (5)..(6): Xaa is C or S

SEQ ID NO: 71448 - protein, 34 aa, Artificial Sequence; identical to SEQ ID NO: 20706
  Cyclic GFR-binding peptide
  MOD_RES (1)..(2)..(34): Xaa is C or S

SEQ ID NO: 71449 - protein, 26 aa, Artificial Sequence
  Cyclic GFR-binding peptide
APTKLRPVQVRKIDDSSNVIKKATVN

SEQ ID NO: 71450 - protein, 30 aa, Artificial Sequence; identical to SEQ ID NO: 24582
  Cyclic GFR-binding peptide

SEQ ID NO: 71451 - protein, 26 aa, Artificial Sequence
  Cyclic GFR-binding peptide
LRPVQIRKIVGRKPKVKKATVMIVRS

SEQ ID NO: 71452 - protein, 26 aa, Artificial Sequence
  Cyclic GFR-binding peptide
  MOD_RES (1)..(1): Xaa is C or S
XVPTELSNITMQIMDEYDKVVIGEMS

SEQ ID NO: 71453 - protein, 25 aa, Artificial Sequence
  Cyclic GFR-binding peptide
HHEPLTVLYYEYVRKKPKLEQLSNR

SEQ ID NO: 71454 - protein, 41 aa, Artificial Sequence
  Cyclic GFR-binding peptide
  MOD_RES (1)..(38)..(40): Xaa is C or S
XRPTQVQLEPLPVVYYEIVRKKPIFEQLSNTLEDHLAXKXE

SEQ ID NO: 71455 - protein, 36 aa, Artificial Sequence
  Cyclic GFR-binding peptide
  MOD_RES (3)..(4)..(36): Xaa is C or S
KPXXAPTQLRPVQVRKIDDSSNVIKKATVNMVVRAX

SEQ ID NO: 71456 - protein, 27 aa, Artificial Sequence
  Cyclic GFR-binding peptide
VPTEEEPLTMLYYRIKPHQGQHEQLSN

SEQ ID NO: 71457 - protein, 30 aa, Artificial Sequence
  Cyclic GFR-binding peptide
  MOD_RES (4)..(5): Xaa is C or S
PKAXXVPTELSNITMQIMDENEKVVIGEMS

SEQ ID NO: 71458 - protein, 28 aa, Artificial Sequence
  Cyclic GFR-binding peptide
  MOD_RES (1)..(1): Xaa is C or S
XVPTEEEPLTMLYYRIKPHQGQHEQLSN

SEQ ID NO: 71459 - protein, 30 aa, Artificial Sequence; identical to SEQ ID NO: 20719
  Cyclic GFR-binding peptide
  MOD_RES (28)..(30): Xaa is C or S

SEQ ID NO: 71460 - protein, 37 aa, Artificial Sequence
  Cyclic GFR-binding peptide
  MOD_RES (4)..(5)..(37): Xaa is C or S
PKAXXVPTELRSVKMAKVDENEKVVKEVQVDMVVEGX

SEQ ID NO: 71461 - protein, 37 aa, Artificial Sequence
  Cyclic GFR-binding peptide
  MOD_RES (2)..(3)..(35)..(37): Xaa is C or S
PXXAPTQLRSVKVAKVDDSSNVIKEVQVNMVVRAXGX

SEQ ID NO: 71462 - protein, 30 aa, Artificial Sequence
  Cyclic GFR-binding peptide
  MOD_RES (4)..(5): Xaa is C or S
AAPXXVPQALSNITIQIMVGRKPKVIGEMS

SEQ ID NO: 71463 - protein, 34 aa, Artificial Sequence; identical to SEQ ID NO: 24590
  Cyclic GFR-binding peptide

SEQ ID NO: 71464 - protein, 32 aa, Artificial Sequence; identical to SEQ ID NO: 20722
  Cyclic GFR-binding peptide
  MOD_RES (1)..(2): Xaa is C or S

SEQ ID NO: 71465 - protein, 29 aa, Artificial Sequence
  Cyclic GFR-binding peptide
ERSVKMAKVRIKPHQGQHKEVQVFLQHNK

SEQ ID NO: 71466 - protein, 33 aa, Artificial Sequence
  Cyclic GFR-binding peptide
  MOD_RES (32)..(32): Xaa is C or S
VPTELRPVQMRKIDENEKVVKKATVDMVVEGXG

SEQ ID NO: 71467 - protein, 31 aa, Artificial Sequence; identical to SEQ ID NO: 20729
  Cyclic GFR-binding peptide
  MOD_RES (30)..(30): Xaa is C or S

SEQ ID NO: 71468 - protein, 27 aa, Artificial Sequence
  Cyclic GFR-binding peptide
PTKLEPLPVVYYDDSSNVIEQLSNNMV

SEQ ID NO: 71469 - protein, 28 aa, Artificial Sequence
  Cyclic GFR-binding peptide
  MOD_RES (27)..(27): Xaa is C or S
LEPLPIVYYVGRTPKVEQLSNMVVKSXK

SEQ ID NO: 71470 - protein, 21 aa, Artificial Sequence
  Cyclic GFR-binding peptide
EPLPVVYYDDSSNVIEQLSNN

SEQ ID NO: 71471 - protein, 36 aa, Artificial Sequence; identical to SEQ ID NO: 20737
  Cyclic GFR-binding peptide
  MOD_RES (3)..(4)..(36): Xaa is C or S

SEQ ID NO: 71472 - protein, 30 aa, Artificial Sequence; identical to SEQ ID NO: 20738
  Cyclic GFR-binding peptide

SEQ ID NO: 71473 - protein, 34 aa, Artificial Sequence
  Cyclic GFR-binding peptide
QPSRVHHEPLPVVYYEYVRKKPKLEQLSNRLEEH

SEQ ID NO: 71474 - protein, 42 aa, Artificial Sequence; identical to SEQ ID NO: 24607
  Cyclic GFR-binding peptide
  MOD_RES (5)..(39)..(41): Xaa is C or S

SEQ ID NO: 71475 - protein, 38 aa, Artificial Sequence
  Cyclic GFR-binding peptide
  MOD_RES (6)..(7)..(38): Xaa is C or S
ASASPXXVSQDLSNITIQIMIGKTPKIIGEMSMIVKSX

SEQ ID NO: 71476 - protein, 28 aa, Artificial Sequence
  Cyclic GFR-binding peptide
  MOD_RES (1)..(2): Xaa is C or S
XXVPTELRPVQMRKIDENEKVVKKATVD

SEQ ID NO: 71477 - protein, 30 aa, Artificial Sequence
  Cyclic GFR-binding peptide
  MOD_RES (3)..(4): Xaa is C or S
KAXXVPTELRSVKMAKVDENEKVVKEVQVD

SEQ ID NO: 71478 - protein, 23 aa, Artificial Sequence
  Cyclic GFR-binding peptide
RSVKMAKVRIKPHQGQHKEVQVF

SEQ ID NO: 71479 - protein, 36 aa, Artificial Sequence; identical to SEQ ID NO: 20748
  Cyclic GFR-binding peptide
  MOD_RES (6)..(7): Xaa is C or S

SEQ ID NO: 71480 - protein, 31 aa, Artificial Sequence
  Cyclic GFR-binding peptide
  MOD_RES (4)..(5): Xaa is C or S
ASPXXVPQDLRSVKIAKVVGRTPKVKEVQVM

SEQ ID NO: 71481 - protein, 41 aa, Artificial Sequence; identical to SEQ ID NO: 24614
  Cyclic GFR-binding peptide
  MOD_RES (2)..(39)..(41): Xaa is C or S

SEQ ID NO: 71482 - protein, 33 aa, Artificial Sequence; identical to SEQ ID NO: 20750
  Cyclic GFR-binding peptide
  MOD_RES (1)..(33): Xaa is C or S

SEQ ID NO: 71483 - protein, 28 aa, Artificial Sequence
  Cyclic GFR-binding peptide
VPTEEEPLPMVYYRIKPHQGQHEQLSNF

SEQ ID NO: 71484 - protein, 30 aa, Artificial Sequence; identical to SEQ ID NO: 20756
  Cyclic GFR-binding peptide
  MOD_RES (28)..(30): Xaa is C or S

SEQ ID NO: 71485 - protein, 30 aa, Artificial Sequence; identical to SEQ ID NO: 20758
  Cyclic GFR-binding peptide
  MOD_RES (4)..(4): Xaa is C or S

SEQ ID NO: 71486 - protein, 37 aa, Artificial Sequence; identical to SEQ ID NO: 20760
  Cyclic GFR-binding peptide
  MOD_RES (2)..(3)..(34)..(36): Xaa is C or S

SEQ ID NO: 71487 - protein, 29 aa, Artificial Sequence
  Cyclic GFR-binding peptide
  MOD_RES (3)..(4): Xaa is C or S
KAXXVPTELRPVQMRKIDENEKVVKKATV

SEQ ID NO: 71488 - protein, 29 aa, Artificial Sequence
  Cyclic GFR-binding peptide
  MOD_RES (2)..(2): Xaa is C or S
EXVPTEERSVKMAKVRIKPHQGQHKEVQV

SEQ ID NO: 71489 - protein, 27 aa, Artificial Sequence
  Cyclic GFR-binding peptide
QVQLEPLTVLYYEIVRKKPIFEQLSNT

SEQ ID NO: 71490 - protein, 26 aa, Artificial Sequence
  Cyclic GFR-binding peptide
EPLPMVYYDENEKVVEQLSNDMVVEG

SEQ ID NO: 71491 - protein, 41 aa, Artificial Sequence
  Cyclic GFR-binding peptide
  MOD_RES (2)..(39)..(41): Xaa is C or S
QXRPTQVQLEPLPVVYYEIVRKKPIFEQLSNTLEDHLAXKX

SEQ ID NO: 71492 - protein, 29 aa, Artificial Sequence
  Cyclic GFR-binding peptide
  MOD_RES (3)..(4): Xaa is C or S
KAXXVPTELEPLPMVYYDENEKVVEQLSN

SEQ ID NO: 71493 - protein, 33 aa, Artificial Sequence
  Cyclic GFR-binding peptide
  MOD_RES (31)..(33): Xaa is C or S
EEEPLTMLYYRIKPHQGQHEQLSNFLQHNKXEX

SEQ ID NO: 71494 - protein, 37 aa, Artificial Sequence
  Cyclic GFR-binding peptide
  MOD_RES (3)..(4)..(35)..(37): Xaa is C or S
SPXXVSQDLSNITIQIMIGKTPKIIGEMSMIVKSXKX

SEQ ID NO: 71495 - protein, 31 aa, Artificial Sequence; identical to SEQ ID NO: 24628
  Cyclic GFR-binding peptide

SEQ ID NO: 71496 - protein, 23 aa, Artificial Sequence
  Cyclic GFR-binding peptide
DLRPVQIRKIIGKTPKIKKATVM

SEQ ID NO: 71497 - protein, 33 aa, Artificial Sequence; identical to SEQ ID NO: 24631
  Cyclic GFR-binding peptide
  MOD_RES (1)..(1): Xaa is C or S

SEQ ID NO: 71498 - protein, 40 aa, Artificial Sequence
  Cyclic GFR-binding peptide
  MOD_RES (4)..(5)..(37)..(39): Xaa is C or S
PKAXXVPTELRPVQMRKIDEYDKVVKKATVEMVVEGXGXR

SEQ ID NO: 71499 - protein, 34 aa, Artificial Sequence
  Cyclic GFR-binding peptide
  MOD_RES (31)..(33): Xaa is C or S
EEEPLTMLYYRIKPHQGQHEQLSNFLQHNKXEXR

SEQ ID NO: 71500 - protein, 36 aa, Artificial Sequence
  Cyclic GFR-binding peptide
  MOD_RES (1)..(33)..(35): Xaa is C or S
XAPTKLRSVKVAKVDDSSNVIKEVQVNMVVRSXGXH

SEQ ID NO: 71501 - protein, 34 aa, Artificial Sequence; identical to SEQ ID NO: 20782
  Cyclic GFR-binding peptide
  MOD_RES (1)..(2)..(34): Xaa is C or S

SEQ ID NO: 71502 - protein, 30 aa, Artificial Sequence
  Cyclic GFR-binding peptide
PTELRPVQMRKIDENEKVVKKATVDMVVEG

SEQ ID NO: 71503 - protein, 32 aa, Artificial Sequence
  Cyclic GFR-binding peptide
SRVHHEPLPVVYYEYVRKKPKLEQLSNRLEEH

SEQ ID NO: 71504 - protein, 39 aa, Artificial Sequence; identical to SEQ ID NO: 20786
  Cyclic GFR-binding peptide
  MOD_RES (5)..(6)..(38): Xaa is C or S

SEQ ID NO: 71505 - protein, 38 aa, Artificial Sequence; identical to SEQ ID NO: 20787
  Cyclic GFR-binding peptide
  MOD_RES (2)..(3)..(35)..(37): Xaa is C or S

SEQ ID NO: 71506 - protein, 29 aa, Artificial Sequence
  Cyclic GFR-binding peptide
  MOD_RES (26)..(28): Xaa is C or S
RSVKIAKVVGRTPKVKEVQVMVVKSXKXS

SEQ ID NO: 71507 - protein, 30 aa, Artificial Sequence
  Cyclic GFR-binding peptide
  MOD_RES (28)..(30): Xaa is C or S
LRPVQMRKIDEYDKVVKKATVEMVVEGXGX

SEQ ID NO: 71508 - protein, 36 aa, Artificial Sequence; identical to SEQ ID NO: 24645
  Cyclic GFR-binding peptide
  MOD_RES (3)..(3): Xaa is C or S

SEQ ID NO: 71509 - protein, 40 aa, Artificial Sequence
  Cyclic GFR-binding peptide
  MOD_RES (3)..(37)..(39): Xaa is C or S
LEXVPTEEEPLPMVYYRIKPHQGQHEQLSNFLQHNKXEXR

SEQ ID NO: 71510 - protein, 30 aa, Artificial Sequence; identical to SEQ ID NO: 20792
  Cyclic GFR-binding peptide
  MOD_RES (2)..(3): Xaa is C or S

SEQ ID NO: 71511 - protein, 38 aa, Artificial Sequence; identical to SEQ ID NO: 24651
  Cyclic GFR-binding peptide
  MOD_RES (5)..(5): Xaa is C or S

SEQ ID NO: 71512 - protein, 26 aa, Artificial Sequence
  Cyclic GFR-binding peptide
HEPLTVLYYEYVRKKPKLEQLSNRLE

SEQ ID NO: 71513 - protein, 33 aa, Artificial Sequence; identical to SEQ ID NO: 20798
  Cyclic GFR-binding peptide
  MOD_RES (30)..(32): Xaa is C or S

SEQ ID NO: 71514 - protein, 32 aa, Artificial Sequence
  Cyclic GFR-binding peptide
  MOD_RES (29)..(31): Xaa is C or S
ELSNITMQIMDEYDKVVIGEMSEMVVEGXGXR

SEQ ID NO: 71515 - protein, 38 aa, Artificial Sequence
  Cyclic GFR-binding peptide
  MOD_RES (4)..(5)..(36)..(38): Xaa is C or S
AAPXXVPQALSNITIQIMVGRKPKVIGEMSMIVRSXKX

SEQ ID NO: 71516 - protein, 32 aa, Artificial Sequence
  Cyclic GFR-binding peptide
  MOD_RES (29)..(31): Xaa is C or S
QALRPVQIRKIVGRKPKVKKATVMIVRSXKXS

SEQ ID NO: 71517 - protein, 44 aa, Artificial Sequence
  Cyclic GFR-binding peptide
  MOD_RES (7)..(41)..(43): Xaa is C or S
NDEGLEXVPTEEEPLPMVYYRIKPHQGQHEQLSNFLQHNKXEXR

SEQ ID NO: 71518 - protein, 33 aa, Artificial Sequence
  Cyclic GFR-binding peptide
  MOD_RES (2)..(2): Xaa is C or S
TXAPTKLSNITVQIMDDSSNVIIGEMSNMVVRS

SEQ ID NO: 71519 - protein, 31 aa, Artificial Sequence
  Cyclic GFR-binding peptide
VPTEEEPLTMLYYRIKPHQGQHEQLSNFLQH

SEQ ID NO: 71520 - protein, 35 aa, Artificial Sequence; identical to SEQ ID NO: 24668
  Cyclic GFR-binding peptide
  MOD_RES (1)..(1): Xaa is C or S

SEQ ID NO: 71521 - protein, 30 aa, Artificial Sequence
  Cyclic GFR-binding peptide
  MOD_RES (27)..(29): Xaa is C or S
LSNITIQIMVGRTPKVIGEMSMVVKSXKXS

SEQ ID NO: 71522 - protein, 24 aa, Artificial Sequence
  Cyclic GFR-binding peptide
EPLPMVYYDENEKVVEQLSNDMVV

SEQ ID NO: 71523 - protein, 21 aa, Artificial Sequence
  Cyclic GFR-binding peptide
LEPLTMLYYDEYDKVVEQLSN

SEQ ID NO: 71524 - protein, 25 aa, Artificial Sequence
  Cyclic GFR-binding peptide
PTELEPLPMVYYDEYDKVVEQLSNE

SEQ ID NO: 71525 - protein, 33 aa, Artificial Sequence; identical to SEQ ID NO: 20822
  Cyclic GFR-binding peptide
  MOD_RES (5)..(6): Xaa is C or S

SEQ ID NO: 71526 - protein, 36 aa, Artificial Sequence
  Cyclic GFR-binding peptide
  MOD_RES (34)..(36): Xaa is C or S
RVHHEPLPVVYYEYVRKKPKLEQLSNRLEEHLEXAX

SEQ ID NO: 71527 - protein, 30 aa, Artificial Sequence
  Cyclic GFR-binding peptide
  MOD_RES (4)..(5): Xaa is C or S
PKPXXAPTQLSNITVQIMDDSSNVIIGEMS

SEQ ID NO: 71528 - protein, 21 aa, Artificial Sequence
  Cyclic GFR-binding peptide
RSVKIAKVIGKTPKIKEVQVM

SEQ ID NO: 71529 - protein, 26 aa, Artificial Sequence
  Cyclic GFR-binding peptide
PTKLRPVQVRKIDDSSNVIKKATVNM

SEQ ID NO: 71530 - protein, 41 aa, Artificial Sequence; identical to SEQ ID NO: 20829
  Cyclic GFR-binding peptide
  MOD_RES (6)..(7)..(39)..(41): Xaa is C or S

SEQ ID NO: 71531 - protein, 29 aa, Artificial Sequence
  Cyclic GFR-binding peptide
VSQDLRSVKIAKVIGKTPKIKEVQVMIVK

SEQ ID NO: 71532 - protein, 37 aa, Artificial Sequence
  Cyclic GFR-binding peptide
  MOD_RES (6)..(7): Xaa is C or S
SIPKAXXVPTELSNITMQIMDEYDKVVIGEMSEMVVE

SEQ ID NO: 71533 - protein, 31 aa, Artificial Sequence; identical to SEQ ID NO: 20839
  Cyclic GFR-binding peptide
  MOD_RES (1)..(2): Xaa is C or S

SEQ ID NO: 71534 - protein, 36 aa, Artificial Sequence
  Cyclic GFR-binding peptide
  MOD_RES (3)..(3): Xaa is C or S
LEXVPTEEEPLPMVYYRIKPHQGQHEQLSNFLQHNK

SEQ ID NO: 71535 - protein, 25 aa, Artificial Sequence
  Cyclic GFR-binding peptide
TELSNITMQIMDENEKVVIGEMSDM

SEQ ID NO: 71536 - protein, 35 aa, Artificial Sequence; identical to SEQ ID NO: 24689
  Cyclic GFR-binding peptide
  MOD_RES (33)..(35): Xaa is C or S

SEQ ID NO: 71537 - protein, 27 aa, Artificial Sequence
  Cyclic GFR-binding peptide
EEEPLPMVYYRIKPHQGQHEQLSNFLQ

SEQ ID NO: 71538 - protein, 24 aa, Artificial Sequence
  Cyclic GFR-binding peptide
DLEPLPIVYYVGRTPKVEQLSNMV

SEQ ID NO: 71539 - protein, 32 aa, Artificial Sequence
  Cyclic GFR-binding peptide
  MOD_RES (3)..(3): Xaa is C or S
PTXAPTKLSNITVQIMDDSSNVIIGEMSNMVV

SEQ ID NO: 71540 - protein, 26 aa, Artificial Sequence
  Cyclic GFR-binding peptide
EPLPMVYYRIKPHQGQHEQLSNFLQH

SEQ ID NO: 71541 - protein, 27 aa, Artificial Sequence
  Cyclic GFR-binding peptide
KLEPLPVVYYDDSSNVIEQLSNNMVVR

SEQ ID NO: 71542 - protein, 21 aa, Artificial Sequence
  Cyclic GFR-binding peptide
RSVKVAKVDDSSNVIKEVQVN

SEQ ID NO: 71543 - protein, 21 aa, Artificial Sequence
  Cyclic GFR-binding peptide
LRSVKIAKVIGKTPKIKEVQV

SEQ ID NO: 71544 - protein, 24 aa, Artificial Sequence
  Cyclic GFR-binding peptide
QDLEPLPIVYYVGRTPKVEQLSNM

SEQ ID NO: 71545 - protein, 29 aa, Artificial Sequence
  Cyclic GFR-binding peptide
TELRPVQMRKIDEYDKVVKKATVEMVVEG

SEQ ID NO: 71546 - protein, 33 aa, Artificial Sequence
  Cyclic GFR-binding peptide
  MOD_RES (6)..(7): Xaa is C or S
SIPKAXXVPTELSNITMQIMDEYDKVVIGEMSE

SEQ ID NO: 71547 - protein, 40 aa, Artificial Sequence; identical to SEQ ID NO: 20850
  Cyclic GFR-binding peptide
  MOD_RES (5)..(6)..(38)..(40): Xaa is C or S

SEQ ID NO: 71548 - protein, 22 aa, Artificial Sequence
  Cyclic GFR-binding peptide
LRPVQMRKIDEYDKVVKKATVE

SEQ ID NO: 71549 - protein, 25 aa, Artificial Sequence
  Cyclic GFR-binding peptide
EPLPVVYYEYVRKKPKLEQLSNRLE

SEQ ID NO: 71550 - protein, 37 aa, Artificial Sequence
  Cyclic GFR-binding peptide
  MOD_RES (3)..(4)..(36): Xaa is C or S
KPXXAPTQLSNITVQIMDDSSNVIIGEMSNMVVRAXG

SEQ ID NO: 71551 - protein, 35 aa, Artificial Sequence
  Cyclic GFR-binding peptide
  MOD_RES (4)..(5): Xaa is C or S
PKAXXVPTELSNITMQIMDEYDKVVIGEMSEMVVE

SEQ ID NO: 71552 - protein, 30 aa, Artificial Sequence
  Cyclic GFR-binding peptide
  MOD_RES (1)..(1): Xaa is C or S
XQPSRVHHEPLTVLYYEYVRKKPKLEQLSN

SEQ ID NO: 71553 - protein, 32 aa, Artificial Sequence; identical to SEQ ID NO: 24698
  Cyclic GFR-binding peptide

SEQ ID NO: 71554 - protein, 31 aa, Artificial Sequence
  Cyclic GFR-binding peptide
HHEPLTVLYYEYVRKKPKLEQLSNRLEEHLE

SEQ ID NO: 71555 - protein, 36 aa, Artificial Sequence; identical to SEQ ID NO: 20858
  Cyclic GFR-binding peptide
  MOD_RES (1)..(2)..(33)..(35): Xaa is C or S

SEQ ID NO: 71556 - protein, 28 aa, Artificial Sequence
  Cyclic GFR-binding peptide
  MOD_RES (2)..(3): Xaa is C or S
AXXVPTELSNITMQIMDEYDKVVIGEMS

SEQ ID NO: 71557 - protein, 36 aa, Artificial Sequence; identical to SEQ ID NO: 20859
  Cyclic GFR-binding peptide
  MOD_RES (1)..(33)..(35): Xaa is C or S

SEQ ID NO: 71558 - protein, 33 aa, Artificial Sequence
  Cyclic GFR-binding peptide
  MOD_RES (30)..(32): Xaa is C or S
EPLPVVYYEIVRKKPIFEQLSNTLEDHLAXKXE

SEQ ID NO: 71559 - protein, 34 aa, Artificial Sequence
  Cyclic GFR-binding peptide
  MOD_RES (5)..(6): Xaa is C or S
SASPXXVPQDLRSVKIAKVVGRTPKVKEVQVMVV

SEQ ID NO: 71560 - protein, 30 aa, Artificial Sequence; identical to SEQ ID NO: 20868
  Cyclic GFR-binding peptide

SEQ ID NO: 71561 - protein, 28 aa, Artificial Sequence
  Cyclic GFR-binding peptide
RVHHSNITVQIMEYVRKKPKLIGEMSRL

SEQ ID NO: 71562 - protein, 41 aa, Artificial Sequence
  Cyclic GFR-binding peptide
  MOD_RES (5)..(6)..(38)..(40): Xaa is C or S
VPKPXXAPTKLRPVQVRKIDDSSNVIKKATVNMVVRSXGXH

SEQ ID NO: 71563 - protein, 33 aa, Artificial Sequence; identical to SEQ ID NO: 20878
  Cyclic GFR-binding peptide
  MOD_RES (1)..(2)..(33): Xaa is C or S

SEQ ID NO: 71564 - protein, 34 aa, Artificial Sequence
  Cyclic GFR-binding peptide
PSRVHHEPLTVLYYEYVRKKPKLEQLSNRLEEHL

SEQ ID NO: 71565 - protein, 44 aa, Artificial Sequence; identical to SEQ ID NO: 24715
  Cyclic GFR-binding peptide
  MOD_RES (7)..(41)..(43): Xaa is C or S

SEQ ID NO: 71566 - protein, 41 aa, Artificial Sequence; identical to SEQ ID NO: 20882
  Cyclic GFR-binding peptide
  MOD_RES (5)..(6)..(38)..(40): Xaa is C or S

SEQ ID NO: 71567 - protein, 28 aa, Artificial Sequence
  Cyclic GFR-binding peptide
SRVHHEPLTVLYYEYVRKKPKLEQLSNR

SEQ ID NO: 71568 - protein, 25 aa, Artificial Sequence
  Cyclic GFR-binding peptide
HHSNITVQIMEYVRKKPKLIGEMSR

SEQ ID NO: 71569 - protein, 30 aa, Artificial Sequence
  Cyclic GFR-binding peptide
VPTELRSVKMAKVDEYDKVVKEVQVEMVVE

SEQ ID NO: 71570 - protein, 31 aa, Artificial Sequence
  Cyclic GFR-binding peptide
  MOD_RES (29)..(31): Xaa is C or S
QLRPVQVRKIDDSSNVIKKATVNMVVRAXGX

SEQ ID NO: 71571 - protein, 33 aa, Artificial Sequence; identical to SEQ ID NO: 20886
  Cyclic GFR-binding peptide
  MOD_RES (30)..(32): Xaa is C or S

SEQ ID NO: 71572 - protein, 40 aa, Artificial Sequence
  Cyclic GFR-binding peptide
  MOD_RES (4)..(4): Xaa is C or S
SVKXQPSRVHHEPLPVVYYEYVRKKPKLEQLSNRLEEHLE

SEQ ID NO: 71573 - protein, 31 aa, Artificial Sequence; identical to SEQ ID NO: 20889
  Cyclic GFR-binding peptide
  MOD_RES (30)..(30): Xaa is C or S

SEQ ID NO: 71574 - protein, 37 aa, Artificial Sequence; identical to SEQ ID NO: 24729
  Cyclic GFR-binding peptide
  MOD_RES (5)..(5): Xaa is C or S

SEQ ID NO: 71575 - protein, 29 aa, Artificial Sequence
  Cyclic GFR-binding peptide
  MOD_RES (4)..(4): Xaa is C or S
KPTXAPTKLRSVKVAKVDDSSNVIKEVQV

SEQ ID NO: 71576 - protein, 34 aa, Artificial Sequence
  Cyclic GFR-binding peptide
  MOD_RES (31)..(33): Xaa is C or S
VPQALRSVKIAKVVGRKPKVKEVQVMIVRSXKXS

SEQ ID NO: 71577 - protein, 32 aa, Artificial Sequence; identical to SEQ ID NO: 24730
  Cyclic GFR-binding peptide
  MOD_RES (4)..(4): Xaa is C or S

SEQ ID NO: 71578 - protein, 36 aa, Artificial Sequence
  Cyclic GFR-binding peptide
  MOD_RES (3)..(4)..(36): Xaa is C or S
KAXXVPTELSNITMQIMDENEKVVIGEMSDMVVEGX

SEQ ID NO: 71579 - protein, 22 aa, Artificial Sequence
  Cyclic GFR-binding peptide
EPLTVLYYDDSSNVIEQLSNNM

SEQ ID NO: 71580 - protein, 33 aa, Artificial Sequence; identical to SEQ ID NO: 20896
  Cyclic GFR-binding peptide
  MOD_RES (2)..(3): Xaa is C or S

SEQ ID NO: 71581 - protein, 26 aa, Artificial Sequence
  Cyclic GFR-binding peptide
LRSVKVAKVDDSSNVIKEVQVNMVVR

SEQ ID NO: 71582 - protein, 31 aa, Artificial Sequence; identical to SEQ ID NO: 24737
  Cyclic GFR-binding peptide

SEQ ID NO: 71583 - protein, 29 aa, Artificial Sequence
  Cyclic GFR-binding peptide
EEPLTMLYYRIKPHQGQHEQLSNFLQHNK

SEQ ID NO: 71584 - protein, 27 aa, Artificial Sequence
  Cyclic GFR-binding peptide
RSVKVAKVEIVRKKPIFKEVQVTLEDH

SEQ ID NO: 71585 - protein, 30 aa, Artificial Sequence
  Cyclic GFR-binding peptide
  MOD_RES (28)..(30): Xaa is C or S
DLSNITIQIMVGRTPKVIGEMSMVVKSXKX

SEQ ID NO: 71586 - protein, 30 aa, Artificial Sequence
  Cyclic GFR-binding peptide
  MOD_RES (3)..(4): Xaa is C or S
SPXXVSQDLSNITIQIMIGKTPKIIGEMSM

SEQ ID NO: 71587 - protein, 37 aa, Artificial Sequence; identical to SEQ ID NO: 20904
  Cyclic GFR-binding peptide
  MOD_RES (2)..(3)..(35)..(37): Xaa is C or S

SEQ ID NO: 71588 - protein, 23 aa, Artificial Sequence
  Cyclic GFR-binding peptide
EEPLTMLYYRIKPHQGQHEQLSN

SEQ ID NO: 71589 - protein, 27 aa, Artificial Sequence
  Cyclic GFR-binding peptide
LEPLPVVYYEIVRKKPIFEQLSNTLED

SEQ ID NO: 71590 - protein, 33 aa, Artificial Sequence; identical to SEQ ID NO: 20916
  Cyclic GFR-binding peptide
  MOD_RES (32)..(32): Xaa is C or S

SEQ ID NO: 71591 - protein, 23 aa, Artificial Sequence
  Cyclic GFR-binding peptide
EPLPMVYYDEYDKVVEQLSNEMV

SEQ ID NO: 71592 - protein, 34 aa, Artificial Sequence
  Cyclic GFR-binding peptide
  MOD_RES (1)..(32)..(34): Xaa is C or S
XVSQDLRPVQIRKIIGKTPKIKKATVMIVKSXKX

SEQ ID NO: 71593 - protein, 35 aa, Artificial Sequence
  Cyclic GFR-binding peptide
  MOD_RES (5)..(6): Xaa is C or S
IPKAXXVPTELRPVQMRKIDEYDKVVKKATVEMVV

SEQ ID NO: 71594 - protein, 23 aa, Artificial Sequence
  Cyclic GFR-binding peptide
ELSNITMQIMDENEKVVIGEMSD

SEQ ID NO: 71595 - protein, 33 aa, Artificial Sequence
  Cyclic GFR-binding peptide
  MOD_RES (5)..(5): Xaa is C or S
TKPTXAPTKLRSVKVAKVDDSSNVIKEVQVNMV

SEQ ID NO: 71596 - protein, 32 aa, Artificial Sequence; identical to SEQ ID NO: 24752
  Cyclic GFR-binding peptide

SEQ ID NO: 71597 - protein, 35 aa, Artificial Sequence
  Cyclic GFR-binding peptide
  MOD_RES (2)..(2): Xaa is C or S
EXVPTEEEPLTMLYYRIKPHQGQHEQLSNFLQHNK

SEQ ID NO: 71598 - protein, 29 aa, Artificial Sequence
  Cyclic GFR-binding peptide
  MOD_RES (28)..(28): Xaa is C or S
ALSNITIQIMVGRKPKVIGEMSMIVRSXK

SEQ ID NO: 71599 - protein, 28 aa, Artificial Sequence
  Cyclic GFR-binding peptide
  MOD_RES (1)..(1): Xaa is C or S
XVPQALRSVKIAKVVGRKPKVKEVQVMI

SEQ ID NO: 71600 - protein, 37 aa, Artificial Sequence; identical to SEQ ID NO: 20940
  Cyclic GFR-binding peptide
  MOD_RES (3)..(35)..(37): Xaa is C or S

SEQ ID NO: 71601 - protein, 26 aa, Artificial Sequence
  Cyclic GFR-binding peptide
PTQLEPLPVVYYDDSSNVIEQLSNNM

SEQ ID NO: 71602 - protein, 28 aa, Artificial Sequence
  Cyclic GFR-binding peptide
TQLEPLTVLYYDDSSNVIEQLSNNMVVR

SEQ ID NO: 71603 - protein, 26 aa, Artificial Sequence
  Cyclic GFR-binding peptide
TQLEPLPVVYYDDSSNVIEQLSNNMV

SEQ ID NO: 71604 - protein, 37 aa, Artificial Sequence
  Cyclic GFR-binding peptide
  MOD_RES (3)..(35)..(37): Xaa is C or S
PTXAPTKLSNITVQIMDDSSNVIIGEMSNMVVRSXGX

SEQ ID NO: 71605 - protein, 25 aa, Artificial Sequence
  Cyclic GFR-binding peptide
HEPLPVVYYEYVRKKPKLEQLSNRL

SEQ ID NO: 71606 - protein, 28 aa, Artificial Sequence
  Cyclic GFR-binding peptide
ELRSVKMAKVDEYDKVVKEVQVEMVVEG

SEQ ID NO: 71607 - protein, 35 aa, Artificial Sequence; identical to SEQ ID NO: 24771
  Cyclic GFR-binding peptide

SEQ ID NO: 71608 - protein, 24 aa, Artificial Sequence
  Cyclic GFR-binding peptide
PQALRPVQIRKIVGRKPKVKKATV

SEQ ID NO: 71609 - protein, 40 aa, Artificial Sequence; identical to SEQ ID NO: 24776
  Cyclic GFR-binding peptide
  MOD_RES (1)..(38)..(40): Xaa is C or S

SEQ ID NO: 71610 - protein, 38 aa, Artificial Sequence
  Cyclic GFR-binding peptide
  MOD_RES (5)..(5): Xaa is C or S
RNVQXRPTQVQLEPLTVLYYEIVRKKPIFEQLSNTLED

SEQ ID NO: 71611 - protein, 31 aa, Artificial Sequence
  Cyclic GFR-binding peptide
  MOD_RES (1)..(2): Xaa is C or S
XXVPTELRPVQMRKIDEYDKVVKKATVEMVV

SEQ ID NO: 71612 - protein, 34 aa, Artificial Sequence
  Cyclic GFR-binding peptide
  MOD_RES (1)..(2)..(34): Xaa is C or S
XXVPTELSNITMQIMDEYDKVVIGEMSEMVVEGX

SEQ ID NO: 71613 - protein, 34 aa, Artificial Sequence
  Cyclic GFR-binding peptide
  MOD_RES (32)..(34): Xaa is C or S
APTKLRSVKVAKVDDSSNVIKEVQVNMVVRSXGX

SEQ ID NO: 71614 - protein, 32 aa, Artificial Sequence
  Cyclic GFR-binding peptide
  MOD_RES (5)..(6): Xaa is C or S
VPKPXXAPTQLSNITVQIMDDSSNVIIGEMSN

SEQ ID NO: 71615 - protein, 22 aa, Artificial Sequence
  Cyclic GFR-binding peptide
LEPLPMVYYDEYDKVVEQLSNE

SEQ ID NO: 71616 - protein, 31 aa, Artificial Sequence; identical to SEQ ID NO: 20964
  Cyclic GFR-binding peptide
  MOD_RES (2)..(3): Xaa is C or S

SEQ ID NO: 71617 - protein, 30 aa, Artificial Sequence
  Cyclic GFR-binding peptide
QLEPLTVLYYEIVRKKPIFEQLSNTLEDHL

SEQ ID NO: 71618 - protein, 31 aa, Artificial Sequence
  Cyclic GFR-binding peptide
  MOD_RES (2)..(3): Xaa is C or S
PXXAPTKLRPVQVRKIDDSSNVIKKATVNMV

SEQ ID NO: 71619 - protein, 40 aa, Artificial Sequence; identical to SEQ ID NO: 24789
  Cyclic GFR-binding peptide
  MOD_RES (4)..(4): Xaa is C or S

SEQ ID NO: 71620 - protein, 30 aa, Artificial Sequence; identical to SEQ ID NO: 24791
  Cyclic GFR-binding peptide

SEQ ID NO: 71621 - protein, 24 aa, Artificial Sequence
  Cyclic GFR-binding peptide
PTELRSVKMAKVDEYDKVVKEVQV

SEQ ID NO: 71622 - protein, 29 aa, Artificial Sequence
  Cyclic GFR-binding peptide
  MOD_RES (3)..(4): Xaa is C or S
APXXVPQALRPVQIRKIVGRKPKVKKATV

SEQ ID NO: 71623 - protein, 34 aa, Artificial Sequence; identical to SEQ ID NO: 20972
  Cyclic GFR-binding peptide
  MOD_RES (6)..(7): Xaa is C or S

SEQ ID NO: 71624 - protein, 29 aa, Artificial Sequence
  Cyclic GFR-binding peptide
  MOD_RES (1)..(2): Xaa is C or S
XXVPQALRSVKIAKVVGRKPKVKEVQVMI

SEQ ID NO: 71625 - protein, 27 aa, Artificial Sequence
  Cyclic GFR-binding peptide
TEEEPLTMLYYRIKPHQGQHEQLSNFL

SEQ ID NO: 71626 - protein, 40 aa, Artificial Sequence
  Cyclic GFR-binding peptide
  MOD_RES (6)..(7)..(38)..(40): Xaa is C or S
ASASPXXVPQDLSNITIQIMVGRTPKVIGEMSMVVKSXKX

SEQ ID NO: 71627 - protein, 31 aa, Artificial Sequence; identical to SEQ ID NO: 24793
  Cyclic GFR-binding peptide

SEQ ID NO: 71628 - protein, 38 aa, Artificial Sequence
  Cyclic GFR-binding peptide
  MOD_RES (4)..(4): Xaa is C or S
NVQXRPTQVQLEPLPVVYYEIVRKKPIFEQLSNTLEDH

SEQ ID NO: 71629 - protein, 27 aa, Artificial Sequence
  Cyclic GFR-binding peptide
QVQLSNITVQIMEIVRKKPIFIGEMST

SEQ ID NO: 71630 - protein, 32 aa, Artificial Sequence
  Cyclic GFR-binding peptide
  MOD_RES (29)..(31): Xaa is C or S
QDLRSVKIAKVIGKTPKIKEVQVMIVKSXKXS

SEQ ID NO: 71631 - protein, 30 aa, Artificial Sequence
  Cyclic GFR-binding peptide
  MOD_RES (4)..(4): Xaa is C or S
KPTXAPTKLSNITVQIMDDSSNVIIGEMSN

SEQ ID NO: 71632 - protein, 36 aa, Artificial Sequence; identical to SEQ ID NO: 24797
  Cyclic GFR-binding peptide
  MOD_RES (2)..(2): Xaa is C or S

SEQ ID NO: 71633 - protein, 31 aa, Artificial Sequence; identical to SEQ ID NO: 24798
  Cyclic GFR-binding peptide

SEQ ID NO: 71634 - protein, 25 aa, Artificial Sequence
  Cyclic GFR-binding peptide
LEPLPVVYYEIVRKKPIFEQLSNTL

SEQ ID NO: 71635 - protein, 31 aa, Artificial Sequence; identical to SEQ ID NO: 20981
  Cyclic GFR-binding peptide
  MOD_RES (5)..(6): Xaa is C or S

SEQ ID NO: 71636 - protein, 32 aa, Artificial Sequence
  Cyclic GFR-binding peptide
  MOD_RES (4)..(5): Xaa is C or S
ASPXXVPQDLRSVKIAKVVGRTPKVKEVQVMV

SEQ ID NO: 71637 - protein, 31 aa, Artificial Sequence
  Cyclic GFR-binding peptide
  MOD_RES (31)..(31): Xaa is C or S
PTELSNITMQIMDENEKVVIGEMSDMVVEGX

SEQ ID NO: 71638 - protein, 31 aa, Artificial Sequence; identical to SEQ ID NO: 20983
  Cyclic GFR-binding peptide
  MOD_RES (1)..(1): Xaa is C or S

SEQ ID NO: 71639 - protein, 34 aa, Artificial Sequence
  Cyclic GFR-binding peptide
  MOD_RES (6)..(6): Xaa is C or S
DEGLEXVPTEEEPLPMVYYRIKPHQGQHEQLSNF

SEQ ID NO: 71640 - protein, 35 aa, Artificial Sequence
  Cyclic GFR-binding peptide
  MOD_RES (7)..(7): Xaa is C or S
HVTKPTXAPTKLRSVKVAKVDDSSNVIKEVQVNMV

SEQ ID NO: 71641 - protein, 41 aa, Artificial Sequence; identical to SEQ ID NO: 20990
  Cyclic GFR-binding peptide
  MOD_RES (5)..(6)..(38)..(40): Xaa is C or S

SEQ ID NO: 71642 - protein, 25 aa, Artificial Sequence
  Cyclic GFR-binding peptide
PTELRPVQMRKIDEYDKVVKKATVE

SEQ ID NO: 71643 - protein, 24 aa, Artificial Sequence
  Cyclic GFR-binding peptide
PTELEPLTMLYYDENEKVVEQLSN

SEQ ID NO: 71644 - protein, 38 aa, Artificial Sequence
  Cyclic GFR-binding peptide
  MOD_RES (5)..(6)..(38): Xaa is C or S
IPKAXXVPTELRPVQMRKIDENEKVVKKATVDMVVEGX

SEQ ID NO: 71645 - protein, 35 aa, Artificial Sequence
  Cyclic GFR-binding peptide
  MOD_RES (5)..(6): Xaa is C or S
IPKAXXVPTELSNITMQIMDENEKVVIGEMSDMVV

SEQ ID NO: 71646 - protein, 37 aa, Artificial Sequence
  Cyclic GFR-binding peptide
  MOD_RES (5)..(6): Xaa is C or S
VPKPXXAPTQLSNITVQIMDDSSNVIIGEMSNMVVRA

SEQ ID NO: 71647 - protein, 34 aa, Artificial Sequence
  Cyclic GFR-binding peptide
  MOD_RES (1)..(33): Xaa is C or S
XVPTELRSVKMAKVDEYDKVVKEVQVEMVVEGXG

SEQ ID NO: 71648 - protein, 27 aa, Artificial Sequence
  Cyclic GFR-binding peptide
LEPLPMVYYDENEKVVEQLSNDMVVEG

SEQ ID NO: 71649 - protein, 34 aa, Artificial Sequence
  Cyclic GFR-binding peptide
  MOD_RES (1)..(33): Xaa is C or S
XVPTELRPVQMRKIDENEKVVKKATVDMVVEGXG

SEQ ID NO: 71650 - protein, 25 aa, Artificial Sequence
  Cyclic GFR-binding peptide
VPQALSNITIQIMVGRKPKVIGEMS

SEQ ID NO: 71651 - protein, 39 aa, Artificial Sequence
  Cyclic GFR-binding peptide
  MOD_RES (3)..(3): Xaa is C or S
VQXRPTQVQLEPLTVLYYEIVRKKPIFEQLSNTLEDHLA

SEQ ID NO: 71652 - protein, 34 aa, Artificial Sequence
  Cyclic GFR-binding peptide
  MOD_RES (31)..(33): Xaa is C or S
LEPLPVVYYEIVRKKPIFEQLSNTLEDHLAXKXE

SEQ ID NO: 71653 - protein, 24 aa, Artificial Sequence
  Cyclic GFR-binding peptide
EERSVKMAKVRIKPHQGQHKEVQV

SEQ ID NO: 71654 - protein, 35 aa, Artificial Sequence
  Cyclic GFR-binding peptide
  MOD_RES (3)..(4)..(35): Xaa is C or S
SPXXVSQDLRSVKIAKVIGKTPKIKEVQVMIVKSX

SEQ ID NO: 71655 - protein, 34 aa, Artificial Sequence; identical to SEQ ID NO: 21009
  Cyclic GFR-binding peptide
  MOD_RES (1)..(33): Xaa is C or S

SEQ ID NO: 71656 - protein, 28 aa, Artificial Sequence
  Cyclic GFR-binding peptide
VHHSNITVQIMEYVRKKPKLIGEMSRLE

SEQ ID NO: 71657 - protein, 32 aa, Artificial Sequence
  Cyclic GFR-binding peptide
  MOD_RES (4)..(5): Xaa is C or S
ASPXXVSQDLRSVKIAKVIGKTPKIKEVQVMI

SEQ ID NO: 71658 - protein, 37 aa, Artificial Sequence
  Cyclic GFR-binding peptide
  MOD_RES (2)..(3)..(35)..(37): Xaa is C or S
AXXVPTELRPVQMRKIDEYDKVVKKATVEMVVEGXGX

SEQ ID NO: 71659 - protein, 42 aa, Artificial Sequence
  Cyclic GFR-binding peptide
  MOD_RES (7)..(39)..(41): Xaa is C or S
HVTKPTXAPTKLSNITVQIMDDSSNVIIGEMSNMVVRSXGXH

SEQ ID NO: 71660 - protein, 36 aa, Artificial Sequence
  Cyclic GFR-binding peptide
  MOD_RES (2)..(3)..(34)..(36): Xaa is C or S
PXXVPQALSNITIQIMVGRKPKVIGEMSMIVRSXKX

SEQ ID NO: 71661 - protein, 39 aa, Artificial Sequence; identical to SEQ ID NO: 24832
  Cyclic GFR-binding peptide
  MOD_RES (4)..(38): Xaa is C or S

SEQ ID NO: 71662 - protein, 35 aa, Artificial Sequence
  Cyclic GFR-binding peptide
  MOD_RES (2)..(3)..(34): Xaa is C or S
PXXVPQDLSNITIQIMVGRTPKVIGEMSMVVKSXK

SEQ ID NO: 71663 - protein, 30 aa, Artificial Sequence
  Cyclic GFR-binding peptide
VSQDLSNITIQIMIGKTPKIIGEMSMIVKS

SEQ ID NO: 71664 - protein, 39 aa, Artificial Sequence
  Cyclic GFR-binding peptide
  MOD_RES (6)..(7)..(38): Xaa is C or S
ASASPXXVPQDLSNITIQIMVGRTPKVIGEMSMVVKSXK

SEQ ID NO: 71665 - protein, 26 aa, Artificial Sequence
  Cyclic GFR-binding peptide
LEPLTVLYYEIVRKKPIFEQLSNTLE

SEQ ID NO: 71666 - protein, 27 aa, Artificial Sequence
  Cyclic GFR-binding peptide
VQLEPLPVVYYEIVRKKPIFEQLSNTL

SEQ ID NO: 71667 - protein, 37 aa, Artificial Sequence
  Cyclic GFR-binding peptide
  MOD_RES (3)..(3): Xaa is C or S
VKXQPSRVHHEPLPVVYYEYVRKKPKLEQLSNRLEEH

SEQ ID NO: 71668 - protein, 22 aa, Artificial Sequence
  Cyclic GFR-binding peptide
RSVKMAKVDENEKVVKEVQVDM

SEQ ID NO: 71669 - protein, 30 aa, Artificial Sequence
  Cyclic GFR-binding peptide
  MOD_RES (2)..(3): Xaa is C or S
AXXVPTELSNITMQIMDENEKVVIGEMSDM

SEQ ID NO: 71670 - protein, 28 aa, Artificial Sequence
  Cyclic GFR-binding peptide
  MOD_RES (27)..(27): Xaa is C or S
LSNITIQIMVGRKPKVIGEMSMIVRSXK

SEQ ID NO: 71671 - protein, 34 aa, Artificial Sequence
  Cyclic GFR-binding peptide
RPTQVQLEPLPVVYYEIVRKKPIFEQLSNTLEDH

SEQ ID NO: 71672 - protein, 34 aa, Artificial Sequence
  Cyclic GFR-binding peptide
  MOD_RES (3)..(4): Xaa is C or S
SPXXVPQDLSNITIQIMVGRTPKVIGEMSMVVKS

SEQ ID NO: 71673 - protein, 40 aa, Artificial Sequence; identical to SEQ ID NO: 24849
  Cyclic GFR-binding peptide
  MOD_RES (1)..(38)..(40): Xaa is C or S

SEQ ID NO: 71674 - protein, 36 aa, Artificial Sequence
  Cyclic GFR-binding peptide
  MOD_RES (3)..(4)..(36): Xaa is C or S
KPXXAPTKLRPVQVRKIDDSSNVIKKATVNMVVRSX

SEQ ID NO: 71675 - protein, 34 aa, Artificial Sequence
  Cyclic GFR-binding peptide
  MOD_RES (2)..(3)..(34): Xaa is C or S
PXXVPQDLSNITIQIMVGRTPKVIGEMSMVVKSX

SEQ ID NO: 71676 - protein, 31 aa, Artificial Sequence
  Cyclic GFR-binding peptide
  MOD_RES (30)..(30): Xaa is C or S
EPLPVVYYEIVRKKPIFEQLSNTLEDHLAXK

SEQ ID NO: 71677 - protein, 30 aa, Artificial Sequence
  Cyclic GFR-binding peptide
  MOD_RES (27)..(29): Xaa is C or S
SNITMQIMDEYDKVVIGEMSEMVVEGXGXR

SEQ ID NO: 71678 - protein, 32 aa, Artificial Sequence
  Cyclic GFR-binding peptide
PTQVQLEPLTVLYYEIVRKKPIFEQLSNTLED

SEQ ID NO: 71679 - protein, 29 aa, Artificial Sequence
  Cyclic GFR-binding peptide
TELSNITMQIMDENEKVVIGEMSDMVVEG

SEQ ID NO: 71680 - protein, 31 aa, Artificial Sequence; identical to SEQ ID NO: 21047
  Cyclic GFR-binding peptide
  MOD_RES (2)..(3): Xaa is C or S

SEQ ID NO: 71681 - protein, 38 aa, Artificial Sequence
  Cyclic GFR-binding peptide
  MOD_RES (4)..(5)..(36)..(38): Xaa is C or S
ASPXXVPQDLSNITIQIMVGRTPKVIGEMSMVVKSXKX

SEQ ID NO: 71682 - protein, 23 aa, Artificial Sequence
  Cyclic GFR-binding peptide
RSVKIAKVVGRKPKVKEVQVMIV

SEQ ID NO: 71683 - protein, 25 aa, Artificial Sequence
  Cyclic GFR-binding peptide
TELEPLPMVYYDEYDKVVEQLSNEM

SEQ ID NO: 71684 - protein, 28 aa, Artificial Sequence
  Cyclic GFR-binding peptide
RSVKMAKVRIKPHQGQHKEVQVFLQHNK

SEQ ID NO: 71685 - protein, 42 aa, Artificial Sequence; identical to SEQ ID NO: 24861
  Cyclic GFR-binding peptide
  MOD_RES (2)..(39)..(41): Xaa is C or S

SEQ ID NO: 71686 - protein, 31 aa, Artificial Sequence
  Cyclic GFR-binding peptide
  MOD_RES (2)..(3): Xaa is C or S
AXXVPTELRPVQMRKIDENEKVVKKATVDMV

SEQ ID NO: 71687 - protein, 41 aa, Artificial Sequence; identical to SEQ ID NO: 24864
  Cyclic GFR-binding peptide
  MOD_RES (1)..(38)..(40): Xaa is C or S

SEQ ID NO: 71688 - protein, 32 aa, Artificial Sequence; identical to SEQ ID NO: 24866
  Cyclic GFR-binding peptide

SEQ ID NO: 71689 - protein, 36 aa, Artificial Sequence
  Cyclic GFR-binding peptide
  MOD_RES (1)..(2)..(34)..(36): Xaa is C or S
XXVPTELRPVQMRKIDENEKVVKKATVDMVVEGXGX

SEQ ID NO: 71690 - protein, 40 aa, Artificial Sequence; identical to SEQ ID NO: 21060
  Cyclic GFR-binding peptide
  MOD_RES (5)..(6)..(38)..(40): Xaa is C or S

SEQ ID NO: 71691 - protein, 26 aa, Artificial Sequence
  Cyclic GFR-binding peptide
LRSVKIAKVVGRKPKVKEVQVMIVRS

SEQ ID NO: 71692 - protein, 33 aa, Artificial Sequence
  Cyclic GFR-binding peptide
  MOD_RES (1)..(33): Xaa is C or S
XVPTELRSVKMAKVDEYDKVVKEVQVEMVVEGX

SEQ ID NO: 71693 - protein, 30 aa, Artificial Sequence; identical to SEQ ID NO: 21062
  Cyclic GFR-binding peptide
  MOD_RES (3)..(4): Xaa is C or S

SEQ ID NO: 71694 - protein, 35 aa, Artificial Sequence; identical to SEQ ID NO: 21063
  Cyclic GFR-binding peptide
  MOD_RES (32)..(34): Xaa is C or S

SEQ ID NO: 71695 - protein, 33 aa, Artificial Sequence; identical to SEQ ID NO: 21064
  Cyclic GFR-binding peptide
  MOD_RES (3)..(4): Xaa is C or S

SEQ ID NO: 71696 - protein, 25 aa, Artificial Sequence
  Cyclic GFR-binding peptide
EPLPIVYYVGRTPKVEQLSNMVVKS

SEQ ID NO: 71697 - protein, 32 aa, Artificial Sequence
  Cyclic GFR-binding peptide
  MOD_RES (31)..(31): Xaa is C or S
PTQLSNITVQIMDDSSNVIIGEMSNMVVRAXG

SEQ ID NO: 71698 - protein, 26 aa, Artificial Sequence
  Cyclic GFR-binding peptide
TKLSNITVQIMDDSSNVIIGEMSNMV

SEQ ID NO: 71699 - protein, 34 aa, Artificial Sequence; identical to SEQ ID NO: 21068
  Cyclic GFR-binding peptide
  MOD_RES (2)..(3): Xaa is C or S

SEQ ID NO: 71700 - protein, 28 aa, Artificial Sequence
  Cyclic GFR-binding peptide
PTQVQLSNITVQIMEIVRKKPIFIGEMS

SEQ ID NO: 71701 - protein, 33 aa, Artificial Sequence
  Cyclic GFR-binding peptide
  MOD_RES (6)..(7): Xaa is C or S
KIPKAXXVPTELRPVQMRKIDENEKVVKKATVD

SEQ ID NO: 71702 - protein, 33 aa, Artificial Sequence
  Cyclic GFR-binding peptide
  MOD_RES (31)..(33): Xaa is C or S
PTELRSVKMAKVDEYDKVVKEVQVEMVVEGXGX

SEQ ID NO: 71703 - protein, 35 aa, Artificial Sequence; identical to SEQ ID NO: 21070
  Cyclic GFR-binding peptide
  MOD_RES (3)..(4): Xaa is C or S

SEQ ID NO: 71704 - protein, 39 aa, Artificial Sequence
  Cyclic GFR-binding peptide
  MOD_RES (6)..(7)..(38): Xaa is C or S
ASASPXXVSQDLSNITIQIMIGKTPKIIGEMSMIVKSXK

SEQ ID NO: 71705 - protein, 33 aa, Artificial Sequence; identical to SEQ ID NO: 24876
  Cyclic GFR-binding peptide
  MOD_RES (32)..(32): Xaa is C or S

SEQ ID NO: 71706 - protein, 34 aa, Artificial Sequence; identical to SEQ ID NO: 21071
  Cyclic GFR-binding peptide
  MOD_RES (31)..(33): Xaa is C or S

SEQ ID NO: 71707 - protein, 35 aa, Artificial Sequence; identical to SEQ ID NO: 24879
  Cyclic GFR-binding peptide
  MOD_RES (3)..(3): Xaa is C or S

SEQ ID NO: 71708 - protein, 33 aa, Artificial Sequence
  Cyclic GFR-binding peptide
  MOD_RES (33)..(33): Xaa is C or S
PTEEEPLPMVYYRIKPHQGQHEQLSNFLQHNKX

SEQ ID NO: 71709 - protein, 26 aa, Artificial Sequence
  Cyclic GFR-binding peptide
  MOD_RES (1)..(1): Xaa is C or S
XVPTELEPLTMLYYDENEKVVEQLSN

SEQ ID NO: 71710 - protein, 27 aa, Artificial Sequence
  Cyclic GFR-binding peptide
EPLPVVYYEYVRKKPKLEQLSNRLEEH

SEQ ID NO: 71711 - protein, 33 aa, Artificial Sequence; identical to SEQ ID NO: 21078
  Cyclic GFR-binding peptide
  MOD_RES (1)..(2): Xaa is C or S

SEQ ID NO: 71712 - protein, 26 aa, Artificial Sequence
  Cyclic GFR-binding peptide
PQDLEPLPIVYYVGRTPKVEQLSNMV

SEQ ID NO: 71713 - protein, 31 aa, Artificial Sequence
  Cyclic GFR-binding peptide
  MOD_RES (28)..(30): Xaa is C or S
DLRSVKIAKVVGRTPKVKEVQVMVVKSXKXS

SEQ ID NO: 71714 - protein, 33 aa, Artificial Sequence
  Cyclic GFR-binding peptide
  MOD_RES (32)..(32): Xaa is C or S
TEEEPLTMLYYRIKPHQGQHEQLSNFLQHNKXE

SEQ ID NO: 71715 - protein, 32 aa, Artificial Sequence; identical to SEQ ID NO: 24886
  Cyclic GFR-binding peptide
  MOD_RES (32)..(32): Xaa is C or S

SEQ ID NO: 71716 - protein, 36 aa, Artificial Sequence
  Cyclic GFR-binding peptide
  MOD_RES (1)..(33)..(35): Xaa is C or S
XVPTELSNITMQIMDENEKVVIGEMSDMVVEGXGXR

SEQ ID NO: 71717 - protein, 21 aa, Artificial Sequence
  Cyclic GFR-binding peptide
RSVKMAKVDENEKVVKEVQVD

SEQ ID NO: 71718 - protein, 25 aa, Artificial Sequence
  Cyclic GFR-binding peptide
SQDLEPLPIVYYIGKTPKIEQLSNM

SEQ ID NO: 71719 - protein, 35 aa, Artificial Sequence; identical to SEQ ID NO: 21097
  Cyclic GFR-binding peptide
  MOD_RES (5)..(5): Xaa is C or S

SEQ ID NO: 71720 - protein, 32 aa, Artificial Sequence
  Cyclic GFR-binding peptide
  MOD_RES (1)..(1): Xaa is C or S
XQPSRVHHEPLPVVYYEYVRKKPKLEQLSNRL

SEQ ID NO: 71721 - protein, 30 aa, Artificial Sequence
  Cyclic GFR-binding peptide
  MOD_RES (1)..(2): Xaa is C or S
XXVPQDLSNITIQIMVGRTPKVIGEMSMVV

SEQ ID NO: 71722 - protein, 31 aa, Artificial Sequence
  Cyclic GFR-binding peptide
QPSRVHHEPLTVLYYEYVRKKPKLEQLSNRL

SEQ ID NO: 71723 - protein, 28 aa, Artificial Sequence
  Cyclic GFR-binding peptide
ERSVKMAKVRIKPHQGQHKEVQVFLQHN

SEQ ID NO: 71724 - protein, 29 aa, Artificial Sequence
  Cyclic GFR-binding peptide
HHSNITVQIMEYVRKKPKLIGEMSRLEEH

SEQ ID NO: 71725 - protein, 33 aa, Artificial Sequence; identical to SEQ ID NO: 21105
  Cyclic GFR-binding peptide
  MOD_RES (6)..(7): Xaa is C or S

SEQ ID NO: 71726 - protein, 37 aa, Artificial Sequence; identical to SEQ ID NO: 21109
  Cyclic GFR-binding peptide
  MOD_RES (6)..(7): Xaa is C or S

SEQ ID NO: 71727 - protein, 29 aa, Artificial Sequence
  Cyclic GFR-binding peptide
  MOD_RES (2)..(2): Xaa is C or S
TXAPTKLEPLTVLYYDDSSNVIEQLSNNM

SEQ ID NO: 71728 - protein, 28 aa, Artificial Sequence
  Cyclic GFR-binding peptide
  MOD_RES (1)..(2): Xaa is C or S
XXVPTELRSVKMAKVDENEKVVKEVQVD

SEQ ID NO: 71729 - protein, 28 aa, Artificial Sequence
  Cyclic GFR-binding peptide
EERSVKMAKVRIKPHQGQHKEVQVFLQH

SEQ ID NO: 71730 - protein, 33 aa, Artificial Sequence
  Cyclic GFR-binding peptide
  MOD_RES (30)..(32): Xaa is C or S
EPLTVLYYEYVRKKPKLEQLSNRLEEHLEXAXA

SEQ ID NO: 71731 - protein, 40 aa, Artificial Sequence
  Cyclic GFR-binding peptide
  MOD_RES (1)..(38)..(40): Xaa is C or S
XRPTQVQLEPLPVVYYEIVRKKPIFEQLSNTLEDHLAXKX

SEQ ID NO: 71732 - protein, 35 aa, Artificial Sequence
  Cyclic GFR-binding peptide
  MOD_RES (32)..(34): Xaa is C or S
APTKLRPVQVRKIDDSSNVIKKATVNMVVRSXGXH

SEQ ID NO: 71733 - protein, 24 aa, Artificial Sequence
  Cyclic GFR-binding peptide
TELEPLTMLYYDEYDKVVEQLSNE

SEQ ID NO: 71734 - protein, 41 aa, Artificial Sequence
  Cyclic GFR-binding peptide
  MOD_RES (6)..(7)..(39)..(41): Xaa is C or S
YVPKPXXAPTKLRPVQVRKIDDSSNVIKKATVNMVVRSXGX

SEQ ID NO: 71735 - protein, 26 aa, Artificial Sequence
  Cyclic GFR-binding peptide
QDLEPLPIVYYIGKTPKIEQLSNMIV

SEQ ID NO: 71736 - protein, 28 aa, Artificial Sequence
  Cyclic GFR-binding peptide
VPQALRSVKIAKVVGRKPKVKEVQVMIV

SEQ ID NO: 71737 - protein, 38 aa, Artificial Sequence; identical to SEQ ID NO: 21132
  Cyclic GFR-binding peptide
  MOD_RES (6)..(38): Xaa is C or S

SEQ ID NO: 71738 - protein, 37 aa, Artificial Sequence
  Cyclic GFR-binding peptide
  MOD_RES (2)..(34)..(36): Xaa is C or S
TXAPTKLSNITVQIMDDSSNVIIGEMSNMVVRSXGXH

SEQ ID NO: 71739 - protein, 35 aa, Artificial Sequence
  Cyclic GFR-binding peptide
  MOD_RES (6)..(7): Xaa is C or S
YVPKPXXAPTKLRSVKVAKVDDSSNVIKEVQVNMV

SEQ ID NO: 71740 - protein, 32 aa, Artificial Sequence
  Cyclic GFR-binding peptide
  MOD_RES (31)..(31): Xaa is C or S
PTELRPVQMRKIDEYDKVVKKATVEMVVEGXG

SEQ ID NO: 71741 - protein, 35 aa, Artificial Sequence
  Cyclic GFR-binding peptide
  MOD_RES (2)..(2): Xaa is C or S
KXQPSRVHHEPLTVLYYEYVRKKPKLEQLSNRLEE

SEQ ID NO: 71742 - protein, 35 aa, Artificial Sequence; identical to SEQ ID NO: 24931
  Cyclic GFR-binding peptide
  MOD_RES (35)..(35): Xaa is C or S

SEQ ID NO: 71743 - protein, 30 aa, Artificial Sequence; identical to SEQ ID NO: 24936
  Cyclic GFR-binding peptide

SEQ ID NO: 71744 - protein, 31 aa, Artificial Sequence
  Cyclic GFR-binding peptide
  MOD_RES (29)..(31): Xaa is C or S
EPLTMLYYRIKPHQGQHEQLSNFLQHNKXEX

SEQ ID NO: 71745 - protein, 38 aa, Artificial Sequence; identical to SEQ ID NO: 21146
  Cyclic GFR-binding peptide
  MOD_RES (3)..(4)..(35)..(37): Xaa is C or S

SEQ ID NO: 71746 - protein, 32 aa, Artificial Sequence
  Cyclic GFR-binding peptide
  MOD_RES (29)..(31): Xaa is C or S
QDLSNITIQIMVGRTPKVIGEMSMVVKSXKXS

SEQ ID NO: 71747 - protein, 36 aa, Artificial Sequence; identical to SEQ ID NO: 24941
  Cyclic GFR-binding peptide
  MOD_RES (36)..(36): Xaa is C or S

SEQ ID NO: 71748 - protein, 30 aa, Artificial Sequence
  Cyclic GFR-binding peptide
  MOD_RES (28)..(30): Xaa is C or S
ALRSVKIAKVVGRKPKVKEVQVMIVRSXKX

SEQ ID NO: 71749 - protein, 38 aa, Artificial Sequence
  Cyclic GFR-binding peptide
  MOD_RES (5)..(5): Xaa is C or S
EGLEXVPTEEEPLPMVYYRIKPHQGQHEQLSNFLQHNK

SEQ ID NO: 71750 - protein, 36 aa, Artificial Sequence
  Cyclic GFR-binding peptide
  MOD_RES (2)..(2): Xaa is C or S
QXRPTQVQLEPLTVLYYEIVRKKPIFEQLSNTLEDH

SEQ ID NO: 71751 - protein, 30 aa, Artificial Sequence
  Cyclic GFR-binding peptide
  MOD_RES (4)..(5): Xaa is C or S
AAPXXVPQALRSVKIAKVVGRKPKVKEVQV

SEQ ID NO: 71752 - protein, 30 aa, Artificial Sequence; identical to SEQ ID NO: 21151
  Cyclic GFR-binding peptide
  MOD_RES (27)..(29): Xaa is C or S

SEQ ID NO: 71753 - protein, 27 aa, Artificial Sequence
  Cyclic GFR-binding peptide
  MOD_RES (1)..(2): Xaa is C or S
XXVPTELRSVKMAKVDEYDKVVKEVQV

SEQ ID NO: 71754 - protein, 25 aa, Artificial Sequence
  Cyclic GFR-binding peptide
PQDLSNITIQIMVGRTPKVIGEMSM

SEQ ID NO: 71755 - protein, 28 aa, Artificial Sequence
  Cyclic GFR-binding peptide
  MOD_RES (28)..(28): Xaa is C or S
DLRSVKIAKVVGRTPKVKEVQVMVVKSX

SEQ ID NO: 71756 - protein, 37 aa, Artificial Sequence; identical to SEQ ID NO: 24951
  Cyclic GFR-binding peptide
  MOD_RES (3)..(37): Xaa is C or S

SEQ ID NO: 71757 - protein, 30 aa, Artificial Sequence
  Cyclic GFR-binding peptide
  MOD_RES (30)..(30): Xaa is C or S
SQDLRSVKIAKVIGKTPKIKEVQVMIVKSX

SEQ ID NO: 71758 - protein, 36 aa, Artificial Sequence
  Cyclic GFR-binding peptide
  MOD_RES (35)..(35): Xaa is C or S
TQVQLEPLPVVYYEIVRKKPIFEQLSNTLEDHLAXK

SEQ ID NO: 71759 - protein, 30 aa, Artificial Sequence
  Cyclic GFR-binding peptide
VPTELRPVQMRKIDEYDKVVKKATVEMVVE

SEQ ID NO: 71760 - protein, 29 aa, Artificial Sequence
  Cyclic GFR-binding peptide
QPSRVHHEPLTVLYYEYVRKKPKLEQLSN

SEQ ID NO: 71761 - protein, 40 aa, Artificial Sequence; identical to SEQ ID NO: 24959
  Cyclic GFR-binding peptide
  MOD_RES (6)..(40): Xaa is C or S

SEQ ID NO: 71762 - protein, 37 aa, Artificial Sequence; identical to SEQ ID NO: 21163
  Cyclic GFR-binding peptide
  MOD_RES (4)..(36): Xaa is C or S

SEQ ID NO: 71763 - protein, 32 aa, Artificial Sequence; identical to SEQ ID NO: 21165
  Cyclic GFR-binding peptide
  MOD_RES (29)..(31): Xaa is C or S

SEQ ID NO: 71764 - protein, 39 aa, Artificial Sequence
  Cyclic GFR-binding peptide
  MOD_RES (6)..(7)..(38): Xaa is C or S
ASASPXXVPQDLRSVKIAKVVGRTPKVKEVQVMVVKSXK

SEQ ID NO: 71765 - protein, 27 aa, Artificial Sequence
  Cyclic GFR-binding peptide
HEPLTVLYYEYVRKKPKLEQLSNRLEE

SEQ ID NO: 71766 - protein, 42 aa, Artificial Sequence; identical to SEQ ID NO: 21171
  Cyclic GFR-binding peptide
  MOD_RES (7)..(39)..(41): Xaa is C or S

SEQ ID NO: 71767 - protein, 31 aa, Artificial Sequence
  Cyclic GFR-binding peptide
  MOD_RES (1)..(2): Xaa is C or S
XXVPTELRSVKMAKVDEYDKVVKEVQVEMVV

SEQ ID NO: 71768 - protein, 28 aa, Artificial Sequence
  Cyclic GFR-binding peptide
QLEPLTVLYYEIVRKKPIFEQLSNTLED

SEQ ID NO: 71769 - protein, 21 aa, Artificial Sequence
  Cyclic GFR-binding peptide
RPVQVRKIDDSSNVIKKATVN

SEQ ID NO: 71770 - protein, 28 aa, Artificial Sequence
  Cyclic GFR-binding peptide
  MOD_RES (2)..(3): Xaa is C or S
AXXVPTELRSVKMAKVDEYDKVVKEVQV

SEQ ID NO: 71771 - protein, 40 aa, Artificial Sequence
  Cyclic GFR-binding peptide
  MOD_RES (5)..(37)..(39): Xaa is C or S
TKPTXAPTKLRPVQVRKIDDSSNVIKKATVNMVVRSXGXH

SEQ ID NO: 71772 - protein, 27 aa, Artificial Sequence
  Cyclic GFR-binding peptide
LRPVQMRKIDENEKVVKKATVDMVVEG

SEQ ID NO: 71773 - protein, 40 aa, Artificial Sequence
  Cyclic GFR-binding peptide
  MOD_RES (6)..(40): Xaa is C or S
DEGLEXVPTEEEPLTMLYYRIKPHQGQHEQLSNFLQHNKX

SEQ ID NO: 71774 - protein, 31 aa, Artificial Sequence
  Cyclic GFR-binding peptide
  MOD_RES (4)..(5): Xaa is C or S
PKPXXAPTQLRSVKVAKVDDSSNVIKEVQVN

SEQ ID NO: 71775 - protein, 31 aa, Artificial Sequence
  Cyclic GFR-binding peptide
  MOD_RES (5)..(6): Xaa is C or S
SAAPXXVPQALRSVKIAKVVGRKPKVKEVQV

SEQ ID NO: 71776 - protein, 34 aa, Artificial Sequence
  Cyclic GFR-binding peptide
  MOD_RES (4)..(5): Xaa is C or S
ASPXXVPQDLRSVKIAKVVGRTPKVKEVQVMVVK

SEQ ID NO: 71777 - protein, 23 aa, Artificial Sequence
  Cyclic GFR-binding peptide
LEPLTVLYYEIVRKKPIFEQLSN

SEQ ID NO: 71778 - protein, 37 aa, Artificial Sequence
  Cyclic GFR-binding peptide
  MOD_RES (4)..(5)..(36): Xaa is C or S
ASPXXVPQDLRPVQIRKIVGRTPKVKKATVMVVKSXK

SEQ ID NO: 71779 - protein, 33 aa, Artificial Sequence; identical to SEQ ID NO: 24987
  Cyclic GFR-binding peptide
  MOD_RES (30)..(32): Xaa is C or S

SEQ ID NO: 71780 - protein, 42 aa, Artificial Sequence
  Cyclic GFR-binding peptide
  MOD_RES (6)..(7)..(39)..(41): Xaa is C or S
KIPKAXXVPTELRSVKMAKVDENEKVVKEVQVDMVVEGXGXR

SEQ ID NO: 71781 - protein, 35 aa, Artificial Sequence
  Cyclic GFR-binding peptide
  MOD_RES (4)..(5): Xaa is C or S
AAPXXVPQALSNITIQIMVGRKPKVIGEMSMIVRS

SEQ ID NO: 71782 - protein, 26 aa, Artificial Sequence
  Cyclic GFR-binding peptide
QALRPVQIRKIVGRKPKVKKATVMIV

SEQ ID NO: 71783 - protein, 37 aa, Artificial Sequence; identical to SEQ ID NO: 21200
  Cyclic GFR-binding peptide
  MOD_RES (6)..(7): Xaa is C or S

SEQ ID NO: 71784 - protein, 41 aa, Artificial Sequence
  Cyclic GFR-binding peptide
  MOD_RES (5)..(6)..(38)..(40): Xaa is C or S
IPKAXXVPTELSNITMQIMDEYDKVVIGEMSEMVVEGXGXR

SEQ ID NO: 71785 - protein, 33 aa, Artificial Sequence
  Cyclic GFR-binding peptide
  MOD_RES (1)..(2): Xaa is C or S
XXVPTELRPVQMRKIDENEKVVKKATVDMVVEG

SEQ ID NO: 71786 - protein, 30 aa, Artificial Sequence
  Cyclic GFR-binding peptide
TEEEPLPMVYYRIKPHQGQHEQLSNFLQHN

SEQ ID NO: 71787 - protein, 35 aa, Artificial Sequence
  Cyclic GFR-binding peptide
  MOD_RES (1)..(2)..(34): Xaa is C or S
XXAPTQLRSVKVAKVDDSSNVIKEVQVNMVVRAXG

SEQ ID NO: 71788 - protein, 33 aa, Artificial Sequence
  Cyclic GFR-binding peptide
  MOD_RES (1)..(2)..(33): Xaa is C or S
XXVPQDLSNITIQIMVGRTPKVIGEMSMVVKSX

SEQ ID NO: 71789 - protein, 33 aa, Artificial Sequence
  Cyclic GFR-binding peptide
  MOD_RES (6)..(7): Xaa is C or S
YVPKPXXAPTKLRSVKVAKVDDSSNVIKEVQVN

SEQ ID NO: 71790 - protein, 37 aa, Artificial Sequence; identical to SEQ ID NO: 21211
  Cyclic GFR-binding peptide
  MOD_RES (3)..(4)..(35)..(37): Xaa is C or S

SEQ ID NO: 71791 - protein, 23 aa, Artificial Sequence
  Cyclic GFR-binding peptide
ELEPLTMLYYDENEKVVEQLSND

SEQ ID NO: 71792 - protein, 37 aa, Artificial Sequence
  Cyclic GFR-binding peptide
  MOD_RES (37)..(37): Xaa is C or S
QPSRVHHEPLTVLYYEYVRKKPKLEQLSNRLEEHLEX

SEQ ID NO: 71793 - protein, 33 aa, Artificial Sequence; identical to SEQ ID NO: 21218
  Cyclic GFR-binding peptide
  MOD_RES (5)..(6): Xaa is C or S

SEQ ID NO: 71794 - protein, 39 aa, Artificial Sequence
  Cyclic GFR-binding peptide
  MOD_RES (4)..(5)..(37)..(39): Xaa is C or S
PKPXXAPTQLRPVQVRKIDDSSNVIKKATVNMVVRAXGX

SEQ ID NO: 71795 - protein, 41 aa, Artificial Sequence; identical to SEQ ID NO: 24996
  Cyclic GFR-binding peptide
  MOD_RES (3)..(40): Xaa is C or S

SEQ ID NO: 71796 - protein, 37 aa, Artificial Sequence
  Cyclic GFR-binding peptide
  MOD_RES (4)..(36): Xaa is C or S
KPTXAPTKLRSVKVAKVDDSSNVIKEVQVNMVVRSXG

SEQ ID NO: 71797 - protein, 35 aa, Artificial Sequence
  Cyclic GFR-binding peptide
PTQVQLEPLPVVYYEIVRKKPIFEQLSNTLEDHLA

SEQ ID NO: 71798 - protein, 38 aa, Artificial Sequence
  Cyclic GFR-binding peptide
  MOD_RES (3)..(4)..(36)..(38): Xaa is C or S
KPXXAPTKLRPVQVRKIDDSSNVIKKATVNMVVRSXGX

SEQ ID NO: 71799 - protein, 28 aa, Artificial Sequence
  Cyclic GFR-binding peptide
EEPLPMVYYRIKPHQGQHEQLSNFLQHN

SEQ ID NO: 71800 - protein, 35 aa, Artificial Sequence; identical to SEQ ID NO: 21224
  Cyclic GFR-binding peptide
  MOD_RES (1)..(2)..(34): Xaa is C or S

SEQ ID NO: 71801 - protein, 25 aa, Artificial Sequence
  Cyclic GFR-binding peptide
TELRSVKMAKVDEYDKVVKEVQVEM

SEQ ID NO: 71802 - protein, 34 aa, Artificial Sequence
  Cyclic GFR-binding peptide
  MOD_RES (32)..(34): Xaa is C or S
VPTELRSVKMAKVDEYDKVVKEVQVEMVVEGXGX

SEQ ID NO: 71803 - protein, 25 aa, Artificial Sequence
  Cyclic GFR-binding peptide
SQDLRPVQIRKIIGKTPKIKKATVM

SEQ ID NO: 71804 - protein, 27 aa, Artificial Sequence
  Cyclic GFR-binding peptide
VHHSNITVQIMEYVRKKPKLIGEMSRL

SEQ ID NO: 71805 - protein, 29 aa, Artificial Sequence
  Cyclic GFR-binding peptide
  MOD_RES (2)..(3): Xaa is C or S
AXXVPTELSNITMQIMDENEKVVIGEMSD

SEQ ID NO: 71806 - protein, 30 aa, Artificial Sequence
  Cyclic GFR-binding peptide
  MOD_RES (3)..(4): Xaa is C or S
KAXXVPTELRPVQMRKIDENEKVVKKATVD

SEQ ID NO: 71807 - protein, 38 aa, Artificial Sequence
  Cyclic GFR-binding peptide
  MOD_RES (3)..(4)..(36)..(38): Xaa is C or S
KPXXAPTQLRPVQVRKIDDSSNVIKKATVNMVVRAXGX

SEQ ID NO: 71808 - protein, 29 aa, Artificial Sequence
  Cyclic GFR-binding peptide
TELEPLPMVYYDEYDKVVEQLSNEMVVEG

SEQ ID NO: 71809 - protein, 22 aa, Artificial Sequence
  Cyclic GFR-binding peptide
DLEPLPIVYYVGRTPKVEQLSN

SEQ ID NO: 71810 - protein, 30 aa, Artificial Sequence
  Cyclic GFR-binding peptide
  MOD_RES (4)..(5): Xaa is C or S
PKAXXVPTELRPVQMRKIDENEKVVKKATV

SEQ ID NO: 71811 - protein, 31 aa, Artificial Sequence; identical to SEQ ID NO: 21240
  Cyclic GFR-binding peptide
  MOD_RES (5)..(6): Xaa is C or S

SEQ ID NO: 71812 - protein, 29 aa, Artificial Sequence
  Cyclic GFR-binding peptide
  MOD_RES (28)..(28): Xaa is C or S
DLEPLPIVYYVGRTPKVEQLSNMVVKSXK

SEQ ID NO: 71813 - protein, 31 aa, Artificial Sequence
  Cyclic GFR-binding peptide
  MOD_RES (29)..(31): Xaa is C or S
KLRPVQVRKIDDSSNVIKKATVNMVVRSXGX

SEQ ID NO: 71814 - protein, 38 aa, Artificial Sequence; identical to SEQ ID NO: 21244
  Cyclic GFR-binding peptide
  MOD_RES (7)..(7): Xaa is C or S

SEQ ID NO: 71815 - protein, 35 aa, Artificial Sequence; identical to SEQ ID NO: 21246
  Cyclic GFR-binding peptide
  MOD_RES (1)..(2)..(34): Xaa is C or S

SEQ ID NO: 71816 - protein, 30 aa, Artificial Sequence; identical to SEQ ID NO: 21247
  Cyclic GFR-binding peptide
  MOD_RES (1)..(2): Xaa is C or S

SEQ ID NO: 71817 - protein, 32 aa, Artificial Sequence; identical to SEQ ID NO: 21250
  Cyclic GFR-binding peptide
  MOD_RES (1)..(1): Xaa is C or S

SEQ ID NO: 71818 - protein, 22 aa, Artificial Sequence
  Cyclic GFR-binding peptide
DLRPVQIRKIVGRTPKVKKATV

SEQ ID NO: 71819 - protein, 35 aa, Artificial Sequence
  Cyclic GFR-binding peptide
  MOD_RES (5)..(6): Xaa is C or S
SASPXXVSQDLSNITIQIMIGKTPKIIGEMSMIVK

SEQ ID NO: 71820 - protein, 30 aa, Artificial Sequence
  Cyclic GFR-binding peptide
  MOD_RES (3)..(4): Xaa is C or S
APXXVPQALRSVKIAKVVGRKPKVKEVQVM

SEQ ID NO: 71821 - protein, 39 aa, Artificial Sequence; identical to SEQ ID NO: 21254
  Cyclic GFR-binding peptide
  MOD_RES (6)..(7)..(39): Xaa is C or S

SEQ ID NO: 71822 - protein, 34 aa, Artificial Sequence
  Cyclic GFR-binding peptide
  MOD_RES (5)..(6): Xaa is C or S
SASPXXVPQDLSNITIQIMVGRTPKVIGEMSMVV

SEQ ID NO: 71823 - protein, 34 aa, Artificial Sequence
  Cyclic GFR-binding peptide
  MOD_RES (3)..(3): Xaa is C or S
LEXVPTEEEPLPMVYYRIKPHQGQHEQLSNFLQH

SEQ ID NO: 71824 - protein, 33 aa, Artificial Sequence
  Cyclic GFR-binding peptide
  MOD_RES (4)..(4): Xaa is C or S
KPTXAPTKLRPVQVRKIDDSSNVIKKATVNMVV

SEQ ID NO: 71825 - protein, 27 aa, Artificial Sequence
  Cyclic GFR-binding peptide
TELEPLTMLYYDENEKVVEQLSNDMVV

SEQ ID NO: 71826 - protein, 33 aa, Artificial Sequence; identical to SEQ ID NO: 25033
  Cyclic GFR-binding peptide
  MOD_RES (32)..(32): Xaa is C or S

SEQ ID NO: 71827 - protein, 29 aa, Artificial Sequence
  Cyclic GFR-binding peptide
  MOD_RES (28)..(28): Xaa is C or S
LEPLPVVYYDDSSNVIEQLSNNMVVRSXG

SEQ ID NO: 71828 - protein, 33 aa, Artificial Sequence; identical to SEQ ID NO: 25034
  Cyclic GFR-binding peptide

SEQ ID NO: 71829 - protein, 35 aa, Artificial Sequence
  Cyclic GFR-binding peptide
  MOD_RES (1)..(2)..(34): Xaa is C or S
XXAPTKLRSVKVAKVDDSSNVIKEVQVNMVVRSXG

SEQ ID NO: 71830 - protein, 42 aa, Artificial Sequence
  Cyclic GFR-binding peptide
  MOD_RES (4)..(41): Xaa is C or S
SVKXQPSRVHHEPLPVVYYEYVRKKPKLEQLSNRLEEHLEXA

SEQ ID NO: 71831 - protein, 30 aa, Artificial Sequence; identical to SEQ ID NO: 21263
  Cyclic GFR-binding peptide
  MOD_RES (4)..(5): Xaa is C or S

SEQ ID NO: 71832 - protein, 26 aa, Artificial Sequence
  Cyclic GFR-binding peptide
QALEPLTILYYVGRKPKVEQLSNMIV

SEQ ID NO: 71833 - protein, 24 aa, Artificial Sequence
  Cyclic GFR-binding peptide
LRPVQIRKIVGRKPKVKKATVMIV

SEQ ID NO: 71834 - protein, 31 aa, Artificial Sequence; identical to SEQ ID NO: 21268
  Cyclic GFR-binding peptide
  MOD_RES (4)..(5): Xaa is C or S

SEQ ID NO: 71835 - protein, 31 aa, Artificial Sequence
  Cyclic GFR-binding peptide
  MOD_RES (5)..(6): Xaa is C or S
IPKAXXVPTELRPVQMRKIDENEKVVKKATV

SEQ ID NO: 71836 - protein, 36 aa, Artificial Sequence; identical to SEQ ID NO: 21270
  Cyclic GFR-binding peptide
  MOD_RES (1)..(2)..(34)..(36): Xaa is C or S

SEQ ID NO: 71837 - protein, 23 aa, Artificial Sequence
  Cyclic GFR-binding peptide
SNITIQIMIGKTPKIIGEMSMIV

SEQ ID NO: 71838 - protein, 22 aa, Artificial Sequence
  Cyclic GFR-binding peptide
ELRPVQMRKIDEYDKVVKKATV

SEQ ID NO: 71839 - protein, 34 aa, Artificial Sequence
  Cyclic GFR-binding peptide
  MOD_RES (4)..(5): Xaa is C or S
AAPXXVPQALRPVQIRKIVGRKPKVKKATVMIVR

SEQ ID NO: 71840 - protein, 24 aa, Artificial Sequence
  Cyclic GFR-binding peptide
QLRSVKVAKVEIVRKKPIFKEVQV

SEQ ID NO: 71841 - protein, 24 aa, Artificial Sequence
  Cyclic GFR-binding peptide
LEPLTILYYVGRKPKVEQLSNMIV

SEQ ID NO: 71842 - protein, 37 aa, Artificial Sequence; identical to SEQ ID NO: 21286
  Cyclic GFR-binding peptide
  MOD_RES (2)..(34)..(36): Xaa is C or S

SEQ ID NO: 71843 - protein, 25 aa, Artificial Sequence
  Cyclic GFR-binding peptide
TELEPLTMLYYDENEKVVEQLSNDM

SEQ ID NO: 71844 - protein, 35 aa, Artificial Sequence
  Cyclic GFR-binding peptide
  MOD_RES (6)..(7): Xaa is C or S
YVPKPXXAPTKLSNITVQIMDDSSNVIIGEMSNMV

SEQ ID NO: 71845 - protein, 39 aa, Artificial Sequence; identical to SEQ ID NO: 25053
  Cyclic GFR-binding peptide
  MOD_RES (37)..(39): Xaa is C or S

SEQ ID NO: 71846 - protein, 28 aa, Artificial Sequence
  Cyclic GFR-binding peptide
TELEPLPMVYYDENEKVVEQLSNDMVVE

SEQ ID NO: 71847 - protein, 32 aa, Artificial Sequence
  Cyclic GFR-binding peptide
  MOD_RES (6)..(7): Xaa is C or S
ASASPXXVPQDLRSVKIAKVVGRTPKVKEVQV

SEQ ID NO: 71848 - protein, 22 aa, Artificial Sequence
  Cyclic GFR-binding peptide
ELEPLPMVYYDEYDKVVEQLSN

SEQ ID NO: 71849 - protein, 30 aa, Artificial Sequence
  Cyclic GFR-binding peptide
  MOD_RES (1)..(1): Xaa is C or S
XVSQDLRSVKIAKVIGKTPKIKEVQVMIVK

SEQ ID NO: 71850 - protein, 33 aa, Artificial Sequence
  Cyclic GFR-binding peptide
  MOD_RES (30)..(32): Xaa is C or S
TELRPVQMRKIDEYDKVVKKATVEMVVEGXGXR

SEQ ID NO: 71851 - protein, 35 aa, Artificial Sequence; identical to SEQ ID NO: 25058
  Cyclic GFR-binding peptide

SEQ ID NO: 71852 - protein, 30 aa, Artificial Sequence; identical to SEQ ID NO: 21300
  Cyclic GFR-binding peptide
  MOD_RES (30)..(30): Xaa is C or S

SEQ ID NO: 71853 - protein, 35 aa, Artificial Sequence
  Cyclic GFR-binding peptide
  MOD_RES (1)..(2)..(33)..(35): Xaa is C or S
XXVPQALSNITIQIMVGRKPKVIGEMSMIVRSXKX

SEQ ID NO: 71854 - protein, 37 aa, Artificial Sequence; identical to SEQ ID NO: 21301
  Cyclic GFR-binding peptide
  MOD_RES (1)..(2)..(34)..(36): Xaa is C or S

SEQ ID NO: 71855 - protein, 35 aa, Artificial Sequence; identical to SEQ ID NO: 21305
  Cyclic GFR-binding peptide
  MOD_RES (1)..(2)..(34): Xaa is C or S

SEQ ID NO: 71856 - protein, 31 aa, Artificial Sequence; identical to SEQ ID NO: 21307
  Cyclic GFR-binding peptide
  MOD_RES (28)..(30): Xaa is C or S

SEQ ID NO: 71857 - protein, 22 aa, Artificial Sequence
  Cyclic GFR-binding peptide
EPLTILYYVGRKPKVEQLSNMI

SEQ ID NO: 71858 - protein, 34 aa, Artificial Sequence
  Cyclic GFR-binding peptide
  MOD_RES (6)..(7): Xaa is C or S
ASASPXXVSQDLSNITIQIMIGKTPKIIGEMSMI

SEQ ID NO: 71859 - protein, 31 aa, Artificial Sequence
  Cyclic GFR-binding peptide
  MOD_RES (1)..(1): Xaa is C or S
XVPTELRPVQMRKIDENEKVVKKATVDMVVE

SEQ ID NO: 71860 - protein, 39 aa, Artificial Sequence; identical to SEQ ID NO: 25065
  Cyclic GFR-binding peptide
  MOD_RES (4)..(4): Xaa is C or S

SEQ ID NO: 71861 - protein, 34 aa, Artificial Sequence
  Cyclic GFR-binding peptide
  MOD_RES (3)..(3): Xaa is C or S
PTXAPTKLRSVKVAKVDDSSNVIKEVQVNMVVRS

SEQ ID NO: 71862 - protein, 26 aa, Artificial Sequence
  Cyclic GFR-binding peptide
APTKLRSVKVAKVDDSSNVIKEVQVN

SEQ ID NO: 71863 - protein, 32 aa, Artificial Sequence; identical to SEQ ID NO: 25069
  Cyclic GFR-binding peptide
  MOD_RES (5)..(5): Xaa is C or S

SEQ ID NO: 71864 - protein, 40 aa, Artificial Sequence; identical to SEQ ID NO: 25070
  Cyclic GFR-binding peptide
  MOD_RES (5)..(5): Xaa is C or S

SEQ ID NO: 71865 - protein, 30 aa, Artificial Sequence
  Cyclic GFR-binding peptide
  MOD_RES (1)..(2): Xaa is C or S
XXVPQALRPVQIRKIVGRKPKVKKATVMIV

SEQ ID NO: 71866 - protein, 35 aa, Artificial Sequence
  Cyclic GFR-binding peptide
  MOD_RES (3)..(4): Xaa is C or S
KPXXAPTKLSNITVQIMDDSSNVIIGEMSNMVVRS

SEQ ID NO: 71867 - protein, 37 aa, Artificial Sequence
  Cyclic GFR-binding peptide
  MOD_RES (5)..(6)..(37): Xaa is C or S
SASPXXVSQDLRPVQIRKIIGKTPKIKKATVMIVKSX

SEQ ID NO: 71868 - protein, 23 aa, Artificial Sequence
  Cyclic GFR-binding peptide
DLRSVKIAKVIGKTPKIKEVQVM

SEQ ID NO: 71869 - protein, 28 aa, Artificial Sequence
  Cyclic GFR-binding peptide
APTKLEPLPVVYYDDSSNVIEQLSNNMV

SEQ ID NO: 71870 - protein, 39 aa, Artificial Sequence
  Cyclic GFR-binding peptide
  MOD_RES (4)..(5)..(37)..(39): Xaa is C or S
PKPXXAPTKLRPVQVRKIDDSSNVIKKATVNMVVRSXGX

SEQ ID NO: 71871 - protein, 33 aa, Artificial Sequence
  Cyclic GFR-binding peptide
  MOD_RES (1)..(2): Xaa is C or S
XXAPTKLRPVQVRKIDDSSNVIKKATVNMVVRS

SEQ ID NO: 71872 - protein, 31 aa, Artificial Sequence
  Cyclic GFR-binding peptide
TQVQLEPLPVVYYEIVRKKPIFEQLSNTLED

SEQ ID NO: 71873 - protein, 34 aa, Artificial Sequence
  Cyclic GFR-binding peptide
  MOD_RES (2)..(3)..(34): Xaa is C or S
PXXVPQALRSVKIAKVVGRKPKVKEVQVMIVRSX

SEQ ID NO: 71874 - protein, 23 aa, Artificial Sequence
  Cyclic GFR-binding peptide
TELRSVKMAKVDENEKVVKEVQV

SEQ ID NO: 71875 - protein, 30 aa, Artificial Sequence
  Cyclic GFR-binding peptide
RPTQVQLEPLPVVYYEIVRKKPIFEQLSNT

SEQ ID NO: 71876 - protein, 37 aa, Artificial Sequence
  Cyclic GFR-binding peptide
  MOD_RES (3)..(4)..(35)..(37): Xaa is C or S
SPXXVPQDLRSVKIAKVVGRTPKVKEVQVMVVKSXKX

SEQ ID NO: 71877 - protein, 29 aa, Artificial Sequence
  Cyclic GFR-binding peptide
TQVQLEPLTVLYYEIVRKKPIFEQLSNTL

SEQ ID NO: 71878 - protein, 32 aa, Artificial Sequence
  Cyclic GFR-binding peptide
  MOD_RES (2)..(3): Xaa is C or S
PXXVPQALSNITIQIMVGRKPKVIGEMSMIVR

SEQ ID NO: 71879 - protein, 28 aa, Artificial Sequence
  Cyclic GFR-binding peptide
SRVHHSNITVQIMEYVRKKPKLIGEMSR

SEQ ID NO: 71880 - protein, 35 aa, Artificial Sequence; identical to SEQ ID NO: 25085
  Cyclic GFR-binding peptide
  MOD_RES (32)..(34): Xaa is C or S

SEQ ID NO: 71881 - protein, 32 aa, Artificial Sequence; identical to SEQ ID NO: 21347
  Cyclic GFR-binding peptide
  MOD_RES (1)..(1): Xaa is C or S

SEQ ID NO: 71882 - protein, 22 aa, Artificial Sequence
  Cyclic GFR-binding peptide
SNITIQIMVGRKPKVIGEMSMI

SEQ ID NO: 71883 - protein, 35 aa, Artificial Sequence
  Cyclic GFR-binding peptide
  MOD_RES (34)..(34): Xaa is C or S
VPTEEEPLPMVYYRIKPHQGQHEQLSNFLQHNKXE

SEQ ID NO: 71884 - protein, 30 aa, Artificial Sequence
  Cyclic GFR-binding peptide
  MOD_RES (27)..(29): Xaa is C or S
LRSVKIAKVIGKTPKIKEVQVMIVKSXKXS

SEQ ID NO: 71885 - protein, 35 aa, Artificial Sequence; identical to SEQ ID NO: 25098
  Cyclic GFR-binding peptide
  MOD_RES (34)..(34): Xaa is C or S

SEQ ID NO: 71886 - protein, 31 aa, Artificial Sequence
  Cyclic GFR-binding peptide
  MOD_RES (28)..(30): Xaa is C or S
LRPVQMRKIDEYDKVVKKATVEMVVEGXGXR

SEQ ID NO: 71887 - protein, 34 aa, Artificial Sequence; identical to SEQ ID NO: 21352
  Cyclic GFR-binding peptide
  MOD_RES (3)..(4): Xaa is C or S

SEQ ID NO: 71888 - protein, 27 aa, Artificial Sequence
  Cyclic GFR-binding peptide
VPQALRSVKIAKVVGRKPKVKEVQVMI

SEQ ID NO: 71889 - protein, 39 aa, Artificial Sequence
  Cyclic GFR-binding peptide
  MOD_RES (4)..(36)..(38): Xaa is C or S
KPTXAPTKLRSVKVAKVDDSSNVIKEVQVNMVVRSXGXH

SEQ ID NO: 71890 - protein, 36 aa, Artificial Sequence
  Cyclic GFR-binding peptide
  MOD_RES (5)..(6): Xaa is C or S
VPKPXXAPTQLSNITVQIMDDSSNVIIGEMSNMVVR

SEQ ID NO: 71891 - protein, 38 aa, Artificial Sequence
  Cyclic GFR-binding peptide
  MOD_RES (5)..(37): Xaa is C or S
TKPTXAPTKLRPVQVRKIDDSSNVIKKATVNMVVRSXG

SEQ ID NO: 71892 - protein, 39 aa, Artificial Sequence
  Cyclic GFR-binding peptide
  MOD_RES (6)..(6): Xaa is C or S
DEGLEXVPTEEEPLTMLYYRIKPHQGQHEQLSNFLQHNK

SEQ ID NO: 71893 - protein, 31 aa, Artificial Sequence; identical to SEQ ID NO: 21360
  Cyclic GFR-binding peptide
  MOD_RES (1)..(2): Xaa is C or S

SEQ ID NO: 71894 - protein, 32 aa, Artificial Sequence
  Cyclic GFR-binding peptide
  MOD_RES (1)..(2): Xaa is C or S
XXVPTELRPVQMRKIDENEKVVKKATVDMVVE

SEQ ID NO: 71895 - protein, 30 aa, Artificial Sequence; identical to SEQ ID NO: 21363
  Cyclic GFR-binding peptide

SEQ ID NO: 71896 - protein, 34 aa, Artificial Sequence; identical to SEQ ID NO: 25111
  Cyclic GFR-binding peptide
  MOD_RES (34)..(34): Xaa is C or S

SEQ ID NO: 71897 - protein, 32 aa, Artificial Sequence
  Cyclic GFR-binding peptide
  MOD_RES (30)..(32): Xaa is C or S
EPLTVLYYEYVRKKPKLEQLSNRLEEHLEXAX

SEQ ID NO: 71898 - protein, 34 aa, Artificial Sequence
  Cyclic GFR-binding peptide
  MOD_RES (1)..(2)..(34): Xaa is C or S
XXVPTELRSVKMAKVDEYDKVVKEVQVEMVVEGX

SEQ ID NO: 71899 - protein, 28 aa, Artificial Sequence
  Cyclic GFR-binding peptide
  MOD_RES (2)..(3): Xaa is C or S
AXXVPTELRPVQMRKIDEYDKVVKKATV

SEQ ID NO: 71900 - protein, 36 aa, Artificial Sequence; identical to SEQ ID NO: 16737
  Cyclic GFR-binding peptide
  MOD_RES (1)..(33)..(35): Xaa is C or S

SEQ ID NO: 71901 - protein, 35 aa, Artificial Sequence
  Cyclic GFR-binding peptide
  MOD_RES (1)..(2)..(34): Xaa is C or S
XXVPTELRSVKMAKVDEYDKVVKEVQVEMVVEGXG

SEQ ID NO: 71902 - protein, 31 aa, Artificial Sequence; identical to SEQ ID NO: 23325
  Cyclic GFR-binding peptide
  MOD_RES (2)..(2): Xaa is C or S

SEQ ID NO: 71903 - protein, 39 aa, Artificial Sequence
  Cyclic GFR-binding peptide
  MOD_RES (4)..(5)..(37)..(39): Xaa is C or S
PKPXXAPTKLRSVKVAKVDDSSNVIKEVQVNMVVRSXGX

SEQ ID NO: 71904 - protein, 34 aa, Artificial Sequence
  Cyclic GFR-binding peptide
  MOD_RES (1)..(32)..(34): Xaa is C or S
XVPQALRSVKIAKVVGRKPKVKEVQVMIVRSXKX

SEQ ID NO: 71905 - protein, 32 aa, Artificial Sequence; identical to SEQ ID NO: 16747
  Cyclic GFR-binding peptide
  MOD_RES (6)..(7): Xaa is C or S

SEQ ID NO: 71906 - protein, 35 aa, Artificial Sequence; identical to SEQ ID NO: 16749
  Cyclic GFR-binding peptide
  MOD_RES (2)..(3)..(35): Xaa is C or S

SEQ ID NO: 71907 - protein, 34 aa, Artificial Sequence; identical to SEQ ID NO: 23328
  Cyclic GFR-binding peptide
  MOD_RES (1)..(1): Xaa is C or S

SEQ ID NO: 71908 - protein, 30 aa, Artificial Sequence
  Cyclic GFR-binding peptide
  MOD_RES (2)..(3): Xaa is C or S
PXXAPTQLRPVQVRKIDDSSNVIKKATVNM

SEQ ID NO: 71909 - protein, 38 aa, Artificial Sequence
  Cyclic GFR-binding peptide
  MOD_RES (3)..(35)..(37): Xaa is C or S
PTXAPTKLSNITVQIMDDSSNVIIGEMSNMVVRSXGXH

SEQ ID NO: 71910 - protein, 32 aa, Artificial Sequence; identical to SEQ ID NO: 16754
  Cyclic GFR-binding peptide
  MOD_RES (6)..(7): Xaa is C or S

SEQ ID NO: 71911 - protein, 40 aa, Artificial Sequence; identical to SEQ ID NO: 16755
  Cyclic GFR-binding peptide
  MOD_RES (6)..(7)..(39): Xaa is C or S

SEQ ID NO: 71912 - protein, 26 aa, Artificial Sequence
  Cyclic GFR-binding peptide
TQLEPLTVLYYDDSSNVIEQLSNNMV

SEQ ID NO: 71913 - protein, 41 aa, Artificial Sequence
  Cyclic GFR-binding peptide
  MOD_RES (4)..(38)..(40): Xaa is C or S
GLEXVPTEEEPLPMVYYRIKPHQGQHEQLSNFLQHNKXEXR

SEQ ID NO: 71914 - protein, 38 aa, Artificial Sequence
  Cyclic GFR-binding peptide
  MOD_RES (2)..(36)..(38): Xaa is C or S
EXVPTEEEPLPMVYYRIKPHQGQHEQLSNFLQHNKXEX

SEQ ID NO: 71915 - protein, 36 aa, Artificial Sequence
  Cyclic GFR-binding peptide
  MOD_RES (3)..(4)..(35): Xaa is C or S
SPXXVSQDLRSVKIAKVIGKTPKIKEVQVMIVKSXK

SEQ ID NO: 71916 - protein, 32 aa, Artificial Sequence; identical to SEQ ID NO: 23335
  Cyclic GFR-binding peptide

SEQ ID NO: 71917 - protein, 24 aa, Artificial Sequence
  Cyclic GFR-binding peptide
DLRSVKIAKVVGRTPKVKEVQVMV

SEQ ID NO: 71918 - protein, 33 aa, Artificial Sequence; identical to SEQ ID NO: 16767
  Cyclic GFR-binding peptide
  MOD_RES (6)..(7): Xaa is C or S

SEQ ID NO: 71919 - protein, 35 aa, Artificial Sequence; identical to SEQ ID NO: 16769
  Cyclic GFR-binding peptide
  MOD_RES (1)..(2)..(34): Xaa is C or S

SEQ ID NO: 71920 - protein, 23 aa, Artificial Sequence
  Cyclic GFR-binding peptide
RPVQIRKIVGRTPKVKKATVMVV

SEQ ID NO: 71921 - protein, 32 aa, Artificial Sequence; identical to SEQ ID NO: 23341
  Cyclic GFR-binding peptide
  MOD_RES (2)..(2): Xaa is C or S

SEQ ID NO: 71922 - protein, 37 aa, Artificial Sequence; identical to SEQ ID NO: 16775
  Cyclic GFR-binding peptide
  MOD_RES (5)..(6): Xaa is C or S

SEQ ID NO: 71923 - protein, 33 aa, Artificial Sequence
  Cyclic GFR-binding peptide
  MOD_RES (1)..(2)..(33): Xaa is C or S
XXVSQDLRSVKIAKVIGKTPKIKEVQVMIVKSX

SEQ ID NO: 71924 - protein, 39 aa, Artificial Sequence; identical to SEQ ID NO: 23349
  Cyclic GFR-binding peptide
  MOD_RES (2)..(39): Xaa is C or S

SEQ ID NO: 71925 - protein, 35 aa, Artificial Sequence; identical to SEQ ID NO: 23351
  Cyclic GFR-binding peptide
  MOD_RES (5)..(5): Xaa is C or S

SEQ ID NO: 71926 - protein, 33 aa, Artificial Sequence; identical to SEQ ID NO: 16780
  Cyclic GFR-binding peptide
  MOD_RES (30)..(32): Xaa is C or S

SEQ ID NO: 71927 - protein, 39 aa, Artificial Sequence
  Cyclic GFR-binding peptide
  MOD_RES (6)..(7)..(38): Xaa is C or S
ASASPXXVSQDLRSVKIAKVIGKTPKIKEVQVMIVKSXK

SEQ ID NO: 71928 - protein, 39 aa, Artificial Sequence
  Cyclic GFR-binding peptide
  MOD_RES (3)..(4)..(36)..(38): Xaa is C or S
KPXXAPTKLSNITVQIMDDSSNVIIGEMSNMVVRSXGXH

SEQ ID NO: 71929 - protein, 27 aa, Artificial Sequence
  Cyclic GFR-binding peptide
VPTEEEPLPMVYYRIKPHQGQHEQLSN

SEQ ID NO: 71930 - protein, 25 aa, Artificial Sequence
  Cyclic GFR-binding peptide
RPVQMRKIDENEKVVKKATVDMVVE

SEQ ID NO: 71931 - protein, 29 aa, Artificial Sequence
  Cyclic GFR-binding peptide
VPTELRSVKMAKVDEYDKVVKEVQVEMVV

SEQ ID NO: 71932 - protein, 31 aa, Artificial Sequence
  Cyclic GFR-binding peptide
  MOD_RES (1)..(1): Xaa is C or S
XAPTKLRSVKVAKVDDSSNVIKEVQVNMVVR

SEQ ID NO: 71933 - protein, 33 aa, Artificial Sequence
  Cyclic GFR-binding peptide
  MOD_RES (1)..(33): Xaa is C or S
XAPTKLSNITVQIMDDSSNVIIGEMSNMVVRSX

SEQ ID NO: 71934 - protein, 35 aa, Artificial Sequence
  Cyclic GFR-binding peptide
  MOD_RES (7)..(7): Xaa is C or S
HVTKPTXAPTKLSNITVQIMDDSSNVIIGEMSNMV

SEQ ID NO: 71935 - protein, 32 aa, Artificial Sequence
  Cyclic GFR-binding peptide
  MOD_RES (30)..(32): Xaa is C or S
TKLRSVKVAKVDDSSNVIKEVQVNMVVRSXGX

SEQ ID NO: 71936 - protein, 31 aa, Artificial Sequence
  Cyclic GFR-binding peptide
  MOD_RES (1)..(2): Xaa is C or S
XXAPTKLSNITVQIMDDSSNVIIGEMSNMVV

SEQ ID NO: 71937 - protein, 36 aa, Artificial Sequence
  Cyclic GFR-binding peptide
  MOD_RES (4)..(5): Xaa is C or S
PKAXXVPTELRSVKMAKVDEYDKVVKEVQVEMVVEG

SEQ ID NO: 71938 - protein, 31 aa, Artificial Sequence
  Cyclic GFR-binding peptide
  MOD_RES (29)..(31): Xaa is C or S
QDLRSVKIAKVVGRTPKVKEVQVMVVKSXKX

SEQ ID NO: 71939 - protein, 33 aa, Artificial Sequence
  Cyclic GFR-binding peptide
  MOD_RES (31)..(33): Xaa is C or S
PTQLRPVQVRKIDDSSNVIKKATVNMVVRAXGX

SEQ ID NO: 71940 - protein, 29 aa, Artificial Sequence
  Cyclic GFR-binding peptide
  MOD_RES (1)..(1): Xaa is C or S
XVPQALRPVQIRKIVGRKPKVKKATVMIV

SEQ ID NO: 71941 - protein, 34 aa, Artificial Sequence; identical to SEQ ID NO: 23360
  Cyclic GFR-binding peptide
  MOD_RES (33)..(33): Xaa is C or S

SEQ ID NO: 71942 - protein, 33 aa, Artificial Sequence
  Cyclic GFR-binding peptide
RPTQVQLEPLPVVYYEIVRKKPIFEQLSNTLED

SEQ ID NO: 71943 - protein, 33 aa, Artificial Sequence
  Cyclic GFR-binding peptide
  MOD_RES (31)..(33): Xaa is C or S
VPQALRPVQIRKIVGRKPKVKKATVMIVRSXKX

SEQ ID NO: 71944 - protein, 40 aa, Artificial Sequence
  Cyclic GFR-binding peptide
  MOD_RES (4)..(38)..(40): Xaa is C or S
GLEXVPTEEEPLTMLYYRIKPHQGQHEQLSNFLQHNKXEX

SEQ ID NO: 71945 - protein, 29 aa, Artificial Sequence
  Cyclic GFR-binding peptide
EEPLPMVYYRIKPHQGQHEQLSNFLQHNK

SEQ ID NO: 71946 - protein, 35 aa, Artificial Sequence; identical to SEQ ID NO: 16804
  Cyclic GFR-binding peptide
  MOD_RES (32)..(34): Xaa is C or S

SEQ ID NO: 71947 - protein, 35 aa, Artificial Sequence
  Cyclic GFR-binding peptide
  MOD_RES (1)..(2)..(33)..(35): Xaa is C or S
XXVPQALRSVKIAKVVGRKPKVKEVQVMIVRSXKX

SEQ ID NO: 71948 - protein, 34 aa, Artificial Sequence; identical to SEQ ID NO: 16806
  Cyclic GFR-binding peptide
  MOD_RES (6)..(7): Xaa is C or S

SEQ ID NO: 71949 - protein, 38 aa, Artificial Sequence; identical to SEQ ID NO: 23367
  Cyclic GFR-binding peptide
  MOD_RES (37)..(37): Xaa is C or S

SEQ ID NO: 71950 - protein, 29 aa, Artificial Sequence
  Cyclic GFR-binding peptide
  MOD_RES (2)..(3): Xaa is C or S
AXXVPTELRPVQMRKIDEYDKVVKKATVE

SEQ ID NO: 71951 - protein, 22 aa, Artificial Sequence
  Cyclic GFR-binding peptide
SNITIQIMVGRTPKVIGEMSMV

SEQ ID NO: 71952 - protein, 21 aa, Artificial Sequence
  Cyclic GFR-binding peptide
LRPVQIRKIVGRKPKVKKATV

SEQ ID NO: 71953 - protein, 37 aa, Artificial Sequence; identical to SEQ ID NO: 23373
  Cyclic GFR-binding peptide
  MOD_RES (3)..(3): Xaa is C or S

SEQ ID NO: 71954 - protein, 29 aa, Artificial Sequence
  Cyclic GFR-binding peptide
TKLRSVKVAKVDDSSNVIKEVQVNMVVRS

SEQ ID NO: 71955 - protein, 27 aa, Artificial Sequence
  Cyclic GFR-binding peptide
PTQLEPLPVVYYDDSSNVIEQLSNNMV

SEQ ID NO: 71956 - protein, 34 aa, Artificial Sequence
  Cyclic GFR-binding peptide
  MOD_RES (2)..(3): Xaa is C or S
AXXVPTELRPVQMRKIDEYDKVVKKATVEMVVEG

SEQ ID NO: 71957 - protein, 25 aa, Artificial Sequence
  Cyclic GFR-binding peptide
LEPLTVLYYEIVRKKPIFEQLSNTL

SEQ ID NO: 71958 - protein, 37 aa, Artificial Sequence
  Cyclic GFR-binding peptide
  MOD_RES (2)..(36): Xaa is C or S
EXVPTEEEPLTMLYYRIKPHQGQHEQLSNFLQHNKXE

SEQ ID NO: 71959 - protein, 25 aa, Artificial Sequence
  Cyclic GFR-binding peptide
VPTELEPLPMVYYDENEKVVEQLSN

SEQ ID NO: 71960 - protein, 31 aa, Artificial Sequence
  Cyclic GFR-binding peptide
  MOD_RES (3)..(4): Xaa is C or S
KAXXVPTELRSVKMAKVDEYDKVVKEVQVEM

SEQ ID NO: 71961 - protein, 35 aa, Artificial Sequence
  Cyclic GFR-binding peptide
  MOD_RES (32)..(34): Xaa is C or S
TEEEPLPMVYYRIKPHQGQHEQLSNFLQHNKXEXR

SEQ ID NO: 71962 - protein, 41 aa, Artificial Sequence
  Cyclic GFR-binding peptide
  MOD_RES (3)..(40): Xaa is C or S
VQXRPTQVQLEPLTVLYYEIVRKKPIFEQLSNTLEDHLAXK

SEQ ID NO: 71963 - protein, 31 aa, Artificial Sequence; identical to SEQ ID NO: 16832
  Cyclic GFR-binding peptide
  MOD_RES (29)..(31): Xaa is C or S

SEQ ID NO: 71964 - protein, 32 aa, Artificial Sequence; identical to SEQ ID NO: 23388
  Cyclic GFR-binding peptide

SEQ ID NO: 71965 - protein, 38 aa, Artificial Sequence
  Cyclic GFR-binding peptide
  MOD_RES (6)..(7)..(38): Xaa is C or S
ASASPXXVPQDLRPVQIRKIVGRTPKVKKATVMVVKSX

SEQ ID NO: 71966 - protein, 35 aa, Artificial Sequence
  Cyclic GFR-binding peptide
  MOD_RES (6)..(7): Xaa is C or S
TVPKPXXAPTQLRSVKVAKVDDSSNVIKEVQVNMV

SEQ ID NO: 71967 - protein, 28 aa, Artificial Sequence
  Cyclic GFR-binding peptide
  MOD_RES (3)..(3): Xaa is C or S
PTXAPTKLRSVKVAKVDDSSNVIKEVQV

SEQ ID NO: 71968 - protein, 31 aa, Artificial Sequence
  Cyclic GFR-binding peptide
  MOD_RES (31)..(31): Xaa is C or S
EEEPLPMVYYRIKPHQGQHEQLSNFLQHNKX

SEQ ID NO: 71969 - protein, 24 aa, Artificial Sequence
  Cyclic GFR-binding peptide
LRPVQIRKIIGKTPKIKKATVMIV

SEQ ID NO: 71970 - protein, 40 aa, Artificial Sequence
  Cyclic GFR-binding peptide
  MOD_RES (5)..(37)..(39): Xaa is C or S
TKPTXAPTKLRSVKVAKVDDSSNVIKEVQVNMVVRSXGXH

SEQ ID NO: 71971 - protein, 30 aa, Artificial Sequence
  Cyclic GFR-binding peptide
  MOD_RES (28)..(30): Xaa is C or S
LRPVQVRKIDDSSNVIKKATVNMVVRAXGX

SEQ ID NO: 71972 - protein, 44 aa, Artificial Sequence
  Cyclic GFR-binding peptide
  MOD_RES (5)..(42)..(44): Xaa is C or S
SSVKXQPSRVHHEPLTVLYYEYVRKKPKLEQLSNRLEEHLEXAX

SEQ ID NO: 71973 - protein, 24 aa, Artificial Sequence
  Cyclic GFR-binding peptide
PTKLRSVKVAKVDDSSNVIKEVQV

SEQ ID NO: 71974 - protein, 31 aa, Artificial Sequence; identical to SEQ ID NO: 23407
  Cyclic GFR-binding peptide

SEQ ID NO: 71975 - protein, 32 aa, Artificial Sequence; identical to SEQ ID NO: 16859
  Cyclic GFR-binding peptide
  MOD_RES (4)..(5): Xaa is C or S

SEQ ID NO: 71976 - protein, 40 aa, Artificial Sequence
  Cyclic GFR-binding peptide
  MOD_RES (6)..(7)..(39): Xaa is C or S
KIPKAXXVPTELRSVKMAKVDENEKVVKEVQVDMVVEGXG

SEQ ID NO: 71977 - protein, 31 aa, Artificial Sequence; identical to SEQ ID NO: 16862
  Cyclic GFR-binding peptide
  MOD_RES (2)..(3): Xaa is C or S

SEQ ID NO: 71978 - protein, 28 aa, Artificial Sequence
  Cyclic GFR-binding peptide
  MOD_RES (1)..(1): Xaa is C or S
XVPQDLRPVQIRKIVGRTPKVKKATVMV

SEQ ID NO: 71979 - protein, 31 aa, Artificial Sequence
  Cyclic GFR-binding peptide
  MOD_RES (3)..(4): Xaa is C or S
KPXXAPTKLRSVKVAKVDDSSNVIKEVQVNM

SEQ ID NO: 71980 - protein, 37 aa, Artificial Sequence
  Cyclic GFR-binding peptide
  MOD_RES (2)..(34)..(36): Xaa is C or S
TXAPTKLRSVKVAKVDDSSNVIKEVQVNMVVRSXGXH

SEQ ID NO: 71981 - protein, 31 aa, Artificial Sequence
  Cyclic GFR-binding peptide
  MOD_RES (1)..(2): Xaa is C or S
XXAPTQLRSVKVAKVDDSSNVIKEVQVNMVV

SEQ ID NO: 71982 - protein, 31 aa, Artificial Sequence
  Cyclic GFR-binding peptide
  MOD_RES (3)..(4): Xaa is C or S
SPXXVSQDLSNITIQIMIGKTPKIIGEMSMI

SEQ ID NO: 71983 - protein, 35 aa, Artificial Sequence
  Cyclic GFR-binding peptide
  MOD_RES (1)..(32)..(34): Xaa is C or S
XVSQDLSNITIQIMIGKTPKIIGEMSMIVKSXKXS

SEQ ID NO: 71984 - protein, 30 aa, Artificial Sequence
  Cyclic GFR-binding peptide
  MOD_RES (4)..(5): Xaa is C or S
PKPXXAPTKLRPVQVRKIDDSSNVIKKATV

SEQ ID NO: 71985 - protein, 26 aa, Artificial Sequence
  Cyclic GFR-binding peptide
  MOD_RES (26)..(26): Xaa is C or S
RPVQIRKIIGKTPKIKKATVMIVKSX

SEQ ID NO: 71986 - protein, 30 aa, Artificial Sequence; identical to SEQ ID NO: 16868
  Cyclic GFR-binding peptide
  MOD_RES (1)..(1): Xaa is C or S

SEQ ID NO: 71987 - protein, 33 aa, Artificial Sequence
  Cyclic GFR-binding peptide
  MOD_RES (2)..(2): Xaa is C or S
QXRPTQVQLEPLTVLYYEIVRKKPIFEQLSNTL

SEQ ID NO: 71988 - protein, 41 aa, Artificial Sequence; identical to SEQ ID NO: 23418
  Cyclic GFR-binding peptide
  MOD_RES (5)..(5): Xaa is C or S

SEQ ID NO: 71989 - protein, 23 aa, Artificial Sequence
  Cyclic GFR-binding peptide
QLEPLTVLYYDDSSNVIEQLSNN

SEQ ID NO: 71990 - protein, 35 aa, Artificial Sequence; identical to SEQ ID NO: 23420
  Cyclic GFR-binding peptide
  MOD_RES (34)..(34): Xaa is C or S

SEQ ID NO: 71991 - protein, 37 aa, Artificial Sequence
  Cyclic GFR-binding peptide
  MOD_RES (4)..(5)..(36): Xaa is C or S
ASPXXVSQDLSNITIQIMIGKTPKIIGEMSMIVKSXK

SEQ ID NO: 71992 - protein, 32 aa, Artificial Sequence
  Cyclic GFR-binding peptide
  MOD_RES (1)..(1): Xaa is C or S
XAPTQLRPVQVRKIDDSSNVIKKATVNMVVRA

SEQ ID NO: 71993 - protein, 40 aa, Artificial Sequence
  Cyclic GFR-binding peptide
  MOD_RES (1)..(38)..(40): Xaa is C or S
XQPSRVHHEPLPVVYYEYVRKKPKLEQLSNRLEEHLEXAX

SEQ ID NO: 71994 - protein, 28 aa, Artificial Sequence
  Cyclic GFR-binding peptide
EEPLTMLYYRIKPHQGQHEQLSNFLQHN

SEQ ID NO: 71995 - protein, 37 aa, Artificial Sequence
  Cyclic GFR-binding peptide
  MOD_RES (1)..(1): Xaa is C or S
XQPSRVHHEPLPVVYYEYVRKKPKLEQLSNRLEEHLE

SEQ ID NO: 71996 - protein, 27 aa, Artificial Sequence
  Cyclic GFR-binding peptide
TEERSVKMAKVRIKPHQGQHKEVQVFL

SEQ ID NO: 71997 - protein, 22 aa, Artificial Sequence
  Cyclic GFR-binding peptide
ELSNITMQIMDENEKVVIGEMS

SEQ ID NO: 71998 - protein, 31 aa, Artificial Sequence
  Cyclic GFR-binding peptide
APTQLSNITVQIMDDSSNVIIGEMSNMVVRA

SEQ ID NO: 71999 - protein, 32 aa, Artificial Sequence
  Cyclic GFR-binding peptide
  MOD_RES (3)..(4): Xaa is C or S
KAXXVPTELRPVQMRKIDEYDKVVKKATVEMV

SEQ ID NO: 72000 - protein, 42 aa, Artificial Sequence
  Cyclic GFR-binding peptide
  MOD_RES (5)..(39)..(41): Xaa is C or S
EGLEXVPTEEEPLPMVYYRIKPHQGQHEQLSNFLQHNKXEXR

SEQ ID NO: 72001 - protein, 29 aa, Artificial Sequence
  Cyclic GFR-binding peptide
SRVHHEPLPVVYYEYVRKKPKLEQLSNRL

SEQ ID NO: 72002 - protein, 30 aa, Artificial Sequence
  Cyclic GFR-binding peptide
  MOD_RES (2)..(3): Xaa is C or S
PXXVPQALRPVQIRKIVGRKPKVKKATVMI

SEQ ID NO: 72003 - protein, 28 aa, Artificial Sequence
  Cyclic GFR-binding peptide
QDLRSVKIAKVIGKTPKIKEVQVMIVKS

SEQ ID NO: 72004 - protein, 33 aa, Artificial Sequence; identical to SEQ ID NO: 16879
  Cyclic GFR-binding peptide
  MOD_RES (6)..(7): Xaa is C or S

SEQ ID NO: 72005 - protein, 30 aa, Artificial Sequence; identical to SEQ ID NO: 16883
  Cyclic GFR-binding peptide
  MOD_RES (3)..(4): Xaa is C or S

SEQ ID NO: 72006 - protein, 35 aa, Artificial Sequence; identical to SEQ ID NO: 16889
  Cyclic GFR-binding peptide
  MOD_RES (1)..(2)..(33)..(35): Xaa is C or S

SEQ ID NO: 72007 - protein, 37 aa, Artificial Sequence; identical to SEQ ID NO: 23436
  Cyclic GFR-binding peptide
  MOD_RES (5)..(5): Xaa is C or S

SEQ ID NO: 72008 - protein, 37 aa, Artificial Sequence; identical to SEQ ID NO: 23437
  Cyclic GFR-binding peptide
  MOD_RES (1)..(1): Xaa is C or S

SEQ ID NO: 72009 - protein, 38 aa, Artificial Sequence; identical to SEQ ID NO: 16890
  Cyclic GFR-binding peptide
  MOD_RES (2)..(3)..(35)..(37): Xaa is C or S

SEQ ID NO: 72010 - protein, 29 aa, Artificial Sequence
  Cyclic GFR-binding peptide
  MOD_RES (27)..(29): Xaa is C or S
SNITVQIMDDSSNVIIGEMSNMVVRSXGX

SEQ ID NO: 72011 - protein, 40 aa, Artificial Sequence; identical to SEQ ID NO: 23438
  Cyclic GFR-binding peptide
  MOD_RES (3)..(40): Xaa is C or S

SEQ ID NO: 72012 - protein, 35 aa, Artificial Sequence
  Cyclic GFR-binding peptide
  MOD_RES (6)..(7): Xaa is C or S
ASASPXXVPQDLSNITIQIMVGRTPKVIGEMSMVV

SEQ ID NO: 72013 - protein, 29 aa, Artificial Sequence
  Cyclic GFR-binding peptide
VQLEPLPVVYYEIVRKKPIFEQLSNTLED

SEQ ID NO: 72014 - protein, 28 aa, Artificial Sequence
  Cyclic GFR-binding peptide
QDLSNITIQIMIGKTPKIIGEMSMIVKS

SEQ ID NO: 72015 - protein, 26 aa, Artificial Sequence
  Cyclic GFR-binding peptide
  MOD_RES (1)..(1): Xaa is C or S
XVPQDLSNITIQIMVGRTPKVIGEMS

SEQ ID NO: 72016 - protein, 31 aa, Artificial Sequence
  Cyclic GFR-binding peptide
  MOD_RES (29)..(31): Xaa is C or S
KLSNITVQIMDDSSNVIIGEMSNMVVRSXGX

SEQ ID NO: 72017 - protein, 26 aa, Artificial Sequence
  Cyclic GFR-binding peptide
RPVQVRKIDDSSNVIKKATVNMVVRA

SEQ ID NO: 72018 - protein, 40 aa, Artificial Sequence
  Cyclic GFR-binding peptide
  MOD_RES (6)..(7)..(39): Xaa is C or S
YVPKPXXAPTKLSNITVQIMDDSSNVIIGEMSNMVVRSXG

SEQ ID NO: 72019 - protein, 29 aa, Artificial Sequence
  Cyclic GFR-binding peptide
  MOD_RES (28)..(28): Xaa is C or S
LEPLTMLYYDENEKVVEQLSNDMVVEGXG

SEQ ID NO: 72020 - protein, 31 aa, Artificial Sequence
  Cyclic GFR-binding peptide
  MOD_RES (5)..(5): Xaa is C or S
TKPTXAPTKLRSVKVAKVDDSSNVIKEVQVN

SEQ ID NO: 72021 - protein, 31 aa, Artificial Sequence; identical to SEQ ID NO: 23447
  Cyclic GFR-binding peptide

SEQ ID NO: 72022 - protein, 35 aa, Artificial Sequence; identical to SEQ ID NO: 23448
  Cyclic GFR-binding peptide

SEQ ID NO: 72023 - protein, 34 aa, Artificial Sequence
  Cyclic GFR-binding peptide
  MOD_RES (3)..(4): Xaa is C or S
APXXVPQALSNITIQIMVGRKPKVIGEMSMIVRS

SEQ ID NO: 72024 - protein, 26 aa, Artificial Sequence
  Cyclic GFR-binding peptide
RPVQVRKIDDSSNVIKKATVNMVVRS

SEQ ID NO: 72025 - protein, 32 aa, Artificial Sequence
  Cyclic GFR-binding peptide
  MOD_RES (1)..(2): Xaa is C or S
XXAPTQLRPVQVRKIDDSSNVIKKATVNMVVR

SEQ ID NO: 72026 - protein, 33 aa, Artificial Sequence
  Cyclic GFR-binding peptide
  MOD_RES (30)..(32): Xaa is C or S
PQALRSVKIAKVVGRKPKVKEVQVMIVRSXKXS

SEQ ID NO: 72027 - protein, 34 aa, Artificial Sequence
  Cyclic GFR-binding peptide
  MOD_RES (1)..(2)..(33): Xaa is C or S
XXVPQALRPVQIRKIVGRKPKVKKATVMIVRSXK

SEQ ID NO: 72028 - protein, 24 aa, Artificial Sequence
  Cyclic GFR-binding peptide
EPLTMLYYDENEKVVEQLSNDMVV

SEQ ID NO: 72029 - protein, 31 aa, Artificial Sequence; identical to SEQ ID NO: 16914
  Cyclic GFR-binding peptide
  MOD_RES (1)..(1): Xaa is C or S

SEQ ID NO: 72030 - protein, 25 aa, Artificial Sequence
  Cyclic GFR-binding peptide
RSVKMAKVDEYDKVVKEVQVEMVVE

SEQ ID NO: 72031 - protein, 27 aa, Artificial Sequence
  Cyclic GFR-binding peptide
QLRSVKVAKVEIVRKKPIFKEVQVTLE

SEQ ID NO: 72032 - protein, 36 aa, Artificial Sequence; identical to SEQ ID NO: 16924
  Cyclic GFR-binding peptide
  MOD_RES (4)..(5): Xaa is C or S

SEQ ID NO: 72033 - protein, 38 aa, Artificial Sequence; identical to SEQ ID NO: 23463
  Cyclic GFR-binding peptide
  MOD_RES (5)..(5): Xaa is C or S

SEQ ID NO: 72034 - protein, 31 aa, Artificial Sequence; identical to SEQ ID NO: 16927
  Cyclic GFR-binding peptide
  MOD_RES (31)..(31): Xaa is C or S

SEQ ID NO: 72035 - protein, 39 aa, Artificial Sequence
  Cyclic GFR-binding peptide
  MOD_RES (5)..(39): Xaa is C or S
EGLEXVPTEEEPLTMLYYRIKPHQGQHEQLSNFLQHNKX

SEQ ID NO: 72036 - protein, 34 aa, Artificial Sequence; identical to SEQ ID NO: 16932
  Cyclic GFR-binding peptide
  MOD_RES (32)..(34): Xaa is C or S

SEQ ID NO: 72037 - protein, 35 aa, Artificial Sequence; identical to SEQ ID NO: 23468
  Cyclic GFR-binding peptide

SEQ ID NO: 72038 - protein, 33 aa, Artificial Sequence
  Cyclic GFR-binding peptide
  MOD_RES (3)..(3): Xaa is C or S
VKXQPSRVHHEPLPVVYYEYVRKKPKLEQLSNR

SEQ ID NO: 72039 - protein, 30 aa, Artificial Sequence
  Cyclic GFR-binding peptide
  MOD_RES (2)..(2): Xaa is C or S
TXAPTKLRPVQVRKIDDSSNVIKKATVNMV

SEQ ID NO: 72040 - protein, 35 aa, Artificial Sequence; identical to SEQ ID NO: 16935
  Cyclic GFR-binding peptide
  MOD_RES (6)..(7): Xaa is C or S

SEQ ID NO: 72041 - protein, 31 aa, Artificial Sequence; identical to SEQ ID NO: 23471
  Cyclic GFR-binding peptide
  MOD_RES (30)..(30): Xaa is C or S

SEQ ID NO: 72042 - protein, 41 aa, Artificial Sequence
  Cyclic GFR-binding peptide
  MOD_RES (2)..(39)..(41): Xaa is C or S
KXQPSRVHHEPLTVLYYEYVRKKPKLEQLSNRLEEHLEXAX

SEQ ID NO: 72043 - protein, 40 aa, Artificial Sequence
  Cyclic GFR-binding peptide
  MOD_RES (6)..(38)..(40): Xaa is C or S
VTKPTXAPTKLRSVKVAKVDDSSNVIKEVQVNMVVRSXGX

SEQ ID NO: 72044 - protein, 29 aa, Artificial Sequence
  Cyclic GFR-binding peptide
VPQALEPLTILYYVGRKPKVEQLSNMIVR

SEQ ID NO: 72045 - protein, 28 aa, Artificial Sequence
  Cyclic GFR-binding peptide
ELEPLPMVYYDENEKVVEQLSNDMVVEG

SEQ ID NO: 72046 - protein, 38 aa, Artificial Sequence; identical to SEQ ID NO: 23475
  Cyclic GFR-binding peptide
  MOD_RES (4)..(38): Xaa is C or S

SEQ ID NO: 72047 - protein, 24 aa, Artificial Sequence
  Cyclic GFR-binding peptide
LSNITVQIMEIVRKKPIFIGEMST

SEQ ID NO: 72048 - protein, 31 aa, Artificial Sequence
  Cyclic GFR-binding peptide
  MOD_RES (30)..(30): Xaa is C or S
TELSNITMQIMDENEKVVIGEMSDMVVEGXG

SEQ ID NO: 72049 - protein, 25 aa, Artificial Sequence
  Cyclic GFR-binding peptide
QALSNITIQIMVGRKPKVIGEMSMI

SEQ ID NO: 72050 - protein, 33 aa, Artificial Sequence; identical to SEQ ID NO: 16956
  Cyclic GFR-binding peptide
  MOD_RES (1)..(33): Xaa is C or S

SEQ ID NO: 72051 - protein, 37 aa, Artificial Sequence; identical to SEQ ID NO: 16959
  Cyclic GFR-binding peptide
  MOD_RES (5)..(6): Xaa is C or S

SEQ ID NO: 72052 - protein, 32 aa, Artificial Sequence
  Cyclic GFR-binding peptide
  MOD_RES (1)..(2): Xaa is C or S
XXVPQDLRSVKIAKVVGRTPKVKEVQVMVVKS

SEQ ID NO: 72053 - protein, 30 aa, Artificial Sequence; identical to SEQ ID NO: 23494
  Cyclic GFR-binding peptide

SEQ ID NO: 72054 - protein, 35 aa, Artificial Sequence
  Cyclic GFR-binding peptide
  MOD_RES (32)..(34): Xaa is C or S
VPTELRPVQMRKIDEYDKVVKKATVEMVVEGXGXR

SEQ ID NO: 72055 - protein, 37 aa, Artificial Sequence; identical to SEQ ID NO: 16966
  Cyclic GFR-binding peptide
  MOD_RES (3)..(4)..(35)..(37): Xaa is C or S

SEQ ID NO: 72056 - protein, 35 aa, Artificial Sequence; identical to SEQ ID NO: 16967
  Cyclic GFR-binding peptide
  MOD_RES (3)..(4)..(35): Xaa is C or S

SEQ ID NO: 72057 - protein, 35 aa, Artificial Sequence
  Cyclic GFR-binding peptide
  MOD_RES (7)..(7): Xaa is C or S
NDEGLEXVPTEEEPLPMVYYRIKPHQGQHEQLSNF

SEQ ID NO: 72058 - protein, 36 aa, Artificial Sequence
  Cyclic GFR-binding peptide
  MOD_RES (6)..(7): Xaa is C or S
ASAAPXXVPQALRSVKIAKVVGRKPKVKEVQVMIVR

SEQ ID NO: 72059 - protein, 33 aa, Artificial Sequence; identical to SEQ ID NO: 16968
  Cyclic GFR-binding peptide
  MOD_RES (5)..(6): Xaa is C or S

SEQ ID NO: 72060 - protein, 34 aa, Artificial Sequence; identical to SEQ ID NO: 23499
  Cyclic GFR-binding peptide
  MOD_RES (3)..(3): Xaa is C or S

SEQ ID NO: 72061 - protein, 30 aa, Artificial Sequence; identical to SEQ ID NO: 16971
  Cyclic GFR-binding peptide

SEQ ID NO: 72062 - protein, 35 aa, Artificial Sequence
  Cyclic GFR-binding peptide
  MOD_RES (2)..(34): Xaa is C or S
TXAPTKLRPVQVRKIDDSSNVIKKATVNMVVRSXG

SEQ ID NO: 72063 - protein, 34 aa, Artificial Sequence; identical to SEQ ID NO: 16980
  Cyclic GFR-binding peptide
  MOD_RES (1)..(2)..(34): Xaa is C or S

SEQ ID NO: 72064 - protein, 31 aa, Artificial Sequence; identical to SEQ ID NO: 16984
  Cyclic GFR-binding peptide
  MOD_RES (1)..(2): Xaa is C or S

SEQ ID NO: 72065 - protein, 28 aa, Artificial Sequence
  Cyclic GFR-binding peptide
  MOD_RES (2)..(3): Xaa is C or S
AXXVPTELEPLTMLYYDEYDKVVEQLSN

SEQ ID NO: 72066 - protein, 35 aa, Artificial Sequence
  Cyclic GFR-binding peptide
  MOD_RES (5)..(6): Xaa is C or S
SAAPXXVPQALRPVQIRKIVGRKPKVKKATVMIVR

SEQ ID NO: 72067 - protein, 27 aa, Artificial Sequence
  Cyclic GFR-binding peptide
TELRSVKMAKVDENEKVVKEVQVDMVV

SEQ ID NO: 72068 - protein, 38 aa, Artificial Sequence
  Cyclic GFR-binding peptide
  MOD_RES (6)..(6): Xaa is C or S
DEGLEXVPTEEEPLPMVYYRIKPHQGQHEQLSNFLQHN

SEQ ID NO: 72069 - protein, 39 aa, Artificial Sequence
  Cyclic GFR-binding peptide
  MOD_RES (2)..(36)..(38): Xaa is C or S
EXVPTEEEPLTMLYYRIKPHQGQHEQLSNFLQHNKXEXR

SEQ ID NO: 72070 - protein, 22 aa, Artificial Sequence
  Cyclic GFR-binding peptide
QLRPVQVRKIDDSSNVIKKATV

SEQ ID NO: 72071 - protein, 32 aa, Artificial Sequence
  Cyclic GFR-binding peptide
  MOD_RES (5)..(6): Xaa is C or S
VPKPXXAPTKLRPVQVRKIDDSSNVIKKATVN

SEQ ID NO: 72072 - protein, 23 aa, Artificial Sequence
  Cyclic GFR-binding peptide
EEPLPMVYYRIKPHQGQHEQLSN

SEQ ID NO: 72073 - protein, 31 aa, Artificial Sequence
  Cyclic GFR-binding peptide
  MOD_RES (29)..(31): Xaa is C or S
QDLSNITIQIMIGKTPKIIGEMSMIVKSXKX

SEQ ID NO: 72074 - protein, 37 aa, Artificial Sequence; identical to SEQ ID NO: 23525
  Cyclic GFR-binding peptide
  MOD_RES (7)..(7): Xaa is C or S

SEQ ID NO: 72075 - protein, 33 aa, Artificial Sequence
  Cyclic GFR-binding peptide
  MOD_RES (32)..(32): Xaa is C or S
QLEPLTVLYYEIVRKKPIFEQLSNTLEDHLAXK

SEQ ID NO: 72076 - protein, 29 aa, Artificial Sequence
  Cyclic GFR-binding peptide
TELRSVKMAKVDENEKVVKEVQVDMVVEG

SEQ ID NO: 72077 - protein, 34 aa, Artificial Sequence; identical to SEQ ID NO: 17003
  Cyclic GFR-binding peptide
  MOD_RES (1)..(2)..(34): Xaa is C or S

SEQ ID NO: 72078 - protein, 24 aa, Artificial Sequence
  Cyclic GFR-binding peptide
ERSVKMAKVRIKPHQGQHKEVQVF

SEQ ID NO: 72079 - protein, 36 aa, Artificial Sequence
  Cyclic GFR-binding peptide
  MOD_RES (4)..(4): Xaa is C or S
GLEXVPTEEEPLTMLYYRIKPHQGQHEQLSNFLQHN

SEQ ID NO: 72080 - protein, 35 aa, Artificial Sequence
  Cyclic GFR-binding peptide
  MOD_RES (2)..(3)..(34): Xaa is C or S
PXXVSQDLRSVKIAKVIGKTPKIKEVQVMIVKSXK

SEQ ID NO: 72081 - protein, 28 aa, Artificial Sequence
  Cyclic GFR-binding peptide
  MOD_RES (2)..(3): Xaa is C or S
AXXVPTELEPLTMLYYDENEKVVEQLSN

SEQ ID NO: 72082 - protein, 24 aa, Artificial Sequence
  Cyclic GFR-binding peptide
ALRPVQIRKIVGRKPKVKKATVMI

SEQ ID NO: 72083 - protein, 28 aa, Artificial Sequence
  Cyclic GFR-binding peptide
  MOD_RES (27)..(27): Xaa is C or S
LRSVKIAKVIGKTPKIKEVQVMIVKSXK

SEQ ID NO: 72084 - protein, 25 aa, Artificial Sequence
  Cyclic GFR-binding peptide
PTQLRPVQVRKIDDSSNVIKKATVN

SEQ ID NO: 72085 - protein, 42 aa, Artificial Sequence; identical to SEQ ID NO: 23541
  Cyclic GFR-binding peptide
  MOD_RES (3)..(40)..(42): Xaa is C or S

SEQ ID NO: 72086 - protein, 33 aa, Artificial Sequence
  Cyclic GFR-binding peptide
  MOD_RES (5)..(6): Xaa is C or S
SASPXXVPQDLRSVKIAKVVGRTPKVKEVQVMV

SEQ ID NO: 72087 - protein, 39 aa, Artificial Sequence; identical to SEQ ID NO: 17016
  Cyclic GFR-binding peptide
  MOD_RES (5)..(6)..(38): Xaa is C or S

SEQ ID NO: 72088 - protein, 35 aa, Artificial Sequence; identical to SEQ ID NO: 17018
  Cyclic GFR-binding peptide
  MOD_RES (4)..(5): Xaa is C or S

SEQ ID NO: 72089 - protein, 31 aa, Artificial Sequence
  Cyclic GFR-binding peptide
  MOD_RES (1)..(2): Xaa is C or S
XXVSQDLRSVKIAKVIGKTPKIKEVQVMIVK

SEQ ID NO: 72090 - protein, 37 aa, Artificial Sequence
  Cyclic GFR-binding peptide
  MOD_RES (6)..(7): Xaa is C or S
YVPKPXXAPTKLRSVKVAKVDDSSNVIKEVQVNMVVR

SEQ ID NO: 72091 - protein, 35 aa, Artificial Sequence; identical to SEQ ID NO: 17020
  Cyclic GFR-binding peptide
  MOD_RES (2)..(3)..(35): Xaa is C or S

SEQ ID NO: 72092 - protein, 36 aa, Artificial Sequence; identical to SEQ ID NO: 17021
  Cyclic GFR-binding peptide
  MOD_RES (2)..(3)..(35): Xaa is C or S

SEQ ID NO: 72093 - protein, 33 aa, Artificial Sequence
  Cyclic GFR-binding peptide
  MOD_RES (1)..(2)..(33): Xaa is C or S
XXVSQDLSNITIQIMIGKTPKIIGEMSMIVKSX

SEQ ID NO: 72094 - protein, 30 aa, Artificial Sequence; identical to SEQ ID NO: 17026
  Cyclic GFR-binding peptide
  MOD_RES (2)..(3): Xaa is C or S

SEQ ID NO: 72095 - protein, 28 aa, Artificial Sequence
  Cyclic GFR-binding peptide
  MOD_RES (1)..(1): Xaa is C or S
XAPTKLSNITVQIMDDSSNVIIGEMSNM

SEQ ID NO: 72096 - protein, 27 aa, Artificial Sequence
  Cyclic GFR-binding peptide
  MOD_RES (1)..(2): Xaa is C or S
XXVSQDLEPLPIVYYIGKTPKIEQLSN

SEQ ID NO: 72097 - protein, 35 aa, Artificial Sequence
  Cyclic GFR-binding peptide
  MOD_RES (32)..(34): Xaa is C or S
TEEEPLTMLYYRIKPHQGQHEQLSNFLQHNKXEXR

SEQ ID NO: 72098 - protein, 40 aa, Artificial Sequence
  Cyclic GFR-binding peptide
  MOD_RES (3)..(40): Xaa is C or S
VQXRPTQVQLEPLPVVYYEIVRKKPIFEQLSNTLEDHLAX

SEQ ID NO: 72099 - protein, 31 aa, Artificial Sequence
  Cyclic GFR-binding peptide
  MOD_RES (31)..(31): Xaa is C or S
PTELRSVKMAKVDENEKVVKEVQVDMVVEGX

SEQ ID NO: 72100 - protein, 29 aa, Artificial Sequence
  Cyclic GFR-binding peptide
TELRPVQMRKIDENEKVVKKATVDMVVEG

SEQ ID NO: 72101 - protein, 25 aa, Artificial Sequence
  Cyclic GFR-binding peptide
LEPLPMVYYDENEKVVEQLSNDMVV

SEQ ID NO: 72102 - protein, 22 aa, Artificial Sequence
  Cyclic GFR-binding peptide
QLEPLTVLYYDDSSNVIEQLSN

SEQ ID NO: 72103 - protein, 24 aa, Artificial Sequence
  Cyclic GFR-binding peptide
SNITMQIMDEYDKVVIGEMSEMVV

SEQ ID NO: 72104 - protein, 31 aa, Artificial Sequence; identical to SEQ ID NO: 17046
  Cyclic GFR-binding peptide
  MOD_RES (6)..(6): Xaa is C or S

SEQ ID NO: 72105 - protein, 29 aa, Artificial Sequence
  Cyclic GFR-binding peptide
  MOD_RES (2)..(3): Xaa is C or S
PXXAPTQLRPVQVRKIDDSSNVIKKATVN

SEQ ID NO: 72106 - protein, 41 aa, Artificial Sequence
  Cyclic GFR-binding peptide
  MOD_RES (3)..(40): Xaa is C or S
VQXRPTQVQLEPLPVVYYEIVRKKPIFEQLSNTLEDHLAXK

SEQ ID NO: 72107 - protein, 25 aa, Artificial Sequence
  Cyclic GFR-binding peptide
VQLEPLPVVYYEIVRKKPIFEQLSN

SEQ ID NO: 72108 - protein, 35 aa, Artificial Sequence; identical to SEQ ID NO: 23565
  Cyclic GFR-binding peptide
  MOD_RES (3)..(3): Xaa is C or S

SEQ ID NO: 72109 - protein, 34 aa, Artificial Sequence; identical to SEQ ID NO: 23570
  Cyclic GFR-binding peptide
  MOD_RES (32)..(34): Xaa is C or S

SEQ ID NO: 72110 - protein, 34 aa, Artificial Sequence; identical to SEQ ID NO: 17054
  Cyclic GFR-binding peptide
  MOD_RES (31)..(33): Xaa is C or S

SEQ ID NO: 72111 - protein, 31 aa, Artificial Sequence; identical to SEQ ID NO: 17058
  Cyclic GFR-binding peptide
  MOD_RES (1)..(1): Xaa is C or S

SEQ ID NO: 72112 - protein, 27 aa, Artificial Sequence
  Cyclic GFR-binding peptide
QALSNITIQIMVGRKPKVIGEMSMIVR

SEQ ID NO: 72113 - protein, 31 aa, Artificial Sequence
  Cyclic GFR-binding peptide
  MOD_RES (1)..(1): Xaa is C or S
XAPTKLSNITVQIMDDSSNVIIGEMSNMVVR

SEQ ID NO: 72114 - protein, 37 aa, Artificial Sequence; identical to SEQ ID NO: 23577
  Cyclic GFR-binding peptide
  MOD_RES (6)..(6): Xaa is C or S

SEQ ID NO: 72115 - protein, 29 aa, Artificial Sequence
  Cyclic GFR-binding peptide
  MOD_RES (3)..(4): Xaa is C or S
SPXXVPQDLRPVQIRKIVGRTPKVKKATV

SEQ ID NO: 72116 - protein, 30 aa, Artificial Sequence; identical to SEQ ID NO: 17071
  Cyclic GFR-binding peptide
  MOD_RES (4)..(4): Xaa is C or S

SEQ ID NO: 72117 - protein, 34 aa, Artificial Sequence
  Cyclic GFR-binding peptide
  MOD_RES (4)..(5): Xaa is C or S
PKAXXVPTELRSVKMAKVDEYDKVVKEVQVEMVV

SEQ ID NO: 72118 - protein, 25 aa, Artificial Sequence
  Cyclic GFR-binding peptide
SNITIQIMIGKTPKIIGEMSMIVKS

SEQ ID NO: 72119 - protein, 28 aa, Artificial Sequence
  Cyclic GFR-binding peptide
  MOD_RES (28)..(28): Xaa is C or S
LEPLTVLYYDDSSNVIEQLSNNMVVRAX

SEQ ID NO: 72120 - protein, 32 aa, Artificial Sequence
  Cyclic GFR-binding peptide
  MOD_RES (2)..(3): Xaa is C or S
PXXVPQDLSNITIQIMVGRTPKVIGEMSMVVK

SEQ ID NO: 72121 - protein, 34 aa, Artificial Sequence
  Cyclic GFR-binding peptide
  MOD_RES (4)..(5): Xaa is C or S
AAPXXVPQALRSVKIAKVVGRKPKVKEVQVMIVR

SEQ ID NO: 72122 - protein, 28 aa, Artificial Sequence
  Cyclic GFR-binding peptide
  MOD_RES (1)..(2): Xaa is C or S
XXVSQDLRSVKIAKVIGKTPKIKEVQVM

SEQ ID NO: 72123 - protein, 30 aa, Artificial Sequence; identical to SEQ ID NO: 23592
  Cyclic GFR-binding peptide

SEQ ID NO: 72124 - protein, 39 aa, Artificial Sequence; identical to SEQ ID NO: 23593
  Cyclic GFR-binding peptide
  MOD_RES (4)..(4): Xaa is C or S

SEQ ID NO: 72125 - protein, 25 aa, Artificial Sequence
  Cyclic GFR-binding peptide
QLEPLPVVYYDDSSNVIEQLSNNMV

SEQ ID NO: 72126 - protein, 35 aa, Artificial Sequence
  Cyclic GFR-binding peptide
  MOD_RES (1)..(1): Xaa is C or S
XRPTQVQLEPLTVLYYEIVRKKPIFEQLSNTLEDH

SEQ ID NO: 72127 - protein, 26 aa, Artificial Sequence
  Cyclic GFR-binding peptide
LRPVQVRKIDDSSNVIKKATVNMVVR

SEQ ID NO: 72128 - protein, 33 aa, Artificial Sequence; identical to SEQ ID NO: 17095
  Cyclic GFR-binding peptide
  MOD_RES (31)..(33): Xaa is C or S

SEQ ID NO: 72129 - protein, 33 aa, Artificial Sequence; identical to SEQ ID NO: 17096
  Cyclic GFR-binding peptide
  MOD_RES (31)..(33): Xaa is C or S

SEQ ID NO: 72130 - protein, 22 aa, Artificial Sequence
  Cyclic GFR-binding peptide
ELSNITMQIMDEYDKVVIGEMS

SEQ ID NO: 72131 - protein, 28 aa, Artificial Sequence
  Cyclic GFR-binding peptide
  MOD_RES (2)..(3): Xaa is C or S
PXXAPTQLSNITVQIMDDSSNVIIGEMS

SEQ ID NO: 72132 - protein, 31 aa, Artificial Sequence
  Cyclic GFR-binding peptide
  MOD_RES (28)..(30): Xaa is C or S
ALRSVKIAKVVGRKPKVKEVQVMIVRSXKXS

SEQ ID NO: 72133 - protein, 22 aa, Artificial Sequence
  Cyclic GFR-binding peptide
RPVQIRKIVGRKPKVKKATVMI

SEQ ID NO: 72134 - protein, 32 aa, Artificial Sequence
  Cyclic GFR-binding peptide
  MOD_RES (31)..(31): Xaa is C or S
VPQALSNITIQIMVGRKPKVIGEMSMIVRSXK

SEQ ID NO: 72135 - protein, 30 aa, Artificial Sequence
  Cyclic GFR-binding peptide
  MOD_RES (28)..(30): Xaa is C or S
LRSVKVAKVDDSSNVIKEVQVNMVVRSXGX

SEQ ID NO: 72136 - protein, 26 aa, Artificial Sequence
  Cyclic GFR-binding peptide
ERPVQMRKIRIKPHQGQHKKATVFLQ

SEQ ID NO: 72137 - protein, 33 aa, Artificial Sequence; identical to SEQ ID NO: 17112
  Cyclic GFR-binding peptide
  MOD_RES (6)..(7): Xaa is C or S

SEQ ID NO: 72138 - protein, 34 aa, Artificial Sequence; identical to SEQ ID NO: 17113
  Cyclic GFR-binding peptide
  MOD_RES (6)..(7): Xaa is C or S

SEQ ID NO: 72139 - protein, 40 aa, Artificial Sequence
  Cyclic GFR-binding peptide
  MOD_RES (1)..(38)..(40): Xaa is C or S
XQPSRVHHEPLTVLYYEYVRKKPKLEQLSNRLEEHLEXAX

SEQ ID NO: 72140 - protein, 37 aa, Artificial Sequence; identical to SEQ ID NO: 17119
  Cyclic GFR-binding peptide
  MOD_RES (6)..(7): Xaa is C or S

SEQ ID NO: 72141 - protein, 30 aa, Artificial Sequence; identical to SEQ ID NO: 23612
  Cyclic GFR-binding peptide

SEQ ID NO: 72142 - protein, 38 aa, Artificial Sequence
  Cyclic GFR-binding peptide
  MOD_RES (6)..(38): Xaa is C or S
VTKPTXAPTKLSNITVQIMDDSSNVIIGEMSNMVVRSX

SEQ ID NO: 72143 - protein, 31 aa, Artificial Sequence
  Cyclic GFR-binding peptide
  MOD_RES (4)..(5): Xaa is C or S
PKAXXVPTELRPVQMRKIDEYDKVVKKATVE

SEQ ID NO: 72144 - protein, 40 aa, Artificial Sequence
  Cyclic GFR-binding peptide
  MOD_RES (5)..(6)..(38)..(40): Xaa is C or S
IPKAXXVPTELSNITMQIMDENEKVVIGEMSDMVVEGXGX

SEQ ID NO: 72145 - protein, 36 aa, Artificial Sequence; identical to SEQ ID NO: 23622
  Cyclic GFR-binding peptide
  MOD_RES (33)..(35): Xaa is C or S

SEQ ID NO: 72146 - protein, 42 aa, Artificial Sequence; identical to SEQ ID NO: 23624
  Cyclic GFR-binding peptide
  MOD_RES (6)..(40)..(42): Xaa is C or S

SEQ ID NO: 72147 - protein, 38 aa, Artificial Sequence; identical to SEQ ID NO: 17134
  Cyclic GFR-binding peptide
  MOD_RES (5)..(6)..(38): Xaa is C or S

SEQ ID NO: 72148 - protein, 38 aa, Artificial Sequence
  Cyclic GFR-binding peptide
  MOD_RES (3)..(35)..(37): Xaa is C or S
PTXAPTKLRSVKVAKVDDSSNVIKEVQVNMVVRSXGXH

SEQ ID NO: 72149 - protein, 34 aa, Artificial Sequence; identical to SEQ ID NO: 17142
  Cyclic GFR-binding peptide
  MOD_RES (32)..(34): Xaa is C or S

SEQ ID NO: 72150 - protein, 35 aa, Artificial Sequence; identical to SEQ ID NO: 23631
  Cyclic GFR-binding peptide
  MOD_RES (3)..(3): Xaa is C or S

SEQ ID NO: 72151 - protein, 26 aa, Artificial Sequence
  Cyclic GFR-binding peptide
PTELRSVKMAKVDEYDKVVKEVQVEM

SEQ ID NO: 72152 - protein, 29 aa, Artificial Sequence
  Cyclic GFR-binding peptide
  MOD_RES (29)..(29): Xaa is C or S
QDLRPVQIRKIIGKTPKIKKATVMIVKSX

SEQ ID NO: 72153 - protein, 39 aa, Artificial Sequence
  Cyclic GFR-binding peptide
  MOD_RES (4)..(5)..(36)..(38): Xaa is C or S
AAPXXVPQALSNITIQIMVGRKPKVIGEMSMIVRSXKXS

SEQ ID NO: 72154 - protein, 36 aa, Artificial Sequence
  Cyclic GFR-binding peptide
  MOD_RES (2)..(3)..(35): Xaa is C or S
AXXVPTELRSVKMAKVDEYDKVVKEVQVEMVVEGXG

SEQ ID NO: 72155 - protein, 36 aa, Artificial Sequence; identical to SEQ ID NO: 17149
  Cyclic GFR-binding peptide
  MOD_RES (4)..(5)..(36): Xaa is C or S

SEQ ID NO: 72156 - protein, 30 aa, Artificial Sequence; identical to SEQ ID NO: 17150
  Cyclic GFR-binding peptide
  MOD_RES (1)..(1): Xaa is C or S

SEQ ID NO: 72157 - protein, 30 aa, Artificial Sequence
  Cyclic GFR-binding peptide
  MOD_RES (30)..(30): Xaa is C or S
EEPLPMVYYRIKPHQGQHEQLSNFLQHNKX

SEQ ID NO: 72158 - protein, 21 aa, Artificial Sequence
  Cyclic GFR-binding peptide
RPVQIRKIIGKTPKIKKATVM

SEQ ID NO: 72159 - protein, 23 aa, Artificial Sequence
  Cyclic GFR-binding peptide
SNITIQIMVGRKPKVIGEMSMIV

SEQ ID NO: 72160 - protein, 29 aa, Artificial Sequence
  Cyclic GFR-binding peptide
  MOD_RES (26)..(28): Xaa is C or S
RPVQIRKIIGKTPKIKKATVMIVKSXKXS

SEQ ID NO: 72161 - protein, 39 aa, Artificial Sequence
  Cyclic GFR-binding peptide
  MOD_RES (5)..(6)..(38): Xaa is C or S
VPKPXXAPTKLRPVQVRKIDDSSNVIKKATVNMVVRSXG

SEQ ID NO: 72162 - protein, 36 aa, Artificial Sequence
  Cyclic GFR-binding peptide
  MOD_RES (5)..(5): Xaa is C or S
SSVKXQPSRVHHEPLTVLYYEYVRKKPKLEQLSNRL

SEQ ID NO: 72163 - protein, 29 aa, Artificial Sequence
  Cyclic GFR-binding peptide
LEPLPVVYYEIVRKKPIFEQLSNTLEDHL

SEQ ID NO: 72164 - protein, 32 aa, Artificial Sequence; identical to SEQ ID NO: 17164
  Cyclic GFR-binding peptide
  MOD_RES (7)..(7): Xaa is C or S

SEQ ID NO: 72165 - protein, 24 aa, Artificial Sequence
  Cyclic GFR-binding peptide
DLEPLPIVYYIGKTPKIEQLSNMI

SEQ ID NO: 72166 - protein, 43 aa, Artificial Sequence
  Cyclic GFR-binding peptide
  MOD_RES (5)..(42): Xaa is C or S
RNVQXRPTQVQLEPLTVLYYEIVRKKPIFEQLSNTLEDHLAXK

SEQ ID NO: 72167 - protein, 28 aa, Artificial Sequence
  Cyclic GFR-binding peptide
  MOD_RES (2)..(3): Xaa is C or S
PXXAPTKLEPLPVVYYDDSSNVIEQLSN

SEQ ID NO: 72168 - protein, 25 aa, Artificial Sequence
  Cyclic GFR-binding peptide
SNITIQIMVGRKPKVIGEMSMIVRS

SEQ ID NO: 72169 - protein, 37 aa, Artificial Sequence
  Cyclic GFR-binding peptide
  MOD_RES (1)..(2)..(34)..(36): Xaa is C or S
XXVPTELRSVKMAKVDENEKVVKEVQVDMVVEGXGXR

SEQ ID NO: 72170 - protein, 31 aa, Artificial Sequence; identical to SEQ ID NO: 23648
  Cyclic GFR-binding peptide
  MOD_RES (29)..(31): Xaa is C or S

SEQ ID NO: 72171 - protein, 34 aa, Artificial Sequence
  Cyclic GFR-binding peptide
  MOD_RES (3)..(4): Xaa is C or S
APXXVPQALRSVKIAKVVGRKPKVKEVQVMIVRS

SEQ ID NO: 72172 - protein, 29 aa, Artificial Sequence
  Cyclic GFR-binding peptide
  MOD_RES (3)..(4): Xaa is C or S
KPXXAPTQLEPLPVVYYDDSSNVIEQLSN

SEQ ID NO: 72173 - protein, 35 aa, Artificial Sequence
  Cyclic GFR-binding peptide
  MOD_RES (6)..(7): Xaa is C or S
ASASPXXVPQDLRSVKIAKVVGRTPKVKEVQVMVV

SEQ ID NO: 72174 - protein, 27 aa, Artificial Sequence
  Cyclic GFR-binding peptide
  MOD_RES (27)..(27): Xaa is C or S
LSNITIQIMVGRKPKVIGEMSMIVRSX

SEQ ID NO: 72175 - protein, 27 aa, Artificial Sequence
  Cyclic GFR-binding peptide
RSVKMAKVRIKPHQGQHKEVQVFLQHN

SEQ ID NO: 72176 - protein, 36 aa, Artificial Sequence; identical to SEQ ID NO: 17177
  Cyclic GFR-binding peptide
  MOD_RES (2)..(34)..(36): Xaa is C or S

SEQ ID NO: 72177 - protein, 29 aa, Artificial Sequence
  Cyclic GFR-binding peptide
VSQDLSNITIQIMIGKTPKIIGEMSMIVK

SEQ ID NO: 72178 - protein, 45 aa, Artificial Sequence
  Cyclic GFR-binding peptide
  MOD_RES (5)..(42)..(44): Xaa is C or S
RNVQXRPTQVQLEPLPVVYYEIVRKKPIFEQLSNTLEDHLAXKXE

SEQ ID NO: 72179 - protein, 34 aa, Artificial Sequence
  Cyclic GFR-binding peptide
  MOD_RES (31)..(33): Xaa is C or S
VPQDLSNITIQIMVGRTPKVIGEMSMVVKSXKXS

SEQ ID NO: 72180 - protein, 27 aa, Artificial Sequence
  Cyclic GFR-binding peptide
  MOD_RES (26)..(26): Xaa is C or S
SNITIQIMVGRKPKVIGEMSMIVRSXK

SEQ ID NO: 72181 - protein, 30 aa, Artificial Sequence
  Cyclic GFR-binding peptide
  MOD_RES (4)..(5): Xaa is C or S
ASPXXVSQDLSNITIQIMIGKTPKIIGEMS

SEQ ID NO: 72182 - protein, 39 aa, Artificial Sequence
  Cyclic GFR-binding peptide
  MOD_RES (3)..(4)..(36)..(38): Xaa is C or S
KAXXVPTELRPVQMRKIDEYDKVVKKATVEMVVEGXGXR

SEQ ID NO: 72183 - protein, 25 aa, Artificial Sequence
  Cyclic GFR-binding peptide
RSVKIAKVVGRKPKVKEVQVMIVRS

SEQ ID NO: 72184 - protein, 29 aa, Artificial Sequence
  Cyclic GFR-binding peptide
  MOD_RES (3)..(4): Xaa is C or S
SPXXVSQDLRSVKIAKVIGKTPKIKEVQV

SEQ ID NO: 72185 - protein, 36 aa, Artificial Sequence
  Cyclic GFR-binding peptide
  MOD_RES (6)..(7): Xaa is C or S
YVPKPXXAPTKLRPVQVRKIDDSSNVIKKATVNMVV

SEQ ID NO: 72186 - protein, 31 aa, Artificial Sequence
  Cyclic GFR-binding peptide
  MOD_RES (3)..(3): Xaa is C or S
LEXVPTEEEPLPMVYYRIKPHQGQHEQLSNF

SEQ ID NO: 72187 - protein, 38 aa, Artificial Sequence; identical to SEQ ID NO: 23678
  Cyclic GFR-binding peptide
  MOD_RES (1)..(38): Xaa is C or S

SEQ ID NO: 72188 - protein, 21 aa, Artificial Sequence
  Cyclic GFR-binding peptide
EPLTMLYYDENEKVVEQLSND

SEQ ID NO: 72189 - protein, 28 aa, Artificial Sequence
  Cyclic GFR-binding peptide
VPQDLEPLPIVYYVGRTPKVEQLSNMVV

SEQ ID NO: 72190 - protein, 22 aa, Artificial Sequence
  Cyclic GFR-binding peptide
DLSNITIQIMVGRTPKVIGEMS

SEQ ID NO: 72191 - protein, 29 aa, Artificial Sequence
  Cyclic GFR-binding peptide
  MOD_RES (2)..(3): Xaa is C or S
PXXAPTKLEPLPVVYYDDSSNVIEQLSNN

SEQ ID NO: 72192 - protein, 22 aa, Artificial Sequence
  Cyclic GFR-binding peptide
RPVQMRKIDENEKVVKKATVDM

SEQ ID NO: 72193 - protein, 38 aa, Artificial Sequence; identical to SEQ ID NO: 17208
  Cyclic GFR-binding peptide
  MOD_RES (4)..(5)..(36)..(38): Xaa is C or S

SEQ ID NO: 72194 - protein, 20 aa, Artificial Sequence
  Cyclic GFR-binding peptide
RSVKVAKVDDSSNVIKEVQV

SEQ ID NO: 72195 - protein, 26 aa, Artificial Sequence
  Cyclic GFR-binding peptide
DLRSVKIAKVIGKTPKIKEVQVMIVK

SEQ ID NO: 72196 - protein, 31 aa, Artificial Sequence; identical to SEQ ID NO: 17212
  Cyclic GFR-binding peptide
  MOD_RES (2)..(3): Xaa is C or S

SEQ ID NO: 72197 - protein, 26 aa, Artificial Sequence
  Cyclic GFR-binding peptide
EPLTVLYYEYVRKKPKLEQLSNRLEE

SEQ ID NO: 72198 - protein, 39 aa, Artificial Sequence
  Cyclic GFR-binding peptide
  MOD_RES (4)..(5)..(36)..(38): Xaa is C or S
ASPXXVPQDLRSVKIAKVVGRTPKVKEVQVMVVKSXKXS

SEQ ID NO: 72199 - protein, 35 aa, Artificial Sequence
  Cyclic GFR-binding peptide
  MOD_RES (1)..(33)..(35): Xaa is C or S
XVPTELSNITMQIMDENEKVVIGEMSDMVVEGXGX

SEQ ID NO: 72200 - protein, 30 aa, Artificial Sequence; identical to SEQ ID NO: 17215
  Cyclic GFR-binding peptide
  MOD_RES (28)..(30): Xaa is C or S

SEQ ID NO: 72201 - protein, 34 aa, Artificial Sequence; identical to SEQ ID NO: 17216
  Cyclic GFR-binding peptide
  MOD_RES (1)..(32)..(34): Xaa is C or S

SEQ ID NO: 72202 - protein, 32 aa, Artificial Sequence; identical to SEQ ID NO: 17219
  Cyclic GFR-binding peptide
  MOD_RES (4)..(5): Xaa is C or S

SEQ ID NO: 72203 - protein, 28 aa, Artificial Sequence
  Cyclic GFR-binding peptide
TELRPVQMRKIDEYDKVVKKATVEMVVE

SEQ ID NO: 72204 - protein, 37 aa, Artificial Sequence
  Cyclic GFR-binding peptide
  MOD_RES (2)..(3)..(35)..(37): Xaa is C or S
PXXAPTKLRPVQVRKIDDSSNVIKKATVNMVVRSXGX

SEQ ID NO: 72205 - protein, 41 aa, Artificial Sequence; identical to SEQ ID NO: 17227
  Cyclic GFR-binding peptide
  MOD_RES (5)..(6)..(38)..(40): Xaa is C or S

SEQ ID NO: 72206 - protein, 32 aa, Artificial Sequence; identical to SEQ ID NO: 23694
  Cyclic GFR-binding peptide
  MOD_RES (3)..(3): Xaa is C or S

SEQ ID NO: 72207 - protein, 41 aa, Artificial Sequence
  Cyclic GFR-binding peptide
  MOD_RES (1)..(38)..(40): Xaa is C or S
XQPSRVHHEPLPVVYYEYVRKKPKLEQLSNRLEEHLEXAXA

SEQ ID NO: 72208 - protein, 30 aa, Artificial Sequence; identical to SEQ ID NO: 17236
  Cyclic GFR-binding peptide
  MOD_RES (4)..(5): Xaa is C or S

SEQ ID NO: 72209 - protein, 33 aa, Artificial Sequence
  Cyclic GFR-binding peptide
  MOD_RES (2)..(2): Xaa is C or S
KXQPSRVHHEPLPVVYYEYVRKKPKLEQLSNRL

SEQ ID NO: 72210 - protein, 28 aa, Artificial Sequence
  Cyclic GFR-binding peptide
KLEPLPVVYYDDSSNVIEQLSNNMVVRS

SEQ ID NO: 72211 - protein, 34 aa, Artificial Sequence; identical to SEQ ID NO: 17239
  Cyclic GFR-binding peptide
  MOD_RES (1)..(32)..(34): Xaa is C or S

SEQ ID NO: 72212 - protein, 32 aa, Artificial Sequence
  Cyclic GFR-binding peptide
  MOD_RES (1)..(1): Xaa is C or S
XAPTKLSNITVQIMDDSSNVIIGEMSNMVVRS

SEQ ID NO: 72213 - protein, 31 aa, Artificial Sequence
  Cyclic GFR-binding peptide
  MOD_RES (4)..(5): Xaa is C or S
PKPXXAPTQLRPVQVRKIDDSSNVIKKATVN

SEQ ID NO: 72214 - protein, 25 aa, Artificial Sequence
  Cyclic GFR-binding peptide
LEPLTILYYVGRKPKVEQLSNMIVR

SEQ ID NO: 72215 - protein, 29 aa, Artificial Sequence
  Cyclic GFR-binding peptide
  MOD_RES (29)..(29): Xaa is C or S
QDLEPLPIVYYVGRTPKVEQLSNMVVKSX

SEQ ID NO: 72216 - protein, 36 aa, Artificial Sequence
  Cyclic GFR-binding peptide
  MOD_RES (1)..(33)..(35): Xaa is C or S
XVPTELRPVQMRKIDEYDKVVKKATVEMVVEGXGXR

SEQ ID NO: 72217 - protein, 33 aa, Artificial Sequence
  Cyclic GFR-binding peptide
  MOD_RES (3)..(4): Xaa is C or S
APXXVPQALRPVQIRKIVGRKPKVKKATVMIVR

SEQ ID NO: 72218 - protein, 35 aa, Artificial Sequence
  Cyclic GFR-binding peptide
  MOD_RES (2)..(3)..(35): Xaa is C or S
PXXAPTQLSNITVQIMDDSSNVIIGEMSNMVVRAX

SEQ ID NO: 72219 - protein, 22 aa, Artificial Sequence
  Cyclic GFR-binding peptide
EPLPIVYYIGKTPKIEQLSNMI

SEQ ID NO: 72220 - protein, 33 aa, Artificial Sequence; identical to SEQ ID NO: 23713
  Cyclic GFR-binding peptide
  MOD_RES (6)..(6): Xaa is C or S

SEQ ID NO: 72221 - protein, 35 aa, Artificial Sequence
  Cyclic GFR-binding peptide
  MOD_RES (4)..(5): Xaa is C or S
PKPXXAPTKLSNITVQIMDDSSNVIIGEMSNMVVR

SEQ ID NO: 72222 - protein, 30 aa, Artificial Sequence; identical to SEQ ID NO: 17261
  Cyclic GFR-binding peptide
  MOD_RES (30)..(30): Xaa is C or S

SEQ ID NO: 72223 - protein, 28 aa, Artificial Sequence
  Cyclic GFR-binding peptide
EERPVQMRKIRIKPHQGQHKKATVFLQH

SEQ ID NO: 72224 - protein, 33 aa, Artificial Sequence; identical to SEQ ID NO: 23719
  Cyclic GFR-binding peptide

SEQ ID NO: 72225 - protein, 32 aa, Artificial Sequence
  Cyclic GFR-binding peptide
  MOD_RES (2)..(3): Xaa is C or S
PXXVSQDLRPVQIRKIIGKTPKIKKATVMIVK

SEQ ID NO: 72226 - protein, 34 aa, Artificial Sequence; identical to SEQ ID NO: 17268
  Cyclic GFR-binding peptide
  MOD_RES (5)..(6): Xaa is C or S

SEQ ID NO: 72227 - protein, 40 aa, Artificial Sequence
  Cyclic GFR-binding peptide
  MOD_RES (5)..(6)..(37)..(39): Xaa is C or S
SASPXXVPQDLSNITIQIMVGRTPKVIGEMSMVVKSXKXS

SEQ ID NO: 72228 - protein, 36 aa, Artificial Sequence; identical to SEQ ID NO: 23720
  Cyclic GFR-binding peptide
  MOD_RES (35)..(35): Xaa is C or S

SEQ ID NO: 72229 - protein, 32 aa, Artificial Sequence
  Cyclic GFR-binding peptide
  MOD_RES (3)..(4): Xaa is C or S
APXXVPQALRSVKIAKVVGRKPKVKEVQVMIV

SEQ ID NO: 72230 - protein, 30 aa, Artificial Sequence; identical to SEQ ID NO: 23721
  Cyclic GFR-binding peptide
  MOD_RES (1)..(1): Xaa is C or S

SEQ ID NO: 72231 - protein, 31 aa, Artificial Sequence
  Cyclic GFR-binding peptide
  MOD_RES (6)..(6): Xaa is C or S
VTKPTXAPTKLRPVQVRKIDDSSNVIKKATV

SEQ ID NO: 72232 - protein, 27 aa, Artificial Sequence
  Cyclic GFR-binding peptide
VSQDLEPLPIVYYIGKTPKIEQLSNMI

SEQ ID NO: 72233 - protein, 24 aa, Artificial Sequence
  Cyclic GFR-binding peptide
QLSNITVQIMEIVRKKPIFIGEMS

SEQ ID NO: 72234 - protein, 27 aa, Artificial Sequence
  Cyclic GFR-binding peptide
  MOD_RES (1)..(2): Xaa is C or S
XXVPQALRSVKIAKVVGRKPKVKEVQV

SEQ ID NO: 72235 - protein, 32 aa, Artificial Sequence; identical to SEQ ID NO: 23732
  Cyclic GFR-binding peptide
  MOD_RES (2)..(2): Xaa is C or S

SEQ ID NO: 72236 - protein, 30 aa, Artificial Sequence
  Cyclic GFR-binding peptide
  MOD_RES (27)..(29): Xaa is C or S
RPVQMRKIDEYDKVVKKATVEMVVEGXGXR

SEQ ID NO: 72237 - protein, 38 aa, Artificial Sequence
  Cyclic GFR-binding peptide
  MOD_RES (5)..(6)..(37): Xaa is C or S
SASPXXVPQDLRSVKIAKVVGRTPKVKEVQVMVVKSXK

SEQ ID NO: 72238 - protein, 32 aa, Artificial Sequence
  Cyclic GFR-binding peptide
  MOD_RES (4)..(5): Xaa is C or S
PKAXXVPTELSNITMQIMDENEKVVIGEMSDM

SEQ ID NO: 72239 - protein, 28 aa, Artificial Sequence
  Cyclic GFR-binding peptide
QDLEPLPIVYYIGKTPKIEQLSNMIVKS

SEQ ID NO: 72240 - protein, 35 aa, Artificial Sequence
  Cyclic GFR-binding peptide
  MOD_RES (6)..(7): Xaa is C or S
TVPKPXXAPTQLSNITVQIMDDSSNVIIGEMSNMV

SEQ ID NO: 72241 - protein, 36 aa, Artificial Sequence
  Cyclic GFR-binding peptide
  MOD_RES (1)..(1): Xaa is C or S
XRPTQVQLEPLPVVYYEIVRKKPIFEQLSNTLEDHL

SEQ ID NO: 72242 - protein, 34 aa, Artificial Sequence; identical to SEQ ID NO: 23741
  Cyclic GFR-binding peptide
  MOD_RES (31)..(33): Xaa is C or S

SEQ ID NO: 72243 - protein, 36 aa, Artificial Sequence
  Cyclic GFR-binding peptide
  MOD_RES (7)..(7): Xaa is C or S
HVTKPTXAPTKLSNITVQIMDDSSNVIIGEMSNMVV

SEQ ID NO: 72244 - protein, 23 aa, Artificial Sequence
  Cyclic GFR-binding peptide
KLSNITVQIMDDSSNVIIGEMSN

SEQ ID NO: 72245 - protein, 36 aa, Artificial Sequence
  Cyclic GFR-binding peptide
  MOD_RES (6)..(7): Xaa is C or S
SIPKAXXVPTELRPVQMRKIDEYDKVVKKATVEMVV

SEQ ID NO: 72246 - protein, 29 aa, Artificial Sequence
  Cyclic GFR-binding peptide
  MOD_RES (1)..(1): Xaa is C or S
XVPTELSNITMQIMDEYDKVVIGEMSEMV

SEQ ID NO: 72247 - protein, 33 aa, Artificial Sequence; identical to SEQ ID NO: 23747
  Cyclic GFR-binding peptide
  MOD_RES (30)..(32): Xaa is C or S

SEQ ID NO: 72248 - protein, 35 aa, Artificial Sequence
  Cyclic GFR-binding peptide
  MOD_RES (4)..(5): Xaa is C or S
PKPXXAPTKLRSVKVAKVDDSSNVIKEVQVNMVVR

SEQ ID NO: 72249 - protein, 29 aa, Artificial Sequence
  Cyclic GFR-binding peptide
  MOD_RES (2)..(3): Xaa is C or S
PXXVPQALRSVKIAKVVGRKPKVKEVQVM

SEQ ID NO: 72250 - protein, 35 aa, Artificial Sequence
  Cyclic GFR-binding peptide
  MOD_RES (5)..(6): Xaa is C or S
SASPXXVSQDLRSVKIAKVIGKTPKIKEVQVMIVK

SEQ ID NO: 72251 - protein, 43 aa, Artificial Sequence; identical to SEQ ID NO: 23752
  Cyclic GFR-binding peptide
  MOD_RES (3)..(40)..(42): Xaa is C or S

SEQ ID NO: 72252 - protein, 39 aa, Artificial Sequence
  Cyclic GFR-binding peptide
  MOD_RES (4)..(5)..(37)..(39): Xaa is C or S
PKAXXVPTELSNITMQIMDEYDKVVIGEMSEMVVEGXGX

SEQ ID NO: 72253 - protein, 28 aa, Artificial Sequence
  Cyclic GFR-binding peptide
  MOD_RES (27)..(27): Xaa is C or S
EPLTMLYYDENEKVVEQLSNDMVVEGXG

SEQ ID NO: 72254 - protein, 31 aa, Artificial Sequence; identical to SEQ ID NO: 17307
  Cyclic GFR-binding peptide

SEQ ID NO: 72255 - protein, 30 aa, Artificial Sequence; identical to SEQ ID NO: 23755
  Cyclic GFR-binding peptide

SEQ ID NO: 72256 - protein, 32 aa, Artificial Sequence
  Cyclic GFR-binding peptide
QPSRVHHEPLPVVYYEYVRKKPKLEQLSNRLE

SEQ ID NO: 72257 - protein, 26 aa, Artificial Sequence
  Cyclic GFR-binding peptide
VPQALEPLTILYYVGRKPKVEQLSNM

SEQ ID NO: 72258 - protein, 33 aa, Artificial Sequence
  Cyclic GFR-binding peptide
  MOD_RES (6)..(7): Xaa is C or S
ASAAPXXVPQALRSVKIAKVVGRKPKVKEVQVM

SEQ ID NO: 72259 - protein, 32 aa, Artificial Sequence
  Cyclic GFR-binding peptide
  MOD_RES (30)..(32): Xaa is C or S
TELRPVQMRKIDEYDKVVKKATVEMVVEGXGX

SEQ ID NO: 72260 - protein, 32 aa, Artificial Sequence
  Cyclic GFR-binding peptide
  MOD_RES (29)..(31): Xaa is C or S
QDLRPVQIRKIIGKTPKIKKATVMIVKSXKXS

SEQ ID NO: 72261 - protein, 33 aa, Artificial Sequence
  Cyclic GFR-binding peptide
  MOD_RES (30)..(32): Xaa is C or S
TQLRSVKVAKVDDSSNVIKEVQVNMVVRAXGXH

SEQ ID NO: 72262 - protein, 36 aa, Artificial Sequence
  Cyclic GFR-binding peptide
  MOD_RES (35)..(35): Xaa is C or S
SRVHHEPLTVLYYEYVRKKPKLEQLSNRLEEHLEXA

SEQ ID NO: 72263 - protein, 25 aa, Artificial Sequence
  Cyclic GFR-binding peptide
RSVKIAKVIGKTPKIKEVQVMIVKS

SEQ ID NO: 72264 - protein, 30 aa, Artificial Sequence; identical to SEQ ID NO: 17314
  Cyclic GFR-binding peptide

SEQ ID NO: 72265 - protein, 34 aa, Artificial Sequence; identical to SEQ ID NO: 23768
  Cyclic GFR-binding peptide
  MOD_RES (31)..(33): Xaa is C or S

SEQ ID NO: 72266 - protein, 24 aa, Artificial Sequence
  Cyclic GFR-binding peptide
RPVQIRKIVGRKPKVKKATVMIVR

SEQ ID NO: 72267 - protein, 28 aa, Artificial Sequence
  Cyclic GFR-binding peptide
  MOD_RES (27)..(27): Xaa is C or S
SNITMQIMDEYDKVVIGEMSEMVVEGXG

SEQ ID NO: 72268 - protein, 36 aa, Artificial Sequence
  Cyclic GFR-binding peptide
  MOD_RES (6)..(7): Xaa is C or S
TVPKPXXAPTQLRPVQVRKIDDSSNVIKKATVNMVV

SEQ ID NO: 72269 - protein, 30 aa, Artificial Sequence
  Cyclic GFR-binding peptide
  MOD_RES (2)..(3): Xaa is C or S
PXXVPQDLRSVKIAKVVGRTPKVKEVQVMV

SEQ ID NO: 72270 - protein, 31 aa, Artificial Sequence; identical to SEQ ID NO: 23770
  Cyclic GFR-binding peptide
  MOD_RES (31)..(31): Xaa is C or S

SEQ ID NO: 72271 - protein, 37 aa, Artificial Sequence; identical to SEQ ID NO: 17319
  Cyclic GFR-binding peptide
  MOD_RES (6)..(7): Xaa is C or S

SEQ ID NO: 72272 - protein, 33 aa, Artificial Sequence; identical to SEQ ID NO: 23773
  Cyclic GFR-binding peptide
  MOD_RES (2)..(2): Xaa is C or S

SEQ ID NO: 72273 - protein, 23 aa, Artificial Sequence
  Cyclic GFR-binding peptide
EPLPMVYYRIKPHQGQHEQLSNF

SEQ ID NO: 72274 - protein, 36 aa, Artificial Sequence; identical to SEQ ID NO: 17321
  Cyclic GFR-binding peptide
  MOD_RES (1)..(33)..(35): Xaa is C or S

SEQ ID NO: 72275 - protein, 30 aa, Artificial Sequence; identical to SEQ ID NO: 23775
  Cyclic GFR-binding peptide

SEQ ID NO: 72276 - protein, 28 aa, Artificial Sequence
  Cyclic GFR-binding peptide
PQDLEPLPIVYYVGRTPKVEQLSNMVVK

SEQ ID NO: 72277 - protein, 33 aa, Artificial Sequence; identical to SEQ ID NO: 17325
  Cyclic GFR-binding peptide
  MOD_RES (3)..(4): Xaa is C or S

SEQ ID NO: 72278 - protein, 37 aa, Artificial Sequence; identical to SEQ ID NO: 23778
  Cyclic GFR-binding peptide
  MOD_RES (1)..(1): Xaa is C or S

SEQ ID NO: 72279 - protein, 31 aa, Artificial Sequence
  Cyclic GFR-binding peptide
RVHHEPLTVLYYEYVRKKPKLEQLSNRLEEH

SEQ ID NO: 72280 - protein, 40 aa, Artificial Sequence
  Cyclic GFR-binding peptide
  MOD_RES (4)..(5)..(37)..(39): Xaa is C or S
PKPXXAPTKLSNITVQIMDDSSNVIIGEMSNMVVRSXGXH

SEQ ID NO: 72281 - protein, 29 aa, Artificial Sequence
  Cyclic GFR-binding peptide
  MOD_RES (2)..(3): Xaa is C or S
PXXVPQDLRPVQIRKIVGRTPKVKKATVM

SEQ ID NO: 72282 - protein, 40 aa, Artificial Sequence; identical to SEQ ID NO: 23787
  Cyclic GFR-binding peptide
  MOD_RES (37)..(39): Xaa is C or S

SEQ ID NO: 72283 - protein, 26 aa, Artificial Sequence
  Cyclic GFR-binding peptide
QVQLEPLTVLYYEIVRKKPIFEQLSN

SEQ ID NO: 72284 - protein, 25 aa, Artificial Sequence
  Cyclic GFR-binding peptide
RSVKVAKVDDSSNVIKEVQVNMVVR

SEQ ID NO: 72285 - protein, 32 aa, Artificial Sequence
  Cyclic GFR-binding peptide
  MOD_RES (7)..(7): Xaa is C or S
HVTKPTXAPTKLRPVQVRKIDDSSNVIKKATV

SEQ ID NO: 72286 - protein, 31 aa, Artificial Sequence; identical to SEQ ID NO: 17331
  Cyclic GFR-binding peptide
  MOD_RES (4)..(5): Xaa is C or S

SEQ ID NO: 72287 - protein, 33 aa, Artificial Sequence
  Cyclic GFR-binding peptide
  MOD_RES (5)..(6): Xaa is C or S
VPKPXXAPTQLRPVQVRKIDDSSNVIKKATVNM

SEQ ID NO: 72288 - protein, 25 aa, Artificial Sequence
  Cyclic GFR-binding peptide
TELEPLPMVYYDENEKVVEQLSNDM

SEQ ID NO: 72289 - protein, 24 aa, Artificial Sequence
  Cyclic GFR-binding peptide
HHEPLPVVYYEYVRKKPKLEQLSN

SEQ ID NO: 72290 - protein, 29 aa, Artificial Sequence
  Cyclic GFR-binding peptide
VPTELRPVQMRKIDENEKVVKKATVDMVV

SEQ ID NO: 72291 - protein, 35 aa, Artificial Sequence
  Cyclic GFR-binding peptide
  MOD_RES (5)..(5): Xaa is C or S
SSVKXQPSRVHHEPLTVLYYEYVRKKPKLEQLSNR

SEQ ID NO: 72292 - protein, 26 aa, Artificial Sequence
  Cyclic GFR-binding peptide
TELSNITMQIMDEYDKVVIGEMSEMV

SEQ ID NO: 72293 - protein, 33 aa, Artificial Sequence
  Cyclic GFR-binding peptide
  MOD_RES (6)..(6): Xaa is C or S
VTKPTXAPTKLRPVQVRKIDDSSNVIKKATVNM

SEQ ID NO: 72294 - protein, 42 aa, Artificial Sequence; identical to SEQ ID NO: 23798
  Cyclic GFR-binding peptide
  MOD_RES (3)..(40)..(42): Xaa is C or S

SEQ ID NO: 72295 - protein, 38 aa, Artificial Sequence
  Cyclic GFR-binding peptide
  MOD_RES (6)..(6): Xaa is C or S
DEGLEXVPTEEEPLTMLYYRIKPHQGQHEQLSNFLQHN

SEQ ID NO: 72296 - protein, 25 aa, Artificial Sequence
  Cyclic GFR-binding peptide
QLEPLTVLYYEIVRKKPIFEQLSNT

SEQ ID NO: 72297 - protein, 35 aa, Artificial Sequence; identical to SEQ ID NO: 17349
  Cyclic GFR-binding peptide
  MOD_RES (1)..(2)..(33)..(35): Xaa is C or S

SEQ ID NO: 72298 - protein, 38 aa, Artificial Sequence
  Cyclic GFR-binding peptide
  MOD_RES (6)..(7)..(38): Xaa is C or S
ASASPXXVSQDLRSVKIAKVIGKTPKIKEVQVMIVKSX

SEQ ID NO: 72299 - protein, 27 aa, Artificial Sequence
  Cyclic GFR-binding peptide
ALRPVQIRKIVGRKPKVKKATVMIVRS

SEQ ID NO: 72300 - protein, 27 aa, Artificial Sequence
  Cyclic GFR-binding peptide
QDLEPLPIVYYIGKTPKIEQLSNMIVK

SEQ ID NO: 72301 - protein, 33 aa, Artificial Sequence; identical to SEQ ID NO: 17355
  Cyclic GFR-binding peptide
  MOD_RES (31)..(33): Xaa is C or S

SEQ ID NO: 72302 - protein, 33 aa, Artificial Sequence
  Cyclic GFR-binding peptide
  MOD_RES (1)..(2): Xaa is C or S
XXVPTELSNITMQIMDEYDKVVIGEMSEMVVEG

SEQ ID NO: 72303 - protein, 20 aa, Artificial Sequence
  Cyclic GFR-binding peptide
RSVKIAKVVGRKPKVKEVQV

SEQ ID NO: 72304 - protein, 34 aa, Artificial Sequence; identical to SEQ ID NO: 17357
  Cyclic GFR-binding peptide
  MOD_RES (31)..(33): Xaa is C or S

SEQ ID NO: 72305 - protein, 22 aa, Artificial Sequence
  Cyclic GFR-binding peptide
EPLTVLYYEYVRKKPKLEQLSN

SEQ ID NO: 72306 - protein, 31 aa, Artificial Sequence; identical to SEQ ID NO: 17359
  Cyclic GFR-binding peptide

SEQ ID NO: 72307 - protein, 33 aa, Artificial Sequence
  Cyclic GFR-binding peptide
  MOD_RES (3)..(4): Xaa is C or S
SPXXVSQDLRSVKIAKVIGKTPKIKEVQVMIVK

SEQ ID NO: 72308 - protein, 39 aa, Artificial Sequence; identical to SEQ ID NO: 17361
  Cyclic GFR-binding peptide
  MOD_RES (5)..(37)..(39): Xaa is C or S

SEQ ID NO: 72309 - protein, 35 aa, Artificial Sequence
  Cyclic GFR-binding peptide
  MOD_RES (32)..(34): Xaa is C or S
APTQLRSVKVAKVDDSSNVIKEVQVNMVVRAXGXH

SEQ ID NO: 72310 - protein, 31 aa, Artificial Sequence; identical to SEQ ID NO: 17365
  Cyclic GFR-binding peptide
  MOD_RES (3)..(4): Xaa is C or S

SEQ ID NO: 72311 - protein, 34 aa, Artificial Sequence
  Cyclic GFR-binding peptide
  MOD_RES (32)..(34): Xaa is C or S
VPTELRPVQMRKIDENEKVVKKATVDMVVEGXGX

SEQ ID NO: 72312 - protein, 26 aa, Artificial Sequence
  Cyclic GFR-binding peptide
  MOD_RES (26)..(26): Xaa is C or S
RPVQIRKIVGRTPKVKKATVMVVKSX

SEQ ID NO: 72313 - protein, 29 aa, Artificial Sequence
  Cyclic GFR-binding peptide
  MOD_RES (27)..(29): Xaa is C or S
RPVQMRKIDENEKVVKKATVDMVVEGXGX

SEQ ID NO: 72314 - protein, 32 aa, Artificial Sequence; identical to SEQ ID NO: 17371
  Cyclic GFR-binding peptide
  MOD_RES (1)..(32): Xaa is C or S

SEQ ID NO: 72315 - protein, 32 aa, Artificial Sequence
  Cyclic GFR-binding peptide
  MOD_RES (30)..(32): Xaa is C or S
PQALSNITIQIMVGRKPKVIGEMSMIVRSXKX

SEQ ID NO: 72316 - protein, 29 aa, Artificial Sequence
  Cyclic GFR-binding peptide
  MOD_RES (27)..(29): Xaa is C or S
LEPLPIVYYVGRTPKVEQLSNMVVKSXKX

SEQ ID NO: 72317 - protein, 31 aa, Artificial Sequence
  Cyclic GFR-binding peptide
  MOD_RES (3)..(4): Xaa is C or S
KAXXVPTELSNITMQIMDEYDKVVIGEMSEM

SEQ ID NO: 72318 - protein, 33 aa, Artificial Sequence
  Cyclic GFR-binding peptide
  MOD_RES (5)..(6): Xaa is C or S
SASPXXVPQDLSNITIQIMVGRTPKVIGEMSMV

SEQ ID NO: 72319 - protein, 32 aa, Artificial Sequence
  Cyclic GFR-binding peptide
  MOD_RES (31)..(31): Xaa is C or S
PTELRPVQMRKIDENEKVVKKATVDMVVEGXG

SEQ ID NO: 72320 - protein, 24 aa, Artificial Sequence
  Cyclic GFR-binding peptide
LRSVKMAKVDEYDKVVKEVQVEMV

SEQ ID NO: 72321 - protein, 35 aa, Artificial Sequence; identical to SEQ ID NO: 23821
  Cyclic GFR-binding peptide
  MOD_RES (6)..(6): Xaa is C or S

SEQ ID NO: 72322 - protein, 31 aa, Artificial Sequence; identical to SEQ ID NO: 17383
  Cyclic GFR-binding peptide
  MOD_RES (5)..(5): Xaa is C or S

SEQ ID NO: 72323 - protein, 34 aa, Artificial Sequence
  Cyclic GFR-binding peptide
  MOD_RES (3)..(3): Xaa is C or S
VQXRPTQVQLEPLPVVYYEIVRKKPIFEQLSNTL

SEQ ID NO: 72324 - protein, 39 aa, Artificial Sequence
  Cyclic GFR-binding peptide
  MOD_RES (4)..(5)..(36)..(38): Xaa is C or S
ASPXXVSQDLRPVQIRKIIGKTPKIKKATVMIVKSXKXS

SEQ ID NO: 72325 - protein, 33 aa, Artificial Sequence
  Cyclic GFR-binding peptide
  MOD_RES (2)..(2): Xaa is C or S
TXAPTKLRPVQVRKIDDSSNVIKKATVNMVVRS

SEQ ID NO: 72326 - protein, 31 aa, Artificial Sequence
  Cyclic GFR-binding peptide
  MOD_RES (1)..(1): Xaa is C or S
XVPTELRSVKMAKVDEYDKVVKEVQVEMVVE

SEQ ID NO: 72327 - protein, 38 aa, Artificial Sequence; identical to SEQ ID NO: 17386
  Cyclic GFR-binding peptide
  MOD_RES (6)..(7): Xaa is C or S

SEQ ID NO: 72328 - protein, 32 aa, Artificial Sequence
  Cyclic GFR-binding peptide
QPSRVHHEPLTVLYYEYVRKKPKLEQLSNRLE

SEQ ID NO: 72329 - protein, 35 aa, Artificial Sequence
  Cyclic GFR-binding peptide
  MOD_RES (1)..(1): Xaa is C or S
XRPTQVQLEPLPVVYYEIVRKKPIFEQLSNTLEDH

SEQ ID NO: 72330 - protein, 35 aa, Artificial Sequence; identical to SEQ ID NO: 17392
  Cyclic GFR-binding peptide
  MOD_RES (1)..(33)..(35): Xaa is C or S

SEQ ID NO: 72331 - protein, 34 aa, Artificial Sequence
  Cyclic GFR-binding peptide
  MOD_RES (3)..(4): Xaa is C or S
SPXXVSQDLRSVKIAKVIGKTPKIKEVQVMIVKS

SEQ ID NO: 72332 - protein, 37 aa, Artificial Sequence; identical to SEQ ID NO: 23837
  Cyclic GFR-binding peptide
  MOD_RES (5)..(5): Xaa is C or S

SEQ ID NO: 72333 - protein, 35 aa, Artificial Sequence
  Cyclic GFR-binding peptide
  MOD_RES (5)..(6): Xaa is C or S
SASPXXVPQDLRPVQIRKIVGRTPKVKKATVMVVK

SEQ ID NO: 72334 - protein, 37 aa, Artificial Sequence; identical to SEQ ID NO: 17398
  Cyclic GFR-binding peptide
  MOD_RES (2)..(3)..(35)..(37): Xaa is C or S

SEQ ID NO: 72335 - protein, 25 aa, Artificial Sequence
  Cyclic GFR-binding peptide
TKLSNITVQIMDDSSNVIIGEMSNM

SEQ ID NO: 72336 - protein, 35 aa, Artificial Sequence; identical to SEQ ID NO: 23844
  Cyclic GFR-binding peptide
  MOD_RES (4)..(4): Xaa is C or S

SEQ ID NO: 72337 - protein, 34 aa, Artificial Sequence; identical to SEQ ID NO: 17399
  Cyclic GFR-binding peptide
  MOD_RES (3)..(3): Xaa is C or S

SEQ ID NO: 72338 - protein, 26 aa, Artificial Sequence
  Cyclic GFR-binding peptide
TKLRPVQVRKIDDSSNVIKKATVNMV

SEQ ID NO: 72339 - protein, 29 aa, Artificial Sequence
  Cyclic GFR-binding peptide
  MOD_RES (26)..(28): Xaa is C or S
SNITIQIMVGRKPKVIGEMSMIVRSXKXS

SEQ ID NO: 72340 - protein, 36 aa, Artificial Sequence
  Cyclic GFR-binding peptide
  MOD_RES (1)..(33)..(35): Xaa is C or S
XAPTQLRSVKVAKVDDSSNVIKEVQVNMVVRAXGXH

SEQ ID NO: 72341 - protein, 28 aa, Artificial Sequence
  Cyclic GFR-binding peptide
  MOD_RES (1)..(2): Xaa is C or S
XXVSQDLSNITIQIMIGKTPKIIGEMSM

SEQ ID NO: 72342 - protein, 39 aa, Artificial Sequence; identical to SEQ ID NO: 23853
  Cyclic GFR-binding peptide
  MOD_RES (6)..(6): Xaa is C or S

SEQ ID NO: 72343 - protein, 39 aa, Artificial Sequence
  Cyclic GFR-binding peptide
  MOD_RES (4)..(4): Xaa is C or S
SVKXQPSRVHHEPLTVLYYEYVRKKPKLEQLSNRLEEHL

SEQ ID NO: 72344 - protein, 25 aa, Artificial Sequence
  Cyclic GFR-binding peptide
SNITVQIMEYVRKKPKLIGEMSRLE

SEQ ID NO: 72345 - protein, 35 aa, Artificial Sequence
  Cyclic GFR-binding peptide
  MOD_RES (2)..(3)..(35): Xaa is C or S
PXXAPTKLSNITVQIMDDSSNVIIGEMSNMVVRSX

SEQ ID NO: 72346 - protein, 30 aa, Artificial Sequence
  Cyclic GFR-binding peptide
  MOD_RES (27)..(29): Xaa is C or S
LSNITIQIMVGRKPKVIGEMSMIVRSXKXS

SEQ ID NO: 72347 - protein, 40 aa, Artificial Sequence
  Cyclic GFR-binding peptide
  MOD_RES (4)..(5)..(37)..(39): Xaa is C or S
PKPXXAPTQLSNITVQIMDDSSNVIIGEMSNMVVRAXGXH

SEQ ID NO: 72348 - protein, 33 aa, Artificial Sequence; identical to SEQ ID NO: 23860
  Cyclic GFR-binding peptide
  MOD_RES (2)..(2): Xaa is C or S

SEQ ID NO: 72349 - protein, 35 aa, Artificial Sequence
  Cyclic GFR-binding peptide
  MOD_RES (1)..(2)..(33)..(35): Xaa is C or S
XXVSQDLRPVQIRKIIGKTPKIKKATVMIVKSXKX

SEQ ID NO: 72350 - protein, 29 aa, Artificial Sequence
  Cyclic GFR-binding peptide
  MOD_RES (29)..(29): Xaa is C or S
ELEPLTMLYYDENEKVVEQLSNDMVVEGX

SEQ ID NO: 72351 - protein, 44 aa, Artificial Sequence; identical to SEQ ID NO: 23863
  Cyclic GFR-binding peptide
  MOD_RES (5)..(42)..(44): Xaa is C or S

SEQ ID NO: 72352 - protein, 34 aa, Artificial Sequence
  Cyclic GFR-binding peptide
  MOD_RES (31)..(33): Xaa is C or S
PTQLRPVQVRKIDDSSNVIKKATVNMVVRAXGXH

SEQ ID NO: 72353 - protein, 39 aa, Artificial Sequence
  Cyclic GFR-binding peptide
  MOD_RES (37)..(39): Xaa is C or S
QPSRVHHEPLPVVYYEYVRKKPKLEQLSNRLEEHLEXAX

SEQ ID NO: 72354 - protein, 29 aa, Artificial Sequence
  Cyclic GFR-binding peptide
TKLSNITVQIMDDSSNVIIGEMSNMVVRS

SEQ ID NO: 72355 - protein, 27 aa, Artificial Sequence
  Cyclic GFR-binding peptide
  MOD_RES (1)..(2): Xaa is C or S
XXAPTKLRSVKVAKVDDSSNVIKEVQV

SEQ ID NO: 72356 - protein, 35 aa, Artificial Sequence
  Cyclic GFR-binding peptide
  MOD_RES (1)..(2)..(33)..(35): Xaa is C or S
XXVPQALRPVQIRKIVGRKPKVKKATVMIVRSXKX

SEQ ID NO: 72357 - protein, 31 aa, Artificial Sequence
  Cyclic GFR-binding peptide
  MOD_RES (1)..(2): Xaa is C or S
XXVPQALRPVQIRKIVGRKPKVKKATVMIVR

SEQ ID NO: 72358 - protein, 35 aa, Artificial Sequence
  Cyclic GFR-binding peptide
  MOD_RES (2)..(3)..(35): Xaa is C or S
AXXVPTELSNITMQIMDEYDKVVIGEMSEMVVEGX

SEQ ID NO: 72359 - protein, 30 aa, Artificial Sequence; identical to SEQ ID NO: 23874
  Cyclic GFR-binding peptide

SEQ ID NO: 72360 - protein, 34 aa, Artificial Sequence
  Cyclic GFR-binding peptide
  MOD_RES (1)..(32)..(34): Xaa is C or S
XVPQALRPVQIRKIVGRKPKVKKATVMIVRSXKX

SEQ ID NO: 72361 - protein, 23 aa, Artificial Sequence
  Cyclic GFR-binding peptide
LRPVQMRKIDENEKVVKKATVDM

SEQ ID NO: 72362 - protein, 34 aa, Artificial Sequence; identical to SEQ ID NO: 17433
  Cyclic GFR-binding peptide
  MOD_RES (1)..(32)..(34): Xaa is C or S

SEQ ID NO: 72363 - protein, 30 aa, Artificial Sequence
  Cyclic GFR-binding peptide
  MOD_RES (28)..(30): Xaa is C or S
LRPVQMRKIDENEKVVKKATVDMVVEGXGX

SEQ ID NO: 72364 - protein, 25 aa, Artificial Sequence
  Cyclic GFR-binding peptide
PTKLEPLPVVYYDDSSNVIEQLSNN

SEQ ID NO: 72365 - protein, 38 aa, Artificial Sequence; identical to SEQ ID NO: 23880
  Cyclic GFR-binding peptide
  MOD_RES (35)..(37): Xaa is C or S

SEQ ID NO: 72366 - protein, 28 aa, Artificial Sequence
  Cyclic GFR-binding peptide
  MOD_RES (1)..(1): Xaa is C or S
XVPTELSNITMQIMDEYDKVVIGEMSEM

SEQ ID NO: 72367 - protein, 29 aa, Artificial Sequence
  Cyclic GFR-binding peptide
  MOD_RES (29)..(29): Xaa is C or S
ELRSVKMAKVDEYDKVVKEVQVEMVVEGX

SEQ ID NO: 72368 - protein, 28 aa, Artificial Sequence
  Cyclic GFR-binding peptide
VSQDLRPVQIRKIIGKTPKIKKATVMIV

SEQ ID NO: 72369 - protein, 31 aa, Artificial Sequence
  Cyclic GFR-binding peptide
APTQLRSVKVAKVDDSSNVIKEVQVNMVVRA

SEQ ID NO: 72370 - protein, 36 aa, Artificial Sequence
  Cyclic GFR-binding peptide
  MOD_RES (6)..(7): Xaa is C or S
KIPKAXXVPTELRSVKMAKVDENEKVVKEVQVDMVV

SEQ ID NO: 72371 - protein, 33 aa, Artificial Sequence
  Cyclic GFR-binding peptide
  MOD_RES (3)..(4): Xaa is C or S
KPXXAPTKLSNITVQIMDDSSNVIIGEMSNMVV

SEQ ID NO: 72372 - protein, 22 aa, Artificial Sequence
  Cyclic GFR-binding peptide
QLSNITVQIMDDSSNVIIGEMS

SEQ ID NO: 72373 - protein, 24 aa, Artificial Sequence
  Cyclic GFR-binding peptide
EPLTMLYYRIKPHQGQHEQLSNFL

SEQ ID NO: 72374 - protein, 28 aa, Artificial Sequence
  Cyclic GFR-binding peptide
  MOD_RES (1)..(2): Xaa is C or S
XXVPTELSNITMQIMDEYDKVVIGEMSE

SEQ ID NO: 72375 - protein, 33 aa, Artificial Sequence
  Cyclic GFR-binding peptide
  MOD_RES (6)..(7): Xaa is C or S
ASASPXXVSQDLRSVKIAKVIGKTPKIKEVQVM

SEQ ID NO: 72376 - protein, 32 aa, Artificial Sequence
  Cyclic GFR-binding peptide
  MOD_RES (5)..(6): Xaa is C or S
IPKAXXVPTELSNITMQIMDENEKVVIGEMSD

SEQ ID NO: 72377 - protein, 24 aa, Artificial Sequence
  Cyclic GFR-binding peptide
QALRPVQIRKIVGRKPKVKKATVM

SEQ ID NO: 72378 - protein, 33 aa, Artificial Sequence; identical to SEQ ID NO: 17456
  Cyclic GFR-binding peptide
  MOD_RES (4)..(5): Xaa is C or S

SEQ ID NO: 72379 - protein, 43 aa, Artificial Sequence
  Cyclic GFR-binding peptide
  MOD_RES (5)..(42): Xaa is C or S
SSVKXQPSRVHHEPLTVLYYEYVRKKPKLEQLSNRLEEHLEXA

SEQ ID NO: 72380 - protein, 32 aa, Artificial Sequence
  Cyclic GFR-binding peptide
  MOD_RES (4)..(4): Xaa is C or S
GLEXVPTEEEPLPMVYYRIKPHQGQHEQLSNF

SEQ ID NO: 72381 - protein, 28 aa, Artificial Sequence
  Cyclic GFR-binding peptide
  MOD_RES (28)..(28): Xaa is C or S
LSNITVQIMDDSSNVIIGEMSNMVVRSX

SEQ ID NO: 72382 - protein, 41 aa, Artificial Sequence
  Cyclic GFR-binding peptide
  MOD_RES (2)..(39)..(41): Xaa is C or S
KXQPSRVHHEPLPVVYYEYVRKKPKLEQLSNRLEEHLEXAX

SEQ ID NO: 72383 - protein, 26 aa, Artificial Sequence
  Cyclic GFR-binding peptide
EEPLPMVYYRIKPHQGQHEQLSNFLQ

SEQ ID NO: 72384 - protein, 23 aa, Artificial Sequence
  Cyclic GFR-binding peptide
EPLTILYYVGRKPKVEQLSNMIV

SEQ ID NO: 72385 - protein, 26 aa, Artificial Sequence
  Cyclic GFR-binding peptide
  MOD_RES (26)..(26): Xaa is C or S
EPLPIVYYVGRTPKVEQLSNMVVKSX

SEQ ID NO: 72386 - protein, 36 aa, Artificial Sequence
  Cyclic GFR-binding peptide
  MOD_RES (4)..(5)..(36): Xaa is C or S
ASPXXVSQDLRPVQIRKIIGKTPKIKKATVMIVKSX

SEQ ID NO: 72387 - protein, 31 aa, Artificial Sequence
  Cyclic GFR-binding peptide
  MOD_RES (1)..(2): Xaa is C or S
XXVPTELSNITMQIMDENEKVVIGEMSDMVV

SEQ ID NO: 72388 - protein, 30 aa, Artificial Sequence
  Cyclic GFR-binding peptide
  MOD_RES (29)..(29): Xaa is C or S
QALRSVKIAKVVGRKPKVKEVQVMIVRSXK

SEQ ID NO: 72389 - protein, 28 aa, Artificial Sequence
  Cyclic GFR-binding peptide
  MOD_RES (2)..(2): Xaa is C or S
TXAPTKLRSVKVAKVDDSSNVIKEVQVN

SEQ ID NO: 72390 - protein, 31 aa, Artificial Sequence
  Cyclic GFR-binding peptide
  MOD_RES (31)..(31): Xaa is C or S
HEPLTVLYYEYVRKKPKLEQLSNRLEEHLEX

SEQ ID NO: 72391 - protein, 25 aa, Artificial Sequence
  Cyclic GFR-binding peptide
EPLPIVYYIGKTPKIEQLSNMIVKS

SEQ ID NO: 72392 - protein, 29 aa, Artificial Sequence
  Cyclic GFR-binding peptide
  MOD_RES (28)..(28): Xaa is C or S
LSNITMQIMDEYDKVVIGEMSEMVVEGXG

SEQ ID NO: 72393 - protein, 26 aa, Artificial Sequence
  Cyclic GFR-binding peptide
LRPVQMRKIDEYDKVVKKATVEMVVE

SEQ ID NO: 72394 - protein, 34 aa, Artificial Sequence
  Cyclic GFR-binding peptide
  MOD_RES (3)..(4): Xaa is C or S
KPXXAPTQLRPVQVRKIDDSSNVIKKATVNMVVR

SEQ ID NO: 72395 - protein, 24 aa, Artificial Sequence
  Cyclic GFR-binding peptide
EPLTVLYYEYVRKKPKLEQLSNRL

SEQ ID NO: 72396 - protein, 26 aa, Artificial Sequence
  Cyclic GFR-binding peptide
KLRPVQVRKIDDSSNVIKKATVNMVV

SEQ ID NO: 72397 - protein, 33 aa, Artificial Sequence
  Cyclic GFR-binding peptide
  MOD_RES (2)..(3): Xaa is C or S
PXXAPTKLRPVQVRKIDDSSNVIKKATVNMVVR

SEQ ID NO: 72398 - protein, 38 aa, Artificial Sequence; identical to SEQ ID NO: 23913
  Cyclic GFR-binding peptide
  MOD_RES (37)..(37): Xaa is C or S

SEQ ID NO: 72399 - protein, 32 aa, Artificial Sequence
  Cyclic GFR-binding peptide
  MOD_RES (29)..(31): Xaa is C or S
QLRPVQVRKIDDSSNVIKKATVNMVVRAXGXH

SEQ ID NO: 72400 - protein, 38 aa, Artificial Sequence; identical to SEQ ID NO: 17485
  Cyclic GFR-binding peptide
  MOD_RES (4)..(36)..(38): Xaa is C or S

SEQ ID NO: 72401 - protein, 26 aa, Artificial Sequence
  Cyclic GFR-binding peptide
PTKLEPLTVLYYDDSSNVIEQLSNNM

SEQ ID NO: 72402 - protein, 36 aa, Artificial Sequence
  Cyclic GFR-binding peptide
  MOD_RES (1)..(2)..(34)..(36): Xaa is C or S
XXAPTQLRSVKVAKVDDSSNVIKEVQVNMVVRAXGX

SEQ ID NO: 72403 - protein, 32 aa, Artificial Sequence
  Cyclic GFR-binding peptide
QVQLEPLTVLYYEIVRKKPIFEQLSNTLEDHL

SEQ ID NO: 72404 - protein, 42 aa, Artificial Sequence
  Cyclic GFR-binding peptide
  MOD_RES (6)..(7)..(39)..(41): Xaa is C or S
TVPKPXXAPTQLRSVKVAKVDDSSNVIKEVQVNMVVRAXGXH

SEQ ID NO: 72405 - protein, 29 aa, Artificial Sequence
  Cyclic GFR-binding peptide
  MOD_RES (2)..(3): Xaa is C or S
PXXVSQDLRPVQIRKIIGKTPKIKKATVM

SEQ ID NO: 72406 - protein, 33 aa, Artificial Sequence
  Cyclic GFR-binding peptide
  MOD_RES (31)..(33): Xaa is C or S
VPQALRSVKIAKVVGRKPKVKEVQVMIVRSXKX

SEQ ID NO: 72407 - protein, 37 aa, Artificial Sequence
  Cyclic GFR-binding peptide
  MOD_RES (6)..(7): Xaa is C or S
KIPKAXXVPTELRPVQMRKIDENEKVVKKATVDMVVE

SEQ ID NO: 72408 - protein, 25 aa, Artificial Sequence
  Cyclic GFR-binding peptide
VPQALRSVKIAKVVGRKPKVKEVQV

SEQ ID NO: 72409 - protein, 37 aa, Artificial Sequence
  Cyclic GFR-binding peptide
  MOD_RES (6)..(7): Xaa is C or S
YVPKPXXAPTKLSNITVQIMDDSSNVIIGEMSNMVVR

SEQ ID NO: 72410 - protein, 31 aa, Artificial Sequence
  Cyclic GFR-binding peptide
  MOD_RES (31)..(31): Xaa is C or S
VSQDLRSVKIAKVIGKTPKIKEVQVMIVKSX

SEQ ID NO: 72411 - protein, 37 aa, Artificial Sequence
  Cyclic GFR-binding peptide
  MOD_RES (5)..(6)..(37): Xaa is C or S
SASPXXVSQDLRSVKIAKVIGKTPKIKEVQVMIVKSX

SEQ ID NO: 72412 - protein, 31 aa, Artificial Sequence
  Cyclic GFR-binding peptide
  MOD_RES (2)..(3): Xaa is C or S
AXXVPTELSNITMQIMDEYDKVVIGEMSEMV

SEQ ID NO: 72413 - protein, 32 aa, Artificial Sequence
  Cyclic GFR-binding peptide
RVHHEPLTVLYYEYVRKKPKLEQLSNRLEEHL

SEQ ID NO: 72414 - protein, 30 aa, Artificial Sequence
  Cyclic GFR-binding peptide
TQVQLEPLTVLYYEIVRKKPIFEQLSNTLE

SEQ ID NO: 72415 - protein, 29 aa, Artificial Sequence
  Cyclic GFR-binding peptide
  MOD_RES (3)..(4): Xaa is C or S
KAXXVPTELSNITMQIMDENEKVVIGEMS

SEQ ID NO: 72416 - protein, 38 aa, Artificial Sequence; identical to SEQ ID NO: 17510
  Cyclic GFR-binding peptide
  MOD_RES (3)..(4)..(36)..(38): Xaa is C or S

SEQ ID NO: 72417 - protein, 35 aa, Artificial Sequence; identical to SEQ ID NO: 17512
  Cyclic GFR-binding peptide
  MOD_RES (4)..(5): Xaa is C or S

SEQ ID NO: 72418 - protein, 27 aa, Artificial Sequence
  Cyclic GFR-binding peptide
  MOD_RES (26)..(26): Xaa is C or S
RPVQIRKIVGRTPKVKKATVMVVKSXK

SEQ ID NO: 72419 - protein, 33 aa, Artificial Sequence
  Cyclic GFR-binding peptide
  MOD_RES (3)..(4): Xaa is C or S
KPXXAPTQLRSVKVAKVDDSSNVIKEVQVNMVV

SEQ ID NO: 72420 - protein, 27 aa, Artificial Sequence
  Cyclic GFR-binding peptide
TKLEPLPVVYYDDSSNVIEQLSNNMVV

SEQ ID NO: 72421 - protein, 25 aa, Artificial Sequence
  Cyclic GFR-binding peptide
PQALRPVQIRKIVGRKPKVKKATVM

SEQ ID NO: 72422 - protein, 31 aa, Artificial Sequence
  Cyclic GFR-binding peptide
  MOD_RES (4)..(4): Xaa is C or S
KPTXAPTKLRPVQVRKIDDSSNVIKKATVNM

SEQ ID NO: 72423 - protein, 33 aa, Artificial Sequence
  Cyclic GFR-binding peptide
  MOD_RES (1)..(2)..(33): Xaa is C or S
XXVPQDLRPVQIRKIVGRTPKVKKATVMVVKSX

SEQ ID NO: 72424 - protein, 32 aa, Artificial Sequence; identical to SEQ ID NO: 23941
  Cyclic GFR-binding peptide
  MOD_RES (1)..(1): Xaa is C or S

SEQ ID NO: 72425 - protein, 31 aa, Artificial Sequence
  Cyclic GFR-binding peptide
  MOD_RES (5)..(6): Xaa is C or S
VPKPXXAPTQLRSVKVAKVDDSSNVIKEVQV

SEQ ID NO: 72426 - protein, 32 aa, Artificial Sequence
  Cyclic GFR-binding peptide
  MOD_RES (31)..(31): Xaa is C or S
VPQDLRPVQIRKIVGRTPKVKKATVMVVKSXK

SEQ ID NO: 72427 - protein, 29 aa, Artificial Sequence
  Cyclic GFR-binding peptide
  MOD_RES (3)..(4): Xaa is C or S
SPXXVPQDLSNITIQIMVGRTPKVIGEMS

SEQ ID NO: 72428 - protein, 23 aa, Artificial Sequence
  Cyclic GFR-binding peptide
TKLEPLTVLYYDDSSNVIEQLSN

SEQ ID NO: 72429 - protein, 39 aa, Artificial Sequence
  Cyclic GFR-binding peptide
  MOD_RES (3)..(3): Xaa is C or S
VKXQPSRVHHEPLTVLYYEYVRKKPKLEQLSNRLEEHLE

SEQ ID NO: 72430 - protein, 37 aa, Artificial Sequence
  Cyclic GFR-binding peptide
  MOD_RES (3)..(4)..(35)..(37): Xaa is C or S
APXXVPQALRSVKIAKVVGRKPKVKEVQVMIVRSXKX

SEQ ID NO: 72431 - protein, 26 aa, Artificial Sequence
  Cyclic GFR-binding peptide
PTELSNITMQIMDEYDKVVIGEMSEM

SEQ ID NO: 72432 - protein, 43 aa, Artificial Sequence; identical to SEQ ID NO: 23954
  Cyclic GFR-binding peptide
  MOD_RES (7)..(41)..(43): Xaa is C or S

SEQ ID NO: 72433 - protein, 28 aa, Artificial Sequence
  Cyclic GFR-binding peptide
  MOD_RES (1)..(2): Xaa is C or S
XXVPQDLSNITIQIMVGRTPKVIGEMSM

SEQ ID NO: 72434 - protein, 28 aa, Artificial Sequence
  Cyclic GFR-binding peptide
  MOD_RES (1)..(2): Xaa is C or S
XXAPTQLSNITVQIMDDSSNVIIGEMSN

SEQ ID NO: 72435 - protein, 27 aa, Artificial Sequence
  Cyclic GFR-binding peptide
  MOD_RES (1)..(1): Xaa is C or S
XAPTKLRPVQVRKIDDSSNVIKKATVN

SEQ ID NO: 72436 - protein, 23 aa, Artificial Sequence
  Cyclic GFR-binding peptide
LEPLTMLYYDEYDKVVEQLSNEM

SEQ ID NO: 72437 - protein, 22 aa, Artificial Sequence
  Cyclic GFR-binding peptide
ELEPLTMLYYDENEKVVEQLSN

SEQ ID NO: 72438 - protein, 34 aa, Artificial Sequence; identical to SEQ ID NO: 23959
  Cyclic GFR-binding peptide
  MOD_RES (31)..(33): Xaa is C or S

SEQ ID NO: 72439 - protein, 33 aa, Artificial Sequence; identical to SEQ ID NO: 17539
  Cyclic GFR-binding peptide
  MOD_RES (1)..(33): Xaa is C or S

SEQ ID NO: 72440 - protein, 30 aa, Artificial Sequence
  Cyclic GFR-binding peptide
VPTELRPVQMRKIDENEKVVKKATVDMVVE

SEQ ID NO: 72441 - protein, 27 aa, Artificial Sequence
  Cyclic GFR-binding peptide
EPLPVVYYEIVRKKPIFEQLSNTLEDH

SEQ ID NO: 72442 - protein, 38 aa, Artificial Sequence
  Cyclic GFR-binding peptide
  MOD_RES (35)..(37): Xaa is C or S
SRVHHEPLPVVYYEYVRKKPKLEQLSNRLEEHLEXAXA

SEQ ID NO: 72443 - protein, 35 aa, Artificial Sequence
  Cyclic GFR-binding peptide
  MOD_RES (2)..(2): Xaa is C or S
KXQPSRVHHEPLPVVYYEYVRKKPKLEQLSNRLEE

SEQ ID NO: 72444 - protein, 25 aa, Artificial Sequence
  Cyclic GFR-binding peptide
LSNITIQIMVGRTPKVIGEMSMVVK

SEQ ID NO: 72445 - protein, 34 aa, Artificial Sequence
  Cyclic GFR-binding peptide
  MOD_RES (1)..(2)..(34): Xaa is C or S
XXAPTKLSNITVQIMDDSSNVIIGEMSNMVVRSX

SEQ ID NO: 72446 - protein, 30 aa, Artificial Sequence
  Cyclic GFR-binding peptide
  MOD_RES (4)..(5): Xaa is C or S
PKPXXAPTKLSNITVQIMDDSSNVIIGEMS

SEQ ID NO: 72447 - protein, 30 aa, Artificial Sequence; identical to SEQ ID NO: 17546
  Cyclic GFR-binding peptide
  MOD_RES (3)..(4): Xaa is C or S

SEQ ID NO: 72448 - protein, 20 aa, Artificial Sequence
  Cyclic GFR-binding peptide
EPLPMVYYDENEKVVEQLSN

SEQ ID NO: 72449 - protein, 35 aa, Artificial Sequence; identical to SEQ ID NO: 17551
  Cyclic GFR-binding peptide
  MOD_RES (1)..(32)..(34): Xaa is C or S

SEQ ID NO: 72450 - protein, 29 aa, Artificial Sequence
  Cyclic GFR-binding peptide
SRVHHSNITVQIMEYVRKKPKLIGEMSRL

SEQ ID NO: 72451 - protein, 35 aa, Artificial Sequence; identical to SEQ ID NO: 17552
  Cyclic GFR-binding peptide
  MOD_RES (6)..(6): Xaa is C or S

SEQ ID NO: 72452 - protein, 36 aa, Artificial Sequence
  Cyclic GFR-binding peptide
  MOD_RES (36)..(36): Xaa is C or S
PTQVQLEPLTVLYYEIVRKKPIFEQLSNTLEDHLAX

SEQ ID NO: 72453 - protein, 32 aa, Artificial Sequence
  Cyclic GFR-binding peptide
  MOD_RES (1)..(32): Xaa is C or S
XVPQDLRSVKIAKVVGRTPKVKEVQVMVVKSX

SEQ ID NO: 72454 - protein, 30 aa, Artificial Sequence; identical to SEQ ID NO: 23973
  Cyclic GFR-binding peptide
  MOD_RES (29)..(29): Xaa is C or S

SEQ ID NO: 72455 - protein, 37 aa, Artificial Sequence
  Cyclic GFR-binding peptide
  MOD_RES (3)..(4)..(36): Xaa is C or S
KAXXVPTELRPVQMRKIDEYDKVVKKATVEMVVEGXG

SEQ ID NO: 72456 - protein, 41 aa, Artificial Sequence; identical to SEQ ID NO: 23978
  Cyclic GFR-binding peptide
  MOD_RES (2)..(39)..(41): Xaa is C or S

SEQ ID NO: 72457 - protein, 34 aa, Artificial Sequence; identical to SEQ ID NO: 17559
  Cyclic GFR-binding peptide
  MOD_RES (31)..(33): Xaa is C or S

SEQ ID NO: 72458 - protein, 30 aa, Artificial Sequence; identical to SEQ ID NO: 17562
  Cyclic GFR-binding peptide
  MOD_RES (30)..(30): Xaa is C or S

SEQ ID NO: 72459 - protein, 30 aa, Artificial Sequence
  Cyclic GFR-binding peptide
  MOD_RES (1)..(1): Xaa is C or S
XVPTEEEPLTMLYYRIKPHQGQHEQLSNFL

SEQ ID NO: 72460 - protein, 33 aa, Artificial Sequence
  Cyclic GFR-binding peptide
  MOD_RES (2)..(2): Xaa is C or S
EXVPTEEEPLPMVYYRIKPHQGQHEQLSNFLQH

SEQ ID NO: 72461 - protein, 30 aa, Artificial Sequence; identical to SEQ ID NO: 17567
  Cyclic GFR-binding peptide
  MOD_RES (29)..(29): Xaa is C or S

SEQ ID NO: 72462 - protein, 35 aa, Artificial Sequence; identical to SEQ ID NO: 17568
  Cyclic GFR-binding peptide
  MOD_RES (2)..(3)..(35): Xaa is C or S

SEQ ID NO: 72463 - protein, 29 aa, Artificial Sequence
  Cyclic GFR-binding peptide
EPLTVLYYEIVRKKPIFEQLSNTLEDHLA

SEQ ID NO: 72464 - protein, 24 aa, Artificial Sequence
  Cyclic GFR-binding peptide
PTELRSVKMAKVDENEKVVKEVQV

SEQ ID NO: 72465 - protein, 28 aa, Artificial Sequence
  Cyclic GFR-binding peptide
PTQLSNITVQIMDDSSNVIIGEMSNMVV

SEQ ID NO: 72466 - protein, 35 aa, Artificial Sequence
  Cyclic GFR-binding peptide
QPSRVHHEPLTVLYYEYVRKKPKLEQLSNRLEEHL

SEQ ID NO: 72467 - protein, 30 aa, Artificial Sequence
  Cyclic GFR-binding peptide
  MOD_RES (28)..(30): Xaa is C or S
DLRPVQIRKIIGKTPKIKKATVMIVKSXKX

SEQ ID NO: 72468 - protein, 43 aa, Artificial Sequence
  Cyclic GFR-binding peptide
  MOD_RES (3)..(40)..(42): Xaa is C or S
VQXRPTQVQLEPLTVLYYEIVRKKPIFEQLSNTLEDHLAXKXE

SEQ ID NO: 72469 - protein, 22 aa, Artificial Sequence
  Cyclic GFR-binding peptide
LSNITIQIMVGRKPKVIGEMSM

SEQ ID NO: 72470 - protein, 25 aa, Artificial Sequence
  Cyclic GFR-binding peptide
ELEPLPMVYYDEYDKVVEQLSNEMV

SEQ ID NO: 72471 - protein, 25 aa, Artificial Sequence
  Cyclic GFR-binding peptide
VSQDLSNITIQIMIGKTPKIIGEMS

SEQ ID NO: 72472 - protein, 28 aa, Artificial Sequence
  Cyclic GFR-binding peptide
  MOD_RES (1)..(2): Xaa is C or S
XXVPTELEPLPMVYYDENEKVVEQLSND

SEQ ID NO: 72473 - protein, 29 aa, Artificial Sequence
  Cyclic GFR-binding peptide
  MOD_RES (2)..(2): Xaa is C or S
EXVPTEEEPLPMVYYRIKPHQGQHEQLSN

SEQ ID NO: 72474 - protein, 28 aa, Artificial Sequence
  Cyclic GFR-binding peptide
QVQLRSVKVAKVEIVRKKPIFKEVQVTL

SEQ ID NO: 72475 - protein, 36 aa, Artificial Sequence
  Cyclic GFR-binding peptide
  MOD_RES (4)..(4): Xaa is C or S
GLEXVPTEEEPLPMVYYRIKPHQGQHEQLSNFLQHN

SEQ ID NO: 72476 - protein, 38 aa, Artificial Sequence; identical to SEQ ID NO: 24002
  Cyclic GFR-binding peptide
  MOD_RES (5)..(5): Xaa is C or S

SEQ ID NO: 72477 - protein, 28 aa, Artificial Sequence
  Cyclic GFR-binding peptide
  MOD_RES (28)..(28): Xaa is C or S
LEPLTVLYYDDSSNVIEQLSNNMVVRSX

SEQ ID NO: 72478 - protein, 39 aa, Artificial Sequence
  Cyclic GFR-binding peptide
  MOD_RES (5)..(6)..(38): Xaa is C or S
IPKAXXVPTELSNITMQIMDEYDKVVIGEMSEMVVEGXG

SEQ ID NO: 72479 - protein, 34 aa, Artificial Sequence; identical to SEQ ID NO: 17591
  Cyclic GFR-binding peptide
  MOD_RES (5)..(6): Xaa is C or S

SEQ ID NO: 72480 - protein, 34 aa, Artificial Sequence; identical to SEQ ID NO: 17592
  Cyclic GFR-binding peptide
  MOD_RES (4)..(5): Xaa is C or S

SEQ ID NO: 72481 - protein, 38 aa, Artificial Sequence
  Cyclic GFR-binding peptide
  MOD_RES (3)..(4)..(35)..(37): Xaa is C or S
SPXXVSQDLRSVKIAKVIGKTPKIKEVQVMIVKSXKXS

SEQ ID NO: 72482 - protein, 30 aa, Artificial Sequence
  Cyclic GFR-binding peptide
VPTELSNITMQIMDEYDKVVIGEMSEMVVE

SEQ ID NO: 72483 - protein, 23 aa, Artificial Sequence
  Cyclic GFR-binding peptide
ALRPVQIRKIVGRKPKVKKATVM

SEQ ID NO: 72484 - protein, 34 aa, Artificial Sequence; identical to SEQ ID NO: 24011
  Cyclic GFR-binding peptide
  MOD_RES (4)..(4): Xaa is C or S

SEQ ID NO: 72485 - protein, 31 aa, Artificial Sequence
  Cyclic GFR-binding peptide
  MOD_RES (2)..(3): Xaa is C or S
PXXAPTQLRPVQVRKIDDSSNVIKKATVNMV

SEQ ID NO: 72486 - protein, 29 aa, Artificial Sequence
  Cyclic GFR-binding peptide
VPQDLRSVKIAKVVGRTPKVKEVQVMVVK

SEQ ID NO: 72487 - protein, 39 aa, Artificial Sequence; identical to SEQ ID NO: 17602
  Cyclic GFR-binding peptide
  MOD_RES (6)..(38): Xaa is C or S

SEQ ID NO: 72488 - protein, 30 aa, Artificial Sequence
  Cyclic GFR-binding peptide
  MOD_RES (1)..(1): Xaa is C or S
XVPTELSNITMQIMDEYDKVVIGEMSEMVV

SEQ ID NO: 72489 - protein, 29 aa, Artificial Sequence
  Cyclic GFR-binding peptide
  MOD_RES (27)..(29): Xaa is C or S
LSNITIQIMVGRKPKVIGEMSMIVRSXKX

SEQ ID NO: 72490 - protein, 35 aa, Artificial Sequence; identical to SEQ ID NO: 17605
  Cyclic GFR-binding peptide
  MOD_RES (32)..(34): Xaa is C or S

SEQ ID NO: 72491 - protein, 31 aa, Artificial Sequence
  Cyclic GFR-binding peptide
  MOD_RES (3)..(4): Xaa is C or S
APXXVPQALRSVKIAKVVGRKPKVKEVQVMI

SEQ ID NO: 72492 - protein, 36 aa, Artificial Sequence; identical to SEQ ID NO: 17606
  Cyclic GFR-binding peptide
  MOD_RES (1)..(33)..(35): Xaa is C or S

SEQ ID NO: 72493 - protein, 33 aa, Artificial Sequence
  Cyclic GFR-binding peptide
  MOD_RES (5)..(6): Xaa is C or S
SASPXXVPQDLRPVQIRKIVGRTPKVKKATVMV

SEQ ID NO: 72494 - protein, 36 aa, Artificial Sequence
  Cyclic GFR-binding peptide
  MOD_RES (35)..(35): Xaa is C or S
SRVHHEPLPVVYYEYVRKKPKLEQLSNRLEEHLEXA

SEQ ID NO: 72495 - protein, 38 aa, Artificial Sequence
  Cyclic GFR-binding peptide
  MOD_RES (5)..(6)..(38): Xaa is C or S
IPKAXXVPTELSNITMQIMDEYDKVVIGEMSEMVVEGX

SEQ ID NO: 72496 - protein, 27 aa, Artificial Sequence
  Cyclic GFR-binding peptide
EPLTVLYYEIVRKKPIFEQLSNTLEDH

SEQ ID NO: 72497 - protein, 24 aa, Artificial Sequence
  Cyclic GFR-binding peptide
RSVKVAKVDDSSNVIKEVQVNMVV

SEQ ID NO: 72498 - protein, 35 aa, Artificial Sequence
  Cyclic GFR-binding peptide
  MOD_RES (4)..(5): Xaa is C or S
ASPXXVSQDLRSVKIAKVIGKTPKIKEVQVMIVKS

SEQ ID NO: 72499 - protein, 26 aa, Artificial Sequence
  Cyclic GFR-binding peptide
LSNITMQIMDENEKVVIGEMSDMVVE

SEQ ID NO: 72500 - protein, 41 aa, Artificial Sequence
  Cyclic GFR-binding peptide
  MOD_RES (6)..(40): Xaa is C or S
DEGLEXVPTEEEPLPMVYYRIKPHQGQHEQLSNFLQHNKXE

SEQ ID NO: 72501 - protein, 33 aa, Artificial Sequence; identical to SEQ ID NO: 17620
  Cyclic GFR-binding peptide
  MOD_RES (32)..(32): Xaa is C or S

SEQ ID NO: 72502 - protein, 29 aa, Artificial Sequence
  Cyclic GFR-binding peptide
  MOD_RES (29)..(29): Xaa is C or S
QDLRPVQIRKIVGRTPKVKKATVMVVKSX

SEQ ID NO: 72503 - protein, 32 aa, Artificial Sequence; identical to SEQ ID NO: 24027
  Cyclic GFR-binding peptide

SEQ ID NO: 72504 - protein, 34 aa, Artificial Sequence
  Cyclic GFR-binding peptide
  MOD_RES (1)..(33): Xaa is C or S
XAPTQLSNITVQIMDDSSNVIIGEMSNMVVRAXG

SEQ ID NO: 72505 - protein, 24 aa, Artificial Sequence
  Cyclic GFR-binding peptide
RPVQIRKIVGRTPKVKKATVMVVK

SEQ ID NO: 72506 - protein, 28 aa, Artificial Sequence
  Cyclic GFR-binding peptide
HHSNITVQIMEYVRKKPKLIGEMSRLEE

SEQ ID NO: 72507 - protein, 34 aa, Artificial Sequence; identical to SEQ ID NO: 17625
  Cyclic GFR-binding peptide
  MOD_RES (1)..(2)..(34): Xaa is C or S

SEQ ID NO: 72508 - protein, 27 aa, Artificial Sequence
  Cyclic GFR-binding peptide
VPQALSNITIQIMVGRKPKVIGEMSMI

SEQ ID NO: 72509 - protein, 34 aa, Artificial Sequence
  Cyclic GFR-binding peptide
  MOD_RES (31)..(33): Xaa is C or S
VPQALRPVQIRKIVGRKPKVKKATVMIVRSXKXS

SEQ ID NO: 72510 - protein, 29 aa, Artificial Sequence
  Cyclic GFR-binding peptide
  MOD_RES (28)..(28): Xaa is C or S
DLRPVQIRKIVGRTPKVKKATVMVVKSXK

SEQ ID NO: 72511 - protein, 27 aa, Artificial Sequence
  Cyclic GFR-binding peptide
SRVHHRPVQVRKIEYVRKKPKLKKATV

SEQ ID NO: 72512 - protein, 33 aa, Artificial Sequence
  Cyclic GFR-binding peptide
  MOD_RES (2)..(3): Xaa is C or S
AXXVPTELRPVQMRKIDEYDKVVKKATVEMVVE

SEQ ID NO: 72513 - protein, 32 aa, Artificial Sequence
  Cyclic GFR-binding peptide
  MOD_RES (32)..(32): Xaa is C or S
QLEPLTVLYYEIVRKKPIFEQLSNTLEDHLAX

SEQ ID NO: 72514 - protein, 35 aa, Artificial Sequence
  Cyclic GFR-binding peptide
  MOD_RES (4)..(5): Xaa is C or S
PKAXXVPTELRSVKMAKVDEYDKVVKEVQVEMVVE

SEQ ID NO: 72515 - protein, 28 aa, Artificial Sequence
  Cyclic GFR-binding peptide
PTKLRPVQVRKIDDSSNVIKKATVNMVV

SEQ ID NO: 72516 - protein, 37 aa, Artificial Sequence; identical to SEQ ID NO: 24041
  Cyclic GFR-binding peptide
  MOD_RES (34)..(36): Xaa is C or S

SEQ ID NO: 72517 - protein, 30 aa, Artificial Sequence
  Cyclic GFR-binding peptide
  MOD_RES (29)..(29): Xaa is C or S
QALSNITIQIMVGRKPKVIGEMSMIVRSXK

SEQ ID NO: 72518 - protein, 31 aa, Artificial Sequence; identical to SEQ ID NO: 17638
  Cyclic GFR-binding peptide
  MOD_RES (1)..(2): Xaa is C or S

SEQ ID NO: 72519 - protein, 29 aa, Artificial Sequence
  Cyclic GFR-binding peptide
  MOD_RES (27)..(29): Xaa is C or S
EPLPMVYYDEYDKVVEQLSNEMVVEGXGX

SEQ ID NO: 72520 - protein, 32 aa, Artificial Sequence
  Cyclic GFR-binding peptide
  MOD_RES (2)..(3): Xaa is C or S
AXXVPTELSNITMQIMDENEKVVIGEMSDMVV

SEQ ID NO: 72521 - protein, 31 aa, Artificial Sequence
  Cyclic GFR-binding peptide
  MOD_RES (28)..(30): Xaa is C or S
LRPVQMRKIDENEKVVKKATVDMVVEGXGXR

SEQ ID NO: 72522 - protein, 35 aa, Artificial Sequence
  Cyclic GFR-binding peptide
  MOD_RES (1)..(33)..(35): Xaa is C or S
XAPTKLSNITVQIMDDSSNVIIGEMSNMVVRSXGX

SEQ ID NO: 72523 - protein, 30 aa, Artificial Sequence
  Cyclic GFR-binding peptide
  MOD_RES (1)..(2): Xaa is C or S
XXVPTELSNITMQIMDEYDKVVIGEMSEMV

SEQ ID NO: 72524 - protein, 26 aa, Artificial Sequence
  Cyclic GFR-binding peptide
ALRPVQIRKIVGRKPKVKKATVMIVR

SEQ ID NO: 72525 - protein, 31 aa, Artificial Sequence; identical to SEQ ID NO: 24045
  Cyclic GFR-binding peptide

SEQ ID NO: 72526 - protein, 38 aa, Artificial Sequence
  Cyclic GFR-binding peptide
  MOD_RES (4)..(5)..(37): Xaa is C or S
PKAXXVPTELRPVQMRKIDEYDKVVKKATVEMVVEGXG

SEQ ID NO: 72527 - protein, 34 aa, Artificial Sequence
  Cyclic GFR-binding peptide
  MOD_RES (6)..(7): Xaa is C or S
YVPKPXXAPTKLRPVQVRKIDDSSNVIKKATVNM

SEQ ID NO: 72528 - protein, 42 aa, Artificial Sequence
  Cyclic GFR-binding peptide
  MOD_RES (6)..(7)..(39)..(41): Xaa is C or S
TVPKPXXAPTQLSNITVQIMDDSSNVIIGEMSNMVVRAXGXH

SEQ ID NO: 72529 - protein, 28 aa, Artificial Sequence
  Cyclic GFR-binding peptide
  MOD_RES (1)..(1): Xaa is C or S
XVPQALRPVQIRKIVGRKPKVKKATVMI

SEQ ID NO: 72530 - protein, 32 aa, Artificial Sequence; identical to SEQ ID NO: 24048
  Cyclic GFR-binding peptide

SEQ ID NO: 72531 - protein, 33 aa, Artificial Sequence; identical to SEQ ID NO: 17654
  Cyclic GFR-binding peptide
  MOD_RES (2)..(3): Xaa is C or S

SEQ ID NO: 72532 - protein, 36 aa, Artificial Sequence
  Cyclic GFR-binding peptide
  MOD_RES (1)..(33)..(35): Xaa is C or S
XAPTQLSNITVQIMDDSSNVIIGEMSNMVVRAXGXH

SEQ ID NO: 72533 - protein, 37 aa, Artificial Sequence
  Cyclic GFR-binding peptide
  MOD_RES (2)..(3)..(35)..(37): Xaa is C or S
PXXAPTQLSNITVQIMDDSSNVIIGEMSNMVVRAXGX

SEQ ID NO: 72534 - protein, 29 aa, Artificial Sequence
  Cyclic GFR-binding peptide
  MOD_RES (1)..(2): Xaa is C or S
XXVPTELRSVKMAKVDENEKVVKEVQVDM

SEQ ID NO: 72535 - protein, 34 aa, Artificial Sequence
  Cyclic GFR-binding peptide
  MOD_RES (4)..(5): Xaa is C or S
PKAXXVPTELRPVQMRKIDENEKVVKKATVDMVV

SEQ ID NO: 72536 - protein, 34 aa, Artificial Sequence
  Cyclic GFR-binding peptide
  MOD_RES (3)..(3): Xaa is C or S
LEXVPTEEEPLTMLYYRIKPHQGQHEQLSNFLQH

SEQ ID NO: 72537 - protein, 28 aa, Artificial Sequence
  Cyclic GFR-binding peptide
  MOD_RES (1)..(1): Xaa is C or S
XVPQDLRSVKIAKVVGRTPKVKEVQVMV

SEQ ID NO: 72538 - protein, 26 aa, Artificial Sequence
  Cyclic GFR-binding peptide
DLRPVQIRKIVGRTPKVKKATVMVVK

SEQ ID NO: 72539 - protein, 36 aa, Artificial Sequence
  Cyclic GFR-binding peptide
  MOD_RES (1)..(1): Xaa is C or S
XQPSRVHHEPLTVLYYEYVRKKPKLEQLSNRLEEHL

SEQ ID NO: 72540 - protein, 27 aa, Artificial Sequence
  Cyclic GFR-binding peptide
QDLSNITIQIMVGRTPKVIGEMSMVVK

SEQ ID NO: 72541 - protein, 39 aa, Artificial Sequence; identical to SEQ ID NO: 24060
  Cyclic GFR-binding peptide
  MOD_RES (36)..(38): Xaa is C or S

SEQ ID NO: 72542 - protein, 32 aa, Artificial Sequence; identical to SEQ ID NO: 17660
  Cyclic GFR-binding peptide
  MOD_RES (1)..(2): Xaa is C or S

SEQ ID NO: 72543 - protein, 32 aa, Artificial Sequence
  Cyclic GFR-binding peptide
  MOD_RES (2)..(3): Xaa is C or S
PXXAPTQLRPVQVRKIDDSSNVIKKATVNMVV

SEQ ID NO: 72544 - protein, 38 aa, Artificial Sequence
  Cyclic GFR-binding peptide
  MOD_RES (35)..(37): Xaa is C or S
TQVQLEPLPVVYYEIVRKKPIFEQLSNTLEDHLAXKXE

SEQ ID NO: 72545 - protein, 32 aa, Artificial Sequence
  Cyclic GFR-binding peptide
  MOD_RES (31)..(31): Xaa is C or S
PTELRSVKMAKVDENEKVVKEVQVDMVVEGXG

SEQ ID NO: 72546 - protein, 30 aa, Artificial Sequence
  Cyclic GFR-binding peptide
  MOD_RES (2)..(3): Xaa is C or S
PXXVPQALRSVKIAKVVGRKPKVKEVQVMI

SEQ ID NO: 72547 - protein, 25 aa, Artificial Sequence
  Cyclic GFR-binding peptide
EPLTILYYVGRKPKVEQLSNMIVRS

SEQ ID NO: 72548 - protein, 37 aa, Artificial Sequence
  Cyclic GFR-binding peptide
  MOD_RES (1)..(2)..(34)..(36): Xaa is C or S
XXVPTELSNITMQIMDENEKVVIGEMSDMVVEGXGXR

SEQ ID NO: 72549 - protein, 32 aa, Artificial Sequence
  Cyclic GFR-binding peptide
  MOD_RES (1)..(1): Xaa is C or S
XAPTQLRSVKVAKVDDSSNVIKEVQVNMVVRA

SEQ ID NO: 72550 - protein, 34 aa, Artificial Sequence
  Cyclic GFR-binding peptide
  MOD_RES (31)..(33): Xaa is C or S
HEPLPVVYYEYVRKKPKLEQLSNRLEEHLEXAXA

SEQ ID NO: 72551 - protein, 29 aa, Artificial Sequence
  Cyclic GFR-binding peptide
  MOD_RES (29)..(29): Xaa is C or S
ELRSVKMAKVDENEKVVKEVQVDMVVEGX

SEQ ID NO: 72552 - protein, 30 aa, Artificial Sequence
  Cyclic GFR-binding peptide
  MOD_RES (30)..(30): Xaa is C or S
TKLRPVQVRKIDDSSNVIKKATVNMVVRSX

SEQ ID NO: 72553 - protein, 35 aa, Artificial Sequence; identical to SEQ ID NO: 17686
  Cyclic GFR-binding peptide
  MOD_RES (2)..(34): Xaa is C or S

SEQ ID NO: 72554 - protein, 30 aa, Artificial Sequence
  Cyclic GFR-binding peptide
  MOD_RES (29)..(29): Xaa is C or S
EPLPMVYYRIKPHQGQHEQLSNFLQHNKXE

SEQ ID NO: 72555 - protein, 35 aa, Artificial Sequence
  Cyclic GFR-binding peptide
  MOD_RES (4)..(4): Xaa is C or S
KPTXAPTKLRPVQVRKIDDSSNVIKKATVNMVVRS

SEQ ID NO: 72556 - protein, 28 aa, Artificial Sequence
  Cyclic GFR-binding peptide
APTQLEPLPVVYYDDSSNVIEQLSNNMV

SEQ ID NO: 72557 - protein, 35 aa, Artificial Sequence; identical to SEQ ID NO: 17690
  Cyclic GFR-binding peptide
  MOD_RES (32)..(34): Xaa is C or S

SEQ ID NO: 72558 - protein, 35 aa, Artificial Sequence
  Cyclic GFR-binding peptide
  MOD_RES (1)..(32)..(34): Xaa is C or S
XVPQALRSVKIAKVVGRKPKVKEVQVMIVRSXKXS

SEQ ID NO: 72559 - protein, 34 aa, Artificial Sequence; identical to SEQ ID NO: 24073
  Cyclic GFR-binding peptide
  MOD_RES (34)..(34): Xaa is C or S

SEQ ID NO: 72560 - protein, 32 aa, Artificial Sequence
  Cyclic GFR-binding peptide
  MOD_RES (1)..(32): Xaa is C or S
XVPQDLSNITIQIMVGRTPKVIGEMSMVVKSX

SEQ ID NO: 72561 - protein, 30 aa, Artificial Sequence
  Cyclic GFR-binding peptide
  MOD_RES (28)..(30): Xaa is C or S
DLRSVKIAKVIGKTPKIKEVQVMIVKSXKX

SEQ ID NO: 72562 - protein, 37 aa, Artificial Sequence; identical to SEQ ID NO: 17694
  Cyclic GFR-binding peptide
  MOD_RES (5)..(6)..(37): Xaa is C or S

SEQ ID NO: 72563 - protein, 35 aa, Artificial Sequence; identical to SEQ ID NO: 17695
  Cyclic GFR-binding peptide
  MOD_RES (1)..(2)..(33)..(35): Xaa is C or S

SEQ ID NO: 72564 - protein, 29 aa, Artificial Sequence
  Cyclic GFR-binding peptide
APTKLRPVQVRKIDDSSNVIKKATVNMVV

SEQ ID NO: 72565 - protein, 36 aa, Artificial Sequence; identical to SEQ ID NO: 24077
  Cyclic GFR-binding peptide
  MOD_RES (3)..(3): Xaa is C or S

SEQ ID NO: 72566 - protein, 24 aa, Artificial Sequence
  Cyclic GFR-binding peptide
QDLSNITIQIMIGKTPKIIGEMSM

SEQ ID NO: 72567 - protein, 31 aa, Artificial Sequence
  Cyclic GFR-binding peptide
  MOD_RES (2)..(3): Xaa is C or S
AXXVPTELRSVKMAKVDEYDKVVKEVQVEMV

SEQ ID NO: 72568 - protein, 36 aa, Artificial Sequence; identical to SEQ ID NO: 17699
  Cyclic GFR-binding peptide
  MOD_RES (1)..(33)..(35): Xaa is C or S

SEQ ID NO: 72569 - protein, 31 aa, Artificial Sequence; identical to SEQ ID NO: 17704
  Cyclic GFR-binding peptide
  MOD_RES (29)..(31): Xaa is C or S

SEQ ID NO: 72570 - protein, 33 aa, Artificial Sequence; identical to SEQ ID NO: 24079
  Cyclic GFR-binding peptide

SEQ ID NO: 72571 - protein, 34 aa, Artificial Sequence; identical to SEQ ID NO: 17707
  Cyclic GFR-binding peptide
  MOD_RES (6)..(7): Xaa is C or S

SEQ ID NO: 72572 - protein, 29 aa, Artificial Sequence
  Cyclic GFR-binding peptide
  MOD_RES (1)..(2): Xaa is C or S
XXAPTKLEPLTVLYYDDSSNVIEQLSNNM

SEQ ID NO: 72573 - protein, 31 aa, Artificial Sequence; identical to SEQ ID NO: 24082
  Cyclic GFR-binding peptide

SEQ ID NO: 72574 - protein, 23 aa, Artificial Sequence
  Cyclic GFR-binding peptide
QALRPVQIRKIVGRKPKVKKATV

SEQ ID NO: 72575 - protein, 28 aa, Artificial Sequence
  Cyclic GFR-binding peptide
TEERPVQMRKIRIKPHQGQHKKATVFLQ

SEQ ID NO: 72576 - protein, 36 aa, Artificial Sequence; identical to SEQ ID NO: 24087
  Cyclic GFR-binding peptide
  MOD_RES (33)..(35): Xaa is C or S

SEQ ID NO: 72577 - protein, 26 aa, Artificial Sequence
  Cyclic GFR-binding peptide
LEPLPMVYYDENEKVVEQLSNDMVVE

SEQ ID NO: 72578 - protein, 26 aa, Artificial Sequence
  Cyclic GFR-binding peptide
RSVKVAKVEIVRKKPIFKEVQVTLED

SEQ ID NO: 72579 - protein, 21 aa, Artificial Sequence
  Cyclic GFR-binding peptide
LEPLTILYYVGRKPKVEQLSN

SEQ ID NO: 72580 - protein, 25 aa, Artificial Sequence
  Cyclic GFR-binding peptide
TEEEPLPMVYYRIKPHQGQHEQLSN

SEQ ID NO: 72581 - protein, 32 aa, Artificial Sequence; identical to SEQ ID NO: 17724
  Cyclic GFR-binding peptide
  MOD_RES (1)..(1): Xaa is C or S

SEQ ID NO: 72582 - protein, 41 aa, Artificial Sequence; identical to SEQ ID NO: 17725
  Cyclic GFR-binding peptide
  MOD_RES (5)..(6)..(38)..(40): Xaa is C or S

SEQ ID NO: 72583 - protein, 32 aa, Artificial Sequence; identical to SEQ ID NO: 24097
  Cyclic GFR-binding peptide

SEQ ID NO: 72584 - protein, 25 aa, Artificial Sequence
  Cyclic GFR-binding peptide
SNITMQIMDEYDKVVIGEMSEMVVE

SEQ ID NO: 72585 - protein, 32 aa, Artificial Sequence
  Cyclic GFR-binding peptide
  MOD_RES (1)..(2): Xaa is C or S
XXVPQDLSNITIQIMVGRTPKVIGEMSMVVKS

SEQ ID NO: 72586 - protein, 33 aa, Artificial Sequence
  Cyclic GFR-binding peptide
  MOD_RES (3)..(3): Xaa is C or S
PTXAPTKLRPVQVRKIDDSSNVIKKATVNMVVR

SEQ ID NO: 72587 - protein, 34 aa, Artificial Sequence
  Cyclic GFR-binding peptide
  MOD_RES (7)..(7): Xaa is C or S
HVTKPTXAPTKLRPVQVRKIDDSSNVIKKATVNM

SEQ ID NO: 72588 - protein, 35 aa, Artificial Sequence
  Cyclic GFR-binding peptide
  MOD_RES (5)..(5): Xaa is C or S
TKPTXAPTKLSNITVQIMDDSSNVIIGEMSNMVVR

SEQ ID NO: 72589 - protein, 32 aa, Artificial Sequence
  Cyclic GFR-binding peptide
  MOD_RES (30)..(32): Xaa is C or S
EPLTVLYYEIVRKKPIFEQLSNTLEDHLAXKX

SEQ ID NO: 72590 - protein, 31 aa, Artificial Sequence
  Cyclic GFR-binding peptide
RVHHEPLPVVYYEYVRKKPKLEQLSNRLEEH

SEQ ID NO: 72591 - protein, 34 aa, Artificial Sequence
  Cyclic GFR-binding peptide
  MOD_RES (4)..(5): Xaa is C or S
PKPXXAPTQLRSVKVAKVDDSSNVIKEVQVNMVV

SEQ ID NO: 72592 - protein, 26 aa, Artificial Sequence
  Cyclic GFR-binding peptide
QLSNITVQIMDDSSNVIIGEMSNMVV

SEQ ID NO: 72593 - protein, 32 aa, Artificial Sequence; identical to SEQ ID NO: 17737
  Cyclic GFR-binding peptide
  MOD_RES (4)..(5): Xaa is C or S

SEQ ID NO: 72594 - protein, 29 aa, Artificial Sequence
  Cyclic GFR-binding peptide
  MOD_RES (1)..(1): Xaa is C or S
XVPTELRPVQMRKIDENEKVVKKATVDMV

SEQ ID NO: 72595 - protein, 25 aa, Artificial Sequence
  Cyclic GFR-binding peptide
VHHEPLTVLYYEYVRKKPKLEQLSN

SEQ ID NO: 72596 - protein, 40 aa, Artificial Sequence
  Cyclic GFR-binding peptide
  MOD_RES (5)..(6)..(38)..(40): Xaa is C or S
VPKPXXAPTQLRSVKVAKVDDSSNVIKEVQVNMVVRAXGX

SEQ ID NO: 72597 - protein, 35 aa, Artificial Sequence; identical to SEQ ID NO: 17742
  Cyclic GFR-binding peptide
  MOD_RES (5)..(5): Xaa is C or S

SEQ ID NO: 72598 - protein, 25 aa, Artificial Sequence
  Cyclic GFR-binding peptide
VQLRSVKVAKVEIVRKKPIFKEVQV

SEQ ID NO: 72599 - protein, 43 aa, Artificial Sequence; identical to SEQ ID NO: 24114
  Cyclic GFR-binding peptide
  MOD_RES (4)..(41)..(43): Xaa is C or S

SEQ ID NO: 72600 - protein, 27 aa, Artificial Sequence
  Cyclic GFR-binding peptide
VPTELEPLTMLYYDEYDKVVEQLSNEM

SEQ ID NO: 72601 - protein, 31 aa, Artificial Sequence
  Cyclic GFR-binding peptide
  MOD_RES (1)..(2): Xaa is C or S
XXVPQDLRPVQIRKIVGRTPKVKKATVMVVK

SEQ ID NO: 72602 - protein, 28 aa, Artificial Sequence
  Cyclic GFR-binding peptide
PTQVQLEPLTVLYYEIVRKKPIFEQLSN

SEQ ID NO: 72603 - protein, 29 aa, Artificial Sequence
  Cyclic GFR-binding peptide
  MOD_RES (26)..(28): Xaa is C or S
EPLPIVYYVGRTPKVEQLSNMVVKSXKXS

SEQ ID NO: 72604 - protein, 36 aa, Artificial Sequence
  Cyclic GFR-binding peptide
  MOD_RES (4)..(5): Xaa is C or S
PKAXXVPTELRPVQMRKIDEYDKVVKKATVEMVVEG

SEQ ID NO: 72605 - protein, 31 aa, Artificial Sequence; identical to SEQ ID NO: 24119
  Cyclic GFR-binding peptide
  MOD_RES (30)..(30): Xaa is C or S

SEQ ID NO: 72606 - protein, 23 aa, Artificial Sequence
  Cyclic GFR-binding peptide
QDLEPLPIVYYVGRTPKVEQLSN

SEQ ID NO: 72607 - protein, 33 aa, Artificial Sequence
  Cyclic GFR-binding peptide
  MOD_RES (30)..(32): Xaa is C or S
EPLTVLYYEIVRKKPIFEQLSNTLEDHLAXKXE

SEQ ID NO: 72608 - protein, 39 aa, Artificial Sequence; identical to SEQ ID NO: 24121
  Cyclic GFR-binding peptide
  MOD_RES (3)..(3): Xaa is C or S

SEQ ID NO: 72609 - protein, 31 aa, Artificial Sequence; identical to SEQ ID NO: 17757
  Cyclic GFR-binding peptide
  MOD_RES (30)..(30): Xaa is C or S

SEQ ID NO: 72610 - protein, 41 aa, Artificial Sequence; identical to SEQ ID NO: 24123
  Cyclic GFR-binding peptide
  MOD_RES (6)..(40): Xaa is C or S

SEQ ID NO: 72611 - protein, 28 aa, Artificial Sequence
  Cyclic GFR-binding peptide
QVQLEPLTVLYYEIVRKKPIFEQLSNTL

SEQ ID NO: 72612 - protein, 27 aa, Artificial Sequence
  Cyclic GFR-binding peptide
LRSVKMAKVDENEKVVKEVQVDMVVEG

SEQ ID NO: 72613 - protein, 32 aa, Artificial Sequence; identical to SEQ ID NO: 24125
  Cyclic GFR-binding peptide
  MOD_RES (30)..(32): Xaa is C or S

SEQ ID NO: 72614 - protein, 35 aa, Artificial Sequence; identical to SEQ ID NO: 17770
  Cyclic GFR-binding peptide
  MOD_RES (2)..(3)..(35): Xaa is C or S

SEQ ID NO: 72615 - protein, 27 aa, Artificial Sequence
  Cyclic GFR-binding peptide
QLSNITVQIMDDSSNVIIGEMSNMVVR

SEQ ID NO: 72616 - protein, 31 aa, Artificial Sequence
  Cyclic GFR-binding peptide
  MOD_RES (28)..(30): Xaa is C or S
LRPVQVRKIDDSSNVIKKATVNMVVRSXGXH

SEQ ID NO: 72617 - protein, 34 aa, Artificial Sequence; identical to SEQ ID NO: 17773
  Cyclic GFR-binding peptide
  MOD_RES (5)..(6): Xaa is C or S

SEQ ID NO: 72618 - protein, 37 aa, Artificial Sequence
  Cyclic GFR-binding peptide
  MOD_RES (5)..(5): Xaa is C or S
EGLEXVPTEEEPLTMLYYRIKPHQGQHEQLSNFLQHN

SEQ ID NO: 72619 - protein, 30 aa, Artificial Sequence
  Cyclic GFR-binding peptide
  MOD_RES (1)..(2): Xaa is C or S
XXVPTELRSVKMAKVDEYDKVVKEVQVEMV

SEQ ID NO: 72620 - protein, 35 aa, Artificial Sequence
  Cyclic GFR-binding peptide
  MOD_RES (1)..(33)..(35): Xaa is C or S
XVPTELRSVKMAKVDENEKVVKEVQVDMVVEGXGX

SEQ ID NO: 72621 - protein, 31 aa, Artificial Sequence; identical to SEQ ID NO: 17784
  Cyclic GFR-binding peptide
  MOD_RES (5)..(6): Xaa is C or S

SEQ ID NO: 72622 - protein, 35 aa, Artificial Sequence
  Cyclic GFR-binding peptide
  MOD_RES (3)..(4)..(35): Xaa is C or S
SPXXVSQDLRPVQIRKIIGKTPKIKKATVMIVKSX

SEQ ID NO: 72623 - protein, 24 aa, Artificial Sequence
  Cyclic GFR-binding peptide
SQDLEPLPIVYYIGKTPKIEQLSN

SEQ ID NO: 72624 - protein, 30 aa, Artificial Sequence
  Cyclic GFR-binding peptide
QVQLEPLTVLYYEIVRKKPIFEQLSNTLED

SEQ ID NO: 72625 - protein, 22 aa, Artificial Sequence
  Cyclic GFR-binding peptide
SNITMQIMDENEKVVIGEMSDM

SEQ ID NO: 72626 - protein, 25 aa, Artificial Sequence
  Cyclic GFR-binding peptide
EPLPMVYYDEYDKVVEQLSNEMVVE

SEQ ID NO: 72627 - protein, 43 aa, Artificial Sequence
  Cyclic GFR-binding peptide
  MOD_RES (5)..(42): Xaa is C or S
RNVQXRPTQVQLEPLPVVYYEIVRKKPIFEQLSNTLEDHLAXK

SEQ ID NO: 72628 - protein, 22 aa, Artificial Sequence
  Cyclic GFR-binding peptide
ELRPVQMRKIDENEKVVKKATV

SEQ ID NO: 72629 - protein, 34 aa, Artificial Sequence; identical to SEQ ID NO: 24147
  Cyclic GFR-binding peptide
  MOD_RES (33)..(33): Xaa is C or S

SEQ ID NO: 72630 - protein, 29 aa, Artificial Sequence
  Cyclic GFR-binding peptide
  MOD_RES (27)..(29): Xaa is C or S
EPLTMLYYDENEKVVEQLSNDMVVEGXGX

SEQ ID NO: 72631 - protein, 41 aa, Artificial Sequence
  Cyclic GFR-binding peptide
  MOD_RES (4)..(38)..(40): Xaa is C or S
GLEXVPTEEEPLTMLYYRIKPHQGQHEQLSNFLQHNKXEXR

SEQ ID NO: 72632 - protein, 31 aa, Artificial Sequence
  Cyclic GFR-binding peptide
  MOD_RES (29)..(31): Xaa is C or S
QDLRPVQIRKIVGRTPKVKKATVMVVKSXKX

SEQ ID NO: 72633 - protein, 33 aa, Artificial Sequence
  Cyclic GFR-binding peptide
VPTEEEPLTMLYYRIKPHQGQHEQLSNFLQHNK

SEQ ID NO: 72634 - protein, 35 aa, Artificial Sequence
  Cyclic GFR-binding peptide
  MOD_RES (6)..(6): Xaa is C or S
DEGLEXVPTEEEPLTMLYYRIKPHQGQHEQLSNFL

SEQ ID NO: 72635 - protein, 30 aa, Artificial Sequence
  Cyclic GFR-binding peptide
HEPLTVLYYEYVRKKPKLEQLSNRLEEHLE

SEQ ID NO: 72636 - protein, 23 aa, Artificial Sequence
  Cyclic GFR-binding peptide
QALEPLTILYYVGRKPKVEQLSN

SEQ ID NO: 72637 - protein, 39 aa, Artificial Sequence
  Cyclic GFR-binding peptide
  MOD_RES (36)..(38): Xaa is C or S
PSRVHHEPLPVVYYEYVRKKPKLEQLSNRLEEHLEXAXA

SEQ ID NO: 72638 - protein, 37 aa, Artificial Sequence; identical to SEQ ID NO: 17814
  Cyclic GFR-binding peptide
  MOD_RES (5)..(6): Xaa is C or S

SEQ ID NO: 72639 - protein, 32 aa, Artificial Sequence
  Cyclic GFR-binding peptide
  MOD_RES (1)..(1): Xaa is C or S
XAPTKLRSVKVAKVDDSSNVIKEVQVNMVVRS

SEQ ID NO: 72640 - protein, 36 aa, Artificial Sequence; identical to SEQ ID NO: 24159
  Cyclic GFR-binding peptide
  MOD_RES (5)..(5): Xaa is C or S

SEQ ID NO: 72641 - protein, 35 aa, Artificial Sequence
  Cyclic GFR-binding peptide
  MOD_RES (3)..(3): Xaa is C or S
VKXQPSRVHHEPLPVVYYEYVRKKPKLEQLSNRLE

SEQ ID NO: 72642 - protein, 24 aa, Artificial Sequence
  Cyclic GFR-binding peptide
TKLEPLPVVYYDDSSNVIEQLSNN

SEQ ID NO: 72643 - protein, 34 aa, Artificial Sequence
  Cyclic GFR-binding peptide
  MOD_RES (1)..(33): Xaa is C or S
XAPTKLSNITVQIMDDSSNVIIGEMSNMVVRSXG

SEQ ID NO: 72644 - protein, 34 aa, Artificial Sequence; identical to SEQ ID NO: 17829
  Cyclic GFR-binding peptide
  MOD_RES (3)..(4): Xaa is C or S

SEQ ID NO: 72645 - protein, 37 aa, Artificial Sequence; identical to SEQ ID NO: 24166
  Cyclic GFR-binding peptide
  MOD_RES (4)..(4): Xaa is C or S

SEQ ID NO: 72646 - protein, 31 aa, Artificial Sequence
  Cyclic GFR-binding peptide
  MOD_RES (31)..(31): Xaa is C or S
VSQDLSNITIQIMIGKTPKIIGEMSMIVKSX

SEQ ID NO: 72647 - protein, 25 aa, Artificial Sequence
  Cyclic GFR-binding peptide
EPLTVLYYDDSSNVIEQLSNNMVVR

SEQ ID NO: 72648 - protein, 32 aa, Artificial Sequence; identical to SEQ ID NO: 17844
  Cyclic GFR-binding peptide
  MOD_RES (6)..(6): Xaa is C or S

SEQ ID NO: 72649 - protein, 21 aa, Artificial Sequence
  Cyclic GFR-binding peptide
LSNITVQIMDDSSNVIIGEMS

SEQ ID NO: 72650 - protein, 37 aa, Artificial Sequence
  Cyclic GFR-binding peptide
  MOD_RES (3)..(4)..(35)..(37): Xaa is C or S
APXXVPQALRPVQIRKIVGRKPKVKKATVMIVRSXKX

SEQ ID NO: 72651 - protein, 35 aa, Artificial Sequence; identical to SEQ ID NO: 24176
  Cyclic GFR-binding peptide
  MOD_RES (1)..(1): Xaa is C or S

SEQ ID NO: 72652 - protein, 40 aa, Artificial Sequence
  Cyclic GFR-binding peptide
  MOD_RES (4)..(5)..(37)..(39): Xaa is C or S
PKPXXAPTKLRSVKVAKVDDSSNVIKEVQVNMVVRSXGXH

SEQ ID NO: 72653 - protein, 37 aa, Artificial Sequence
  Cyclic GFR-binding peptide
  MOD_RES (5)..(5): Xaa is C or S
EGLEXVPTEEEPLPMVYYRIKPHQGQHEQLSNFLQHN

SEQ ID NO: 72654 - protein, 32 aa, Artificial Sequence; identical to SEQ ID NO: 17849
  Cyclic GFR-binding peptide
  MOD_RES (2)..(3): Xaa is C or S

SEQ ID NO: 72655 - protein, 23 aa, Artificial Sequence
  Cyclic GFR-binding peptide
DLSNITIQIMIGKTPKIIGEMSM

SEQ ID NO: 72656 - protein, 26 aa, Artificial Sequence
  Cyclic GFR-binding peptide
TELRSVKMAKVDEYDKVVKEVQVEMV

SEQ ID NO: 72657 - protein, 34 aa, Artificial Sequence
  Cyclic GFR-binding peptide
  MOD_RES (4)..(4): Xaa is C or S
KPTXAPTKLRPVQVRKIDDSSNVIKKATVNMVVR

SEQ ID NO: 72658 - protein, 37 aa, Artificial Sequence
  Cyclic GFR-binding peptide
  MOD_RES (2)..(3)..(34)..(36): Xaa is C or S
PXXVPQDLRSVKIAKVVGRTPKVKEVQVMVVKSXKXS

SEQ ID NO: 72659 - protein, 36 aa, Artificial Sequence
  Cyclic GFR-binding peptide
  MOD_RES (5)..(5): Xaa is C or S
TKPTXAPTKLSNITVQIMDDSSNVIIGEMSNMVVRS

SEQ ID NO: 72660 - protein, 34 aa, Artificial Sequence
  Cyclic GFR-binding peptide
  MOD_RES (5)..(5): Xaa is C or S
TKPTXAPTKLRSVKVAKVDDSSNVIKEVQVNMVV

SEQ ID NO: 72661 - protein, 27 aa, Artificial Sequence
  Cyclic GFR-binding peptide
LSNITVQIMDDSSNVIIGEMSNMVVRA

SEQ ID NO: 72662 - protein, 24 aa, Artificial Sequence
  Cyclic GFR-binding peptide
PTQLRSVKVAKVDDSSNVIKEVQV

SEQ ID NO: 72663 - protein, 34 aa, Artificial Sequence; identical to SEQ ID NO: 17868
  Cyclic GFR-binding peptide
  MOD_RES (6)..(6): Xaa is C or S

SEQ ID NO: 72664 - protein, 28 aa, Artificial Sequence
  Cyclic GFR-binding peptide
LEPLTVLYYEIVRKKPIFEQLSNTLEDH

SEQ ID NO: 72665 - protein, 32 aa, Artificial Sequence
  Cyclic GFR-binding peptide
  MOD_RES (4)..(5): Xaa is C or S
ASPXXVSQDLSNITIQIMIGKTPKIIGEMSMI

SEQ ID NO: 72666 - protein, 33 aa, Artificial Sequence; identical to SEQ ID NO: 17874
  Cyclic GFR-binding peptide
  MOD_RES (4)..(5): Xaa is C or S

SEQ ID NO: 72667 - protein, 33 aa, Artificial Sequence; identical to SEQ ID NO: 24196
  Cyclic GFR-binding peptide

SEQ ID NO: 72668 - protein, 24 aa, Artificial Sequence
  Cyclic GFR-binding peptide
LEPLTVLYYEIVRKKPIFEQLSNT

SEQ ID NO: 72669 - protein, 24 aa, Artificial Sequence
  Cyclic GFR-binding peptide
RSVKIAKVVGRTPKVKEVQVMVVK

SEQ ID NO: 72670 - protein, 33 aa, Artificial Sequence; identical to SEQ ID NO: 24199
  Cyclic GFR-binding peptide
  MOD_RES (32)..(32): Xaa is C or S

SEQ ID NO: 72671 - protein, 27 aa, Artificial Sequence
  Cyclic GFR-binding peptide
LSNITVQIMDDSSNVIIGEMSNMVVRS

SEQ ID NO: 72672 - protein, 29 aa, Artificial Sequence
  Cyclic GFR-binding peptide
  MOD_RES (2)..(3): Xaa is C or S
AXXVPTELRSVKMAKVDENEKVVKEVQVD

SEQ ID NO: 72673 - protein, 31 aa, Artificial Sequence
  Cyclic GFR-binding peptide
  MOD_RES (4)..(5): Xaa is C or S
PKAXXVPTELRSVKMAKVDENEKVVKEVQVD

SEQ ID NO: 72674 - protein, 35 aa, Artificial Sequence; identical to SEQ ID NO: 17885
  Cyclic GFR-binding peptide
  MOD_RES (3)..(4): Xaa is C or S

SEQ ID NO: 72675 - protein, 39 aa, Artificial Sequence; identical to SEQ ID NO: 24203
  Cyclic GFR-binding peptide
  MOD_RES (2)..(36)..(38): Xaa is C or S

SEQ ID NO: 72676 - protein, 27 aa, Artificial Sequence
  Cyclic GFR-binding peptide
  MOD_RES (2)..(2): Xaa is C or S
TXAPTKLRSVKVAKVDDSSNVIKEVQV

SEQ ID NO: 72677 - protein, 35 aa, Artificial Sequence; identical to SEQ ID NO: 24206
  Cyclic GFR-binding peptide
  MOD_RES (5)..(5): Xaa is C or S

SEQ ID NO: 72678 - protein, 35 aa, Artificial Sequence
  Cyclic GFR-binding peptide
  MOD_RES (2)..(3)..(34): Xaa is C or S
PXXVPQALRSVKIAKVVGRKPKVKEVQVMIVRSXK

SEQ ID NO: 72679 - protein, 29 aa, Artificial Sequence
  Cyclic GFR-binding peptide
APTQLSNITVQIMDDSSNVIIGEMSNMVV

SEQ ID NO: 72680 - protein, 31 aa, Artificial Sequence; identical to SEQ ID NO: 24208
  Cyclic GFR-binding peptide

SEQ ID NO: 72681 - protein, 23 aa, Artificial Sequence
  Cyclic GFR-binding peptide
LRPVQIRKIVGRTPKVKKATVMV

SEQ ID NO: 72682 - protein, 41 aa, Artificial Sequence
  Cyclic GFR-binding peptide
  MOD_RES (6)..(7)..(39)..(41): Xaa is C or S
YVPKPXXAPTKLRSVKVAKVDDSSNVIKEVQVNMVVRSXGX

SEQ ID NO: 72683 - protein, 29 aa, Artificial Sequence
  Cyclic GFR-binding peptide
  MOD_RES (1)..(1): Xaa is C or S
XVPQDLRSVKIAKVVGRTPKVKEVQVMVV

SEQ ID NO: 72684 - protein, 35 aa, Artificial Sequence; identical to SEQ ID NO: 17900
  Cyclic GFR-binding peptide
  MOD_RES (32)..(34): Xaa is C or S

SEQ ID NO: 72685 - protein, 28 aa, Artificial Sequence
  Cyclic GFR-binding peptide
  MOD_RES (2)..(3): Xaa is C or S
PXXVSQDLSNITIQIMIGKTPKIIGEMS

SEQ ID NO: 72686 - protein, 23 aa, Artificial Sequence
  Cyclic GFR-binding peptide
TELEPLTMLYYDEYDKVVEQLSN

SEQ ID NO: 72687 - protein, 27 aa, Artificial Sequence
  Cyclic GFR-binding peptide
  MOD_RES (1)..(1): Xaa is C or S
XVPQALRPVQIRKIVGRKPKVKKATVM

SEQ ID NO: 72688 - protein, 33 aa, Artificial Sequence; identical to SEQ ID NO: 17913
  Cyclic GFR-binding peptide
  MOD_RES (30)..(32): Xaa is C or S

SEQ ID NO: 72689 - protein, 34 aa, Artificial Sequence
  Cyclic GFR-binding peptide
  MOD_RES (6)..(7): Xaa is C or S
YVPKPXXAPTKLSNITVQIMDDSSNVIIGEMSNM

SEQ ID NO: 72690 - protein, 28 aa, Artificial Sequence
  Cyclic GFR-binding peptide
  MOD_RES (2)..(3): Xaa is C or S
PXXVPQALSNITIQIMVGRKPKVIGEMS

SEQ ID NO: 72691 - protein, 31 aa, Artificial Sequence
  Cyclic GFR-binding peptide
SRVHHEPLTVLYYEYVRKKPKLEQLSNRLEE

SEQ ID NO: 72692 - protein, 36 aa, Artificial Sequence
  Cyclic GFR-binding peptide
  MOD_RES (5)..(5): Xaa is C or S
TKPTXAPTKLRSVKVAKVDDSSNVIKEVQVNMVVRS

SEQ ID NO: 72693 - protein, 30 aa, Artificial Sequence
  Cyclic GFR-binding peptide
APTKLRSVKVAKVDDSSNVIKEVQVNMVVR

SEQ ID NO: 72694 - protein, 30 aa, Artificial Sequence
  Cyclic GFR-binding peptide
  MOD_RES (30)..(30): Xaa is C or S
PQDLSNITIQIMVGRTPKVIGEMSMVVKSX

SEQ ID NO: 72695 - protein, 22 aa, Artificial Sequence
  Cyclic GFR-binding peptide
RSVKIAKVVGRKPKVKEVQVMI

SEQ ID NO: 72696 - protein, 40 aa, Artificial Sequence
  Cyclic GFR-binding peptide
  MOD_RES (5)..(6)..(38)..(40): Xaa is C or S
IPKAXXVPTELRSVKMAKVDENEKVVKEVQVDMVVEGXGX

SEQ ID NO: 72697 - protein, 41 aa, Artificial Sequence; identical to SEQ ID NO: 24220
  Cyclic GFR-binding peptide
  MOD_RES (5)..(39)..(41): Xaa is C or S

SEQ ID NO: 72698 - protein, 34 aa, Artificial Sequence; identical to SEQ ID NO: 17922
  Cyclic GFR-binding peptide
  MOD_RES (4)..(5): Xaa is C or S

SEQ ID NO: 72699 - protein, 34 aa, Artificial Sequence
  Cyclic GFR-binding peptide
  MOD_RES (5)..(6): Xaa is C or S
SASPXXVSQDLRSVKIAKVIGKTPKIKEVQVMIV

SEQ ID NO: 72700 - protein, 28 aa, Artificial Sequence
  Cyclic GFR-binding peptide
  MOD_RES (28)..(28): Xaa is C or S
LRPVQMRKIDEYDKVVKKATVEMVVEGX

SEQ ID NO: 72701 - protein, 38 aa, Artificial Sequence
  Cyclic GFR-binding peptide
  MOD_RES (3)..(4)..(36)..(38): Xaa is C or S
KPXXAPTKLRSVKVAKVDDSSNVIKEVQVNMVVRSXGX

SEQ ID NO: 72702 - protein, 38 aa, Artificial Sequence
  Cyclic GFR-binding peptide
  MOD_RES (4)..(5)..(37): Xaa is C or S
PKAXXVPTELRSVKMAKVDEYDKVVKEVQVEMVVEGXG

SEQ ID NO: 72703 - protein, 39 aa, Artificial Sequence
  Cyclic GFR-binding peptide
  MOD_RES (5)..(6)..(38): Xaa is C or S
IPKAXXVPTELRSVKMAKVDENEKVVKEVQVDMVVEGXG

SEQ ID NO: 72704 - protein, 36 aa, Artificial Sequence; identical to SEQ ID NO: 17927
  Cyclic GFR-binding peptide
  MOD_RES (1)..(33)..(35): Xaa is C or S

SEQ ID NO: 72705 - protein, 40 aa, Artificial Sequence
  Cyclic GFR-binding peptide
  MOD_RES (5)..(6)..(37)..(39): Xaa is C or S
SASPXXVPQDLRSVKIAKVVGRTPKVKEVQVMVVKSXKXS

SEQ ID NO: 72706 - protein, 34 aa, Artificial Sequence
  Cyclic GFR-binding peptide
  MOD_RES (5)..(6): Xaa is C or S
IPKAXXVPTELRPVQMRKIDENEKVVKKATVDMV

SEQ ID NO: 72707 - protein, 29 aa, Artificial Sequence
  Cyclic GFR-binding peptide
  MOD_RES (29)..(29): Xaa is C or S
RSVKMAKVRIKPHQGQHKEVQVFLQHNKX

SEQ ID NO: 72708 - protein, 37 aa, Artificial Sequence
  Cyclic GFR-binding peptide
  MOD_RES (34)..(36): Xaa is C or S
QVQLEPLTVLYYEIVRKKPIFEQLSNTLEDHLAXKXE

SEQ ID NO: 72709 - protein, 22 aa, Artificial Sequence
  Cyclic GFR-binding peptide
KLEPLPVVYYDDSSNVIEQLSN

SEQ ID NO: 72710 - protein, 36 aa, Artificial Sequence
  Cyclic GFR-binding peptide
  MOD_RES (1)..(2)..(34)..(36): Xaa is C or S
XXVPTELSNITMQIMDENEKVVIGEMSDMVVEGXGX

SEQ ID NO: 72711 - protein, 32 aa, Artificial Sequence; identical to SEQ ID NO: 17937
  Cyclic GFR-binding peptide
  MOD_RES (5)..(6): Xaa is C or S

SEQ ID NO: 72712 - protein, 33 aa, Artificial Sequence; identical to SEQ ID NO: 17944
  Cyclic GFR-binding peptide
  MOD_RES (1)..(2): Xaa is C or S

SEQ ID NO: 72713 - protein, 27 aa, Artificial Sequence
  Cyclic GFR-binding peptide
EEPLTMLYYRIKPHQGQHEQLSNFLQH

SEQ ID NO: 72714 - protein, 37 aa, Artificial Sequence; identical to SEQ ID NO: 17946
  Cyclic GFR-binding peptide
  MOD_RES (2)..(3)..(35)..(37): Xaa is C or S

SEQ ID NO: 72715 - protein, 32 aa, Artificial Sequence
  Cyclic GFR-binding peptide
  MOD_RES (6)..(7): Xaa is C or S
ASAAPXXVPQALRSVKIAKVVGRKPKVKEVQV

SEQ ID NO: 72716 - protein, 37 aa, Artificial Sequence; identical to SEQ ID NO: 17950
  Cyclic GFR-binding peptide
  MOD_RES (5)..(6): Xaa is C or S

SEQ ID NO: 72717 - protein, 39 aa, Artificial Sequence
  Cyclic GFR-binding peptide
  MOD_RES (3)..(4)..(36)..(38): Xaa is C or S
KPXXAPTQLSNITVQIMDDSSNVIIGEMSNMVVRAXGXH

SEQ ID NO: 72718 - protein, 37 aa, Artificial Sequence
  Cyclic GFR-binding peptide
  MOD_RES (4)..(5)..(37): Xaa is C or S
PKAXXVPTELRPVQMRKIDEYDKVVKKATVEMVVEGX

SEQ ID NO: 72719 - protein, 35 aa, Artificial Sequence; identical to SEQ ID NO: 17951
  Cyclic GFR-binding peptide
  MOD_RES (1)..(2)..(34): Xaa is C or S

SEQ ID NO: 72720 - protein, 22 aa, Artificial Sequence
  Cyclic GFR-binding peptide
KLRPVQVRKIDDSSNVIKKATV

SEQ ID NO: 72721 - protein, 38 aa, Artificial Sequence
  Cyclic GFR-binding peptide
  MOD_RES (5)..(37): Xaa is C or S
TKPTXAPTKLSNITVQIMDDSSNVIIGEMSNMVVRSXG

SEQ ID NO: 72722 - protein, 30 aa, Artificial Sequence; identical to SEQ ID NO: 17959
  Cyclic GFR-binding peptide
  MOD_RES (29)..(29): Xaa is C or S

SEQ ID NO: 72723 - protein, 26 aa, Artificial Sequence
  Cyclic GFR-binding peptide
  MOD_RES (1)..(1): Xaa is C or S
XAPTKLRPVQVRKIDDSSNVIKKATV

SEQ ID NO: 72724 - protein, 32 aa, Artificial Sequence
  Cyclic GFR-binding peptide
  MOD_RES (31)..(31): Xaa is C or S
LEPLPVVYYEIVRKKPIFEQLSNTLEDHLAXK

SEQ ID NO: 72725 - protein, 38 aa, Artificial Sequence; identical to SEQ ID NO: 17963
  Cyclic GFR-binding peptide
  MOD_RES (4)..(5)..(37): Xaa is C or S

SEQ ID NO: 72726 - protein, 29 aa, Artificial Sequence
  Cyclic GFR-binding peptide
PSRVHHRPVQVRKIEYVRKKPKLKKATVR

SEQ ID NO: 72727 - protein, 28 aa, Artificial Sequence
  Cyclic GFR-binding peptide
  MOD_RES (1)..(2): Xaa is C or S
XXVPQDLEPLPIVYYVGRTPKVEQLSNM

SEQ ID NO: 72728 - protein, 32 aa, Artificial Sequence
  Cyclic GFR-binding peptide
  MOD_RES (4)..(5): Xaa is C or S
PKAXXVPTELRSVKMAKVDENEKVVKEVQVDM

SEQ ID NO: 72729 - protein, 35 aa, Artificial Sequence; identical to SEQ ID NO: 17970
  Cyclic GFR-binding peptide
  MOD_RES (7)..(7): Xaa is C or S

SEQ ID NO: 72730 - protein, 27 aa, Artificial Sequence
  Cyclic GFR-binding peptide
TQLRSVKVAKVDDSSNVIKEVQVNMVV

SEQ ID NO: 72731 - protein, 24 aa, Artificial Sequence
  Cyclic GFR-binding peptide
TELRPVQMRKIDENEKVVKKATVD

SEQ ID NO: 72732 - protein, 31 aa, Artificial Sequence; identical to SEQ ID NO: 17976
  Cyclic GFR-binding peptide
  MOD_RES (29)..(31): Xaa is C or S

SEQ ID NO: 72733 - protein, 34 aa, Artificial Sequence
  Cyclic GFR-binding peptide
  MOD_RES (7)..(7): Xaa is C or S
HVTKPTXAPTKLRSVKVAKVDDSSNVIKEVQVNM

SEQ ID NO: 72734 - protein, 38 aa, Artificial Sequence; identical to SEQ ID NO: 24269
  Cyclic GFR-binding peptide
  MOD_RES (1)..(38): Xaa is C or S

SEQ ID NO: 72735 - protein, 35 aa, Artificial Sequence
  Cyclic GFR-binding peptide
  MOD_RES (4)..(5): Xaa is C or S
ASPXXVSQDLSNITIQIMIGKTPKIIGEMSMIVKS

SEQ ID NO: 72736 - protein, 32 aa, Artificial Sequence
  Cyclic GFR-binding peptide
  MOD_RES (30)..(32): Xaa is C or S
EPLPVVYYEYVRKKPKLEQLSNRLEEHLEXAX

SEQ ID NO: 72737 - protein, 35 aa, Artificial Sequence
  Cyclic GFR-binding peptide
  MOD_RES (1)..(2)..(33)..(35): Xaa is C or S
XXVSQDLRSVKIAKVIGKTPKIKEVQVMIVKSXKX

SEQ ID NO: 72738 - protein, 29 aa, Artificial Sequence
  Cyclic GFR-binding peptide
  MOD_RES (1)..(1): Xaa is C or S
XVPTEERPVQMRKIRIKPHQGQHKKATVF

SEQ ID NO: 72739 - protein, 35 aa, Artificial Sequence
  Cyclic GFR-binding peptide
  MOD_RES (6)..(7): Xaa is C or S
SIPKAXXVPTELSNITMQIMDEYDKVVIGEMSEMV

SEQ ID NO: 72740 - protein, 25 aa, Artificial Sequence
  Cyclic GFR-binding peptide
TQLRPVQVRKIDDSSNVIKKATVNM

SEQ ID NO: 72741 - protein, 29 aa, Artificial Sequence
  Cyclic GFR-binding peptide
  MOD_RES (1)..(1): Xaa is C or S
XAPTKLSNITVQIMDDSSNVIIGEMSNMV

SEQ ID NO: 72742 - protein, 35 aa, Artificial Sequence
  Cyclic GFR-binding peptide
  MOD_RES (3)..(3): Xaa is C or S
VKXQPSRVHHEPLTVLYYEYVRKKPKLEQLSNRLE

SEQ ID NO: 72743 - protein, 34 aa, Artificial Sequence
  Cyclic GFR-binding peptide
  MOD_RES (4)..(5): Xaa is C or S
ASPXXVSQDLSNITIQIMIGKTPKIIGEMSMIVK

SEQ ID NO: 72744 - protein, 33 aa, Artificial Sequence; identical to SEQ ID NO: 17990
  Cyclic GFR-binding peptide
  MOD_RES (6)..(7): Xaa is C or S

SEQ ID NO: 72745 - protein, 36 aa, Artificial Sequence
  Cyclic GFR-binding peptide
  MOD_RES (5)..(6): Xaa is C or S
VPKPXXAPTQLRSVKVAKVDDSSNVIKEVQVNMVVR

SEQ ID NO: 72746 - protein, 27 aa, Artificial Sequence
  Cyclic GFR-binding peptide
APTKLEPLTVLYYDDSSNVIEQLSNNM

SEQ ID NO: 72747 - protein, 42 aa, Artificial Sequence
  Cyclic GFR-binding peptide
  MOD_RES (5)..(42): Xaa is C or S
RNVQXRPTQVQLEPLPVVYYEIVRKKPIFEQLSNTLEDHLAX

SEQ ID NO: 72748 - protein, 33 aa, Artificial Sequence; identical to SEQ ID NO: 17994
  Cyclic GFR-binding peptide
  MOD_RES (7)..(7): Xaa is C or S

SEQ ID NO: 72749 - protein, 32 aa, Artificial Sequence; identical to SEQ ID NO: 17997
  Cyclic GFR-binding peptide
  MOD_RES (31)..(31): Xaa is C or S

SEQ ID NO: 72750 - protein, 39 aa, Artificial Sequence; identical to SEQ ID NO: 24284
  Cyclic GFR-binding peptide
  MOD_RES (3)..(37)..(39): Xaa is C or S

SEQ ID NO: 72751 - protein, 26 aa, Artificial Sequence
  Cyclic GFR-binding peptide
  MOD_RES (1)..(1): Xaa is C or S
XVSQDLRSVKIAKVIGKTPKIKEVQV

SEQ ID NO: 72752 - protein, 35 aa, Artificial Sequence
  Cyclic GFR-binding peptide
  MOD_RES (6)..(6): Xaa is C or S
VTKPTXAPTKLSNITVQIMDDSSNVIIGEMSNMVV

SEQ ID NO: 72753 - protein, 39 aa, Artificial Sequence
  Cyclic GFR-binding peptide
  MOD_RES (36)..(38): Xaa is C or S
PTQVQLEPLPVVYYEIVRKKPIFEQLSNTLEDHLAXKXE

SEQ ID NO: 72754 - protein, 34 aa, Artificial Sequence; identical to SEQ ID NO: 24288
  Cyclic GFR-binding peptide
  MOD_RES (31)..(33): Xaa is C or S

SEQ ID NO: 72755 - protein, 31 aa, Artificial Sequence; identical to SEQ ID NO: 24289
  Cyclic GFR-binding peptide
  MOD_RES (2)..(2): Xaa is C or S

SEQ ID NO: 72756 - protein, 34 aa, Artificial Sequence; identical to SEQ ID NO: 17998
  Cyclic GFR-binding peptide
  MOD_RES (6)..(7): Xaa is C or S

SEQ ID NO: 72757 - protein, 25 aa, Artificial Sequence
  Cyclic GFR-binding peptide
TELEPLTMLYYDEYDKVVEQLSNEM

SEQ ID NO: 72758 - protein, 34 aa, Artificial Sequence
  Cyclic GFR-binding peptide
  MOD_RES (1)..(2)..(34): Xaa is C or S
XXAPTKLRSVKVAKVDDSSNVIKEVQVNMVVRSX

SEQ ID NO: 72759 - protein, 32 aa, Artificial Sequence
  Cyclic GFR-binding peptide
  MOD_RES (1)..(1): Xaa is C or S
XVPTELSNITMQIMDENEKVVIGEMSDMVVEG

SEQ ID NO: 72760 - protein, 29 aa, Artificial Sequence
  Cyclic GFR-binding peptide
  MOD_RES (27)..(29): Xaa is C or S
RPVQVRKIDDSSNVIKKATVNMVVRAXGX

SEQ ID NO: 72761 - protein, 37 aa, Artificial Sequence
  Cyclic GFR-binding peptide
  MOD_RES (7)..(7): Xaa is C or S
NDEGLEXVPTEEEPLPMVYYRIKPHQGQHEQLSNFLQ

SEQ ID NO: 72762 - protein, 40 aa, Artificial Sequence; identical to SEQ ID NO: 18016
  Cyclic GFR-binding peptide
  MOD_RES (6)..(7)..(39): Xaa is C or S

SEQ ID NO: 72763 - protein, 28 aa, Artificial Sequence
  Cyclic GFR-binding peptide
  MOD_RES (27)..(27): Xaa is C or S
EPLPMVYYDENEKVVEQLSNDMVVEGXG

SEQ ID NO: 72764 - protein, 33 aa, Artificial Sequence
  Cyclic GFR-binding peptide
  MOD_RES (2)..(3): Xaa is C or S
PXXAPTQLRPVQVRKIDDSSNVIKKATVNMVVR

SEQ ID NO: 72765 - protein, 34 aa, Artificial Sequence
  Cyclic GFR-binding peptide
  MOD_RES (1)..(2)..(34): Xaa is C or S
XXVPTELSNITMQIMDENEKVVIGEMSDMVVEGX

SEQ ID NO: 72766 - protein, 33 aa, Artificial Sequence
  Cyclic GFR-binding peptide
  MOD_RES (4)..(5): Xaa is C or S
PKAXXVPTELRPVQMRKIDEYDKVVKKATVEMV

SEQ ID NO: 72767 - protein, 35 aa, Artificial Sequence
  Cyclic GFR-binding peptide
  MOD_RES (1)..(33)..(35): Xaa is C or S
XVPTELRPVQMRKIDEYDKVVKKATVEMVVEGXGX

SEQ ID NO: 72768 - protein, 39 aa, Artificial Sequence; identical to SEQ ID NO: 18025
  Cyclic GFR-binding peptide
  MOD_RES (5)..(6)..(38): Xaa is C or S

SEQ ID NO: 72769 - protein, 26 aa, Artificial Sequence
  Cyclic GFR-binding peptide
APTQLEPLPVVYYDDSSNVIEQLSNN

SEQ ID NO: 72770 - protein, 27 aa, Artificial Sequence
  Cyclic GFR-binding peptide
PTEEEPLTMLYYRIKPHQGQHEQLSNF

SEQ ID NO: 72771 - protein, 38 aa, Artificial Sequence; identical to SEQ ID NO: 18032
  Cyclic GFR-binding peptide
  MOD_RES (4)..(5)..(37): Xaa is C or S

SEQ ID NO: 72772 - protein, 30 aa, Artificial Sequence; identical to SEQ ID NO: 24312
  Cyclic GFR-binding peptide
  MOD_RES (1)..(1): Xaa is C or S

SEQ ID NO: 72773 - protein, 31 aa, Artificial Sequence
  Cyclic GFR-binding peptide
  MOD_RES (4)..(4): Xaa is C or S
KPTXAPTKLRSVKVAKVDDSSNVIKEVQVNM

SEQ ID NO: 72774 - protein, 35 aa, Artificial Sequence
  Cyclic GFR-binding peptide
  MOD_RES (1)..(2)..(33)..(35): Xaa is C or S
XXVPQDLRPVQIRKIVGRTPKVKKATVMVVKSXKX

SEQ ID NO: 72775 - protein, 26 aa, Artificial Sequence
  Cyclic GFR-binding peptide
ELSNITMQIMDEYDKVVIGEMSEMVV

SEQ ID NO: 72776 - protein, 23 aa, Artificial Sequence
  Cyclic GFR-binding peptide
TKLRPVQVRKIDDSSNVIKKATV

SEQ ID NO: 72777 - protein, 28 aa, Artificial Sequence
  Cyclic GFR-binding peptide
  MOD_RES (2)..(3): Xaa is C or S
PXXVPQDLEPLPIVYYVGRTPKVEQLSN

SEQ ID NO: 72778 - protein, 26 aa, Artificial Sequence
  Cyclic GFR-binding peptide
EPLTMLYYDEYDKVVEQLSNEMVVEG

SEQ ID NO: 72779 - protein, 22 aa, Artificial Sequence
  Cyclic GFR-binding peptide
LRPVQMRKIDENEKVVKKATVD

SEQ ID NO: 72780 - protein, 29 aa, Artificial Sequence
  Cyclic GFR-binding peptide
  MOD_RES (2)..(2): Xaa is C or S
EXVPTEEEPLTMLYYRIKPHQGQHEQLSN

SEQ ID NO: 72781 - protein, 36 aa, Artificial Sequence
  Cyclic GFR-binding peptide
  MOD_RES (1)..(2)..(34)..(36): Xaa is C or S
XXAPTQLSNITVQIMDDSSNVIIGEMSNMVVRAXGX

SEQ ID NO: 72782 - protein, 32 aa, Artificial Sequence
  Cyclic GFR-binding peptide
  MOD_RES (32)..(32): Xaa is C or S
HHEPLTVLYYEYVRKKPKLEQLSNRLEEHLEX

SEQ ID NO: 72783 - protein, 28 aa, Artificial Sequence
  Cyclic GFR-binding peptide
  MOD_RES (1)..(2): Xaa is C or S
XXVPTELRPVQMRKIDEYDKVVKKATVE

SEQ ID NO: 72784 - protein, 30 aa, Artificial Sequence
  Cyclic GFR-binding peptide
  MOD_RES (3)..(4): Xaa is C or S
KPXXAPTKLRPVQVRKIDDSSNVIKKATVN

SEQ ID NO: 72785 - protein, 24 aa, Artificial Sequence
  Cyclic GFR-binding peptide
LEPLPVVYYDDSSNVIEQLSNNMV

SEQ ID NO: 72786 - protein, 31 aa, Artificial Sequence
  Cyclic GFR-binding peptide
  MOD_RES (30)..(30): Xaa is C or S
EEPLPMVYYRIKPHQGQHEQLSNFLQHNKXE

SEQ ID NO: 72787 - protein, 26 aa, Artificial Sequence
  Cyclic GFR-binding peptide
  MOD_RES (1)..(1): Xaa is C or S
XVPQALEPLTILYYVGRKPKVEQLSN

SEQ ID NO: 72788 - protein, 26 aa, Artificial Sequence
  Cyclic GFR-binding peptide
TQLSNITVQIMDDSSNVIIGEMSNMV

SEQ ID NO: 72789 - protein, 40 aa, Artificial Sequence
  Cyclic GFR-binding peptide
  MOD_RES (4)..(5)..(37)..(39): Xaa is C or S
PKPXXAPTQLRSVKVAKVDDSSNVIKEVQVNMVVRAXGXH

SEQ ID NO: 72790 - protein, 24 aa, Artificial Sequence
  Cyclic GFR-binding peptide
QDLEPLPIVYYIGKTPKIEQLSNM

SEQ ID NO: 72791 - protein, 37 aa, Artificial Sequence
  Cyclic GFR-binding peptide
  MOD_RES (3)..(35)..(37): Xaa is C or S
PTXAPTKLRPVQVRKIDDSSNVIKKATVNMVVRSXGX

SEQ ID NO: 72792 - protein, 23 aa, Artificial Sequence
  Cyclic GFR-binding peptide
QDLSNITIQIMVGRTPKVIGEMS

SEQ ID NO: 72793 - protein, 39 aa, Artificial Sequence; identical to SEQ ID NO: 24331
  Cyclic GFR-binding peptide
  MOD_RES (5)..(5): Xaa is C or S

SEQ ID NO: 72794 - protein, 41 aa, Artificial Sequence
  Cyclic GFR-binding peptide
  MOD_RES (6)..(7)..(39)..(41): Xaa is C or S
TVPKPXXAPTQLRPVQVRKIDDSSNVIKKATVNMVVRAXGX

SEQ ID NO: 72795 - protein, 36 aa, Artificial Sequence
  Cyclic GFR-binding peptide
  MOD_RES (5)..(6): Xaa is C or S
IPKAXXVPTELSNITMQIMDENEKVVIGEMSDMVVE

SEQ ID NO: 72796 - protein, 26 aa, Artificial Sequence
  Cyclic GFR-binding peptide
SNITVQIMEIVRKKPIFIGEMSTLED

SEQ ID NO: 72797 - protein, 27 aa, Artificial Sequence
  Cyclic GFR-binding peptide
QLRSVKVAKVDDSSNVIKEVQVNMVVR

SEQ ID NO: 72798 - protein, 39 aa, Artificial Sequence
  Cyclic GFR-binding peptide
  MOD_RES (5)..(6)..(38): Xaa is C or S
VPKPXXAPTQLSNITVQIMDDSSNVIIGEMSNMVVRAXG

SEQ ID NO: 72799 - protein, 30 aa, Artificial Sequence
  Cyclic GFR-binding peptide
  MOD_RES (30)..(30): Xaa is C or S
TELSNITMQIMDEYDKVVIGEMSEMVVEGX

SEQ ID NO: 72800 - protein, 44 aa, Artificial Sequence
  Cyclic GFR-binding peptide
  MOD_RES (4)..(41)..(43): Xaa is C or S
SVKXQPSRVHHEPLTVLYYEYVRKKPKLEQLSNRLEEHLEXAXA

SEQ ID NO: 72801 - protein, 33 aa, Artificial Sequence
  Cyclic GFR-binding peptide
  MOD_RES (5)..(6): Xaa is C or S
VPKPXXAPTKLSNITVQIMDDSSNVIIGEMSNM

SEQ ID NO: 72802 - protein, 33 aa, Artificial Sequence; identical to SEQ ID NO: 18074
  Cyclic GFR-binding peptide
  MOD_RES (1)..(2): Xaa is C or S

SEQ ID NO: 72803 - protein, 32 aa, Artificial Sequence
  Cyclic GFR-binding peptide
  MOD_RES (29)..(31): Xaa is C or S
ELRSVKMAKVDENEKVVKEVQVDMVVEGXGXR

SEQ ID NO: 72804 - protein, 35 aa, Artificial Sequence
  Cyclic GFR-binding peptide
  MOD_RES (2)..(3)..(34): Xaa is C or S
PXXVPQALRPVQIRKIVGRKPKVKKATVMIVRSXK

SEQ ID NO: 72805 - protein, 28 aa, Artificial Sequence
  Cyclic GFR-binding peptide
ELSNITMQIMDEYDKVVIGEMSEMVVEG

SEQ ID NO: 72806 - protein, 31 aa, Artificial Sequence; identical to SEQ ID NO: 18077
  Cyclic GFR-binding peptide
  MOD_RES (4)..(5): Xaa is C or S

SEQ ID NO: 72807 - protein, 22 aa, Artificial Sequence
  Cyclic GFR-binding peptide
LRPVQVRKIDDSSNVIKKATVN

SEQ ID NO: 72808 - protein, 39 aa, Artificial Sequence
  Cyclic GFR-binding peptide
  MOD_RES (37)..(39): Xaa is C or S
QPSRVHHEPLTVLYYEYVRKKPKLEQLSNRLEEHLEXAX

SEQ ID NO: 72809 - protein, 33 aa, Artificial Sequence; identical to SEQ ID NO: 18079
  Cyclic GFR-binding peptide
  MOD_RES (30)..(32): Xaa is C or S

SEQ ID NO: 72810 - protein, 27 aa, Artificial Sequence
  Cyclic GFR-binding peptide
APTQLSNITVQIMDDSSNVIIGEMSNM

SEQ ID NO: 72811 - protein, 24 aa, Artificial Sequence
  Cyclic GFR-binding peptide
RSVKMAKVDENEKVVKEVQVDMVV

SEQ ID NO: 72812 - protein, 25 aa, Artificial Sequence
  Cyclic GFR-binding peptide
PTKLRSVKVAKVDDSSNVIKEVQVN

SEQ ID NO: 72813 - protein, 36 aa, Artificial Sequence
  Cyclic GFR-binding peptide
  MOD_RES (4)..(36): Xaa is C or S
KPTXAPTKLRPVQVRKIDDSSNVIKKATVNMVVRSX

SEQ ID NO: 72814 - protein, 30 aa, Artificial Sequence
  Cyclic GFR-binding peptide
  MOD_RES (29)..(29): Xaa is C or S
QDLRPVQIRKIIGKTPKIKKATVMIVKSXK

SEQ ID NO: 72815 - protein, 41 aa, Artificial Sequence
  Cyclic GFR-binding peptide
  MOD_RES (5)..(6)..(38)..(40): Xaa is C or S
IPKAXXVPTELSNITMQIMDENEKVVIGEMSDMVVEGXGXR

SEQ ID NO: 72816 - protein, 36 aa, Artificial Sequence
  Cyclic GFR-binding peptide
  MOD_RES (5)..(5): Xaa is C or S
RNVQXRPTQVQLEPLPVVYYEIVRKKPIFEQLSNTL

SEQ ID NO: 72817 - protein, 30 aa, Artificial Sequence
  Cyclic GFR-binding peptide
  MOD_RES (30)..(30): Xaa is C or S
EPLTVLYYEIVRKKPIFEQLSNTLEDHLAX

SEQ ID NO: 72818 - protein, 29 aa, Artificial Sequence
  Cyclic GFR-binding peptide
  MOD_RES (3)..(4): Xaa is C or S
KAXXVPTELSNITMQIMDEYDKVVIGEMS

SEQ ID NO: 72819 - protein, 33 aa, Artificial Sequence; identical to SEQ ID NO: 24355
  Cyclic GFR-binding peptide

SEQ ID NO: 72820 - protein, 23 aa, Artificial Sequence
  Cyclic GFR-binding peptide
LSNITIQIMVGRTPKVIGEMSMV

SEQ ID NO: 72821 - protein, 32 aa, Artificial Sequence
  Cyclic GFR-binding peptide
  MOD_RES (3)..(3): Xaa is C or S
LEXVPTEEEPLTMLYYRIKPHQGQHEQLSNFL

SEQ ID NO: 72822 - protein, 33 aa, Artificial Sequence
  Cyclic GFR-binding peptide
RVHHEPLPVVYYEYVRKKPKLEQLSNRLEEHLE

SEQ ID NO: 72823 - protein, 27 aa, Artificial Sequence
  Cyclic GFR-binding peptide
LEPLTVLYYDDSSNVIEQLSNNMVVRS

SEQ ID NO: 72824 - protein, 27 aa, Artificial Sequence
  Cyclic GFR-binding peptide
EEEPLTMLYYRIKPHQGQHEQLSNFLQ

SEQ ID NO: 72825 - protein, 30 aa, Artificial Sequence
  Cyclic GFR-binding peptide
  MOD_RES (1)..(1): Xaa is C or S
XQPSRVHHEPLPVVYYEYVRKKPKLEQLSN

SEQ ID NO: 72826 - protein, 27 aa, Artificial Sequence
  Cyclic GFR-binding peptide
VPTEERSVKMAKVRIKPHQGQHKEVQV

SEQ ID NO: 72827 - protein, 30 aa, Artificial Sequence
  Cyclic GFR-binding peptide
  MOD_RES (2)..(3): Xaa is C or S
PXXAPTKLRSVKVAKVDDSSNVIKEVQVNM

SEQ ID NO: 72828 - protein, 32 aa, Artificial Sequence
  Cyclic GFR-binding peptide
  MOD_RES (30)..(32): Xaa is C or S
TQLRPVQVRKIDDSSNVIKKATVNMVVRAXGX

SEQ ID NO: 72829 - protein, 35 aa, Artificial Sequence
  Cyclic GFR-binding peptide
  MOD_RES (4)..(5): Xaa is C or S
AAPXXVPQALRSVKIAKVVGRKPKVKEVQVMIVRS

SEQ ID NO: 72830 - protein, 28 aa, Artificial Sequence
  Cyclic GFR-binding peptide
PTKLEPLPVVYYDDSSNVIEQLSNNMVV

SEQ ID NO: 72831 - protein, 23 aa, Artificial Sequence
  Cyclic GFR-binding peptide
EPLPVVYYEYVRKKPKLEQLSNR

SEQ ID NO: 72832 - protein, 25 aa, Artificial Sequence
  Cyclic GFR-binding peptide
LRSVKMAKVDEYDKVVKEVQVEMVV

SEQ ID NO: 72833 - protein, 27 aa, Artificial Sequence
  Cyclic GFR-binding peptide
  MOD_RES (1)..(2): Xaa is C or S
XXVPTELEPLPMVYYDEYDKVVEQLSN

SEQ ID NO: 72834 - protein, 28 aa, Artificial Sequence
  Cyclic GFR-binding peptide
  MOD_RES (27)..(27): Xaa is C or S
EPLTVLYYDDSSNVIEQLSNNMVVRAXG

SEQ ID NO: 72835 - protein, 31 aa, Artificial Sequence
  Cyclic GFR-binding peptide
  MOD_RES (4)..(5): Xaa is C or S
PKPXXAPTKLRSVKVAKVDDSSNVIKEVQVN

SEQ ID NO: 72836 - protein, 39 aa, Artificial Sequence
  Cyclic GFR-binding peptide
  MOD_RES (4)..(5)..(36)..(38): Xaa is C or S
AAPXXVPQALRSVKIAKVVGRKPKVKEVQVMIVRSXKXS

SEQ ID NO: 72837 - protein, 32 aa, Artificial Sequence; identical to SEQ ID NO: 18100
  Cyclic GFR-binding peptide
  MOD_RES (6)..(7): Xaa is C or S

SEQ ID NO: 72838 - protein, 29 aa, Artificial Sequence
  Cyclic GFR-binding peptide
QPSRVHHRPVQVRKIEYVRKKPKLKKATV

SEQ ID NO: 72839 - protein, 36 aa, Artificial Sequence
  Cyclic GFR-binding peptide
  MOD_RES (3)..(35): Xaa is C or S
PTXAPTKLRPVQVRKIDDSSNVIKKATVNMVVRSXG

SEQ ID NO: 72840 - protein, 34 aa, Artificial Sequence
  Cyclic GFR-binding peptide
  MOD_RES (5)..(6): Xaa is C or S
VPKPXXAPTQLSNITVQIMDDSSNVIIGEMSNMV

SEQ ID NO: 72841 - protein, 41 aa, Artificial Sequence; identical to SEQ ID NO: 18107
  Cyclic GFR-binding peptide
  MOD_RES (6)..(7)..(39)..(41): Xaa is C or S

SEQ ID NO: 72842 - protein, 35 aa, Artificial Sequence
  Cyclic GFR-binding peptide
  MOD_RES (5)..(5): Xaa is C or S
RNVQXRPTQVQLEPLTVLYYEIVRKKPIFEQLSNT

SEQ ID NO: 72843 - protein, 37 aa, Artificial Sequence; identical to SEQ ID NO: 24384
  Cyclic GFR-binding peptide
  MOD_RES (34)..(36): Xaa is C or S

SEQ ID NO: 72844 - protein, 30 aa, Artificial Sequence
  Cyclic GFR-binding peptide
  MOD_RES (1)..(2): Xaa is C or S
XXVPQALSNITIQIMVGRKPKVIGEMSMIV

SEQ ID NO: 72845 - protein, 35 aa, Artificial Sequence
  Cyclic GFR-binding peptide
  MOD_RES (2)..(3)..(35): Xaa is C or S
AXXVPTELSNITMQIMDENEKVVIGEMSDMVVEGX

SEQ ID NO: 72846 - protein, 34 aa, Artificial Sequence; identical to SEQ ID NO: 18114
  Cyclic GFR-binding peptide
  MOD_RES (1)..(2)..(34): Xaa is C or S

SEQ ID NO: 72847 - protein, 33 aa, Artificial Sequence
  Cyclic GFR-binding peptide
  MOD_RES (31)..(33): Xaa is C or S
PTKLRSVKVAKVDDSSNVIKEVQVNMVVRSXGX

SEQ ID NO: 72848 - protein, 37 aa, Artificial Sequence
  Cyclic GFR-binding peptide
  MOD_RES (5)..(6): Xaa is C or S
VPKPXXAPTQLRSVKVAKVDDSSNVIKEVQVNMVVRA

SEQ ID NO: 72849 - protein, 27 aa, Artificial Sequence
  Cyclic GFR-binding peptide
SQDLSNITIQIMIGKTPKIIGEMSMIV

SEQ ID NO: 72850 - protein, 37 aa, Artificial Sequence
  Cyclic GFR-binding peptide
  MOD_RES (34)..(36): Xaa is C or S
QVQLEPLPVVYYEIVRKKPIFEQLSNTLEDHLAXKXE

SEQ ID NO: 72851 - protein, 28 aa, Artificial Sequence
  Cyclic GFR-binding peptide
PTEERPVQMRKIRIKPHQGQHKKATVFL

SEQ ID NO: 72852 - protein, 36 aa, Artificial Sequence
  Cyclic GFR-binding peptide
RPTQVQLEPLPVVYYEIVRKKPIFEQLSNTLEDHLA

SEQ ID NO: 72853 - protein, 30 aa, Artificial Sequence
  Cyclic GFR-binding peptide
  MOD_RES (4)..(4): Xaa is C or S
KPTXAPTKLRSVKVAKVDDSSNVIKEVQVN

SEQ ID NO: 72854 - protein, 20 aa, Artificial Sequence
  Cyclic GFR-binding peptide
SNITIQIMVGRTPKVIGEMS

SEQ ID NO: 72855 - protein, 30 aa, Artificial Sequence
  Cyclic GFR-binding peptide
  MOD_RES (4)..(5): Xaa is C or S
AAPXXVPQALRPVQIRKIVGRKPKVKKATV

SEQ ID NO: 72856 - protein, 28 aa, Artificial Sequence
  Cyclic GFR-binding peptide
QALEPLTILYYVGRKPKVEQLSNMIVRS

SEQ ID NO: 72857 - protein, 28 aa, Artificial Sequence
  Cyclic GFR-binding peptide
  MOD_RES (1)..(2): Xaa is C or S
XXAPTQLRPVQVRKIDDSSNVIKKATVN

SEQ ID NO: 72858 - protein, 31 aa, Artificial Sequence; identical to SEQ ID NO: 18126
  Cyclic GFR-binding peptide
  MOD_RES (1)..(2): Xaa is C or S

SEQ ID NO: 72859 - protein, 31 aa, Artificial Sequence; identical to SEQ ID NO: 18127
  Cyclic GFR-binding peptide
  MOD_RES (4)..(5): Xaa is C or S

SEQ ID NO: 72860 - protein, 41 aa, Artificial Sequence; identical to SEQ ID NO: 18128
  Cyclic GFR-binding peptide
  MOD_RES (6)..(7)..(39)..(41): Xaa is C or S

SEQ ID NO: 72861 - protein, 33 aa, Artificial Sequence
  Cyclic GFR-binding peptide
  MOD_RES (1)..(33): Xaa is C or S
XVPTELRSVKMAKVDENEKVVKEVQVDMVVEGX

SEQ ID NO: 72862 - protein, 28 aa, Artificial Sequence
  Cyclic GFR-binding peptide
  MOD_RES (2)..(3): Xaa is C or S
PXXAPTQLEPLPVVYYDDSSNVIEQLSN

SEQ ID NO: 72863 - protein, 36 aa, Artificial Sequence
  Cyclic GFR-binding peptide
  MOD_RES (5)..(5): Xaa is C or S
EGLEXVPTEEEPLPMVYYRIKPHQGQHEQLSNFLQH

SEQ ID NO: 72864 - protein, 28 aa, Artificial Sequence
  Cyclic GFR-binding peptide
  MOD_RES (26)..(28): Xaa is C or S
RPVQIRKIVGRTPKVKKATVMVVKSXKX

SEQ ID NO: 72865 - protein, 32 aa, Artificial Sequence; identical to SEQ ID NO: 24411
  Cyclic GFR-binding peptide

SEQ ID NO: 72866 - protein, 32 aa, Artificial Sequence
  Cyclic GFR-binding peptide
  MOD_RES (29)..(31): Xaa is C or S
EPLTMLYYRIKPHQGQHEQLSNFLQHNKXEXR

SEQ ID NO: 72867 - protein, 26 aa, Artificial Sequence
  Cyclic GFR-binding peptide
TKLEPLPVVYYDDSSNVIEQLSNNMV

SEQ ID NO: 72868 - protein, 39 aa, Artificial Sequence
  Cyclic GFR-binding peptide
  MOD_RES (2)..(39): Xaa is C or S
KXQPSRVHHEPLPVVYYEYVRKKPKLEQLSNRLEEHLEX

SEQ ID NO: 72869 - protein, 33 aa, Artificial Sequence
  Cyclic GFR-binding peptide
  MOD_RES (30)..(32): Xaa is C or S
TQLSNITVQIMDDSSNVIIGEMSNMVVRAXGXH

SEQ ID NO: 72870 - protein, 35 aa, Artificial Sequence
  Cyclic GFR-binding peptide
  MOD_RES (6)..(7): Xaa is C or S
YVPKPXXAPTKLRPVQVRKIDDSSNVIKKATVNMV

SEQ ID NO: 72871 - protein, 27 aa, Artificial Sequence
  Cyclic GFR-binding peptide
PTELRPVQMRKIDEYDKVVKKATVEMV

SEQ ID NO: 72872 - protein, 35 aa, Artificial Sequence
  Cyclic GFR-binding peptide
  MOD_RES (1)..(33)..(35): Xaa is C or S
XAPTQLRSVKVAKVDDSSNVIKEVQVNMVVRAXGX

SEQ ID NO: 72873 - protein, 30 aa, Artificial Sequence
  Cyclic GFR-binding peptide
  MOD_RES (27)..(29): Xaa is C or S
LRPVQIRKIIGKTPKIKKATVMIVKSXKXS

SEQ ID NO: 72874 - protein, 31 aa, Artificial Sequence; identical to SEQ ID NO: 18152
  Cyclic GFR-binding peptide
  MOD_RES (30)..(30): Xaa is C or S

SEQ ID NO: 72875 - protein, 38 aa, Artificial Sequence; identical to SEQ ID NO: 24425
  Cyclic GFR-binding peptide
  MOD_RES (3)..(37): Xaa is C or S

SEQ ID NO: 72876 - protein, 25 aa, Artificial Sequence
  Cyclic GFR-binding peptide
QDLEPLPIVYYIGKTPKIEQLSNMI

SEQ ID NO: 72877 - protein, 31 aa, Artificial Sequence; identical to SEQ ID NO: 18158
  Cyclic GFR-binding peptide
  MOD_RES (28)..(30): Xaa is C or S

SEQ ID NO: 72878 - protein, 26 aa, Artificial Sequence
  Cyclic GFR-binding peptide
TQLRPVQVRKIDDSSNVIKKATVNMV

SEQ ID NO: 72879 - protein, 39 aa, Artificial Sequence; identical to SEQ ID NO: 24432
  Cyclic GFR-binding peptide
  MOD_RES (2)..(36)..(38): Xaa is C or S

SEQ ID NO: 72880 - protein, 29 aa, Artificial Sequence
  Cyclic GFR-binding peptide
PQALSNITIQIMVGRKPKVIGEMSMIVRS

SEQ ID NO: 72881 - protein, 27 aa, Artificial Sequence
  Cyclic GFR-binding peptide
  MOD_RES (1)..(1): Xaa is C or S
XVPTELEPLPMVYYDEYDKVVEQLSNE

SEQ ID NO: 72882 - protein, 31 aa, Artificial Sequence; identical to SEQ ID NO: 24437
  Cyclic GFR-binding peptide
  MOD_RES (1)..(1): Xaa is C or S

SEQ ID NO: 72883 - protein, 38 aa, Artificial Sequence
  Cyclic GFR-binding peptide
  MOD_RES (3)..(4)..(35)..(37): Xaa is C or S
SPXXVSQDLSNITIQIMIGKTPKIIGEMSMIVKSXKXS

SEQ ID NO: 72884 - protein, 28 aa, Artificial Sequence
  Cyclic GFR-binding peptide
  MOD_RES (2)..(3): Xaa is C or S
PXXAPTQLRPVQVRKIDDSSNVIKKATV

SEQ ID NO: 72885 - protein, 29 aa, Artificial Sequence
  Cyclic GFR-binding peptide
  MOD_RES (3)..(4): Xaa is C or S
KPXXAPTKLEPLPVVYYDDSSNVIEQLSN

SEQ ID NO: 72886 - protein, 34 aa, Artificial Sequence
  Cyclic GFR-binding peptide
  MOD_RES (34)..(34): Xaa is C or S
VPTEEEPLTMLYYRIKPHQGQHEQLSNFLQHNKX

SEQ ID NO: 72887 - protein, 32 aa, Artificial Sequence
  Cyclic GFR-binding peptide
  MOD_RES (29)..(31): Xaa is C or S
QALRSVKIAKVVGRKPKVKEVQVMIVRSXKXS

SEQ ID NO: 72888 - protein, 27 aa, Artificial Sequence
  Cyclic GFR-binding peptide
LEPLTVLYYDDSSNVIEQLSNNMVVRA

SEQ ID NO: 72889 - protein, 33 aa, Artificial Sequence
  Cyclic GFR-binding peptide
QPSRVHHEPLTVLYYEYVRKKPKLEQLSNRLEE

SEQ ID NO: 72890 - protein, 32 aa, Artificial Sequence; identical to SEQ ID NO: 18173
  Cyclic GFR-binding peptide
  MOD_RES (3)..(4): Xaa is C or S

SEQ ID NO: 72891 - protein, 39 aa, Artificial Sequence
  Cyclic GFR-binding peptide
  MOD_RES (6)..(7)..(39): Xaa is C or S
YVPKPXXAPTKLSNITVQIMDDSSNVIIGEMSNMVVRSX

SEQ ID NO: 72892 - protein, 24 aa, Artificial Sequence
  Cyclic GFR-binding peptide
QLSNITVQIMDDSSNVIIGEMSNM

SEQ ID NO: 72893 - protein, 22 aa, Artificial Sequence
  Cyclic GFR-binding peptide
LRPVQIRKIIGKTPKIKKATVM

SEQ ID NO: 72894 - protein, 33 aa, Artificial Sequence; identical to SEQ ID NO: 18179
  Cyclic GFR-binding peptide
  MOD_RES (30)..(32): Xaa is C or S

SEQ ID NO: 72895 - protein, 29 aa, Artificial Sequence
  Cyclic GFR-binding peptide
QLRSVKVAKVEIVRKKPIFKEVQVTLEDH

SEQ ID NO: 72896 - protein, 38 aa, Artificial Sequence
  Cyclic GFR-binding peptide
  MOD_RES (2)..(3)..(35)..(37): Xaa is C or S
PXXAPTKLSNITVQIMDDSSNVIIGEMSNMVVRSXGXH

SEQ ID NO: 72897 - protein, 31 aa, Artificial Sequence
  Cyclic GFR-binding peptide
  MOD_RES (28)..(30): Xaa is C or S
LSNITMQIMDEYDKVVIGEMSEMVVEGXGXR

SEQ ID NO: 72898 - protein, 22 aa, Artificial Sequence
  Cyclic GFR-binding peptide
ELEPLTMLYYDEYDKVVEQLSN

SEQ ID NO: 72899 - protein, 28 aa, Artificial Sequence
  Cyclic GFR-binding peptide
  MOD_RES (1)..(2): Xaa is C or S
XXAPTQLRSVKVAKVDDSSNVIKEVQVN

SEQ ID NO: 72900 - protein, 33 aa, Artificial Sequence; identical to SEQ ID NO: 18187
  Cyclic GFR-binding peptide
  MOD_RES (2)..(3): Xaa is C or S

SEQ ID NO: 72901 - protein, 24 aa, Artificial Sequence
  Cyclic GFR-binding peptide
RSVKMAKVRIKPHQGQHKEVQVFL

SEQ ID NO: 72902 - protein, 26 aa, Artificial Sequence
  Cyclic GFR-binding peptide
QLEPLTVLYYEIVRKKPIFEQLSNTL

SEQ ID NO: 72903 - protein, 26 aa, Artificial Sequence
  Cyclic GFR-binding peptide
HHRPVQVRKIEYVRKKPKLKKATVRL

SEQ ID NO: 72904 - protein, 27 aa, Artificial Sequence
  Cyclic GFR-binding peptide
  MOD_RES (27)..(27): Xaa is C or S
LRPVQIRKIVGRTPKVKKATVMVVKSX

SEQ ID NO: 72905 - protein, 34 aa, Artificial Sequence; identical to SEQ ID NO: 18190
  Cyclic GFR-binding peptide
  MOD_RES (4)..(5): Xaa is C or S

SEQ ID NO: 72906 - protein, 25 aa, Artificial Sequence
  Cyclic GFR-binding peptide
TKLRPVQVRKIDDSSNVIKKATVNM

SEQ ID NO: 72907 - protein, 37 aa, Artificial Sequence; identical to SEQ ID NO: 18196
  Cyclic GFR-binding peptide
  MOD_RES (3)..(4)..(36): Xaa is C or S

SEQ ID NO: 72908 - protein, 34 aa, Artificial Sequence
  Cyclic GFR-binding peptide
  MOD_RES (5)..(6): Xaa is C or S
SASPXXVPQDLRPVQIRKIVGRTPKVKKATVMVV

SEQ ID NO: 72909 - protein, 32 aa, Artificial Sequence
  Cyclic GFR-binding peptide
  MOD_RES (30)..(32): Xaa is C or S
PQDLSNITIQIMVGRTPKVIGEMSMVVKSXKX

SEQ ID NO: 72910 - protein, 37 aa, Artificial Sequence; identical to SEQ ID NO: 24459
  Cyclic GFR-binding peptide
  MOD_RES (3)..(37): Xaa is C or S

SEQ ID NO: 72911 - protein, 29 aa, Artificial Sequence
  Cyclic GFR-binding peptide
  MOD_RES (27)..(29): Xaa is C or S
LRPVQIRKIVGRTPKVKKATVMVVKSXKX

SEQ ID NO: 72912 - protein, 23 aa, Artificial Sequence
  Cyclic GFR-binding peptide
KLEPLPVVYYDDSSNVIEQLSNN

SEQ ID NO: 72913 - protein, 31 aa, Artificial Sequence
  Cyclic GFR-binding peptide
  MOD_RES (30)..(30): Xaa is C or S
PQDLSNITIQIMVGRTPKVIGEMSMVVKSXK

SEQ ID NO: 72914 - protein, 26 aa, Artificial Sequence
  Cyclic GFR-binding peptide
SQDLSNITIQIMIGKTPKIIGEMSMI

SEQ ID NO: 72915 - protein, 35 aa, Artificial Sequence
  Cyclic GFR-binding peptide
RPTQVQLEPLPVVYYEIVRKKPIFEQLSNTLEDHL

SEQ ID NO: 72916 - protein, 31 aa, Artificial Sequence; identical to SEQ ID NO: 18212
  Cyclic GFR-binding peptide
  MOD_RES (2)..(3): Xaa is C or S

SEQ ID NO: 72917 - protein, 37 aa, Artificial Sequence
  Cyclic GFR-binding peptide
  MOD_RES (5)..(37): Xaa is C or S
TKPTXAPTKLRPVQVRKIDDSSNVIKKATVNMVVRSX

SEQ ID NO: 72918 - protein, 33 aa, Artificial Sequence
  Cyclic GFR-binding peptide
  MOD_RES (5)..(6): Xaa is C or S
VPKPXXAPTQLSNITVQIMDDSSNVIIGEMSNM

SEQ ID NO: 72919 - protein, 35 aa, Artificial Sequence
  Cyclic GFR-binding peptide
  MOD_RES (1)..(35): Xaa is C or S
XVPTEEEPLTMLYYRIKPHQGQHEQLSNFLQHNKX

SEQ ID NO: 72920 - protein, 29 aa, Artificial Sequence
  Cyclic GFR-binding peptide
  MOD_RES (3)..(4): Xaa is C or S
KAXXVPTELEPLTMLYYDENEKVVEQLSN

SEQ ID NO: 72921 - protein, 43 aa, Artificial Sequence
  Cyclic GFR-binding peptide
  MOD_RES (3)..(40)..(42): Xaa is C or S
VQXRPTQVQLEPLPVVYYEIVRKKPIFEQLSNTLEDHLAXKXE

SEQ ID NO: 72922 - protein, 30 aa, Artificial Sequence
  Cyclic GFR-binding peptide
  MOD_RES (30)..(30): Xaa is C or S
PQALRPVQIRKIVGRKPKVKKATVMIVRSX

SEQ ID NO: 72923 - protein, 34 aa, Artificial Sequence
  Cyclic GFR-binding peptide
  MOD_RES (5)..(6): Xaa is C or S
VPKPXXAPTQLRPVQVRKIDDSSNVIKKATVNMV

SEQ ID NO: 72924 - protein, 31 aa, Artificial Sequence; identical to SEQ ID NO: 18220
  Cyclic GFR-binding peptide
  MOD_RES (3)..(4): Xaa is C or S

SEQ ID NO: 72925 - protein, 30 aa, Artificial Sequence; identical to SEQ ID NO: 18221
  Cyclic GFR-binding peptide
  MOD_RES (28)..(30): Xaa is C or S

SEQ ID NO: 72926 - protein, 31 aa, Artificial Sequence; identical to SEQ ID NO: 18227
  Cyclic GFR-binding peptide
  MOD_RES (28)..(30): Xaa is C or S

SEQ ID NO: 72927 - protein, 25 aa, Artificial Sequence
  Cyclic GFR-binding peptide
QDLRSVKIAKVVGRTPKVKEVQVMV

SEQ ID NO: 72928 - protein, 37 aa, Artificial Sequence
  Cyclic GFR-binding peptide
  MOD_RES (3)..(4)..(36): Xaa is C or S
KAXXVPTELRSVKMAKVDEYDKVVKEVQVEMVVEGXG

SEQ ID NO: 72929 - protein, 28 aa, Artificial Sequence
  Cyclic GFR-binding peptide
QALRSVKIAKVVGRKPKVKEVQVMIVRS

SEQ ID NO: 72930 - protein, 33 aa, Artificial Sequence
  Cyclic GFR-binding peptide
  MOD_RES (7)..(7): Xaa is C or S
HVTKPTXAPTKLRPVQVRKIDDSSNVIKKATVN

SEQ ID NO: 72931 - protein, 32 aa, Artificial Sequence
  Cyclic GFR-binding peptide
  MOD_RES (2)..(3): Xaa is C or S
AXXVPTELRPVQMRKIDEYDKVVKKATVEMVV

SEQ ID NO: 72932 - protein, 37 aa, Artificial Sequence
  Cyclic GFR-binding peptide
  MOD_RES (2)..(2): Xaa is C or S
QXRPTQVQLEPLPVVYYEIVRKKPIFEQLSNTLEDHL

SEQ ID NO: 72933 - protein, 32 aa, Artificial Sequence
  Cyclic GFR-binding peptide
VPTEEEPLPMVYYRIKPHQGQHEQLSNFLQHN

SEQ ID NO: 72934 - protein, 25 aa, Artificial Sequence
  Cyclic GFR-binding peptide
HEPLTVLYYEYVRKKPKLEQLSNRL

SEQ ID NO: 72935 - protein, 27 aa, Artificial Sequence
  Cyclic GFR-binding peptide
  MOD_RES (1)..(1): Xaa is C or S
XAPTQLEPLPVVYYDDSSNVIEQLSNN

SEQ ID NO: 72936 - protein, 32 aa, Artificial Sequence; identical to SEQ ID NO: 24479
  Cyclic GFR-binding peptide

SEQ ID NO: 72937 - protein, 32 aa, Artificial Sequence
  Cyclic GFR-binding peptide
  MOD_RES (1)..(2): Xaa is C or S
XXVSQDLRPVQIRKIIGKTPKIKKATVMIVKS

SEQ ID NO: 72938 - protein, 25 aa, Artificial Sequence
  Cyclic GFR-binding peptide
SNITVQIMDDSSNVIIGEMSNMVVR

SEQ ID NO: 72939 - protein, 34 aa, Artificial Sequence; identical to SEQ ID NO: 18239
  Cyclic GFR-binding peptide
  MOD_RES (32)..(34): Xaa is C or S

SEQ ID NO: 72940 - protein, 24 aa, Artificial Sequence
  Cyclic GFR-binding peptide
TELEPLTMLYYDENEKVVEQLSND

SEQ ID NO: 72941 - protein, 38 aa, Artificial Sequence
  Cyclic GFR-binding peptide
  MOD_RES (6)..(7): Xaa is C or S
SIPKAXXVPTELRSVKMAKVDEYDKVVKEVQVEMVVEG

SEQ ID NO: 72942 - protein, 27 aa, Artificial Sequence
  Cyclic GFR-binding peptide
  MOD_RES (26)..(26): Xaa is C or S
EPLTILYYVGRKPKVEQLSNMIVRSXK

SEQ ID NO: 72943 - protein, 30 aa, Artificial Sequence; identical to SEQ ID NO: 24492
  Cyclic GFR-binding peptide

SEQ ID NO: 72944 - protein, 35 aa, Artificial Sequence; identical to SEQ ID NO: 24493
  Cyclic GFR-binding peptide
  MOD_RES (32)..(34): Xaa is C or S

SEQ ID NO: 72945 - protein, 31 aa, Artificial Sequence
  Cyclic GFR-binding peptide
  MOD_RES (3)..(4): Xaa is C or S
KAXXVPTELRPVQMRKIDEYDKVVKKATVEM

SEQ ID NO: 72946 - protein, 38 aa, Artificial Sequence; identical to SEQ ID NO: 18250
  Cyclic GFR-binding peptide
  MOD_RES (6)..(7): Xaa is C or S

SEQ ID NO: 72947 - protein, 28 aa, Artificial Sequence
  Cyclic GFR-binding peptide
  MOD_RES (2)..(3): Xaa is C or S
AXXVPTELSNITMQIMDENEKVVIGEMS

SEQ ID NO: 72948 - protein, 24 aa, Artificial Sequence
  Cyclic GFR-binding peptide
DLRPVQIRKIVGRTPKVKKATVMV

SEQ ID NO: 72949 - protein, 30 aa, Artificial Sequence
  Cyclic GFR-binding peptide
  MOD_RES (1)..(1): Xaa is C or S
XVPQALRPVQIRKIVGRKPKVKKATVMIVR

SEQ ID NO: 72950 - protein, 32 aa, Artificial Sequence
  Cyclic GFR-binding peptide
  MOD_RES (31)..(31): Xaa is C or S
EEEPLPMVYYRIKPHQGQHEQLSNFLQHNKXE

SEQ ID NO: 72951 - protein, 29 aa, Artificial Sequence
  Cyclic GFR-binding peptide
APTQLEPLPVVYYDDSSNVIEQLSNNMVV

SEQ ID NO: 72952 - protein, 31 aa, Artificial Sequence
  Cyclic GFR-binding peptide
  MOD_RES (3)..(4): Xaa is C or S
KPXXAPTQLRPVQVRKIDDSSNVIKKATVNM

SEQ ID NO: 72953 - protein, 38 aa, Artificial Sequence
  Cyclic GFR-binding peptide
  MOD_RES (2)..(36)..(38): Xaa is C or S
EXVPTEEEPLTMLYYRIKPHQGQHEQLSNFLQHNKXEX

SEQ ID NO: 72954 - protein, 29 aa, Artificial Sequence
  Cyclic GFR-binding peptide
  MOD_RES (1)..(1): Xaa is C or S
XAPTKLRSVKVAKVDDSSNVIKEVQVNMV

SEQ ID NO: 72955 - protein, 27 aa, Artificial Sequence
  Cyclic GFR-binding peptide
SQDLRSVKIAKVIGKTPKIKEVQVMIV

SEQ ID NO: 72956 - protein, 38 aa, Artificial Sequence
  Cyclic GFR-binding peptide
  MOD_RES (35)..(37): Xaa is C or S
SRVHHEPLTVLYYEYVRKKPKLEQLSNRLEEHLEXAXA

SEQ ID NO: 72957 - protein, 31 aa, Artificial Sequence
  Cyclic GFR-binding peptide
  MOD_RES (31)..(31): Xaa is C or S
VPQDLRPVQIRKIVGRTPKVKKATVMVVKSX

SEQ ID NO: 72958 - protein, 41 aa, Artificial Sequence
  Cyclic GFR-binding peptide
  MOD_RES (5)..(6)..(38)..(40): Xaa is C or S
IPKAXXVPTELRSVKMAKVDENEKVVKEVQVDMVVEGXGXR

SEQ ID NO: 72959 - protein, 32 aa, Artificial Sequence; identical to SEQ ID NO: 18264
  Cyclic GFR-binding peptide
  MOD_RES (30)..(32): Xaa is C or S

SEQ ID NO: 72960 - protein, 30 aa, Artificial Sequence; identical to SEQ ID NO: 18265
  Cyclic GFR-binding peptide

SEQ ID NO: 72961 - protein, 25 aa, Artificial Sequence
  Cyclic GFR-binding peptide
LRPVQMRKIDEYDKVVKKATVEMVV

SEQ ID NO: 72962 - protein, 32 aa, Artificial Sequence
  Cyclic GFR-binding peptide
  MOD_RES (29)..(31): Xaa is C or S
ELSNITMQIMDENEKVVIGEMSDMVVEGXGXR

SEQ ID NO: 72963 - protein, 41 aa, Artificial Sequence; identical to SEQ ID NO: 24507
  Cyclic GFR-binding peptide
  MOD_RES (3)..(40): Xaa is C or S

SEQ ID NO: 72964 - protein, 33 aa, Artificial Sequence
  Cyclic GFR-binding peptide
  MOD_RES (6)..(6): Xaa is C or S
VTKPTXAPTKLRSVKVAKVDDSSNVIKEVQVNM

SEQ ID NO: 72965 - protein, 29 aa, Artificial Sequence
  Cyclic GFR-binding peptide
VPQALRSVKIAKVVGRKPKVKEVQVMIVR

SEQ ID NO: 72966 - protein, 36 aa, Artificial Sequence
  Cyclic GFR-binding peptide
  MOD_RES (3)..(3): Xaa is C or S
VKXQPSRVHHEPLPVVYYEYVRKKPKLEQLSNRLEE

SEQ ID NO: 72967 - protein, 33 aa, Artificial Sequence; identical to SEQ ID NO: 18282
  Cyclic GFR-binding peptide
  MOD_RES (5)..(6): Xaa is C or S

SEQ ID NO: 72968 - protein, 28 aa, Artificial Sequence
  Cyclic GFR-binding peptide
VHHRPVQVRKIEYVRKKPKLKKATVRLE

SEQ ID NO: 72969 - protein, 35 aa, Artificial Sequence
  Cyclic GFR-binding peptide
  MOD_RES (32)..(34): Xaa is C or S
APTQLSNITVQIMDDSSNVIIGEMSNMVVRAXGXH

SEQ ID NO: 72970 - protein, 26 aa, Artificial Sequence
  Cyclic GFR-binding peptide
SNITVQIMDDSSNVIIGEMSNMVVRA

SEQ ID NO: 72971 - protein, 29 aa, Artificial Sequence
  Cyclic GFR-binding peptide
  MOD_RES (29)..(29): Xaa is C or S
QALRPVQIRKIVGRKPKVKKATVMIVRSX

SEQ ID NO: 72972 - protein, 38 aa, Artificial Sequence
  Cyclic GFR-binding peptide
  MOD_RES (1)..(38): Xaa is C or S
XRPTQVQLEPLTVLYYEIVRKKPIFEQLSNTLEDHLAX

SEQ ID NO: 72973 - protein, 26 aa, Artificial Sequence
  Cyclic GFR-binding peptide
SNITVQIMDDSSNVIIGEMSNMVVRS

SEQ ID NO: 72974 - protein, 31 aa, Artificial Sequence
  Cyclic GFR-binding peptide
  MOD_RES (29)..(31): Xaa is C or S
ELRPVQMRKIDEYDKVVKKATVEMVVEGXGX

SEQ ID NO: 72975 - protein, 34 aa, Artificial Sequence
  Cyclic GFR-binding peptide
  MOD_RES (2)..(34): Xaa is C or S
TXAPTKLRPVQVRKIDDSSNVIKKATVNMVVRSX

SEQ ID NO: 72976 - protein, 26 aa, Artificial Sequence
  Cyclic GFR-binding peptide
EERPVQMRKIRIKPHQGQHKKATVFL

SEQ ID NO: 72977 - protein, 32 aa, Artificial Sequence; identical to SEQ ID NO: 24521
  Cyclic GFR-binding peptide
  MOD_RES (32)..(32): Xaa is C or S

SEQ ID NO: 72978 - protein, 37 aa, Artificial Sequence
  Cyclic GFR-binding peptide
  MOD_RES (6)..(7): Xaa is C or S
TVPKPXXAPTQLRPVQVRKIDDSSNVIKKATVNMVVR

SEQ ID NO: 72979 - protein, 26 aa, Artificial Sequence
  Cyclic GFR-binding peptide
TELRPVQMRKIDENEKVVKKATVDMV

SEQ ID NO: 72980 - protein, 30 aa, Artificial Sequence
  Cyclic GFR-binding peptide
  MOD_RES (2)..(3): Xaa is C or S
PXXVPQDLSNITIQIMVGRTPKVIGEMSMV

SEQ ID NO: 72981 - protein, 33 aa, Artificial Sequence; identical to SEQ ID NO: 24523
  Cyclic GFR-binding peptide
  MOD_RES (5)..(5): Xaa is C or S

SEQ ID NO: 72982 - protein, 34 aa, Artificial Sequence; identical to SEQ ID NO: 24524
  Cyclic GFR-binding peptide
  MOD_RES (4)..(4): Xaa is C or S

SEQ ID NO: 72983 - protein, 28 aa, Artificial Sequence
  Cyclic GFR-binding peptide
  MOD_RES (1)..(1): Xaa is C or S
XAPTKLRPVQVRKIDDSSNVIKKATVNM

SEQ ID NO: 72984 - protein, 31 aa, Artificial Sequence
  Cyclic GFR-binding peptide
  MOD_RES (2)..(3): Xaa is C or S
PXXVPQALRSVKIAKVVGRKPKVKEVQVMIV

SEQ ID NO: 72985 - protein, 31 aa, Artificial Sequence
  Cyclic GFR-binding peptide
QLEPLTVLYYEIVRKKPIFEQLSNTLEDHLA

SEQ ID NO: 72986 - protein, 29 aa, Artificial Sequence
  Cyclic GFR-binding peptide
  MOD_RES (1)..(1): Xaa is C or S
XVPTELEPLTMLYYDEYDKVVEQLSNEMV

SEQ ID NO: 72987 - protein, 31 aa, Artificial Sequence
  Cyclic GFR-binding peptide
  MOD_RES (5)..(6): Xaa is C or S
IPKAXXVPTELRSVKMAKVDENEKVVKEVQV

SEQ ID NO: 72988 - protein, 20 aa, Artificial Sequence
  Cyclic GFR-binding peptide
RPVQIRKIIGKTPKIKKATV

SEQ ID NO: 72989 - protein, 28 aa, Artificial Sequence
  Cyclic GFR-binding peptide
  MOD_RES (27)..(27): Xaa is C or S
SNITVQIMDDSSNVIIGEMSNMVVRSXG

SEQ ID NO: 72990 - protein, 28 aa, Artificial Sequence
  Cyclic GFR-binding peptide
  MOD_RES (2)..(3): Xaa is C or S
PXXVPQDLRSVKIAKVVGRTPKVKEVQV

SEQ ID NO: 72991 - protein, 40 aa, Artificial Sequence
  Cyclic GFR-binding peptide
  MOD_RES (5)..(6)..(37)..(39): Xaa is C or S
SASPXXVSQDLRPVQIRKIIGKTPKIKKATVMIVKSXKXS

SEQ ID NO: 72992 - protein, 32 aa, Artificial Sequence
  Cyclic GFR-binding peptide
  MOD_RES (3)..(3): Xaa is C or S
VKXQPSRVHHEPLTVLYYEYVRKKPKLEQLSN

SEQ ID NO: 72993 - protein, 35 aa, Artificial Sequence; identical to SEQ ID NO: 18309
  Cyclic GFR-binding peptide
  MOD_RES (4)..(5): Xaa is C or S

SEQ ID NO: 72994 - protein, 37 aa, Artificial Sequence; identical to SEQ ID NO: 18310
  Cyclic GFR-binding peptide
  MOD_RES (2)..(34)..(36): Xaa is C or S

SEQ ID NO: 72995 - protein, 28 aa, Artificial Sequence
  Cyclic GFR-binding peptide
SNITVQIMEYVRKKPKLIGEMSRLEEHL

SEQ ID NO: 72996 - protein, 35 aa, Artificial Sequence
  Cyclic GFR-binding peptide
  MOD_RES (1)..(32)..(34): Xaa is C or S
XVSQDLRSVKIAKVIGKTPKIKEVQVMIVKSXKXS

SEQ ID NO: 72997 - protein, 37 aa, Artificial Sequence
  Cyclic GFR-binding peptide
  MOD_RES (36)..(36): Xaa is C or S
PSRVHHEPLPVVYYEYVRKKPKLEQLSNRLEEHLEXA

SEQ ID NO: 72998 - protein, 34 aa, Artificial Sequence; identical to SEQ ID NO: 18315
  Cyclic GFR-binding peptide
  MOD_RES (1)..(33): Xaa is C or S

SEQ ID NO: 72999 - protein, 33 aa, Artificial Sequence; identical to SEQ ID NO: 18317
  Cyclic GFR-binding peptide
  MOD_RES (5)..(6): Xaa is C or S

SEQ ID NO: 73000 - protein, 37 aa, Artificial Sequence
  Cyclic GFR-binding peptide
  MOD_RES (5)..(6): Xaa is C or S
VPKPXXAPTQLRPVQVRKIDDSSNVIKKATVNMVVRA

SEQ ID NO: 73001 - protein, 21 aa, Artificial Sequence
  Cyclic GFR-binding peptide
LEPLPIVYYIGKTPKIEQLSN

SEQ ID NO: 73002 - protein, 34 aa, Artificial Sequence
  Cyclic GFR-binding peptide
  MOD_RES (31)..(33): Xaa is C or S
VSQDLRPVQIRKIIGKTPKIKKATVMIVKSXKXS

SEQ ID NO: 73003 - protein, 34 aa, Artificial Sequence
  Cyclic GFR-binding peptide
  MOD_RES (4)..(4): Xaa is C or S
NVQXRPTQVQLEPLTVLYYEIVRKKPIFEQLSNT

SEQ ID NO: 73004 - protein, 28 aa, Artificial Sequence
  Cyclic GFR-binding peptide
PTQVQLEPLPVVYYEIVRKKPIFEQLSN

SEQ ID NO: 73005 - protein, 21 aa, Artificial Sequence
  Cyclic GFR-binding peptide
LEPLTMLYYDENEKVVEQLSN

SEQ ID NO: 73006 - protein, 37 aa, Artificial Sequence; identical to SEQ ID NO: 18325
  Cyclic GFR-binding peptide
  MOD_RES (3)..(4)..(36): Xaa is C or S

SEQ ID NO: 73007 - protein, 36 aa, Artificial Sequence; identical to SEQ ID NO: 18332
  Cyclic GFR-binding peptide
  MOD_RES (5)..(6): Xaa is C or S

SEQ ID NO: 73008 - protein, 23 aa, Artificial Sequence
  Cyclic GFR-binding peptide
LSNITVQIMEIVRKKPIFIGEMS

SEQ ID NO: 73009 - protein, 24 aa, Artificial Sequence
  Cyclic GFR-binding peptide
KLEPLTVLYYDDSSNVIEQLSNNM

SEQ ID NO: 73010 - protein, 39 aa, Artificial Sequence
  Cyclic GFR-binding peptide
  MOD_RES (6)..(7)..(39): Xaa is C or S
KIPKAXXVPTELRSVKMAKVDENEKVVKEVQVDMVVEGX

SEQ ID NO: 73011 - protein, 30 aa, Artificial Sequence; identical to SEQ ID NO: 18344
  Cyclic GFR-binding peptide
  MOD_RES (2)..(3): Xaa is C or S

SEQ ID NO: 73012 - protein, 30 aa, Artificial Sequence; identical to SEQ ID NO: 18345
  Cyclic GFR-binding peptide

SEQ ID NO: 73013 - protein, 31 aa, Artificial Sequence
  Cyclic GFR-binding peptide
  MOD_RES (2)..(2): Xaa is C or S
KXQPSRVHHEPLPVVYYEYVRKKPKLEQLSN

SEQ ID NO: 73014 - protein, 39 aa, Artificial Sequence
  Cyclic GFR-binding peptide
  MOD_RES (6)..(7)..(38): Xaa is C or S
ASAAPXXVPQALRPVQIRKIVGRKPKVKKATVMIVRSXK

SEQ ID NO: 73015 - protein, 22 aa, Artificial Sequence
  Cyclic GFR-binding peptide
LEPLTMLYYDENEKVVEQLSND

SEQ ID NO: 73016 - protein, 27 aa, Artificial Sequence
  Cyclic GFR-binding peptide
  MOD_RES (27)..(27): Xaa is C or S
SNITMQIMDEYDKVVIGEMSEMVVEGX

SEQ ID NO: 73017 - protein, 32 aa, Artificial Sequence
  Cyclic GFR-binding peptide
  MOD_RES (1)..(1): Xaa is C or S
XVPTEEEPLTMLYYRIKPHQGQHEQLSNFLQH

SEQ ID NO: 73018 - protein, 29 aa, Artificial Sequence
  Cyclic GFR-binding peptide
  MOD_RES (1)..(1): Xaa is C or S
XVPTELRSVKMAKVDEYDKVVKEVQVEMV

SEQ ID NO: 73019 - protein, 30 aa, Artificial Sequence
  Cyclic GFR-binding peptide
  MOD_RES (1)..(1): Xaa is C or S
XAPTKLSNITVQIMDDSSNVIIGEMSNMVV

SEQ ID NO: 73020 - protein, 42 aa, Artificial Sequence; identical to SEQ ID NO: 18353
  Cyclic GFR-binding peptide
  MOD_RES (6)..(7)..(39)..(41): Xaa is C or S

SEQ ID NO: 73021 - protein, 25 aa, Artificial Sequence
  Cyclic GFR-binding peptide
EEEPLPMVYYRIKPHQGQHEQLSNF

SEQ ID NO: 73022 - protein, 27 aa, Artificial Sequence
  Cyclic GFR-binding peptide
LSNITMQIMDENEKVVIGEMSDMVVEG

SEQ ID NO: 73023 - protein, 31 aa, Artificial Sequence
  Cyclic GFR-binding peptide
  MOD_RES (31)..(31): Xaa is C or S
PTELRPVQMRKIDEYDKVVKKATVEMVVEGX

SEQ ID NO: 73024 - protein, 31 aa, Artificial Sequence
  Cyclic GFR-binding peptide
  MOD_RES (3)..(4): Xaa is C or S
KPXXAPTKLRPVQVRKIDDSSNVIKKATVNM

SEQ ID NO: 73025 - protein, 33 aa, Artificial Sequence
  Cyclic GFR-binding peptide
  MOD_RES (4)..(4): Xaa is C or S
SVKXQPSRVHHEPLTVLYYEYVRKKPKLEQLSN

SEQ ID NO: 73026 - protein, 37 aa, Artificial Sequence; identical to SEQ ID NO: 18361
  Cyclic GFR-binding peptide
  MOD_RES (3)..(4)..(36): Xaa is C or S

SEQ ID NO: 73027 - protein, 40 aa, Artificial Sequence
  Cyclic GFR-binding peptide
  MOD_RES (5)..(6)..(38)..(40): Xaa is C or S
VPKPXXAPTKLSNITVQIMDDSSNVIIGEMSNMVVRSXGX

SEQ ID NO: 73028 - protein, 34 aa, Artificial Sequence; identical to SEQ ID NO: 18364
  Cyclic GFR-binding peptide
  MOD_RES (2)..(3): Xaa is C or S

SEQ ID NO: 73029 - protein, 40 aa, Artificial Sequence
  Cyclic GFR-binding peptide
  MOD_RES (7)..(7): Xaa is C or S
NDEGLEXVPTEEEPLTMLYYRIKPHQGQHEQLSNFLQHNK

SEQ ID NO: 73030 - protein, 30 aa, Artificial Sequence
  Cyclic GFR-binding peptide
VPQDLRSVKIAKVVGRTPKVKEVQVMVVKS

SEQ ID NO: 73031 - protein, 26 aa, Artificial Sequence
  Cyclic GFR-binding peptide
TEERPVQMRKIRIKPHQGQHKKATVF

SEQ ID NO: 73032 - protein, 31 aa, Artificial Sequence; identical to SEQ ID NO: 24562
  Cyclic GFR-binding peptide
  MOD_RES (30)..(30): Xaa is C or S

SEQ ID NO: 73033 - protein, 32 aa, Artificial Sequence
  Cyclic GFR-binding peptide
  MOD_RES (30)..(32): Xaa is C or S
EEPLTMLYYRIKPHQGQHEQLSNFLQHNKXEX

SEQ ID NO: 73034 - protein, 38 aa, Artificial Sequence
  Cyclic GFR-binding peptide
  MOD_RES (3)..(4)..(36)..(38): Xaa is C or S
KAXXVPTELSNITMQIMDEYDKVVIGEMSEMVVEGXGX

SEQ ID NO: 73035 - protein, 31 aa, Artificial Sequence; identical to SEQ ID NO: 18385
  Cyclic GFR-binding peptide
  MOD_RES (1)..(1): Xaa is C or S

SEQ ID NO: 73036 - protein, 29 aa, Artificial Sequence
  Cyclic GFR-binding peptide
TQVQLSNITVQIMEIVRKKPIFIGEMSTL

SEQ ID NO: 73037 - protein, 27 aa, Artificial Sequence
  Cyclic GFR-binding peptide
KLEPLTVLYYDDSSNVIEQLSNNMVVR

SEQ ID NO: 73038 - protein, 31 aa, Artificial Sequence
  Cyclic GFR-binding peptide
  MOD_RES (5)..(6): Xaa is C or S
SASPXXVPQDLSNITIQIMVGRTPKVIGEMS

SEQ ID NO: 73039 - protein, 36 aa, Artificial Sequence; identical to SEQ ID NO: 24580
  Cyclic GFR-binding peptide
  MOD_RES (35)..(35): Xaa is C or S

SEQ ID NO: 73040 - protein, 31 aa, Artificial Sequence; identical to SEQ ID NO: 18394
  Cyclic GFR-binding peptide
  MOD_RES (29)..(31): Xaa is C or S

SEQ ID NO: 73041 - protein, 28 aa, Artificial Sequence
  Cyclic GFR-binding peptide
  MOD_RES (1)..(1): Xaa is C or S
XAPTQLRPVQVRKIDDSSNVIKKATVNM

SEQ ID NO: 73042 - protein, 29 aa, Artificial Sequence
  Cyclic GFR-binding peptide
  MOD_RES (3)..(4): Xaa is C or S
APXXVPQALRSVKIAKVVGRKPKVKEVQV

SEQ ID NO: 73043 - protein, 41 aa, Artificial Sequence
  Cyclic GFR-binding peptide
  MOD_RES (6)..(7)..(38)..(40): Xaa is C or S
ASASPXXVSQDLSNITIQIMIGKTPKIIGEMSMIVKSXKXS

SEQ ID NO: 73044 - protein, 36 aa, Artificial Sequence
  Cyclic GFR-binding peptide
  MOD_RES (1)..(2)..(33)..(35): Xaa is C or S
XXVSQDLSNITIQIMIGKTPKIIGEMSMIVKSXKXS

SEQ ID NO: 73045 - protein, 28 aa, Artificial Sequence
  Cyclic GFR-binding peptide
  MOD_RES (1)..(1): Xaa is C or S
XAPTQLEPLPVVYYDDSSNVIEQLSNNM

SEQ ID NO: 73046 - protein, 26 aa, Artificial Sequence
  Cyclic GFR-binding peptide
TEEEPLTMLYYRIKPHQGQHEQLSNF

SEQ ID NO: 73047 - protein, 35 aa, Artificial Sequence
  Cyclic GFR-binding peptide
  MOD_RES (2)..(2): Xaa is C or S
QXRPTQVQLEPLPVVYYEIVRKKPIFEQLSNTLED

SEQ ID NO: 73048 - protein, 30 aa, Artificial Sequence; identical to SEQ ID NO: 18407
  Cyclic GFR-binding peptide
  MOD_RES (4)..(5): Xaa is C or S

SEQ ID NO: 73049 - protein, 28 aa, Artificial Sequence
  Cyclic GFR-binding peptide
  MOD_RES (28)..(28): Xaa is C or S
LEPLPVVYYDDSSNVIEQLSNNMVVRSX

SEQ ID NO: 73050 - protein, 21 aa, Artificial Sequence
  Cyclic GFR-binding peptide
LSNITMQIMDEYDKVVIGEMS

SEQ ID NO: 73051 - protein, 39 aa, Artificial Sequence; identical to SEQ ID NO: 24587
  Cyclic GFR-binding peptide
  MOD_RES (5)..(5): Xaa is C or S

SEQ ID NO: 73052 - protein, 42 aa, Artificial Sequence
  Cyclic GFR-binding peptide
  MOD_RES (4)..(41): Xaa is C or S
NVQXRPTQVQLEPLPVVYYEIVRKKPIFEQLSNTLEDHLAXK

SEQ ID NO: 73053 - protein, 34 aa, Artificial Sequence
  Cyclic GFR-binding peptide
  MOD_RES (5)..(6): Xaa is C or S
VPKPXXAPTKLRPVQVRKIDDSSNVIKKATVNMV

SEQ ID NO: 73054 - protein, 30 aa, Artificial Sequence; identical to SEQ ID NO: 24596
  Cyclic GFR-binding peptide

SEQ ID NO: 73055 - protein, 27 aa, Artificial Sequence
  Cyclic GFR-binding peptide
  MOD_RES (27)..(27): Xaa is C or S
RSVKVAKVDDSSNVIKEVQVNMVVRSX

SEQ ID NO: 73056 - protein, 33 aa, Artificial Sequence
  Cyclic GFR-binding peptide
  MOD_RES (5)..(6): Xaa is C or S
IPKAXXVPTELRSVKMAKVDEYDKVVKEVQVEM

SEQ ID NO: 73057 - protein, 31 aa, Artificial Sequence; identical to SEQ ID NO: 18421
  Cyclic GFR-binding peptide
  MOD_RES (2)..(3): Xaa is C or S

SEQ ID NO: 73058 - protein, 28 aa, Artificial Sequence
  Cyclic GFR-binding peptide
HEPLTVLYYEYVRKKPKLEQLSNRLEEH

SEQ ID NO: 73059 - protein, 28 aa, Artificial Sequence
  Cyclic GFR-binding peptide
  MOD_RES (28)..(28): Xaa is C or S
ALRSVKIAKVVGRKPKVKEVQVMIVRSX

SEQ ID NO: 73060 - protein, 31 aa, Artificial Sequence
  Cyclic GFR-binding peptide
  MOD_RES (30)..(30): Xaa is C or S
SQDLRPVQIRKIIGKTPKIKKATVMIVKSXK

SEQ ID NO: 73061 - protein, 36 aa, Artificial Sequence
  Cyclic GFR-binding peptide
  MOD_RES (1)..(33)..(35): Xaa is C or S
XAPTKLRPVQVRKIDDSSNVIKKATVNMVVRSXGXH

SEQ ID NO: 73062 - protein, 30 aa, Artificial Sequence
  Cyclic GFR-binding peptide
  MOD_RES (2)..(2): Xaa is C or S
EXVPTEEEPLTMLYYRIKPHQGQHEQLSNF

SEQ ID NO: 73063 - protein, 37 aa, Artificial Sequence; identical to SEQ ID NO: 18429
  Cyclic GFR-binding peptide
  MOD_RES (3)..(4)..(36): Xaa is C or S

SEQ ID NO: 73064 - protein, 30 aa, Artificial Sequence
  Cyclic GFR-binding peptide
APTQLRPVQVRKIDDSSNVIKKATVNMVVR

SEQ ID NO: 73065 - protein, 30 aa, Artificial Sequence
  Cyclic GFR-binding peptide
PTELRPVQMRKIDEYDKVVKKATVEMVVEG

SEQ ID NO: 73066 - protein, 30 aa, Artificial Sequence
  Cyclic GFR-binding peptide
  MOD_RES (2)..(3): Xaa is C or S
PXXAPTQLRSVKVAKVDDSSNVIKEVQVNM

SEQ ID NO: 73067 - protein, 37 aa, Artificial Sequence
  Cyclic GFR-binding peptide
  MOD_RES (4)..(4): Xaa is C or S
NVQXRPTQVQLEPLPVVYYEIVRKKPIFEQLSNTLED

SEQ ID NO: 73068 - protein, 29 aa, Artificial Sequence
  Cyclic GFR-binding peptide
  MOD_RES (2)..(3): Xaa is C or S
PXXVPQALSNITIQIMVGRKPKVIGEMSM

SEQ ID NO: 73069 - protein, 32 aa, Artificial Sequence; identical to SEQ ID NO: 18453
  Cyclic GFR-binding peptide
  MOD_RES (5)..(5): Xaa is C or S

SEQ ID NO: 73070 - protein, 26 aa, Artificial Sequence
  Cyclic GFR-binding peptide
VPTELEPLPMVYYDEYDKVVEQLSNE

SEQ ID NO: 73071 - protein, 29 aa, Artificial Sequence
  Cyclic GFR-binding peptide
VHHRPVQVRKIEYVRKKPKLKKATVRLEE

SEQ ID NO: 73072 - protein, 33 aa, Artificial Sequence
  Cyclic GFR-binding peptide
  MOD_RES (32)..(32): Xaa is C or S
VPTELSNITMQIMDENEKVVIGEMSDMVVEGXG

SEQ ID NO: 73073 - protein, 26 aa, Artificial Sequence
  Cyclic GFR-binding peptide
EEEPLTMLYYRIKPHQGQHEQLSNFL

SEQ ID NO: 73074 - protein, 36 aa, Artificial Sequence; identical to SEQ ID NO: 24632
  Cyclic GFR-binding peptide
  MOD_RES (4)..(4): Xaa is C or S

SEQ ID NO: 73075 - protein, 22 aa, Artificial Sequence
  Cyclic GFR-binding peptide
LEPLTVLYYDDSSNVIEQLSNN

SEQ ID NO: 73076 - protein, 40 aa, Artificial Sequence; identical to SEQ ID NO: 18463
  Cyclic GFR-binding peptide
  MOD_RES (5)..(6)..(38)..(40): Xaa is C or S

SEQ ID NO: 73077 - protein, 37 aa, Artificial Sequence; identical to SEQ ID NO: 24635
  Cyclic GFR-binding peptide
  MOD_RES (34)..(36): Xaa is C or S

SEQ ID NO: 73078 - protein, 38 aa, Artificial Sequence
  Cyclic GFR-binding peptide
  MOD_RES (4)..(4): Xaa is C or S
SVKXQPSRVHHEPLTVLYYEYVRKKPKLEQLSNRLEEH

SEQ ID NO: 73079 - protein, 28 aa, Artificial Sequence
  Cyclic GFR-binding peptide
  MOD_RES (26)..(28): Xaa is C or S
RSVKIAKVIGKTPKIKEVQVMIVKSXKX

SEQ ID NO: 73080 - protein, 36 aa, Artificial Sequence
  Cyclic GFR-binding peptide
  MOD_RES (2)..(34)..(36): Xaa is C or S
TXAPTKLRPVQVRKIDDSSNVIKKATVNMVVRSXGX

SEQ ID NO: 73081 - protein, 37 aa, Artificial Sequence
  Cyclic GFR-binding peptide
  MOD_RES (5)..(6)..(37): Xaa is C or S
SAAPXXVPQALSNITIQIMVGRKPKVIGEMSMIVRSX

SEQ ID NO: 73082 - protein, 25 aa, Artificial Sequence
  Cyclic GFR-binding peptide
LEPLPVVYYDDSSNVIEQLSNNMVV

SEQ ID NO: 73083 - protein, 21 aa, Artificial Sequence
  Cyclic GFR-binding peptide
LSNITMQIMDENEKVVIGEMS

SEQ ID NO: 73084 - protein, 41 aa, Artificial Sequence; identical to SEQ ID NO: 18475
  Cyclic GFR-binding peptide
  MOD_RES (6)..(7)..(39)..(41): Xaa is C or S

SEQ ID NO: 73085 - protein, 33 aa, Artificial Sequence
  Cyclic GFR-binding peptide
  MOD_RES (31)..(33): Xaa is C or S
PTELRPVQMRKIDEYDKVVKKATVEMVVEGXGX

SEQ ID NO: 73086 - protein, 38 aa, Artificial Sequence
  Cyclic GFR-binding peptide
  MOD_RES (4)..(4): Xaa is C or S
SVKXQPSRVHHEPLPVVYYEYVRKKPKLEQLSNRLEEH

SEQ ID NO: 73087 - protein, 32 aa, Artificial Sequence; identical to SEQ ID NO: 24640
  Cyclic GFR-binding peptide

SEQ ID NO: 73088 - protein, 33 aa, Artificial Sequence; identical to SEQ ID NO: 18482
  Cyclic GFR-binding peptide
  MOD_RES (6)..(6): Xaa is C or S

SEQ ID NO: 73089 - protein, 32 aa, Artificial Sequence
  Cyclic GFR-binding peptide
  MOD_RES (7)..(7): Xaa is C or S
HVTKPTXAPTKLSNITVQIMDDSSNVIIGEMS

SEQ ID NO: 73090 - protein, 29 aa, Artificial Sequence
  Cyclic GFR-binding peptide
  MOD_RES (1)..(2): Xaa is C or S
XXAPTKLEPLPVVYYDDSSNVIEQLSNNM

SEQ ID NO: 73091 - protein, 31 aa, Artificial Sequence
  Cyclic GFR-binding peptide
  MOD_RES (3)..(4): Xaa is C or S
SPXXVSQDLRPVQIRKIIGKTPKIKKATVMI

SEQ ID NO: 73092 - protein, 33 aa, Artificial Sequence
  Cyclic GFR-binding peptide
  MOD_RES (1)..(32): Xaa is C or S
XVPQALRSVKIAKVVGRKPKVKEVQVMIVRSXK

SEQ ID NO: 73093 - protein, 29 aa, Artificial Sequence
  Cyclic GFR-binding peptide
TQLRSVKVAKVDDSSNVIKEVQVNMVVRA

SEQ ID NO: 73094 - protein, 30 aa, Artificial Sequence
  Cyclic GFR-binding peptide
  MOD_RES (1)..(2): Xaa is C or S
XXVSQDLRPVQIRKIIGKTPKIKKATVMIV

SEQ ID NO: 73095 - protein, 29 aa, Artificial Sequence
  Cyclic GFR-binding peptide
  MOD_RES (3)..(4): Xaa is C or S
KPXXAPTKLRSVKVAKVDDSSNVIKEVQV

SEQ ID NO: 73096 - protein, 38 aa, Artificial Sequence
  Cyclic GFR-binding peptide
  MOD_RES (2)..(3)..(35)..(37): Xaa is C or S
PXXAPTKLRSVKVAKVDDSSNVIKEVQVNMVVRSXGXH

SEQ ID NO: 73097 - protein, 40 aa, Artificial Sequence; identical to SEQ ID NO: 24647
  Cyclic GFR-binding peptide
  MOD_RES (4)..(4): Xaa is C or S

SEQ ID NO: 73098 - protein, 25 aa, Artificial Sequence
  Cyclic GFR-binding peptide
PTELRPVQMRKIDENEKVVKKATVD

SEQ ID NO: 73099 - protein, 40 aa, Artificial Sequence
  Cyclic GFR-binding peptide
  MOD_RES (6)..(7)..(38)..(40): Xaa is C or S
ASAAPXXVPQALRSVKIAKVVGRKPKVKEVQVMIVRSXKX

SEQ ID NO: 73100 - protein, 29 aa, Artificial Sequence
  Cyclic GFR-binding peptide
  MOD_RES (3)..(4): Xaa is C or S
KAXXVPTELRPVQMRKIDEYDKVVKKATV

SEQ ID NO: 73101 - protein, 29 aa, Artificial Sequence
  Cyclic GFR-binding peptide
  MOD_RES (28)..(28): Xaa is C or S
ALEPLTILYYVGRKPKVEQLSNMIVRSXK

SEQ ID NO: 73102 - protein, 41 aa, Artificial Sequence
  Cyclic GFR-binding peptide
  MOD_RES (5)..(5): Xaa is C or S
RNVQXRPTQVQLEPLTVLYYEIVRKKPIFEQLSNTLEDHLA

SEQ ID NO: 73103 - protein, 31 aa, Artificial Sequence; identical to SEQ ID NO: 24656
  Cyclic GFR-binding peptide

SEQ ID NO: 73104 - protein, 35 aa, Artificial Sequence; identical to SEQ ID NO: 18502
  Cyclic GFR-binding peptide
  MOD_RES (1)..(33)..(35): Xaa is C or S

SEQ ID NO: 73105 - protein, 37 aa, Artificial Sequence; identical to SEQ ID NO: 18503
  Cyclic GFR-binding peptide
  MOD_RES (3)..(35)..(37): Xaa is C or S

SEQ ID NO: 73106 - protein, 25 aa, Artificial Sequence
  Cyclic GFR-binding peptide
TEEEPLTMLYYRIKPHQGQHEQLSN

SEQ ID NO: 73107 - protein, 30 aa, Artificial Sequence; identical to SEQ ID NO: 18505
  Cyclic GFR-binding peptide
  MOD_RES (27)..(29): Xaa is C or S

SEQ ID NO: 73108 - protein, 29 aa, Artificial Sequence
  Cyclic GFR-binding peptide
  MOD_RES (3)..(4): Xaa is C or S
KAXXVPTELEPLPMVYYDEYDKVVEQLSN

SEQ ID NO: 73109 - protein, 29 aa, Artificial Sequence
  Cyclic GFR-binding peptide
  MOD_RES (29)..(29): Xaa is C or S
QLEPLPVVYYDDSSNVIEQLSNNMVVRAX

SEQ ID NO: 73110 - protein, 33 aa, Artificial Sequence
  Cyclic GFR-binding peptide
  MOD_RES (3)..(4): Xaa is C or S
SPXXVPQDLRPVQIRKIVGRTPKVKKATVMVVK

SEQ ID NO: 73111 - protein, 25 aa, Artificial Sequence
  Cyclic GFR-binding peptide
RSVKMAKVRIKPHQGQHKEVQVFLQ

SEQ ID NO: 73112 - protein, 32 aa, Artificial Sequence; identical to SEQ ID NO: 18514
  Cyclic GFR-binding peptide
  MOD_RES (4)..(5): Xaa is C or S

SEQ ID NO: 73113 - protein, 32 aa, Artificial Sequence
  Cyclic GFR-binding peptide
  MOD_RES (6)..(7): Xaa is C or S
YVPKPXXAPTKLSNITVQIMDDSSNVIIGEMS

SEQ ID NO: 73114 - protein, 30 aa, Artificial Sequence
  Cyclic GFR-binding peptide
  MOD_RES (3)..(4): Xaa is C or S
KPXXAPTKLSNITVQIMDDSSNVIIGEMSN

SEQ ID NO: 73115 - protein, 27 aa, Artificial Sequence
  Cyclic GFR-binding peptide
PTEERPVQMRKIRIKPHQGQHKKATVF

SEQ ID NO: 73116 - protein, 34 aa, Artificial Sequence
  Cyclic GFR-binding peptide
  MOD_RES (32)..(34): Xaa is C or S
APTQLRPVQVRKIDDSSNVIKKATVNMVVRAXGX

SEQ ID NO: 73117 - protein, 29 aa, Artificial Sequence
  Cyclic GFR-binding peptide
TKLRPVQVRKIDDSSNVIKKATVNMVVRS

SEQ ID NO: 73118 - protein, 26 aa, Artificial Sequence
  Cyclic GFR-binding peptide
LRSVKMAKVDENEKVVKEVQVDMVVE

SEQ ID NO: 73119 - protein, 33 aa, Artificial Sequence
  Cyclic GFR-binding peptide
  MOD_RES (30)..(32): Xaa is C or S
TKLRSVKVAKVDDSSNVIKEVQVNMVVRSXGXH

SEQ ID NO: 73120 - protein, 32 aa, Artificial Sequence; identical to SEQ ID NO: 18533
  Cyclic GFR-binding peptide
  MOD_RES (1)..(2): Xaa is C or S

SEQ ID NO: 73121 - protein, 28 aa, Artificial Sequence
  Cyclic GFR-binding peptide
  MOD_RES (1)..(1): Xaa is C or S
XAPTKLRSVKVAKVDDSSNVIKEVQVNM

SEQ ID NO: 73122 - protein, 39 aa, Artificial Sequence
  Cyclic GFR-binding peptide
  MOD_RES (36)..(38): Xaa is C or S
PSRVHHEPLTVLYYEYVRKKPKLEQLSNRLEEHLEXAXA

SEQ ID NO: 73123 - protein, 28 aa, Artificial Sequence
  Cyclic GFR-binding peptide
PTELRSVKMAKVDENEKVVKEVQVDMVV

SEQ ID NO: 73124 - protein, 28 aa, Artificial Sequence
  Cyclic GFR-binding peptide
  MOD_RES (26)..(28): Xaa is C or S
SNITIQIMIGKTPKIIGEMSMIVKSXKX

SEQ ID NO: 73125 - protein, 35 aa, Artificial Sequence; identical to SEQ ID NO: 24692
  Cyclic GFR-binding peptide
  MOD_RES (4)..(4): Xaa is C or S

SEQ ID NO: 73126 - protein, 29 aa, Artificial Sequence
  Cyclic GFR-binding peptide
PSRVHHEPLTVLYYEYVRKKPKLEQLSNR

SEQ ID NO: 73127 - protein, 38 aa, Artificial Sequence; identical to SEQ ID NO: 18547
  Cyclic GFR-binding peptide
  MOD_RES (6)..(7)..(38): Xaa is C or S

SEQ ID NO: 73128 - protein, 24 aa, Artificial Sequence
  Cyclic GFR-binding peptide
QDLRSVKIAKVIGKTPKIKEVQVM

SEQ ID NO: 73129 - protein, 34 aa, Artificial Sequence
  Cyclic GFR-binding peptide
  MOD_RES (31)..(33): Xaa is C or S
PTKLRPVQVRKIDDSSNVIKKATVNMVVRSXGXH

SEQ ID NO: 73130 - protein, 30 aa, Artificial Sequence
  Cyclic GFR-binding peptide
LEPLTVLYYEIVRKKPIFEQLSNTLEDHLA

SEQ ID NO: 73131 - protein, 32 aa, Artificial Sequence
  Cyclic GFR-binding peptide
  MOD_RES (30)..(32): Xaa is C or S
EPLPVVYYEIVRKKPIFEQLSNTLEDHLAXKX

SEQ ID NO: 73132 - protein, 28 aa, Artificial Sequence
  Cyclic GFR-binding peptide
  MOD_RES (27)..(27): Xaa is C or S
LSNITIQIMIGKTPKIIGEMSMIVKSXK

SEQ ID NO: 73133 - protein, 29 aa, Artificial Sequence
  Cyclic GFR-binding peptide
  MOD_RES (2)..(3): Xaa is C or S
PXXAPTKLSNITVQIMDDSSNVIIGEMSN

SEQ ID NO: 73134 - protein, 31 aa, Artificial Sequence
  Cyclic GFR-binding peptide
  MOD_RES (30)..(30): Xaa is C or S
SQDLRSVKIAKVIGKTPKIKEVQVMIVKSXK

SEQ ID NO: 73135 - protein, 32 aa, Artificial Sequence
  Cyclic GFR-binding peptide
  MOD_RES (30)..(32): Xaa is C or S
SQDLSNITIQIMIGKTPKIIGEMSMIVKSXKX

SEQ ID NO: 73136 - protein, 40 aa, Artificial Sequence
  Cyclic GFR-binding peptide
  MOD_RES (5)..(6)..(37)..(39): Xaa is C or S
SAAPXXVPQALRPVQIRKIVGRKPKVKKATVMIVRSXKXS

SEQ ID NO: 73137 - protein, 37 aa, Artificial Sequence
  Cyclic GFR-binding peptide
  MOD_RES (4)..(36): Xaa is C or S
KPTXAPTKLSNITVQIMDDSSNVIIGEMSNMVVRSXG

SEQ ID NO: 73138 - protein, 41 aa, Artificial Sequence
  Cyclic GFR-binding peptide
  MOD_RES (6)..(7)..(38)..(40): Xaa is C or S
ASASPXXVSQDLRSVKIAKVIGKTPKIKEVQVMIVKSXKXS

SEQ ID NO: 73139 - protein, 30 aa, Artificial Sequence
  Cyclic GFR-binding peptide
PTEEEPLTMLYYRIKPHQGQHEQLSNFLQH

SEQ ID NO: 73140 - protein, 26 aa, Artificial Sequence
  Cyclic GFR-binding peptide
TELEPLTMLYYDEYDKVVEQLSNEMV

SEQ ID NO: 73141 - protein, 30 aa, Artificial Sequence
  Cyclic GFR-binding peptide
  MOD_RES (3)..(3): Xaa is C or S
LEXVPTEEEPLPMVYYRIKPHQGQHEQLSN

SEQ ID NO: 73142 - protein, 32 aa, Artificial Sequence; identical to SEQ ID NO: 18572
  Cyclic GFR-binding peptide
  MOD_RES (3)..(4): Xaa is C or S

SEQ ID NO: 73143 - protein, 24 aa, Artificial Sequence
  Cyclic GFR-binding peptide
DLSNITIQIMVGRTPKVIGEMSMV

SEQ ID NO: 73144 - protein, 30 aa, Artificial Sequence
  Cyclic GFR-binding peptide
  MOD_RES (30)..(30): Xaa is C or S
EEPLTMLYYRIKPHQGQHEQLSNFLQHNKX

SEQ ID NO: 73145 - protein, 31 aa, Artificial Sequence
  Cyclic GFR-binding peptide
  MOD_RES (2)..(2): Xaa is C or S
QXRPTQVQLEPLTVLYYEIVRKKPIFEQLSN

SEQ ID NO: 73146 - protein, 36 aa, Artificial Sequence; identical to SEQ ID NO: 18575
  Cyclic GFR-binding peptide
  MOD_RES (5)..(6): Xaa is C or S

SEQ ID NO: 73147 - protein, 30 aa, Artificial Sequence
  Cyclic GFR-binding peptide
VSQDLRPVQIRKIIGKTPKIKKATVMIVKS

SEQ ID NO: 73148 - protein, 27 aa, Artificial Sequence
  Cyclic GFR-binding peptide
LRPVQVRKIDDSSNVIKKATVNMVVRA

SEQ ID NO: 73149 - protein, 36 aa, Artificial Sequence; identical to SEQ ID NO: 24716
  Cyclic GFR-binding peptide
  MOD_RES (1)..(1): Xaa is C or S

SEQ ID NO: 73150 - protein, 34 aa, Artificial Sequence; identical to SEQ ID NO: 18581
  Cyclic GFR-binding peptide
  MOD_RES (7)..(7): Xaa is C or S

SEQ ID NO: 73151 - protein, 33 aa, Artificial Sequence
  Cyclic GFR-binding peptide
  MOD_RES (3)..(3): Xaa is C or S
VQXRPTQVQLEPLPVVYYEIVRKKPIFEQLSNT

SEQ ID NO: 73152 - protein, 30 aa, Artificial Sequence
  Cyclic GFR-binding peptide
  MOD_RES (2)..(3): Xaa is C or S
PXXVPQDLRPVQIRKIVGRTPKVKKATVMV

SEQ ID NO: 73153 - protein, 24 aa, Artificial Sequence
  Cyclic GFR-binding peptide
LRPVQMRKIDENEKVVKKATVDMV

SEQ ID NO: 73154 - protein, 33 aa, Artificial Sequence
  Cyclic GFR-binding peptide
  MOD_RES (1)..(2): Xaa is C or S
XXVPTELRPVQMRKIDEYDKVVKKATVEMVVEG

SEQ ID NO: 73155 - protein, 33 aa, Artificial Sequence
  Cyclic GFR-binding peptide
  MOD_RES (1)..(33): Xaa is C or S
XVPTELSNITMQIMDENEKVVIGEMSDMVVEGX

SEQ ID NO: 73156 - protein, 38 aa, Artificial Sequence
  Cyclic GFR-binding peptide
  MOD_RES (4)..(38): Xaa is C or S
GLEXVPTEEEPLPMVYYRIKPHQGQHEQLSNFLQHNKX

SEQ ID NO: 73157 - protein, 26 aa, Artificial Sequence
  Cyclic GFR-binding peptide
ELEPLTMLYYDENEKVVEQLSNDMVV

SEQ ID NO: 73158 - protein, 42 aa, Artificial Sequence
  Cyclic GFR-binding peptide
  MOD_RES (6)..(7)..(39)..(41): Xaa is C or S
SIPKAXXVPTELSNITMQIMDEYDKVVIGEMSEMVVEGXGXR

SEQ ID NO: 73159 - protein, 34 aa, Artificial Sequence
  Cyclic GFR-binding peptide
  MOD_RES (3)..(4): Xaa is C or S
SPXXVPQDLRPVQIRKIVGRTPKVKKATVMVVKS

SEQ ID NO: 73160 - protein, 32 aa, Artificial Sequence; identical to SEQ ID NO: 24727
  Cyclic GFR-binding peptide
  MOD_RES (32)..(32): Xaa is C or S

SEQ ID NO: 73161 - protein, 41 aa, Artificial Sequence
  Cyclic GFR-binding peptide
  MOD_RES (5)..(5): Xaa is C or S
RNVQXRPTQVQLEPLPVVYYEIVRKKPIFEQLSNTLEDHLA

SEQ ID NO: 73162 - protein, 25 aa, Artificial Sequence
  Cyclic GFR-binding peptide
VPTELSNITMQIMDENEKVVIGEMS

SEQ ID NO: 73163 - protein, 27 aa, Artificial Sequence
  Cyclic GFR-binding peptide
LRPVQVRKIDDSSNVIKKATVNMVVRS

SEQ ID NO: 73164 - protein, 32 aa, Artificial Sequence
  Cyclic GFR-binding peptide
  MOD_RES (32)..(32): Xaa is C or S
APTKLRPVQVRKIDDSSNVIKKATVNMVVRSX

SEQ ID NO: 73165 - protein, 22 aa, Artificial Sequence
  Cyclic GFR-binding peptide
EPLTMLYYRIKPHQGQHEQLSN

SEQ ID NO: 73166 - protein, 32 aa, Artificial Sequence
  Cyclic GFR-binding peptide
VPTEEEPLTMLYYRIKPHQGQHEQLSNFLQHN

SEQ ID NO: 73167 - protein, 36 aa, Artificial Sequence
  Cyclic GFR-binding peptide
  MOD_RES (4)..(5): Xaa is C or S
PKAXXVPTELSNITMQIMDEYDKVVIGEMSEMVVEG

SEQ ID NO: 73168 - protein, 31 aa, Artificial Sequence; identical to SEQ ID NO: 24732
  Cyclic GFR-binding peptide

SEQ ID NO: 73169 - protein, 29 aa, Artificial Sequence
  Cyclic GFR-binding peptide
  MOD_RES (2)..(3): Xaa is C or S
AXXVPTELSNITMQIMDEYDKVVIGEMSE

SEQ ID NO: 73170 - protein, 20 aa, Artificial Sequence
  Cyclic GFR-binding peptide
EPLPIVYYVGRTPKVEQLSN

SEQ ID NO: 73171 - protein, 40 aa, Artificial Sequence
  Cyclic GFR-binding peptide
  MOD_RES (5)..(37)..(39): Xaa is C or S
TKPTXAPTKLSNITVQIMDDSSNVIIGEMSNMVVRSXGXH

SEQ ID NO: 73172 - protein, 21 aa, Artificial Sequence
  Cyclic GFR-binding peptide
EPLPIVYYVGRTPKVEQLSNM

SEQ ID NO: 73173 - protein, 39 aa, Artificial Sequence
  Cyclic GFR-binding peptide
  MOD_RES (5)..(39): Xaa is C or S
EGLEXVPTEEEPLPMVYYRIKPHQGQHEQLSNFLQHNKX

SEQ ID NO: 73174 - protein, 26 aa, Artificial Sequence
  Cyclic GFR-binding peptide
PTELRPVQMRKIDEYDKVVKKATVEM

SEQ ID NO: 73175 - protein, 34 aa, Artificial Sequence
  Cyclic GFR-binding peptide
  MOD_RES (2)..(3)..(34): Xaa is C or S
PXXVSQDLRSVKIAKVIGKTPKIKEVQVMIVKSX

SEQ ID NO: 73176 - protein, 42 aa, Artificial Sequence
  Cyclic GFR-binding peptide
  MOD_RES (2)..(39)..(41): Xaa is C or S
QXRPTQVQLEPLPVVYYEIVRKKPIFEQLSNTLEDHLAXKXE

SEQ ID NO: 73177 - protein, 34 aa, Artificial Sequence; identical to SEQ ID NO: 18613
  Cyclic GFR-binding peptide
  MOD_RES (31)..(33): Xaa is C or S

SEQ ID NO: 73178 - protein, 27 aa, Artificial Sequence
  Cyclic GFR-binding peptide
PQDLRPVQIRKIVGRTPKVKKATVMVV

SEQ ID NO: 73179 - protein, 32 aa, Artificial Sequence
  Cyclic GFR-binding peptide
  MOD_RES (3)..(4): Xaa is C or S
SPXXVSQDLRPVQIRKIIGKTPKIKKATVMIV

SEQ ID NO: 73180 - protein, 28 aa, Artificial Sequence
  Cyclic GFR-binding peptide
VPTELSNITMQIMDENEKVVIGEMSDMV

SEQ ID NO: 73181 - protein, 32 aa, Artificial Sequence
  Cyclic GFR-binding peptide
  MOD_RES (4)..(5): Xaa is C or S
AAPXXVPQALSNITIQIMVGRKPKVIGEMSMI

SEQ ID NO: 73182 - protein, 31 aa, Artificial Sequence; identical to SEQ ID NO: 18619
  Cyclic GFR-binding peptide
  MOD_RES (30)..(30): Xaa is C or S

SEQ ID NO: 73183 - protein, 22 aa, Artificial Sequence
  Cyclic GFR-binding peptide
ALEPLTILYYVGRKPKVEQLSN

SEQ ID NO: 73184 - protein, 38 aa, Artificial Sequence
  Cyclic GFR-binding peptide
  MOD_RES (7)..(7): Xaa is C or S
NDEGLEXVPTEEEPLTMLYYRIKPHQGQHEQLSNFLQH

SEQ ID NO: 73185 - protein, 29 aa, Artificial Sequence
  Cyclic GFR-binding peptide
PTELEPLPMVYYDENEKVVEQLSNDMVVE

SEQ ID NO: 73186 - protein, 20 aa, Artificial Sequence
  Cyclic GFR-binding peptide
RPVQIRKIVGRTPKVKKATV

SEQ ID NO: 73187 - protein, 27 aa, Artificial Sequence
  Cyclic GFR-binding peptide
VPTELRPVQMRKIDENEKVVKKATVDM

SEQ ID NO: 73188 - protein, 39 aa, Artificial Sequence
  Cyclic GFR-binding peptide
  MOD_RES (2)..(36)..(38): Xaa is C or S
EXVPTEEEPLPMVYYRIKPHQGQHEQLSNFLQHNKXEXR

SEQ ID NO: 73189 - protein, 39 aa, Artificial Sequence; identical to SEQ ID NO: 18629
  Cyclic GFR-binding peptide
  MOD_RES (4)..(5)..(37)..(39): Xaa is C or S

SEQ ID NO: 73190 - protein, 30 aa, Artificial Sequence
  Cyclic GFR-binding peptide
  MOD_RES (29)..(29): Xaa is C or S
QDLRPVQIRKIVGRTPKVKKATVMVVKSXK

SEQ ID NO: 73191 - protein, 35 aa, Artificial Sequence; identical to SEQ ID NO: 18632
  Cyclic GFR-binding peptide
  MOD_RES (6)..(7): Xaa is C or S

SEQ ID NO: 73192 - protein, 25 aa, Artificial Sequence
  Cyclic GFR-binding peptide
LEPLPIVYYIGKTPKIEQLSNMIVK

SEQ ID NO: 73193 - protein, 31 aa, Artificial Sequence
  Cyclic GFR-binding peptide
RPTQVQLEPLTVLYYEIVRKKPIFEQLSNTL

SEQ ID NO: 73194 - protein, 32 aa, Artificial Sequence
  Cyclic GFR-binding peptide
  MOD_RES (4)..(5): Xaa is C or S
PKPXXAPTKLRPVQVRKIDDSSNVIKKATVNM

SEQ ID NO: 73195 - protein, 31 aa, Artificial Sequence; identical to SEQ ID NO: 18638
  Cyclic GFR-binding peptide
  MOD_RES (31)..(31): Xaa is C or S

SEQ ID NO: 73196 - protein, 25 aa, Artificial Sequence
  Cyclic GFR-binding peptide
LRPVQMRKIDENEKVVKKATVDMVV

SEQ ID NO: 73197 - protein, 36 aa, Artificial Sequence
  Cyclic GFR-binding peptide
  MOD_RES (3)..(3): Xaa is C or S
VQXRPTQVQLEPLTVLYYEIVRKKPIFEQLSNTLED

SEQ ID NO: 73198 - protein, 31 aa, Artificial Sequence
  Cyclic GFR-binding peptide
  MOD_RES (6)..(6): Xaa is C or S
VTKPTXAPTKLSNITVQIMDDSSNVIIGEMS

SEQ ID NO: 73199 - protein, 24 aa, Artificial Sequence
  Cyclic GFR-binding peptide
ELRSVKMAKVDENEKVVKEVQVDM

SEQ ID NO: 73200 - protein, 34 aa, Artificial Sequence; identical to SEQ ID NO: 24757
  Cyclic GFR-binding peptide
  MOD_RES (1)..(1): Xaa is C or S

SEQ ID NO: 73201 - protein, 39 aa, Artificial Sequence; identical to SEQ ID NO: 18645
  Cyclic GFR-binding peptide
  MOD_RES (3)..(4)..(36)..(38): Xaa is C or S

SEQ ID NO: 73202 - protein, 39 aa, Artificial Sequence
  Cyclic GFR-binding peptide
  MOD_RES (6)..(7)..(39): Xaa is C or S
SIPKAXXVPTELRPVQMRKIDEYDKVVKKATVEMVVEGX

SEQ ID NO: 73203 - protein, 34 aa, Artificial Sequence; identical to SEQ ID NO: 18647
  Cyclic GFR-binding peptide
  MOD_RES (5)..(6): Xaa is C or S

SEQ ID NO: 73204 - protein, 29 aa, Artificial Sequence
  Cyclic GFR-binding peptide
PSRVHHSNITVQIMEYVRKKPKLIGEMSR

SEQ ID NO: 73205 - protein, 30 aa, Artificial Sequence; identical to SEQ ID NO: 24761
  Cyclic GFR-binding peptide

SEQ ID NO: 73206 - protein, 34 aa, Artificial Sequence
  Cyclic GFR-binding peptide
  MOD_RES (5)..(5): Xaa is C or S
SSVKXQPSRVHHEPLPVVYYEYVRKKPKLEQLSN

SEQ ID NO: 73207 - protein, 34 aa, Artificial Sequence
  Cyclic GFR-binding peptide
  MOD_RES (3)..(4): Xaa is C or S
KPXXAPTKLRSVKVAKVDDSSNVIKEVQVNMVVR

SEQ ID NO: 73208 - protein, 26 aa, Artificial Sequence
  Cyclic GFR-binding peptide
  MOD_RES (1)..(1): Xaa is C or S
XAPTKLSNITVQIMDDSSNVIIGEMS

SEQ ID NO: 73209 - protein, 33 aa, Artificial Sequence
  Cyclic GFR-binding peptide
  MOD_RES (1)..(1): Xaa is C or S
XRPTQVQLEPLPVVYYEIVRKKPIFEQLSNTLE

SEQ ID NO: 73210 - protein, 38 aa, Artificial Sequence; identical to SEQ ID NO: 18650
  Cyclic GFR-binding peptide
  MOD_RES (5)..(6)..(37): Xaa is C or S

SEQ ID NO: 73211 - protein, 32 aa, Artificial Sequence
  Cyclic GFR-binding peptide
  MOD_RES (5)..(6): Xaa is C or S
IPKAXXVPTELRSVKMAKVDENEKVVKEVQVD

SEQ ID NO: 73212 - protein, 24 aa, Artificial Sequence
  Cyclic GFR-binding peptide
PQALRSVKIAKVVGRKPKVKEVQV

SEQ ID NO: 73213 - protein, 38 aa, Artificial Sequence; identical to SEQ ID NO: 18651
  Cyclic GFR-binding peptide
  MOD_RES (3)..(4)..(36)..(38): Xaa is C or S

SEQ ID NO: 73214 - protein, 35 aa, Artificial Sequence; identical to SEQ ID NO: 18656
  Cyclic GFR-binding peptide
  MOD_RES (3)..(4): Xaa is C or S

SEQ ID NO: 73215 - protein, 27 aa, Artificial Sequence
  Cyclic GFR-binding peptide
APTQLRSVKVAKVDDSSNVIKEVQVNM

SEQ ID NO: 73216 - protein, 35 aa, Artificial Sequence; identical to SEQ ID NO: 18659
  Cyclic GFR-binding peptide
  MOD_RES (4)..(5): Xaa is C or S

SEQ ID NO: 73217 - protein, 37 aa, Artificial Sequence
  Cyclic GFR-binding peptide
  MOD_RES (2)..(3)..(34)..(36): Xaa is C or S
PXXVPQALSNITIQIMVGRKPKVIGEMSMIVRSXKXS

SEQ ID NO: 73218 - protein, 29 aa, Artificial Sequence
  Cyclic GFR-binding peptide
  MOD_RES (1)..(2): Xaa is C or S
XXVPTELRPVQMRKIDENEKVVKKATVDM

SEQ ID NO: 73219 - protein, 34 aa, Artificial Sequence
  Cyclic GFR-binding peptide
  MOD_RES (2)..(3): Xaa is C or S
AXXVPTELRSVKMAKVDEYDKVVKEVQVEMVVEG

SEQ ID NO: 73220 - protein, 23 aa, Artificial Sequence
  Cyclic GFR-binding peptide
QLRPVQVRKIDDSSNVIKKATVN

SEQ ID NO: 73221 - protein, 36 aa, Artificial Sequence; identical to SEQ ID NO: 24770
  Cyclic GFR-binding peptide
  MOD_RES (2)..(2): Xaa is C or S

SEQ ID NO: 73222 - protein, 40 aa, Artificial Sequence
  Cyclic GFR-binding peptide
  MOD_RES (6)..(7)..(38)..(40): Xaa is C or S
ASAAPXXVPQALRPVQIRKIVGRKPKVKKATVMIVRSXKX

SEQ ID NO: 73223 - protein, 33 aa, Artificial Sequence; identical to SEQ ID NO: 24777
  Cyclic GFR-binding peptide
  MOD_RES (3)..(3): Xaa is C or S

SEQ ID NO: 73224 - protein, 27 aa, Artificial Sequence
  Cyclic GFR-binding peptide
  MOD_RES (27)..(27): Xaa is C or S
LRSVKIAKVVGRKPKVKEVQVMIVRSX

SEQ ID NO: 73225 - protein, 24 aa, Artificial Sequence
  Cyclic GFR-binding peptide
LEPLTMLYYDENEKVVEQLSNDMV

SEQ ID NO: 73226 - protein, 33 aa, Artificial Sequence; identical to SEQ ID NO: 24780
  Cyclic GFR-binding peptide

SEQ ID NO: 73227 - protein, 30 aa, Artificial Sequence; identical to SEQ ID NO: 18669
  Cyclic GFR-binding peptide
  MOD_RES (3)..(4): Xaa is C or S

SEQ ID NO: 73228 - protein, 34 aa, Artificial Sequence
  Cyclic GFR-binding peptide
  MOD_RES (1)..(33): Xaa is C or S
XVPTELSNITMQIMDENEKVVIGEMSDMVVEGXG

SEQ ID NO: 73229 - protein, 33 aa, Artificial Sequence
  Cyclic GFR-binding peptide
  MOD_RES (32)..(32): Xaa is C or S
APTKLSNITVQIMDDSSNVIIGEMSNMVVRSXG

SEQ ID NO: 73230 - protein, 33 aa, Artificial Sequence; identical to SEQ ID NO: 24783
  Cyclic GFR-binding peptide

SEQ ID NO: 73231 - protein, 41 aa, Artificial Sequence
  Cyclic GFR-binding peptide
  MOD_RES (6)..(7)..(39)..(41): Xaa is C or S
SIPKAXXVPTELRPVQMRKIDEYDKVVKKATVEMVVEGXGX

SEQ ID NO: 73232 - protein, 32 aa, Artificial Sequence
  Cyclic GFR-binding peptide
  MOD_RES (30)..(32): Xaa is C or S
TELSNITMQIMDENEKVVIGEMSDMVVEGXGX

SEQ ID NO: 73233 - protein, 28 aa, Artificial Sequence
  Cyclic GFR-binding peptide
  MOD_RES (27)..(27): Xaa is C or S
LRSVKIAKVVGRTPKVKEVQVMVVKSXK

SEQ ID NO: 73234 - protein, 31 aa, Artificial Sequence
  Cyclic GFR-binding peptide
  MOD_RES (1)..(1): Xaa is C or S
XVPQDLRSVKIAKVVGRTPKVKEVQVMVVKS

SEQ ID NO: 73235 - protein, 30 aa, Artificial Sequence
  Cyclic GFR-binding peptide
  MOD_RES (30)..(30): Xaa is C or S
TKLRSVKVAKVDDSSNVIKEVQVNMVVRSX

SEQ ID NO: 73236 - protein, 31 aa, Artificial Sequence; identical to SEQ ID NO: 18681
  Cyclic GFR-binding peptide
  MOD_RES (4)..(4): Xaa is C or S

SEQ ID NO: 73237 - protein, 27 aa, Artificial Sequence
  Cyclic GFR-binding peptide
ELSNITMQIMDENEKVVIGEMSDMVVE

SEQ ID NO: 73238 - protein, 23 aa, Artificial Sequence
  Cyclic GFR-binding peptide
TQLEPLTVLYYDDSSNVIEQLSN

SEQ ID NO: 73239 - protein, 40 aa, Artificial Sequence; identical to SEQ ID NO: 18685
  Cyclic GFR-binding peptide
  MOD_RES (5)..(37)..(39): Xaa is C or S

SEQ ID NO: 73240 - protein, 27 aa, Artificial Sequence
  Cyclic GFR-binding peptide
  MOD_RES (27)..(27): Xaa is C or S
RPVQVRKIDDSSNVIKKATVNMVVRSX

SEQ ID NO: 73241 - protein, 30 aa, Artificial Sequence
  Cyclic GFR-binding peptide
  MOD_RES (1)..(2): Xaa is C or S
XXVPTELRPVQMRKIDENEKVVKKATVDMV

SEQ ID NO: 73242 - protein, 32 aa, Artificial Sequence; identical to SEQ ID NO: 18689
  Cyclic GFR-binding peptide
  MOD_RES (3)..(4): Xaa is C or S

SEQ ID NO: 73243 - protein, 40 aa, Artificial Sequence; identical to SEQ ID NO: 24799
  Cyclic GFR-binding peptide
  MOD_RES (7)..(7): Xaa is C or S

SEQ ID NO: 73244 - protein, 28 aa, Artificial Sequence
  Cyclic GFR-binding peptide
  MOD_RES (1)..(2): Xaa is C or S
XXVPQDLRSVKIAKVVGRTPKVKEVQVM

SEQ ID NO: 73245 - protein, 39 aa, Artificial Sequence
  Cyclic GFR-binding peptide
  MOD_RES (5)..(5): Xaa is C or S
RNVQXRPTQVQLEPLTVLYYEIVRKKPIFEQLSNTLEDH

SEQ ID NO: 73246 - protein, 36 aa, Artificial Sequence; identical to SEQ ID NO: 24802
  Cyclic GFR-binding peptide

SEQ ID NO: 73247 - protein, 25 aa, Artificial Sequence
  Cyclic GFR-binding peptide
LRSVKVAKVEIVRKKPIFKEVQVTL

SEQ ID NO: 73248 - protein, 39 aa, Artificial Sequence; identical to SEQ ID NO: 18698
  Cyclic GFR-binding peptide
  MOD_RES (4)..(5)..(37)..(39): Xaa is C or S

SEQ ID NO: 73249 - protein, 30 aa, Artificial Sequence
  Cyclic GFR-binding peptide
  MOD_RES (4)..(5): Xaa is C or S
ASPXXVPQDLRSVKIAKVVGRTPKVKEVQV

SEQ ID NO: 73250 - protein, 39 aa, Artificial Sequence
  Cyclic GFR-binding peptide
  MOD_RES (6)..(7)..(39): Xaa is C or S
YVPKPXXAPTKLRSVKVAKVDDSSNVIKEVQVNMVVRSX

SEQ ID NO: 73251 - protein, 27 aa, Artificial Sequence
  Cyclic GFR-binding peptide
VPQDLSNITIQIMVGRTPKVIGEMSMV

SEQ ID NO: 73252 - protein, 28 aa, Artificial Sequence
  Cyclic GFR-binding peptide
VSQDLRSVKIAKVIGKTPKIKEVQVMIV

SEQ ID NO: 73253 - protein, 31 aa, Artificial Sequence
  Cyclic GFR-binding peptide
  MOD_RES (31)..(31): Xaa is C or S
PTELRSVKMAKVDEYDKVVKEVQVEMVVEGX

SEQ ID NO: 73254 - protein, 27 aa, Artificial Sequence
  Cyclic GFR-binding peptide
LEPLPMVYYDEYDKVVEQLSNEMVVEG

SEQ ID NO: 73255 - protein, 37 aa, Artificial Sequence; identical to SEQ ID NO: 18709
  Cyclic GFR-binding peptide
  MOD_RES (5)..(6)..(37): Xaa is C or S

SEQ ID NO: 73256 - protein, 29 aa, Artificial Sequence
  Cyclic GFR-binding peptide
  MOD_RES (4)..(4): Xaa is C or S
KPTXAPTKLRPVQVRKIDDSSNVIKKATV

SEQ ID NO: 73257 - protein, 43 aa, Artificial Sequence; identical to SEQ ID NO: 24811
  Cyclic GFR-binding peptide
  MOD_RES (4)..(41)..(43): Xaa is C or S

SEQ ID NO: 73258 - protein, 40 aa, Artificial Sequence; identical to SEQ ID NO: 24813
  Cyclic GFR-binding peptide
  MOD_RES (2)..(39): Xaa is C or S

SEQ ID NO: 73259 - protein, 34 aa, Artificial Sequence
  Cyclic GFR-binding peptide
  MOD_RES (1)..(2)..(34): Xaa is C or S
XXVPTELRSVKMAKVDENEKVVKEVQVDMVVEGX

SEQ ID NO: 73260 - protein, 27 aa, Artificial Sequence
  Cyclic GFR-binding peptide
TQLEPLTVLYYDDSSNVIEQLSNNMVV

SEQ ID NO: 73261 - protein, 41 aa, Artificial Sequence; identical to SEQ ID NO: 18713
  Cyclic GFR-binding peptide
  MOD_RES (7)..(39)..(41): Xaa is C or S

SEQ ID NO: 73262 - protein, 35 aa, Artificial Sequence; identical to SEQ ID NO: 18716
  Cyclic GFR-binding peptide
  MOD_RES (4)..(5): Xaa is C or S

SEQ ID NO: 73263 - protein, 24 aa, Artificial Sequence
  Cyclic GFR-binding peptide
SQDLRSVKIAKVIGKTPKIKEVQV

SEQ ID NO: 73264 - protein, 31 aa, Artificial Sequence
  Cyclic GFR-binding peptide
  MOD_RES (5)..(6): Xaa is C or S
IPKAXXVPTELRSVKMAKVDEYDKVVKEVQV

SEQ ID NO: 73265 - protein, 26 aa, Artificial Sequence
  Cyclic GFR-binding peptide
VPQDLEPLPIVYYVGRTPKVEQLSNM

SEQ ID NO: 73266 - protein, 40 aa, Artificial Sequence
  Cyclic GFR-binding peptide
  MOD_RES (5)..(6)..(38)..(40): Xaa is C or S
IPKAXXVPTELSNITMQIMDEYDKVVIGEMSEMVVEGXGX

SEQ ID NO: 73267 - protein, 25 aa, Artificial Sequence
  Cyclic GFR-binding peptide
APTKLRSVKVAKVDDSSNVIKEVQV

SEQ ID NO: 73268 - protein, 38 aa, Artificial Sequence; identical to SEQ ID NO: 18723
  Cyclic GFR-binding peptide
  MOD_RES (4)..(5)..(37): Xaa is C or S

SEQ ID NO: 73269 - protein, 42 aa, Artificial Sequence
  Cyclic GFR-binding peptide
  MOD_RES (5)..(39)..(41): Xaa is C or S
EGLEXVPTEEEPLTMLYYRIKPHQGQHEQLSNFLQHNKXEXR

SEQ ID NO: 73270 - protein, 31 aa, Artificial Sequence
  Cyclic GFR-binding peptide
  MOD_RES (29)..(31): Xaa is C or S
ELRPVQMRKIDENEKVVKKATVDMVVEGXGX

SEQ ID NO: 73271 - protein, 35 aa, Artificial Sequence
  Cyclic GFR-binding peptide
  MOD_RES (4)..(4): Xaa is C or S
KPTXAPTKLRSVKVAKVDDSSNVIKEVQVNMVVRS

SEQ ID NO: 73272 - protein, 32 aa, Artificial Sequence; identical to SEQ ID NO: 24833
  Cyclic GFR-binding peptide
  MOD_RES (31)..(31): Xaa is C or S

SEQ ID NO: 73273 - protein, 37 aa, Artificial Sequence; identical to SEQ ID NO: 24834
  Cyclic GFR-binding peptide
  MOD_RES (3)..(3): Xaa is C or S

SEQ ID NO: 73274 - protein, 29 aa, Artificial Sequence
  Cyclic GFR-binding peptide
TQVQLEPLPVVYYEIVRKKPIFEQLSNTL

SEQ ID NO: 73275 - protein, 43 aa, Artificial Sequence
  Cyclic GFR-binding peptide
  MOD_RES (5)..(42): Xaa is C or S
SSVKXQPSRVHHEPLPVVYYEYVRKKPKLEQLSNRLEEHLEXA

SEQ ID NO: 73276 - protein, 32 aa, Artificial Sequence; identical to SEQ ID NO: 24841
  Cyclic GFR-binding peptide
  MOD_RES (3)..(3): Xaa is C or S

SEQ ID NO: 73277 - protein, 33 aa, Artificial Sequence; identical to SEQ ID NO: 24842
  Cyclic GFR-binding peptide
  MOD_RES (31)..(33): Xaa is C or S

SEQ ID NO: 73278 - protein, 31 aa, Artificial Sequence
  Cyclic GFR-binding peptide
  MOD_RES (1)..(1): Xaa is C or S
XAPTQLSNITVQIMDDSSNVIIGEMSNMVVR

SEQ ID NO: 73279 - protein, 21 aa, Artificial Sequence
  Cyclic GFR-binding peptide
LRPVQMRKIDEYDKVVKKATV

SEQ ID NO: 73280 - protein, 30 aa, Artificial Sequence; identical to SEQ ID NO: 18738
  Cyclic GFR-binding peptide
  MOD_RES (1)..(2): Xaa is C or S

SEQ ID NO: 73281 - protein, 40 aa, Artificial Sequence
  Cyclic GFR-binding peptide
  MOD_RES (37)..(39): Xaa is C or S
QPSRVHHEPLPVVYYEYVRKKPKLEQLSNRLEEHLEXAXA

SEQ ID NO: 73282 - protein, 27 aa, Artificial Sequence
  Cyclic GFR-binding peptide
  MOD_RES (1)..(1): Xaa is C or S
XVPQALEPLTILYYVGRKPKVEQLSNM

SEQ ID NO: 73283 - protein, 31 aa, Artificial Sequence
  Cyclic GFR-binding peptide
  MOD_RES (3)..(4): Xaa is C or S
SPXXVSQDLRSVKIAKVIGKTPKIKEVQVMI

SEQ ID NO: 73284 - protein, 28 aa, Artificial Sequence
  Cyclic GFR-binding peptide
VSQDLSNITIQIMIGKTPKIIGEMSMIV

SEQ ID NO: 73285 - protein, 33 aa, Artificial Sequence
  Cyclic GFR-binding peptide
  MOD_RES (1)..(32): Xaa is C or S
XVPQALRPVQIRKIVGRKPKVKKATVMIVRSXK

SEQ ID NO: 73286 - protein, 35 aa, Artificial Sequence
  Cyclic GFR-binding peptide
  MOD_RES (3)..(4): Xaa is C or S
KAXXVPTELSNITMQIMDEYDKVVIGEMSEMVVEG

SEQ ID NO: 73287 - protein, 27 aa, Artificial Sequence
  Cyclic GFR-binding peptide
KLRSVKVAKVDDSSNVIKEVQVNMVVR

SEQ ID NO: 73288 - protein, 32 aa, Artificial Sequence
  Cyclic GFR-binding peptide
  MOD_RES (5)..(6): Xaa is C or S
VPKPXXAPTKLSNITVQIMDDSSNVIIGEMSN

SEQ ID NO: 73289 - protein, 26 aa, Artificial Sequence
  Cyclic GFR-binding peptide
PTELEPLTMLYYDENEKVVEQLSNDM

SEQ ID NO: 73290 - protein, 39 aa, Artificial Sequence
  Cyclic GFR-binding peptide
  MOD_RES (5)..(5): Xaa is C or S
RNVQXRPTQVQLEPLPVVYYEIVRKKPIFEQLSNTLEDH

SEQ ID NO: 73291 - protein, 39 aa, Artificial Sequence
  Cyclic GFR-binding peptide
  MOD_RES (4)..(5)..(37)..(39): Xaa is C or S
PKPXXAPTKLSNITVQIMDDSSNVIIGEMSNMVVRSXGX

SEQ ID NO: 73292 - protein, 28 aa, Artificial Sequence
  Cyclic GFR-binding peptide
  MOD_RES (2)..(3): Xaa is C or S
PXXVSQDLRPVQIRKIIGKTPKIKKATV

SEQ ID NO: 73293 - protein, 31 aa, Artificial Sequence
  Cyclic GFR-binding peptide
  MOD_RES (1)..(1): Xaa is C or S
XVSQDLRPVQIRKIIGKTPKIKKATVMIVKS

SEQ ID NO: 73294 - protein, 34 aa, Artificial Sequence
  Cyclic GFR-binding peptide
  MOD_RES (31)..(33): Xaa is C or S
EEEPLPMVYYRIKPHQGQHEQLSNFLQHNKXEXR

SEQ ID NO: 73295 - protein, 34 aa, Artificial Sequence; identical to SEQ ID NO: 24862
  Cyclic GFR-binding peptide

SEQ ID NO: 73296 - protein, 32 aa, Artificial Sequence; identical to SEQ ID NO: 18769
  Cyclic GFR-binding peptide
  MOD_RES (4)..(5): Xaa is C or S

SEQ ID NO: 73297 - protein, 29 aa, Artificial Sequence
  Cyclic GFR-binding peptide
  MOD_RES (29)..(29): Xaa is C or S
KLEPLPVVYYDDSSNVIEQLSNNMVVRSX

SEQ ID NO: 73298 - protein, 22 aa, Artificial Sequence
  Cyclic GFR-binding peptide
LSNITIQIMIGKTPKIIGEMSM

SEQ ID NO: 73299 - protein, 29 aa, Artificial Sequence
  Cyclic GFR-binding peptide
  MOD_RES (1)..(2): Xaa is C or S
XXVSQDLRPVQIRKIIGKTPKIKKATVMI

SEQ ID NO: 73300 - protein, 28 aa, Artificial Sequence
  Cyclic GFR-binding peptide
PTELSNITMQIMDEYDKVVIGEMSEMVV

SEQ ID NO: 73301 - protein, 29 aa, Artificial Sequence
  Cyclic GFR-binding peptide
  MOD_RES (1)..(2): Xaa is C or S
XXVPTELSNITMQIMDENEKVVIGEMSDM

SEQ ID NO: 73302 - protein, 24 aa, Artificial Sequence
  Cyclic GFR-binding peptide
TKLRSVKVAKVDDSSNVIKEVQVN

SEQ ID NO: 73303 - protein, 39 aa, Artificial Sequence
  Cyclic GFR-binding peptide
  MOD_RES (6)..(38): Xaa is C or S
VTKPTXAPTKLRSVKVAKVDDSSNVIKEVQVNMVVRSXG

SEQ ID NO: 73304 - protein, 30 aa, Artificial Sequence
  Cyclic GFR-binding peptide
  MOD_RES (4)..(5): Xaa is C or S
ASPXXVSQDLRPVQIRKIIGKTPKIKKATV

SEQ ID NO: 73305 - protein, 36 aa, Artificial Sequence
  Cyclic GFR-binding peptide
  MOD_RES (6)..(7): Xaa is C or S
ASASPXXVPQDLRSVKIAKVVGRTPKVKEVQVMVVK

SEQ ID NO: 73306 - protein, 38 aa, Artificial Sequence; identical to SEQ ID NO: 24875
  Cyclic GFR-binding peptide
  MOD_RES (2)..(2): Xaa is C or S

SEQ ID NO: 73307 - protein, 20 aa, Artificial Sequence
  Cyclic GFR-binding peptide
EPLPMVYYDEYDKVVEQLSN

SEQ ID NO: 73308 - protein, 40 aa, Artificial Sequence; identical to SEQ ID NO: 18782
  Cyclic GFR-binding peptide
  MOD_RES (4)..(5)..(37)..(39): Xaa is C or S

SEQ ID NO: 73309 - protein, 31 aa, Artificial Sequence
  Cyclic GFR-binding peptide
  MOD_RES (3)..(4): Xaa is C or S
KPXXAPTKLSNITVQIMDDSSNVIIGEMSNM

SEQ ID NO: 73310 - protein, 28 aa, Artificial Sequence
  Cyclic GFR-binding peptide
  MOD_RES (1)..(1): Xaa is C or S
XAPTQLRSVKVAKVDDSSNVIKEVQVNM

SEQ ID NO: 73311 - protein, 30 aa, Artificial Sequence; identical to SEQ ID NO: 18791
  Cyclic GFR-binding peptide
  MOD_RES (4)..(5): Xaa is C or S

SEQ ID NO: 73312 - protein, 39 aa, Artificial Sequence; identical to SEQ ID NO: 18792
  Cyclic GFR-binding peptide
  MOD_RES (6)..(38): Xaa is C or S

SEQ ID NO: 73313 - protein, 40 aa, Artificial Sequence; identical to SEQ ID NO: 24881
  Cyclic GFR-binding peptide
  MOD_RES (3)..(40): Xaa is C or S

SEQ ID NO: 73314 - protein, 38 aa, Artificial Sequence; identical to SEQ ID NO: 24882
  Cyclic GFR-binding peptide
  MOD_RES (5)..(5): Xaa is C or S

SEQ ID NO: 73315 - protein, 34 aa, Artificial Sequence
  Cyclic GFR-binding peptide
  MOD_RES (33)..(33): Xaa is C or S
PTEEEPLTMLYYRIKPHQGQHEQLSNFLQHNKXE

SEQ ID NO: 73316 - protein, 22 aa, Artificial Sequence
  Cyclic GFR-binding peptide
KLSNITVQIMDDSSNVIIGEMS

SEQ ID NO: 73317 - protein, 34 aa, Artificial Sequence
  Cyclic GFR-binding peptide
  MOD_RES (31)..(33): Xaa is C or S
PTELRPVQMRKIDEYDKVVKKATVEMVVEGXGXR

SEQ ID NO: 73318 - protein, 35 aa, Artificial Sequence
  Cyclic GFR-binding peptide
  MOD_RES (32)..(34): Xaa is C or S
APTKLRSVKVAKVDDSSNVIKEVQVNMVVRSXGXH

SEQ ID NO: 73319 - protein, 32 aa, Artificial Sequence
  Cyclic GFR-binding peptide
  MOD_RES (29)..(31): Xaa is C or S
QALSNITIQIMVGRKPKVIGEMSMIVRSXKXS

SEQ ID NO: 73320 - protein, 24 aa, Artificial Sequence
  Cyclic GFR-binding peptide
LEPLPIVYYIGKTPKIEQLSNMIV

SEQ ID NO: 73321 - protein, 23 aa, Artificial Sequence
  Cyclic GFR-binding peptide
QDLRPVQIRKIIGKTPKIKKATV

SEQ ID NO: 73322 - protein, 31 aa, Artificial Sequence
  Cyclic GFR-binding peptide
  MOD_RES (29)..(31): Xaa is C or S
QALSNITIQIMVGRKPKVIGEMSMIVRSXKX

SEQ ID NO: 73323 - protein, 38 aa, Artificial Sequence; identical to SEQ ID NO: 24889
  Cyclic GFR-binding peptide
  MOD_RES (5)..(5): Xaa is C or S

SEQ ID NO: 73324 - protein, 26 aa, Artificial Sequence
  Cyclic GFR-binding peptide
VPTELRSVKMAKVDEYDKVVKEVQVE

SEQ ID NO: 73325 - protein, 33 aa, Artificial Sequence
  Cyclic GFR-binding peptide
  MOD_RES (5)..(5): Xaa is C or S
EGLEXVPTEEEPLTMLYYRIKPHQGQHEQLSNF

SEQ ID NO: 73326 - protein, 40 aa, Artificial Sequence; identical to SEQ ID NO: 24892
  Cyclic GFR-binding peptide
  MOD_RES (5)..(5): Xaa is C or S

SEQ ID NO: 73327 - protein, 25 aa, Artificial Sequence
  Cyclic GFR-binding peptide
PTELEPLTMLYYDENEKVVEQLSND

SEQ ID NO: 73328 - protein, 31 aa, Artificial Sequence
  Cyclic GFR-binding peptide
  MOD_RES (29)..(31): Xaa is C or S
QALRSVKIAKVVGRKPKVKEVQVMIVRSXKX

SEQ ID NO: 73329 - protein, 39 aa, Artificial Sequence; identical to SEQ ID NO: 18807
  Cyclic GFR-binding peptide
  MOD_RES (5)..(6)..(37)..(39): Xaa is C or S

SEQ ID NO: 73330 - protein, 38 aa, Artificial Sequence
  Cyclic GFR-binding peptide
  MOD_RES (2)..(2): Xaa is C or S
QXRPTQVQLEPLTVLYYEIVRKKPIFEQLSNTLEDHLA

SEQ ID NO: 73331 - protein, 21 aa, Artificial Sequence
  Cyclic GFR-binding peptide
LEPLTVLYYDDSSNVIEQLSN

SEQ ID NO: 73332 - protein, 37 aa, Artificial Sequence
  Cyclic GFR-binding peptide
  MOD_RES (5)..(6): Xaa is C or S
VPKPXXAPTKLSNITVQIMDDSSNVIIGEMSNMVVRS

SEQ ID NO: 73333 - protein, 35 aa, Artificial Sequence
  Cyclic GFR-binding peptide
  MOD_RES (4)..(5): Xaa is C or S
PKPXXAPTQLSNITVQIMDDSSNVIIGEMSNMVVR

SEQ ID NO: 73334 - protein, 38 aa, Artificial Sequence
  Cyclic GFR-binding peptide
  MOD_RES (37)..(37): Xaa is C or S
RPTQVQLEPLPVVYYEIVRKKPIFEQLSNTLEDHLAXK

SEQ ID NO: 73335 - protein, 31 aa, Artificial Sequence
  Cyclic GFR-binding peptide
  MOD_RES (4)..(5): Xaa is C or S
PKAXXVPTELSNITMQIMDENEKVVIGEMSD

SEQ ID NO: 73336 - protein, 32 aa, Artificial Sequence
  Cyclic GFR-binding peptide
  MOD_RES (31)..(31): Xaa is C or S
PTELSNITMQIMDEYDKVVIGEMSEMVVEGXG

SEQ ID NO: 73337 - protein, 28 aa, Artificial Sequence
  Cyclic GFR-binding peptide
ELEPLTMLYYDEYDKVVEQLSNEMVVEG

SEQ ID NO: 73338 - protein, 40 aa, Artificial Sequence
  Cyclic GFR-binding peptide
  MOD_RES (6)..(7)..(39): Xaa is C or S
KIPKAXXVPTELRPVQMRKIDENEKVVKKATVDMVVEGXG

SEQ ID NO: 73339 - protein, 25 aa, Artificial Sequence
  Cyclic GFR-binding peptide
RPVQIRKIVGRTPKVKKATVMVVKS

SEQ ID NO: 73340 - protein, 29 aa, Artificial Sequence
  Cyclic GFR-binding peptide
PTQVQLEPLPVVYYEIVRKKPIFEQLSNT

SEQ ID NO: 73341 - protein, 36 aa, Artificial Sequence
  Cyclic GFR-binding peptide
  MOD_RES (6)..(7): Xaa is C or S
ASASPXXVPQDLRPVQIRKIVGRTPKVKKATVMVVK

SEQ ID NO: 73342 - protein, 41 aa, Artificial Sequence
  Cyclic GFR-binding peptide
  MOD_RES (2)..(39)..(41): Xaa is C or S
QXRPTQVQLEPLTVLYYEIVRKKPIFEQLSNTLEDHLAXKX

SEQ ID NO: 73343 - protein, 25 aa, Artificial Sequence
  Cyclic GFR-binding peptide
TQLRSVKVAKVDDSSNVIKEVQVNM

SEQ ID NO: 73344 - protein, 25 aa, Artificial Sequence
  Cyclic GFR-binding peptide
VPTELEPLPMVYYDEYDKVVEQLSN

SEQ ID NO: 73345 - protein, 28 aa, Artificial Sequence
  Cyclic GFR-binding peptide
  MOD_RES (26)..(28): Xaa is C or S
EPLPIVYYVGRTPKVEQLSNMVVKSXKX

SEQ ID NO: 73346 - protein, 26 aa, Artificial Sequence
  Cyclic GFR-binding peptide
QLRSVKVAKVEIVRKKPIFKEVQVTL

SEQ ID NO: 73347 - protein, 38 aa, Artificial Sequence; identical to SEQ ID NO: 24911
  Cyclic GFR-binding peptide
  MOD_RES (36)..(38): Xaa is C or S

SEQ ID NO: 73348 - protein, 23 aa, Artificial Sequence
  Cyclic GFR-binding peptide
ELEPLPMVYYDEYDKVVEQLSNE

SEQ ID NO: 73349 - protein, 23 aa, Artificial Sequence
  Cyclic GFR-binding peptide
QALSNITIQIMVGRKPKVIGEMS

SEQ ID NO: 73350 - protein, 31 aa, Artificial Sequence; identical to SEQ ID NO: 24913
  Cyclic GFR-binding peptide

SEQ ID NO: 73351 - protein, 34 aa, Artificial Sequence; identical to SEQ ID NO: 18838
  Cyclic GFR-binding peptide
  MOD_RES (3)..(4): Xaa is C or S

SEQ ID NO: 73352 - protein, 33 aa, Artificial Sequence
  Cyclic GFR-binding peptide
  MOD_RES (1)..(33): Xaa is C or S
XAPTQLSNITVQIMDDSSNVIIGEMSNMVVRAX

SEQ ID NO: 73353 - protein, 31 aa, Artificial Sequence
  Cyclic GFR-binding peptide
  MOD_RES (28)..(30): Xaa is C or S
LRSVKMAKVDEYDKVVKEVQVEMVVEGXGXR

SEQ ID NO: 73354 - protein, 31 aa, Artificial Sequence; identical to SEQ ID NO: 24924
  Cyclic GFR-binding peptide
  MOD_RES (1)..(1): Xaa is C or S

SEQ ID NO: 73355 - protein, 29 aa, Artificial Sequence
  Cyclic GFR-binding peptide
VPTELEPLTMLYYDEYDKVVEQLSNEMVV

SEQ ID NO: 73356 - protein, 31 aa, Artificial Sequence; identical to SEQ ID NO: 18843
  Cyclic GFR-binding peptide
  MOD_RES (1)..(1): Xaa is C or S

SEQ ID NO: 73357 - protein, 34 aa, Artificial Sequence; identical to SEQ ID NO: 18846
  Cyclic GFR-binding peptide
  MOD_RES (32)..(34): Xaa is C or S

SEQ ID NO: 73358 - protein, 27 aa, Artificial Sequence
  Cyclic GFR-binding peptide
  MOD_RES (1)..(2): Xaa is C or S
XXVPTELEPLPMVYYDENEKVVEQLSN

SEQ ID NO: 73359 - protein, 31 aa, Artificial Sequence; identical to SEQ ID NO: 24926
  Cyclic GFR-binding peptide
  MOD_RES (1)..(1): Xaa is C or S

SEQ ID NO: 73360 - protein, 30 aa, Artificial Sequence
  Cyclic GFR-binding peptide
VHHEPLTVLYYEYVRKKPKLEQLSNRLEEH

SEQ ID NO: 73361 - protein, 44 aa, Artificial Sequence
  Cyclic GFR-binding peptide
  MOD_RES (5)..(42)..(44): Xaa is C or S
SSVKXQPSRVHHEPLPVVYYEYVRKKPKLEQLSNRLEEHLEXAX

SEQ ID NO: 73362 - protein, 30 aa, Artificial Sequence
  Cyclic GFR-binding peptide
  MOD_RES (29)..(29): Xaa is C or S
ELSNITMQIMDENEKVVIGEMSDMVVEGXG

SEQ ID NO: 73363 - protein, 43 aa, Artificial Sequence
  Cyclic GFR-binding peptide
  MOD_RES (4)..(41)..(43): Xaa is C or S
SVKXQPSRVHHEPLPVVYYEYVRKKPKLEQLSNRLEEHLEXAX

SEQ ID NO: 73364 - protein, 35 aa, Artificial Sequence
  Cyclic GFR-binding peptide
  MOD_RES (1)..(2)..(34): Xaa is C or S
XXVPTELRPVQMRKIDEYDKVVKKATVEMVVEGXG

SEQ ID NO: 73365 - protein, 25 aa, Artificial Sequence
  Cyclic GFR-binding peptide
HHEPLPVVYYEYVRKKPKLEQLSNR

SEQ ID NO: 73366 - protein, 33 aa, Artificial Sequence; identical to SEQ ID NO: 18854
  Cyclic GFR-binding peptide
  MOD_RES (4)..(5): Xaa is C or S

SEQ ID NO: 73367 - protein, 38 aa, Artificial Sequence; identical to SEQ ID NO: 24932
  Cyclic GFR-binding peptide
  MOD_RES (3)..(3): Xaa is C or S

SEQ ID NO: 73368 - protein, 31 aa, Artificial Sequence; identical to SEQ ID NO: 18859
  Cyclic GFR-binding peptide
  MOD_RES (5)..(6): Xaa is C or S

SEQ ID NO: 73369 - protein, 26 aa, Artificial Sequence
  Cyclic GFR-binding peptide
LEPLTMLYYDENEKVVEQLSNDMVVE

SEQ ID NO: 73370 - protein, 38 aa, Artificial Sequence; identical to SEQ ID NO: 18865
  Cyclic GFR-binding peptide
  MOD_RES (4)..(5)..(37): Xaa is C or S

SEQ ID NO: 73371 - protein, 42 aa, Artificial Sequence; identical to SEQ ID NO: 24935
  Cyclic GFR-binding peptide
  MOD_RES (4)..(41): Xaa is C or S

SEQ ID NO: 73372 - protein, 43 aa, Artificial Sequence
  Cyclic GFR-binding peptide
  MOD_RES (7)..(41)..(43): Xaa is C or S
NDEGLEXVPTEEEPLPMVYYRIKPHQGQHEQLSNFLQHNKXEX

SEQ ID NO: 73373 - protein, 33 aa, Artificial Sequence
  Cyclic GFR-binding peptide
  MOD_RES (32)..(32): Xaa is C or S
QLEPLPVVYYEIVRKKPIFEQLSNTLEDHLAXK

SEQ ID NO: 73374 - protein, 33 aa, Artificial Sequence; identical to SEQ ID NO: 24943
  Cyclic GFR-binding peptide

SEQ ID NO: 73375 - protein, 34 aa, Artificial Sequence; identical to SEQ ID NO: 18871
  Cyclic GFR-binding peptide
  MOD_RES (1)..(2)..(33): Xaa is C or S

SEQ ID NO: 73376 - protein, 34 aa, Artificial Sequence; identical to SEQ ID NO: 24947
  Cyclic GFR-binding peptide

SEQ ID NO: 73377 - protein, 30 aa, Artificial Sequence; identical to SEQ ID NO: 18880
  Cyclic GFR-binding peptide
  MOD_RES (1)..(2): Xaa is C or S

SEQ ID NO: 73378 - protein, 30 aa, Artificial Sequence; identical to SEQ ID NO: 18881
  Cyclic GFR-binding peptide
  MOD_RES (30)..(30): Xaa is C or S

SEQ ID NO: 73379 - protein, 33 aa, Artificial Sequence
  Cyclic GFR-binding peptide
  MOD_RES (4)..(5): Xaa is C or S
AAPXXVPQALRPVQIRKIVGRKPKVKKATVMIV

SEQ ID NO: 73380 - protein, 35 aa, Artificial Sequence
  Cyclic GFR-binding peptide
  MOD_RES (3)..(4)..(35): Xaa is C or S
APXXVPQALRPVQIRKIVGRKPKVKKATVMIVRSX

SEQ ID NO: 73381 - protein, 38 aa, Artificial Sequence; identical to SEQ ID NO: 24956
  Cyclic GFR-binding peptide
  MOD_RES (2)..(2): Xaa is C or S

SEQ ID NO: 73382 - protein, 35 aa, Artificial Sequence; identical to SEQ ID NO: 18885
  Cyclic GFR-binding peptide
  MOD_RES (4)..(5): Xaa is C or S

SEQ ID NO: 73383 - protein, 38 aa, Artificial Sequence
  Cyclic GFR-binding peptide
  MOD_RES (3)..(4)..(35)..(37): Xaa is C or S
SPXXVPQDLRPVQIRKIVGRTPKVKKATVMVVKSXKXS

SEQ ID NO: 73384 - protein, 34 aa, Artificial Sequence
  Cyclic GFR-binding peptide
  MOD_RES (1)..(2)..(34): Xaa is C or S
XXAPTQLRSVKVAKVDDSSNVIKEVQVNMVVRAX

SEQ ID NO: 73385 - protein, 32 aa, Artificial Sequence; identical to SEQ ID NO: 18887
  Cyclic GFR-binding peptide
  MOD_RES (6)..(7): Xaa is C or S

SEQ ID NO: 73386 - protein, 39 aa, Artificial Sequence
  Cyclic GFR-binding peptide
  MOD_RES (3)..(4)..(36)..(38): Xaa is C or S
KPXXAPTKLRSVKVAKVDDSSNVIKEVQVNMVVRSXGXH

SEQ ID NO: 73387 - protein, 28 aa, Artificial Sequence
  Cyclic GFR-binding peptide
  MOD_RES (1)..(2): Xaa is C or S
XXVPTELRSVKMAKVDEYDKVVKEVQVE

SEQ ID NO: 73388 - protein, 28 aa, Artificial Sequence
  Cyclic GFR-binding peptide
PTEEEPLTMLYYRIKPHQGQHEQLSNFL

SEQ ID NO: 73389 - protein, 32 aa, Artificial Sequence; identical to SEQ ID NO: 24958
  Cyclic GFR-binding peptide
  MOD_RES (30)..(32): Xaa is C or S

SEQ ID NO: 73390 - protein, 27 aa, Artificial Sequence
  Cyclic GFR-binding peptide
QLEPLTVLYYDDSSNVIEQLSNNMVVR

SEQ ID NO: 73391 - protein, 31 aa, Artificial Sequence
  Cyclic GFR-binding peptide
  MOD_RES (1)..(1): Xaa is C or S
XQPSRVHHEPLTVLYYEYVRKKPKLEQLSNR

SEQ ID NO: 73392 - protein, 30 aa, Artificial Sequence
  Cyclic GFR-binding peptide
PTQLSNITVQIMDDSSNVIIGEMSNMVVRA

SEQ ID NO: 73393 - protein, 28 aa, Artificial Sequence
  Cyclic GFR-binding peptide
  MOD_RES (2)..(3): Xaa is C or S
AXXVPTELRPVQMRKIDENEKVVKKATV

SEQ ID NO: 73394 - protein, 38 aa, Artificial Sequence
  Cyclic GFR-binding peptide
  MOD_RES (3)..(4)..(36)..(38): Xaa is C or S
KAXXVPTELRSVKMAKVDENEKVVKEVQVDMVVEGXGX

SEQ ID NO: 73395 - protein, 38 aa, Artificial Sequence
  Cyclic GFR-binding peptide
  MOD_RES (3)..(4)..(36)..(38): Xaa is C or S
KAXXVPTELRSVKMAKVDEYDKVVKEVQVEMVVEGXGX

SEQ ID NO: 73396 - protein, 25 aa, Artificial Sequence
  Cyclic GFR-binding peptide
TQLEPLPVVYYDDSSNVIEQLSNNM

SEQ ID NO: 73397 - protein, 30 aa, Artificial Sequence; identical to SEQ ID NO: 18902
  Cyclic GFR-binding peptide
  MOD_RES (5)..(5): Xaa is C or S

SEQ ID NO: 73398 - protein, 29 aa, Artificial Sequence
  Cyclic GFR-binding peptide
  MOD_RES (1)..(2): Xaa is C or S
XXVSQDLSNITIQIMIGKTPKIIGEMSMI

SEQ ID NO: 73399 - protein, 25 aa, Artificial Sequence
  Cyclic GFR-binding peptide
EPLPVVYYDDSSNVIEQLSNNMVVR

SEQ ID NO: 73400 - protein, 36 aa, Artificial Sequence
  Cyclic GFR-binding peptide
  MOD_RES (1)..(2)..(33)..(35): Xaa is C or S
XXVPQALSNITIQIMVGRKPKVIGEMSMIVRSXKXS

SEQ ID NO: 73401 - protein, 29 aa, Artificial Sequence
  Cyclic GFR-binding peptide
  MOD_RES (2)..(3): Xaa is C or S
PXXVPQDLRSVKIAKVVGRTPKVKEVQVM

SEQ ID NO: 73402 - protein, 29 aa, Artificial Sequence
  Cyclic GFR-binding peptide
PTKLRPVQVRKIDDSSNVIKKATVNMVVR

SEQ ID NO: 73403 - protein, 29 aa, Artificial Sequence
  Cyclic GFR-binding peptide
PTQVQLRSVKVAKVEIVRKKPIFKEVQVT

SEQ ID NO: 73404 - protein, 32 aa, Artificial Sequence
  Cyclic GFR-binding peptide
  MOD_RES (30)..(32): Xaa is C or S
TELRSVKMAKVDENEKVVKEVQVDMVVEGXGX

SEQ ID NO: 73405 - protein, 35 aa, Artificial Sequence; identical to SEQ ID NO: 18908
  Cyclic GFR-binding peptide
  MOD_RES (3)..(4): Xaa is C or S

SEQ ID NO: 73406 - protein, 40 aa, Artificial Sequence; identical to SEQ ID NO: 18909
  Cyclic GFR-binding peptide
  MOD_RES (5)..(6)..(37)..(39): Xaa is C or S

SEQ ID NO: 73407 - protein, 33 aa, Artificial Sequence
  Cyclic GFR-binding peptide
  MOD_RES (31)..(33): Xaa is C or S
HEPLPVVYYEYVRKKPKLEQLSNRLEEHLEXAX

SEQ ID NO: 73408 - protein, 26 aa, Artificial Sequence
  Cyclic GFR-binding peptide
RVHHEPLTVLYYEYVRKKPKLEQLSN

SEQ ID NO: 73409 - protein, 28 aa, Artificial Sequence
  Cyclic GFR-binding peptide
  MOD_RES (1)..(1): Xaa is C or S
XVPTELEPLTMLYYDENEKVVEQLSNDM

SEQ ID NO: 73410 - protein, 25 aa, Artificial Sequence
  Cyclic GFR-binding peptide
QLRPVQVRKIDDSSNVIKKATVNMV

SEQ ID NO: 73411 - protein, 34 aa, Artificial Sequence
  Cyclic GFR-binding peptide
  MOD_RES (33)..(33): Xaa is C or S
VHHEPLTVLYYEYVRKKPKLEQLSNRLEEHLEXA

SEQ ID NO: 73412 - protein, 25 aa, Artificial Sequence
  Cyclic GFR-binding peptide
ELRPVQMRKIDEYDKVVKKATVEMV

SEQ ID NO: 73413 - protein, 30 aa, Artificial Sequence; identical to SEQ ID NO: 18927
  Cyclic GFR-binding peptide
  MOD_RES (3)..(3): Xaa is C or S

SEQ ID NO: 73414 - protein, 32 aa, Artificial Sequence; identical to SEQ ID NO: 18928
  Cyclic GFR-binding peptide
  MOD_RES (5)..(6): Xaa is C or S

SEQ ID NO: 73415 - protein, 25 aa, Artificial Sequence
  Cyclic GFR-binding peptide
EPLTMLYYDEYDKVVEQLSNEMVVE

SEQ ID NO: 73416 - protein, 27 aa, Artificial Sequence
  Cyclic GFR-binding peptide
  MOD_RES (27)..(27): Xaa is C or S
RPVQVRKIDDSSNVIKKATVNMVVRAX

SEQ ID NO: 73417 - protein, 36 aa, Artificial Sequence
  Cyclic GFR-binding peptide
  MOD_RES (33)..(35): Xaa is C or S
PTEEEPLTMLYYRIKPHQGQHEQLSNFLQHNKXEXR

SEQ ID NO: 73418 - protein, 32 aa, Artificial Sequence
  Cyclic GFR-binding peptide
  MOD_RES (5)..(5): Xaa is C or S
EGLEXVPTEEEPLTMLYYRIKPHQGQHEQLSN

SEQ ID NO: 73419 - protein, 36 aa, Artificial Sequence; identical to SEQ ID NO: 24993
  Cyclic GFR-binding peptide
  MOD_RES (34)..(36): Xaa is C or S

SEQ ID NO: 73420 - protein, 28 aa, Artificial Sequence
  Cyclic GFR-binding peptide
  MOD_RES (27)..(27): Xaa is C or S
LSNITIQIMVGRTPKVIGEMSMVVKSXK

SEQ ID NO: 73421 - protein, 24 aa, Artificial Sequence
  Cyclic GFR-binding peptide
QALRSVKIAKVVGRKPKVKEVQVM

SEQ ID NO: 73422 - protein, 37 aa, Artificial Sequence
  Cyclic GFR-binding peptide
  MOD_RES (6)..(7): Xaa is C or S
ASASPXXVSQDLRSVKIAKVIGKTPKIKEVQVMIVKS

SEQ ID NO: 73423 - protein, 32 aa, Artificial Sequence
  Cyclic GFR-binding peptide
  MOD_RES (4)..(5): Xaa is C or S
PKAXXVPTELRPVQMRKIDENEKVVKKATVDM

SEQ ID NO: 73424 - protein, 34 aa, Artificial Sequence; identical to SEQ ID NO: 18957
  Cyclic GFR-binding peptide
  MOD_RES (2)..(3): Xaa is C or S

SEQ ID NO: 73425 - protein, 26 aa, Artificial Sequence
  Cyclic GFR-binding peptide
QVQLEPLPVVYYEIVRKKPIFEQLSN

SEQ ID NO: 73426 - protein, 33 aa, Artificial Sequence
  Cyclic GFR-binding peptide
  MOD_RES (1)..(33): Xaa is C or S
XAPTQLRSVKVAKVDDSSNVIKEVQVNMVVRAX

SEQ ID NO: 73427 - protein, 33 aa, Artificial Sequence; identical to SEQ ID NO: 25015
  Cyclic GFR-binding peptide
  MOD_RES (30)..(32): Xaa is C or S

SEQ ID NO: 73428 - protein, 30 aa, Artificial Sequence; identical to SEQ ID NO: 18966
  Cyclic GFR-binding peptide
  MOD_RES (3)..(4): Xaa is C or S

SEQ ID NO: 73429 - protein, 32 aa, Artificial Sequence
  Cyclic GFR-binding peptide
  MOD_RES (6)..(7): Xaa is C or S
TVPKPXXAPTQLRSVKVAKVDDSSNVIKEVQV

SEQ ID NO: 73430 - protein, 35 aa, Artificial Sequence
  Cyclic GFR-binding peptide
  MOD_RES (5)..(6): Xaa is C or S
SAAPXXVPQALRSVKIAKVVGRKPKVKEVQVMIVR

SEQ ID NO: 73431 - protein, 33 aa, Artificial Sequence
  Cyclic GFR-binding peptide
  MOD_RES (2)..(2): Xaa is C or S
TXAPTKLRSVKVAKVDDSSNVIKEVQVNMVVRS

SEQ ID NO: 73432 - protein, 36 aa, Artificial Sequence
  Cyclic GFR-binding peptide
  MOD_RES (3)..(4)..(35): Xaa is C or S
SPXXVSQDLSNITIQIMIGKTPKIIGEMSMIVKSXK

SEQ ID NO: 73433 - protein, 33 aa, Artificial Sequence
  Cyclic GFR-binding peptide
  MOD_RES (6)..(7): Xaa is C or S
TVPKPXXAPTQLRPVQVRKIDDSSNVIKKATVN

SEQ ID NO: 73434 - protein, 37 aa, Artificial Sequence
  Cyclic GFR-binding peptide
  MOD_RES (7)..(7): Xaa is C or S
HVTKPTXAPTKLRPVQVRKIDDSSNVIKKATVNMVVR

SEQ ID NO: 73435 - protein, 27 aa, Artificial Sequence
  Cyclic GFR-binding peptide
DLRPVQIRKIIGKTPKIKKATVMIVKS

SEQ ID NO: 73436 - protein, 33 aa, Artificial Sequence
  Cyclic GFR-binding peptide
  MOD_RES (2)..(3): Xaa is C or S
AXXVPTELRSVKMAKVDENEKVVKEVQVDMVVE

SEQ ID NO: 73437 - protein, 33 aa, Artificial Sequence
  Cyclic GFR-binding peptide
  MOD_RES (2)..(3): Xaa is C or S
PXXVPQALRSVKIAKVVGRKPKVKEVQVMIVRS

SEQ ID NO: 73438 - protein, 29 aa, Artificial Sequence
  Cyclic GFR-binding peptide
  MOD_RES (2)..(3): Xaa is C or S
AXXVPTELEPLTMLYYDEYDKVVEQLSNE

SEQ ID NO: 73439 - protein, 23 aa, Artificial Sequence
  Cyclic GFR-binding peptide
TKLSNITVQIMDDSSNVIIGEMS

SEQ ID NO: 73440 - protein, 35 aa, Artificial Sequence
  Cyclic GFR-binding peptide
  MOD_RES (32)..(34): Xaa is C or S
APTKLSNITVQIMDDSSNVIIGEMSNMVVRSXGXH

SEQ ID NO: 73441 - protein, 40 aa, Artificial Sequence; identical to SEQ ID NO: 18978
  Cyclic GFR-binding peptide
  MOD_RES (6)..(7)..(38)..(40): Xaa is C or S

SEQ ID NO: 73442 - protein, 32 aa, Artificial Sequence; identical to SEQ ID NO: 18979
  Cyclic GFR-binding peptide
  MOD_RES (5)..(6): Xaa is C or S

SEQ ID NO: 73443 - protein, 24 aa, Artificial Sequence
  Cyclic GFR-binding peptide
HHEPLTVLYYEYVRKKPKLEQLSN

SEQ ID NO: 73444 - protein, 33 aa, Artificial Sequence; identical to SEQ ID NO: 18980
  Cyclic GFR-binding peptide
  MOD_RES (1)..(32): Xaa is C or S

SEQ ID NO: 73445 - protein, 35 aa, Artificial Sequence; identical to SEQ ID NO: 25023
  Cyclic GFR-binding peptide
  MOD_RES (1)..(35): Xaa is C or S

SEQ ID NO: 73446 - protein, 36 aa, Artificial Sequence
  Cyclic GFR-binding peptide
  MOD_RES (2)..(2): Xaa is C or S
KXQPSRVHHEPLPVVYYEYVRKKPKLEQLSNRLEEH

SEQ ID NO: 73447 - protein, 29 aa, Artificial Sequence
  Cyclic GFR-binding peptide
RVHHSNITVQIMEYVRKKPKLIGEMSRLE

SEQ ID NO: 73448 - protein, 31 aa, Artificial Sequence; identical to SEQ ID NO: 18981
  Cyclic GFR-binding peptide
  MOD_RES (3)..(4): Xaa is C or S

SEQ ID NO: 73449 - protein, 41 aa, Artificial Sequence; identical to SEQ ID NO: 25027
  Cyclic GFR-binding peptide
  MOD_RES (2)..(39)..(41): Xaa is C or S

SEQ ID NO: 73450 - protein, 29 aa, Artificial Sequence
  Cyclic GFR-binding peptide
PTELSNITMQIMDENEKVVIGEMSDMVVE

SEQ ID NO: 73451 - protein, 37 aa, Artificial Sequence; identical to SEQ ID NO: 25029
  Cyclic GFR-binding peptide
  MOD_RES (2)..(36): Xaa is C or S

SEQ ID NO: 73452 - protein, 29 aa, Artificial Sequence
  Cyclic GFR-binding peptide
  MOD_RES (1)..(2): Xaa is C or S
XXVPTELEPLPMVYYDEYDKVVEQLSNEM

SEQ ID NO: 73453 - protein, 36 aa, Artificial Sequence
  Cyclic GFR-binding peptide
RPTQVQLEPLTVLYYEIVRKKPIFEQLSNTLEDHLA

SEQ ID NO: 73454 - protein, 32 aa, Artificial Sequence; identical to SEQ ID NO: 19000
  Cyclic GFR-binding peptide
  MOD_RES (1)..(1): Xaa is C or S

SEQ ID NO: 73455 - protein, 29 aa, Artificial Sequence
  Cyclic GFR-binding peptide
  MOD_RES (27)..(29): Xaa is C or S
EPLTVLYYDDSSNVIEQLSNNMVVRAXGX

SEQ ID NO: 73456 - protein, 30 aa, Artificial Sequence; identical to SEQ ID NO: 19004
  Cyclic GFR-binding peptide
  MOD_RES (2)..(2): Xaa is C or S

SEQ ID NO: 73457 - protein, 31 aa, Artificial Sequence
  Cyclic GFR-binding peptide
APTKLRPVQVRKIDDSSNVIKKATVNMVVRS

SEQ ID NO: 73458 - protein, 25 aa, Artificial Sequence
  Cyclic GFR-binding peptide
QALRSVKIAKVVGRKPKVKEVQVMI

SEQ ID NO: 73459 - protein, 20 aa, Artificial Sequence
  Cyclic GFR-binding peptide
RSVKMAKVDENEKVVKEVQV

SEQ ID NO: 73460 - protein, 33 aa, Artificial Sequence; identical to SEQ ID NO: 25038
  Cyclic GFR-binding peptide
  MOD_RES (2)..(2): Xaa is C or S

SEQ ID NO: 73461 - protein, 30 aa, Artificial Sequence
  Cyclic GFR-binding peptide
VHHEPLPVVYYEYVRKKPKLEQLSNRLEEH

SEQ ID NO: 73462 - protein, 42 aa, Artificial Sequence
  Cyclic GFR-binding peptide
  MOD_RES (6)..(7)..(39)..(41): Xaa is C or S
SIPKAXXVPTELRSVKMAKVDEYDKVVKEVQVEMVVEGXGXR

SEQ ID NO: 73463 - protein, 23 aa, Artificial Sequence
  Cyclic GFR-binding peptide
LRSVKVAKVEIVRKKPIFKEVQV

SEQ ID NO: 73464 - protein, 25 aa, Artificial Sequence
  Cyclic GFR-binding peptide
TKLRSVKVAKVDDSSNVIKEVQVNM

SEQ ID NO: 73465 - protein, 41 aa, Artificial Sequence; identical to SEQ ID NO: 25045
  Cyclic GFR-binding peptide
  MOD_RES (3)..(40): Xaa is C or S

SEQ ID NO: 73466 - protein, 40 aa, Artificial Sequence
  Cyclic GFR-binding peptide
  MOD_RES (5)..(5): Xaa is C or S
SSVKXQPSRVHHEPLPVVYYEYVRKKPKLEQLSNRLEEHL

SEQ ID NO: 73467 - protein, 37 aa, Artificial Sequence; identical to SEQ ID NO: 19010
  Cyclic GFR-binding peptide
  MOD_RES (4)..(5)..(36): Xaa is C or S

SEQ ID NO: 73468 - protein, 41 aa, Artificial Sequence; identical to SEQ ID NO: 25047
  Cyclic GFR-binding peptide
  MOD_RES (4)..(38)..(40): Xaa is C or S

SEQ ID NO: 73469 - protein, 39 aa, Artificial Sequence
  Cyclic GFR-binding peptide
  MOD_RES (4)..(5)..(37)..(39): Xaa is C or S
PKAXXVPTELRSVKMAKVDENEKVVKEVQVDMVVEGXGX

SEQ ID NO: 73470 - protein, 28 aa, Artificial Sequence
  Cyclic GFR-binding peptide
  MOD_RES (26)..(28): Xaa is C or S
RSVKIAKVVGRTPKVKEVQVMVVKSXKX

SEQ ID NO: 73471 - protein, 32 aa, Artificial Sequence; identical to SEQ ID NO: 25048
  Cyclic GFR-binding peptide
  MOD_RES (30)..(32): Xaa is C or S

SEQ ID NO: 73472 - protein, 26 aa, Artificial Sequence
  Cyclic GFR-binding peptide
TELRPVQMRKIDEYDKVVKKATVEMV

SEQ ID NO: 73473 - protein, 29 aa, Artificial Sequence
  Cyclic GFR-binding peptide
HSNITVQIMEYVRKKPKLIGEMSRLEEHL

SEQ ID NO: 73474 - protein, 36 aa, Artificial Sequence
  Cyclic GFR-binding peptide
  MOD_RES (4)..(36): Xaa is C or S
KPTXAPTKLRSVKVAKVDDSSNVIKEVQVNMVVRSX

SEQ ID NO: 73475 - protein, 39 aa, Artificial Sequence
  Cyclic GFR-binding peptide
  MOD_RES (1)..(38): Xaa is C or S
XQPSRVHHEPLPVVYYEYVRKKPKLEQLSNRLEEHLEXA

SEQ ID NO: 73476 - protein, 29 aa, Artificial Sequence
  Cyclic GFR-binding peptide
VSQDLEPLPIVYYIGKTPKIEQLSNMIVK

SEQ ID NO: 73477 - protein, 31 aa, Artificial Sequence; identical to SEQ ID NO: 19026
  Cyclic GFR-binding peptide
  MOD_RES (3)..(4): Xaa is C or S

SEQ ID NO: 73478 - protein, 38 aa, Artificial Sequence; identical to SEQ ID NO: 19028
  Cyclic GFR-binding peptide
  MOD_RES (2)..(3)..(35)..(37): Xaa is C or S

SEQ ID NO: 73479 - protein, 27 aa, Artificial Sequence
  Cyclic GFR-binding peptide
ELEPLPMVYYDENEKVVEQLSNDMVVE

SEQ ID NO: 73480 - protein, 29 aa, Artificial Sequence
  Cyclic GFR-binding peptide
PQDLRPVQIRKIVGRTPKVKKATVMVVKS

SEQ ID NO: 73481 - protein, 28 aa, Artificial Sequence
  Cyclic GFR-binding peptide
VPTELRSVKMAKVDENEKVVKEVQVDMV

SEQ ID NO: 73482 - protein, 29 aa, Artificial Sequence
  Cyclic GFR-binding peptide
VQLRSVKVAKVEIVRKKPIFKEVQVTLED

SEQ ID NO: 73483 - protein, 27 aa, Artificial Sequence
  Cyclic GFR-binding peptide
  MOD_RES (1)..(2): Xaa is C or S
XXVSQDLRSVKIAKVIGKTPKIKEVQV

SEQ ID NO: 73484 - protein, 28 aa, Artificial Sequence
  Cyclic GFR-binding peptide
  MOD_RES (1)..(1): Xaa is C or S
XVPTELRSVKMAKVDEYDKVVKEVQVEM

SEQ ID NO: 73485 - protein, 28 aa, Artificial Sequence
  Cyclic GFR-binding peptide
  MOD_RES (1)..(1): Xaa is C or S
XVPQDLSNITIQIMVGRTPKVIGEMSMV

SEQ ID NO: 73486 - protein, 31 aa, Artificial Sequence; identical to SEQ ID NO: 25076
  Cyclic GFR-binding peptide

SEQ ID NO: 73487 - protein, 29 aa, Artificial Sequence
  Cyclic GFR-binding peptide
  MOD_RES (1)..(1): Xaa is C or S
XVPTEEEPLTMLYYRIKPHQGQHEQLSNF

SEQ ID NO: 73488 - protein, 28 aa, Artificial Sequence
  Cyclic GFR-binding peptide
PTELEPLTMLYYDENEKVVEQLSNDMVV

SEQ ID NO: 73489 - protein, 32 aa, Artificial Sequence; identical to SEQ ID NO: 19055
  Cyclic GFR-binding peptide
  MOD_RES (31)..(31): Xaa is C or S

SEQ ID NO: 73490 - protein, 25 aa, Artificial Sequence
  Cyclic GFR-binding peptide
LSNITMQIMDENEKVVIGEMSDMVV

SEQ ID NO: 73491 - protein, 31 aa, Artificial Sequence
  Cyclic GFR-binding peptide
  MOD_RES (1)..(2): Xaa is C or S
XXVSQDLRPVQIRKIIGKTPKIKKATVMIVK

SEQ ID NO: 73492 - protein, 21 aa, Artificial Sequence
  Cyclic GFR-binding peptide
LSNITIQIMVGRKPKVIGEMS

SEQ ID NO: 73493 - protein, 34 aa, Artificial Sequence
  Cyclic GFR-binding peptide
  MOD_RES (1)..(2)..(34): Xaa is C or S
XXAPTQLSNITVQIMDDSSNVIIGEMSNMVVRAX

SEQ ID NO: 73494 - protein, 24 aa, Artificial Sequence
  Cyclic GFR-binding peptide
PTELEPLPMVYYDENEKVVEQLSN

SEQ ID NO: 73495 - protein, 33 aa, Artificial Sequence
  Cyclic GFR-binding peptide
  MOD_RES (6)..(7): Xaa is C or S
ASASPXXVPQDLRSVKIAKVVGRTPKVKEVQVM

SEQ ID NO: 73496 - protein, 32 aa, Artificial Sequence; identical to SEQ ID NO: 25087
  Cyclic GFR-binding peptide
  MOD_RES (3)..(3): Xaa is C or S

SEQ ID NO: 73497 - protein, 30 aa, Artificial Sequence
  Cyclic GFR-binding peptide
  MOD_RES (2)..(3): Xaa is C or S
PXXVPQALSNITIQIMVGRKPKVIGEMSMI

SEQ ID NO: 73498 - protein, 23 aa, Artificial Sequence
  Cyclic GFR-binding peptide
ERSVKMAKVRIKPHQGQHKEVQV

SEQ ID NO: 73499 - protein, 35 aa, Artificial Sequence
  Cyclic GFR-binding peptide
  MOD_RES (2)..(34): Xaa is C or S
TXAPTKLRSVKVAKVDDSSNVIKEVQVNMVVRSXG

SEQ ID NO: 73500 - protein, 39 aa, Artificial Sequence
  Cyclic GFR-binding peptide
  MOD_RES (4)..(5)..(37)..(39): Xaa is C or S
PKAXXVPTELRSVKMAKVDEYDKVVKEVQVEMVVEGXGX

SEQ ID NO: 73501 - protein, 28 aa, Artificial Sequence
  Cyclic GFR-binding peptide
  MOD_RES (26)..(28): Xaa is C or S
SNITIQIMVGRKPKVIGEMSMIVRSXKX

SEQ ID NO: 73502 - protein, 27 aa, Artificial Sequence
  Cyclic GFR-binding peptide
SNITVQIMEYVRKKPKLIGEMSRLEEH

SEQ ID NO: 73503 - protein, 42 aa, Artificial Sequence; identical to SEQ ID NO: 25096
  Cyclic GFR-binding peptide
  MOD_RES (2)..(39)..(41): Xaa is C or S

SEQ ID NO: 73504 - protein, 30 aa, Artificial Sequence; identical to SEQ ID NO: 25097
  Cyclic GFR-binding peptide

SEQ ID NO: 73505 - protein, 35 aa, Artificial Sequence
  Cyclic GFR-binding peptide
  MOD_RES (6)..(7): Xaa is C or S
SIPKAXXVPTELRSVKMAKVDEYDKVVKEVQVEMV

SEQ ID NO: 73506 - protein, 22 aa, Artificial Sequence
  Cyclic GFR-binding peptide
EPLTMLYYDEYDKVVEQLSNEM

SEQ ID NO: 73507 - protein, 34 aa, Artificial Sequence; identical to SEQ ID NO: 25100
  Cyclic GFR-binding peptide
  MOD_RES (34)..(34): Xaa is C or S

SEQ ID NO: 73508 - protein, 39 aa, Artificial Sequence
  Cyclic GFR-binding peptide
  MOD_RES (6)..(38): Xaa is C or S
VTKPTXAPTKLRPVQVRKIDDSSNVIKKATVNMVVRSXG

SEQ ID NO: 73509 - protein, 30 aa, Artificial Sequence; identical to SEQ ID NO: 25102
  Cyclic GFR-binding peptide
  MOD_RES (1)..(1): Xaa is C or S

SEQ ID NO: 73510 - protein, 35 aa, Artificial Sequence; identical to SEQ ID NO: 19077
  Cyclic GFR-binding peptide
  MOD_RES (5)..(6): Xaa is C or S

SEQ ID NO: 73511 - protein, 27 aa, Artificial Sequence
  Cyclic GFR-binding peptide
  MOD_RES (1)..(2): Xaa is C or S
XXAPTQLRSVKVAKVDDSSNVIKEVQV

SEQ ID NO: 73512 - protein, 28 aa, Artificial Sequence
  Cyclic GFR-binding peptide
  MOD_RES (28)..(28): Xaa is C or S
LEPLPVVYYDDSSNVIEQLSNNMVVRAX

SEQ ID NO: 73513 - protein, 27 aa, Artificial Sequence
  Cyclic GFR-binding peptide
  MOD_RES (1)..(1): Xaa is C or S
XVPTELRSVKMAKVDEYDKVVKEVQVE

SEQ ID NO: 73514 - protein, 38 aa, Artificial Sequence
  Cyclic GFR-binding peptide
  MOD_RES (2)..(3)..(35)..(37): Xaa is C or S
AXXVPTELRPVQMRKIDEYDKVVKKATVEMVVEGXGXR

SEQ ID NO: 73515 - protein, 34 aa, Artificial Sequence
  Cyclic GFR-binding peptide
  MOD_RES (31)..(33): Xaa is C or S
VPQDLRSVKIAKVVGRTPKVKEVQVMVVKSXKXS

SEQ ID NO: 73516 - protein, 27 aa, Artificial Sequence
  Cyclic GFR-binding peptide
VPTELSNITMQIMDENEKVVIGEMSDM

SEQ ID NO: 73517 - protein, 35 aa, Artificial Sequence; identical to SEQ ID NO: 19087
  Cyclic GFR-binding peptide
  MOD_RES (2)..(34): Xaa is C or S

SEQ ID NO: 73518 - protein, 31 aa, Artificial Sequence
  Cyclic GFR-binding peptide
  MOD_RES (2)..(2): Xaa is C or S
TXAPTKLSNITVQIMDDSSNVIIGEMSNMVV

SEQ ID NO: 73519 - protein, 39 aa, Artificial Sequence
  Cyclic GFR-binding peptide
  MOD_RES (6)..(7)..(38): Xaa is C or S
ASASPXXVSQDLRPVQIRKIIGKTPKIKKATVMIVKSXK

SEQ ID NO: 73520 - protein, 29 aa, Artificial Sequence
  Cyclic GFR-binding peptide
HHRPVQVRKIEYVRKKPKLKKATVRLEEH

SEQ ID NO: 73521 - protein, 27 aa, Artificial Sequence
  Cyclic GFR-binding peptide
  MOD_RES (1)..(2): Xaa is C or S
XXVSQDLRPVQIRKIIGKTPKIKKATV

SEQ ID NO: 73522 - protein, 30 aa, Artificial Sequence
  Cyclic GFR-binding peptide
  MOD_RES (27)..(29): Xaa is C or S
LRPVQIRKIVGRTPKVKKATVMVVKSXKXS

SEQ ID NO: 73523 - protein, 28 aa, Artificial Sequence
  Cyclic GFR-binding peptide
  MOD_RES (1)..(1): Xaa is C or S
XVPQALSNITIQIMVGRKPKVIGEMSMI

SEQ ID NO: 73524 - protein, 32 aa, Artificial Sequence
  Cyclic GFR-binding peptide
  MOD_RES (4)..(4): Xaa is C or S
KPTXAPTKLRSVKVAKVDDSSNVIKEVQVNMV

SEQ ID NO: 73525 - protein, 24 aa, Artificial Sequence
  Cyclic GFR-binding peptide
PQDLRPVQIRKIVGRTPKVKKATV

SEQ ID NO: 73526 - protein, 29 aa, Artificial Sequence
  Cyclic GFR-binding peptide
SQDLSNITIQIMIGKTPKIIGEMSMIVKS

SEQ ID NO: 73527 - protein, 24 aa, Artificial Sequence
  Cyclic GFR-binding peptide
TQLRSVKVAKVDDSSNVIKEVQVN

SEQ ID NO: 73528 - protein, 31 aa, Artificial Sequence; identical to SEQ ID NO: 19097
  Cyclic GFR-binding peptide
  MOD_RES (4)..(5): Xaa is C or S

SEQ ID NO: 73529 - protein, 36 aa, Artificial Sequence; identical to SEQ ID NO: 19101
  Cyclic GFR-binding peptide
  MOD_RES (6)..(6): Xaa is C or S

SEQ ID NO: 73530 - protein, 32 aa, Artificial Sequence; identical to SEQ ID NO: 19102
  Cyclic GFR-binding peptide
  MOD_RES (5)..(6): Xaa is C or S

SEQ ID NO: 73531 - protein, 26 aa, Artificial Sequence
  Cyclic GFR-binding peptide
  MOD_RES (1)..(1): Xaa is C or S
XVPTELEPLTMLYYDEYDKVVEQLSN

SEQ ID NO: 73532 - protein, 26 aa, Artificial Sequence
  Cyclic GFR-binding peptide
PQALRPVQIRKIVGRKPKVKKATVMI

SEQ ID NO: 73533 - protein, 30 aa, Artificial Sequence; identical to SEQ ID NO: 23334
  Cyclic GFR-binding peptide

SEQ ID NO: 73534 - protein, 34 aa, Artificial Sequence
  Cyclic GFR-binding peptide
  MOD_RES (4)..(5): Xaa is C or S
PKAXXVPTELRPVQMRKIDEYDKVVKKATVEMVV

SEQ ID NO: 73535 - protein, 34 aa, Artificial Sequence; identical to SEQ ID NO: 19109
  Cyclic GFR-binding peptide
  MOD_RES (6)..(7): Xaa is C or S

SEQ ID NO: 73536 - protein, 34 aa, Artificial Sequence; identical to SEQ ID NO: 19111
  Cyclic GFR-binding peptide
  MOD_RES (2)..(3): Xaa is C or S

SEQ ID NO: 73537 - protein, 32 aa, Artificial Sequence
  Cyclic GFR-binding peptide
  MOD_RES (1)..(32): Xaa is C or S
XVSQDLSNITIQIMIGKTPKIIGEMSMIVKSX

SEQ ID NO: 73538 - protein, 25 aa, Artificial Sequence
  Cyclic GFR-binding peptide
APTQLSNITVQIMDDSSNVIIGEMS

SEQ ID NO: 73539 - protein, 32 aa, Artificial Sequence
  Cyclic GFR-binding peptide
  MOD_RES (32)..(32): Xaa is C or S
VPTELRPVQMRKIDENEKVVKKATVDMVVEGX

SEQ ID NO: 73540 - protein, 31 aa, Artificial Sequence; identical to SEQ ID NO: 23342
  Cyclic GFR-binding peptide
  MOD_RES (1)..(1): Xaa is C or S

SEQ ID NO: 73541 - protein, 26 aa, Artificial Sequence
  Cyclic GFR-binding peptide
QVQLRSVKVAKVEIVRKKPIFKEVQV

SEQ ID NO: 73542 - protein, 27 aa, Artificial Sequence
  Cyclic GFR-binding peptide
QALEPLTILYYVGRKPKVEQLSNMIVR

SEQ ID NO: 73543 - protein, 32 aa, Artificial Sequence
  Cyclic GFR-binding peptide
  MOD_RES (6)..(7): Xaa is C or S
YVPKPXXAPTKLRPVQVRKIDDSSNVIKKATV

SEQ ID NO: 73544 - protein, 38 aa, Artificial Sequence; identical to SEQ ID NO: 19128
  Cyclic GFR-binding peptide
  MOD_RES (4)..(5)..(37): Xaa is C or S

SEQ ID NO: 73545 - protein, 34 aa, Artificial Sequence
  Cyclic GFR-binding peptide
  MOD_RES (4)..(5): Xaa is C or S
ASPXXVSQDLRSVKIAKVIGKTPKIKEVQVMIVK

SEQ ID NO: 73546 - protein, 33 aa, Artificial Sequence
  Cyclic GFR-binding peptide
  MOD_RES (6)..(7): Xaa is C or S
SIPKAXXVPTELRPVQMRKIDEYDKVVKKATVE

SEQ ID NO: 73547 - protein, 34 aa, Artificial Sequence
  Cyclic GFR-binding peptide
  MOD_RES (1)..(2)..(34): Xaa is C or S
XXVPTELRPVQMRKIDEYDKVVKKATVEMVVEGX

SEQ ID NO: 73548 - protein, 36 aa, Artificial Sequence
  Cyclic GFR-binding peptide
  MOD_RES (2)..(2): Xaa is C or S
QXRPTQVQLEPLPVVYYEIVRKKPIFEQLSNTLEDH

SEQ ID NO: 73549 - protein, 24 aa, Artificial Sequence
  Cyclic GFR-binding peptide
SNITMQIMDENEKVVIGEMSDMVV

SEQ ID NO: 73550 - protein, 37 aa, Artificial Sequence; identical to SEQ ID NO: 23352
  Cyclic GFR-binding peptide
  MOD_RES (1)..(1): Xaa is C or S

SEQ ID NO: 73551 - protein, 34 aa, Artificial Sequence
  Cyclic GFR-binding peptide
  MOD_RES (31)..(33): Xaa is C or S
PTELSNITMQIMDENEKVVIGEMSDMVVEGXGXR

SEQ ID NO: 73552 - protein, 25 aa, Artificial Sequence
  Cyclic GFR-binding peptide
PQALRSVKIAKVVGRKPKVKEVQVM

SEQ ID NO: 73553 - protein, 26 aa, Artificial Sequence
  Cyclic GFR-binding peptide
ALRSVKIAKVVGRKPKVKEVQVMIVR

SEQ ID NO: 73554 - protein, 35 aa, Artificial Sequence; identical to SEQ ID NO: 19141
  Cyclic GFR-binding peptide
  MOD_RES (2)..(3)..(35): Xaa is C or S

SEQ ID NO: 73555 - protein, 21 aa, Artificial Sequence
  Cyclic GFR-binding peptide
RSVKIAKVVGRTPKVKEVQVM

SEQ ID NO: 73556 - protein, 25 aa, Artificial Sequence
  Cyclic GFR-binding peptide
QLEPLPVVYYEIVRKKPIFEQLSNT

SEQ ID NO: 73557 - protein, 45 aa, Artificial Sequence; identical to SEQ ID NO: 23354
  Cyclic GFR-binding peptide
  MOD_RES (5)..(42)..(44): Xaa is C or S

SEQ ID NO: 73558 - protein, 33 aa, Artificial Sequence; identical to SEQ ID NO: 19142
  Cyclic GFR-binding peptide
  MOD_RES (3)..(4): Xaa is C or S

SEQ ID NO: 73559 - protein, 34 aa, Artificial Sequence; identical to SEQ ID NO: 23356
  Cyclic GFR-binding peptide

SEQ ID NO: 73560 - protein, 37 aa, Artificial Sequence
  Cyclic GFR-binding peptide
  MOD_RES (35)..(37): Xaa is C or S
TQVQLEPLTVLYYEIVRKKPIFEQLSNTLEDHLAXKX

SEQ ID NO: 73561 - protein, 27 aa, Artificial Sequence
  Cyclic GFR-binding peptide
  MOD_RES (1)..(1): Xaa is C or S
XVPQDLEPLPIVYYVGRTPKVEQLSNM

SEQ ID NO: 73562 - protein, 28 aa, Artificial Sequence
  Cyclic GFR-binding peptide
  MOD_RES (27)..(27): Xaa is C or S
EPLPVVYYDDSSNVIEQLSNNMVVRAXG

SEQ ID NO: 73563 - protein, 25 aa, Artificial Sequence
  Cyclic GFR-binding peptide
QDLSNITIQIMIGKTPKIIGEMSMI

SEQ ID NO: 73564 - protein, 38 aa, Artificial Sequence; identical to SEQ ID NO: 19158
  Cyclic GFR-binding peptide
  MOD_RES (4)..(5)..(37): Xaa is C or S

SEQ ID NO: 73565 - protein, 28 aa, Artificial Sequence
  Cyclic GFR-binding peptide
QDLEPLPIVYYVGRTPKVEQLSNMVVKS

SEQ ID NO: 73566 - protein, 42 aa, Artificial Sequence
  Cyclic GFR-binding peptide
  MOD_RES (7)..(39)..(41): Xaa is C or S
HVTKPTXAPTKLRPVQVRKIDDSSNVIKKATVNMVVRSXGXH

SEQ ID NO: 73567 - protein, 32 aa, Artificial Sequence; identical to SEQ ID NO: 23365
  Cyclic GFR-binding peptide
  MOD_RES (1)..(1): Xaa is C or S

SEQ ID NO: 73568 - protein, 30 aa, Artificial Sequence; identical to SEQ ID NO: 19165
  Cyclic GFR-binding peptide
  MOD_RES (1)..(1): Xaa is C or S

SEQ ID NO: 73569 - protein, 36 aa, Artificial Sequence; identical to SEQ ID NO: 19166
  Cyclic GFR-binding peptide
  MOD_RES (3)..(4)..(35): Xaa is C or S

SEQ ID NO: 73570 - protein, 30 aa, Artificial Sequence; identical to SEQ ID NO: 23366
  Cyclic GFR-binding peptide

SEQ ID NO: 73571 - protein, 23 aa, Artificial Sequence
  Cyclic GFR-binding peptide
LRSVKIAKVVGRKPKVKEVQVMI

SEQ ID NO: 73572 - protein, 40 aa, Artificial Sequence
  Cyclic GFR-binding peptide
  MOD_RES (6)..(7)..(39): Xaa is C or S
SIPKAXXVPTELSNITMQIMDEYDKVVIGEMSEMVVEGXG

SEQ ID NO: 73573 - protein, 40 aa, Artificial Sequence; identical to SEQ ID NO: 19175
  Cyclic GFR-binding peptide
  MOD_RES (4)..(5)..(37)..(39): Xaa is C or S

SEQ ID NO: 73574 - protein, 30 aa, Artificial Sequence
  Cyclic GFR-binding peptide
  MOD_RES (1)..(2): Xaa is C or S
XXAPTKLSNITVQIMDDSSNVIIGEMSNMV

SEQ ID NO: 73575 - protein, 27 aa, Artificial Sequence
  Cyclic GFR-binding peptide
VPQDLRSVKIAKVVGRTPKVKEVQVMV

SEQ ID NO: 73576 - protein, 31 aa, Artificial Sequence
  Cyclic GFR-binding peptide
  MOD_RES (31)..(31): Xaa is C or S
HEPLPVVYYEYVRKKPKLEQLSNRLEEHLEX

SEQ ID NO: 73577 - protein, 40 aa, Artificial Sequence
  Cyclic GFR-binding peptide
  MOD_RES (3)..(40): Xaa is C or S
VQXRPTQVQLEPLTVLYYEIVRKKPIFEQLSNTLEDHLAX

SEQ ID NO: 73578 - protein, 38 aa, Artificial Sequence
  Cyclic GFR-binding peptide
  MOD_RES (6)..(7): Xaa is C or S
TVPKPXXAPTQLSNITVQIMDDSSNVIIGEMSNMVVRA

SEQ ID NO: 73579 - protein, 33 aa, Artificial Sequence
  Cyclic GFR-binding peptide
  MOD_RES (1)..(32): Xaa is C or S
XVPQDLSNITIQIMVGRTPKVIGEMSMVVKSXK

SEQ ID NO: 73580 - protein, 38 aa, Artificial Sequence
  Cyclic GFR-binding peptide
  MOD_RES (4)..(36)..(38): Xaa is C or S
KPTXAPTKLRSVKVAKVDDSSNVIKEVQVNMVVRSXGX

SEQ ID NO: 73581 - protein, 28 aa, Artificial Sequence
  Cyclic GFR-binding peptide
  MOD_RES (27)..(27): Xaa is C or S
RSVKVAKVDDSSNVIKEVQVNMVVRAXG

SEQ ID NO: 73582 - protein, 37 aa, Artificial Sequence; identical to SEQ ID NO: 19184
  Cyclic GFR-binding peptide
  MOD_RES (3)..(4)..(36): Xaa is C or S

SEQ ID NO: 73583 - protein, 42 aa, Artificial Sequence; identical to SEQ ID NO: 19186
  Cyclic GFR-binding peptide
  MOD_RES (6)..(7)..(39)..(41): Xaa is C or S

SEQ ID NO: 73584 - protein, 33 aa, Artificial Sequence
  Cyclic GFR-binding peptide
  MOD_RES (30)..(32): Xaa is C or S
EPLPVVYYEYVRKKPKLEQLSNRLEEHLEXAXA

SEQ ID NO: 73585 - protein, 35 aa, Artificial Sequence; identical to SEQ ID NO: 23383
  Cyclic GFR-binding peptide
  MOD_RES (1)..(1): Xaa is C or S

SEQ ID NO: 73586 - protein, 30 aa, Artificial Sequence
  Cyclic GFR-binding peptide
  MOD_RES (1)..(1): Xaa is C or S
XVPQALSNITIQIMVGRKPKVIGEMSMIVR

SEQ ID NO: 73587 - protein, 40 aa, Artificial Sequence; identical to SEQ ID NO: 19187
  Cyclic GFR-binding peptide
  MOD_RES (5)..(6)..(37)..(39): Xaa is C or S

SEQ ID NO: 73588 - protein, 34 aa, Artificial Sequence
  Cyclic GFR-binding peptide
  MOD_RES (3)..(4): Xaa is C or S
KPXXAPTKLRPVQVRKIDDSSNVIKKATVNMVVR

SEQ ID NO: 73589 - protein, 28 aa, Artificial Sequence
  Cyclic GFR-binding peptide
  MOD_RES (1)..(2): Xaa is C or S
XXVSQDLRPVQIRKIIGKTPKIKKATVM

SEQ ID NO: 73590 - protein, 31 aa, Artificial Sequence; identical to SEQ ID NO: 23393
  Cyclic GFR-binding peptide

SEQ ID NO: 73591 - protein, 36 aa, Artificial Sequence
  Cyclic GFR-binding peptide
  MOD_RES (1)..(2)..(33)..(35): Xaa is C or S
XXVPQDLSNITIQIMVGRTPKVIGEMSMVVKSXKXS

SEQ ID NO: 73592 - protein, 33 aa, Artificial Sequence
  Cyclic GFR-binding peptide
  MOD_RES (4)..(5): Xaa is C or S
AAPXXVPQALRSVKIAKVVGRKPKVKEVQVMIV

SEQ ID NO: 73593 - protein, 26 aa, Artificial Sequence
  Cyclic GFR-binding peptide
QVQLSNITVQIMEIVRKKPIFIGEMS

SEQ ID NO: 73594 - protein, 26 aa, Artificial Sequence
  Cyclic GFR-binding peptide
  MOD_RES (1)..(1): Xaa is C or S
XAPTQLRPVQVRKIDDSSNVIKKATV

SEQ ID NO: 73595 - protein, 32 aa, Artificial Sequence
  Cyclic GFR-binding peptide
  MOD_RES (4)..(5): Xaa is C or S
PKAXXVPTELRSVKMAKVDEYDKVVKEVQVEM

SEQ ID NO: 73596 - protein, 33 aa, Artificial Sequence
  Cyclic GFR-binding peptide
  MOD_RES (32)..(32): Xaa is C or S
VPTELRPVQMRKIDEYDKVVKKATVEMVVEGXG

SEQ ID NO: 73597 - protein, 43 aa, Artificial Sequence
  Cyclic GFR-binding peptide
  MOD_RES (4)..(41)..(43): Xaa is C or S
SVKXQPSRVHHEPLTVLYYEYVRKKPKLEQLSNRLEEHLEXAX

SEQ ID NO: 73598 - protein, 32 aa, Artificial Sequence
  Cyclic GFR-binding peptide
  MOD_RES (5)..(6): Xaa is C or S
IPKAXXVPTELRPVQMRKIDENEKVVKKATVD

SEQ ID NO: 73599 - protein, 35 aa, Artificial Sequence
  Cyclic GFR-binding peptide
  MOD_RES (33)..(35): Xaa is C or S
PTEEEPLPMVYYRIKPHQGQHEQLSNFLQHNKXEX

SEQ ID NO: 73600 - protein, 29 aa, Artificial Sequence
  Cyclic GFR-binding peptide
RSVKVAKVEIVRKKPIFKEVQVTLEDHLA

SEQ ID NO: 73601 - protein, 25 aa, Artificial Sequence
  Cyclic GFR-binding peptide
TELRSVKMAKVDENEKVVKEVQVDM

SEQ ID NO: 73602 - protein, 39 aa, Artificial Sequence; identical to SEQ ID NO: 19202
  Cyclic GFR-binding peptide
  MOD_RES (5)..(6)..(38): Xaa is C or S

SEQ ID NO: 73603 - protein, 36 aa, Artificial Sequence
  Cyclic GFR-binding peptide
  MOD_RES (2)..(3)..(35): Xaa is C or S
PXXAPTQLSNITVQIMDDSSNVIIGEMSNMVVRAXG

SEQ ID NO: 73604 - protein, 31 aa, Artificial Sequence; identical to SEQ ID NO: 23404
  Cyclic GFR-binding peptide
  MOD_RES (2)..(2): Xaa is C or S

SEQ ID NO: 73605 - protein, 34 aa, Artificial Sequence
  Cyclic GFR-binding peptide
  MOD_RES (31)..(33): Xaa is C or S
PTQLSNITVQIMDDSSNVIIGEMSNMVVRAXGXH

SEQ ID NO: 73606 - protein, 28 aa, Artificial Sequence
  Cyclic GFR-binding peptide
  MOD_RES (2)..(3): Xaa is C or S
PXXAPTKLRSVKVAKVDDSSNVIKEVQV

SEQ ID NO: 73607 - protein, 22 aa, Artificial Sequence
  Cyclic GFR-binding peptide
RSVKIAKVIGKTPKIKEVQVMI

SEQ ID NO: 73608 - protein, 34 aa, Artificial Sequence
  Cyclic GFR-binding peptide
  MOD_RES (2)..(2): Xaa is C or S
EXVPTEEEPLTMLYYRIKPHQGQHEQLSNFLQHN

SEQ ID NO: 73609 - protein, 30 aa, Artificial Sequence
  Cyclic GFR-binding peptide
  MOD_RES (28)..(30): Xaa is C or S
LSNITMQIMDENEKVVIGEMSDMVVEGXGX

SEQ ID NO: 73610 - protein, 26 aa, Artificial Sequence
  Cyclic GFR-binding peptide
SNITMQIMDENEKVVIGEMSDMVVEG

SEQ ID NO: 73611 - protein, 30 aa, Artificial Sequence
  Cyclic GFR-binding peptide
  MOD_RES (3)..(4): Xaa is C or S
KAXXVPTELRPVQMRKIDEYDKVVKKATVE

SEQ ID NO: 73612 - protein, 34 aa, Artificial Sequence
  Cyclic GFR-binding peptide
  MOD_RES (6)..(7): Xaa is C or S
ASASPXXVSQDLRPVQIRKIIGKTPKIKKATVMI

SEQ ID NO: 73613 - protein, 42 aa, Artificial Sequence
  Cyclic GFR-binding peptide
  MOD_RES (6)..(7)..(39)..(41): Xaa is C or S
KIPKAXXVPTELSNITMQIMDENEKVVIGEMSDMVVEGXGXR

SEQ ID NO: 73614 - protein, 39 aa, Artificial Sequence
  Cyclic GFR-binding peptide
  MOD_RES (4)..(4): Xaa is C or S
SVKXQPSRVHHEPLPVVYYEYVRKKPKLEQLSNRLEEHL

SEQ ID NO: 73615 - protein, 30 aa, Artificial Sequence; identical to SEQ ID NO: 19217
  Cyclic GFR-binding peptide
  MOD_RES (2)..(3): Xaa is C or S

SEQ ID NO: 73616 - protein, 26 aa, Artificial Sequence
  Cyclic GFR-binding peptide
RVHHSNITVQIMEYVRKKPKLIGEMS

SEQ ID NO: 73617 - protein, 36 aa, Artificial Sequence
  Cyclic GFR-binding peptide
  MOD_RES (3)..(4)..(36): Xaa is C or S
KPXXAPTQLSNITVQIMDDSSNVIIGEMSNMVVRAX

SEQ ID NO: 73618 - protein, 33 aa, Artificial Sequence
  Cyclic GFR-binding peptide
  MOD_RES (5)..(6): Xaa is C or S
IPKAXXVPTELRPVQMRKIDEYDKVVKKATVEM

SEQ ID NO: 73619 - protein, 26 aa, Artificial Sequence
  Cyclic GFR-binding peptide
VHHEPLPVVYYEYVRKKPKLEQLSNR

SEQ ID NO: 73620 - protein, 29 aa, Artificial Sequence
  Cyclic GFR-binding peptide
SNITVQIMEYVRKKPKLIGEMSRLEEHLE

SEQ ID NO: 73621 - protein, 23 aa, Artificial Sequence
  Cyclic GFR-binding peptide
ELSNITMQIMDEYDKVVIGEMSE

SEQ ID NO: 73622 - protein, 41 aa, Artificial Sequence
  Cyclic GFR-binding peptide
  MOD_RES (6)..(7)..(39)..(41): Xaa is C or S
KIPKAXXVPTELSNITMQIMDENEKVVIGEMSDMVVEGXGX

SEQ ID NO: 73623 - protein, 31 aa, Artificial Sequence; identical to SEQ ID NO: 19233
  Cyclic GFR-binding peptide
  MOD_RES (30)..(30): Xaa is C or S

SEQ ID NO: 73624 - protein, 36 aa, Artificial Sequence
  Cyclic GFR-binding peptide
  MOD_RES (5)..(6): Xaa is C or S
IPKAXXVPTELRSVKMAKVDEYDKVVKEVQVEMVVE

SEQ ID NO: 73625 - protein, 30 aa, Artificial Sequence
  Cyclic GFR-binding peptide
PTELSNITMQIMDEYDKVVIGEMSEMVVEG

SEQ ID NO: 73626 - protein, 27 aa, Artificial Sequence
  Cyclic GFR-binding peptide
PTELEPLTMLYYDEYDKVVEQLSNEMV

SEQ ID NO: 73627 - protein, 32 aa, Artificial Sequence
  Cyclic GFR-binding peptide
  MOD_RES (5)..(6): Xaa is C or S
VPKPXXAPTKLRSVKVAKVDDSSNVIKEVQVN

SEQ ID NO: 73628 - protein, 39 aa, Artificial Sequence
  Cyclic GFR-binding peptide
  MOD_RES (5)..(37)..(39): Xaa is C or S
TKPTXAPTKLRPVQVRKIDDSSNVIKKATVNMVVRSXGX

SEQ ID NO: 73629 - protein, 35 aa, Artificial Sequence
  Cyclic GFR-binding peptide
  MOD_RES (4)..(5): Xaa is C or S
PKPXXAPTQLRPVQVRKIDDSSNVIKKATVNMVVR

SEQ ID NO: 73630 - protein, 43 aa, Artificial Sequence; identical to SEQ ID NO: 23439
  Cyclic GFR-binding peptide
  MOD_RES (6)..(40)..(42): Xaa is C or S

SEQ ID NO: 73631 - protein, 27 aa, Artificial Sequence
  Cyclic GFR-binding peptide
ELRSVKMAKVDEYDKVVKEVQVEMVVE

SEQ ID NO: 73632 - protein, 30 aa, Artificial Sequence
  Cyclic GFR-binding peptide
PTELSNITMQIMDENEKVVIGEMSDMVVEG

SEQ ID NO: 73633 - protein, 32 aa, Artificial Sequence; identical to SEQ ID NO: 19243
  Cyclic GFR-binding peptide
  MOD_RES (1)..(2): Xaa is C or S

SEQ ID NO: 73634 - protein, 36 aa, Artificial Sequence; identical to SEQ ID NO: 19244
  Cyclic GFR-binding peptide
  MOD_RES (2)..(3)..(35): Xaa is C or S

SEQ ID NO: 73635 - protein, 29 aa, Artificial Sequence
  Cyclic GFR-binding peptide
  MOD_RES (29)..(29): Xaa is C or S
KLSNITVQIMDDSSNVIIGEMSNMVVRSX

SEQ ID NO: 73636 - protein, 29 aa, Artificial Sequence
  Cyclic GFR-binding peptide
PTEEEPLTMLYYRIKPHQGQHEQLSNFLQ

SEQ ID NO: 73637 - protein, 28 aa, Artificial Sequence
  Cyclic GFR-binding peptide
VPQDLRPVQIRKIVGRTPKVKKATVMVV

SEQ ID NO: 73638 - protein, 34 aa, Artificial Sequence
  Cyclic GFR-binding peptide
PSRVHHEPLPVVYYEYVRKKPKLEQLSNRLEEHL

SEQ ID NO: 73639 - protein, 33 aa, Artificial Sequence; identical to SEQ ID NO: 19249
  Cyclic GFR-binding peptide
  MOD_RES (2)..(3): Xaa is C or S

SEQ ID NO: 73640 - protein, 28 aa, Artificial Sequence
  Cyclic GFR-binding peptide
VSQDLEPLPIVYYIGKTPKIEQLSNMIV

SEQ ID NO: 73641 - protein, 31 aa, Artificial Sequence
  Cyclic GFR-binding peptide
  MOD_RES (4)..(5): Xaa is C or S
ASPXXVSQDLRPVQIRKIIGKTPKIKKATVM

SEQ ID NO: 73642 - protein, 36 aa, Artificial Sequence
  Cyclic GFR-binding peptide
  MOD_RES (6)..(7): Xaa is C or S
SIPKAXXVPTELRSVKMAKVDEYDKVVKEVQVEMVV

SEQ ID NO: 73643 - protein, 31 aa, Artificial Sequence; identical to SEQ ID NO: 19254
  Cyclic GFR-binding peptide
  MOD_RES (5)..(6): Xaa is C or S

SEQ ID NO: 73644 - protein, 35 aa, Artificial Sequence; identical to SEQ ID NO: 19256
  Cyclic GFR-binding peptide
  MOD_RES (5)..(6): Xaa is C or S

SEQ ID NO: 73645 - protein, 34 aa, Artificial Sequence
  Cyclic GFR-binding peptide
RPTQVQLEPLTVLYYEIVRKKPIFEQLSNTLEDH

SEQ ID NO: 73646 - protein, 32 aa, Artificial Sequence
  Cyclic GFR-binding peptide
  MOD_RES (1)..(2): Xaa is C or S
XXVPTELRPVQMRKIDEYDKVVKKATVEMVVE

SEQ ID NO: 73647 - protein, 26 aa, Artificial Sequence
  Cyclic GFR-binding peptide
PTEERPVQMRKIRIKPHQGQHKKATV

SEQ ID NO: 73648 - protein, 44 aa, Artificial Sequence; identical to SEQ ID NO: 23458
  Cyclic GFR-binding peptide
  MOD_RES (4)..(41)..(43): Xaa is C or S

SEQ ID NO: 73649 - protein, 36 aa, Artificial Sequence
  Cyclic GFR-binding peptide
  MOD_RES (3)..(4)..(36): Xaa is C or S
KAXXVPTELRPVQMRKIDENEKVVKKATVDMVVEGX

SEQ ID NO: 73650 - protein, 34 aa, Artificial Sequence; identical to SEQ ID NO: 19258
  Cyclic GFR-binding peptide
  MOD_RES (3)..(4): Xaa is C or S

SEQ ID NO: 73651 - protein, 23 aa, Artificial Sequence
  Cyclic GFR-binding peptide
EPLTVLYYDDSSNVIEQLSNNMV

SEQ ID NO: 73652 - protein, 30 aa, Artificial Sequence
  Cyclic GFR-binding peptide
RVHHEPLPVVYYEYVRKKPKLEQLSNRLEE

SEQ ID NO: 73653 - protein, 31 aa, Artificial Sequence
  Cyclic GFR-binding peptide
VPTELSNITMQIMDENEKVVIGEMSDMVVEG

SEQ ID NO: 73654 - protein, 32 aa, Artificial Sequence
  Cyclic GFR-binding peptide
  MOD_RES (5)..(6): Xaa is C or S
IPKAXXVPTELRSVKMAKVDEYDKVVKEVQVE

SEQ ID NO: 73655 - protein, 31 aa, Artificial Sequence; identical to SEQ ID NO: 23466
  Cyclic GFR-binding peptide
  MOD_RES (31)..(31): Xaa is C or S

SEQ ID NO: 73656 - protein, 35 aa, Artificial Sequence; identical to SEQ ID NO: 23472
  Cyclic GFR-binding peptide
  MOD_RES (6)..(6): Xaa is C or S

SEQ ID NO: 73657 - protein, 38 aa, Artificial Sequence
  Cyclic GFR-binding peptide
  MOD_RES (2)..(3)..(35)..(37): Xaa is C or S
PXXAPTQLSNITVQIMDDSSNVIIGEMSNMVVRAXGXH

SEQ ID NO: 73658 - protein, 28 aa, Artificial Sequence
  Cyclic GFR-binding peptide
  MOD_RES (28)..(28): Xaa is C or S
DLRPVQIRKIVGRTPKVKKATVMVVKSX

SEQ ID NO: 73659 - protein, 37 aa, Artificial Sequence; identical to SEQ ID NO: 23477
  Cyclic GFR-binding peptide
  MOD_RES (3)..(3): Xaa is C or S

SEQ ID NO: 73660 - protein, 32 aa, Artificial Sequence
  Cyclic GFR-binding peptide
  MOD_RES (2)..(3): Xaa is C or S
PXXVSQDLRSVKIAKVIGKTPKIKEVQVMIVK

SEQ ID NO: 73661 - protein, 24 aa, Artificial Sequence
  Cyclic GFR-binding peptide
LRSVKVAKVEIVRKKPIFKEVQVT

SEQ ID NO: 73662 - protein, 29 aa, Artificial Sequence
  Cyclic GFR-binding peptide
  MOD_RES (3)..(3): Xaa is C or S
PTXAPTKLRSVKVAKVDDSSNVIKEVQVN

SEQ ID NO: 73663 - protein, 39 aa, Artificial Sequence
  Cyclic GFR-binding peptide
  MOD_RES (6)..(7)..(39): Xaa is C or S
TVPKPXXAPTQLSNITVQIMDDSSNVIIGEMSNMVVRAX

SEQ ID NO: 73664 - protein, 30 aa, Artificial Sequence; identical to SEQ ID NO: 23487
  Cyclic GFR-binding peptide
  MOD_RES (30)..(30): Xaa is C or S

SEQ ID NO: 73665 - protein, 36 aa, Artificial Sequence
  Cyclic GFR-binding peptide
  MOD_RES (1)..(1): Xaa is C or S
XRPTQVQLEPLTVLYYEIVRKKPIFEQLSNTLEDHL

SEQ ID NO: 73666 - protein, 40 aa, Artificial Sequence
  Cyclic GFR-binding peptide
  MOD_RES (37)..(39): Xaa is C or S
RPTQVQLEPLTVLYYEIVRKKPIFEQLSNTLEDHLAXKXE

SEQ ID NO: 73667 - protein, 27 aa, Artificial Sequence
  Cyclic GFR-binding peptide
  MOD_RES (1)..(1): Xaa is C or S
XAPTKLSNITVQIMDDSSNVIIGEMSN

SEQ ID NO: 73668 - protein, 25 aa, Artificial Sequence
  Cyclic GFR-binding peptide
TQLEPLTVLYYDDSSNVIEQLSNNM

SEQ ID NO: 73669 - protein, 32 aa, Artificial Sequence
  Cyclic GFR-binding peptide
  MOD_RES (1)..(2): Xaa is C or S
XXVPQALRPVQIRKIVGRKPKVKKATVMIVRS

SEQ ID NO: 73670 - protein, 29 aa, Artificial Sequence
  Cyclic GFR-binding peptide
  MOD_RES (3)..(4): Xaa is C or S
SPXXVSQDLEPLPIVYYIGKTPKIEQLSN

SEQ ID NO: 73671 - protein, 38 aa, Artificial Sequence; identical to SEQ ID NO: 23500
  Cyclic GFR-binding peptide
  MOD_RES (1)..(38): Xaa is C or S

SEQ ID NO: 73672 - protein, 35 aa, Artificial Sequence; identical to SEQ ID NO: 19293
  Cyclic GFR-binding peptide
  MOD_RES (3)..(4): Xaa is C or S

SEQ ID NO: 73673 - protein, 36 aa, Artificial Sequence
  Cyclic GFR-binding peptide
  MOD_RES (6)..(7): Xaa is C or S
YVPKPXXAPTKLRSVKVAKVDDSSNVIKEVQVNMVV

SEQ ID NO: 73674 - protein, 36 aa, Artificial Sequence; identical to SEQ ID NO: 19297
  Cyclic GFR-binding peptide
  MOD_RES (5)..(6): Xaa is C or S

SEQ ID NO: 73675 - protein, 29 aa, Artificial Sequence
  Cyclic GFR-binding peptide
SRVHHRPVQVRKIEYVRKKPKLKKATVRL

SEQ ID NO: 73676 - protein, 25 aa, Artificial Sequence
  Cyclic GFR-binding peptide
LEPLTMLYYDEYDKVVEQLSNEMVV

SEQ ID NO: 73677 - protein, 41 aa, Artificial Sequence; identical to SEQ ID NO: 19305
  Cyclic GFR-binding peptide
  MOD_RES (6)..(7)..(38)..(40): Xaa is C or S

SEQ ID NO: 73678 - protein, 28 aa, Artificial Sequence
  Cyclic GFR-binding peptide
VQLEPLTVLYYEIVRKKPIFEQLSNTLE

SEQ ID NO: 73679 - protein, 32 aa, Artificial Sequence; identical to SEQ ID NO: 23509
  Cyclic GFR-binding peptide
  MOD_RES (29)..(31): Xaa is C or S

SEQ ID NO: 73680 - protein, 33 aa, Artificial Sequence; identical to SEQ ID NO: 23511
  Cyclic GFR-binding peptide
  MOD_RES (1)..(1): Xaa is C or S

SEQ ID NO: 73681 - protein, 32 aa, Artificial Sequence; identical to SEQ ID NO: 19312
  Cyclic GFR-binding peptide
  MOD_RES (1)..(1): Xaa is C or S

SEQ ID NO: 73682 - protein, 41 aa, Artificial Sequence; identical to SEQ ID NO: 23514
  Cyclic GFR-binding peptide
  MOD_RES (6)..(40): Xaa is C or S

SEQ ID NO: 73683 - protein, 35 aa, Artificial Sequence
  Cyclic GFR-binding peptide
  MOD_RES (5)..(6): Xaa is C or S
SASPXXVSQDLRPVQIRKIIGKTPKIKKATVMIVK

SEQ ID NO: 73684 - protein, 22 aa, Artificial Sequence
  Cyclic GFR-binding peptide
EPLPVVYYEYVRKKPKLEQLSN

SEQ ID NO: 73685 - protein, 32 aa, Artificial Sequence; identical to SEQ ID NO: 23517
  Cyclic GFR-binding peptide

SEQ ID NO: 73686 - protein, 31 aa, Artificial Sequence; identical to SEQ ID NO: 19317
  Cyclic GFR-binding peptide
  MOD_RES (3)..(3): Xaa is C or S

SEQ ID NO: 73687 - protein, 24 aa, Artificial Sequence
  Cyclic GFR-binding peptide
LEPLPMVYYDENEKVVEQLSNDMV

SEQ ID NO: 73688 - protein, 34 aa, Artificial Sequence
  Cyclic GFR-binding peptide
  MOD_RES (3)..(4): Xaa is C or S
KAXXVPTELRSVKMAKVDENEKVVKEVQVDMVVE

SEQ ID NO: 73689 - protein, 38 aa, Artificial Sequence
  Cyclic GFR-binding peptide
  MOD_RES (5)..(6)..(37): Xaa is C or S
SAAPXXVPQALSNITIQIMVGRKPKVIGEMSMIVRSXK

SEQ ID NO: 73690 - protein, 36 aa, Artificial Sequence
  Cyclic GFR-binding peptide
  MOD_RES (1)..(33)..(35): Xaa is C or S
XAPTKLSNITVQIMDDSSNVIIGEMSNMVVRSXGXH

SEQ ID NO: 73691 - protein, 34 aa, Artificial Sequence; identical to SEQ ID NO: 19327
  Cyclic GFR-binding peptide
  MOD_RES (32)..(34): Xaa is C or S

SEQ ID NO: 73692 - protein, 34 aa, Artificial Sequence
  Cyclic GFR-binding peptide
  MOD_RES (32)..(34): Xaa is C or S
QLEPLPVVYYEIVRKKPIFEQLSNTLEDHLAXKX

SEQ ID NO: 73693 - protein, 29 aa, Artificial Sequence
  Cyclic GFR-binding peptide
HEPLPVVYYEYVRKKPKLEQLSNRLEEHL

SEQ ID NO: 73694 - protein, 36 aa, Artificial Sequence; identical to SEQ ID NO: 23526
  Cyclic GFR-binding peptide
  MOD_RES (34)..(36): Xaa is C or S

SEQ ID NO: 73695 - protein, 27 aa, Artificial Sequence
  Cyclic GFR-binding peptide
  MOD_RES (1)..(1): Xaa is C or S
XVPTELEPLTMLYYDEYDKVVEQLSNE

SEQ ID NO: 73696 - protein, 35 aa, Artificial Sequence
  Cyclic GFR-binding peptide
PTQVQLEPLTVLYYEIVRKKPIFEQLSNTLEDHLA

SEQ ID NO: 73697 - protein, 35 aa, Artificial Sequence
  Cyclic GFR-binding peptide
  MOD_RES (2)..(34): Xaa is C or S
TXAPTKLSNITVQIMDDSSNVIIGEMSNMVVRSXG

SEQ ID NO: 73698 - protein, 33 aa, Artificial Sequence
  Cyclic GFR-binding peptide
  MOD_RES (4)..(5): Xaa is C or S
PKPXXAPTKLSNITVQIMDDSSNVIIGEMSNMV

SEQ ID NO: 73699 - protein, 29 aa, Artificial Sequence
  Cyclic GFR-binding peptide
ERPVQMRKIRIKPHQGQHKKATVFLQHNK

SEQ ID NO: 73700 - protein, 26 aa, Artificial Sequence
  Cyclic GFR-binding peptide
VPTELSNITMQIMDEYDKVVIGEMSE

SEQ ID NO: 73701 - protein, 29 aa, Artificial Sequence
  Cyclic GFR-binding peptide
VPQALSNITIQIMVGRKPKVIGEMSMIVR

SEQ ID NO: 73702 - protein, 32 aa, Artificial Sequence; identical to SEQ ID NO: 19347
  Cyclic GFR-binding peptide
  MOD_RES (6)..(7): Xaa is C or S

SEQ ID NO: 73703 - protein, 22 aa, Artificial Sequence
  Cyclic GFR-binding peptide
LRPVQIRKIVGRKPKVKKATVM

SEQ ID NO: 73704 - protein, 25 aa, Artificial Sequence
  Cyclic GFR-binding peptide
ALEPLTILYYVGRKPKVEQLSNMIV

SEQ ID NO: 73705 - protein, 32 aa, Artificial Sequence
  Cyclic GFR-binding peptide
  MOD_RES (29)..(31): Xaa is C or S
QDLSNITIQIMIGKTPKIIGEMSMIVKSXKXS

SEQ ID NO: 73706 - protein, 30 aa, Artificial Sequence; identical to SEQ ID NO: 19352
  Cyclic GFR-binding peptide
  MOD_RES (4)..(5): Xaa is C or S

SEQ ID NO: 73707 - protein, 24 aa, Artificial Sequence
  Cyclic GFR-binding peptide
TKLSNITVQIMDDSSNVIIGEMSN

SEQ ID NO: 73708 - protein, 32 aa, Artificial Sequence; identical to SEQ ID NO: 23544
  Cyclic GFR-binding peptide
  MOD_RES (31)..(31): Xaa is C or S

SEQ ID NO: 73709 - protein, 32 aa, Artificial Sequence
  Cyclic GFR-binding peptide
  MOD_RES (1)..(1): Xaa is C or S
XRPTQVQLEPLPVVYYEIVRKKPIFEQLSNTL

SEQ ID NO: 73710 - protein, 38 aa, Artificial Sequence
  Cyclic GFR-binding peptide
  MOD_RES (1)..(35)..(37): Xaa is C or S
XVPTEEEPLTMLYYRIKPHQGQHEQLSNFLQHNKXEXR

SEQ ID NO: 73711 - protein, 29 aa, Artificial Sequence
  Cyclic GFR-binding peptide
  MOD_RES (28)..(28): Xaa is C or S
LEPLPVVYYDDSSNVIEQLSNNMVVRAXG

SEQ ID NO: 73712 - protein, 39 aa, Artificial Sequence; identical to SEQ ID NO: 23550
  Cyclic GFR-binding peptide
  MOD_RES (4)..(4): Xaa is C or S

SEQ ID NO: 73713 - protein, 32 aa, Artificial Sequence; identical to SEQ ID NO: 19364
  Cyclic GFR-binding peptide
  MOD_RES (3)..(4): Xaa is C or S

SEQ ID NO: 73714 - protein, 37 aa, Artificial Sequence; identical to SEQ ID NO: 23554
  Cyclic GFR-binding peptide
  MOD_RES (2)..(36): Xaa is C or S

SEQ ID NO: 73715 - protein, 36 aa, Artificial Sequence; identical to SEQ ID NO: 23555
  Cyclic GFR-binding peptide
  MOD_RES (4)..(4): Xaa is C or S

SEQ ID NO: 73716 - protein, 25 aa, Artificial Sequence
  Cyclic GFR-binding peptide
VHHEPLPVVYYEYVRKKPKLEQLSN

SEQ ID NO: 73717 - protein, 29 aa, Artificial Sequence
  Cyclic GFR-binding peptide
PTQLRPVQVRKIDDSSNVIKKATVNMVVR

SEQ ID NO: 73718 - protein, 37 aa, Artificial Sequence; identical to SEQ ID NO: 19371
  Cyclic GFR-binding peptide
  MOD_RES (2)..(3)..(34)..(36): Xaa is C or S

SEQ ID NO: 73719 - protein, 24 aa, Artificial Sequence
  Cyclic GFR-binding peptide
LEPLPIVYYVGRTPKVEQLSNMVV

SEQ ID NO: 73720 - protein, 27 aa, Artificial Sequence
  Cyclic GFR-binding peptide
VPTELEPLPMVYYDEYDKVVEQLSNEM

SEQ ID NO: 73721 - protein, 32 aa, Artificial Sequence; identical to SEQ ID NO: 19378
  Cyclic GFR-binding peptide
  MOD_RES (5)..(6): Xaa is C or S

SEQ ID NO: 73722 - protein, 31 aa, Artificial Sequence
  Cyclic GFR-binding peptide
  MOD_RES (4)..(5): Xaa is C or S
PKAXXVPTELRPVQMRKIDENEKVVKKATVD

SEQ ID NO: 73723 - protein, 26 aa, Artificial Sequence
  Cyclic GFR-binding peptide
TELEPLTMLYYDENEKVVEQLSNDMV

SEQ ID NO: 73724 - protein, 28 aa, Artificial Sequence
  Cyclic GFR-binding peptide
  MOD_RES (3)..(3): Xaa is C or S
PTXAPTKLEPLPVVYYDDSSNVIEQLSN

SEQ ID NO: 73725 - protein, 29 aa, Artificial Sequence
  Cyclic GFR-binding peptide
  MOD_RES (26)..(28): Xaa is C or S
EPLTILYYVGRKPKVEQLSNMIVRSXKXS

SEQ ID NO: 73726 - protein, 40 aa, Artificial Sequence; identical to SEQ ID NO: 23564
  Cyclic GFR-binding peptide
  MOD_RES (4)..(4): Xaa is C or S

SEQ ID NO: 73727 - protein, 25 aa, Artificial Sequence
  Cyclic GFR-binding peptide
TEERSVKMAKVRIKPHQGQHKEVQV

SEQ ID NO: 73728 - protein, 30 aa, Artificial Sequence; identical to SEQ ID NO: 19388
  Cyclic GFR-binding peptide
  MOD_RES (2)..(3): Xaa is C or S

SEQ ID NO: 73729 - protein, 31 aa, Artificial Sequence; identical to SEQ ID NO: 19389
  Cyclic GFR-binding peptide
  MOD_RES (1)..(1): Xaa is C or S

SEQ ID NO: 73730 - protein, 38 aa, Artificial Sequence; identical to SEQ ID NO: 19390
  Cyclic GFR-binding peptide
  MOD_RES (6)..(7): Xaa is C or S

SEQ ID NO: 73731 - protein, 41 aa, Artificial Sequence
  Cyclic GFR-binding peptide
  MOD_RES (6)..(7)..(39)..(41): Xaa is C or S
YVPKPXXAPTKLSNITVQIMDDSSNVIIGEMSNMVVRSXGX

SEQ ID NO: 73732 - protein, 27 aa, Artificial Sequence
  Cyclic GFR-binding peptide
  MOD_RES (1)..(2): Xaa is C or S
XXAPTKLEPLPVVYYDDSSNVIEQLSN

SEQ ID NO: 73733 - protein, 36 aa, Artificial Sequence; identical to SEQ ID NO: 19394
  Cyclic GFR-binding peptide
  MOD_RES (3)..(4)..(36): Xaa is C or S

SEQ ID NO: 73734 - protein, 30 aa, Artificial Sequence; identical to SEQ ID NO: 19397
  Cyclic GFR-binding peptide
  MOD_RES (29)..(29): Xaa is C or S

SEQ ID NO: 73735 - protein, 34 aa, Artificial Sequence
  Cyclic GFR-binding peptide
  MOD_RES (31)..(33): Xaa is C or S
VPQALSNITIQIMVGRKPKVIGEMSMIVRSXKXS

SEQ ID NO: 73736 - protein, 29 aa, Artificial Sequence
  Cyclic GFR-binding peptide
  MOD_RES (1)..(1): Xaa is C or S
XVPQALRSVKIAKVVGRKPKVKEVQVMIV

SEQ ID NO: 73737 - protein, 37 aa, Artificial Sequence
  Cyclic GFR-binding peptide
  MOD_RES (34)..(36): Xaa is C or S
VPTEEEPLPMVYYRIKPHQGQHEQLSNFLQHNKXEXR

SEQ ID NO: 73738 - protein, 34 aa, Artificial Sequence
  Cyclic GFR-binding peptide
  MOD_RES (4)..(4): Xaa is C or S
SVKXQPSRVHHEPLPVVYYEYVRKKPKLEQLSNR

SEQ ID NO: 73739 - protein, 26 aa, Artificial Sequence
  Cyclic GFR-binding peptide
  MOD_RES (1)..(1): Xaa is C or S
XAPTQLEPLTVLYYDDSSNVIEQLSN

SEQ ID NO: 73740 - protein, 38 aa, Artificial Sequence; identical to SEQ ID NO: 23578
  Cyclic GFR-binding peptide
  MOD_RES (35)..(37): Xaa is C or S

SEQ ID NO: 73741 - protein, 34 aa, Artificial Sequence
  Cyclic GFR-binding peptide
  MOD_RES (6)..(7): Xaa is C or S
ASASPXXVPQDLRPVQIRKIVGRTPKVKKATVMV

SEQ ID NO: 73742 - protein, 33 aa, Artificial Sequence; identical to SEQ ID NO: 23579
  Cyclic GFR-binding peptide
